United States Patent Application Publication US 2021/0199660 A1 - sequence listing, part 61

SEQ ID NO: 877914 - DNA, 120 bp, Artificial Sequence
  ENSG00000228340_179 (sequence is synthesized)
gaggccaaaccagtgacttggtgcctgcatcatgatcttaacaggacagctgatgagtaaagaagaactcaactctgtagtggggaggtcagaacaagagctcacatgtatcccagtgcc

SEQ ID NO: 877915 - DNA, 120 bp, Artificial Sequence
  ENSG00000228340_180 (sequence is synthesized)
tcctgaagccaaaatgagcaaatgcaagatggtgggatgagaggtgatgtttacagatctggatctttctccacaactgtagcctgtgggccctgggaccgagtaaattaagatggaaac

SEQ ID NO: 877916 - DNA, 120 bp, Artificial Sequence
  ENSG00000228340_181 (sequence is synthesized)
tgcaacccatgcagatgtaggggctggattctctctatgactgagtgggagtctcagccccaagaaatgccccgggttggccctgaaatccacaatggcttgctgggctggaggccacca

SEQ ID NO: 877917 - DNA, 120 bp, Artificial Sequence
  ENSG00000228340_182 (sequence is synthesized)
gctgatgggacccaagagaggaatgaattatttatctggactcctcacagagaacaatgccctgcaaatgtcccccgcaccatgctgggtggaattcatagtcaacctaacaaccagctt

SEQ ID NO: 877918 - DNA, 120 bp, Artificial Sequence
  ENSG00000228340_183 (sequence is synthesized)
agcatcttctctcccggaccttgcccctccaaccgtatcgaactttgaggagcaattagggaattgcttgacatcttccctgcgagctcttgggtcacaaaagctaattaaccttcctct

SEQ ID NO: 877919 - DNA, 120 bp, Artificial Sequence
  ENSG00000228340_184 (sequence is synthesized)
tgccttccaaactaagtaacaacctccagagccaagtcttctggaacaaaacaggaaggaagaaagaaactaagaaagaagcactgtctctgattttttttttttaatgaaggttaacat

SEQ ID NO: 877920 - DNA, 120 bp, Artificial Sequence
  ENSG00000228340_185 (sequence is synthesized)
ataatttttaaaatgaactccatggaaaggaggttgtggggttcacaacccctgggagcagttccagcagtgccaggacggtctcagtggcagccctctgctcatctttgaggtctactt

SEQ ID NO: 877921 - DNA, 120 bp, Artificial Sequence
  ENSG00000228340_186 (sequence is synthesized)
tgcccagcagctaactcttgtaggtggaaacatggtggcttcttgttctctgggaagttctggatgggaacttgatgtgggaagttgtgaggtgccctgaacttggaggtggggctcatt

SEQ ID NO: 877922 - DNA, 120 bp, Artificial Sequence
  ENSG00000228340_187 (sequence is synthesized)
ggcaccacagtgatggtcccatctgtgccatgtagacttgaccaagcaactcaaggtgtccttaatgtcccagactgagagagaatttgccggcctccaccttggaatattgttgacttt

SEQ ID NO: 877923 - DNA, 120 bp, Artificial Sequence
  ENSG00000228340_188 (sequence is synthesized)
cagtgcacgacgcaagtcctctccttcaacactcctctctaagaagatacacagtcaaacacttaaggacttgggcttgcggagggtgtagatctgggctcagattcccattctgacact

SEQ ID NO: 877924 - DNA, 120 bp, Artificial Sequence
  ENSG00000228340_189 (sequence is synthesized)
tactggctacgtgacctacactgtgattcccaaatgcctgcatatccacataccactgtgtcccactgcactagctacccggagctgccataacacattgccactaactaggtggcttaa

SEQ ID NO: 877925 - DNA, 120 bp, Artificial Sequence
  ENSG00000228340_190 (sequence is synthesized)
attgccactaactaggtggcttaaaaccagaggaattcattctcttatagttctgggggtcagaaaacttttttttatttgtttgagatggagattcgctcttgttgtccaggctggagt

SEQ ID NO: 877926 - DNA, 67 bp, Artificial Sequence
  ENSG00000228340_191 (sequence is synthesized)
atctgccccctgggggtcatatatcttaaatcaaggtatcaacaggaccaagctccccaaaagctcc

SEQ ID NO: 877927 - DNA, 120 bp, Artificial Sequence
  ENSG00000228340_192 (sequence is synthesized)
aaatcaaggtatcaacaggaccaagctccccaaaagctccaggaaaggatacttcttggcctctcttctggcttctggtggctgcagcaatccttggggttccttggcttatggatgcat

SEQ ID NO: 877928 - DNA, 120 bp, Artificial Sequence
  ENSG00000228340_193 (sequence is synthesized)
ttccgtcctcacttgaccttctcacctaccttcctttacgtcatcttccttctgagatgctctgtgtccaaattttattctttgtaaaaggatgccagtcattggatcagagaccacctt

SEQ ID NO: 877929 - DNA, 120 bp, Artificial Sequence
  ENSG00000228340_194 (sequence is synthesized)
aatccaggatgacttcatcttaactaaattacatctgcaaagattctatttctaaataaacccacattctgaggttctgggtgggcatgctatttggcaggacaaagtcaacacaggaca

SEQ ID NO: 877930 - DNA, 120 bp, Artificial Sequence
  ENSG00000228340_195 (sequence is synthesized)
ttgtggttgtttaaccacaatgagtaagtcatgccgtgagggcccagagactgtgtcactgttgtgatgatagagtgcagggcccttcaaagggaggtctgtgggccagcagcacccaag

SEQ ID NO: 877931 - DNA, 120 bp, Artificial Sequence
  ENSG00000228343_0 (sequence is synthesized)
cagcatattagaaatgtttattaagaataatggcatgaactgcttttaacaatttagaaaagacccattccccccgcccccccccgcccccagatccagggcacttcctctaagtaaata

SEQ ID NO: 877932 - DNA, 120 bp, Artificial Sequence
  ENSG00000228343_1 (sequence is synthesized)
ggatgctgaagacaaaccaaagtaggagaccaacaagcactttaagggtggtcgggggttgacctcaaatctggaactttattcatcacagactatggcactatagagaactgtgggctc

SEQ ID NO: 877933 - DNA, 120 bp, Artificial Sequence
  ENSG00000228343_2 (sequence is synthesized)
tcttccttagagcagatagacagccagagactgggactccctgggctggatgatcacaaagcacattgtaaacacagcagagcagagcaggtttagagttgttatacaaataaattttgg

SEQ ID NO: 877934 - DNA, 120 bp, Artificial Sequence
  ENSG00000239216_0 (sequence is synthesized)
cctcccctgccccctcagcctgcgggcagcagaaggcggcggccagcctcctcctgcccctcggccggacgaaccgcggctgccgcgcctgtcacctctgcacctgcccggctgaggtga

SEQ ID NO: 877935 - DNA, 120 bp, Artificial Sequence
  ENSG00000239216_1 (sequence is synthesized)
taaggacaactcagatgaagtgcaggcgggctgacatcgcgcacttgggtctttccgggaaagacagccgcgctctgggagaagcctagtcctccggcttgtccccggacccgccccaaa

SEQ ID NO: 877936 - DNA, 120 bp, Artificial Sequence
  ENSG00000239216_2 (sequence is synthesized)
ggccgctgggagctcggtgaggacgtggcggtccccttgctcatctgactccggaggcaggttccgcagaaagagctctcaatctcggccgctgggctccaagataatctcctggcgaaa

SEQ ID NO: 877937 - DNA, 120 bp, Artificial Sequence
  ENSG00000236242_0 (sequence is synthesized)
cgatgattccagatggaaaaaatggaaatgcttcatccatgtgctagttcagcctgtgagatgctggtgagcccacctccaggcactcacggactccccacccattgagtgtggcctgga

SEQ ID NO: 877938 - DNA, 120 bp, Artificial Sequence
  ENSG00000236242_1 (sequence is synthesized)
tttagtgactcaatcaaacgtgacagagtgctggggtgtcattttcaagactgggttatgtgaagactgcagcctccatctggggtgctctctcttggattgcttgctcagggatgtggg

SEQ ID NO: 877939 - DNA, 120 bp, Artificial Sequence
  ENSG00000236242_2 (sequence is synthesized)
ttctcttgggaagatactgaggagtcagattgctggatcccgtgaagaatgtgcacctgggattggctcttgcttcctaaggaacctcaaaaaagctgcaacctattggagacttttgat

SEQ ID NO: 877940 - DNA, 120 bp, Artificial Sequence
  ENSG00000236242_3 (sequence is synthesized)
tcagcatcaaggatatgcgtgagactttggttcttttctgttgggacacagttgattctgactgtcttaaagttaggcttttctaaagatttagactaataaattatttgaatgggacaa

SEQ ID NO: 877941 - DNA, 120 bp, Artificial Sequence
  ENSG00000280383_0 (sequence is synthesized)
aggagcatactccaaactcttggtattatctttctgatattcataatcatcgtttccctggtgtgctgtcttctcttaaaagttttaaatgtctgcatgcagccatctctagaatgtcaa

SEQ ID NO: 877942 - DNA, 120 bp, Artificial Sequence
  ENSG00000280383_1 (sequence is synthesized)
atggtctctcttcaggtggaatgacaagagctgaaagaaatgtgtggccatgagggcaccataacctatgaatgacgtgctgagaccagaagcccaaaatgatggtaaatgagagtggca

SEQ ID NO: 877943 - DNA, 120 bp, Artificial Sequence
  ENSG00000280383_2 (sequence is synthesized)
gtaaggccctacgttttggtcacactctcacctaagtgagaacgtgaccaaaaggggagaattttaaaagaaaattatgggaggccattgttttggactgagctcctgcactaagcccca

SEQ ID NO: 877944 - DNA, 120 bp, Artificial Sequence
  ENSG00000280383_3 (sequence is synthesized)
atagaccagaacaaaccaaaatggagttactcatgctaaatgtgatataatcaaactaagactttcatgaaacacatagatcctagaaaagacctgattttatctttttcctgtgaacag

SEQ ID NO: 877945 - DNA, 120 bp, Artificial Sequence
  ENSG00000280383_4 (sequence is synthesized)
gacattccaggatgtaccctctactctaacctttacaaaaaagtaacctgaagtccttgttcccaacttacaaaacccactgttttgctgtttcccagtgggttccaagactaactaagt

SEQ ID NO: 877946 - DNA, 120 bp, Artificial Sequence
  ENSG00000280383_5 (sequence is synthesized)
acgtttatgatggtgatagtaacagcaatgacaaagttttggtcaatctctcaaaattgagaggatgatcaaaagaggggaattgttaagtttaatctaaagctacctccttacatattt

SEQ ID NO: 877947 - DNA, 120 bp, Artificial Sequence
  ENSG00000280383_6 (sequence is synthesized)
taagttcggcctaagggtttctctgtacatcgtcaactaaaacctaagtagagttgtgtgcctagtaatgtgccaatcactgagttttaaccaatcaaaggcagccaactgttcaaacca

SEQ ID NO: 877948 - DNA, 120 bp, Artificial Sequence
  ENSG00000280383_7 (sequence is synthesized)
tgtccaaataaggcaaacgctgagctgtaaccagtccagctgtttctgtccctcacttccattttctgtcacttttctttgtctgtccataaatcttcttccaccatgtggctatgctgg

SEQ ID NO: 877949 - DNA, 120 bp, Artificial Sequence
  ENSG00000280383_8 (sequence is synthesized)
tgcctttgagcctactgtggctcaggaggctcttcaattcacgaatcattctttgctcaattcaattcaatttaattcagctaaagttttgcttttaacactttgttagtgtgtgtttat

SEQ ID NO: 877950 - DNA, 120 bp, Artificial Sequence
  ENSG00000280383_9 (sequence is synthesized)
ttctgggctctgtattctgttctctcgatctacatgacaatttcacactatcttgataactgtagttttatagtatcttgaaatcaaatagtttaaggccttcacctttgttctttttca

SEQ ID NO: 877951 - DNA, 120 bp, Artificial Sequence
  ENSG00000280383_10 (sequence is synthesized)
aaattgttttggatattctgggtcctttgcctttttgtataaatttaagatcagattttcaaaatcttttcacaaagcatgttaaaattttaattggaattataccaaatggataggtca

SEQ ID NO: 877952 - DNA, 120 bp, Artificial Sequence
  ENSG00000280383_11 (sequence is synthesized)
acttgaagaggacttacatcttaacaatattgagtattccaactcacaaacatgatgtatctttccattgaaataggtctttttcaacttcattttgtaattgtttgtgtttctcactgc

SEQ ID NO: 877953 - DNA, 120 bp, Artificial Sequence
  ENSG00000280383_12 (sequence is synthesized)
acaggtcttgtatatctttcatgaaatatagtgctggatatttttcatatattaacctgtatcttgcaaacttgctacattcacttattagttttaatagtgtttttataaattcattag

SEQ ID NO: 877954 - DNA, 120 bp, Artificial Sequence
  ENSG00000280383_13 (sequence is synthesized)
gactgcctatatacacttttttccccccaatttgtttgtctattatttctttttccagccttggctaggaccttcagtaaaataccgaagatagtgatggcagacatctttgccttgttc

SEQ ID NO: 877955 - DNA, 120 bp, Artificial Sequence
  ENSG00000280383_14 (sequence is synthesized)
ttgatcttatttgaaagctgagtccttcaccattgagtatgatatgaggtgtaaattttggtttgtttttgttttgtagaagctctcaatcgggttgtgaaagttcccttctatttctaa

SEQ ID NO: 877956 - DNA, 120 bp, Artificial Sequence
  ENSG00000280383_15 (sequence is synthesized)
ttttctggaagtttttattgagagggtattgaattttatcaaatgcttttccccatatctattgaaacgatcatacacttttcttttttattctattaatatggtgaatcatattgattc

SEQ ID NO: 877957 - DNA, 120 bp, Artificial Sequence
  ENSG00000280383_16 (sequence is synthesized)
accaacttttaaatcattttagaagttaaactaatcttgaattccccaaatacaccccacctggtctggatgccttattctttctatagatggtttgatttaatttgctaatattttgtt

SEQ ID NO: 877958 - DNA, 82 bp, Artificial Sequence
  ENSG00000280383_17 (sequence is synthesized)
tttctatagatggtttgatttaatttgctaatattttgttaaggatttttgtgtctatgatagttaggaatattggtctgca

SEQ ID NO: 877959 - DNA, 90 bp, Artificial Sequence
  ENSG00000280383_18 (sequence is synthesized)
atgatccaccgaccttggcctcccgaagtgttgttgtctgcagggattgtgtgtgtctatgtgtgtgtgtgtgtatatatgtgtgtgtgt

SEQ ID NO: 877960 - DNA, 120 bp, Artificial Sequence
  ENSG00000280383_19 (sequence is synthesized)
gtgtgtctatgtgtgtgtgtgtgtatatatgtgtgtgtgtgtaaagcttttgactgtttttagaatcagagtaataatagccttgtataaaataagttaggaagtgttccctctctcttt

SEQ ID NO: 877961 - DNA, 120 bp, Artificial Sequence
  ENSG00000280383_20 (sequence is synthesized)
tctgaaagagtttgtgtagaattggtgttgttttttccttaaatgagggatagtatttatcattgaagccatgtcaacttggggttgctttatgggaaggtttttatttataagttcaat

SEQ ID NO: 877962 - DNA, 120 bp, Artificial Sequence
  ENSG00000280383_21 (sequence is synthesized)
ttatttaattgattatcagactgtttaagttttgtattttttcttgaatgagttggtaatttgtgtcttttagggaatttgaccatttcacataggttttgtgaaactttattattataa

SEQ ID NO: 877963 - DNA, 120 bp, Artificial Sequence
  ENSG00000280383_22 (sequence is synthesized)
atttcacataggttttgtgaaactttattattataaagttgttcacaatatgccctttttattattttctgtttgtttttgttttcaagatgcagtcttgctctgttgcccaggttggag

SEQ ID NO: 877964 - DNA, 62 bp, Artificial Sequence
  ENSG00000280383_23 (sequence is synthesized)
tgcagtggtgcaatctcggctcactgcgacctctgccttccaggttcagacaaataattttt

SEQ ID NO: 877965 - DNA, 90 bp, Artificial Sequence
  ENSG00000280383_24 (sequence is synthesized)
atacggtggtgcgatcacagctcattgcagccttgacctcttgggcttaagcaatcctcccaccgcagcctcctgagtagctgggactac

SEQ ID NO: 877966 - DNA, 74 bp, Artificial Sequence
  ENSG00000280383_25 (sequence is synthesized)
agctgggactacaggtgtgcaccaccacaaccagcaaattttttttttttaactttttagcagagacagggtct

SEQ ID NO: 877967 - DNA, 120 bp, Artificial Sequence
  ENSG00000280383_26 (sequence is synthesized)
agtgctgggattgcaagtgtgagccaccacacccagcctattatttatttatttattttttgagatgaagtctggctctgtccaggctggggggcagtggctcaatctcggctgactgca

SEQ ID NO: 877968 - DNA, 120 bp, Artificial Sequence
  ENSG00000280383_27 (sequence is synthesized)
atatctaatatttaatcagtgtttattccattatactttattgtaattattgatatgattgggctgggtctatcattttatttatatttatgtatttatttagagacagggtctcactct

SEQ ID NO: 877969 - DNA, 120 bp, Artificial Sequence
  ENSG00000280383_28 (sequence is synthesized)
tgcagtggcacaatcacagcttactgcagtcttgccctccaagcaagggatcccccaacttcagcctcccaagtagctgggactaaggcctgcaccaccatacctggctaagtttttaaa

SEQ ID NO: 877970 - DNA, 88 bp, Artificial Sequence
  ENSG00000280383_29 (sequence is synthesized)
gactaaggcctgcaccaccatacctggctaagtttttaaaaaaatttttttagagatggggtctcacaatgttgcccaggattgcctt

SEQ ID NO: 877971 - DNA, 120 bp, Artificial Sequence
  ENSG00000280383_30 (sequence is synthesized)
acctggcctttgttttctgtttgtcttctctgtattccccctttcagttcctccttttcttttttattttctcacttgaatgcttttcagaattacattttgattttcccattagcctct

SEQ ID NO: 877972 - DNA, 120 bp, Artificial Sequence
  ENSG00000280383_31 (sequence is synthesized)
tagctacaattccttacattttttaatggctaccctaaggaatgtaatatacaatgaacttacaggtcagtatccccctctgttctttgttattgttgttacatgtaatacatctacata

SEQ ID NO: 877973 - DNA, 120 bp, Artificial Sequence
  ENSG00000280383_32 (sequence is synthesized)
cattatacacctcacatgaatatgcttaatttttgctatgaaccattatatggtttataaaacaattgagaggaaaaatgcaaatgggaaaaattatttgtatttacccagctatttacc

SEQ ID NO: 877974 - DNA, 120 bp, Artificial Sequence
  ENSG00000280383_33 (sequence is synthesized)
atgtctaatacttgtcagcttttctgaggatttgagtttccatctgatataatttccctcagcatgaagaagttcctttagcatttctcgtggtacagttctgttggtgaggccatctct

SEQ ID NO: 877975 - DNA, 120 bp, Artificial Sequence
  ENSG00000280383_34 (sequence is synthesized)
tagttttattttatctgaacatgtctttaatattgtttttattctagaataatattttttctggatgtagaattcctgattgatagtttttttttttccttcaggaggttacaaatgttc

SEQ ID NO: 877976 - DNA, 120 bp, Artificial Sequence
  ENSG00000280383_35 (sequence is synthesized)
cactatcttctggactccatggtttctgataagaagcagtcatgaatcaataattgtttttctgtatatgtcatttttatgttgatgctatcaagatgtttgtttgctctctttctttga

SEQ ID NO: 877977 - DNA, 120 bp, Artificial Sequence
  ENSG00000280383_36 (sequence is synthesized)
ctttcactggtgtgatgtgtcttagcataggcttctttatgttgattttgtttgatgttagtttagcatcttaaatttgcaagattccacctttcaccaaatttggaaaattttggctat

SEQ ID NO: 877978 - DNA, 120 bp, Artificial Sequence
  ENSG00000280383_37 (sequence is synthesized)
tatttcttcacatacttttttttggggggtcctgttttctctttcctgtccttctagccttgcaattacactaatatttgaaaatctgatatcctctaacaggtccctgatattctttct

SEQ ID NO: 877979 - DNA, 85 bp, Artificial Sequence
  ENSG00000280383_38 (sequence is synthesized)
aaaatctgatatcctctaacaggtccctgatattctttctctttgttgtttaaaaaatatatattttttcagccaggtgctcata

SEQ ID NO: 877980 - DNA, 120 bp, Artificial Sequence
  ENSG00000280383_39 (sequence is synthesized)
gtccagccctttttaatcatttctatttctctgctgagattgatcattttctctcttgaggtttttattcactgaagtcatgttttgttttacctcatttaatttagttataatcattgc

SEQ ID NO: 877981 - DNA, 120 bp, Artificial Sequence
  ENSG00000280383_40 (sequence is synthesized)
tttaaaatctgtcagttctcacatctagttcatctcatggacagatttgattttcttttctcttgagaatgttctctaatttcatatttgtatttcaggtaacttttggattgtattttg

SEQ ID NO: 877982 - DNA, 120 bp, Artificial Sequence
  ENSG00000280383_41 (sequence is synthesized)
atactattaatagtaagctgtggggattctggattctgttattttcctctgtggagtgttgtttcctttgttttcatagacaattttcttatgtgggcttgggctgaaaactctatttct

SEQ ID NO: 877983 - DNA, 120 bp, Artificial Sequence
  ENSG00000280383_42 (sequence is synthesized)
tcaggggcagttccagttttgcgtcagatcttttgtatttagttgagctgctttgggtctacaccacatgataaggtttattaagtgggcagtcagctatacggatataattaatttggg

SEQ ID NO: 877984 - DNA, 120 bp, Artificial Sequence
  ENSG00000280383_43 (sequence is synthesized)
gatcccctctatcttggtccatttcctgctgcttataacagaatatctgaaactgggtaacttataaagaaaagaaatttatttcttacagttatggaggctgaaaagtccaaaattgag

SEQ ID NO: 877985 - DNA, 120 bp, Artificial Sequence
  ENSG00000280383_44 (sequence is synthesized)
gggctgcatttggcgagaggcttcttgctgaaggggactctctccagagtcccaaggcagtgcagggcatcacatagtgagggggctgagggtactagctcaggtctctcttcctcttct

SEQ ID NO: 877986 - DNA, 120 bp, Artificial Sequence
  ENSG00000280383_45 (sequence is synthesized)
tatagagccaccagacccactcccaagataaccaattaatccattattctatgaatagattaatccattcatgaggacagctctcatgaaccagtcactccttaaaggccctacctgtca

SEQ ID NO: 877987 - DNA, 120 bp, Artificial Sequence
  ENSG00000280383_46 (sequence is synthesized)
atactgccacattggggattaaaatctcaacatgagttttggacaggagaaacattcaaagcatagcaccctctctggctctttcccttttgggatttttcccattctcttcagtgttca

SEQ ID NO: 877988 - DNA, 120 bp, Artificial Sequence
  ENSG00000280383_47 (sequence is synthesized)
attttcatacatttacttttatgtttccccaggccagaaagaatgcagagttttgcacatgtgcccccaaccattgctgtgcacatccacgtgctacaattagtcccaggctaaaagcta

SEQ ID NO: 877989 - DNA, 120 bp, Artificial Sequence
  ENSG00000280383_48 (sequence is synthesized)
cagagatgtgaacctacttgtatagctccccatctcccttcctccaagtgaggaggtactcctcatcagagtctgcgtctgttcactctcaagcccttcaggtggttgttttttgtagta

SEQ ID NO: 877990 - DNA, 120 bp, Artificial Sequence
  ENSG00000280383_49 (sequence is synthesized)
tatctaggttttatgattatttactatggggtacataagtgtgggggtcaccaagtagggtcttcgtccatcttacccagaagtggaagtttgtcatgaattggtccgcagagcactttg

SEQ ID NO: 877991 - DNA, 120 bp, Artificial Sequence
  ENSG00000280383_50 (sequence is synthesized)
aatagtcctggcctaaaccactgtctcaatgatggccccattcagaatggcatttgcaagtttctcttccatagttttctaccagatgtttataagtgaggttcaataccagataatgtc

SEQ ID NO: 877992 - DNA, 120 bp, Artificial Sequence
  ENSG00000280383_51 (sequence is synthesized)
aaaactaatagaggaattcccagttcaggcagagggagcacaaagtgccaataatatccaaatattgtttggtactgattgacttgacaaagctcatttcacaaaaaaccgttctggctt

SEQ ID NO: 877993 - DNA, 120 bp, Artificial Sequence
  ENSG00000280383_52 (sequence is synthesized)
ttacagactgttctcaatggatttcccttctttcctgtcaatggattttctttctttgctggcctttgactttctgtgatcttggctgctgggaagtataaggcagaggaagtccttagg

SEQ ID NO: 877994 - DNA, 120 bp, Artificial Sequence
  ENSG00000280383_53 (sequence is synthesized)
caggagataaacctgggcctgttcctacagaggtggtcttttgagagtcctggggtcactagttgggacagcagaaggcaaaagtcccaggtagtgttatgatggtttggagcagagcca

SEQ ID NO: 877995 - DNA, 120 bp, Artificial Sequence
  ENSG00000280383_54 (sequence is synthesized)
tgtcatgaatattttaattttttattttaaaccctatgagacattgttgctttatgattgttttgtactttggatgttcatttagatgaagcggatggtaaataccattctcagtcttct

SEQ ID NO: 877996 - DNA, 120 bp, Artificial Sequence
  ENSG00000280383_55 (sequence is synthesized)
ttattcctttctgtgtctctcatcttccatctgggattgtttttgtctctaattcacactcttttgtatttcctttaccatggatctgttggcagttatttttatttttcagcacatcca

SEQ ID NO: 877997 - DNA, 120 bp, Artificial Sequence
  ENSG00000280383_56 (sequence is synthesized)
agatagcattccactattttggtttccagtgtttctgtggaggatacagcttactgaatcctcactcctttaaaaataaactgtctttttattcccctgtggcttcttatcagattttgt

SEQ ID NO: 877998 - DNA, 120 bp, Artificial Sequence
  ENSG00000280383_57 (sequence is synthesized)
ctttgtctttttgcataacttcactagatgtgaatatatggtgtgtttatatttagatgtcttttcgtgtattctgctttctattcattgagcttcttgaatctgtggtttggaatcttt

SEQ ID NO: 877999 - DNA, 120 bp, Artificial Sequence
  ENSG00000280383_58 (sequence is synthesized)
catcagttttggcagattctcagctattctcctaggtattgcctctgttacaattacatgtgttagactttctcaacttattttctgcatctcttagctcttctgtattttttgtatttt

SEQ ID NO: 878000 - DNA, 120 bp, Artificial Sequence
  ENSG00000280383_59 (sequence is synthesized)
aatttcttcattctggatagtttctttctaaatcttccagttcatttattctctctttaggtctctctaacctgttttaatcccatcaattgagttgttactgtgttatttctaatttca

SEQ ID NO: 878001 - DNA, 120 bp, Artificial Sequence
  ENSG00000280383_60 (sequence is synthesized)
taatttcagttccagaatttctatttatttattatataaatacactatttcactttttatagttcaataccttgcttggacttttgaactatttcttttttcttttttgagatggagtct

SEQ ID NO: 878002 - DNA, 120 bp, Artificial Sequence
  ENSG00000280383_61 (sequence is synthesized)
cgtgagccactgcgcctggccgaattatttctttgaacatagtaaacctgttgtgtcattgccatgttccattccaatagcttaagtttttgtggatcagtttctgttgtatgttgcttc

SEQ ID NO: 878003 - DNA, 120 bp, Artificial Sequence
  ENSG00000280383_62 (sequence is synthesized)
tgctggttcttataatttctggtttccctgtagagtgagttatttttgtgttgttcactctatttgagaagtatttgtagaaataatttgatgcttaggatggcacattcttccaaagat

SEQ ID NO: 878004 - DNA, 120 bp, Artificial Sequence
  ENSG00000280383_63 (sequence is synthesized)
ggttttcatttgcttctgtcatgtgtctaaatgtgccaccattctgggtctgtcttaatcccaattcaggtgttttggttccttggatcaaccaggtgacaaagaggtttttgaaatatt

SEQ ID NO: 878005 - DNA, 120 bp, Artificial Sequence
  ENSG00000280383_64 (sequence is synthesized)
tcatttgggtttaaaataaaagtttttctcattcagaggatagctttaaataacttggcgtgacattaccagaagtgaagctttttctgttttatgaagcttcttgtataaggcagggat

SEQ ID NO: 878006 - DNA, 120 bp, Artificial Sequence
  ENSG00000280383_65 (sequence is synthesized)
tacatcttttctccatgtttggtagaaccatatataaagtcagctggtttgaggctatattttggtgcttcattttctggaatgtatttccacctttgtttgtctagtgctcatacaatt

SEQ ID NO: 878007 - DNA, 120 bp, Artificial Sequence
  ENSG00000280383_66 (sequence is synthesized)
atttaagattcagcttacatggtttctctagttgtatttcttcatctctccagcttcttagctctttatacatcttttttctgacatgatttattatgctatcttatcagtatatatttc

SEQ ID NO: 878008 - DNA, 120 bp, Artificial Sequence
  ENSG00000280383_67 (sequence is synthesized)
tgttttcctttaatagactcagaggttattcatgactaaggtattatattattcatcttcataagactaggttctaatatagtccatgatagatgctcaaatcttctggttaaattgaaa

SEQ ID NO: 878009 - DNA, 120 bp, Artificial Sequence
  ENSG00000280383_68 (sequence is synthesized)
tatgaaaaataaaatgtaaaatggattggtaacaatcataaggaatagcttaataactttacaaattacataaaaataattgatccccacaaggcaactattactaacatcagaatcatc

SEQ ID NO: 878010 - DNA, 120 bp, Artificial Sequence
  ENSG00000280383_69 (sequence is synthesized)
acctcaaataccggtagtctattgtcagtcacttattaccaattatatcttgaccgtactcacgatttcctacgtgtttcctactgtttctcatttgcccaactacctaacagcttttga

SEQ ID NO: 878011 - DNA, 120 bp, Artificial Sequence
  ENSG00000280383_70 (sequence is synthesized)
tctccttgcccacttcgttctttctactttctcacttttacaccacacagttcgctgttaacacgtattgaactaagctaaatatatgacagactctgaattgactatcatcaaatcttc

SEQ ID NO: 878012 - DNA, 120 bp, Artificial Sequence
  ENSG00000280383_71 (sequence is synthesized)
ccaacaatttaattaaataggtgctattactattccattttacaaatgaaaaaaaaaaggcttaaagagatggttacttgtccaagttcaggtgctaagagataaaagagggattcacat

SEQ ID NO: 878013 - DNA, 120 bp, Artificial Sequence
  ENSG00000280383_72 (sequence is synthesized)
cacccaggtctgtctgactccagagctcatgttctttaccagaagttggcaaaccttttctaaaaagaaccatatagttaatattttaggctttggaggccatacagtctctgtagcaac

SEQ ID NO: 878014 - DNA, 120 bp, Artificial Sequence
  ENSG00000280383_73 (sequence is synthesized)
aagtcaattctgccactttagtgccaaaatagccacagagaatatgtaaatgaatgactatgacagtttctaacacaattttatttacgaaaataggtggcgggaagagtttggctcata

SEQ ID NO: 878015 - DNA, 120 bp, Artificial Sequence
  ENSG00000280383_74 (sequence is synthesized)
ggtgatagtgtgccaatccctgctctgaacaagtacactactctgttatttttttctcctttttctcaatctccagagttttccattcaacagatattgatagcattgcttctaagcaca

SEQ ID NO: 878016 - DNA, 120 bp, Artificial Sequence
  ENSG00000280383_75 (sequence is synthesized)
gggctgggatgaagatgagaaaatccctgccttgagggacctcagatgtggaagaggagggcataaacacacatctatagcacaggctgactatggaaagtcagtgccaaaagagaggca

SEQ ID NO: 878017 - DNA, 120 bp, Artificial Sequence
  ENSG00000280383_76 (sequence is synthesized)
caggctgaccagagattcttctgaagaacacatgagatcttgtggagttggtgatatatgacaaaagctttctagcaagagcatcgtaggcagagatgctaagaaggatgtttccaacag

SEQ ID NO: 878018 - DNA, 120 bp, Artificial Sequence
  ENSG00000280383_77 (sequence is synthesized)
cgtaggcagagatgctaagaaggatgtttccaacagaaaagccagcagaagcacacatttttctatccacttgtcacttatcttctactcagtctctctttttttttttttttttttgag

SEQ ID NO: 878019 - DNA, 120 bp, Artificial Sequence
  ENSG00000280383_78 (sequence is synthesized)
ctcatcttctattctctttaccagtattcacttacttcctctttcttttccttgccaaaatcatatgcactttggtccaaatctgtttttgccttgcacctcatctactttcttctctga

SEQ ID NO: 878020 - DNA, 120 bp, Artificial Sequence
  ENSG00000280383_79 (sequence is synthesized)
ttttcttttttgccttccttccttttcttttctttgtatttacttccttcttgattactgagtcattgctgattcaattcttctgcagtgggctcaaggtacaaatttatatcacaaatt

SEQ ID NO: 878021 - DNA, 120 bp, Artificial Sequence
  ENSG00000280383_80 (sequence is synthesized)
tcatttgaagtcgaattcacgtacatcaacatggtggcatgttcatctggtttgtctaagtcaaacagctatataacattaacaatgtcatttagccctagtgaaatattaacttggttc

SEQ ID NO: 878022 - DNA, 120 bp, Artificial Sequence
  ENSG00000280383_81 (sequence is synthesized)
tgtcaattcagtcaaggttgaaatcctctagtcgattttgggcagtcaataacatccactgtttgaccagtttaatttcctttcgtttctcttatgcgtatttctactttttgtctgtcc

SEQ ID NO: 878023 - DNA, 120 bp, Artificial Sequence
  ENSG00000280383_82 (sequence is synthesized)
tgttaatctctctgttttaatcttttcccttataatttttcttctttttccatcagcctccttttctgtactttttggattattgcacttcttctagaggcatgctatctcctttctcct

SEQ ID NO: 878024 - DNA, 80 bp, Artificial Sequence
  ENSG00000280383_83 (sequence is synthesized)
aggaccgtaagcaggcatgagccaccgcgtccggcctctgctgatatagttaaaaagattctttgttcattaattcaact

SEQ ID NO: 878025 - DNA, 120 bp, Artificial Sequence
  ENSG00000280383_84 (sequence is synthesized)
ctgatatagttaaaaagattctttgttcattaattcaacttttattgagcaattaccacatagtaggtctttttctaggtgctgggctggagatacaaaaataaccaaaagagacaaaaa

SEQ ID NO: 878026 - DNA, 120 bp, Artificial Sequence
  ENSG00000280383_85 (sequence is synthesized)
tctctacccttgtagagcttacattctagtagtaagtgaaatagataagcaacaataaacaaaatagaaaagtaagttatatatcaagtattaagtgctatgcggaaaattcctggggat

SEQ ID NO: 878027 - DNA, 120 bp, Artificial Sequence
  ENSG00000280383_86 (sequence is synthesized)
gtagttgaaggaaataaggaagcaagtcatggagatgtttgtgaggagttgttctatacaaaaacaaaaacaaaaacaccagcatatacaaactcctaaggcaggagagttcttttcctg

SEQ ID NO: 878028 - DNA, 120 bp, Artificial Sequence
  ENSG00000280383_87 (sequence is synthesized)
gtggagttatgggatttaaaaaaaaaaaaggaaaaacaaaactttatctgaggaatatgatctcctttaaatgatcgggcctagagaagcattggaatgaaacaccaatcatgtctctcc

SEQ ID NO: 878029 - DNA, 120 bp, Artificial Sequence
  ENSG00000280383_88 (sequence is synthesized)
tccttgagctgaatacttacctcttttcaaaaggaattattactattttttaaagacagggtctctctctattacccaggctggactgcagtggtgtggtaatagctcactgaggccttc

SEQ ID NO: 878030 - DNA, 120 bp, Artificial Sequence
  ENSG00000280383_89 (sequence is synthesized)
aactcctaggctcaatgaatcctcccatttcagcctctggagtagctgggactattgccatgtaccaccatgcctaattttttaaaaattttttcgtagagatggggggtctcacactat

SEQ ID NO: 878031 - DNA, 88 bp, Artificial Sequence
  ENSG00000280383_90 (sequence is synthesized)
ctcctgcctcagccacccaaagcactgagacacctcttgaagccacattctatttggcctctagacgaactgatgtcaactagctaca

SEQ ID NO: 878032 - DNA, 120 bp, Artificial Sequence
  ENSG00000280383_91 (sequence is synthesized)
tctatttggcctctagacgaactgatgtcaactagctacacaatggcatacaatctatagttcaacattgtacagccaatcattaaccaacattatttcttaaaccaatgagaattcatg

SEQ ID NO: 878033 - DNA, 120 bp, Artificial Sequence
  ENSG00000280383_92 (sequence is synthesized)
acaaacaaccttttaaatcaccctctctcctgattcgtccttttttctttaaaaagttgagcttctctttcgttctccagagcactccccaaggcaacttggatgtgtgtcctggactgc

SEQ ID NO: 878034 - DNA, 120 bp, Artificial Sequence
  ENSG00000280383_93 (sequence is synthesized)
aatgctcacgttggcccaaataaactctttatattgattttacctcagcttattccttttaaatagacagaggacaataaggaggtcagtatggctgaagcacaatggaagaggaagagg

SEQ ID NO: 878035 - DNA, 120 bp, Artificial Sequence
  ENSG00000280383_94 (sequence is synthesized)
ctagtagatgtgattagagcccacaggggctggaggtgatggcgaaggaggaggcaggtcatttaggggcttttctattggaagaacttggcttttactctgagtgaaatggaaatccct

SEQ ID NO: 878036 - DNA, 120 bp, Artificial Sequence
  ENSG00000280383_95 (sequence is synthesized)
tagagggttttgggcagagttaaatgttgaaatattttttaaacgatctaaaacgtaaggaagcaagagcagaggccaaaagaccaatcaggaatatattacaatattccaggcaagaag

SEQ ID NO: 878037 - DNA, 120 bp, Artificial Sequence
  ENSG00000280383_96 (sequence is synthesized)
aatatattacaatattccaggcaagaagtatgaatattatagggaatgtttttctgggaatgttacatttgagaataagaaaactaaaggccaggtttttttgtttgtttgtttgagaca

SEQ ID NO: 878038 - DNA, 120 bp, Artificial Sequence
  ENSG00000280383_97 (sequence is synthesized)
gttgcccaggctggaatgcagtggtatgatctcagctcagtgcaacgtgtgccttccaggttcaagcaattcccttgtctcagcctcccaaatggctgggactacaggcacccgccacca

SEQ ID NO: 878039 - DNA, 120 bp, Artificial Sequence
  ENSG00000280383_98 (sequence is synthesized)
taaagatcaggattttggtgcataacaagtacattttactatcctgtgctcctcaagggaaaattaagagatttttgccctgttagcttaaggagtgttaaacattttgcattgtcttga

SEQ ID NO: 878040 - DNA, 120 bp, Artificial Sequence
  ENSG00000280383_99 (sequence is synthesized)
gcactgctactaataagtgatctaatacctggcacatagtacaccgcaatattcgtggaatgaataaatacatactcaattaaatgggtaaactgaatgacaatatcaagtaacttgctt

SEQ ID NO: 878041 - DNA, 76 bp, Artificial Sequence
  ENSG00000280383_100 (sequence is synthesized)
taaatgggtaaactgaatgacaatatcaagtaacttgcttgtgcagcagcattcatttcccatcattctgccaccc

SEQ ID NO: 878042 - DNA, 77 bp, Artificial Sequence
  ENSG00000280383_101 (sequence is synthesized)
ggattcactttttctgcatactctggtggtgtttattgttatctttacattttatttagcaaagaatgttaaaagcg

SEQ ID NO: 878043 - DNA, 120 bp, Artificial Sequence
  ENSG00000280383_102 (sequence is synthesized)
gttatctttacattttatttagcaaagaatgttaaaagcgccatgttataagcacactcctaccctccaagcagaatgtaaagggtatgtatttatatattttaagtggtcccacagcaa

SEQ ID NO: 878044 - DNA, 120 bp, Artificial Sequence
  ENSG00000280383_103 (sequence is synthesized)
tttgtacagttatagcagttcacaactatactcagttatgtttgcttctctccttctcaatagtctgtgaggttccttcaggtttggaactgtcttttattaatctttacatctccagca

SEQ ID NO: 878045 - DNA, 120 bp, Artificial Sequence
  ENSG00000280383_104 (sequence is synthesized)
cctagcgcagggcttagcaacaatttttgttgaaagtatatacactgtaataaagggcagtggaaagaaaatatgtgagttatcaacaccagctagagaagccttgtctgattcctgtga

SEQ ID NO: 878046 - DNA, 120 bp, Artificial Sequence
  ENSG00000280383_105 (sequence is synthesized)
aatatattcatttcccttaggaaaaaaaacaattctaaccctattgctgtgtaacttagcttcttgacttcgaacggtattttaaggctttgaggagctggagcaatgtatactcactag

SEQ ID NO: 878047 - DNA, 120 bp, Artificial Sequence
  ENSG00000280383_106 (sequence is synthesized)
aggcaaagtgcctggtaagtggtctggtattgatcagcaatgatcagtaagtactgggaagtgcgttttcagggcctgagacttgcaagctagtgacagaccgctccagcttccagtgga

SEQ ID NO: 878048 - DNA, 120 bp, Artificial Sequence
  ENSG00000280383_107 (sequence is synthesized)
cccgggcgggggcactgatcaacccacttgagcagtgggatcaaggtcttcagccttagcagtgggagcctctgcccggcccccttcgttcccgagaccctcagtcagcgtctcctccca

SEQ ID NO: 878049 - DNA, 120 bp, Artificial Sequence
  ENSG00000280383_108 (sequence is synthesized)
agagggtcccctccacccagaatgtcctcccctgggggagaccactctgtctgcgggccccctcccacaggagggcccctcttcctcaaggtgaacctctgtccccgatacccgctccca

SEQ ID NO: 878050 - DNA, 120 bp, Artificial Sequence
  ENSG00000280383_109 (sequence is synthesized)
agaccgagaccttgttacggccccaccctccacaggccccttaccccccggatcccctcccctgggggagacccctctgtccgcgggcaccctcctataggacgcgcccctctttctcag

SEQ ID NO: 878051 - DNA, 120 bp, Artificial Sequence
  ENSG00000280383_110 (sequence is synthesized)
ggtgaacctctggttcccgatacccgctcccaagaccgagaccctgttacggccacatcaacacaggtccccctccccccggcgtcccctcccctcggaggagccccgtctgcgacgctt

SEQ ID NO: 878052 - DNA, 120 bp, Artificial Sequence
  ENSG00000280383_111 (sequence is synthesized)
cccagtcaatcacccccagcatccctccccgctctcacccagaacttccgccgcgccccctcccctcaggcgggacttccgccggcgccccctcccccgcggcgccgtctcctcctcccg

SEQ ID NO: 878053 - DNA, 120 bp, Artificial Sequence
  ENSG00000280383_112 (sequence is synthesized)
cctgaggcgagtctgggctcagcctagagctctccggcggcggcgcagcttcagggcagcgcgggctgcagcggcggcggcggttagggctgtgtagggcgaggcctcccccttcctcct

SEQ ID NO: 878054 - DNA, 120 bp, Artificial Sequence
  ENSG00000280383_113 (sequence is synthesized)
cgccatcctactcctccctcctcgtcatcctcccccttcgtcctcctcgccttcctcctcctcgtcaggctcgacccagctgtgagcggcaagatggcggcgcccaggccgccgcctgcc

SEQ ID NO: 878055 - DNA, 120 bp, Artificial Sequence
  ENSG00000280383_114 (sequence is synthesized)
aggctgtcgggcgtcatggtgccggcgcccatccaagacctggaggccctgcgcgcgctcacggcgctcttcaaagagcagcggaaccggtaacgggtccggccggggggctgccccggg

SEQ ID NO: 878056 - DNA, 80 bp, Artificial Sequence
  ENSG00000280383_115 (sequence is synthesized)
ggacccaggcgccgcccccgcctcgctggagacgcggagggcgaggcctgcgcgggctgcctgagcgccacccaggcctc

SEQ ID NO: 878057 - DNA, 120 bp, Artificial Sequence
  ENSG00000280383_116 (sequence is synthesized)
ctcgtgggtccccgcggggcctggggcgggcgccccgctcccccaccgcagccagtccgggtgcgaagccgcgatcccgggagcccttgccgcggcgtgccggtgatgttgacccaacac

SEQ ID NO: 878058 - DNA, 120 bp, Artificial Sequence
  ENSG00000280383_117 (sequence is synthesized)
gtgccggtgatgttgacccaacacacggttaggcctcccctgtcatgtgcgagggctgcgccaggccctggctgcaagacccacgcggcccccagagtcataaagcgtgtgttttagcgg

SEQ ID NO: 878059 - DNA, 120 bp, Artificial Sequence
  ENSG00000280383_118 (sequence is synthesized)
gagagacccgtgttacggacgcgggaattgggcagttgcggggatggcagtctctaggcatggagtgggactggcactcctttctcctcggcgttagagcccaggctgcaccatctgccc

SEQ ID NO: 878060 - DNA, 120 bp, Artificial Sequence
  ENSG00000280383_119 (sequence is synthesized)
tgggggcagcgctctgtgcagtgtggaagagcacgggcctggagagaccagtccagtcctgatgccactgaggggcaagatagccaggcaaaaagagaaggtgcccaggagtcgacagtt

SEQ ID NO: 878061 - DNA, 120 bp, Artificial Sequence
  ENSG00000280383_120 (sequence is synthesized)
gtggatttggttcctggccttgcaagctgcgtgttactgtgcagtttctccaggccttagaattcttgtctaaaaatgggactataatacacagcttagttgctggattgtacagaggaa

SEQ ID NO: 878062 - DNA, 120 bp, Artificial Sequence
  ENSG00000280383_121 (sequence is synthesized)
taaatgaaataaagtacgtgaaaatataaaatgtgcgaagccctcagtcaatgcttgtttgatcttgttctgtcctctgggcctcagttttcttgtctatttaatgggagtaaagttgaa

SEQ ID NO: 878063 - DNA, 120 bp, Artificial Sequence
  ENSG00000280383_122 (sequence is synthesized)
cagtacctccctggtgatagtgtcataaggagtaaatgagatataatgcatattaaatccttaggacatacctgtacatagcactaaatgtagctgatattatcacttaacacattgatt

SEQ ID NO: 878064 - DNA, 120 bp, Artificial Sequence
  ENSG00000280383_123 (sequence is synthesized)
ggtagttacccatgtatcagctattgtgctaggtgatggggtaggaaaatggaaagtccttgctctctcctgtactagtatgtacaagataacacagctgtgggggtatgtatgtacaaa

SEQ ID NO: 878065 - DNA, 120 bp, Artificial Sequence
  ENSG00000280383_124 (sequence is synthesized)
gcagagggaacattgaagaaagaaatactgagacttgggtcagcctaggtgatcactagaggacttcctctctttaaactagacacctggtctgagcacttcctttacctcacatcactt

SEQ ID NO: 878066 - DNA, 120 bp, Artificial Sequence
  ENSG00000280383_125 (sequence is synthesized)
tgggaaatgtggagctgctgaaggaatgctattaataaaagtccctggtactgctctatgggcctttgggggagatgtatttattgatttaatgcttaggcatttctgtatcatgatgga

SEQ ID NO: 878067 - DNA, 120 bp, Artificial Sequence
  ENSG00000280383_126 (sequence is synthesized)
ccctccttttagttaataacccagtcatcaaccatttattgagcacctactatgaaacagatttttttgttggggtctgagggtacagagaggaatgatgtgagtgatcccttttatcag

SEQ ID NO: 878068 - DNA, 120 bp, Artificial Sequence
  ENSG00000280383_127 (sequence is synthesized)
gcatatttgggaaatagctaaataaacacattgtaatggaaatctatacaagaggtggtggcacaggggagcatgtggatatgttggaagattggcgagccaggagaggctttttaaggt

SEQ ID NO: 878069 - DNA, 120 bp, Artificial Sequence
  ENSG00000280383_128 (sequence is synthesized)
tatttcaggtgctcggttatagatgagaggactagagggaacagtgtctgcaaaggggccatatgttaattttgcaaaaccgatgagacaattaagtaacatagataaggtttctcgtac

SEQ ID NO: 878070 - DNA, 120 bp, Artificial Sequence
  ENSG00000280383_129 (sequence is synthesized)
agaagagacatttagtcagacatcagttccctttttataacttggagaaaatccaagcccctgagccagtttagaaggcccttcttgactctatctcttgtgagggaagaagttacagag

SEQ ID NO: 878071 - DNA, 120 bp, Artificial Sequence
  ENSG00000280383_130 (sequence is synthesized)
aaccattgatggtttttgtcaagggagtggcgcgataagatctgcctgttagatcttcctggccgcctccgcctccattgtggggaataaatgagaggacgaagctagagacagggggga

SEQ ID NO: 878072 - DNA, 120 bp, Artificial Sequence
  ENSG00000280383_131 (sequence is synthesized)
cctttaaggagtggtagcggaagcccatgtgaaagagaaaagtgcctaaattaggacattgtggggatgagtagaataaatactgagagatacaaggttgaatggacaggactcggacca

SEQ ID NO: 878073 - DNA, 120 bp, Artificial Sequence
  ENSG00000280383_132 (sequence is synthesized)
gttggattgtgggggggagaatgaggaaatgaggatgcttcccagatttcatctgagttctgggacagtgtccttgttccaggcagagattggagaccaggaaaggtgaactgatgtgca

SEQ ID NO: 878074 - DNA, 120 bp, Artificial Sequence
  ENSG00000280383_133 (sequence is synthesized)
ggtcctggcatggaaagacacagttgtgtggtggtgcagagaactcatgatcagggtttataaggacaggcttctggtcctggttctgtcactgcttctctttgtctttggacaaattat

SEQ ID NO: 878075 - DNA, 120 bp, Artificial Sequence
  ENSG00000280383_134 (sequence is synthesized)
aagggtcttgtggggctgggcccagactcctgctcctctgagaggatccctccagttctgatgctcagggagccagtgtttgtccttgggggtctcctcttcagagaggacatagggctg

SEQ ID NO: 878076 - DNA, 120 bp, Artificial Sequence
  ENSG00000280383_135 (sequence is synthesized)
ttgtctagtatgaacaggaacacagatggatccagggggaggatgggccaaggtgttagaaggtggacgagacaaaaagccaggcaaaatgagtcctcagtgtagcaaatagaaaacagc

SEQ ID NO: 878077 - DNA, 120 bp, Artificial Sequence
  ENSG00000280383_136 (sequence is synthesized)
agacaaaaagcaaaaacagtgaggaaagtaattaagagattcttctcttttggtggaatacattatttctctaggattccattttatatttgaagaatcatagacataatgtagttggtg

SEQ ID NO: 878078 - DNA, 120 bp, Artificial Sequence
  ENSG00000280383_137 (sequence is synthesized)
gtccttctgagctcttccatgctacaaaacaaacttctgtcagtggtagcttgagtaatagaagtgtcatgcagtgggaagagcagtggctttggaaccatggagacctggatgtgaatc

SEQ ID NO: 878079 - DNA, 120 bp, Artificial Sequence
  ENSG00000280383_138 (sequence is synthesized)
ctggtttagtttgtgaggcttcttgtttctttccttgaaaacgggatgatggtagccactttgacagattattttgaggatctgtaatattatatgtgtagcatagtggtttatgcatag

SEQ ID NO: 878080 - DNA, 120 bp, Artificial Sequence
  ENSG00000280383_139 (sequence is synthesized)
taaatgccatttatttaggacctgttattaaaatataacaaggttgtaagtgaccaagaatccatttgtgttgaatctcctgtcttatcagaaacaaaaattgcagctatttcaggaaga

SEQ ID NO: 878081 - DNA, 120 bp, Artificial Sequence
  ENSG00000280383_140 (sequence is synthesized)
cagttctaattttggggtttccggagaaggggatctcaggatctcattacaattttagcagcccccaagtgaaaagaaattcttacatcccattgtgggaattttaaatatgtccacaaa

SEQ ID NO: 878082 - DNA, 120 bp, Artificial Sequence
  ENSG00000280383_141 (sequence is synthesized)
ttctttgatactctgaccttctcaagaggaggaggttaattcttttctccttgagtgtgggctgaacttagtgacttgctcctgaagagtagaatatggtagaagtgacagtgtgcgact

SEQ ID NO: 878083 - DNA, 120 bp, Artificial Sequence
  ENSG00000280383_142 (sequence is synthesized)
tctcagactaggtcataaaaagcatcgtagtttcctctttgctagctctttcttgaatcacccactctgacaaagccagctgccatgtcatgaggacactcaagcatccatatgcagaga

SEQ ID NO: 878084 - DNA, 120 bp, Artificial Sequence
  ENSG00000280383_143 (sequence is synthesized)
gctgtgtggtgaggagctgaggcctcctttgaacagccatgtgatgaactaccttggaagcaggtcctctgagctccagtcacatcctcagccacgtgtgcaacctcatgagacacccta

SEQ ID NO: 878085 - DNA, 120 bp, Artificial Sequence
  ENSG00000280383_144 (sequence is synthesized)
agcctctcagatctgtgtgagatcataaatgttattgttttaaaatgctaaattttgggctaatttgctatgtagcaatacatcattaatacaccagtcttaattctccatgctgtgtat

SEQ ID NO: 878086 - DNA, 120 bp, Artificial Sequence
  ENSG00000280383_145 (sequence is synthesized)
taaatgcattctgtaacccacttcttaaacagtgtcttggtcactaaaataatttaaacatattgcttatggtcatataatatcagtattgagatattcctcagctgtttcttctctgtg

SEQ ID NO: 878087 - DNA, 120 bp, Artificial Sequence
  ENSG00000280383_146 (sequence is synthesized)
taagataattcttttttctcacatttgttttatactttttgtttaatgtagatatcaccgtatttcacatttgtttaacaagtgatttatcttgctgtgagtctttgcaagtcatgttaa

SEQ ID NO: 878088 - DNA, 120 bp, Artificial Sequence
  ENSG00000280383_147 (sequence is synthesized)
attctttctgaacaagtaagacaaacatttaaaattctattttagttgctcctttaattatttttcttttttttttccgagacagggcctcactttgtcatccaggttggagtgcatttt

SEQ ID NO: 878089 - DNA, 120 bp, Artificial Sequence
  ENSG00000280383_148 (sequence is synthesized)
ctagttgcctttatgatgcatccatgaggcatctccagaccccacaaagtgtagagccaggtgagatgggttgtcatactccatctgtgctgttcattaagtagccactagctacatgta

SEQ ID NO: 878090 - DNA, 120 bp, Artificial Sequence
  ENSG00000280383_149 (sequence is synthesized)
gtagccactagctacatgtagctacttaattaattgaaaataagtaaaattaatgtttcatttccttagttgcattagccatattttttaatttgtttttttttttttgagacagtttca

SEQ ID NO: 878091 - DNA, 63 bp, Artificial Sequence
  ENSG00000280383_150 (sequence is synthesized)
ccgtgccctgccctttattactaatagttcactgcatcctcgacttcctgggctcaagcaatc

SEQ ID NO: 878092 - DNA, 76 bp, Artificial Sequence
  ENSG00000280383_151 (sequence is synthesized)
ccatgcccagataatttttttgtcattagccatattttaagtgctcattggccacatgtgatgtgacagcacagat

SEQ ID NO: 878093 - DNA, 120 bp, Artificial Sequence
  ENSG00000280383_152 (sequence is synthesized)
ttaagtgctcattggccacatgtgatgtgacagcacagatatagaatatttccatcatcacagaaagttctggaaatagtgctcttctgtagtaagttttctataggggagattgtattt

SEQ ID NO: 878094 - DNA, 120 bp, Artificial Sequence
  ENSG00000280383_153 (sequence is synthesized)
tgactcttgagtattcttgaaataatggaacatttggatgctgctttctataaattcatctcatacttaaactgatacctcattggtcttccacctgatgagcttcttgaatgaagtggg

SEQ ID NO: 878095 - DNA, 120 bp, Artificial Sequence
  ENSG00000280383_154 (sequence is synthesized)
cacatcacattcactgtatgcctggcatctagcatagagttgatagtggcagatgcttatcagtttcttgtggagttgctgctatttctataacttattactcattgcacttgcttggtc

SEQ ID NO: 878096 - DNA, 120 bp, Artificial Sequence
  ENSG00000280383_155 (sequence is synthesized)
tttttcttagtcgtgtagacagtaattttttttttcagcttctatcagtatagctcattttttctcttcaatctgcttagacaaaatgaggttttcgttggtgtttaatttaaaaattaa

SEQ ID NO: 878097 - DNA, 120 bp, Artificial Sequence
  ENSG00000280383_156 (sequence is synthesized)
aaaaaaattcaggccaaaaggtcttaaaaaaaaaaaaaagaaaaggcaagtcctggacttagagaagtatttaaaatatatatgataaagaagttgtttcagaatatatgaagtactcct

SEQ ID NO: 878098 - DNA, 120 bp, Artificial Sequence
  ENSG00000280383_157 (sequence is synthesized)
acctacaactcaataaaaaagactcctacaactcaatttaaaaattgggcaaaatctgtgctttacaaagaaaaataaaggccaataagcgtatgataaagtgctccaaatcactagtta

SEQ ID NO: 878099 - DNA, 120 bp, Artificial Sequence
  ENSG00000280383_158 (sequence is synthesized)
ttagggaaatgcagttaaaacttcagtgagagactactgcatgccgtttaggatggctattatccaaaaaatggaaaagaacaagtatcgttgaggatgtggggaaatgggaacccttgt

SEQ ID NO: 878100 - DNA, 120 bp, Artificial Sequence
  ENSG00000280383_159 (sequence is synthesized)
gtgttgctagtggacatgtaaagtggtgctgctactatggaaaataatttggtgggtcctcaaaaagctaaacatggaatatgaccaagcagttttactcttaggtatgtgcccgaagaa

SEQ ID NO: 878101 - DNA, 120 bp, Artificial Sequence
  ENSG00000280383_160 (sequence is synthesized)
aatgaaaaaggacaaattctgtatgattctgcttttatgaagtacctagaacagacaaacttgtagagacagaaagtagattagaggttactaggatttggagagaggggaaattgggag

SEQ ID NO: 878102 - DNA, 120 bp, Artificial Sequence
  ENSG00000280383_161 (sequence is synthesized)
ttactgcttcatgtttacagagtttctatttgggtgttaaaaaaaattttggaagtagaggtgatagttgtacaacattgtgaatataattaaagccattgaactgtagacttaaaatga

SEQ ID NO: 878103 - DNA, 120 bp, Artificial Sequence
  ENSG00000280383_162 (sequence is synthesized)
acaacatggcaaattttatgttatatatatgtattttaccacagttaaaaaaattaataatacaatgtaccaaaatccatttaattgtacgctttaagtgggtgactttagtgtgccacg

SEQ ID NO: 878104 - DNA, 120 bp, Artificial Sequence
  ENSG00000280383_163 (sequence is synthesized)
tgaaccctatctcaatagtgctgttataaacaaatccatagtaaggtgcctctgcatccctattagaatggctataatgaaaatgagtgacactgaattttggtgggcatgtgaagctat

SEQ ID NO: 878105 - DNA, 120 bp, Artificial Sequence
  ENSG00000280383_164 (sequence is synthesized)
atatttatgatttttaaaaagtcacattgtttggagtagaggggatgtgtttaaaatgtgaactcctccctcactgctatttttgtttcataataaaatagccttttatgtatctttttc

SEQ ID NO: 878106 - DNA, 120 bp, Artificial Sequence
  ENSG00000280383_165 (sequence is synthesized)
cctactcagtagtgcctttcttgaagggagggactttatggtgtttcttagcagggtgcctggcccattttgggtactctgtaaatgttgaactgaactgaatagagcaatgaagagcca

SEQ ID NO: 878107 - DNA, 120 bp, Artificial Sequence
  ENSG00000280383_166 (sequence is synthesized)
gtagctccagtgagccaatcagtaattactcaaattgctaaaatgctattgattagtttaccatgtaattcattcattgactcacaccacacatgatacatgtaagatctgtgcttagtg

SEQ ID NO: 878108 - DNA, 120 bp, Artificial Sequence
  ENSG00000280383_167 (sequence is synthesized)
ctgcagctgtgattgataggataaaattaactatgtgtagcttactttgaactactgacataggagtagctcacatgctattaaattattaaatttaatacatttgtaatttgctaaaaa

SEQ ID NO: 878109 - DNA, 120 bp, Artificial Sequence
  ENSG00000280383_168 (sequence is synthesized)
tgtatatttgtaatttatatttacaaaataaatttgtaaatttgtaaatataaatgtcttaagccttcattcctttgcttatacacactcttcattttccctcaaggttgagttaccatt

SEQ ID NO: 878110 - DNA, 120 bp, Artificial Sequence
  ENSG00000280383_169 (sequence is synthesized)
tcacttccttttgaaagccgtttctgaccttcaggtgcttttgccctgtattcccttggcactctgtgcttacctctttcaaagaacttcacataatcacttaattacctaccagtctca

SEQ ID NO: 878111 - DNA, 120 bp, Artificial Sequence
  ENSG00000280383_170 (sequence is synthesized)
ctagagtgagagcagcccgaggccaggactcttatttacctctgttttcagtaccaactttcaggcctaccacataatgagcatccaatagtatttttattattttcttgaacacctgat

SEQ ID NO: 878112 - DNA, 120 bp, Artificial Sequence
  ENSG00000280383_171 (sequence is synthesized)
tttcttgagccatgagagagaaaatgagagcatacaagaaagactttaattaggaggggacaggaaacgttaaatatgacagatgactgatttcaaggggtaaaaaatgacttggtattg

SEQ ID NO: 878113 - DNA, 120 bp, Artificial Sequence
  ENSG00000280383_172 (sequence is synthesized)
ttacttggttgtataaatatgttgactaaccttcataaagaaagtgaatagattaagcactttagaggtcaacataccacagaggtaaaaaataaacctatccatctgtgtatacacacg

SEQ ID NO: 878114 - DNA, 120 bp, Artificial Sequence
  ENSG00000280383_173 (sequence is synthesized)
cacatggattttccccggacattactgagcctctgggcagcaagtgtctttaactacaccaaaacacacaaaaacccaaaaaacaaaaacccacacgagtcgtcagcttggctgaggacg

SEQ ID NO: 878115 - DNA, 120 bp, Artificial Sequence
  ENSG00000280383_174 (sequence is synthesized)
ccatatggcgttttgactcaaccatgattcagctcaactttgttgagagagaacatcaattaagttacactataaaaagcatattttagagtgtgctggcaatttcctttatttttacct

SEQ ID NO: 878116 - DNA, 120 bp, Artificial Sequence
  ENSG00000280383_175 (sequence is synthesized)
atgccatgagctggaatgctacatggaattgtttggtaaggtgttctgactcagcttcaaaatacagaagtggtcagtgtgagccacctcatacattcaattatcttaaatgcatgaagt

SEQ ID NO: 878117 - DNA, 120 bp, Artificial Sequence
  ENSG00000280383_176 (sequence is synthesized)
agacaggaaagagtttgagccagccgaaataaataaaaccaatcgaaataaataaggttaggattgtgaccaccagtaccctcagagcagagtttctcagctctttcattcttccagtct

SEQ ID NO: 878118 - DNA, 120 bp, Artificial Sequence
  ENSG00000280383_177 (sequence is synthesized)
tttgtagtggtcactggacccaagggcttggtcactggactgtgggcaatgacactcaaaagcaaaggaactgtgggactaccagtagggtgagctgggccctgtgatggccacaagctt

SEQ ID NO: 878119 - DNA, 120 bp, Artificial Sequence
  ENSG00000280384_0 (sequence is synthesized)
ttaagcgctcaagttaaactccttgtgacccacataggttagcagaatttaaatcctaggtgattattaactctaatcatacatctaatgacctatattgaagatacactgcctgcttag

SEQ ID NO: 878120 - DNA, 120 bp, Artificial Sequence
  ENSG00000280384_1 (sequence is synthesized)
ttgtggcttcagcctttgctccgtcactgatagttctagcctgaaaagcaaatgagccctcatgctcacgatttcaccacagtcacataagcgggaagagcaggctcctggctgtggcga

SEQ ID NO: 878121 - DNA, 120 bp, Artificial Sequence
  ENSG00000280384_2 (sequence is synthesized)
gcttgactccatttggtttgatagaaatgagaggtagatgattccctagacaaatgcaggcctttctcgaagcccctttcccaggacgacgtgacatgagtggtctgtgccttccagggc

SEQ ID NO: 878122 - DNA, 120 bp, Artificial Sequence
  ENSG00000280384_3 (sequence is synthesized)
agccacgtcatgctttgcccagccagggcggtggggagggagacagccacatcctgcccggggctcctgggccccgctgcatcaagtgaaagcagggctggctccctgatgtccttggag

SEQ ID NO: 878123 - DNA, 120 bp, Artificial Sequence
  ENSG00000280384_4 (sequence is synthesized)
aagtcgcccacactgctttcccccatgggagtgacaaggatgtgtcccgccagccttccacgacggaccccccactctctattaattcccaagaaaccaggccatggaggtgggtttgag

SEQ ID NO: 878124 - DNA, 77 bp, Artificial Sequence
  ENSG00000280384_5 (sequence is synthesized)
attaattcccaagaaaccaggccatggaggtgggtttgagggtttgtattggtgttttttaaagtcaggttgaccga

SEQ ID NO: 878125 - DNA, 120 bp, Artificial Sequence
  ENSG00000280384_6 (sequence is synthesized)
aggctgcagtgagccgagatcgcgccactccagcctgggtgacaagagtgagattctgcctcaaaataaataaagtcgggtttattaagatataatttacatacagtaattttttttttt

SEQ ID NO: 878126 - DNA, 120 bp, Artificial Sequence
  ENSG00000280384_7 (sequence is synthesized)
caggcatgagccactgcacccggccagtacatgctttcttgatttgtctgtttcccacctgtctcccctccctagaatggcagctccatgacgacagaggtgtttctctgttttctccat

SEQ ID NO: 878127 - DNA, 120 bp, Artificial Sequence
  ENSG00000280384_8 (sequence is synthesized)
tgtttctctgttttctccatggctgcaccctcagctgctagaaggtggcccagcataggaggtatttaatgaagccttcctctccacttaaatctacacccttgtgcttattaaaaggtg

SEQ ID NO: 878128 - DNA, 120 bp, Artificial Sequence
  ENSG00000280384_9 (sequence is synthesized)
acagttttctgtttgaaaattttattagtgttttaatgagaaagttattatttgggtaatgcctgaatatgaggaaaacattaagggtagaaatgtaattgttttcctatttcattcagt

SEQ ID NO: 878129 - DNA, 120 bp, Artificial Sequence
  ENSG00000280384_10 (sequence is synthesized)
ctatggattttattgaagattacagaattacttctttgtagctatggaagtaaaaaaataataagacgagtagctatttcaaaacgtagggctgataaatttgggatggtttgagaacgt

SEQ ID NO: 878130 - DNA, 120 bp, Artificial Sequence
  ENSG00000280384_11 (sequence is synthesized)
aaaacgtagggctgataaatttgggatggtttgagaacgttaagttggggaactccatttctttttttacatttttatttattttcatttgtttatttatttatttgagacagagtttcg

SEQ ID NO: 878131 - DNA, 80 bp, Artificial Sequence
  ENSG00000280384_12 (sequence is synthesized)
ggccatgtcagccaggctggcctcaaactcctgaccgcaggtgatccgcctgcccttggcctcccaaagtgctgggatta

SEQ ID NO: 878132 - DNA, 120 bp, Artificial Sequence
  ENSG00000233797_0 (sequence is synthesized)
gggtcctctcttccccacagacatgaacgaaccagctctatgaccacatctcccataaccagccccggcctgcaaaggcagccaccacagagcttcttagtgatgtatcagcgcattcct

SEQ ID NO: 878133 - DNA, 120 bp, Artificial Sequence
  ENSG00000233797_1 (sequence is synthesized)
gatggacggtgtgttacttggtgttccattctcccagtgaaacataattctctgtcaatggaagcatttgagaaaaaaacacctttcaaagtgaaactgtattatgttactggaacattt

SEQ ID NO: 878134 - DNA, 120 bp, Artificial Sequence
  ENSG00000233797_2 (sequence is synthesized)
gttaaaaatctattaacctctaagaagccaagaacagaaattcagcaataaaaggtaaactgatggactgtggagctgcaaggggaaaccacctggtagtgatcaaagaagataggttga

SEQ ID NO: 878135 - DNA, 120 bp, Artificial Sequence
  ENSG00000233797_3 (sequence is synthesized)
aattctcctggaaagatgtacatgtaagacaacaatgcatgacaccctctggtggactcttctcctccctctaaaaaactcgctgatactgattcatcactgcgaggtaacaagtagtac

SEQ ID NO: 878136 - DNA, 120 bp, Artificial Sequence
  ENSG00000233797_4 (sequence is synthesized)
acagatctatcttctcacaaaggatttgttataatatggaagcagaacaatttgacatcattatccgaaaatccactgtggaagatgaattcatgtgtcaaaactgctaaaatggataat

SEQ ID NO: 878137 - DNA, 120 bp, Artificial Sequence
  ENSG00000233797_5 (sequence is synthesized)
gggcataattgttaatatactaactgttgtgattttttagtgagtaaatatgtaaccattcacacatctttctgtaatttataagtaaaaatctctccctttgtgactcagtattgtgat

SEQ ID NO: 878138 - DNA, 120 bp, Artificial Sequence
  ENSG00000233797_6 (sequence is synthesized)
cttccatgctcactatgaaaaacataatagaaatatgatatgataaaatcagagtgctatactatagtgacaagaaaacaggaggtatggattttaatgtgagttcaacccctagctagc

SEQ ID NO: 878139 - DNA, 120 bp, Artificial Sequence
  ENSG00000233797_7 (sequence is synthesized)
tcttttactttgggcattcccttagtcttggtctcaatgccctcttctgtaaagttgtgaggtttgagttattctctgagatacattctgctgttaaaattctattattgaatttgaaaa

SEQ ID NO: 878140 - DNA, 120 bp, Artificial Sequence
  ENSG00000233797_8 (sequence is synthesized)
ccactaaacctttcagtgagggaaatttggaaaaagaatggtatattttttttagctgataaagtttttaagtgaaaaaagtgtttaaacttctttgtatttgttaattgagctattttt

SEQ ID NO: 878141 - DNA, 120 bp, Artificial Sequence
  ENSG00000233797_9 (sequence is synthesized)
ttatttagacatatgagttcaaaatttatagctgtttttgacactatagtcagtaggtaaaaagcagtttctggaggctgcctatgcttgaatctagtttcatcatttactagttgtaaa

SEQ ID NO: 878142 - DNA, 120 bp, Artificial Sequence
  ENSG00000233797_10 (sequence is synthesized)
acatgggaaagtttttaaaatgtctttgtgctcagtttactcctctgtcaatggggtataattacagcacccttcttgaagagatattatgaggagtaagcaagatgatttgcataactc

SEQ ID NO: 878143 - DNA, 120 bp, Artificial Sequence
  ENSG00000233797_11 (sequence is synthesized)
cttagcaaatgattaaagcattaacatattcttgacacacatgagcttttacaattactctggtgtcaccagctatcccaggctattatcattccatactttattactgtaattatagcc

SEQ ID NO: 878144 - DNA, 120 bp, Artificial Sequence
  ENSG00000233797_12 (sequence is synthesized)
gactgccccaaacacaattgtcttcattgccttctgataaaaactgttaacaacagacttcagttatttccatacccaggagaactgagtatatattgtcctggcatttaagactctcat

SEQ ID NO: 878145 - DNA, 120 bp, Artificial Sequence
  ENSG00000233797_13 (sequence is synthesized)
taatattggttcaatttgtctttccagcttcattccattacctcctcttatatacacgctctagctgaatggaactatccaagtatcactgagaactcgcactctgcttttctgtgttaa

SEQ ID NO: 878146 - DNA, 120 bp, Artificial Sequence
  ENSG00000233797_14 (sequence is synthesized)
gctcttaagggaagagacagtgataagtctttataccccagtataaagtccaggacctggcacacagtaagcattcaatatttttgaagtgaacagtctttgcttgcactgttttcctct

SEQ ID NO: 878147 - DNA, 120 bp, Artificial Sequence
  ENSG00000233797_15 (sequence is synthesized)
cagaagtcctctcttcttatctttacctacataacacctatccttcaaggtcccagctaaatatcatgaattaccaccattcataggctacctacttccttcatagtattgtcatgtatt

SEQ ID NO: 878148 - DNA, 120 bp, Artificial Sequence
  ENSG00000233797_16 (sequence is synthesized)
taccttctagaatttacattccactgtgattataattatttttgttatcttatgccctcatttttgactggtgttgagagcagtgtactatgtcttaatcaattttatttcctacaatgc

SEQ ID NO: 878149 - DNA, 120 bp, Artificial Sequence
  ENSG00000233797_17 (sequence is synthesized)
ctagcatttttctttgactatgttaattgccagtgactagttattgaatgaatcaatatgattaataggatcctatttgttaaccattgtttcttggccattaaaaaaacttcaatagaa

SEQ ID NO: 878150 - DNA, 120 bp, Artificial Sequence
  ENSG00000233797_18 (sequence is synthesized)
caaaatcctacttcaatagaacaaaatcttcaccccttgccaggctccttagtctctccaaggtccagccacatcctctctgcctaacatgactttgggtagctactgaagccctactag

SEQ ID NO: 878151 - DNA, 120 bp, Artificial Sequence
  ENSG00000233797_19 (sequence is synthesized)
cttttcattattccatggacatgccatatacattcttaaccatgttcctttgctgatgtttcctttgcttgagggcaatactgtctttgtttcagctatccaagcctgacttaaggtctc

SEQ ID NO: 878152 - DNA, 120 bp, Artificial Sequence
  ENSG00000233797_20 (sequence is synthesized)
attccatactttattactgtaataatagccaactagttttaaagtctcttcctttcaaatctaacctatacacttcttccagtgaagactgccccaaacacaattgtcttcattttcttc

SEQ ID NO: 878153 - DNA, 120 bp, Artificial Sequence
  ENSG00000233797_21 (sequence is synthesized)
tcccaaattcatcatggagcactcctctagacttccacagtgctttttctctttcatcataggaaagacaaatttaggttcttagtttagtacttaatcatacaatttaatcatacacac

SEQ ID NO: 878154 - DNA, 120 bp, Artificial Sequence
  ENSG00000233797_22 (sequence is synthesized)
accctagaacaatgaaacaataaaagtaggagataatttaaaagggctttactacagaaattctaataatgaaatttgaaaggggctagttccatattaacccactctgtaattcctttc

SEQ ID NO: 878155 - DNA, 120 bp, Artificial Sequence
  ENSG00000233797_23 (sequence is synthesized)
ctcctcctccctgggttacctcttatattagctgtgcagacaccattcttgacaacctgtttctaagatatttaaggaactttgcattcatctgaacctcttctagctaataatacaatc

SEQ ID NO: 878156 - DNA, 120 bp, Artificial Sequence
  ENSG00000233797_24 (sequence is synthesized)
ggaagtgccgtggttgtaccgcggcgctgggggttcctcccggcgagactggcggggctgcggcggctaggagagtgtcaatggaagcatttgagaaaaaaacacctttcaaagtgaaac

SEQ ID NO: 878157 - DNA, 120 bp, Artificial Sequence
  ENSG00000233797_25 (sequence is synthesized)
aacatatacctatttgaagatccctggcacacagatacagcagaagaagcccaaatgtgttatcaaaccattgagagaaacagaactttcctcaaagccaagaaacagctttcaaaagga

SEQ ID NO: 878158 - DNA, 120 bp, Artificial Sequence
  ENSG00000233797_26 (sequence is synthesized)
agtttcccaaaaactcttctaaaagtaccagcatatcttcaaaccaagtaacgtttttttcaatgctatccttaactgttctacttttatttgcttgtagaaaagtggcacaacctagac

SEQ ID NO: 878159 - DNA, 120 bp, Artificial Sequence
  ENSG00000233797_27 (sequence is synthesized)
tgtcatcgctaaagccatgactaaaatttttagtattttgtaaccacatcagatttgtgaacatctcccagttgatataatcacttatttactcgcatattgagactgtaccataacttt

SEQ ID NO: 878160 - DNA, 120 bp, Artificial Sequence
  ENSG00000233797_28 (sequence is synthesized)
gtggttcagatggaattcgttagaaaactaaactgtttttaaaaacgttatgtttttgtttttctcgttataaatttaccttcacagtttgcaaatgcattagtataatcatctggtaaa

SEQ ID NO: 878161 - DNA, 120 bp, Artificial Sequence
  ENSG00000233797_29 (sequence is synthesized)
aaaatggcaactcttgatttgatacatttttaaaaaacaagtacactcaggcaaattttataaattcaaaactcacagtgttttgtttttatttatatatttttcttacagttttctttg

SEQ ID NO: 878162 - DNA, 120 bp, Artificial Sequence
  ENSG00000233797_30 (sequence is synthesized)
tttacttttaataatttgttagtacatccaatatctaccaagatgtaataatcaaatgttctatttgcattggaaaaacgttctcacttacatagcctaagggctttaaaaaagtttttc

SEQ ID NO: 878163 - DNA, 120 bp, Artificial Sequence
  ENSG00000233797_31 (sequence is synthesized)
tttgtattaagatgatatcggtattataaaaataaacaaattctcaaaaaagggctatatttcatgaagaacaactttgatgtcatgaattttagcagattgtggctaaaaagatgagtg

SEQ ID NO: 878164 - DNA, 120 bp, Artificial Sequence
  ENSG00000233797_32 (sequence is synthesized)
aaggctttttttttaaagaaaaaagtgttttcaagtttttttctcttcggcattcatgcctctttatggctatgaacacaaaaatatatttgcaaaaactgtttattgataaaattctca

SEQ ID NO: 878165 - DNA, 120 bp, Artificial Sequence
  ENSG00000233797_33 (sequence is synthesized)
cgggtcatttgaaattcatgttgcttctcttacgaaaataatatggcctataaatttcagactcattaaagtattttgaaattttgacagaaactagcatagaaacattagatgtttcct

SEQ ID NO: 878166 - DNA, 120 bp, Artificial Sequence
  ENSG00000233797_34 (sequence is synthesized)
tccaaaaaacgggagaaattatccttcatttaattacctaaatatatgtgaacattaaaaaaagcaccttcttttgctatgtagtttttcttaaagcatatgagactctctgagtagcaa

SEQ ID NO: 878167 - DNA, 120 bp, Artificial Sequence
  ENSG00000233797_35 (sequence is synthesized)
agcttgactgtgagtccaaagattttggacactgcattctagatcactcccagaactaaggtattggaatcagagattgcagcttcctgtcaaagttggtttcagttctatagtcaataa

SEQ ID NO: 878168 - DNA, 120 bp, Artificial Sequence
  ENSG00000233797_36 (sequence is synthesized)
gaaaatgaaaacaaaagatacatatcaaatatgtctaggtgctaaattattaatcaatccttggaatacagagaaaatcaggaaagaattatgaaggaaatttcagttattcagaattaa

SEQ ID NO: 878169 - DNA, 120 bp, Artificial Sequence
  ENSG00000233797_37 (sequence is synthesized)
gaagctatacaaagaaaaatggtaaaatgctaaaaaaataagaaggaaaaatgttaaggtaagggccagaaatttgaaatgagtaataatgtcacaatatttgaaaatactcaaacttta

SEQ ID NO: 878170 - DNA, 120 bp, Artificial Sequence
  ENSG00000233797_38 (sequence is synthesized)
ggcaagaataatgaagaaaaaagaaattcaaatgtaataccaaaaatagcaaataattgttgatttagcatagataaaaattgaagtaactattttgagtaattttatgttgaaaaattt

SEQ ID NO: 878171 - DNA, 120 bp, Artificial Sequence
  ENSG00000233797_39 (sequence is synthesized)
gaaatatgactaaatagttgtatttttgtacaaatacagaaataccaatatttgtgaaagaaaaattctgattcagcagttaacagttaaagaaatggaattcataaacaacaacaacta

SEQ ID NO: 878172 - DNA, 120 bp, Artificial Sequence
  ENSG00000233797_40 (sequence is synthesized)
aaggcaaatactaggtctaaatggttttcctatgatatcaacaattcaataaattaggaataccatccaccttttttaaaaattattttggaaaatacaaaaattaagaaagaagcttag

SEQ ID NO: 878173 - DNA, 120 bp, Artificial Sequence
  ENSG00000233797_41 (sequence is synthesized)
ctcatgaggtcaattataatcttgttacccaagcaagatatgactttgtttaaaaaaaaaaagtcatttgtgcttatgaacacagatgcaaaaatacaaaaattcagcaataataaatat

SEQ ID NO: 878174 - DNA, 120 bp, Artificial Sequence
  ENSG00000233797_42 (sequence is synthesized)
tagaaatagatcgtgatgtgattcaagagtacgtttatggaagtttagttgcatttgatcctaagtataaatttaattggacaatctctcaattccatctagactccagaacttacagac

SEQ ID NO: 878175 - DNA, 120 bp, Artificial Sequence
  ENSG00000233797_43 (sequence is synthesized)
tgaaaaaccttactgaaagggtctcttttcattggaaaaacattaacttttaatatgaatgatttgactgactgttgcagtgttttcttcctgtgagaccaatgtttaatgtttttagaa

SEQ ID NO: 878176 - DNA, 120 bp, Artificial Sequence
  ENSG00000233797_44 (sequence is synthesized)
atactctgattaaaagtttccttaaatcctttttgaactgaaatgcaatggcaaaaaccattaaataaatgatgtcagttcaatataatcaggttataaatgaaatagccaccatttaat

SEQ ID NO: 878177 - DNA, 120 bp, Artificial Sequence
  ENSG00000233797_45 (sequence is synthesized)
aaatgctcacccttagccaggccttgtgccaagcattttacacacatcatttcctttaatccttctagaacccctaaaaaggacaccttttctcatcccttcacagatgaggaaattgca

SEQ ID NO: 878178 - DNA, 120 bp, Artificial Sequence
  ENSG00000233797_46 (sequence is synthesized)
ggccacagatacaagtaaccagcttaaccactggattgtgctctctctttccttctgtaatctactttgaacaaataatacaaacgtgaataatccatttgctattggtatctcaagttt

SEQ ID NO: 878179 - DNA, 120 bp, Artificial Sequence
  ENSG00000233797_47 (sequence is synthesized)
tgttgtcttgatttccctggtctctaccttttattctgtaattaagaactatttaacgatgagttgaatttagattaatttcttttaacaagggtatctgacacatatatatggcactta

SEQ ID NO: 878180 - DNA, 120 bp, Artificial Sequence
  ENSG00000233797_48 (sequence is synthesized)
ttagtgtcaaacactgatctgagcacttatattaacttatacacacacacacctattaactcattatatccccattttattgataaagaaactgaggcccaaaatgattaagtgacttgt

SEQ ID NO: 878181 - DNA, 120 bp, Artificial Sequence
  ENSG00000233797_49 (sequence is synthesized)
ccaaaaccacacagagagttaatggcacaaaatacttttcaagcccaggccacctggctttagaatctgggcacttgataattaacattttagatcactgattccccaggttgcagccag

SEQ ID NO: 878182 - DNA, 120 bp, Artificial Sequence
  ENSG00000233797_50 (sequence is synthesized)
aatatgcaatcattttagtgataccagaatgtaagctttgtgaggggctttgttttcttcactgctgtatccttatcaccagaatgtagtagatgcttaataaatgctgtatgtctcata

SEQ ID NO: 878183 - DNA, 120 bp, Artificial Sequence
  ENSG00000233797_51 (sequence is synthesized)
ctggcggggctgcggcggctaggagagtgatgccatggagcacagtggtggataaggaagacatggtctggccgtaacaattttgaaatctaatgaagcagattaaaaagtcaatggaag

SEQ ID NO: 878184 - DNA, 120 bp, Artificial Sequence
  ENSG00000233797_52 (sequence is synthesized)
cacagatacagcagaagaagcccaaatggtttttgtggagcctttcggatttttttatataaaagagtcctgttctgttgtccaggctggagttcagtggcgagatcttggctcactgca

SEQ ID NO: 878185 - DNA, 90 bp, Artificial Sequence
  ENSG00000233797_53 (sequence is synthesized)
atgcctcagccttctaagtagctgggactaaagacagagtctttctgtgttgcccaagctggagtgcagtggtgctcgtctcactgcaac

SEQ ID NO: 878186 - DNA, 120 bp, Artificial Sequence
  ENSG00000247311_0 (sequence is synthesized)
tactctgtgaatccagaccccacaggttatggaagaaaagcaacagacagaagatgggaaaaacaggtcacgtttataagaccagcttgaagaccatgccacactgaggagtttggtttt

SEQ ID NO: 878187 - DNA, 120 bp, Artificial Sequence
  ENSG00000247311_1 (sequence is synthesized)
tcgttaggcaaagaaactagctgttttttcttcaatgttcatcggaaaacttgcccagcagctgtgagtgactcttcagctttcgaatcattgtcttggaatcttctaaaccaggacttt

SEQ ID NO: 878188 - DNA, 120 bp, Artificial Sequence
  ENSG00000247311_2 (sequence is synthesized)
taatcagctgccagtgtggccagaataaagcaggaaaatgtggaaggacttgacttgctgagtcttctggtcttcagctttctcccatgctggatgcttcctgccttagagcattggact

SEQ ID NO: 878189 - DNA, 120 bp, Artificial Sequence
  ENSG00000247311_3 (sequence is synthesized)
acttgctgagtcttctggtcttcagctttctcccatgctggatgcttcctgccttagagcattggactccaggtcttcagcttttggactctcggacttacaccagtggtttgccagggg

SEQ ID NO: 878190 - DNA, 120 bp, Artificial Sequence
  ENSG00000247311_4 (sequence is synthesized)
gtcggcttccctacttttgaggttttgggcttccctactcctcagcttgcagatggcctattgtggaactttaccctgtgatcatgtgagtcaatacattttaataaacttcccatcata

SEQ ID NO: 878191 - DNA, 66 bp, Artificial Sequence
  ENSG00000247311_5 (sequence is synthesized)
gggactgagttctctagtaactgatgggaaacagagcaaagtagggactttaaaaaatactgtaac

SEQ ID NO: 878192 - DNA, 120 bp, Artificial Sequence
  ENSG00000247311_6 (sequence is synthesized)
acctggaagatggtgatgccagcacaatgggaaatgtgccagtgtgtagaattcttctctggtctttgtaaatagaaatgctcactttctatgtgaaacacctaaatgattcgatgccaa

SEQ ID NO: 878193 - DNA, 120 bp, Artificial Sequence
  ENSG00000247311_7 (sequence is synthesized)
acgcagaataagtttaaaggtagaacaagcaaatagctaaacaagggagtgtttcagaaaggaaatatgtcaagccttggctcaaaagcaaaacagtcttttcatgaagggaagtgttca

SEQ ID NO: 878194 - DNA, 120 bp, Artificial Sequence
  ENSG00000247311_8 (sequence is synthesized)
cagcatctattaaatgcatactcagtcacaaaaataaaacccatctgtttaatattaacatttgtaataaacattttaaaaaaaggaatgtagaaggcaaaaatgtattgtaaaacaaaa

SEQ ID NO: 878195 - DNA, 120 bp, Artificial Sequence
  ENSG00000247317_0 (sequence is synthesized)
gtcggcgagcccgcggtgggggtccccgcgccgcccaggcctaccccggctccttgggatagatggggaagctgaggcccagaagggggctgagaccacctcccagtttccccagtgagg

SEQ ID NO: 878196 - DNA, 120 bp, Artificial Sequence
  ENSG00000247317_1 (sequence is synthesized)
tggcgcctgagccacggccaggcccggcctccttccacccggccctgctgtgcgcgcggcgggtgctgacctggcgaggccggacaggggaccaggtcggggtgaccgtcactgacacct

SEQ ID NO: 878197 - DNA, 120 bp, Artificial Sequence
  ENSG00000247317_2 (sequence is synthesized)
ggacagtcctcgttgtgttcggggtgggaagcccacggaagacatcaacacaggagactcccaagactgctggggccaaatgtggcaggtggacgtctccccgccaccgagcaagccatc

SEQ ID NO: 878198 - DNA, 79 bp, Artificial Sequence
  ENSG00000247317_3 (sequence is synthesized)
catgagctgcgagggccagcctctggaacttcttaccgactggcccgacgttgaggttcccactgttagaggaacgctt

SEQ ID NO: 878199 - DNA, 120 bp, Artificial Sequence
  ENSG00000247317_4 (sequence is synthesized)
ctggcccgacgttgaggttcccactgttagaggaacgcttgctcaccaggcctctggtttaatgaaacatgaccagagtgactccatcttgaagtgagtaggaggcactcacaaggcacc

SEQ ID NO: 878200 - DNA, 120 bp, Artificial Sequence
  ENSG00000247317_5 (sequence is synthesized)
tataaggttaatgcttatggtctaaaaatagccatgtctcaagctggacaccaattataattacagaatatttgtggccatatggggcatctcccagcaagcccgcagactgtccagata

SEQ ID NO: 878201 - DNA, 120 bp, Artificial Sequence
  ENSG00000247317_6 (sequence is synthesized)
ccaggagtggactgcgggacacccagagtggactgcaggaggacacagaagctaggctgaagcgggaggaagctgggaaccctgcacggggccactgcgcactgggactcgttactggtc

SEQ ID NO: 878202 - DNA, 120 bp, Artificial Sequence
  ENSG00000247317_7 (sequence is synthesized)
acagttacctgtcggctgcagctggtaccagctccccaccccgtacagagaccgaagcgtcctctctctccccatcacccagcaccagactctgccccgcgacctcagcctgcacctgct

SEQ ID NO: 878203 - DNA, 120 bp, Artificial Sequence
  ENSG00000247317_8 (sequence is synthesized)
tcctggctccatccagccttccagcctcactagatcatcatgggccactggccaacacacagggcagtgccgagcccaggccgtggtcacacatggctgggttagtagctgaaaacattg

SEQ ID NO: 878204 - DNA, 120 bp, Artificial Sequence
  ENSG00000247317_9 (sequence is synthesized)
tttttcactggcctcacagtaatggcacctgcccccattttctgtgattgaatttttggatcctgctaccaggttatgatagattttatggtatgtctcaagatattgagataaaggtaa

SEQ ID NO: 878205 - DNA, 120 bp, Artificial Sequence
  ENSG00000247317_10 (sequence is synthesized)
aatgggtgagttgaactggcaaggaggagcccactgtcattacgggcctctggaatcccggcaggaggagattaaccacatggacattcgaggtggcagagagagctgcctagagaaggt

SEQ ID NO: 878206 - DNA, 120 bp, Artificial Sequence
  ENSG00000247317_11 (sequence is synthesized)
gcgggggcagcagccagctgaggcagagcccggagggtttggtgcaggagcgtctgtagtggagggccatcccccaggctcaaattcctcccataggagattttagccctaggggagctg

SEQ ID NO: 878207 - DNA, 120 bp, Artificial Sequence
  ENSG00000247317_12 (sequence is synthesized)
ttgtatgtgatctttgtggggtggtcttgcccatcagatggggccagtctgacccgagcatgccttggtctgctggcctctcccagggccccggcctggccacgcctgcttgcagggcag

SEQ ID NO: 878208 - DNA, 120 bp, Artificial Sequence
  ENSG00000247317_13 (sequence is synthesized)
cctgcccactgcctcccacactgtagcttctccagggcccactgtcaccccccatcttgcttttgccagtgcatgtctgtgcaggtgggttttgctttccttgcccgccagtgtacctgt

SEQ ID NO: 878209 - DNA, 120 bp, Artificial Sequence
  ENSG00000247317_14 (sequence is synthesized)
gtgtttgcaccctgccctgccattgctgtggcaggagtaccgtttgcccaacgccccctgctgactgccattgcagttggagccttggcagacacagagccagccagccccacctccctt

SEQ ID NO: 878210 - DNA, 120 bp, Artificial Sequence
  ENSG00000247317_15 (sequence is synthesized)
gcaccccactcttgcaccaacactgttgcgggagtgaaactaggcacggaatagggaccaccctgcctgtggggcacaaagaatgccacaggcctgggcctgccggtgctccacctccat

SEQ ID NO: 878211 - DNA, 120 bp, Artificial Sequence
  ENSG00000247317_16 (sequence is synthesized)
cccaacaccaccgccagcatggctgttgccagcagggggccctgccccccaggtgctttcgtctgccactgtggtgaacacctgcacagaggcaggcaccccagcacttgctagcaccct

SEQ ID NO: 878212 - DNA, 120 bp, Artificial Sequence
  ENSG00000247317_17 (sequence is synthesized)
gccacagccgatgaacgtgcaccctgtgctgctgccaccacggctgctggcatgtgcaagcaagaatggatcccgctgccactgcactgcaaaatgcactggctggcaccacctatcaga

SEQ ID NO: 878213 - DNA, 120 bp, Artificial Sequence
  ENSG00000247317_18 (sequence is synthesized)
gtgtagtgaccggtagtgaggagcaccttgatccctcagtgcagttgattcctaacctccgggagccagagaacaaagttggtgcctgatacaagtaccccagttagagcacacagtctg

SEQ ID NO: 878214 - DNA, 120 bp, Artificial Sequence
  ENSG00000247317_19 (sequence is synthesized)
ggagttgggaactgagccttggccccctaaaatcatccagaaacaaagccagtcagctgaatccaacttatactacaatcaaatcctcaaggtcatcaaataggataaaagaaaaaaaaa

SEQ ID NO: 878215 - DNA, 120 bp, Artificial Sequence
  ENSG00000247317_20 (sequence is synthesized)
ccagacacaacatagtaaaattgctgaaaaccaaagatgaatagaacacttaacagttggaggaaaaaagccacattaccttcataaggacaccaatcacactaacatctgacttcgaaa

SEQ ID NO: 878216 - DNA, 120 bp, Artificial Sequence
  ENSG00000247317_21 (sequence is synthesized)
tagaaatataaaagccaaactacaagggaatgtgatcttcaaaatattgaaagaatttaattgttaagtgaaataattaactgccaacctaaattctattcctagtggaaatactctcca

SEQ ID NO: 878217 - DNA, 120 bp, Artificial Sequence
  ENSG00000247317_22 (sequence is synthesized)
catagtgagtctggggacccaagatcttattttcctttctgtcacccccgcttggttttggattccgtgacagctggacccggcttctgcgtggacataattggagacactggttatttt

SEQ ID NO: 878218 - DNA, 120 bp, Artificial Sequence
  ENSG00000247317_23 (sequence is synthesized)
accaaagctttgaccggaaggatgtacttttggatacaaacagactgctttaaggagtcaaagctgacttatgaagttggcctcatcccttgtctacacagtcactgtacagagttcctt

SEQ ID NO: 878219 - DNA, 120 bp, Artificial Sequence
  ENSG00000247317_24 (sequence is synthesized)
gcctgtagtatgtaaagaatgtcactttctgacaggctcaggagccccaaattatcctgggaccttgaggagaggacattgcccaatttatataggtattttcaggcaccaataaatcat

SEQ ID NO: 878220 - DNA, 120 bp, Artificial Sequence
  ENSG00000247317_25 (sequence is synthesized)
ggattcgttatagaataaagttccagcaaagccaattttaagacaggcctatatggcaaataattattcgtgctgacattatgcaaacactcaggccaagtataagatgaaaaattattt

SEQ ID NO: 878221 - DNA, 120 bp, Artificial Sequence
  ENSG00000247317_26 (sequence is synthesized)
attttaaataaatttgtcctactatgatttgtcttcagtaaaaacaggtactgggctgggcatggtggctcacagctgtaatcccagcacactgggaggccaaggcaggcagatcgcttg

SEQ ID NO: 878222 - DNA, 83 bp, Artificial Sequence
  ENSG00000247317_27 (sequence is synthesized)
tgagaccagcctggccaacatggtggtgaaacaccatctctacctctgtaatcctagctacccaggaggctgaggcatgagaa

SEQ ID NO: 878223 - DNA, 84 bp, Artificial Sequence
  ENSG00000247317_28 (sequence is synthesized)
ctgagtcctggtaaggcacagacagaaagggttgtcagccatttttttctgaggttataagatctgcaacttccccagttattc

SEQ ID NO: 878224 - DNA, 120 bp, Artificial Sequence
  ENSG00000281383_0 (sequence is synthesized)
atcaacgcaagcttatgacccgcacttactgggaattcctcgttcatggggaataattgcaatccccgatccccatcacgaatggggttcaacgggttacccccaccgccggcgtagggt

SEQ ID NO: 878225 - DNA, 120 bp, Artificial Sequence
  ENSG00000281383_1 (sequence is synthesized)
cgtagggtaggcacacgctgagccagtcagtgtagcgcgcgtgcagccccggacatctaagggcatcacagacctgttattgctcaatctcgggtggctgaacgccacttgtccctctaa

SEQ ID NO: 878226 - DNA, 120 bp, Artificial Sequence
  ENSG00000281383_2 (sequence is synthesized)
ggggacgccgaccgctcgggggtcgcgtaactagttagcatgccagagtctcgttcgttatcggaattaaccagacaaatcgctccaccaactaagaacggccatgcaccaccacccacg

SEQ ID NO: 878227 - DNA, 87 bp, Artificial Sequence
  ENSG00000281383_3 (sequence is synthesized)
acccaaagactttggtttcccggaagctgcccggcgggtcatgggaataacgccgccgcatcgccggtcggcatcgtttatggtcgg

SEQ ID NO: 878228 - DNA, 120 bp, Artificial Sequence
  ENSG00000281383_4 (sequence is synthesized)
tgcccggcgggtcatgggaataacgccgccgcatcgccggtcggcatcgtttatggtcggaactacgacggtatctgatcgtcttcgaacctccgactttcgttcttgattaatgaaaac

SEQ ID NO: 878229 - DNA, 120 bp, Artificial Sequence
  ENSG00000281383_5 (sequence is synthesized)
ctctggtccgtcttgcgccggtccaagaatttcacctctagcggcgcaatacgaatgcccccggccgtccctcttaatcatggcctcagttccgaaaaccaacaaaatagaaccgcggtc

SEQ ID NO: 878230 - DNA, 71 bp, Artificial Sequence
  ENSG00000281383_6 (sequence is synthesized)
ggtcctattccattattcctagctgcggtatccaggcggctccgcgggacactcagctaagagcatcgagg

SEQ ID NO: 878231 - DNA, 120 bp, Artificial Sequence
  ENSG00000281386_0 (sequence is synthesized)
cttccttccattagccttgacgctacctctacggtcctgcagctgcaactccccacccctgtcccacagatgcaggcctcctctgtccctggacactggacttcaggctgaggtgtcctg

SEQ ID NO: 878232 - DNA, 120 bp, Artificial Sequence
  ENSG00000281386_1 (sequence is synthesized)
ccttggaggcactgctcaaagaagaaagggacaccatccctagtttcaaggcgcgacttgtcctgcccctgatggctgtggctgatccacgaggaagtaaacttggactgggaaaacaca

SEQ ID NO: 878233 - DNA, 120 bp, Artificial Sequence
  ENSG00000281386_2 (sequence is synthesized)
aaccctaacatcgataagacatctgtctggacctttcaggtctgaacagacagggcagctgctgagaacctggggaaactgacaatccgattcctctctgtgtctgaaccttccctcttc

SEQ ID NO: 878234 - DNA, 120 bp, Artificial Sequence
  ENSG00000281386_3 (sequence is synthesized)
tcactgcaccaccagtgcaggcctctttgactcacacaagaccgtttttttagcacaaggtcacctcgaggtcaaccgtcaaccccaatgctacagaaactcacctctgactgcgaacct

SEQ ID NO: 878235 - DNA, 120 bp, Artificial Sequence
  ENSG00000229434_0 (sequence is synthesized)
caaagtacaaacaatttgcccttttattttattttcctgcagacttgctctttgtacccctccttggtttatgttcctggtgatcgggtgttgggtttgaagaactttatatagtatcac

SEQ ID NO: 878236 - DNA, 120 bp, Artificial Sequence
  ENSG00000229434_1 (sequence is synthesized)
aaatacctagaactgatgaggtctttaagagttcattgaatcctttgttcatctaatttggggcttcacccaagatagctgagatgaggaaactgaaagccaaagagatgaaatgactct

SEQ ID NO: 878237 - DNA, 120 bp, Artificial Sequence
  ENSG00000229434_2 (sequence is synthesized)
aagttggcagccaagcaaagatgtcctgtgtccaggacacaggtcctggacccctggctctttgcttccttatattagaacaactcgaaaaatttctaaagaaaccaatgctggaaggta

SEQ ID NO: 878238 - DNA, 120 bp, Artificial Sequence
  ENSG00000229434_3 (sequence is synthesized)
taacgagaatccagtgagtggggagtggagtatgggagcatagcttaccaggatatggtagttatgggttccaattttccctgataataaaaattgttcaatattttaaattattccaga

SEQ ID NO: 878239 - DNA, 120 bp, Artificial Sequence
  ENSG00000229437_0 (sequence is synthesized)
agaaaaggaggcacagagatgcagatggagaattcagagcatggattgcaggcaagttcagtgcaattcaagcagccccacataccaatgctgagatttgaagagctaagctgctaggat

SEQ ID NO: 878240 - DNA, 120 bp, Artificial Sequence
  ENSG00000229437_1 (sequence is synthesized)
gcaccctgggaaaaggcttgtgcaatgcagtcctagaaaaactaaaaccaaagctggacaaatgatcttctttgtctattcacagctcaaatcctataaaagactatatccaagagtacc

SEQ ID NO: 878241 - DNA, 120 bp, Artificial Sequence
  ENSG00000229437_2 (sequence is synthesized)
agaaaaacagcataggagctgaatttcctacattcgaactaccactctttacttgatcttagccaaaaggcttagagatgatctctccaaaccgctcttgtcagaatctgcctggagaca

SEQ ID NO: 878242 - DNA, 88 bp, Artificial Sequence
  ENSG00000229437_3 (sequence is synthesized)
cctgcttcagcctcccaaagtgctggggttacaaagagacggggtcttgctttgttgcctgactagtctcaaactcctggcctcaagg

SEQ ID NO: 878243 - DNA, 120 bp, Artificial Sequence
  ENSG00000229437_4 (sequence is synthesized)
ccatggatggtgtctctaatgcactcacacctgatccatgacgtgtgacacagctgctcctgaatgggttcagatacttgatacttatgtgtattttatgtcatctgtcagcaacctgac

SEQ ID NO: 878244 - DNA, 120 bp, Artificial Sequence
  ENSG00000229437_5 (sequence is synthesized)
cagttgtggcttatgtggcaaatgacagacagaaaatgtttattgtgtcttaacatgtgcctttcggggaagatctacttaacattcattcagttattaataaattagatggacattcat

SEQ ID NO: 878245 - DNA, 120 bp, Artificial Sequence
  ENSG00000229437_6 (sequence is synthesized)
ttctttgtctattcacagctcaaatcctataaaagactatatccaagagtaccagaaaaacagaacatttccaataaagtggagatggtgcatgaataacagggggtgacgttctgcagt

SEQ ID NO: 878246 - DNA, 120 bp, Artificial Sequence
  ENSG00000229437_7 (sequence is synthesized)
aactaccactctttacttgatcttagccaaaaggcttagagatgatctctccaaaccgctcttgtcagaatctgcctgggtgagcctttttgaaatatatctcctcggctccttctctcc

SEQ ID NO: 878247 - DNA, 120 bp, Artificial Sequence
  ENSG00000229437_8 (sequence is synthesized)
tctagacaccaaccgtttattcttaaggcctgggcccaaagctctcatctgttctgtattctgttatttaatatccacaaggcttcattgctaaatattctacttgttccctaccatcaa

SEQ ID NO: 878248 - DNA, 120 bp, Artificial Sequence
  ENSG00000229437_9 (sequence is synthesized)
cacctgcttcagcctcccaaagtgctggggttacaaagcatgtattccttctaattataaaaaagcatcaaactgcctcaggcagttctttcaggaggcatccagaagaaggcattgtta

SEQ ID NO: 878249 - DNA, 85 bp, Artificial Sequence
  ENSG00000229437_10 (sequence is synthesized)
gaagaaggcattgttatcacaggagatgagagctccacgggtgtcattgcccctgcagaccttccagtggaacaagatgtagagg

SEQ ID NO: 878250 - DNA, 120 bp, Artificial Sequence
  ENSG00000229437_11 (sequence is synthesized)
tatgtgtgcatttgtgttttagtgtttagtaagaaaagtttaaaaagtaaaaaataataaaagcttaaaaatagaagaaagcttataggacaagaatataaagaaagaatttttatacaa

SEQ ID NO: 878251 - DNA, 120 bp, Artificial Sequence
  ENSG00000229437_12 (sequence is synthesized)
tacaaaggtgagccaccgcacctgggcccctgccatcttctttaccttctttttactctctcaatgtatagttttctcctttctaattattcgtaataggaatgtttcataatctacaaa

SEQ ID NO: 878252 - DNA, 120 bp, Artificial Sequence
  ENSG00000229431_0 (sequence is synthesized)
ggaacattaaaaaagtcatcttaagcaaggtgtccaggaggaaagaagtgacatgggagaatagtctgttcatccactcctagaacagatagctaaacctgtgtgactcccatttaacgt

SEQ ID NO: 878253 - DNA, 120 bp, Artificial Sequence
  ENSG00000229431_1 (sequence is synthesized)
cacagatcttcatctcggtctggagacaacaccagaggaatgatgacctggttacggaacagcggtgttttttcatgcttcaagaccttgttcagagtgttcagctgtccagaaagcaag

SEQ ID NO: 878254 - DNA, 120 bp, Artificial Sequence
  ENSG00000229431_2 (sequence is synthesized)
gcaaagctgtccaggacagatggcctggtggtggtaacaaggtacaccctacactccctcactgagacattttcgacagacctaatgccaggagatcattctctcatgtgcacctctgta

SEQ ID NO: 878255 - DNA, 120 bp, Artificial Sequence
  ENSG00000229431_3 (sequence is synthesized)
ccagcttcctccatcctagcatctgtgagcctggctgtcttgtcagtctctgggaaatctgcctactcatgaagacttctctgaacaccagtcctgctctcccctttccctcccccaacc

SEQ ID NO: 878256 - DNA, 120 bp, Artificial Sequence
  ENSG00000229431_4 (sequence is synthesized)
aacgactccagctttccatctgctctcatcattttgtttcaaccttctccttgctgaattaatatgcaatcatctatctctgtgtcaatattcccgtgcctctttcacaagctcagtcaa

SEQ ID NO: 878257 - DNA, 120 bp, Artificial Sequence
  ENSG00000229431_5 (sequence is synthesized)
cccattaacatttattgagactaccagctgcaagaaactaagtgacaaatgaaaaacaaaaaccacacatgcttctaagcactggacaaacaaattaaaatgctgggggtctgcaaagca

SEQ ID NO: 878258 - DNA, 120 bp, Artificial Sequence
  ENSG00000261014_0 (sequence is synthesized)
agatgatcctggatcatggagccatgaagatgttgatagttggatatcaggaacagatgatgtcaatcactaatggatcacagttgaccaggggaaactaaaatcatgggaaacaaaacc

SEQ ID NO: 878259 - DNA, 120 bp, Artificial Sequence
  ENSG00000261014_1 (sequence is synthesized)
atggataaggcagtactactgtatacagttggccctccatagccatgcactctgcatcagtggattcaatcagccatggataaaaaaatgtttgaaaagtttaaaagaatggttgtttct

SEQ ID NO: 878260 - DNA, 120 bp, Artificial Sequence
  ENSG00000261014_2 (sequence is synthesized)
gtactgaacaggttaggtgttcaagctgtgttaaatcacatccctgatgtttatgtggtcaggatatgtgcccttgagtgaccaagcagaagtgcatcttcaatgttagctaaatacacc

SEQ ID NO: 878261 - DNA, 120 bp, Artificial Sequence
  ENSG00000261014_3 (sequence is synthesized)
tctaacgtattgaaggaaaaaattcaaaccagacagagaggactggaatatataactagcgcttcagtgcaaagacacagacctacatcatgagaaacaacagcccactaggaaccataa

SEQ ID NO: 878262 - DNA, 120 bp, Artificial Sequence
  ENSG00000261014_4 (sequence is synthesized)
cctcccccacccaaaaaaaaaaagtcactgaccatagcaagatagcaatatgtgagttctctgaccaagaatttaaaatagaagttttaagaatatgcagtgcatagcaattcacaaatt

SEQ ID NO: 878263 - DNA, 120 bp, Artificial Sequence
  ENSG00000261014_5 (sequence is synthesized)
tatgaaagtaatttaacaaataaattgaaataatttttaaaaatcaaatagacatcttaggaatcaaaaatgaatttgctaaactgaaaaactcattggaggctctgaacagaagaatgg

SEQ ID NO: 878264 - DNA, 120 bp, Artificial Sequence
  ENSG00000261014_6 (sequence is synthesized)
acactgttagagaaaaaaaaaaagaaagagaagaaatgataatctcctgcaagatacagaaaattatctcaaaaaaatctaagaactactggtgttctaccgggagttgaacaagagaaa

SEQ ID NO: 878265 - DNA, 120 bp, Artificial Sequence
  ENSG00000261014_7 (sequence is synthesized)
gaggtggaaaagttactcaaagaaataataacaaaaaattcccaaacatgagaaagatagaaatatacagttacaggaaaatcagagaatgccaaacatatttgatgcaaataagactac

SEQ ID NO: 878266 - DNA, 120 bp, Artificial Sequence
  ENSG00000261014_8 (sequence is synthesized)
cccaagataaataataatcaaactctcaaaggtcaaagacaaattaggaacctaaaagcacaaaagaatagttgcaaataacatataaaggagctttaattcctctgccaacagacttct

SEQ ID NO: 878267 - DNA, 120 bp, Artificial Sequence
  ENSG00000261014_9 (sequence is synthesized)
cagtgaaaatcctatgggccaggagggagtaaaacatttttaaagtgctgaaagaaaaaactgccatttgagaatagaacaaagctatccttcagatatgaaggagatataaagtctttt

SEQ ID NO: 878268 - DNA, 120 bp, Artificial Sequence
  ENSG00000261014_10 (sequence is synthesized)
ctagacaaacaaaaacagtgacaattcaccaccacctgacccatcttataaaaaaatctttaaaaagtcttcaatatgaaattaaaaaaaacaaataaacaataatatgcaaaaaatgaa

SEQ ID NO: 878269 - DNA, 120 bp, Artificial Sequence
  ENSG00000261014_11 (sequence is synthesized)
gcatttgaaggtataaaactcactggtaatattaagtacaaaagcaaccccagaatactgtattactgtaattgtggtgtgcaatccaattataacactaatttaaagcctaaaagacaa

SEQ ID NO: 878270 - DNA, 120 bp, Artificial Sequence
  ENSG00000261014_12 (sequence is synthesized)
atctgttaaaaacaatggtagctacagcaaccttttaaaagataggcaatattaaaaaatgtaaatagagacaaccaaaagtcaaaatgtttggtatggaattaaaattgagattttttg

SEQ ID NO: 878271 - DNA, 120 bp, Artificial Sequence
  ENSG00000261014_13 (sequence is synthesized)
ctctgccctcaggatgaaaaagggttattgaaacctaggggactttgagtgtgtcagtagcacatagacaatcttacccatgagtttctagctgttttgtactgtaagaaactgacatat

SEQ ID NO: 878272 - DNA, 120 bp, Artificial Sequence
  ENSG00000261014_14 (sequence is synthesized)
tcacaaactgatgggattaaatggagcatcaagtgacctacatttggcaagaagccatgttgtatagggacaggagctttggcacaagcgtgacaataaattctctgtatttttgaattg

SEQ ID NO: 878273 - DNA, 120 bp, Artificial Sequence
  ENSG00000261014_15 (sequence is synthesized)
caggatactccttaaggcttgtccgtctaacaggctcccaggtgatgccaatactgatgttacacagaccatacttcaaggaacaaagacttaaagcaagtgtcttcttctggggcctga

SEQ ID NO: 878274 - DNA, 120 bp, Artificial Sequence
  ENSG00000261014_16 (sequence is synthesized)
gaaaaatgtttatgtgaaggtgatttatttggtaatatgataccagggaataggaatacagggcaggtaagtgacacagagaaggaataaaagccaatacaaggatagatgatcaagttg

SEQ ID NO: 878275 - DNA, 120 bp, Artificial Sequence
  ENSG00000261014_17 (sequence is synthesized)
gggaatttttgcagagctttatgaaatatatgtcaaaatttgctgccttggggataatagggggaaaatttctatcagattttgttcccattggccaagggtgggtccatgagcccgcac

SEQ ID NO: 878276 - DNA, 120 bp, Artificial Sequence
  ENSG00000261014_18 (sequence is synthesized)
ttccaggttgcacatgaatgcttgcagagacttttactatgacagtcccatctttacacatcaaatgaatccccagagtatgaaacagaaatagttacaacatggaccaagacaatgtgc

SEQ ID NO: 878277 - DNA, 120 bp, Artificial Sequence
  ENSG00000261014_19 (sequence is synthesized)
tgttcaagttgctcctccaggaaactagtcaaggcctacttaaatcagttgtcacagaaactatgaacgactaagaagattttgaagtgatgcatgagaactctaagatgctttagtatg

SEQ ID NO: 878278 - DNA, 120 bp, Artificial Sequence
  ENSG00000261014_20 (sequence is synthesized)
actatacaatgccctgagctggagcacttggccacaaaactcatgtctcttggaggcaaaagccaaatgacctttccagcagtatgcaacattgcttttcccaaagcaaaatcatgattt

SEQ ID NO: 878279 - DNA, 120 bp, Artificial Sequence
  ENSG00000261014_21 (sequence is synthesized)
tgccatgctaatggtaaaaccataggcacattgccagacaatgtttctaggaagaaaagaatgttttgttttgtttttcttcttttaagattaatagatgacctttaagggactggtaaa

SEQ ID NO: 878280 - DNA, 120 bp, Artificial Sequence
  ENSG00000261014_22 (sequence is synthesized)
tgggaagaggaaataatcctaccgtggtgcatgccatttttctatccaagggaacctcgtaagttgctgataagaataaattgcagtgaatgagaaaatcatgaaaagtcaaaaattaaa

SEQ ID NO: 878281 - DNA, 120 bp, Artificial Sequence
  ENSG00000261014_23 (sequence is synthesized)
gaagtgagtggaactttctaccatgctttgtatgctaagacttccatcaacgagtgattttcttgctttaaatttaatgctgactccattcaagcagaaaatagatttgaagacaatgaa

SEQ ID NO: 878282 - DNA, 120 bp, Artificial Sequence
  ENSG00000261014_24 (sequence is synthesized)
cactttatttccctaaggccttctctgcacagtaggccttgaacaaaagtaatttcataaggagagacaaacaactaagtgaatcttcaaatacaaaaatttattgtttttttttgctaa

SEQ ID NO: 878283 - DNA, 120 bp, Artificial Sequence
  ENSG00000261014_25 (sequence is synthesized)
acctggcacagtgattattttttcccttccaaggggaggaacattttattttttgaattggaacatttttgttgctgtttttctacatggtcaccatgtttttagaatatcttctaatgt

SEQ ID NO: 878284 - DNA, 120 bp, Artificial Sequence
  ENSG00000261014_26 (sequence is synthesized)
agtaacattgtatttattgagaaataacggctaatactgaatttgttcaatttcaaaaatgggaaaatgtgcagagtgtatgatcataaacaacagtggtaacaatagcaagcaaaacaa

SEQ ID NO: 878285 - DNA, 120 bp, Artificial Sequence
  ENSG00000261012_0 (sequence is synthesized)
taaagtatttataattacatattttataattcaatattttataaatagttaaaaagacgaggaaaaaattaaaaagacgaggttattgatctcaggaattgtatttgccaagtgagaagg

SEQ ID NO: 878286 - DNA, 120 bp, Artificial Sequence
  ENSG00000261012_1 (sequence is synthesized)
gtatttgccaagtgagaaggaaaaaatattcacaaaggcttgtacatactttgatcctgaggaacacctctggtgtcttcatgtgccacatagtcttcctcactgactgtctgcctttgc

SEQ ID NO: 878287 - DNA, 120 bp, Artificial Sequence
  ENSG00000261012_2 (sequence is synthesized)
aaggcaaggctctccggtaggcctcgagatgaaataacaagtcctttatttcactcagcctgccaggagtggagaaggaatggctagggagtcctagccccaggggcttcatggcaatac

SEQ ID NO: 878288 - DNA, 120 bp, Artificial Sequence
  ENSG00000261012_3 (sequence is synthesized)
ggaccccagatgtctccctggagctctgccaggatccattcaaggccaagaaagtatgattgggagaggaggggtggagatgtagattcctaacaattctgtgacccagcatacatgtat

SEQ ID NO: 878289 - DNA, 120 bp, Artificial Sequence
  ENSG00000261012_4 (sequence is synthesized)
gctctttaggctcttaagcatccttatttttccaaatataatatccaacaatcccaagtgtagtaaaaacccaagggtttctcctgccacatccactcacttcaaactctgattttaaac

SEQ ID NO: 878290 - DNA, 120 bp, Artificial Sequence
  ENSG00000261012_5 (sequence is synthesized)
gaaagctgcaaaaaacctgtgcaacaaaacttgcactcatattactgacaagggtagatataaaacagcgcattcttttccatgacactgaagagcaaagaagagtgtaacttgggggca

SEQ ID NO: 878291 - DNA, 120 bp, Artificial Sequence
  ENSG00000261012_6 (sequence is synthesized)
ataagaaattggaggtcaccacctcccaaatcctacatgaggtctatttggaaaagacctccttttttaattcaaaaatccttcaacctccaccattctttcataaagcttcacattctc

SEQ ID NO: 878292 - DNA, 120 bp, Artificial Sequence
  ENSG00000261012_7 (sequence is synthesized)
ttggtgaagcccactgttaaaatgcacaggcgttacctggaaaaggaaacacatagccttaacaatattcttctgtactgaactgaagagtgagaaagagtctatggagctataatacgg

SEQ ID NO: 878293 - DNA, 88 bp, Artificial Sequence
  ENSG00000261012_8 (sequence is synthesized)
gtgagcgaataaatgagtggataaatgaggggtcagttttgagagtgagagaaacatggaaattagactcaaatcccaaggcaccaca

SEQ ID NO: 878294 - DNA, 120 bp, Artificial Sequence
  ENSG00000261012_9 (sequence is synthesized)
gagaaacatggaaattagactcaaatcccaaggcaccacatggaatagttccaggaatagttctgcaagagtttccctgatgagctataagcagcaaaaatttagtgagtgttcaaactg

SEQ ID NO: 878295 - DNA, 120 bp, Artificial Sequence
  ENSG00000261012_10 (sequence is synthesized)
aaaggaggcctggaattgtggcttaatttggagggaaagagggagtccaagattcccagtgcttatttgttgatatctatctagtgctgaaaagaaaaaaaaatagccacaaatccaaaa

SEQ ID NO: 878296 - DNA, 120 bp, Artificial Sequence
  ENSG00000261012_11 (sequence is synthesized)
tgattgtgcagtcacatggtacccactgcccagttccttgaccagtgtccctcatacaaagggcccctgatgagctcagaatgtctttgttgtactgaataaagtttgaagaacaaggga

SEQ ID NO: 878297 - DNA, 120 bp, Artificial Sequence
  ENSG00000261018_0 (sequence is synthesized)
tgcaggctgtaattccccatcgcctctgccacatgaggctggcttctgctgacgtcctaacctcaggcagtgacaaccccaagtggagcgacggtggtgcagactggagctggatgaggc

SEQ ID NO: 878298 - DNA, 120 bp, Artificial Sequence
  ENSG00000261018_1 (sequence is synthesized)
tgtcttttcaaaccagggcaatggaaacaccccacacgctgcacacctgagcccgcgcacgcctcccactctgtccgctggcacactctgctgcccgaccctctcaccttctcttgcaca

SEQ ID NO: 878299 - DNA, 120 bp, Artificial Sequence
  ENSG00000261018_2 (sequence is synthesized)
ctttggtacctcgtcattctcctggtcccatctaaaagacgtccaatctaacagacccaggatgcgaggcacactctgcctattcggcatcacagagtaatcacagtgacttgcagttac

SEQ ID NO: 878300 - DNA, 120 bp, Artificial Sequence
  ENSG00000261018_3 (sequence is synthesized)
ccatctctcaatagtttctttttaaaaagttcatctcttctctaaatgggcttgatcttgacctgcacagatcatctggagttgagtggacacaggttcagtgaaaacggatcaaagggg

SEQ ID NO: 878301 - DNA, 120 bp, Artificial Sequence
  ENSG00000261018_4 (sequence is synthesized)
ctgttgctgggctcagtcaatcaactgcagaacgtcttatggctgcaggctaagaagaggaaacaattcaacgaccaaacaaaggttaatctagtaactgcggcaaggcccaggtaattt

SEQ ID NO: 878302 - DNA, 120 bp, Artificial Sequence
  ENSG00000261018_5 (sequence is synthesized)
ccataaatatgtggaaacagcaaccacttcaatagtttggcctggcaccaatatgaggaggagcttggaaaaccggacgtggaccccctttcagtgccctgagatccatcgagcagctga

SEQ ID NO: 878303 - DNA, 120 bp, Artificial Sequence
  ENSG00000261018_6 (sequence is synthesized)
atggaggtcggtgctgggggccagggggcacccacacagaccagtgagcagctgccccttctggaatctcacagacttctaacaccgaggggtccccgggtgccagctgtgctgcaagtg

SEQ ID NO: 878304 - DNA, 120 bp, Artificial Sequence
  ENSG00000261018_7 (sequence is synthesized)
gacagccagcctctgctcagacatgtctggagatggcgagctcctcccttccagagggttcccagaaagggaataggagaagctcttggccatcattctcattactctccacatcctggc

SEQ ID NO: 878305 - DNA, 120 bp, Artificial Sequence
  ENSG00000261018_8 (sequence is synthesized)
tgctcacatcctttgttcccaagaacgtcgttccctccattcgagtgtgcaggggactgtgcatgggggtgcaggtgtgattggaatgtcagggtttccccgccaccgctggttttgttt

SEQ ID NO: 878306 - DNA, 120 bp, Artificial Sequence
  ENSG00000261018_9 (sequence is synthesized)
tttcctctatatccagccaatgagcacctcttgtgcacatatagatcctcagagagaaagaaagcctgatgcctcttcttcatgaggctgtaagtctttgagcaatgaggctatccaact

SEQ ID NO: 878307 - DNA, 120 bp, Artificial Sequence
  ENSG00000261018_10 (sequence is synthesized)
cgactccaagaaacggatgcgcacagaggtcctgcttgtatagtgtcaggctgatcttacgcaagccccatttgccctaagtggaaaatgaacctttgtaaactgccacccatgaaccaa

SEQ ID NO: 878308 - DNA, 120 bp, Artificial Sequence
  ENSG00000261018_11 (sequence is synthesized)
tgtgttgggaggtgttcaaccaacttggccatctgttgaatttgagttatatccacgaagctctgttgtggaatgatgctggtggtggggacagagtagctgccgttggctgaggttgcc

SEQ ID NO: 878309 - DNA, 120 bp, Artificial Sequence
  ENSG00000261018_12 (sequence is synthesized)
acgcgactaaacagcttattgtagtggatggagaaccagtccggcggcagaatgtcactcctcccacccccgggcctgtttttggccaacctaaaagaactgcgtgtaactaggatcctt

SEQ ID NO: 878310 - DNA, 120 bp, Artificial Sequence
  ENSG00000261018_13 (sequence is synthesized)
ttttttgcacgcaccaggagaacttgctatttagggaatcctgatgatgaattgtttttataaagtcagaccagagactcttccttgtctttctctcccctcacccatttttattttctg

SEQ ID NO: 878311 - DNA, 120 bp, Artificial Sequence
  ENSG00000261018_14 (sequence is synthesized)
aaattggtttttgcttaaaatcagggcatgcttttgcacataaataatgagtttggtggtgaccatctggcattgcgatccaaatgaaatctattcagtgtagtcacctctttgctggct

SEQ ID NO: 878312 - DNA, 120 bp, Artificial Sequence
  ENSG00000261018_15 (sequence is synthesized)
gtgtgaccttggccaagtcacttcacccctttgttaccatctgtaaagcgagggcaatgcaggcatctactgtacatattgtgggtaatattcagacctctttcaaataaaatgggctcc

SEQ ID NO: 878313 - DNA, 120 bp, Artificial Sequence
  ENSG00000255043_0 (sequence is synthesized)
ttctttgcctcgcttccttgtgtctcacctttgctgccatggatttgcatcttccaaatgaaacatctcactttcaatttttgccccaggctctatcttctagagaagctagcctaacat

SEQ ID NO: 878314 - DNA, 120 bp, Artificial Sequence
  ENSG00000255043_1 (sequence is synthesized)
acatataggaagggcagccttcccactcagcccagggtgtggtggaacttcatttaggctgcatgtgaaaattggccacctgctttgcttgtctacagctctaagtaagaaatcctggga

SEQ ID NO: 878315 - DNA, 120 bp, Artificial Sequence
  ENSG00000255043_2 (sequence is synthesized)
gcaggagctacagagaatgtcctaatggcagtctcagacggaagtacagctagcacagtgtattcccccaaggggtgagagaatgggaagatgggaagaggctaagttttggactccaac

SEQ ID NO: 878316 - DNA, 120 bp, Artificial Sequence
  ENSG00000255043_3 (sequence is synthesized)
aggcctgggtttcagtctcgaactccatcactttctatctgtggaccatggacaagtcatttaacctctctgtgcctgaggttcctcatctgaaaattagaggaataacactatgtttca

SEQ ID NO: 878317 - DNA, 120 bp, Artificial Sequence
  ENSG00000255043_4 (sequence is synthesized)
tacatacatacagattccaaatttgcacttaactgctatattatgtatgtacttgttcatgacaccacttggaattcaggtagaggtattttcaatcagctccaacatccctttccttcc

SEQ ID NO: 878318 - DNA, 120 bp, Artificial Sequence
  ENSG00000255043_5 (sequence is synthesized)
ttggatgtttccaagacaccatcaagccaggcacatttaggcagagaggttgctggggagaatagaacattgccaagctctggcgccaaatactgcactctggcaacgtgtaagtgtaag

SEQ ID NO: 878319 - DNA, 120 bp, Artificial Sequence
  ENSG00000255043_6 (sequence is synthesized)
gcaggcattgtgggtgtgtgacctctgcaatcacacagggcctcatgctcaggagggccctgtgcttgattcaatactctgctggccccatcttgaaattcttaatgatttttgaacaag

SEQ ID NO: 878320 - DNA, 120 bp, Artificial Sequence
  ENSG00000255043_7 (sequence is synthesized)
gggctccacatgtccatttatcagtgagcccctcaaattatatagccagttttgtgtgaggacaaagcaatggacagatactatgaagctcctttctgggtggcattttctctttctttt

SEQ ID NO: 878321 - DNA, 120 bp, Artificial Sequence
  ENSG00000255043_8 (sequence is synthesized)
ctccttcctttcagagctaccaagtcaccccacactctagctcaagagctctacctgaccaaaactcaatggcctttcctcaggaaatccagctatgctaatgccaccagaactgagtca

SEQ ID NO: 878322 - DNA, 120 bp, Artificial Sequence
  ENSG00000255043_9 (sequence is synthesized)
gaactcctaactctacaaatatggctcctctgtattgagtgcctgctaggtgccaggcacaacactcaactgggaccaatattatttctgatctgggagatagataggtatgatcagccc

SEQ ID NO: 878323 - DNA, 120 bp, Artificial Sequence
  ENSG00000255043_10 (sequence is synthesized)
catttcacagttgaggacattgaggctcagagagattcagtgacttgtccaaggtcacacagtgcatcaaacacaaatctgatgagccttctcaaaggctcttgatgccacctgcttcca

SEQ ID NO: 878324 - DNA, 120 bp, Artificial Sequence
  ENSG00000255043_11 (sequence is synthesized)
gaacattctgccactcactctgcctaggctgctgccctgcctgacttgagctcaggcagttctgccacttgggtcagatcggctacaagtcctggagtatgggcccttcctagccccatg

SEQ ID NO: 878325 - DNA, 120 bp, Artificial Sequence
  ENSG00000255043_12 (sequence is synthesized)
cctatagtttctggctcctcttacctcttccagatttggatgaaaacactctccagcatggggtgggaactggtctcctgagaggctgccattaggactgggtgatacaatcctgaagtg

SEQ ID NO: 878326 - DNA, 120 bp, Artificial Sequence
  ENSG00000255043_13 (sequence is synthesized)
cagaagagttaacccccactaggaaaactttgaccagtggaaaataggagttgagagggagcaggacacatacattccttcttcctctctccatggactgcttcatgacagtctgccttg

SEQ ID NO: 878327 - DNA, 120 bp, Artificial Sequence
  ENSG00000255043_14 (sequence is synthesized)
ccgctcatccagctgaatcccacgtgtcatgctgaaaggtcttgtgcagtgaccttctgggtgtctccatggctgtttgtgacataatagccatcaaggaaacacaccacttagtgtggc

SEQ ID NO: 878328 - DNA, 120 bp, Artificial Sequence
  ENSG00000255043_15 (sequence is synthesized)
agtacaggccttccttcttctctctctccccactccatctgcatgacccgacccaccccacctcaaggcatggttaattgttcattagtgacacctggcccaagttgacccaatgaatct

SEQ ID NO: 878329 - DNA, 120 bp, Artificial Sequence
  ENSG00000255043_16 (sequence is synthesized)
ctccctctgttgggatttttaaactcaggactaagtgattccatctccgcttctttctacatactctctccaaaaccacatatgcagtgtctacagctctaagtaagaaatcctgggagt

SEQ ID NO: 878330 - DNA, 120 bp, Artificial Sequence
  ENSG00000255043_17 (sequence is synthesized)
tcaggcttggagtccttgacagattggaaactccagatttctatgacagtaggattgaagccttgaaagatcttaatgtcaccatcatgagcctaaaagagatctttgaaaaagatacta

SEQ ID NO: 878331 - DNA, 120 bp, Artificial Sequence
  ENSG00000255043_18 (sequence is synthesized)
catggatcatatgtgtctttcacagagcagaaatttttaatttccagccattatattccttgacattcacctcaaagacttgaaaattatgtccatacaaaaacctgtacatggatattt

SEQ ID NO: 878332 - DNA, 120 bp, Artificial Sequence
  ENSG00000255043_19 (sequence is synthesized)
attgcagctttatccacaattgccagaacttgtaagcaaccaagacatccttcagtaggtgactgtatccattgtggtacgttcaggctatggaatattgttcagcactaaaaggaaatg

SEQ ID NO: 878333 - DNA, 120 bp, Artificial Sequence
  ENSG00000255043_20 (sequence is synthesized)
agctatcaagccatgaaaaacatggaggaaactcaacacatattactaagtgaaggaagacaatctgaaaaagctacaaattgtatgattccagccacatgacgctctggagaaggccaa

SEQ ID NO: 878334 - DNA, 120 bp, Artificial Sequence
  ENSG00000255043_21 (sequence is synthesized)
actatggagaccgtaaaaagatcagtgtttcctgggagtaggaaggcgggagagatgaataagcagagcacagaggacttttagggcagtgaaactactgtgtatgataccataatggtg

SEQ ID NO: 878335 - DNA, 120 bp, Artificial Sequence
  ENSG00000255043_22 (sequence is synthesized)
gatacttatcattacacatttgcccaaacccatacaaggaacaacagcaagagtgaacctaatgtaaactatggactttgagtgattatgatgtgccagtgtaggttaatcaattataac

SEQ ID NO: 878336 - DNA, 120 bp, Artificial Sequence
  ENSG00000255043_23 (sequence is synthesized)
aaatgtgctactttggtgacagatatcgataatggaggaggctgtgtatgtgtggggggcaaggggtatataggaaatctctgttaacttctgctccattttactgtaaatccaaaattg

SEQ ID NO: 878337 - DNA, 120 bp, Artificial Sequence
  ENSG00000255043_24 (sequence is synthesized)
ctctaaaaagaggtctattcaaaaaggcattatataactcaatttaatcaatttaatcaagaccatgtttacacagtactttgtgtccacacatcatgatcataagaccaaaatcatgtt

SEQ ID NO: 878338 - DNA, 120 bp, Artificial Sequence
  ENSG00000255043_25 (sequence is synthesized)
ggaaactgaagaaagaaaattacctgacagtcttccaatccagaggcgaagtccaggtcccatctcctggaattctgataggttccatgcctacttcaactaacacaatgtggacactgc

SEQ ID NO: 878339 - DNA, 120 bp, Artificial Sequence
  ENSG00000255043_26 (sequence is synthesized)
cagtttccagagccaggacttatgaagctggcagtttgtattctccgctatttgaaatactgtctctgggagcaatggacttcaaactctgaagccaccatgctaatgtggctgcatgta

SEQ ID NO: 878340 - DNA, 120 bp, Artificial Sequence
  ENSG00000255043_27 (sequence is synthesized)
ggtgttctagccaatagttacaactcatatgtaagttgctttgctggagggatggcttgaaagcctgcctgaatttctgacccacaaagttatatcataataaaatgatgttatcttaaa

SEQ ID NO: 878341 - DNA, 120 bp, Artificial Sequence
  ENSG00000255046_0 (sequence is synthesized)
gccgacgagcgggattggtgccctgatggagccgggcctttgttttcttccgcttaccccggctgggagcgcgaacgctgtggggactggaggtgaggcggtggggcttaggatgcgcag

SEQ ID NO: 878342 - DNA, 120 bp, Artificial Sequence
  ENSG00000255046_1 (sequence is synthesized)
gagcccaacggtggtccgcagtcgggagagcagtgcggggctgcttcctccccacttggtcaataagtcgcccacgtgtccggcctcggtggctcctgccagccgggtgagctctgcagc

SEQ ID NO: 878343 - DNA, 120 bp, Artificial Sequence
  ENSG00000255046_2 (sequence is synthesized)
cgctctctgtagagcctaaaaccgtgaaaaggccgggccagcgccaagctgggcgtctttactgtaacacacccgagcacagcccagctcgcctgcccgccaccgccatccagccccagg

SEQ ID NO: 878344 - DNA, 120 bp, Artificial Sequence
  ENSG00000255046_3 (sequence is synthesized)
aaaaaggagctgaagccttagagagcctgtaacaggaatgtggaaacttctctcatcctagatctctccagccctagaaactactggctacccgtccaggcgtggtggctcacgcctgta

SEQ ID NO: 878345 - DNA, 69 bp, Artificial Sequence
  ENSG00000255046_4 (sequence is synthesized)
tgcacacacttgattataatccttccattttaaattcctccaatgaaatgtcttcgaatcaatggattg

SEQ ID NO: 878346 - DNA, 120 bp, Artificial Sequence
  ENSG00000255046_5 (sequence is synthesized)
ttaaattcctccaatgaaatgtcttcgaatcaatggattgatttaaaggaaatcaagccttctggcatagaataaaaacgtccttgccatttggcatctacatcctttgttgggatttca

SEQ ID NO: 878347 - DNA, 120 bp, Artificial Sequence
  ENSG00000255046_6 (sequence is synthesized)
gcggaaggagactggcgtgataacactctagaagctcattggaggccgagaaagaggccgacgagcgggattggtgccctgatggagccgggcctttgttttcttccgcttaccccggct

SEQ ID NO: 878348 - DNA, 78 bp, Artificial Sequence
  ENSG00000255046_7 (sequence is synthesized)
tttgcagtgagccaagatgacaccgctgcactccagccaggccaacagagcaagactacgtctccaaaaaaaaaaaaa

SEQ ID NO: 878349 - DNA, 120 bp, Artificial Sequence
  ENSG00000225195_0 (sequence is synthesized)
aggacaggatgaatgtatgagaatcatcttcttactgagaatggtaggacagaagggatagtttagccactatacttcctggaagaatcagtacttgagggttgctgcagctttttggga

SEQ ID NO: 878350 - DNA, 83 bp, Artificial Sequence
  ENSG00000225195_1 (sequence is synthesized)
tgaaggagtatgttcatttcctttggaagattaattttttccttttttttgacatggagtctctctctgtcgccctccagcct

SEQ ID NO: 878351 - DNA, 120 bp, Artificial Sequence
  ENSG00000255045_0 (sequence is synthesized)
ctttcagtaccaggattctttgggcggtgagtgccagagggccccagtcacccagaacccccaccccgagtcaaagcgctgaaatgagccccgcggcaggggccgtgttcattacctttg

SEQ ID NO: 878352 - DNA, 90 bp, Artificial Sequence
  ENSG00000255045_1 (sequence is synthesized)
atgcagagggagaaacaggatgaactcaaacacaggagataggagatgatttggatgaagtgataaagaaaaggcttcactccaaggacc

SEQ ID NO: 878353 - DNA, 120 bp, Artificial Sequence
  ENSG00000255045_2 (sequence is synthesized)
aagaagggaattatggtgatagctaccacttaagcacttaccttgttccaggtgcaataacggtgttttacaggcattattttatttagtcccccaaaataaagctattacgtacctttt

SEQ ID NO: 878354 - DNA, 88 bp, Artificial Sequence
  ENSG00000280655_0 (sequence is synthesized)
gtggactggacctggaggaacatcttggtggcagcagctacaggtgcgcactctcaggaccagtctgtcctcagtgaaggtctccttc

SEQ ID NO: 878355 - DNA, 120 bp, Artificial Sequence
  ENSG00000280655_1 (sequence is synthesized)
acatatgcacagaagttccagggcagagtcaccataaccagggacacgtccatgagcacagcctacacggagctgagcagcctgagatctgaggacatggccgtgtattactgtgcgaga

SEQ ID NO: 878356 - DNA, 120 bp, Artificial Sequence
  ENSG00000280650_0 (sequence is synthesized)
ctatgagtctggcaggaagctgaacagttttacaaattaggcaatcaagactcaggatttaagtgacttggactgaactggctcaatttcttcaaatatagagagtacaaagaaacctgg

SEQ ID NO: 878357 - DNA, 120 bp, Artificial Sequence
  ENSG00000280650_1 (sequence is synthesized)
tcaatcttactactgtccttgaaagaatgttttttcctaattcagcaaggcaaaactgttagcaaaagtgttcttcaacaagggatctgtgattgtatgttaaaaagctttctctaaggt

SEQ ID NO: 878358 - DNA, 120 bp, Artificial Sequence
  ENSG00000280650_2 (sequence is synthesized)
acttatcacttaagtaacaatgacctgattcatttttgttttttgtggggaattgtaacagtaaggaaatcatggttcttcactgttttagtgagataggtgaattttggaattgtgtac

SEQ ID NO: 878359 - DNA, 120 bp, Artificial Sequence
  ENSG00000280650_3 (sequence is synthesized)
caactgaggtaaggcaaaagtctacagtaaaactgttagaattctacttaaaaatatgaatagaaaatgcagaaaatcagtaaataaaaataaatctacagaccagttgcatgcagagtg

SEQ ID NO: 878360 - DNA, 120 bp, Artificial Sequence
  ENSG00000280650_4 (sequence is synthesized)
agtttgaatgtgtcatgtatgatgctgagttactgatgtgactctgagcacatgtgactctgtgggctcaccccataggacttggtattctctgctgggttcacactatctctaattagg

SEQ ID NO: 878361 - DNA, 120 bp, Artificial Sequence
  ENSG00000280650_5 (sequence is synthesized)
gaacatttaagcttatgtttactgtgttagagaacatcgacttaaatctaccctattaacaaatagagtttctcaggttgttttgttgctttgctctgccgaagttcaatttagaccatt

SEQ ID NO: 878362 - DNA, 120 bp, Artificial Sequence
  ENSG00000280650_6 (sequence is synthesized)
tctaattaaattaaacgtgaatgagagaagactgttagaagaggtaaacattctcagttcttccagaattcttcctaaaaagtagctgaaccaccctttccctggggtttagcagagatt

SEQ ID NO: 878363 - DNA, 120 bp, Artificial Sequence
  ENSG00000280650_7 (sequence is synthesized)
gtgagttgcctcatggaaggcaggggccatgctttattgacaatatttatttccagaacctcaatgaggacaaagcttataaaaagcattcagtacacactggctgaataaaccaatgag

SEQ ID NO: 878364 - DNA, 120 bp, Artificial Sequence
  ENSG00000280650_8 (sequence is synthesized)
ctgcagtctggaagccttcccgggacagactctctggactttagtaaaatagagagcttccttggaggtccccacacacttatcttgacagtgaccttattggtttgtaatgaattgttg

SEQ ID NO: 878365 - DNA, 120 bp, Artificial Sequence
  ENSG00000280650_9 (sequence is synthesized)
ttattggtttgtaatgaattgttgatgtttctttcccactagaaaattatctcccagaagttattttttgtcagctgtgaatctctataatctgtgaacacacacacacacacacacaca

SEQ ID NO: 878366 - DNA, 120 bp, Artificial Sequence
  ENSG00000280650_10 (sequence is synthesized)
gaattgtagaggttttttatgtctagacttcttatactaagagggtaccatagacagcatataggcatgaaacaattaactcaaaagcaaaaattttattaagacagaactgagacgagg

SEQ ID NO: 878367 - DNA, 120 bp, Artificial Sequence
  ENSG00000280650_11 (sequence is synthesized)
gttccagtatcttgagagtctcccctggccagtgtttcttgtctccttcacctatgcacccatctgacaatttaaaaaactaaagcttggagattcatgttggcaattttttattattag

SEQ ID NO: 878368 - DNA, 120 bp, Artificial Sequence
  ENSG00000280650_12 (sequence is synthesized)
tgtacgtggtatatatagcttttccgcaatttggttggagaaatgttttgctagcttcccagaaactagcagccttcaccaaagtgggggctgtcttaaggtgtgcccccttaccttggg

SEQ ID NO: 878369 - DNA, 120 bp, Artificial Sequence
  ENSG00000280650_13 (sequence is synthesized)
ataaagctatgtgctatggaatcacacaagcccgtgtttgtatttttttcattttaatttttaaacacttgcataaaattaaggggtaaagtgcagtttggcttcatggatctattgctt

SEQ ID NO: 878370 - DNA, 120 bp, Artificial Sequence
  ENSG00000280650_14 (sequence is synthesized)
taggggaagtctgggcttttagagtgaccatcacttgcataatgtacattgtacccattaagtaatttctcatccctcaaccccttccaacctccaacccttcttagtctctagtgtgat

SEQ ID NO: 878371 - DNA, 120 bp, Artificial Sequence
  ENSG00000280650_15 (sequence is synthesized)
tgttccacactctacatccacattatttagctctcccttatttagctcccctgtatacattatttagctcccccttatgaatgagaacatgcagtgttggattttcagaaagcctttctg

SEQ ID NO: 878372 - DNA, 120 bp, Artificial Sequence
  ENSG00000280650_16 (sequence is synthesized)
agccttggttttctcatctgtgtaagtgggatttgaatgccttcctgagggactctcaaccctagcttaacccctctcctctcctccctccctgcactaatgcctgtggctctcttctgt

SEQ ID NO: 878373 - DNA, 120 bp, Artificial Sequence
  ENSG00000280650_17 (sequence is synthesized)
ctgctagggtgggatcgaaagttaaaaatatcagcatatttcaaccttatttcagttttcttgacattgttttagaaacttgagtgttactcctccctttaccacagctaggttatcgtg

SEQ ID NO: 878374 - DNA, 120 bp, Artificial Sequence
  ENSG00000280650_18 (sequence is synthesized)
ttctttcacagtgcttttagtgttttttttcctatgtcattatgttctgtgttagtctgccccgcaagactctaagctttatgatgattagagactttgtctgctttatttatgcatgcc

SEQ ID NO: 878375 - DNA, 120 bp, Artificial Sequence
  ENSG00000280650_19 (sequence is synthesized)
taacaatcagttttgaatcttgcacaaatgttgagtgcacggttaatgagggaatatgtagtgtttgggttaaaaggcatgagctccacagcaagcctgagcgtggagtcagtgagctga

SEQ ID NO: 878376 - DNA, 120 bp, Artificial Sequence
  ENSG00000280650_20 (sequence is synthesized)
ggtgaatgggaccatctccagtttcaagatgatcttatcgggatcaaactgatgtaaaaaatcttattttgtactacaataaaagtttaaaactgaaaaaaaatcatgtaattgaaatta

SEQ ID NO: 878377 - DNA, 120 bp, Artificial Sequence
  ENSG00000280650_21 (sequence is synthesized)
aaaagtttaaaactgaaaaaaaatcatgtaattgaaattaaatgagctttttttgttttctgtggttcataacaaaatacttgaaactgggcagtttataaagaaaaggaatttatttct

SEQ ID NO: 878378 - DNA, 120 bp, Artificial Sequence
  ENSG00000280650_22 (sequence is synthesized)
tcttgctggtagggactctctgtagagtcccgaggtgacacagggcatcacacggtgaggggctgagcatgttagcttagttctctcttcctcttcttatgaagccactggtcccatgcc

SEQ ID NO: 878379 - DNA, 120 bp, Artificial Sequence
  ENSG00000280650_23 (sequence is synthesized)
attaaaacccattaaaccattaacccaggaattaagtttcaacatgagttttggaggcgacaaatattcaaatcatagcattgatttgaatatttgtagggctctacaacaaggccactg

SEQ ID NO: 878380 - DNA, 120 bp, Artificial Sequence
  ENSG00000280650_24 (sequence is synthesized)
tgtcacccaggttagtaaccaataaaacatacatttttcattagtgtctctcagttgctgaagtatgaggaccctgactgatagctttcatctgtattattggtggtcgggatgatatta

SEQ ID NO: 878381 - DNA, 120 bp, Artificial Sequence
  ENSG00000280650_25 (sequence is synthesized)
ttttatatgtcctaaacagcaccaaatataaagatctctataatgtccttaaattttttttttaatttagcttttaaagttatttgaggtttgtagattttgctgtttatctcacaaaat

SEQ ID NO: 878382 - DNA, 120 bp, Artificial Sequence
  ENSG00000280650_26 (sequence is synthesized)
aactctgtttcagttactctgtcttggacttactattttcaccagttgaaatgtgttgtaggaatactggatggaattcagcatatgtaagttctaggcccatttttcttttttagcaaa

SEQ ID NO: 878383 - DNA, 120 bp, Artificial Sequence
  ENSG00000280650_27 (sequence is synthesized)
taagctttgccattatagttacatttacattacttatgccctgaaggcctaagtcttatttgtgtagtgaataggaacacacacacacacagacacacagacacacacacatttatcaaa

SEQ ID NO: 878384 - DNA, 120 bp, Artificial Sequence
  ENSG00000280650_28 (sequence is synthesized)
atttgataatatgtaattaatttagtattatcaacttgggaattactgaattcttttgctgtgcataaagattattgaagagcagcatctactcccttagaattttcacatctagtattc

SEQ ID NO: 878385 - DNA, 120 bp, Artificial Sequence
  ENSG00000280650_29 (sequence is synthesized)
tttctttatattgttaaaataattttaataatgatctaaattggatataaattcaggtaattattgccatcattttgtataagtactgtcgtatctggtactagttgtctctgacagcaa

SEQ ID NO: 878386 - DNA, 120 bp, Artificial Sequence
  ENSG00000280650_30 (sequence is synthesized)
aataaaacatgatgatcaatattttggattgatttttttctgctgggacgatgtgagcatacactgattagagctgatttttgctgctgatcagtctctatgaggcaaaatttcaataat

SEQ ID NO: 878387 - DNA, 120 bp, Artificial Sequence
  ENSG00000280650_31 (sequence is synthesized)
tgttttgtttttaggtgactttcttctctgatgtccagactgatttgcagattgcaaagatccactcttataatagaaagagatgccattagattagaaaaaaagccacttatcacagga

SEQ ID NO: 878388 - DNA, 120 bp, Artificial Sequence
  ENSG00000280650_32 (sequence is synthesized)
attacgtgctaacacagtggttcaccttaatgttctctctttataatgccccctttcaagatgtgcataattgatattgccataagcactctcctattctttttgcacagctaaaagaat

SEQ ID NO: 878389 - DNA, 120 bp, Artificial Sequence
  ENSG00000280650_33 (sequence is synthesized)
agagtggattagaatacagagtaaagtctcaggattgcacaacagaattaatcctgttctatgtcataaaatattgcattcattagaaatgaatattttcattgcaaatgaactgagacc

SEQ ID NO: 878390 - DNA, 120 bp, Artificial Sequence
  ENSG00000280650_34 (sequence is synthesized)
ggcaggtagacggagtgattccttttattttgtttctcttagaaggaatgattccaacaaatggtaaaaatacaactaaggtttggcatgtgccaatcacctatttcacaatgtattttt

SEQ ID NO: 878391 - DNA, 120 bp, Artificial Sequence
  ENSG00000280650_35 (sequence is synthesized)
cacacacacacacacacatatatgtatatcacaaagtaacccttttctcttgtggcagtatctccttaggtcccattcatttttagaacccacatgtattcttagcaccctgtgatactt

SEQ ID NO: 878392 - DNA, 120 bp, Artificial Sequence
  ENSG00000280650_36 (sequence is synthesized)
tattcttagcaccctgtgatacttgctaccagagtgaacatattttcccagccacaacctgattgcatgttctggattatactcatattctccagaaataatttaaggattgagttcaat

SEQ ID NO: 878393 - DNA, 120 bp, Artificial Sequence
  ENSG00000280650_37 (sequence is synthesized)
aatcgtgctcccgaggtgggtgccatctgaaatctaacccataatgtttacctgcggtgatgatcaagaacctctcttgagagaattaggcccttagggatattttagagcaacgtttag

SEQ ID NO: 878394 - DNA, 120 bp, Artificial Sequence
  ENSG00000280650_38 (sequence is synthesized)
attttttaaataacaaaaatcatgatcaagaacatctgttgaaagaattaggcctttatggatattttagagcaatgtttagattttttaaataacaaaaatgctaatgagaatgatgat

SEQ ID NO: 878395 - DNA, 120 bp, Artificial Sequence
  ENSG00000280650_39 (sequence is synthesized)
ggattctgcttgttgagtgctttttgtcttcataaatttccatgagaaaggtgttaatgtgtccattttatgaattagtcatctgacactcagaacacctaaataacttgctggaggtca

SEQ ID NO: 878396 - DNA, 120 bp, Artificial Sequence
  ENSG00000280650_40 (sequence is synthesized)
cacagctgggtgagcgacggagccagaatttgacctcagcactgcctgattatgaagctgtgtgttctgtctgctttcagctgctgcctcttatttccagttccaaggtcagtctaaaac

SEQ ID NO: 878397 - DNA, 120 bp, Artificial Sequence
  ENSG00000280650_41 (sequence is synthesized)
caaacacccacatatgttgaatccttatgctgaaggcaggtggtgccatgggcttttcagggtgagtggtttatttttcaagaagcacagagaattaattcattaagtggaacttgagag

SEQ ID NO: 878398 - DNA, 120 bp, Artificial Sequence
  ENSG00000280650_42 (sequence is synthesized)
gctactcaaatatctgagctgctgagaagttcaacctttttaattatctggagtgagacttcccacaatgttaaaccttcagaatggtgccagactcagaagctcctctgcagtgattct

SEQ ID NO: 878399 - DNA, 120 bp, Artificial Sequence
  ENSG00000280650_43 (sequence is synthesized)
gaattgacagaatacagtcaaatagccaagatgaagtcaagatctgaacattccaaccagcgtgttgcaatggttctgccacacaggaaaaaggaaaggcgggcttttgttgctagtgaa

SEQ ID NO: 878400 - DNA, 120 bp, Artificial Sequence
  ENSG00000280650_44 (sequence is synthesized)
gggataatgaccaattaaaaaaataaaactgagcaaagagagacaaagaaggaaatgagacagggaaagagagaacatagagatgagcataaaaattgcagagaaagtgagtaaatgtag

SEQ ID NO: 878401 - DNA, 120 bp, Artificial Sequence
  ENSG00000280650_45 (sequence is synthesized)
tgtcagaaaagataaaaaaaggtgaaatattttgtgtaagggatgacaacagggtgtcaagtgacagctattctaagagcacaaaagaaacctgagactaaagaaagaaatcatttttgt

SEQ ID NO: 878402 - DNA, 120 bp, Artificial Sequence
  ENSG00000280650_46 (sequence is synthesized)
gattaagagaaggattaggaaacaaaaaacaatttaattattacagataatattgctaagtattttcgttacacatatgaagtacttctgcgtgtgatatttcatttaatcccctcacaa

SEQ ID NO: 878403 - DNA, 120 bp, Artificial Sequence
  ENSG00000280650_47 (sequence is synthesized)
tattcctgcgtaattggttaagtggatatttcagactttatttcagaaatatagaaacttagtgcttgatttgtctagtttctaaaataagtggtagagttgaaacaagaaaatgtgtgt

SEQ ID NO: 878404 - DNA, 120 bp, Artificial Sequence
  ENSG00000280650_48 (sequence is synthesized)
tttttttcactaggtgctgctagacatccttgtgtgatgttaaaagtacatctgccataacatggctttaccacgtatgcttgggggcatttaattactgggctagtctggtcttctttt

SEQ ID NO: 878405 - DNA, 120 bp, Artificial Sequence
  ENSG00000280650_49 (sequence is synthesized)
gaaatacccctaggggatagcgacatgtaaaaagtgcagcactgagtgtatttcaactattgcattttactaacctgagattgtcagggtgcttttattataaaatggagatcaagtatg

SEQ ID NO: 878406 - DNA, 120 bp, Artificial Sequence
  ENSG00000280650_50 (sequence is synthesized)
gaaaaaaggtattacttctgttactaccgctttggtggttatagaaggtgatgaactgaaacatcaggacctgtggattttgcaacagagacaaggccaaactggctcacctgcagaata

SEQ ID NO: 878407 - DNA, 120 bp, Artificial Sequence
  ENSG00000280650_51 (sequence is synthesized)
aacaaagggtaatgtctataaagagaattgtgaataacggtgcttatctgttgttcctgtctacccaggatctcttttctcatcttcttggttgtgaatacattaggtggggttgactca

SEQ ID NO: 878408 - DNA, 120 bp, Artificial Sequence
  ENSG00000280650_52 (sequence is synthesized)
tctccccttctctatccaacatagattggcatatgctttgcactgggccagtgttctccttggctactttctgccagagtacatggaaaaaacaggtattgctcagttgtatagggatct

SEQ ID NO: 878409 - DNA, 120 bp, Artificial Sequence
  ENSG00000280650_53 (sequence is synthesized)
ggggttgccacttaccattttatccatgccatggtgggagcctgatggaaaacccaggacaggtggagcccttggccccactgattgagcctccagaaaataggatcgcctgaatccttg

SEQ ID NO: 878410 - DNA, 120 bp, Artificial Sequence
  ENSG00000280650_54 (sequence is synthesized)
gacttgccatttggggtaacaaataaatcctcaagctagtataagttgagatctggtcactgtaaatcagtcaaatacaaatgcaggtagctggtgcatcataataataaccaacactta

SEQ ID NO: 878411 - DNA, 120 bp, Artificial Sequence
  ENSG00000280650_55 (sequence is synthesized)
ttgaatgtatgctatactagtaagcattctttaatcacttcattctcgcagcaatcctatgacgtgcatgtccattactgtctccatttcacaggaagaaacagagacagacttgttaga

SEQ ID NO: 878412 - DNA, 120 bp, Artificial Sequence
  ENSG00000280650_56 (sequence is synthesized)
tgacttgttaaagatcagagataggaagaagcagagctgggatttgaactcaggaagtctagctgtactctgtgaactctagtcattctctatctctctttgtgtatatccccttgccat

SEQ ID NO: 878413 - DNA, 120 bp, Artificial Sequence
  ENSG00000280650_57 (sequence is synthesized)
atatgtgtaaatgcctttatctttctatatgtgtatctatatctgtctgtatgttatctctctgaaatatgcaaattattggcaagaattgaatttatgttacaaattagaacattaatg

SEQ ID NO: 878414 - DNA, 120 bp, Artificial Sequence
  ENSG00000280650_58 (sequence is synthesized)
ttggttctgtgcatggaaattagtatctcaaatttcatcccagtgtcatggacaagaatagaaatttctattagagcttaaaaagaaactatagatctatgagtgttttgaaaagagcac

SEQ ID NO: 878415 - DNA, 120 bp, Artificial Sequence
  ENSG00000280650_59 (sequence is synthesized)
aataggaaaattaaaataagtataatattgaagcatccatattatatgacattaagtctcagtaagagactgagttagctgatcaaatcttttagcagtaaaaacaaaacaaaacagaca

SEQ ID NO: 878416 - DNA, 120 bp, Artificial Sequence
  ENSG00000280650_60 (sequence is synthesized)
aaaaaacagaggcaatcacgtataagcactagggcatatttaatatgactgttattgaggagaagactgcagttgggaagaatctttgaacagatacttactaaaaactaaaatattttg

SEQ ID NO: 878417 - DNA, 120 bp, Artificial Sequence
  ENSG00000280650_61 (sequence is synthesized)
tgagtcagaacatttagccaatccagctactaagatatttcaaagtcgaatgagttatcacaaagctagaagacaaaaaacactgtactggggaagctgtctaatttagttaatccagtt

SEQ ID NO: 878418 - DNA, 120 bp, Artificial Sequence
  ENSG00000280650_62 (sequence is synthesized)
aactaacttaggcagttagtgagtctggtgccaagctacatgtcgaatcgaaagggttaagtttttcaccttgcatcactgatataaggtgctcggaaaagtaaattttattactaagaa

SEQ ID NO: 878419 - DNA, 120 bp, Artificial Sequence
  ENSG00000280650_63 (sequence is synthesized)
gtgtcaagctcctatgtaacttccttttgcaagaaaaaaagcaagaaaagtaggtaaacacttaaaaaaatctgctcttatgcttttggaaaaaagaattttctaagaatcgtggttatg

SEQ ID NO: 878420 - DNA, 120 bp, Artificial Sequence
  ENSG00000280650_64 (sequence is synthesized)
atttaggacagaggtaagcaaatgggccaaatctggcccaccacctgttcttgtaaggcctgtatacttggaacgatttttatgtttataaatggttgataaaagttacaagaagaataa

SEQ ID NO: 878421 - DNA, 120 bp, Artificial Sequence
  ENSG00000280650_65 (sequence is synthesized)
tattgttacttgtgaaaattatatgaaatttaaattttaatgtccatacataagttttattggaatatagccacactaatttccatattgcctatgactgcttttgtgctatgccagcag

SEQ ID NO: 878422 - DNA, 120 bp, Artificial Sequence
  ENSG00000280650_66 (sequence is synthesized)
agttgagtaattgtggtaaagattgtataacctgcaaagcctaaaacatgtactggtcctttacagaagcaatttgccaaccctctatttggataatagagcaatggtattgggaggtac

SEQ ID NO: 878423 - DNA, 120 bp, Artificial Sequence
  ENSG00000280650_67 (sequence is synthesized)
ttgaaatgttgtaaggaagcagagttagtgcctagaaacaaacaaagtgacaaataagtaagtatatgtgggtaggttttaaacatccttcctattgtcttgatattgtttcctgaatta

SEQ ID NO: 878424 - DNA, 120 bp, Artificial Sequence
  ENSG00000280650_68 (sequence is synthesized)
aaaccgtaaaccaaaattgcatccaaatatgcagtgcagttttagaacctctttttttttttgaatctttattctatttattaccaatatgataagttatacaacctttctcagccttgg

SEQ ID NO: 878425 - DNA, 120 bp, Artificial Sequence
  ENSG00000280650_69 (sequence is synthesized)
ttttctcaatggaaaaattacagaaataattctcttttttgtgacaagtttacacaaccttctttgggaggtgatgtagtgggttatcaatttcagcataacatagaacacatgtattta

SEQ ID NO: 878426 - DNA, 120 bp, Artificial Sequence
  ENSG00000280650_70 (sequence is synthesized)
ataatagaatgacttcatgaacactgtgtcctgttgaaatatgtagtctcataaagataaagcagggacatatttgggttttggaatgaggttttcttaaaatacccatgtaaattctga

SEQ ID NO: 878427 - DNA, 120 bp, Artificial Sequence
  ENSG00000280650_71 (sequence is synthesized)
aaacgtagccattcttggacttcattcacctcatcaatggacttggaaaaggaagcaggattcaaaaaatgaaggtcagctagcaggaagattatgatccccattcaccattgtactgca

SEQ ID NO: 878428 - DNA, 120 bp, Artificial Sequence
  ENSG00000280650_72 (sequence is synthesized)
atctagaaattgcagttctggtgtggacataggagaggcaaagaaaagagtgctaaaaaagggccaagtaattccatattttggagttgactgtcagattgttgtgcttatgctgtttgt

SEQ ID NO: 878429 - DNA, 120 bp, Artificial Sequence
  ENSG00000280650_73 (sequence is synthesized)
ctgtttataattaccaaccagctttttttcttatctctacgtttataaattctacccatgtattatatttatttaaaaacatttgaagcatataacgtatacaaaatgtatatctcactg

SEQ ID NO: 878430 - DNA, 120 bp, Artificial Sequence
  ENSG00000280650_74 (sequence is synthesized)
tgcaggctgaagaatgataatcaatttttccatgtacccatctttaatctctcaaacactgtttcctctgtgttcttaggaaatactttttctattttctattctaattgcttgtgtata

SEQ ID NO: 878431 - DNA, 120 bp, Artificial Sequence
  ENSG00000280650_75 (sequence is synthesized)
tgtgtcctaaattcttctgaaatactgtgagtttcttcaatgcatgattcttgactcattcatgtttggttcccattaccttcaacatgtaaggatgtaaataaatatgtgtagagtgag

SEQ ID NO: 878432 - DNA, 120 bp, Artificial Sequence
  ENSG00000280650_76 (sequence is synthesized)
tgagtgaatgcattgcaagctctctgtggtgagaactcatttattatcttactattcctttcagttactatgcttaggggcaattaacaaatgttggaattgaatgcattgaaaggtcct

SEQ ID NO: 878433 - DNA, 120 bp, Artificial Sequence
  ENSG00000280650_77 (sequence is synthesized)
gttagtctgtctaggcacctcttgaatgtttgtgcaaggcactgtgctgtgttatgtgttgttcattcatgttcatgaaagtaataaaatataaaacttactgaggagtttgagactatc

SEQ ID NO: 878434 - DNA, 120 bp, Artificial Sequence
  ENSG00000280650_78 (sequence is synthesized)
ctgtctgttcattgaagacctcatattgtcatattacttgcaattgtaattgtcgtattctttctttctctttccagctatttctggtagtcatgtcaagttgagtttatatgctaggtt

SEQ ID NO: 878435 - DNA, 120 bp, Artificial Sequence
  ENSG00000280650_79 (sequence is synthesized)
tgatgaagaggcagcatggagtgtgattggaaaaatggagtgtgatctaatggaaataaactggggagaacttagcagggccagttggttcagattctcctctgtatcctgtttcttcag

SEQ ID NO: 878436 - DNA, 120 bp, Artificial Sequence
  ENSG00000280650_80 (sequence is synthesized)
agataggattttgctttcttctgggaatatggaagccactctagaatgagggtcttatgacccacttcaagggaaggtcagaaaaatccttcctggattttaggaccaaatttgagggga

SEQ ID NO: 878437 - DNA, 120 bp, Artificial Sequence
  ENSG00000280650_81 (sequence is synthesized)
aggtgagaatgaccttcctgcttctgctatagtctccaatgtcaaggtgccatatttttgggctaacatgtcttaaaccccatcaaactgtattatctaatccttggtttcctcatctgc

SEQ ID NO: 878438 - DNA, 75 bp, Artificial Sequence
  ENSG00000225226_0 (sequence is synthesized)
gagagcacagcaggagggacaatgatcagcatataaacccaggcatctgagccagcaacagctactattaaatct

SEQ ID NO: 878439 - DNA, 120 bp, Artificial Sequence
  ENSG00000225226_1 (sequence is synthesized)
tttgtatgggagctctgtcttcactctattaaatcttgcagctgcactctcttttggtctacatttgtcatggttcgagctgagctttctctcgccgtccaccactgctgtttgccgctg

SEQ ID NO: 878440 - DNA, 120 bp, Artificial Sequence
  ENSG00000225226_2 (sequence is synthesized)
gctgtcgcagacctgctgctgacttccatccgtccagatccggcaaggtgtctgctgtgctcctgatccagcgaggcgcccattacagctcccagtcgggctaaaggcttgccactgttc

SEQ ID NO: 878441 - DNA, 120 bp, Artificial Sequence
  ENSG00000225226_3 (sequence is synthesized)
ctgggagcaaggaccacctggtaacaataggccaaatactgtgctgataagcttgaaagcctgccctgaatcctcatctattgatggagatggtgtcatcttgccttgattgtatccaga

SEQ ID NO: 878442 - DNA, 120 bp, Artificial Sequence
  ENSG00000225226_4 (sequence is synthesized)
tctctccgatgaccagcttcttttgctcgactctagagaaggttgctttctgcattctggcaactgccctctgtctacatgattagactcgttggttgcagtgctttctggagtaatgaa

SEQ ID NO: 878443 - DNA, 120 bp, Artificial Sequence
  ENSG00000225226_5 (sequence is synthesized)
gggatccagtgcacagggtttaacttactgggcacaatctctaagccaactctgcctgaatgggtcccctgttttttctcttctgctcttgttgaaccatatctctgttccttgtgctcc

SEQ ID NO: 878444 - DNA, 120 bp, Artificial Sequence
  ENSG00000225226_6 (sequence is synthesized)
tgggaatttcttgctctgtaagggtaaataagaacatgctaaccaaataatcaaaacaaatggtcatgaaaaaaatggaaactctctcaaggaataacaatcagagctgtctggttgaca

SEQ ID NO: 878445 - DNA, 120 bp, Artificial Sequence
  ENSG00000225226_7 (sequence is synthesized)
agggacattatggttgcaagaagaccctgaagcaaggattctacatcaaagattcaggggcaatctgagtttgcatttaagatccttctgcctatagcagtagcttatatgttatgttca

SEQ ID NO: 878446 - DNA, 120 bp, Artificial Sequence
  ENSG00000225226_8 (sequence is synthesized)
attgacgtataagcactgtgaagaaatattctattacaacctcttatgacattagcattgtatatttcagaatgtaattgtagacagaaagttggtatatttaattcaaattatgattat

SEQ ID NO: 878447 - DNA, 120 bp, Artificial Sequence
  ENSG00000225226_9 (sequence is synthesized)
tctttaaaaacaaaacttgaaaattcagtttatctacataattggcttaagtatttgttgcatgcctattccataccaagcaatgagcaaggtgttataaaataaaacatacaaaaacta

SEQ ID NO: 878448 - DNA, 120 bp, Artificial Sequence
  ENSG00000225226_10 (sequence is synthesized)
atcttgggagctctgggagcaaggaccacctggtaacaataggccaaatactgtgctgataagttattgctcaatgttcagactcttgcttcaagatcaactgaagtgctttcttgaaag

SEQ ID NO: 878449 - DNA, 120 bp, Artificial Sequence
  ENSG00000228484_0 (sequence is synthesized)
ggggaacctcacaagcaggcagagagcacacctgagacacaaggacaaattaaagccagtgaataaaactaaaggtcactttaaaggagtataaagctacagtggacataacgtggcata

SEQ ID NO: 878450 - DNA, 120 bp, Artificial Sequence
  ENSG00000228484_1 (sequence is synthesized)
ggtgatcttgacaccacagaactgtgaagcctgcaatcctacaatatagaggggtatgaggaagacatctcaggatactgaagagtgttgcagaggacccacaaatagtcctgagcatga

SEQ ID NO: 878451 - DNA, 120 bp, Artificial Sequence
  ENSG00000228484_2 (sequence is synthesized)
gatggtggacaacaaacccatttttggtgtgggtgttgcagcaagagcgctggcctgccatgatctgctacattctacctggaaatacaagtcagaagtcagcctgtcatattttttcaa

SEQ ID NO: 878452 - DNA, 120 bp, Artificial Sequence
  ENSG00000228484_3 (sequence is synthesized)
ggtcccagctactcaggagactgagatgggaggatcacctgagcccgggaggttaaggctgcagtgagccaggattgggccactgcactacagcatgggtgacagagtgaaatgctgtct

SEQ ID NO: 878453 - DNA, 120 bp, Artificial Sequence
  ENSG00000228484_4 (sequence is synthesized)
caaaaaacaacaacaaaaaatctctcaatctgtccaaatagttagattgtcttcagtaatctttccatcgcgatcttgctttgtttctactactactctgatgctacataattaaggtca

SEQ ID NO: 878454 - DNA, 120 bp, Artificial Sequence
  ENSG00000228484_5 (sequence is synthesized)
taattaaggtcaccaatcgttgtcactgtctttccaaacctgttgttccttacttcctccggccattcttccttgtccccctcccattcatcatccagacacacacacacacacacacac

SEQ ID NO: 878455 - DNA, 78 bp, Artificial Sequence
  ENSG00000228484_6 (sequence is synthesized)
attaaagccagtgaataaaactaaaggtcactttaaaggagtataaagctacagtggacataacgtggcataggtgat

SEQ ID NO: 878456 - DNA, 120 bp, Artificial Sequence
  ENSG00000228484_7 (sequence is synthesized)
agtctcctggatgtgtctggacctactaggtttggttaacttgcctttgcactagtcttcctctccggaatatttctgtcccagatacatacatagcttgacccctctacttattcgtgt

SEQ ID NO: 878457 - DNA, 120 bp, Artificial Sequence
  ENSG00000228484_8 (sequence is synthesized)
tcgctatcctcttaccctgcttcattttctcttcactacatttagtcaccatttgatatattatatctcttttgtttattgattctcatccccaattacaatgcaagtgccatgaaaaca

SEQ ID NO: 878458 - DNA, 120 bp, Artificial Sequence
  ENSG00000228484_9 (sequence is synthesized)
aattcagactgaaaacacagtaactcctctggcccttgctgggaaatgtcctgcgcaggccatgggcagcactccagtgcagctgacctcccacaaggcccccaaacacatgatcccacc

SEQ ID NO: 878459 - DNA, 120 bp, Artificial Sequence
  ENSG00000228484_10 (sequence is synthesized)
aaaggcttgaacaggggaacctcacaagcaggcagagagcacacctgagacacaaggacaagtaagtcaagcaaatgggactgagattaaagccagtgaataaaactaaaggtcacttta

SEQ ID NO: 878460 - DNA, 120 bp, Artificial Sequence
  ENSG00000228484_11 (sequence is synthesized)
cattgctaactcctctcatctttccagagtgttcacgtctaccaggagtgttcttgtccctcccattcctttctactctagctccactcacagttctgtgtaatcccatcttgtggacta

SEQ ID NO: 878461 - DNA, 120 bp, Artificial Sequence
  ENSG00000228484_12 (sequence is synthesized)
acccgtgttaaaaagatttgtttgctgatttgattcttccctccactacacccccccataacacaaaatgagtcccttaaaagcagaaatgttgcctcactggtctccagcacccagtgg

SEQ ID NO: 878462 - DNA, 120 bp, Artificial Sequence
  ENSG00000228484_13 (sequence is synthesized)
agtatttggtatgaatgtcggtcgaactgtactctctccagtgtgcattttgttccaggaagactaggtaatagcaggagcattagaagcctcatcttcagggctgtttgacattgattt

SEQ ID NO: 878463 - DNA, 120 bp, Artificial Sequence
  ENSG00000228484_14 (sequence is synthesized)
tttaaaaaatacatttcctgaggtctcactagtgccagaatatgaaaaaaataatcattcttctctgactaaagtggaatcaccagtgatttattctctccttaatcagtaatactagct

SEQ ID NO: 878464 - DNA, 120 bp, Artificial Sequence
  ENSG00000228484_15 (sequence is synthesized)
aacatttatatagccctcactaggtcccaagcactttgaacatatcatcttatttcatgtctataaccaccttcaggtaggcactgttgttaccctccaatttacaaaggaggaaactga

SEQ ID NO: 878465 - DNA, 120 bp, Artificial Sequence
  ENSG00000228484_16 (sequence is synthesized)
agtgcagggaggttaagtaagtggcaagctagaatctggatacaggttgtctggttccagggaccaggcagttagccattatgctatgcggcatgatttcttgctttccttgcccttttt

SEQ ID NO: 878466 - DNA, 120 bp, Artificial Sequence
  ENSG00000228484_17 (sequence is synthesized)
tcttaaatgtttaattacataagtagcatatcaatacatttaaattgtcaaaaattcagaaacaaagcaaaaactcactactatttgatgggtatctttcaagatctttttctttgttta

SEQ ID NO: 878467 - DNA, 120 bp, Artificial Sequence
  ENSG00000228484_18 (sequence is synthesized)
catacatatatacattatgtgtgtgtacatatacacaaagaaatatgtatttttatgtaactggattatgccttatttttctatagatttgttttcatttaacaatttgtcttaaaggtc

SEQ ID NO: 878468 - DNA, 120 bp, Artificial Sequence
  ENSG00000228484_19 (sequence is synthesized)
ttttcatatcgatgcatattgatctattttattctttgaatgttgcatagtatggatatattccatagaatgggtgtaatatagtttaggtaaccatttttcttttgcgagtcatttatg

SEQ ID NO: 878469 - DNA, 120 bp, Artificial Sequence
  ENSG00000228484_20 (sequence is synthesized)
ttgtttctgatttcactgttacaaaccaggctgcactgagtatccttgaacatgtctcttcacattcatgcaactatacgtctaggaaagatcctcagaaataaaattgttgggatgaag

SEQ ID NO: 878470 - DNA, 120 bp, Artificial Sequence
  ENSG00000228484_21 (sequence is synthesized)
agctgcaaaatggtaactagaaaggaggaaaaaatacctcttcctccctcctggccagcccttccacagctcccggcagggcagccagcgcgagcccatcccccacgcctcccagcccag

SEQ ID NO: 878471 - DNA, 65 bp, Artificial Sequence
  ENSG00000228484_22 (sequence is synthesized)
ttcaaaaggtgacttgtcaaaatgagacttctttcataaaatcagtcggtggatggcttgagccc

SEQ ID NO: 878472 - DNA, 120 bp, Artificial Sequence
  ENSG00000228484_23 (sequence is synthesized)
ttttggtgtgggtaaaatcattagcgacatctttttctttttttttttttcagcagtttgaagatgtgtcattccatttattttttcataatttctgttaaaaagactgcagctgccctt

SEQ ID NO: 878473 - DNA, 120 bp, Artificial Sequence
  ENSG00000250532_0 (sequence is synthesized)
agtgctcctgagcttcttgtttgaggtcgcttcttccttgtgaagtgtactttcatttaaaataaatctgtgctttggcttgccttgcttgtgtgctttgttcagttctttgttctaaag

SEQ ID NO: 878474 - DNA, 120 bp, Artificial Sequence
  ENSG00000250532_1 (sequence is synthesized)
gccaagaacctggacaactaccctcaaccagtaacatgttttggcaagccagccaggagaggctgttgtgatatcctgcatggacaaggaaatgatgttcatctaatacacccacttggg

SEQ ID NO: 878475 - DNA, 120 bp, Artificial Sequence
  ENSG00000250532_2 (sequence is synthesized)
tggaaactcattttggaaaatgtgaaatgagtgatccccaaaagtagccttgctcatgattgggtgattatattaagggtgattttttttctttattgtatttagctgttttccattgtg

SEQ ID NO: 878476 - DNA, 120 bp, Artificial Sequence
  ENSG00000250532_3 (sequence is synthesized)
ttttttggcaacaaatataaaaagttatagttttcttatttttaaaagacatgttgcctcatagaagtagataatatcagaaaatgacttttttgtgtccaatggctccatctgccccta

SEQ ID NO: 878477 - DNA, 120 bp, Artificial Sequence
  ENSG00000244158_0 (sequence is synthesized)
gtgctgtttataccagatgaatctacaaagccaagaacaggaatcaccgtatctccttcagtagacctgatactatatgtcataacactgtcaatgcctggaggagagtaaaattctgac

SEQ ID NO: 878478 - DNA, 120 bp, Artificial Sequence
  ENSG00000244158_1 (sequence is synthesized)
tctgaccaccaagctgatctgcacagaaggggatacatgattattcaaagaatgctagttgaacccaaaatttcaaactgcagctacatctatctaatgttgtttcctccaccttcagtt

SEQ ID NO: 878479 - DNA, 120 bp, Artificial Sequence
  ENSG00000244158_2 (sequence is synthesized)
ttgagccttactctgtgtgactccagactgagctgaggtgtgcttgaaagaacatgggctttgaagtcaagtgcatcttgtctgtggtgtgtttaacaagtatgcccctctgagacacag

SEQ ID NO: 878480 - DNA, 120 bp, Artificial Sequence
  ENSG00000244158_3 (sequence is synthesized)
catccttatttgtaaaagaaggataatagtgcccacttttcaagattactgacatgagtagattgagtagcatatgtaaagtgcctttacatataggatatgtctgttaaatgaatgatc

SEQ ID NO: 878481 - DNA, 120 bp, Artificial Sequence
  ENSG00000244151_0 (sequence is synthesized)
agataggtgggggccaaagcactttactgcaggggcagtgggggaggagaagactttaaattattcacttaaataaaaaggagggaggggcatgggagggggaaccccatcccaccagcc

SEQ ID NO: 878482 - DNA, 120 bp, Artificial Sequence
  ENSG00000244151_1 (sequence is synthesized)
tgtcccctcgtccatcggtccctcggctgtccctcggtggcggctacacaggcatgggcatctcattgtactcgtccacaccctcccgctcatcaaacaccggctctgcctcgttagcat

SEQ ID NO: 878483 - DNA, 120 bp, Artificial Sequence
  ENSG00000244151_2 (sequence is synthesized)
ccagctgtgtgtggggaggtggcggtcaagaagggaagtgggggggcctttccagatccacagggaggcaagaggaaccgggggaggcagacgggagggcttacacatttcatctctcgg

SEQ ID NO: 878484 - DNA, 120 bp, Artificial Sequence
  ENSG00000244151_3 (sequence is synthesized)
tcggtgaagatacgggtgagcaccaccatgcggagcggcactgtgaggatgaggatgaaggggaaggccagggaggcagctgtggacatgacggcccagagcagggccaggcagagcagc

SEQ ID NO: 878485 - DNA, 120 bp, Artificial Sequence
  ENSG00000244151_4 (sequence is synthesized)
tgcagggccgtgaacaggtgcatacggagggtccggacctggggggcggagacaggtgccacagccttgctcatgacagtgagcgcgttggcgtgagtgacagagcggacagtggcagca

SEQ ID NO: 878486 - DNA, 120 bp, Artificial Sequence
  ENSG00000244151_5 (sequence is synthesized)
atgccgcccatggccacgatgagcagcaggtccaggtggaagccggagcccttctgcagcatgcgctccttcttggagatgatgagcctgagagcgggaggggtgctgctgaggcccagg

SEQ ID NO: 878487 - DNA, 120 bp, Artificial Sequence
  ENSG00000244151_6 (sequence is synthesized)
ctggactcagctccgcagaccacagggtctttccagaatgcccagccagtccctccatctggctttggaacctggcggtccctgtccattccgtcaggattcaaattccgttacagagca

SEQ ID NO: 878488 - DNA, 120 bp, Artificial Sequence
  ENSG00000244151_7 (sequence is synthesized)
aaacctgggcccccagcccttatcgtccatgacagctcccagctagcactgccagggtggcctgcccctccacgtgctgttcctgtcccagcaaacatcggggtttttctgctgtctaca

SEQ ID NO: 878489 - DNA, 120 bp, Artificial Sequence
  ENSG00000244151_8 (sequence is synthesized)
gaataaactgtggccatctgggcatccaaggttccctgaggtccctgggattgcccagtgtggctggaggttccatgctgagttccccagcctggcctggggctctggcctctcacaccc

SEQ ID NO: 878490 - DNA, 120 bp, Artificial Sequence
  ENSG00000244151_9 (sequence is synthesized)
ctttggctaggaccactcacgtggtgatctgtgtctccatgaagatgagaatgaagaccaggatggcgggcagcaggctggcaaccatcatccacacagggaaggggctcttctctccca

SEQ ID NO: 878491 - DNA, 120 bp, Artificial Sequence
  ENSG00000268505_0 (sequence is synthesized)
aacactccctgatgccagcccgggcatcaagttgaagccctttcaagcgatcatcggctccctgggaaatgccttttctctgttacctggcacagccgaacatcaagaagaaacgtggaa

SEQ ID NO: 878492 - DNA, 120 bp, Artificial Sequence
  ENSG00000268505_1 (sequence is synthesized)
aacatcacactgaccccccagaaaaatgaaagaaaagtacggaagagaccaattcccacccttgctatagacggaataagtatgtgcgtttgtgaaccttaagtgttcatctaaatatgt

SEQ ID NO: 878493 - DNA, 120 bp, Artificial Sequence
  ENSG00000268505_2 (sequence is synthesized)
tgcttcaacggagatccgcttgtggatacagacacacgaaaatacacgagaccacgctctattttaaggaattgctgaagagtgttgaacactcaaacccaccgcacagcaccctcgcag

SEQ ID NO: 878494 - DNA, 120 bp, Artificial Sequence
  ENSG00000268505_3 (sequence is synthesized)
ctaagagcacaattgaatgaaaccagcggattcatttattttaacctccactggagctgtcccaaaaaagcagggtgggcaatgccatttctgcagccgtccagggctctggcaaatgtt

SEQ ID NO: 878495 - DNA, 120 bp, Artificial Sequence
  ENSG00000268505_4 (sequence is synthesized)
aaggctgtcactgtagacagaatccccatggtctgtctgtgtgcctcgatagagtccgaagaaaaacattcctcgcattcctgacggttggtcctatctccgggccttggactcggccct

SEQ ID NO: 878496 - DNA, 120 bp, Artificial Sequence
  ENSG00000268505_5 (sequence is synthesized)
gcaggctcgtgtcaccccgtcaaacggcctaggccacggctaatctaaaccgctgccctccccagccagccctgcggcagggtgaaaactgggaccaatttgctgcctaaaccctgagga

SEQ ID NO: 878497 - DNA, 120 bp, Artificial Sequence
  ENSG00000268505_6 (sequence is synthesized)
tacagcaagtttgattctcgacctttaaggacaccagctgcaatttgttccgccgaaaagagcttagcggttctggcacattctgacaagatacattttatagggtttgtgctcaaattt

SEQ ID NO: 878498 - DNA, 120 bp, Artificial Sequence
  ENSG00000268505_7 (sequence is synthesized)
gatattggaagttaggattccaattttatgcctccagtgataacaatagcagctgggacctttaagaaatgtgtgtgtatgccttctattgaagagttacataacaaaagctatttatgt

SEQ ID NO: 878499 - DNA, 120 bp, Artificial Sequence
  ENSG00000268505_8 (sequence is synthesized)
caaacaccttataagggaaagatttagcctaaatgtcaacataacatataatactttttcatatttagataggacgaaaacatctgctatcagtgctgcatataatttttggtttggagt

SEQ ID NO: 878500 - DNA, 120 bp, Artificial Sequence
  ENSG00000268505_9 (sequence is synthesized)
attagatctgtgggggctttcaacatttcaagtaagcatctccttgccttaatttacgaattcatcgaggggcctttttttcaatattgtttctgtataaaaaacaaataccgatacatc

SEQ ID NO: 878501 - DNA, 120 bp, Artificial Sequence
  ENSG00000268505_10 (sequence is synthesized)
atgatttggttttccaagtccttctaatgaacgcacacaaaagaagggcacaatttcatgttgtttgatttgacatttgtaattcccaagcatgccatgaagccattcagtggtgcctta

SEQ ID NO: 878502 - DNA, 120 bp, Artificial Sequence
  ENSG00000268505_11 (sequence is synthesized)
taaaccgaggctgcttttgtctcctgaaaatggctgtggttttggagaggacctggctgaccagaaccttggtaattctgatgaaggaagagatcagccgctcaaggaagaaaacctttc

SEQ ID NO: 878503 - DNA, 120 bp, Artificial Sequence
  ENSG00000268505_12 (sequence is synthesized)
ccagcaaaggaacagcagcgcccagttcaagacaacatctgcagctcgattttggaggggcttaaattccctccagcttccctagtgacaccacagcaagctttctgagaaggaatccca

SEQ ID NO: 878504 - DNA, 120 bp, Artificial Sequence
  ENSG00000268505_13 (sequence is synthesized)
ccaccaaatagacaatgactcttgtttacaccagacgcttaggagtgaccacacgtgggcctgtgaggcaggcttggctggaaaatcccagcttccctcttagcttttctgctcagacgg

SEQ ID NO: 878505 - DNA, 120 bp, Artificial Sequence
  ENSG00000268505_14 (sequence is synthesized)
cagaacctaactgagatgggaagagaaccccaattagcaaagccagggattcgcctgcacccatgcatgtgccggttccgtccgtccccttgcttcaggtttctttgacgaattggacgg

SEQ ID NO: 878506 - DNA, 120 bp, Artificial Sequence
  ENSG00000268505_15 (sequence is synthesized)
tgtgaccacgggttaatgagaaagcccagtggacggcggcacgcacggtcatctggatgttctctgctcctgccccagcccctgagcctcccactgtggaccacagcccccgttggggaa

SEQ ID NO: 878507 - DNA, 120 bp, Artificial Sequence
  ENSG00000268505_16 (sequence is synthesized)
ggcaaaacgcaagttcaatttcttttgttctgaagtcacaacttggatgtaacagctcctaagccaatatgatctgaaaaagaactcactactgagctgcccccttcccacggtccgaaa

SEQ ID NO: 878508 - DNA, 120 bp, Artificial Sequence
  ENSG00000268505_17 (sequence is synthesized)
attgcttcagcctaaacggaaggcaatttccttttcttttataacaagagaaccgctaagcttctcttagtatttccacccagtgtcaccactaaataccagcacttacaaaaagatccc

SEQ ID NO: 878509 - DNA, 120 bp, Artificial Sequence
  ENSG00000268505_18 (sequence is synthesized)
tcgttgtgtcaactgccaggctgtctaatacgctgaattttaaatatgttggctacatgattattgtcagagagaatcatgctccagataaggaccaggaagtgcatctagagacagcat

SEQ ID NO: 878510 - DNA, 120 bp, Artificial Sequence
  ENSG00000268505_19 (sequence is synthesized)
gaatatttagaataaaaatgcgctgctccagaggtttctgcagagacttagatttgaaacaatggctttctgtgtgctgtgtcccatccactcagtgacattgatgctgactgtcattat

SEQ ID NO: 878511 - DNA, 120 bp, Artificial Sequence
  ENSG00000268505_20 (sequence is synthesized)
ctacatttcacatcagaggagatggaaggaaaggaagattcagtttcacaaggggagaacataacagatgaggctcgaaggtaaataataataattgtatgaataaccacctttacggag

SEQ ID NO: 878512 - DNA, 120 bp, Artificial Sequence
  ENSG00000268505_21 (sequence is synthesized)
ttattaccagatgccaggagttttctactcctgttataccatcatacgtggaaagactcatttgacccccacaacaacccaggaggagggactattattagcttcactttgtagatgagg

SEQ ID NO: 878513 - DNA, 120 bp, Artificial Sequence
  ENSG00000268505_22 (sequence is synthesized)
aaactgaggcagacagaggccagcccatcgctgaagaccaggctgctggagagtgacaaagtgtcagagtcaggagctcaagccaggctgtccactggcagagctggaaaaacaggagat

SEQ ID NO: 878514 - DNA, 120 bp, Artificial Sequence
  ENSG00000268505_23 (sequence is synthesized)
aaacatcagcagcgagagcccaggtcacactgcccgggatcacaccccagactgccaactgggtgaatgaaccattctgagccttagtttgctcttctataaaccggggagagcaatggt

SEQ ID NO: 878515 - DNA, 120 bp, Artificial Sequence
  ENSG00000268505_24 (sequence is synthesized)
ccctacctcatgggttttttattgggattgcataaaataggccctgaaaagtgctggacgtgcccggcaaacatgagtgctgtgcatgcggtctgggctggctgcccacctgcccaaagc

SEQ ID NO: 878516 - DNA, 120 bp, Artificial Sequence
  ENSG00000268505_25 (sequence is synthesized)
tcattcctctcactgaccaggtcatgactgcaacgtttgctccaggaatccatctgagaactctgtccatgttctcaaatgcctggatggcgaggtggctgagggcagtatcgtgcggtc

SEQ ID NO: 878517 - DNA, 120 bp, Artificial Sequence
  ENSG00000268505_26 (sequence is synthesized)
cccagcagccaggactcagcccagctgacctgtccccagccagcagaagaggatccgcagatgcccgcaggaaggggacgcattgccaggtccaccagctctcccacagacagctccagg

SEQ ID NO: 878518 - DNA, 120 bp, Artificial Sequence
  ENSG00000268505_27 (sequence is synthesized)
cctcactgctgagtctgtgtcctatatacaatgtcatctgagggtggcaccgaacacctggctggcttgctggccacccaccaccctttcagccaccctggctgccctctggtttctatc

SEQ ID NO: 878519 - DNA, 120 bp, Artificial Sequence
  ENSG00000268505_28 (sequence is synthesized)
gcgtctgttaaaaggcagacccctctggatgctttcctccactctttcaaagtgcccccaccctcacccttcaaacatcaagttgatggttgtaccatgagccacaggaacaataaacag

SEQ ID NO: 878520 - DNA, 120 bp, Artificial Sequence
  ENSG00000268505_29 (sequence is synthesized)
cccggaagccactccactcaaggtctcgaggccctcccgacagccggccgcctgccctgccacggaggctgggcagcacagctgggggcttgagagctggttcaaatcctgtgtctgccc

SEQ ID NO: 878521 - DNA, 120 bp, Artificial Sequence
  ENSG00000268505_30 (sequence is synthesized)
cctgcgagctatgtttgctcaggcaagtagcttgccctctctggatctagtttccctgtcctcaaaagcatgggcagacatgggcaaagtgctggcttgcaattctcaataaattacaga

SEQ ID NO: 878522 - DNA, 120 bp, Artificial Sequence
  ENSG00000268505_31 (sequence is synthesized)
ttatcagatcgctatttaactcaggcaacaaaaggaaaatacttgattgtgtggagagcaataactcttaaaaatggggtggccgccccataataagaaaagctagaaaaaaataaacca

SEQ ID NO: 878523 - DNA, 120 bp, Artificial Sequence
  ENSG00000268505_32 (sequence is synthesized)
cagacgcagtgatttggcagggtgatatacggaggaaattctgccatcaggaaacagtattgtccataggttttcttcctactttcttcctttaattactaaataaaatcttcaatcact

SEQ ID NO: 878524 - DNA, 120 bp, Artificial Sequence
  ENSG00000287831_0 (sequence is synthesized)
agttcccttcgtattgccctctcctttttaaaaattacatgtgtgcacagagagaccaccttttttaggactatgcattttcaggcttgtagcaataagtaagatcgaccaaggcaagtg

SEQ ID NO: 878525 - DNA, 120 bp, Artificial Sequence
  ENSG00000287831_1 (sequence is synthesized)
tttgtaaagacttcccaattggccctaaagttctagcatgtgattgcttcactcctggactgtgactttcactgggagatgtaagcttttcagagaactgaactgtggaaaaatgacctt

SEQ ID NO: 878526 - DNA, 120 bp, Artificial Sequence
  ENSG00000287831_2 (sequence is synthesized)
tccttaacttgaagatagctttaaaattagagtctagaccaaaagaagaggaatagcatattggagtcaagatgacagataaggtgagagtaatgactaactccaaagatggcttcactg

SEQ ID NO: 878527 - DNA, 120 bp, Artificial Sequence
  ENSG00000287831_3 (sequence is synthesized)
aaaagaatgcattttaagatctaaaaaataaaaatcttgtcagaagattccatcatcctgaatcataaatcagacaatgtgactctcttcctgtcctcaagatccttcaacatagccatt

SEQ ID NO: 878528 - DNA, 120 bp, Artificial Sequence
  ENSG00000287831_4 (sequence is synthesized)
ggaggagtatgattattttttagttattgaaggattgtaaggtaaaataaaagatgaatggatgaaaatggctagaattttaacattgaataataaaatccaaactcgtttgacagtata

SEQ ID NO: 878529 - DNA, 120 bp, Artificial Sequence
  ENSG00000287831_5 (sequence is synthesized)
caaagacatttttgagctctttgtcaactttcccaattatatctctccacttagtcttcatattctatgccccagccagactgaaatatttgcaattccaagaaagttccacatgccatc

SEQ ID NO: 878530 - DNA, 120 bp, Artificial Sequence
  ENSG00000287831_6 (sequence is synthesized)
tttgccccgtgctgctgctcagagaagcgaaagaagagaaagaaaatttcaaagtttctgcaattcttcagtgccactgaaatgtgagatgggagttggtggctcatgctaagcagacac

SEQ ID NO: 878531 - DNA, 120 bp, Artificial Sequence
  ENSG00000287831_7 (sequence is synthesized)
cgaagagtccatggacaggagagcacgaagaagaaagatgaaggttctgcctatcacacgaggacagggatccctctcttcagcaaagtgtcccacaacttgggtagcacctggtcatct

SEQ ID NO: 878532 - DNA, 120 bp, Artificial Sequence
  ENSG00000287831_8 (sequence is synthesized)
ttcatgctttgtctcatcccttactttccaaaatcctcttcagcttctctcttctgtgttaatagggtggagacgtggacaatgtagaaaaggatgtgtatcaagggagggggcaaataa

SEQ ID NO: 878533 - DNA, 120 bp, Artificial Sequence
  ENSG00000287831_9 (sequence is synthesized)
tgggctgtgtgaaacccctccatcatctcaagctttcagcaaagtctaccacacaagcaaatgtcttgtgtgagtgaagttctcaggggtaaagagactgtgtttcacatcttggacaat

SEQ ID NO: 878534 - DNA, 120 bp, Artificial Sequence
  ENSG00000287831_10 (sequence is synthesized)
ttggaaagattgggagggattcaaggctactacagcttacaggttagggttgaaataaatctcattttaatctcaataagcaggacaactcaatctacatgtagcctacagtttttattt

SEQ ID NO: 878535 - DNA, 120 bp, Artificial Sequence
  ENSG00000287831_11 (sequence is synthesized)
agatctagttctcttaggctttgtattcctagaaggcagagatttggggataatttgcctctgattccccatgctttgcttactaaaatgtatatacatgctaaatgatgttgtagttgc

SEQ ID NO: 878536 - DNA, 120 bp, Artificial Sequence
  ENSG00000287831_12 (sequence is synthesized)
tagaaggaaggaaggaaggaaggaagaagggaaggaagaggaaggaaggaaggaaggattttatagattctttaaataactagacagagagtttttactccaaagagcaattttgagctc

SEQ ID NO: 878537 - DNA, 120 bp, Artificial Sequence
  ENSG00000287831_13 (sequence is synthesized)
caagatactaatttataaaagataaaaataagcgtgaaaaaagttttctataagttaccgatgacaaattttaatttttaattataccaggggaaagaaatgtcagaggctctttttagt

SEQ ID NO: 878538 - DNA, 120 bp, Artificial Sequence
  ENSG00000287831_14 (sequence is synthesized)
taggcaagttaccaaagacataggttatgaataaatattaattggtctagagctaaaataaattaggttaagataattctaaaaatgtttatgttaacaaagactccaaactaaagccca

SEQ ID NO: 878539 - DNA, 120 bp, Artificial Sequence
  ENSG00000287831_15 (sequence is synthesized)
tcatgtttatgcaacatttatgcaaatatttacagccttttcaatagatagtttactcctgtgatattggagtttgtaaaataatattttgcatgcaaattattttatagttggtttata

SEQ ID NO: 878540 - DNA, 120 bp, Artificial Sequence
  ENSG00000287831_16 (sequence is synthesized)
taaacagattggggttggcttggtatagcacttgggcttatctgtagagcagctattagagctatatacggtttttgctatcatccaagaacgttaccttcaattagtgaacgatatgac

SEQ ID NO: 878541 - DNA, 120 bp, Artificial Sequence
  ENSG00000287831_17 (sequence is synthesized)
cccagtgggatgccatctactcaggagcattgtaaagcacttttagatttgacaatggccccatagaactcactcaataggatgggctgtactttaaactcataaagctcaaggaagaga

SEQ ID NO: 878542 - DNA, 120 bp, Artificial Sequence
  ENSG00000287831_18 (sequence is synthesized)
acacagcttccttgcgttgaatcaatggagacagcaggtgccaaaagaaattcaagactcaatgtacacatgaaatttttaatagcattactttctataaggacaataatgctaaagaat

SEQ ID NO: 878543 - DNA, 75 bp, Artificial Sequence
  ENSG00000236673_0 (sequence is synthesized)
cggctgaagactgacactgcccgattgccttggaagccccctaaacgtgcatgaaagttaggggtagaagaaaag

SEQ ID NO: 878544 - DNA, 120 bp, Artificial Sequence
  ENSG00000236673_1 (sequence is synthesized)
tgcatgaaagttaggggtagaagaaaagatggattgaggttgtcctcagactttccatggtatctgagctgttttcctcttccggaattgtgtctcatatgaagttcctcttcatttgag

SEQ ID NO: 878545 - DNA, 89 bp, Artificial Sequence
  ENSG00000236673_2 (sequence is synthesized)
ccaggagaatgggtgacttgaactggcaaggagcaacctgctctctccacgggcctctggaaccccggcaagagaagatcccttgatca

SEQ ID NO: 878546 - DNA, 120 bp, Artificial Sequence
  ENSG00000236673_3 (sequence is synthesized)
cgggcctctggaaccccggcaagagaagatcccttgatcaccatggacactcaagttggcaagaagagctccttagagaagtcgtgggagggcaagcaagctgatgtggagccaggacga

SEQ ID NO: 878547 - DNA, 120 bp, Artificial Sequence
  ENSG00000236673_4 (sequence is synthesized)
tttgatgtgggagcacctgcagtggagcacagccagggagagccatctccccaggcctgacttgctcccataggagactttagccctaggggaactgtccatcctgatctctgcagggtg

SEQ ID NO: 878548 - DNA, 120 bp, Artificial Sequence
  ENSG00000236673_5 (sequence is synthesized)
gtcttgtccatcagacagggctgattcgacctgagcaccccttggtctgctggcctttctggggtcccagcctggccagacctgcttgcagggcagtcttgggtgccctggaggccacgc

SEQ ID NO: 878549 - DNA, 120 bp, Artificial Sequence
  ENSG00000236673_6 (sequence is synthesized)
catagcttctgtgctggcagatagtatctgactggtggagagctccagcaaggctgcccctaggccacacaccagcccatccaccccctccccacactgcagcttccctaggcccaggaa

SEQ ID NO: 878550 - DNA, 120 bp, Artificial Sequence
  ENSG00000236673_7 (sequence is synthesized)
actcctcacgtgtctttgctggcacaagtctgcacaggtaggttttgccttccttgccctgccagtgcatgggagtgtagtctgcccccctgccccgtctggctgtcattgaagacagag

SEQ ID NO: 878551 - DNA, 120 bp, Artificial Sequence
  ENSG00000236673_8 (sequence is synthesized)
ccttggtgggcacagagcaagccagctcccccgcaacgcccacctcaacacctggcccttgtgctaacactgtgcagagaacagtggaccctgctcgcaccctgagtgatcactcctgct

SEQ ID NO: 878552 - DNA, 120 bp, Artificial Sequence
  ENSG00000236673_9 (sequence is synthesized)
tgtggggcacagagaaggtgtccagacctgctcacgccagtgccctgcccccaagccaacaccacatccaacaggagcctgcacccagtcttcagcatagaggtgaaagatctctacgag

SEQ ID NO: 878553 - DNA, 76 bp, Artificial Sequence
  ENSG00000236673_10 (sequence is synthesized)
aaagatctctacgaggagaactatgaaacactgctcaaaataatcaaatatgatacaagcaaatggaagagcatgc

SEQ ID NO: 878554 - DNA, 78 bp, Artificial Sequence
  ENSG00000236673_11 (sequence is synthesized)
aatgctattcctattaaactaccattgatattcttcacaaaactagaaatagccaaggaaatcctaagcaaaaagaac

SEQ ID NO: 878555 - DNA, 61 bp, Artificial Sequence
  ENSG00000236673_12 (sequence is synthesized)
caaaacagcgggttctctatttcacacacctacaactatctgatcttcgacaaacctgata

SEQ ID NO: 878556 - DNA, 120 bp, Artificial Sequence
  ENSG00000236673_13 (sequence is synthesized)
tcacacacctacaactatctgatcttcgacaaacctgataaaaacaagcaatagggaaatgattctgtattcattaaatgatgctggaataactggctagccatatgctgaagattaaaa

SEQ ID NO: 878557 - DNA, 89 bp, Artificial Sequence
  ENSG00000236673_14 (sequence is synthesized)
atgctggaataactggctagccatatgctgaagattaaaactggaccccttccttatactgtacacaaaaatcaactcaaaatggatgc

SEQ ID NO: 878558 - DNA, 120 bp, Artificial Sequence
  ENSG00000236673_15 (sequence is synthesized)
ggaacaggcaaaaatttcatgacaaagacaccaaaagcaattgaaacaaaagcaaaaattgaaaagtgggttctaaataaaactaaagagctcctgcacagcaaagaaaatacaaacaga

SEQ ID NO: 878559 - DNA, 120 bp, Artificial Sequence
  ENSG00000236673_16 (sequence is synthesized)
gtgaacagacaacctacagaatgacagtatctgcaaactatacatccaacaaagatctaatattcagcatctataagaaacttaaacaaatttccaaaaacaaccccattaaaaagtggg

SEQ ID NO: 878560 - DNA, 65 bp, Artificial Sequence
  ENSG00000236673_17 (sequence is synthesized)
caaccccattaaaaagtgggcaaagcaggctcaacaccaccaatcattagagaaatgcaaatcaa

SEQ ID NO: 878561 - DNA, 61 bp, Artificial Sequence
  ENSG00000236673_18 (sequence is synthesized)
catctcacactagtcagaatggctcaatgcttatgcactgttggtgggagtataaattagt

SEQ ID NO: 878562 - DNA, 120 bp, Artificial Sequence
  ENSG00000236673_19 (sequence is synthesized)
tcattgtggttgacagtgtggtgattcctcaaagatctgaaaacagaaatataattctacctagcaatgctactactgggtatatacccaaagaaaaataaattgttcaattataaagac

SEQ ID NO: 878563 - DNA, 120 bp, Artificial Sequence
  ENSG00000255958_0 (sequence is synthesized)
ttcagacagggttggaattccagctcaaccacagatcagcaatgtgaaacctttaggaagttactgcatttctttgtgctttgaatactccatctgtagaacgggtaatcgtgtaaggaa

SEQ ID NO: 878564 - DNA, 120 bp, Artificial Sequence
  ENSG00000255958_1 (sequence is synthesized)
agaagaaacccagagtggctgtgagtcaagaaaagacatcagataacagcaattattttaccattatgtgacacgtaatactaatgttcctacctgaagataaagagcacaattttaaaa

SEQ ID NO: 878565 - DNA, 120 bp, Artificial Sequence
  ENSG00000255959_0 (sequence is synthesized)
attctccaggctgcagcagggcaaaggcggggtcccaacaccatagagaacgccacccctgtccatgctgtcccccacttcaccttttcttggagcggtccttccacactcgccccgatt

SEQ ID NO: 878566 - DNA, 120 bp, Artificial Sequence
  ENSG00000255959_1 (sequence is synthesized)
tgggcttccccttcgggattacaggaagctcctctttattcaacttcttggacgctggggcctgggatgaagaaccttttcgcttctttgccccgaagccgcctgtcaccgtctccccag

SEQ ID NO: 878567 - DNA, 120 bp, Artificial Sequence
  ENSG00000255959_2 (sequence is synthesized)
catgctgaccccggggggagccaggtgccctgggtgtcagctccagtagtggctgagagggctccggaccgggagcttgctgaccggggtgtcatgaagaggtacaacagggaagagggc

SEQ ID NO: 878568 - DNA, 120 bp, Artificial Sequence
  ENSG00000255959_3 (sequence is synthesized)
aatcatggtccctgccttagtggatcttacggcatcttgggggcacagataataaacacctgaatctgaaaattatcctttgaggaaggctgagcaagaattaattcccccattttacag

SEQ ID NO: 878569 - DNA, 120 bp, Artificial Sequence
  ENSG00000226758_0 (sequence is synthesized)
gacaaccaccagaagctgggagagaggcacggaaaagattctccctcagagcctcagaaggaacccactggactaacaccttgactttggatttctggctgctgggacaatgacggactg

SEQ ID NO: 878570 - DNA, 120 bp, Artificial Sequence
  ENSG00000226758_1 (sequence is synthesized)
acatgttcctccggctctgccacacccatcagatggcaggtggggagcagattaagacatgggcattcgcagggtgcacagaacgctggcttacaaacacctcctctcataggcatgcag

SEQ ID NO: 878571 - DNA, 62 bp, Artificial Sequence
  ENSG00000226758_2 (sequence is synthesized)
gaacgctggcttacaaacacctcctctcataggcatgcagggtctcgctgtgtcacagaata

SEQ ID NO: 878572 - DNA, 90 bp, Artificial Sequence
  ENSG00000226758_3 (sequence is synthesized)
atggggtttcagcatgttgaagcacccagattcaaaaagcaagttcttagagacctacaaagcggcttagactcccacacaataatagtg

SEQ ID NO: 878573 - DNA, 66 bp, Artificial Sequence
  ENSG00000226758_4 (sequence is synthesized)
cggacctaatagacatctacagagctctccaccccatcacaaacttaatccatcacataaatacca

SEQ ID NO: 878574 - DNA, 80 bp, Artificial Sequence
  ENSG00000226758_5 (sequence is synthesized)
agctctggactaagcggacctaatagacatctacagagctctccaccccatcacaaacttaatccatcacataaatacca

SEQ ID NO: 878575 - DNA, 120 bp, Artificial Sequence
  ENSG00000226759_0 (sequence is synthesized)
cttctggactgcctcttcaggaaagtgtccagagagggcaagctcaactacctactgaatctccaaactaagcactgaagataatccctccagatgaaccatttattgtgtggttatgcc

SEQ ID NO: 878576 - DNA, 120 bp, Artificial Sequence
  ENSG00000226759_1 (sequence is synthesized)
tgctctctgaagaggtgtaaggccccctgggtccgctctgccatctacaattgacatgcaggctggacatacagtgggcctcgattgcttagaagccaaactgaactcaccaagaaaaga

SEQ ID NO: 878577 - DNA, 120 bp, Artificial Sequence
  ENSG00000226759_2 (sequence is synthesized)
agacaggagaaacttctcaagaggaatatctccaaattgcaggatcgaataccataagaggaattctggactgaagagttatgaagtcatttcagacacttccagacaatttgtgttaat

SEQ ID NO: 878578 - DNA, 120 bp, Artificial Sequence
  ENSG00000226759_3 (sequence is synthesized)
gcatttttcctggaaaggctcctcaaaatggtaataaagggtaattcttttagatgatcttgcatttgtttgaatgggaactgagcttaatcaaacatgttaggaagactatgtctgttt

SEQ ID NO: 878579 - DNA, 120 bp, Artificial Sequence
  ENSG00000226759_4 (sequence is synthesized)
cactttttaaaattattttggatggacacaataattatatatatttatggggtacagagtgatattttgacacatgtatacaatgtgtaatggtcaacttagggtatttagcatatttct

SEQ ID NO: 878580 - DNA, 120 bp, Artificial Sequence
  ENSG00000226759_5 (sequence is synthesized)
cacctcaaacatttattattaatttgtgttgggaatgtttaaaatcctttctatttgaaattatgcaataaaatattatctatagtcacccaacagtgctgtagaacactagaacttttt

SEQ ID NO: 878581 - DNA, 120 bp, Artificial Sequence
  ENSG00000226759_6 (sequence is synthesized)
ggttcacatcataatggttcttttgccaacaggagctggtaatcaggatggcagtgaggcaggcacttgcttgcagaagaacaggcctagttttttaagaagccacaaaagtgtctttgg

SEQ ID NO: 878582 - DNA, 120 bp, Artificial Sequence
  ENSG00000226759_7 (sequence is synthesized)
atgattaggatctaaggggccaacagctttgcaataacagcataaatattgtgggctggatggacaggcaccaaatggggacattccatcctgctgtgtgatgagaaagctgccactttt

SEQ ID NO: 878583 - DNA, 120 bp, Artificial Sequence
  ENSG00000226759_8 (sequence is synthesized)
tggtactgccaggaatacgaagggagaatgaaacaaaactgctccgcttagggaacttggaaaggaaattgaaaaggcaaggcacaggctggaagaaaatatttgaaaaagatttatgtg

SEQ ID NO: 878584 - DNA, 120 bp, Artificial Sequence
  ENSG00000226759_9 (sequence is synthesized)
aacttctttctggattatacaaaatatttttagatattcttacaactctaaaataagataactccttaaaaatctaaattctaccaaaggagagataaagatgacgaatacattcaaaga

SEQ ID NO: 878585 - DNA, 120 bp, Artificial Sequence
  ENSG00000226759_10 (sequence is synthesized)
tgctgaaaatcacttatttattattaggaagttacaagctaaagcataatgagataccactacaacctactaaactgactaaaattaatcagactaaccaggtgttggcaagaaacaggg

SEQ ID NO: 878586 - DNA, 120 bp, Artificial Sequence
  ENSG00000226759_11 (sequence is synthesized)
acttctttggaaatgagttcagtaactttttaaacagttgaaaatagacctatcatgcaaaccagcaatcccacttccagttgacatgcaggctggacatacagtgggcctcgattgctt

SEQ ID NO: 878587 - DNA, 120 bp, Artificial Sequence
  ENSG00000226759_12 (sequence is synthesized)
aaccagcaatcccacttccaggtatttatacaaggaaaatgacaacatatgcccacataaagacttgtgcacaaatgaccgtagcagctttgtgataattgctaaaaactagaaacttgt

SEQ ID NO: 878588 - DNA, 90 bp, Artificial Sequence
  ENSG00000226759_13 (sequence is synthesized)
aaacttgtcaagtgtccaacagacatcgaactctgttgcccaggctggtattgaactcctgcgctcaagtgatcctcctgcctcagcctc

SEQ ID NO: 878589 - DNA, 120 bp, Artificial Sequence
  ENSG00000226759_14 (sequence is synthesized)
ctgggattacaggtgtgaaccactctacccagcccctccttgctcattcgtaatgaaacaacgctttgtaaaccgtgaaagtgctatataaagatatctttaaaataccaaagaagtccc

SEQ ID NO: 878590 - DNA, 120 bp, Artificial Sequence
  ENSG00000226759_15 (sequence is synthesized)
cagctggtactgccaggtggagagtgagttgggtagctgacctcgggcatggcagccttggtttttggccacttcatggggtgacctgttgagcaaacagcagtggaattctgcagctgt

SEQ ID NO: 878591 - DNA, 120 bp, Artificial Sequence
  ENSG00000226759_16 (sequence is synthesized)
ttgacacaagtctctggtacagatgaagaccagagagcttgggagtcactgctgaagagaagagtgaatgagtaaacaaaggtagatgaggcaaagaacataccgaatgtcaggattcag

SEQ ID NO: 878592 - DNA, 120 bp, Artificial Sequence
  ENSG00000226759_17 (sequence is synthesized)
atgggactgctgtatgatattaatgaacacagatatctggagaaaccatgtcaaagctttccaagagagactgtgaacagtacctggggaacaccaaaaagagagatgataaagaaggga

SEQ ID NO: 878593 - DNA, 120 bp, Artificial Sequence
  ENSG00000226759_18 (sequence is synthesized)
tgacaagtccctgcaggcctggaccaagtgcaacacagaacaagcaacaagaccaaaagaaagcagtgtgtcttgttaagtttctttgcaaggctttaaatcagctgtggcttcctggca

SEQ ID NO: 878594 - DNA, 120 bp, Artificial Sequence
  ENSG00000226759_19 (sequence is synthesized)
ctatcatgcaaaccagcaatcccacttccagctaaggaaatagagacaaactacataagttgctgaaaaatcacagcaaataattagctgaggaagagactcaaatctatcagaactgct

SEQ ID NO: 878595 - DNA, 120 bp, Artificial Sequence
  ENSG00000226759_20 (sequence is synthesized)
atcaagagtcacctcctcagtgaagccttccatggtttcataccacccatccctatcggaatgaatgtatccttgttctccgttatcccagtattttgcctgggcttctgtcacactact

SEQ ID NO: 878596 - DNA, 120 bp, Artificial Sequence
  ENSG00000226759_21 (sequence is synthesized)
ttcaatgtctatacctcagttatcgaatcgaaaaacaagagtcatcagtctctaaggtccttgcaagcttcaaaactttatatttttgtcaattacaactgaataaagctgaacaactta

SEQ ID NO: 878597 - DNA, 120 bp, Artificial Sequence
  ENSG00000226759_22 (sequence is synthesized)
aaaaaggaactattaatacatttgacaatatggatgtaaattataatgctatgctgagataaagaacccaaagattttatacatatgattcaatttctataaaccgttagaaaatgaaaa

SEQ ID NO: 878598 - DNA, 120 bp, Artificial Sequence
  ENSG00000226759_23 (sequence is synthesized)
acccaccaattcatcagccaacctgtcctcttcaactgtgcagggaaagagaatataggcaaccataacacatctggatagtaccttcttaggaactcctgttgcatctttactcagttt

SEQ ID NO: 878599 - DNA, 120 bp, Artificial Sequence
  ENSG00000226759_24 (sequence is synthesized)
agtagccatataaataacgatgtccccagaaggataaaaaaaggaggcagctgaggagaaaaacaaaactcccactggaagaaacacgatgatatgaaaaagccagatgtatcaggtgtg

SEQ ID NO: 878600 - DNA, 120 bp, Artificial Sequence
  ENSG00000226759_25 (sequence is synthesized)
atgatctgttgaggctggcttcagacagaactgggaaaatgattcaggacttcatgttgaagcagcagggtgtgaagtcacagcgtctcgggctgcatttcctttttttctgattctgta

SEQ ID NO: 878601 - DNA, 120 bp, Artificial Sequence
  ENSG00000226759_26 (sequence is synthesized)
atctctcctattcatttacatcctcagaacttagcacgatgtctgaccatagtggattttcaataagtaactatggggtggaggcatgggggcaccaatgcaggaatcaccacacctact

SEQ ID NO: 878602 - DNA, 120 bp, Artificial Sequence
  ENSG00000226759_27 (sequence is synthesized)
cagaaagaaggcatttaccaaattgcaaaggaacacatcctgcctgcagacaataaatggtgtgtgatgcttccatgaagtgagatggatggagctctccgttgctaactggcccataac

SEQ ID NO: 878603 - DNA, 120 bp, Artificial Sequence
  ENSG00000226759_28 (sequence is synthesized)
aatatgtttgcaaaagactccaaatcaatgtattaaattgaaatccagtatcaaaacacccattaaagtgctcttttgaaattgtacattttatatcaataaaatttcaaaatataaaaa

SEQ ID NO: 878604 - DNA, 120 bp, Artificial Sequence
  ENSG00000226759_29 (sequence is synthesized)
ggtgcatgggtttgtgaagactccagcagtatgattggggaactcacttgccagcctctgcctggacccagagacattgcctgaactgtatgaattgctaagaagctgctagtctgcaag

SEQ ID NO: 878605 - DNA, 120 bp, Artificial Sequence
  ENSG00000226759_30 (sequence is synthesized)
atctctcctattcatttacatcctcagaacttagcacgatgtctgaccatagtggattttcaataagtaactatgggttgacatgcaggctggacatacagtgggcctcgattgcttaga

SEQ ID NO: 878606 - DNA, 120 bp, Artificial Sequence
  ENSG00000226754_0 (sequence is synthesized)
gactgcaacatcccctcacgcctagtctgtaaagaactttgtttaacccggaggcggggccagccagctccgcccctccagctggacgcgggagcgaggttgaggttcatacccctgggt

SEQ ID NO: 878607 - DNA, 120 bp, Artificial Sequence
  ENSG00000226754_1 (sequence is synthesized)
tctctccaggcctgaggcggagagccagccgcctgcctacctctgggctttgaaccccgggtctggtgacttcgcttaaagacctcgggccgaaggcccgccaggctcaacctcggttca

SEQ ID NO: 878608 - DNA, 120 bp, Artificial Sequence
  ENSG00000226754_2 (sequence is synthesized)
caggacccccgacttgtgtgagtcgtacaccgctctttaccgtctctggacctaggtcatctcggcagtaaaatggggtgaaatgacccgacctccccggaggatgccgcgcacgatgtg

SEQ ID NO: 878609 - DNA, 120 bp, Artificial Sequence
  ENSG00000226754_3 (sequence is synthesized)
tgcctcaagttggcttccactgacctgaactgttaagaaagccctcctcagtgacgccttccctgaatccacagtggagattgccgttttcctggaactaattcacccacacttacccat

SEQ ID NO: 878610 - DNA, 120 bp, Artificial Sequence
  ENSG00000226754_4 (sequence is synthesized)
tgctgggagacgttagagtatttgatctcccactccccagtcatcccacttaccgagcagtaattctctgcctggctgcacattgcaatcacttgggaagcctctaaaaatactgatgcc

SEQ ID NO: 878611 - DNA, 120 bp, Artificial Sequence
  ENSG00000226754_5 (sequence is synthesized)
agggctctaccccaagccagttaaaatctccagcgctggacctgggcattggtactttttgtaaagctttcagtttaccaagatgatgccagtatagctagtgagatgcagcaccccatc

SEQ ID NO: 878612 - DNA, 120 bp, Artificial Sequence
  ENSG00000226754_6 (sequence is synthesized)
ctcagccccctcgcctctggaagagacaccagactgcaaagggcaccgcgtacagaagctaacggaacttgaatgacaagacaaaaagagcagaatcagttagtgtgacacaacattcta

SEQ ID NO: 878613 - DNA, 120 bp, Artificial Sequence
  ENSG00000226754_7 (sequence is synthesized)
acatgcctgattcttacatcaaatatggtaactttggggttggtagggggagacaaacaaggagaatccacttgggaacaatttgatgaagtttgcaaatcagcactttacccccaaatt

SEQ ID NO: 878614 - DNA, 120 bp, Artificial Sequence
  ENSG00000226754_8 (sequence is synthesized)
aacaacagcttgtatggaaaaaaaaatgctcttttaaaagtatatggtttggacaggtatatttgttttctcttgtagtttttgtaaaaaagtatcaaaaccttggctttaaatatatat

SEQ ID NO: 878615 - DNA, 120 bp, Artificial Sequence
  ENSG00000226754_9 (sequence is synthesized)
taaacttgggctgatctggaaacgtctccacttagctctgtaaggatggcacccttcagggtgcttcagaggaaacttactgaattcaacccaagtgtcctgaaagaaattgaagaagtt

SEQ ID NO: 878616 - DNA, 120 bp, Artificial Sequence
  ENSG00000226754_10 (sequence is synthesized)
actcaaagagctgaactttaaaacaaggagtagctgagggtgaggcatatcctatcttgagtttctgagcactctggtaccatggaatgtctgtacactgaccttcgccaaagccaagaa

SEQ ID NO: 878617 - DNA, 120 bp, Artificial Sequence
  ENSG00000226754_11 (sequence is synthesized)
agccctggtaggagtcacagcagccatgggtgagctgaaaggcttttcctgacttcctggggtctcaggaatagccagaggtgaaaagatttgccttttttactacataattgcacaaac

SEQ ID NO: 878618 - DNA, 120 bp, Artificial Sequence
  ENSG00000226754_12 (sequence is synthesized)
catggtatctattttctgatccagatttccaaaggcttttctgaaaactacaagatataccccttgtggactgtgtgaaaataaatttatctttatgtatttgaacagtagccatagatg

SEQ ID NO: 878619 - DNA, 120 bp, Artificial Sequence
  ENSG00000226754_13 (sequence is synthesized)
tgcctcttctctacagatttttctgtcacacacatacacatataaacacacacatacacacacagagtctgtgtggtgggccaaacatgccaaaaataaatactctcacttctctaaatt

SEQ ID NO: 878620 - DNA, 120 bp, Artificial Sequence
  ENSG00000226754_14 (sequence is synthesized)
gaaaatgtttaccagatttataatcgaggaggtcctggatgaccttggcaaaagcaaccccaatggcatgggaatgaatgtttaccaagatgatgccagtatagctagtgagatgcagca

SEQ ID NO: 878621 - DNA, 120 bp, Artificial Sequence
  ENSG00000226756_0 (sequence is synthesized)
gactaagaaatctgatcatgtccaggcttttaacaccctcctcccccaaggaacaataaaacacaccagcgaaaacaaagaggctgccctgaaaaggttgcagtggtggatgatactggc

SEQ ID NO: 878622 - DNA, 120 bp, Artificial Sequence
  ENSG00000226756_1 (sequence is synthesized)
agaatcagaaaggaagctaagagaaacaggcgcgtcctcagccgggcctcgcgtgtcctgacactgcagcaggcacgggatgtgggctgtcccctccagcacagtgcgggaaggtgctgg

SEQ ID NO: 878623 - DNA, 120 bp, Artificial Sequence
  ENSG00000226756_2 (sequence is synthesized)
agaccccaaaacaactgcgtctggcccaggggagtgggcaaaaattccaacagggagagaccgtctctggcttatttacagacaggaagaaagctattagtgctccatgtaaacaagcac

SEQ ID NO: 878624 - DNA, 120 bp, Artificial Sequence
  ENSG00000226756_3 (sequence is synthesized)
gcccaattcaagttggaactctttaaattctggaagacagcacatcacatccagccacgagggggcgcagccgagcagcaaggagcgcaaaagtctcattcttcactgcaatttctacct

SEQ ID NO: 878625 - DNA, 120 bp, Artificial Sequence
  ENSG00000226756_4 (sequence is synthesized)
acagctctctcaaagtatacacattttcaagattgtttccaaattcaggtatccacaggacactgctaagcaagctgggagctttgccaaggccaaaataaattaaattatggtacggtt

SEQ ID NO: 878626 - DNA, 120 bp, Artificial Sequence
  ENSG00000226757_0 (sequence is synthesized)
gttgtccaaagtcattccggctccaaagggcgaattctcttttcgccatctctcccagccctggaacagcttagggtccctctcgaagagcacagcgccagcccagaccccatacaccca

SEQ ID NO: 878627 - DNA, 120 bp, Artificial Sequence
  ENSG00000226757_1 (sequence is synthesized)
ccgtccctggcacccgaacgcgctgcgagccccgggcctcccacaggagcggagacgcgggtccctgcgcctcacgccggaacggacccgtcagagccgccgagccccgcacctggaagc

SEQ ID NO: 878628 - DNA, 120 bp, Artificial Sequence
  ENSG00000226757_2 (sequence is synthesized)
tgggaggccgcgaggacggagaatcgaggcggagacccagcccagcgcccgcgcagctcggtgccctcccgccagtgcccgcactcgggtcacaccgcttgctctcgggagaagccccaa

SEQ ID NO: 878629 - DNA, 120 bp, Artificial Sequence
  ENSG00000226757_3 (sequence is synthesized)
ggctcgcggtgcaccgagaggcgcccgggctggagcgccccggccgtgttggccacggagttcttcagctgcttgatgaccacgaagagcaggaggaaaagtaagaagagcaggaagaag

SEQ ID NO: 878630 - DNA, 120 bp, Artificial Sequence
  ENSG00000226757_4 (sequence is synthesized)
aagagcgccaggtagagcagcaagttgagttcccactccatgctggaggcgccggcgctcgctggccctgcgcgctcggcgcgggctgcagctggagggcgagcgcgccgcccgcacacc

SEQ ID NO: 878631 - DNA, 120 bp, Artificial Sequence
  ENSG00000226757_5 (sequence is synthesized)
cacctcccgcactcccgcccctcgcgagggcgtcccgctatgggcgccgactccggggtccgtgctttgcctcccccggctccgaggaaacgcgccaaggagctgaggaaatccggcgca

SEQ ID NO: 878632 - DNA, 120 bp, Artificial Sequence
  ENSG00000226757_6 (sequence is synthesized)
gactctcccagctggcaccaaagccttccgcttcgccgagatcctctcaggtgctcttgaggacgcgagcgacttccctaggagcgaacttccgcgggcacggacgccagaagaggtaac

SEQ ID NO: 878633 - DNA, 120 bp, Artificial Sequence
  ENSG00000226757_7 (sequence is synthesized)
agctcagtcttccaggggaggtcgggactggtgttttgtaaatgatttaaaagttccacccccaacatccagtagggtccctagctccgctgcgttcccaattaatttatttcgttatat

SEQ ID NO: 878634 - DNA, 120 bp, Artificial Sequence
  ENSG00000226757_8 (sequence is synthesized)
ccctccgttcctgctttccgaaaggacaggggatgtcatggcccagagacccaaaagaatgaaaggtggcagtgaagatggggtctgaaaggctatgagatgatttcgtgctatgaggtg

SEQ ID NO: 878635 - DNA, 120 bp, Artificial Sequence
  ENSG00000226757_9 (sequence is synthesized)
ttctatggacaacaggtcacttggaaacgcattaagaatacaatgtatttcagaagttatatagcacaaagatttcaaatattggcctcaaattcagtttatttggtgaaaagaggaaaa

SEQ ID NO: 878636 - DNA, 120 bp, Artificial Sequence
  ENSG00000226757_10 (sequence is synthesized)
caagtttactcaaagtgtttcttgagtccctaaagcctttctgtatctggttgacgtgacccaaagcccatatcgcgcagctttaaaagctgttcagtgtatctattactgcagaacaaa

SEQ ID NO: 878637 - DNA, 120 bp, Artificial Sequence
  ENSG00000226757_11 (sequence is synthesized)
ttacccccaaatttagtggcttcaaacagcataaacattgatcatctctcacagtttctgtgggtccgaaatgtgggagcactggctgggtgattctggtgtcgggttactcatgaggct

SEQ ID NO: 878638 - DNA, 120 bp, Artificial Sequence
  ENSG00000226757_12 (sequence is synthesized)
ccgttcagatgtcagccaggtctgccttcagctgaatgcttgtgtagaggtggaggatccacttccagggtggctcactcactgcttgccaggtagggctggttgttggtgggaggcctc

SEQ ID NO: 878639 - DNA, 120 bp, Artificial Sequence
  ENSG00000226757_13 (sequence is synthesized)
agttcccttccatgggtgcttccaatacagctgcgggattcccccagaacaagtgatgaaagaaaacaaagcagaggctgcagtgctctttaccgccagcttcagaagtcacgtgccatc

SEQ ID NO: 878640 - DNA, 120 bp, Artificial Sequence
  ENSG00000226757_14 (sequence is synthesized)
agatctgtaatatcctactggtcacacaggtcagccctattcagggtaggagtccaaggacacgaacgccaaggagtaaggatcactggggctcatcttagagtcggctatgacagctgt

SEQ ID NO: 878641 - DNA, 120 bp, Artificial Sequence
  ENSG00000226757_15 (sequence is synthesized)
taatacagccagctatcattgcccatttgtaggcctaactttattttattctttatttgtgaagatgcagaattgcctcctggactgaattctggggatgagggctgacaacatcccaga

SEQ ID NO: 878642 - DNA, 120 bp, Artificial Sequence
  ENSG00000226757_16 (sequence is synthesized)
ttgtaataagtggctgctccagggatgacaggggttcaaagagacagggtggtatgaaaacagtctgtgaactgcaagtctcatggacccgattctagtgtcagctctgtcagtggtcac

SEQ ID NO: 878643 - DNA, 120 bp, Artificial Sequence
  ENSG00000226757_17 (sequence is synthesized)
ttttgctcagtgactctcagtcccctcatctgtaacatgccttgcttatctttcccttggatttgttgtgaggctcaaaaatgagaaaatgttaaataaaaatgtgttttgctatataaa

SEQ ID NO: 878644 - DNA, 120 bp, Artificial Sequence
  ENSG00000226751_0 (sequence is synthesized)
acaaggagaggggctttgtgtcttgtttcacactgtgtccccaggcttagaatattctggcatcagaaggcactcagtaaacatagagaggaagaaaggaagaagatgaaatcaggagta

SEQ ID NO: 878645 - DNA, 120 bp, Artificial Sequence
  ENSG00000226751_1 (sequence is synthesized)
cagattaaagtgttatctttggaagacaggcaagacatcctttgggacagaagggaaggagagaaagctggggaacatgcagataatacaagaggtgcggtttgtgactgatggctgcta

SEQ ID NO: 878646 - DNA, 120 bp, Artificial Sequence
  ENSG00000226751_2 (sequence is synthesized)
gatcagaatggcatagttttcctgtcttcatggagatgaatgaatgaactgtattttttattagcctaagcatgaattcttcccaaatttcctccatgaaccataggatcctacctctta

SEQ ID NO: 878647 - DNA, 120 bp, Artificial Sequence
  ENSG00000226751_3 (sequence is synthesized)
accattttatgaaaattctatggtgaattgaggtcctcaagttgtctgacaatatctgattttgccacggtcatgtgggaaaagtaggcatgtgagcaagtcatagttttacttgtttgg

SEQ ID NO: 878648 - DNA, 120 bp, Artificial Sequence
  ENSG00000226751_4 (sequence is synthesized)
aagattcttctaattatgtcaagatgaaaggttttatactgtgtagaaggcagtgtgagagaagtggacagtagaactcctatttggtgggccagtggctatattttaaaatatgaagga

SEQ ID NO: 878649 - DNA, 85 bp, Artificial Sequence
  ENSG00000283674_0 (sequence is synthesized)
ccgaagccactggcaagccctgaggtagggatggctgagaagaggctgcggctgttgctggaggggggaagcgcacagcccgagg

SEQ ID NO: 878650 - DNA, 120 bp, Artificial Sequence
  ENSG00000283674_1 (sequence is synthesized)
gaagagaagaggctgcggctgttgctggaggggggaagcgcacagcccgaggactgcgaggacggggaggacgcgccgcggccgggcagggaggagaccggcacccagacaggtggcgac

SEQ ID NO: 878651 - DNA, 86 bp, Artificial Sequence
  ENSG00000283674_2 (sequence is synthesized)
ccctccaaatcatggaagaatatgtctaccctctcggggcgtcccttgtcttctctcctccttgggcagggagaccatcggagtgc

SEQ ID NO: 878652 - DNA, 120 bp, Artificial Sequence
  ENSG00000283674_3 (sequence is synthesized)
tgtcttctctcctccttgggcagggagaccatcggagtgcaacctggctggggcggggaggaggtgcagggcctggccagagcgggcctggccacgggcaagggacagcgacctcctggg

SEQ ID NO: 878653 - DNA, 120 bp, Artificial Sequence
  ENSG00000283674_4 (sequence is synthesized)
cacgggcaagggacagcgacctcctgggccaggacaggtgagcgcggcgcaggcccgggcccggcgtgtccgcgctgcgcgggagaggccagcagagggcgccagagagccaggagcggc

SEQ ID NO: 878654 - DNA, 89 bp, Artificial Sequence
  ENSG00000283674_5 (sequence is synthesized)
cagcaagctacgctcgccccgggtgcttctttttccccaagtgcaggcagagcccctggagccatggccagcccttccggcagctccga

SEQ ID NO: 878655 - DNA, 72 bp, Artificial Sequence
  ENSG00000283674_6 (sequence is synthesized)
gaagagaagaggctgcggctgttgctggaggggggaagagcacagcccgaggactgcgaggacggggaggac

SEQ ID NO: 878656 - DNA, 77 bp, Artificial Sequence
  ENSG00000283674_7 (sequence is synthesized)
ggagcctccaaatcatggaagacacacggtgcaggcagagccccccagccgtggccagcccttccggcagctccgaa

SEQ ID NO: 878657 - DNA, 90 bp, Artificial Sequence
  ENSG00000283674_8 (sequence is synthesized)
gagaagaggctgcggctgtagctggaggggggaagcgcagaacccgaggactgcgaggacggggaggacgcgccgcggccaggcagggag

SEQ ID NO: 878658 - DNA, 120 bp, Artificial Sequence
  ENSG00000283674_9 (sequence is synthesized)
gcgcagaacccgaggactgcgaggacggggaggacgcgccgcggccaggcagggaggagaccggcacccagacaggtggcgaaggcagaggagtggtcatttttcttcttgtggcctctg

SEQ ID NO: 878659 - DNA, 62 bp, Artificial Sequence
  ENSG00000283674_10 (sequence is synthesized)
gagtccggtgcctggtttggggaatgttcgtgggatatgttccaaaggactgacagacctat

SEQ ID NO: 878660 - DNA, 64 bp, Artificial Sequence
  ENSG00000283674_11 (sequence is synthesized)
agccaggtgtgcacctgggagacagaggttgcagtcagccgagattgaaccactgtacttcagc

SEQ ID NO: 878661 - DNA, 78 bp, Artificial Sequence
  ENSG00000283674_12 (sequence is synthesized)
gggaggctgaggcaggagaatcgtttgcacctgggagacagaggttgcagtcagccgagattgaaccactgtacttca

SEQ ID NO: 878662 - DNA, 74 bp, Artificial Sequence
  ENSG00000283674_13 (sequence is synthesized)
aatgtgactggatgtcccttggagtagctcccaggctgtgctcttgtggttgggtccacctcaaccacttgctg

SEQ ID NO: 878663 - DNA, 79 bp, Artificial Sequence
  ENSG00000283674_14 (sequence is synthesized)
agaaaagtctctcctaggtatttggttgtccacctcaaccacttgctgagtcttccgcaagaccaggcacctagggtga

SEQ ID NO: 878664 - DNA, 72 bp, Artificial Sequence
  ENSG00000283674_15 (sequence is synthesized)
cagctccgcgccgccgcttgagccgggtccttcttcttccccaagttcaggcagagcccgcggagccatggc

SEQ ID NO: 878665 - DNA, 120 bp, Artificial Sequence
  ENSG00000283674_16 (sequence is synthesized)
cttcttccccaagttcaggcagagcccgcggagccatggccagcccttccagcagctccgaagccactggcaagccgcgaggcagggatggcagtcccaggatgggggaggaggacgtcc

SEQ ID NO: 878666 - DNA, 120 bp, Artificial Sequence
  ENSG00000283674_17 (sequence is synthesized)
ctcccgaagagaagaggctggggctgtagctggaggggggaagcgcacagcccgaggactgcgaggacggggaggacccgccgctaccgggcaggaaggagaccggcacccagacaggtg

SEQ ID NO: 878667 - DNA, 120 bp, Artificial Sequence
  ENSG00000283674_18 (sequence is synthesized)
ccaacctggaccatctggccagggagggcgtcaaggccaagtacctcatgccgccccttgtgacaatgacctccccgtcccacttcactgccatcacagaatcccaatggccactaaaat

SEQ ID NO: 878668 - DNA, 120 bp, Artificial Sequence
  ENSG00000283674_19 (sequence is synthesized)
ggccactaaaatagagggattccaacctaaaaaggaggaagaggaggctgctggaaagcaaaggactctgtgtaagaatcataatagcaggagtggagccaagatggccgaataggaaca

SEQ ID NO: 878669 - DNA, 89 bp, Artificial Sequence
  ENSG00000283674_20 (sequence is synthesized)
ctggagagtgtcagaaagtgggtgcaggacacttggtgcagtgcaccgagcatgagccaagcaggacaaggcattgcctcacctgggaa

SEQ ID NO: 878670 - DNA, 90 bp, Artificial Sequence
  ENSG00000283674_21 (sequence is synthesized)
gtcagaaagtgggtgcaggacacttggtgcagtgcaccgagcatgagccaagcaggacaatcagagaattcccttccctagtcaaagaaa

SEQ ID NO: 878671 - DNA, 64 bp, Artificial Sequence
  ENSG00000283674_22 (sequence is synthesized)
aacccatggagcctcactcattgctagcacagcagtatgagatcaaactgcaaggtggcagcaa

SEQ ID NO: 878672 - DNA, 64 bp, Artificial Sequence
  ENSG00000283674_23 (sequence is synthesized)
gagcctcactcattgctagcacagcagttaggcttcagtaggtaaacaaagcagctgggaagct

SEQ ID NO: 878673 - DNA, 72 bp, Artificial Sequence
  ENSG00000283674_24 (sequence is synthesized)
ctcaacaatatctgctgttctgcagcctcaactgctgacacccaggcaaactccaacagacctgcagctgag

SEQ ID NO: 878674 - DNA, 63 bp, Artificial Sequence
  ENSG00000283674_25 (sequence is synthesized)
cgcacttcttccaaaattgaccacatagttggaagtgaagcactcttcagcaaatgtaaaaca

SEQ ID NO: 878675 - DNA, 62 bp, Artificial Sequence
  ENSG00000283674_26 (sequence is synthesized)
tcttctcagcaccacatcgcacttcttccaaaattgaccacatagttggaagtgaagcactc

SEQ ID NO: 878676 - DNA, 73 bp, Artificial Sequence
  ENSG00000283674_27 (sequence is synthesized)
aatgacaaaaaccatatgattatctcattacatgcagaaaaggcctgtgacaaaattcaacaaccttcatgct

SEQ ID NO: 878677 - DNA, 120 bp, Artificial Sequence
  ENSG00000283674_28 (sequence is synthesized)
aagaagacatttatgtagccaaaagacacgtgaaaaaaatgctcatcatccctggccagagaaatgcaagtcaaaacaacaatgtgataccatctcaccccagttagaatggcgatcatt

SEQ ID NO: 878678 - DNA, 120 bp, Artificial Sequence
  ENSG00000283674_29 (sequence is synthesized)
ccagacaggtggcgacggcagaggaataaccttcactcttctctgcaacgaatcccaaaagtgtgtagttgagctgactgcaaggtgcttgacacgcaagagattccacaaatgggattc

SEQ ID NO: 878679 - DNA, 120 bp, Artificial Sequence
  ENSG00000283674_30 (sequence is synthesized)
gtgcttgacacgcaagagattccacaaatgggattcggcctctggaaagtggtggtagttccagatttatgtgaatgttactttgtttttccctataaaatctattctttaaactatcaa

SEQ ID NO: 878680 - DNA, 120 bp, Artificial Sequence
  ENSG00000283674_31 (sequence is synthesized)
catgcaccggctgattaccaaaacccccaagagtatgtaaggacccagttactggaaccgacccccagaaggacccaaatgaaagagaggatatgcaaacgctaaaccgagacagggaag

SEQ ID NO: 878681 - DNA, 120 bp, Artificial Sequence
  ENSG00000283674_32 (sequence is synthesized)
ctctcttggaaggattaaagaggggagcccaggaggccacaaatgttaacaaggtctctgaggtcattcagagaaaagaagaaagtccagcacaattctaggagagactgtgtgatgcct

SEQ ID NO: 878682 - DNA, 120 bp, Artificial Sequence
  ENSG00000283674_33 (sequence is synthesized)
atggtgatcgagtgtggatcaaggactggaaagtagcctctttgtgtccactgtggaaaggaccccagactgtcgtcctgagcactcccaccgctgtgaaggtagaaggaatcccagtct

SEQ ID NO: 878683 - DNA, 120 bp, Artificial Sequence
  ENSG00000283674_34 (sequence is synthesized)
gaatcccagtctggaaccaccacagctgtgtaaaacctgcagcgccggaaacctgggaggcaagaccaagcccagacaacccttgcagagtgaccctgaagaagacgacaagccctgctc

SEQ ID NO: 878684 - DNA, 71 bp, Artificial Sequence
  ENSG00000283674_35 (sequence is synthesized)
tcatcgttaccttactcaaaatggggactgtccccagtgtatttatcaggtcaccgaagtaggacagcaaa

SEQ ID NO: 878685 - DNA, 78 bp, Artificial Sequence
  ENSG00000283674_36 (sequence is synthesized)
agtaagggcttcaactaaccttactcaaaatggggactgtccccagtgtatttatcaggtcaccgaagatgaatgtat

SEQ ID NO: 878686 - DNA, 120 bp, Artificial Sequence
  ENSG00000283674_37 (sequence is synthesized)
tacaaggtatgtagcccaagaaatgaccgacctgatgcgtgttatagcccatctgagcccgctgcaaccaccgtttttgaaataagaactggccttttgctaggtgatacaagtaaaata

SEQ ID NO: 878687 - DNA, 120 bp, Artificial Sequence
  ENSG00000283674_38 (sequence is synthesized)
ataactagaacagaagaaaaagaaatccccaagcaaataactttaagatctgatgcttgtgcagccattaatagtaaaaagctagaaataggatgtggttctcttaactgagaaaggagc

SEQ ID NO: 878688 - DNA, 120 bp, Artificial Sequence
  ENSG00000283674_39 (sequence is synthesized)
taaagagtagaaaataaatatgtttgtcatgagtcaggggtttgtaaaaattgtgcctattggccatgtgttatttaggctacttaaaaaaagaacaaaaatgactcggtttatcttcag

SEQ ID NO: 878689 - DNA, 80 bp, Artificial Sequence
  ENSG00000283674_40 (sequence is synthesized)
ttggaaaaagggagaacgtgtagccctggggatcaataggacagggttaaaccctctagttgccattttaattagagggg

SEQ ID NO: 878690 - DNA, 120 bp, Artificial Sequence
  ENSG00000283674_41 (sequence is synthesized)
acagggttaaaccctctagttgccattttaattagaggggaggtccacaagtgctctcccaaaacagtatttcaaacgttttatgaggagctgaatctgccaacaccagaacttctgaaa

SEQ ID NO: 878691 - DNA, 120 bp, Artificial Sequence
  ENSG00000283674_42 (sequence is synthesized)
ttgtttctccaattagcagaaaatgtagctaattcccttaatgttacttcttgttatgtatgcggaggaaccactatcggagacagatggccttcggaagcccgagagttggtgtctact

SEQ ID NO: 878692 - DNA, 120 bp, Artificial Sequence
  ENSG00000283674_43 (sequence is synthesized)
atccagctcctgatataattccagttcagaaggcccaagctagcaacttctaggtcctaaaacctcaattattagacaatactgtatagctagagaagggaaagactttatcatccctgt

SEQ ID NO: 878693 - DNA, 120 bp, Artificial Sequence
  ENSG00000283674_44 (sequence is synthesized)
aggaaagcttaattgtataggacagaagttgtataacagcacaacaaagacaattacttagtagggcctaacccacactgaaaagaatccatttagtaaattttctaaattaaaaactgc

SEQ ID NO: 878694 - DNA, 120 bp, Artificial Sequence
  ENSG00000283674_45 (sequence is synthesized)
ttaggctcatgcagaatctcattaggactggacggttcccactggactatactagatacgtaggcacagagcctacattcggttacctaataaatgggcagacagttgtgttattggcac

SEQ ID NO: 878695 - DNA, 120 bp, Artificial Sequence
  ENSG00000283674_46 (sequence is synthesized)
tattaagccgtcctttttcttattacccataaaaatgggtgagctcctaggtttccctgtctatgcctcctgagaaaataaaggcatagttataggaaactggaaagataatgagtggcc

SEQ ID NO: 878696 - DNA, 120 bp, Artificial Sequence
  ENSG00000283674_47 (sequence is synthesized)
ccctgaaaggatcattcagtattatgggcctgccacaggggcacaagatggctcatggggataccaaacccccatctacatgctcaactggatcatacggttgcagtccgtctaagaaat

SEQ ID NO: 878697 - DNA, 120 bp, Artificial Sequence
  ENSG00000283674_48 (sequence is synthesized)
aattactaatgaaactggcagagctttgactgttttagctttgcaagaaacccaaatgaggaatgctatctatcagaaaagactggccttagactacttgctagtagctgaaggagtttg

SEQ ID NO: 878698 - DNA, 120 bp, Artificial Sequence
  ENSG00000283674_49 (sequence is synthesized)
tggaaaatttaacttaaccaactgctgcctacaaataaatgatcaaggacaggtggttaaaaacatagtcagggacatgacaaaggttgcacatgtgcctgtagaggtttggcacgagtt

SEQ ID NO: 878699 - DNA, 120 bp, Artificial Sequence
  ENSG00000283674_50 (sequence is synthesized)
taatcctgagtctttatttgaaaaatggtttccagctataggaggatttaaaaccctcattgtaggtgtattgctagtgataggaacttacttgctgctcccctgtgtattactcttgct

SEQ ID NO: 878700 - DNA, 120 bp, Artificial Sequence
  ENSG00000283674_51 (sequence is synthesized)
ttttcaaatgataaaagattttgttgctactttggttcatcagaaaacttcagcacacgtgtgttatataaatcactatcgctctatctcacaaagagactcaaaaagtaaagatgagag

SEQ ID NO: 878701 - DNA, 89 bp, Artificial Sequence
  ENSG00000283674_52 (sequence is synthesized)
gctctatctcacaaagagactcaaaaagtaaagatgagagtgagaactcccactaaaaagtgaaaatgctcaaaggggggaaatatggt

SEQ ID NO: 878702 - DNA, 89 bp, Artificial Sequence
  ENSG00000283674_53 (sequence is synthesized)
tccccttttccctagtttataagacagcaaaaaagggagaaagcaaaaagctggaaaaaacagaagtaaaataaatacctagacgactg

SEQ ID NO: 878703 - DNA, 90 bp, Artificial Sequence
  ENSG00000283674_54 (sequence is synthesized)
gccctggtggttaaagtaacaataatattaacccctgaccaaaactactgttgttatcggtaaatcactttttgttctgttagctgatgt

SEQ ID NO: 878704 - DNA, 75 bp, Artificial Sequence
  ENSG00000283674_55 (sequence is synthesized)
atgtagcccccagtcacgttcctcaagcttccttgatctattatgactttttcacgtagaacccttagagttgtc

SEQ ID NO: 878705 - DNA, 120 bp, Artificial Sequence
  ENSG00000283674_56 (sequence is synthesized)
agctgagctttcagtgggtgctcagtggaacaggtgctgaatggagtccggctctagggaggccagggtgtgttggaaggaaaatacatgtacagccaacttccttgagggttcgttctt

SEQ ID NO: 878706 - DNA, 120 bp, Artificial Sequence
  ENSG00000283674_57 (sequence is synthesized)
ttgcatcagggtgtctcaaactgatgcccttaaaacacctgtaagagaatcatccaggcggcttgcttgctctgcatgcaggccctttagaatcagactcagaatccctggggctggagc

SEQ ID NO: 878707 - DNA, 120 bp, Artificial Sequence
  ENSG00000283674_58 (sequence is synthesized)
tgaaccatgagcagcagcaacttgagtcacctccaggtggaagtgttaagaggttgctctatgatccaccacattccctttgccctgaagtggagatcaaggacacatgcagagatgggg

SEQ ID NO: 878708 - DNA, 82 bp, Artificial Sequence
  ENSG00000283674_59 (sequence is synthesized)
tgagtgaacacaatgaacagaccaccccagaatgccctaacacagcccagacatgcaacgtgaccaagaataagcctcactg

SEQ ID NO: 878709 - DNA, 76 bp, Artificial Sequence
  ENSG00000283674_60 (sequence is synthesized)
tgaggtcaggagttcaagaccaacctggctaacagggtgaaatcctgtctctactaagtacaaagattagccagac

SEQ ID NO: 878710 - DNA, 120 bp, Artificial Sequence
  ENSG00000283674_61 (sequence is synthesized)
aaacaaacaaacaaatacctcactgcatgaggccactgagatttggggtttgttgttactgcaccagaacccaaatcatcctgaccgctagggtgtcctaactagggtttcttaccaaaa

SEQ ID NO: 878711 - DNA, 120 bp, Artificial Sequence
  ENSG00000283674_62 (sequence is synthesized)
aggcatttttaaagttcgtgacatttaaacaaaagagcaaataccaatatctaccactttgtcaggctaaaaaacccaaacaaagccaacagccagaagttaaaataaacagatcattag

SEQ ID NO: 878712 - DNA, 120 bp, Artificial Sequence
  ENSG00000283674_63 (sequence is synthesized)
gttgaaaatagaactgtcaaaacaggcacaattgacttcatttagtgattgcaaagaacatcaggcaagacacaggtatgctcatcataacatttatcacatgcttcattgcacatgttt

SEQ ID NO: 878713 - DNA, 120 bp, Artificial Sequence
  ENSG00000283674_64 (sequence is synthesized)
ttcattgcacatgtttgactaagaaaaacaaagtatttaagctcatctgtagctcaaagtgcctatccgtgtatttatctattcatcctgatttatttattgagcaactcttttgtgcca

SEQ ID NO: 878714 - DNA, 65 bp, Artificial Sequence
  ENSG00000283674_65 (sequence is synthesized)
tcattactttaatctcttaatcctgtcagtcgagaaggatgtatatcgtctcaggacctgtaata

SEQ ID NO: 878715 - DNA, 120 bp, Artificial Sequence
  ENSG00000283674_66 (sequence is synthesized)
ctatcattactttaatctcttaatcctgtcagtcgagaaggatgtatatcgtctcaggacctgtaataattgcgttaagtacataaattgtacatcatgtgtgtttgagcaatatgaaat

SEQ ID NO: 878716 - DNA, 60 bp, Artificial Sequence
  ENSG00000283674_67 (sequence is synthesized)
ttcccgcctaataaactttggtcagacgggttgatctcaaaaccctgtctcctcgtcctg

SEQ ID NO: 878717 - DNA, 120 bp, Artificial Sequence
  ENSG00000283674_68 (sequence is synthesized)
tccttcttagaaattcctaaggctcaatgctttgtggaagattctgagaaagaaaatagtttccgatctttgggattcccgagatggtccaatctgcaaaaagttcattgccatttccat

SEQ ID NO: 878718 - DNA, 120 bp, Artificial Sequence
  ENSG00000283674_69 (sequence is synthesized)
ctgcaacttccgcctcccaggttcaatctattctcctgtctcagccccccaagtagctgggactacagatgttgcatttcccaagaccaccctggctgccacacccccattctgtgccta

SEQ ID NO: 878719 - DNA, 120 bp, Artificial Sequence
  ENSG00000283674_70 (sequence is synthesized)
taaaaaccctgagaccctagcaggcagacacaggcagctggactttgagaggagcacatcagcagaggaacacaagggtgctggacttcaacaggaacgcaccaatgggcaccgtcacac

SEQ ID NO: 878720 - DNA, 120 bp, Artificial Sequence
  ENSG00000283674_71 (sequence is synthesized)
cgcaggccactgactgcagaacaacgcagagtttggctgggatattcggagaagagtccggccactcatccaactccaggggtaaaccatctcccttctggcacgcccatctgctgagag

SEQ ID NO: 878721 - DNA, 68 bp, Artificial Sequence
  ENSG00000283674_72 (sequence is synthesized)
ggtaaaccatctcccttctggcacgcccatctgctgagagatacttccactcaataaaaccttgcact

SEQ ID NO: 878722 - DNA, 120 bp, Artificial Sequence
  ENSG00000283674_73 (sequence is synthesized)
agctgagatcacaccacttctggtacaccaagacaagaaccccgggacaaagagagccctctctccttgcaataaggcaggggtctaattgagccgactaacacaagctacctacagacg

SEQ ID NO: 878723 - DNA, 120 bp, Artificial Sequence
  ENSG00000283674_74 (sequence is synthesized)
tgtaacacacgcccactggggcttcaactatgaacattcacccctggacactgccatgggtctccctgcctgtctgcatgctctcctagaggtttgagcagtggggcactgaataaacga

SEQ ID NO: 878724 - DNA, 120 bp, Artificial Sequence
  ENSG00000283674_75 (sequence is synthesized)
gtggggcactgaataaacgaaccacacccgcatcgcatgcccttcgagggggacaacagaacttttcccatttcatctgagagaccaaggcaggaggatcgcttgagcccatgtgtttga

SEQ ID NO: 878725 - DNA, 120 bp, Artificial Sequence
  ENSG00000283674_76 (sequence is synthesized)
aaaaaaaaaataagtaaacaaaaaaaaagcattaaaaattagccagctgtggtggcacacacctgtagtttcagctactcaggaggctgatgtggaaggattgattgagcccaggagatt

SEQ ID NO: 878726 - DNA, 68 bp, Artificial Sequence
  ENSG00000283674_77 (sequence is synthesized)
agccagctgtggtggcacacacctgtagtttcagctactcaggaggctgatgtggaaggattgatagc

SEQ ID NO: 878727 - DNA, 120 bp, Artificial Sequence
  ENSG00000283674_78 (sequence is synthesized)
caattcttgtttctagcagtattatggagaaacatgatcactaatacatgaaggagaggaggtttcaagttctgatgaaaagatggtaaagagaggagttagttgactaggagcgactag

SEQ ID NO: 878728 - DNA, 120 bp, Artificial Sequence
  ENSG00000283674_79 (sequence is synthesized)
gaataggaagaaaacgcatgacactacttagaggaaagaagaaaaataagcatagaggtgactgagcagacagaaaggacttggaagaagcgtggctggccctgtctctaaattttttcc

SEQ ID NO: 878729 - DNA, 79 bp, Artificial Sequence
  ENSG00000283674_80 (sequence is synthesized)
ttggaagaagcgtggctggccctgtctctaaattttttcccttgcagggtacctagtgctccctttctgtccacttctc

SEQ ID NO: 878730 - DNA, 120 bp, Artificial Sequence
  ENSG00000283674_81 (sequence is synthesized)
aggcttctcatatctttccttccttaatctgcccctagcatctctacataacccatatacacctggagttccacatgttccagtctttgcactgcagtgaattcaaagaatggtagactc

SEQ ID NO: 878731 - DNA, 86 bp, Artificial Sequence
  ENSG00000283674_82 (sequence is synthesized)
ctcaaaaaaaacacgcgcacacacaaaaaaacaaaggtagactccaataggaaaaattcactcaaaagcaactcaaataattattc

SEQ ID NO: 878732 - DNA, 83 bp, Artificial Sequence
  ENSG00000283674_83 (sequence is synthesized)
ataaacttattctgtccagattccctagttttctttttcttatcttttttgttttcttttgagacaggacctcactctgtcac

SEQ ID NO: 878733 - DNA, 66 bp, Artificial Sequence
  ENSG00000283674_84 (sequence is synthesized)
aacttattctgtccagattccctagttttctttttcttatcttttttgttttcttttgagacagga

SEQ ID NO: 878734 - DNA, 120 bp, Artificial Sequence
  ENSG00000283674_85 (sequence is synthesized)
cctcagcctcccaagtaactggaactacaggtgcatgccaccatgctcagcacctttttgtattttttgtagaaacggggtctcgctatgtgggccaggctggtcttgaactcctggact

SEQ ID NO: 878735 - DNA, 120 bp, Artificial Sequence
  ENSG00000283674_86 (sequence is synthesized)
ccgcctgcctcaacctcccaaagggccaagattacaagcatgagccactgcatctggctgattccttagttttctttttctctttgcccattgcctggattccataagcagaaggaaaac

SEQ ID NO: 878736 - DNA, 120 bp, Artificial Sequence
  ENSG00000283674_87 (sequence is synthesized)
ccagggactgacttgtaggcaagaccctttcctcttcaaaacataaattggctcaagtggtaccaaaactgaaacatgtttataacttaacatcttttcttcctaccccttcaatctctt

SEQ ID NO: 878737 - DNA, 120 bp, Artificial Sequence
  ENSG00000283674_88 (sequence is synthesized)
accccttcaatctcttgagcaatgagaaaaggcactgggctctttatttgtgtagggaaaagaaagagagatccgactgtcactgtgtctatgtcgaaagggaagacataagagactcca

SEQ ID NO: 878738 - DNA, 60 bp, Artificial Sequence
  ENSG00000283674_89 (sequence is synthesized)
agactccattttgaaaaagacctgtacttaaaacaattgctttgccttggagttcacaaa

SEQ ID NO: 878739 - DNA, 79 bp, Artificial Sequence
  ENSG00000283674_90 (sequence is synthesized)
tccaaggtttctccccatgtgatatcttcagcccgatacccataaagggtctgtggtgaggtgaattagtaaaagagga

SEQ ID NO: 878740 - DNA, 64 bp, Artificial Sequence
  ENSG00000283674_91 (sequence is synthesized)
cgtgggatgagaaagacctgactgttcttcagcccgatacccataaagggtctgtggtgaggtg

SEQ ID NO: 878741 - DNA, 120 bp, Artificial Sequence
  ENSG00000283674_92 (sequence is synthesized)
tgcccctgggaactcaaagtctcgatgtaaaacccgattgtacatttgtttaagtctgagatcggagaaaagctgccctgtgatgggaggcaagacatgtttgcagcaatgctgccttgt

SEQ ID NO: 878742 - DNA, 120 bp, Artificial Sequence
  ENSG00000167912_0 (sequence is synthesized)
ccctatctccgcgacccccactcctcctcggctgttccccaaccctgtcactgtgctcccctccctactcccggcccgtagtggaggtgactttcctgcgcagcgccgcttctgagggcg

SEQ ID NO: 878743 - DNA, 120 bp, Artificial Sequence
  ENSG00000167912_1 (sequence is synthesized)
gagaacccacagggagtgcgacccctttgcacgctgtgagtgggcaactgtccgagggactcgagccgatcgaaggctggacgccctatagggctcttggcagtccacgaaagacctgga

SEQ ID NO: 878744 - DNA, 120 bp, Artificial Sequence
  ENSG00000167912_2 (sequence is synthesized)
gtccgcctccccatttctccggtcggtgagtggcaggaggaaatcgccaaacatgttttcccgctttgcctccccaactcggaaacttgcaacttgccgtgtcctggaggttgagacaat

SEQ ID NO: 878745 - DNA, 120 bp, Artificial Sequence
  ENSG00000167912_3 (sequence is synthesized)
ttggggtctcttggctgccgtccaacagatttatctctgagggcagtgtccttggtgagaggtccaagtaggtgtgggcgacattgtcctccatctcatgagggagcagccctgcacact

SEQ ID NO: 878746 - DNA, 120 bp, Artificial Sequence
  ENSG00000167912_4 (sequence is synthesized)
taggacatgttgattgccaactgctctgtgcagctttcccatagctgtctgttcccgtgcatttcggagcaccaagcaaatacgagcagagagacctggaaaaaaaaatgatgaagacag

SEQ ID NO: 878747 - DNA, 120 bp, Artificial Sequence
  ENSG00000167912_5 (sequence is synthesized)
tattaatgataaaattaacatggctgagtgaattgtcaatgcaagttcctttactaactctttgttaagttttgctttgtactccttacatcctctttctcttaagccattgttttaatt

SEQ ID NO: 878748 - DNA, 120 bp, Artificial Sequence
  ENSG00000167912_6 (sequence is synthesized)
tcttctcgttatcatttttaaaagtaacagaaatacagctttcttcctaccttcacgattgacttggtggaggttgggttgcaaagaggaagcagtaagaaaaaataattattctataca

SEQ ID NO: 878749 - DNA, 120 bp, Artificial Sequence
  ENSG00000167912_7 (sequence is synthesized)
ttcacaagtccttcaaggcacaaaataaaagtaagaaatagaaaatatgtcctttctcctaataaaggtctttataataaaatttaaatgaagttttgtgtttcataacagcttcccaaa

SEQ ID NO: 878750 - DNA, 120 bp, Artificial Sequence
  ENSG00000167912_8 (sequence is synthesized)
tactgttgtagatactaaaatgtgcctgtatgtatttccttccacaataataatagtaataataaacttttttaggtccaaattaaacatttctcagcttaaatttctatcctcaatcca

SEQ ID NO: 878751 - DNA, 120 bp, Artificial Sequence
  ENSG00000167912_9 (sequence is synthesized)
tgatgtctgtttgatggcctcgtgaacatcaggaagatgaaatgaaatggttcaagactggaacaataccattatctgcatcttgactcctgggagataatgatatctcctgctttcctc

SEQ ID NO: 878752 - DNA, 120 bp, Artificial Sequence
  ENSG00000167912_10 (sequence is synthesized)
tacagacctaccagttttctctgctttaagggaaaatccaaatgcatgagacctgtgcattcttctacataatcaagagtctggtttcttccatcggagtgtatggagttaaagtggtat

SEQ ID NO: 878753 - DNA, 120 bp, Artificial Sequence
  ENSG00000167912_11 (sequence is synthesized)
actgtacatggcatggtgtgataggtgggaatatgagctactgggggaaaaagttcttacttctagccacttatacaaagagaggccatctcagtgtaatctgaaaaaatgctcacttta

SEQ ID NO: 878754 - DNA, 120 bp, Artificial Sequence
  ENSG00000167912_12 (sequence is synthesized)
taatgctgtatccaaggcccatcaaaaactaaatggatgtatttgtactaaaagttggggaaagttgaatatctaaacctctgagcaaatctttcttaatttagaaaataaaatagagca

SEQ ID NO: 878755 - DNA, 120 bp, Artificial Sequence
  ENSG00000167912_13 (sequence is synthesized)
gtacattaatcaacagagagagtggtgaaaaacactaatgctttgtattatttataggtttaaaatacaaaacaaattacttaaaatggttcctgctctagatgtagtctttcagagtag

SEQ ID NO: 878756 - DNA, 120 bp, Artificial Sequence
  ENSG00000167912_14 (sequence is synthesized)
tattttccaaactagtctggtcagtgaagtcatcttagcagtttagaaaaatactcatgccagagccccacacgcacagattctgattcagttcttttcaggtagggcctgagcacagga

SEQ ID NO: 878757 - DNA, 120 bp, Artificial Sequence
  ENSG00000167912_15 (sequence is synthesized)
atttttaaaagctctccagtggctttaattttcagaaaagattgagaaccactggcctaaaaggaaagataaggtagtctagaaggaaagagtccttaacaaaggaaatgttaaaagtat

SEQ ID NO: 878758 - DNA, 120 bp, Artificial Sequence
  ENSG00000167912_16 (sequence is synthesized)
gaaattttagtagataggctggattgtcattttgtgttgatccccataagaggacattgaggatcaccactcccaaaacctcatcacctacgctgccttttagagatggagttggcaatt

SEQ ID NO: 878759 - DNA, 120 bp, Artificial Sequence
  ENSG00000167912_17 (sequence is synthesized)
tgcccatttactgtcagtaaacttgcatgacttgtaaaggtccaggttacagtttattcacctgacctaggaactttatgtactctagttaccagaaaatgagtgcctgtaaacaaaacg

SEQ ID NO: 878760 - DNA, 120 bp, Artificial Sequence
  ENSG00000167912_18 (sequence is synthesized)
tgtctttaccagtgctgatgtaatgctatcagtacctacttgtgaaatgcctactatatcgtggacctggtcctaatttctttacattgaatttcgcagtcttatttaattttccagatt

SEQ ID NO: 878761 - DNA, 120 bp, Artificial Sequence
  ENSG00000167912_19 (sequence is synthesized)
actttggaaagcctcatcagtaattacaaaccacacggagcatttgattttgttccctcaacattgcccatcttcactttaattatagtttcacaaattgttacgttttcaaatttatac

SEQ ID NO: 878762 - DNA, 120 bp, Artificial Sequence
  ENSG00000167912_20 (sequence is synthesized)
ttgttttcagtgaccacattttatgtctactgattctttgtattatgtaggttaagtcctaaatcttgtagtaatgtctccaaatcacatacagaatgtgttactttggggaaaatagct

SEQ ID NO: 878763 - DNA, 120 bp, Artificial Sequence
  ENSG00000167912_21 (sequence is synthesized)
tttagacagttaatcctatctgtgatttacaagagtcttataaaaattattcaacaaaccatggtacttcctggcaggcattctttgctagattttggagttagtttttcttcaagggtt

SEQ ID NO: 878764 - DNA, 120 bp, Artificial Sequence
  ENSG00000167912_22 (sequence is synthesized)
gaagccctctatagatgcacatgagaatgaaatgtcatatagaggggttgattttgaaatgccagatattaaaactaaaatcaaagcctgccgtattgtataactaaattaatatttagc

SEQ ID NO: 878765 - DNA, 120 bp, Artificial Sequence
  ENSG00000167912_23 (sequence is synthesized)
ccttcactggcctttctgatttatgggctagttttccagtgacagctgatgtcgcaatatttctagggaaaagaaagcctcattcttttaaaataccattcattttatacctcatatggc

SEQ ID NO: 878766 - DNA, 120 bp, Artificial Sequence
  ENSG00000167912_24 (sequence is synthesized)
ccacctaggattttaagccctcattggacatgtgtatacccaatgaggttacatggtgaagtagctatttgtttccttagaatctagccaatcctgagtgctatacattttaaattcaaa

SEQ ID NO: 878767 - DNA, 120 bp, Artificial Sequence
  ENSG00000167912_25 (sequence is synthesized)
aggacatcattaatggttttcatgggaaatgtttacatgttctcaatttaccagttagcatttactgttgtccagggttatttaacatttttctaaagtaatttaaatgtaaaatggaat

SEQ ID NO: 878768 - DNA, 120 bp, Artificial Sequence
  ENSG00000167912_26 (sequence is synthesized)
gttcagcaaaacaagcttagacggaacagagtgaggtgtctgggctcaggagtaaaagaaacaccttccttccctcacatccgtttgtggtttgtttaagaagaagaggaaaaaaaaaaa

SEQ ID NO: 878769 - DNA, 120 bp, Artificial Sequence
  ENSG00000167912_27 (sequence is synthesized)
aaaaaaagaggggggaaaagcgctcaactctcccccaagccgcggcgcgcacccgtcggcgccgagcgcgcagcctgctccaccgccgcctcttggtcccgccgccgccgctgccgccgc

SEQ ID NO: 878770 - DNA, 120 bp, Artificial Sequence
  ENSG00000167912_28 (sequence is synthesized)
ggcctccgctgtgcccgtgccgcgctcctcgggaccagcgcgtcgcacacaaaggggctgccgagccagagccaccagcggcctcagggcaccgtggggagcgcgcagctagggggcgct

SEQ ID NO: 878771 - DNA, 120 bp, Artificial Sequence
  ENSG00000165511_0 (sequence is synthesized)
gctctaggaaagtggcggagcgaccctctatggtcccgggcccacccgaaagcgttgttcgtttcttcctgtggttttgttttctcctccccccaactcggaaggcgtcctgtgaccccc

SEQ ID NO: 878772 - DNA, 120 bp, Artificial Sequence
  ENSG00000165511_1 (sequence is synthesized)
gggacctcaagagctgtaaccgcccctgtgtgtggtcgaggcttttgaaaccaaactctagcctctccaacctagaaactgcatactttccacaaattttgagatttttgagaccctggt

SEQ ID NO: 878773 - DNA, 120 bp, Artificial Sequence
  ENSG00000165511_2 (sequence is synthesized)
acttttcacgaagtcaccttaattatcaccaaaaagctcctgcaagatgggagtggttatactccatttacaggaaaggaaccaaggctcagagaagaaatgtgctccgttcaccgtgtg

SEQ ID NO: 878774 - DNA, 120 bp, Artificial Sequence
  ENSG00000165511_3 (sequence is synthesized)
ctcctcctcagccatcctggccgtgctcagtcatctgaccagctgacctccgtgttcccccactccctggggagctcctccgccttttggcttccaatgctattgctgcatgctgaagac

SEQ ID NO: 878775 - DNA, 120 bp, Artificial Sequence
  ENSG00000165511_4 (sequence is synthesized)
tcccgcattggtaactccagtctgactgtgggacataaatgttattgaactttagacttgtatatcgaactgattactcaagagctgcatttgcatgtgtaatggacatcccaaacctaa

SEQ ID NO: 878776 - DNA, 120 bp, Artificial Sequence
  ENSG00000165511_5 (sequence is synthesized)
cataccccccaaatgaattcctgatatctacctaacctgttcttgcaacagtcttcttcccagggatgggtgaagatcccatcatctttccagttgctcaagccaaaaaccttgatgtca

SEQ ID NO: 878777 - DNA, 120 bp, Artificial Sequence
  ENSG00000165511_6 (sequence is synthesized)
ctgttgtctcttctttttttcatccaaaattcacctgtgatttatccacaaattctgtcggcttcatcgttaaaatatattcattatcaagccactttcaacacttccactgctataacc

SEQ ID NO: 878778 - DNA, 120 bp, Artificial Sequence
  ENSG00000165511_7 (sequence is synthesized)
accaagccaccttcatccaccttctggattattatattggcttccagacgggttgccctacagtctattcacggccccagagtaatcctcttaaacctaagttagatcatgtcattcatt

SEQ ID NO: 878779 - DNA, 120 bp, Artificial Sequence
  ENSG00000165511_8 (sequence is synthesized)
tgttcaaaaccttcaaaggcttcccaacttattagagcaaagccaaggacctcgcagtggcacccgatgcctctcatgatctgtctctttagttctttattgtgtctgcagtgctgaaaa

SEQ ID NO: 878780 - DNA, 120 bp, Artificial Sequence
  ENSG00000165511_9 (sequence is synthesized)
cagtgctcagcagggaacagacactcagtaaatagctgttgaatgaatgaatttataagatgccttattgtttacaaagtacttttacatcttatcttctggttattcatcttcaccata

SEQ ID NO: 878781 - DNA, 120 bp, Artificial Sequence
  ENSG00000165511_10 (sequence is synthesized)
gtctcatgaagcacagattatcatatctgtcttgcaaatcagtaaactgaagcaagagaggctgacctgcctgaagtaatacagtggtttgttggtggaggctaaactaagtcataggtt

SEQ ID NO: 878782 - DNA, 120 bp, Artificial Sequence
  ENSG00000165511_11 (sequence is synthesized)
cattctcttaagttggggctttctgctctgtagggagctgtctctgcatatggcaaagcacaaagctgaatgaggtctggacaaagaagctccactcgcaatctagagagtatctggact

SEQ ID NO: 878783 - DNA, 120 bp, Artificial Sequence
  ENSG00000165511_12 (sequence is synthesized)
ttattattaaattgttataagttggttgatgctggtggttggagagtttggggtaaagggcaatggccagagatctagaaatggtttaggaaaagcgtcaggagcaaacatgacccgttg

SEQ ID NO: 878784 - DNA, 120 bp, Artificial Sequence
  ENSG00000165511_13 (sequence is synthesized)
ggactgtctgctctatgtacactaaaataaaaagataatttttaaaaagccattttgttagtaaggtagttactaattaaaactaactcctttaatgtctacataaagatggattatccc

SEQ ID NO: 878785 - DNA, 120 bp, Artificial Sequence
  ENSG00000165511_14 (sequence is synthesized)
tttttcctatacctgaaaacaactgggccagccatagaagggccagaggtatgtcaactaaagcattgggtaaacgaggatggattttttaaaaagagagagacgaaagtcaggaaataa

SEQ ID NO: 878786 - DNA, 120 bp, Artificial Sequence
  ENSG00000165511_15 (sequence is synthesized)
aggggtgtgtgtccctaagtgtggacagagtcctgggcagtaaggatggagaggagggagagccagaaaaatatatgaaggagaggagggtaaaggagaatgggaaaaagacagggagag

SEQ ID NO: 878787 - DNA, 120 bp, Artificial Sequence
  ENSG00000165511_16 (sequence is synthesized)
aaagcaggtagggttttatgccttcagcctagctgttagtataataatagttaacacttattgagtgcttattgtgtgccaggcactgtttgcagcatttgaggatctcacgtgagattc

SEQ ID NO: 878788 - DNA, 120 bp, Artificial Sequence
  ENSG00000165511_17 (sequence is synthesized)
ctgaggcatgattattcctgagggtttgctccaccttctctggttttggtccctgcactttgtggtgtgactccggtgcctcctggtgaaccacatgcctgtcccactgatgttgacttg

SEQ ID NO: 878789 - DNA, 120 bp, Artificial Sequence
  ENSG00000165511_18 (sequence is synthesized)
accactgatttgaattggctgaccgcatgtgactggatgcaaggggtacatcacatcccagaagaaacttcaagtcattgtgtttctgccaggactctgctctttccctctgccttgaga

SEQ ID NO: 878790 - DNA, 120 bp, Artificial Sequence
  ENSG00000165511_19 (sequence is synthesized)
atagcatgtcccaagtaggggctgcccctttagtctaggaaccaggatgataagacacatggagcagagccacagaagctcacatgtaaccacaacggtcccacgtaatgttagagaaac

SEQ ID NO: 878791 - DNA, 120 bp, Artificial Sequence
  ENSG00000165511_20 (sequence is synthesized)
aaatgctcttgtaacactgagattcttggtggtattattgcattaaagttgactaatgtacctcccaccaaccgtaagagataggaattgttattatcctgtgatattgtgaaatacata

SEQ ID NO: 878792 - DNA, 120 bp, Artificial Sequence
  ENSG00000165511_21 (sequence is synthesized)
gttgatcttctccccgtttcctgacatacaacttctaaaatccttagaatctccaaagtgatgtctttttatatgctgatgagttgactgatgcctggcagcccctgggtagcttcagga

SEQ ID NO: 878793 - DNA, 120 bp, Artificial Sequence
  ENSG00000165511_22 (sequence is synthesized)
tggggctggtcactggaaagaccacagcaggattagaaggatggcaatttcagctccaccccatcaacatctggggaggagggcaactgaaggtgaagtggatcaccaatggctgatgga

SEQ ID NO: 878794 - DNA, 120 bp, Artificial Sequence
  ENSG00000165511_23 (sequence is synthesized)
ttaatcaatcatgcctgtgttacaaagtctccataaaagctcccaaaggactgggttcagagagcttctggatacctgaacacatggatgttactggagggtgccacctggggtcggggg

SEQ ID NO: 878795 - DNA, 120 bp, Artificial Sequence
  ENSG00000165511_24 (sequence is synthesized)
gtgcaaaggggaaggagtatggaagctccgcaccctttccttcatacctcactatatgcatttctttttctatatcctttggaatatcatttgtaataaaccaggaaatgtgtttcgctg

SEQ ID NO: 878796 - DNA, 120 bp, Artificial Sequence
  ENSG00000275769_0 (sequence is synthesized)
tcttaaatcacaaaattagcagctcccacagtgtgttctgtttatcacacaactaccattactgcttgttctccccttttaagtaatctctaggcagaggatcagagacctaggcttgct

SEQ ID NO: 878797 - DNA, 120 bp, Artificial Sequence
  ENSG00000275769_1 (sequence is synthesized)
tatttatttgtttacctgagaaatagatcactgtttctggggactttgagacatcttccaacatccctgactcttagtggttttaaaatagaaatgtttagtaatcctatcttaacattc

SEQ ID NO: 878798 - DNA, 120 bp, Artificial Sequence
  ENSG00000275769_2 (sequence is synthesized)
acctattttattcttcaaaaggccagtttcttatcctctggacattttctaaatgcctgcttatatgactttttgctgtattaccttcttgatctaataaacactccaaaatgactccta

SEQ ID NO: 878799 - DNA, 120 bp, Artificial Sequence
  ENSG00000253842_0 (sequence is synthesized)
gttgttgctatttttgttagtaagatgataagaagtcctaccactgaaaggatgtgcgggtagaaatgagcaattgcaactagaagagcctgtgtgcccacaatcaagggtaaggaggag

SEQ ID NO: 878800 - DNA, 120 bp, Artificial Sequence
  ENSG00000253842_1 (sequence is synthesized)
tgtcatggagcagctctctactgccctgagaatgacatccccactgttcaccatggccttaaatcccctgcgaattccacctcatcctctgccacttcccgtcactgctctgaagatgcc

SEQ ID NO: 878801 - DNA, 120 bp, Artificial Sequence
  ENSG00000253842_2 (sequence is synthesized)
ctgatcttgtttcagtcccttggatgtacccagctcttctccatctttgcatgtgtcatagcctcttcctggaaaacccttcctgctgctcatcccagaactgactctccatgtatttac

SEQ ID NO: 878802 - DNA, 120 bp, Artificial Sequence
  ENSG00000253842_3 (sequence is synthesized)
tcttattttgagagaagggggcatttccaccaccagaagggaacttgctgtcttggtagccattgtcccctgacacctggcacatctactctatacagtcaccattcaagtggatgttga

SEQ ID NO: 878803 - DNA, 120 bp, Artificial Sequence
  ENSG00000253842_4 (sequence is synthesized)
atgagtacacttgtttcacagtttggttgggtaagccccaaagcttggttcccggtaggatcaggctttatgagtgggctgagtttctataaaagtctccctaccagtttccaatcttgg

SEQ ID NO: 878804 - DNA, 120 bp, Artificial Sequence
  ENSG00000253842_5 (sequence is synthesized)
tgaaactatgtctgtgggcacaaatgagaaaacttgccattcgtatcaccggttacccagctgtggaccatgtgggccaggtccacagaagagccttatcctactttcactttttatttc

SEQ ID NO: 878805 - DNA, 120 bp, Artificial Sequence
  ENSG00000253842_6 (sequence is synthesized)
ctgcagtcatggggacagtggggcaccaccttttcagaaactctaagaaagagtgttcatgaaagtggccagagagttttacaattttgccattaggaatgattaaatatccatgactaa

SEQ ID NO: 878806 - DNA, 120 bp, Artificial Sequence
  ENSG00000253842_7 (sequence is synthesized)
tgcctctgtgattaaattgtattgggagttccaaagtttgctttttgtgctttaagagtaaaatgagaagaaagcaactgaacttctcatttagaaaatatttcttctctccttggccag

SEQ ID NO: 878807 - DNA, 120 bp, Artificial Sequence
  ENSG00000253842_8 (sequence is synthesized)
aaaaaaaaaaagtaaaaaaaaaagaacatttcttctctcctggacccagaagcaccttccagacatgaatccaggaagtaggaatgagagctgccactgcagggtagaaaatgcaagtaa

SEQ ID NO: 878808 - DNA, 120 bp, Artificial Sequence
  ENSG00000253842_9 (sequence is synthesized)
tagaaaatgcaagtaaaccttatacgagatgtaacacccaggcagggtgagcctcaggaaatgggaacgctccaatggcacggctcatctggactgggccactctgagtgccagaatttg

SEQ ID NO: 878809 - DNA, 120 bp, Artificial Sequence
  ENSG00000253842_10 (sequence is synthesized)
tataacgttttagatttgcttagatataggaatatacaagaaggagaatatataagaggatttagcagtggttatttctgagaaacagggagtacatgtagttttgggtttttttcttag

SEQ ID NO: 878810 - DNA, 120 bp, Artificial Sequence
  ENSG00000253842_11 (sequence is synthesized)
tttcttagctggatttttttaagtttctaaaatgaacatgatttacttttggaattttttaaaaagcattgaatatttaaaatttttaaaataataggcactcattaagcaaaaaaatta

SEQ ID NO: 878811 - DNA, 120 bp, Artificial Sequence
  ENSG00000253842_12 (sequence is synthesized)
tgaagttacaaaggaagaagaaaactgttcaaatctactatttatgtttggggtttttaaaaattgtattttttaaaaaaataaactggtttgtcttatttagcatagctataatgatac

SEQ ID NO: 878812 - DNA, 120 bp, Artificial Sequence
  ENSG00000253842_13 (sequence is synthesized)
tgtatataaaatatttttgcttgcattcttcaacttatttcattataagtactttccatgttattacttagtctttacagcactattttaacttgcaaataacattctgttgaaatatca

SEQ ID NO: 878813 - DNA, 120 bp, Artificial Sequence
  ENSG00000253842_14 (sequence is synthesized)
aggttccgggctttgcttaaatggactaaattttaattacagaaagcgtggtgagcagcaggcaaggagggtggacttcccgcatgccgtgatctggattgaaaaaggccacagagagag

SEQ ID NO: 878814 - DNA, 120 bp, Artificial Sequence
  ENSG00000254607_0 (sequence is synthesized)
ccttatctatgctgtgcaaaggaataagaaactagtgctgtctcgggaaccagcaacacagatgttcccaggagcaatgtttgcagggttctatgaggctgaaaatattggatcagtatt

SEQ ID NO: 878815 - DNA, 120 bp, Artificial Sequence
  ENSG00000254607_1 (sequence is synthesized)
actttgcaaacaaatcaaatgtacgtttaggaagatgaaatcatgcaacagaaagatttttcagaatttttcagcaacagattttacacacaattcagaaggaagaaagaacagatgagt

SEQ ID NO: 878816 - DNA, 120 bp, Artificial Sequence
  ENSG00000254607_2 (sequence is synthesized)
ttgggaatcaggagaccagatgtcaagactggactacatctttatattcatttccagatttaaagttctatgttgtattttatttgatgcaaagcaataaaatattcctccctcctgtga

SEQ ID NO: 878817 - DNA, 120 bp, Artificial Sequence
  ENSG00000254607_3 (sequence is synthesized)
accagccacctcactggtcctctgttgccagtagaaaaagccctacaaggattaatgcaagaagaagttctgctttggggttctatgaggctgaaaatattggatcagtattcctgagga

SEQ ID NO: 878818 - DNA, 120 bp, Artificial Sequence
  ENSG00000254606_0 (sequence is synthesized)
gggagatagaatgtcatcggaatgcccatagacatctaaagcagtgcagtgatttggaggaaattaatgtttctgaaattgttggatcataaagttcaaggggcaaaatattagaacttg

SEQ ID NO: 878819 - DNA, 120 bp, Artificial Sequence
  ENSG00000254606_1 (sequence is synthesized)
aagctggaacaataagcaagggtcaaatgacagcgatccagttagaccatgttgaagacctcagattgtatcctttcagtgatgggaacatcgaaacatttcatctctctgttgcccttt

SEQ ID NO: 878820 - DNA, 120 bp, Artificial Sequence
  ENSG00000254606_2 (sequence is synthesized)
ctttgcaaatgggacagactcagggcattcagaatagaatgttccgctgagttgttgtgaaaactacagtgtaaggagaagcatgaaaaatgctgcatatgccatgaaacaaagaagcca

SEQ ID NO: 878821 - DNA, 120 bp, Artificial Sequence
  ENSG00000254606_3 (sequence is synthesized)
ccccaatcaattgtggcatccttagcttggccgttgaacagctaaggagagggaatcactccaagggtattttttttttttcttgagattttgaaagagtagagatggacatcagaaata

SEQ ID NO: 878822 - DNA, 120 bp, Artificial Sequence
  ENSG00000254606_4 (sequence is synthesized)
tttgacccagtcctttttcaaattgctttgctgtgctgaaacttttgtgtggatgaaattcacctgagatgcttgtttaaatgcaccttcctgagcctacctctacacaggctgatttag

SEQ ID NO: 878823 - DNA, 90 bp, Artificial Sequence
  ENSG00000254606_5 (sequence is synthesized)
atgcaccttcctgagcctacctctacacaggctgatttagcagattttggagtgggatccagagttctgctttttaaagaagaacctcaa

SEQ ID NO: 878824 - DNA, 120 bp, Artificial Sequence
  ENSG00000254605_0 (sequence is synthesized)
ccagatccaggttcaacagcataggtttttcagcagacaatcacaaccatgaaaacgcccaaaatggctccatgaatggaacgataaaaagaccaaagagatggacactagcacaaaaac

SEQ ID NO: 878825 - DNA, 120 bp, Artificial Sequence
  ENSG00000254605_1 (sequence is synthesized)
aaaagggacagtggcctgccgagccctgggcacaattattgagaattgctattggtccacgtgtctccatccccccggcctccaccctagacctggccacctcttctctcccctggattc

SEQ ID NO: 878826 - DNA, 120 bp, Artificial Sequence
  ENSG00000254605_2 (sequence is synthesized)
cctgaagcaccctcagtctggccttcccactcctgttgcccactctccatgccatagccaaagcgatcttttataaaggcaagattgtgccactgcattccaacctgagcgacagcaaga

SEQ ID NO: 878827 - DNA, 120 bp, Artificial Sequence
  ENSG00000254605_3 (sequence is synthesized)
gcagaagaaatatgaattcccacagcgagtccacgtgctcacttatggcctgtctgtaaaggacgcacccagcccgacgcccgcagcgaagcacctctcggtaagtagcagttacgaccg

SEQ ID NO: 878828 - DNA, 120 bp, Artificial Sequence
  ENSG00000254605_4 (sequence is synthesized)
gtaagtagcagttacgaccgcgaacgatgactacgaatgagaggctgaatggtcactgggcctgtttttctaaaaagagacaaggtctcattctgttgcccaagctggagtgcagtggtg

SEQ ID NO: 878829 - DNA, 120 bp, Artificial Sequence
  ENSG00000254604_0 (sequence is synthesized)
acaagagagtgaatactacatgatcttgtttatacacatgaagaacgaaactaacagagcagtctatggcaccaggagccaggcactcatccctagggaaggggcagtgcctcagaagga

SEQ ID NO: 878830 - DNA, 120 bp, Artificial Sequence
  ENSG00000254604_1 (sequence is synthesized)
gcaggaggcctccagagccctggtcagatcccatttttcaatgtaggtgtggaccacacaggggatgctgactttacagattcatttaactgttcactcatacgtgcatttctctatatg

SEQ ID NO: 878831 - DNA, 120 bp, Artificial Sequence
  ENSG00000254604_2 (sequence is synthesized)
tatatagtacaaatgttaattactcagtttgaatcatgaaaactgaaaaatgaaattcaaaacatttaattataaaatgtgtccttaaaatattaactttttccttcaagaggcccttag

SEQ ID NO: 878832 - DNA, 75 bp, Artificial Sequence
  ENSG00000254604_3 (sequence is synthesized)
gtccttaaaatattaactttttccttcaagaggcccttagactgattcaattttgataaaaaggctgaggcagaa

SEQ ID NO: 878833 - DNA, 120 bp, Artificial Sequence
  ENSG00000254602_0 (sequence is synthesized)
aaatccagcacgaggggcatctgggaacagggtttctgccagccccaccttggggccgcatttggcgggaactggatctgccttcacctgcagccctgtgcggggcgtgacggaaagagc

SEQ ID NO: 878834 - DNA, 120 bp, Artificial Sequence
  ENSG00000254602_1 (sequence is synthesized)
ggggagaggggcgtcctggtgcgggggttgttgagcttggacaccagccctgaagcagggaaaagacagatgtactaattgtcatggatggcaaactgtgcccccaaacttgtaccaagc

SEQ ID NO: 878835 - DNA, 120 bp, Artificial Sequence
  ENSG00000254602_2 (sequence is synthesized)
attatgcgtgcttcatgaatggagacacctacgttatatgaagttctctattgggctgtaaacttcctgagacaggccttctgggaaattactctctacatcccaggactgcaatgtcca

SEQ ID NO: 878836 - DNA, 89 bp, Artificial Sequence
  ENSG00000254602_3 (sequence is synthesized)
ctgggaaattactctctacatcccaggactgcaatgtccagtgcagacccgtgcatttagatgtttccaaaatagcagttgtttccgcg

SEQ ID NO: 878837 - DNA, 120 bp, Artificial Sequence
  ENSG00000254602_4 (sequence is synthesized)
attcaagatggacggcagggagtgtggaaggagaaagggggcgaggggggaagagcgagatcggcagaggagagggtctccgcggcccaccggcctcgcaacctcggtcccggccggcgg

SEQ ID NO: 878838 - DNA, 120 bp, Artificial Sequence
  ENSG00000254602_5 (sequence is synthesized)
gtggcggggcggccgctggggatccaagcccggcccgggagaggggctggcggggtgcgagagggcgtgagcgagggggagcgaggccagggaggggagccaagagggagggaagggcag

SEQ ID NO: 878839 - DNA, 82 bp, Artificial Sequence
  ENSG00000254602_6 (sequence is synthesized)
cactttgggctcttcttacttttaagccaacttgctaagaagggagttacagtgtttgacccagactatcaagatgaaatca

SEQ ID NO: 878840 - DNA, 75 bp, Artificial Sequence
  ENSG00000254602_7 (sequence is synthesized)
tgaaatcagtctactactccacaatggcggtaaggaagtatgcgtggaatacaggagatcacgtagggcggcaac

SEQ ID NO: 878841 - DNA, 120 bp, Artificial Sequence
  ENSG00000254602_8 (sequence is synthesized)
atgaaggtttgggtcactccaccaggtaaaaaaaacataatctgctgaggtgcttgctgaaggcaaacggaattcagaatgggtagtcaaagaaggtagtcatcaatacgaactatgacc

SEQ ID NO: 878842 - DNA, 84 bp, Artificial Sequence
  ENSG00000254602_9 (sequence is synthesized)
accttttgttaggaacatgtttgtgcatatatacacttgtattaagaaaatatcttcattttatttcctttcttttgcctttat

SEQ ID NO: 878843 - DNA, 120 bp, Artificial Sequence
  ENSG00000254602_10 (sequence is synthesized)
agaaaatatcttcattttatttcctttcttttgcctttatcatgtgacataagacttactgacttgatatcagcacttaagtgttgttaactctatgtaatagcatttgggttggggatt

SEQ ID NO: 878844 - DNA, 84 bp, Artificial Sequence
  ENSG00000254602_11 (sequence is synthesized)
gttggggattggtgcgtttccggttgtacaaaggatagctgtattatgttaagccatgtatgatttcaggagacgtgtatgggt

SEQ ID NO: 878845 - DNA, 120 bp, Artificial Sequence
  ENSG00000254602_12 (sequence is synthesized)
ctgggtgtgtctgtgagggtattgccaaaggcgattaacatttgagtcaatggactaggaaaggcagacccacctcaatctggatgggcacaatgtaatcaactgtcagctaggccagaa

SEQ ID NO: 878846 - DNA, 120 bp, Artificial Sequence
  ENSG00000254602_13 (sequence is synthesized)
tgggcacaatgtaatcaactgtcagctaggccagaataaaagcagacagaagaacgtggaaagaccagactggtttagcctctgagcctacgtctttctcccatgctggacgcttcctgc

SEQ ID NO: 878847 - DNA, 120 bp, Artificial Sequence
  ENSG00000254602_14 (sequence is synthesized)
cctcgaatattgaactccaaggtcttcaactttgggattcggactggcttccttgcccctcagcttgcaggcagcctactgtgggacctcatctggtgatcatctgagtcaatattccgt

SEQ ID NO: 878848 - DNA, 120 bp, Artificial Sequence
  ENSG00000254602_15 (sequence is synthesized)
aataactctgatttatatatacatctatcctattagttctatcccgctagagaactctgattaatagagcagttgagttgcatcttcagacatgaaccaagtgtctggctttggtctcaa

SEQ ID NO: 878849 - DNA, 120 bp, Artificial Sequence
  ENSG00000254602_16 (sequence is synthesized)
agagactgaattagactcttagctctgccaattacttggcaggaaccactaggcaaattactgataatctttgtgccttagtcttactcttctgctaaatgaagctaataatatttatta

SEQ ID NO: 878850 - DNA, 120 bp, Artificial Sequence
  ENSG00000254602_17 (sequence is synthesized)
ttattagctcatggagatgcagaataaagtgagataacatttaaatgcctgaaaaatgcctggcacatgataggcagtaaacagtagtgtcatttcaaaacaacattctcgccaggtgcg

SEQ ID NO: 878851 - DNA, 120 bp, Artificial Sequence
  ENSG00000254602_18 (sequence is synthesized)
gcacgtgcctgtaatcccagctactcgagagcctgaggcaggagaatcgcttgaacaggaagtcagaggttgcggtaagctgagatggcgccactgtactcacagaggttgcagtgagcc

SEQ ID NO: 878852 - DNA, 83 bp, Artificial Sequence
  ENSG00000254602_19 (sequence is synthesized)
agaggttgcggtaagctgagatggcgccactgtactcacagaggttgcagtgagccgatcgcgccagcctgcattcttggctg

SEQ ID NO: 878853 - DNA, 120 bp, Artificial Sequence
  ENSG00000254602_20 (sequence is synthesized)
gaggaagattgccttctgcccacgcgccagcctccgagtggctgaaggtgctggaggcagaggataagaagggaggtggcccctgttggctccgataagcagcttggacaccagccctga

SEQ ID NO: 878854 - DNA, 120 bp, Artificial Sequence
  ENSG00000254602_21 (sequence is synthesized)
tttgctgcctcacccctgggtgatgttcaggctagcctggtgcgcgagaggaggggaatggcaggtccccgcttcgcgtaccttggaaataagctcatcgtgtttggccaggtgtgcacg

SEQ ID NO: 878855 - DNA, 120 bp, Artificial Sequence
  ENSG00000253469_0 (sequence is synthesized)
atggaggaagacatgtggacaatttttgctgagacagctggtgaatacagagaacagtgaatgcaaactggatcaagttagagaagaggtggaatctcaggcagagtttggactgtattt

SEQ ID NO: 878856 - DNA, 120 bp, Artificial Sequence
  ENSG00000253469_1 (sequence is synthesized)
tgtgcattaagagacgtttgacctcagccgtgacatgatatagaacactgcttgcagaagataaattcgcccttctagccacctactgaatagagaagacaccagggacccagagatggg

SEQ ID NO: 878857 - DNA, 120 bp, Artificial Sequence
  ENSG00000253469_2 (sequence is synthesized)
actgcacgactctgatgggtagaacccattccctgtccaatgcttctctctgctccccactcccaccagtgtgcatttgaactgtgacatgagcaagaagtaaaccctcattatgtaaag

SEQ ID NO: 878858 - DNA, 120 bp, Artificial Sequence
  ENSG00000253469_3 (sequence is synthesized)
ccgctgaagtttgaaggttacttattatagctgcagcctactcagactaatacaactctccattatgagaagctaatatctacaaagaagtaatattcaacgcactccaaaagagcatac

SEQ ID NO: 878859 - DNA, 120 bp, Artificial Sequence
  ENSG00000253469_4 (sequence is synthesized)
attgtaaagagattttaataagttattgcatattgctgattctgagaatacttgtttggggaaaagtaatcacaatgctatactttcaaataaatacataatcgtgattttaatgatcaa

SEQ ID NO: 878860 - DNA, 120 bp, Artificial Sequence
  ENSG00000284543_0 (sequence is synthesized)
gcagcattgtatgagaactgctagaatatcactcaccacttcccatagagattctgtttgttcatctgcttgtcccactgtgtgccttacacatagtaggtgctcttggaatgtgtgtga

SEQ ID NO: 878861 - DNA, 120 bp, Artificial Sequence
  ENSG00000284543_1 (sequence is synthesized)
gatggattaacatgagaagtgcttctctgcatgatttcaccattgaagtgttgaaagcaactagcactcctccttcctgacctccaggcttccacccagctgtggggactgctgtggtgg

SEQ ID NO: 878862 - DNA, 120 bp, Artificial Sequence
  ENSG00000284543_2 (sequence is synthesized)
aagggcctagtctgaatctggacaggggaggtgcctgcaaatattttcgtgcctgcaaatatttttgtgcctcgggacagatggatgtccagtttactgtctgcttcctcagtggttcta

SEQ ID NO: 878863 - DNA, 120 bp, Artificial Sequence
  ENSG00000284543_3 (sequence is synthesized)
gagctgctcagtcgcaggctccagatgtctgcttcagaattcaagaacaccttcctgagctgggaaacagatccaaggaaatatcagccagaggcttcattttatcatctgtggaaatgc

SEQ ID NO: 878864 - DNA, 120 bp, Artificial Sequence
  ENSG00000284543_4 (sequence is synthesized)
tgtcttgaggctgcctgcagaacagagggtcatctgctttcattagattctcaagggagcctcaacaggctacacctgaaccccaggtttggggcatctctccagccctcccagctctga

SEQ ID NO: 878865 - DNA, 120 bp, Artificial Sequence
  ENSG00000284543_5 (sequence is synthesized)
catcatcatcaccattaacagctgaaatgtgtgaggtggttgggatgtaccaacaaccctcccaagagtcccatatctacctgacctcatttgaccttcacagcaacccagtgactcagc

SEQ ID NO: 878866 - DNA, 120 bp, Artificial Sequence
  ENSG00000284543_6 (sequence is synthesized)
tgctatttggcccacgttttacaaacctgagtcagtgtgctttacctcagtgacccaagaacccaggtgctagagtcaggcctgcatccaaatcaggggtgggatcagtggtgtgccctg

SEQ ID NO: 878867 - DNA, 66 bp, Artificial Sequence
  ENSG00000284543_7 (sequence is synthesized)
cctgcatccaaatcaggggtgggatcagtggtgtgccctgaacaaatcattatcctcttttttgtt

SEQ ID NO: 878868 - DNA, 71 bp, Artificial Sequence
  ENSG00000284543_8 (sequence is synthesized)
gctcacagcaaccactcgactacaggtgcgtgccaccacgctcagctaatttttgtgttttagtagagaca

SEQ ID NO: 878869 - DNA, 69 bp, Artificial Sequence
  ENSG00000284543_9 (sequence is synthesized)
gtcagcgggctggcgaatatacagcaggaagaaaaaggtgaaaaggcaagactggcctagcctcccagc

SEQ ID NO: 878870 - DNA, 120 bp, Artificial Sequence
  ENSG00000284543_10 (sequence is synthesized)
tgttttagcacctcttacgaatgagtgtctgagcagccaaaaaataaataatgaatcatccaggcaaaggggaagaaaaatggacttggccagagatggggaagaacgtacgcaaaaaga

SEQ ID NO: 878871 - DNA, 120 bp, Artificial Sequence
  ENSG00000284543_11 (sequence is synthesized)
tgaggtcgttcagattggaagttggattggagggcggaccaaaggagaagctgctgaagtagatgttaaagatggagagaagtggacggcagagacatagaggaggaaaagtcagcaaga

SEQ ID NO: 878872 - DNA, 120 bp, Artificial Sequence
  ENSG00000284543_12 (sequence is synthesized)
cccgagatgtgtatggagagttagagtgtgggaagtgtgacatgtaactgaatcggatgatggcaactttcactgggcagtgaaaggtcaggttggtggtaaaagtcatgagttgacttt

SEQ ID NO: 878873 - DNA, 120 bp, Artificial Sequence
  ENSG00000284543_13 (sequence is synthesized)
tgagggcaataatctcctttcttccccactagccatgttcatgaaagtacttatttgcccattttaaaatatgtagcaatgtgccccagaaaggctggggcatgagtcctgcttggggtg

SEQ ID NO: 878874 - DNA, 120 bp, Artificial Sequence
  ENSG00000284543_14 (sequence is synthesized)
gggttgagtcacagcacaagggcactcacatgccccaccccgaggaggtccctgttctgacagaagccctgagccgtgactgtggactgacacccactgcctctgtgaccttgggtgggt

SEQ ID NO: 878875 - DNA, 120 bp, Artificial Sequence
  ENSG00000284543_15 (sequence is synthesized)
tacataacctcccacatgagaaggaggcggaggcacccgggcttgtggcctgagctaacctgggtagtgggagccctatctgtgaattgccaagggactgccatggggactggtgagaac

SEQ ID NO: 878876 - DNA, 120 bp, Artificial Sequence
  ENSG00000284543_16 (sequence is synthesized)
acagctctgcaaggcccttttgatttgttttaacctttaacttttcaaaaatttcaaatttaaaggatgcatgacacagttgaagtttatcacaaatggactcacgagtgtgtctcctca

SEQ ID NO: 878877 - DNA, 120 bp, Artificial Sequence
  ENSG00000284543_17 (sequence is synthesized)
gctcccaactcccggactcctgacctccaaggccaatacttcgaattctgttaggcatttcttctagcatttatctcaatagttccaaataacaagctcgtgatgcgatttcacaaccct

SEQ ID NO: 878878 - DNA, 120 bp, Artificial Sequence
  ENSG00000284543_18 (sequence is synthesized)
tgcttcaaatgtcatgtattgactttccatatgagggatggtccttgtttctgttatatctccctgcttcctcttttcagttctctgaatatatgttttaaaaatttaggctggacgcgg

SEQ ID NO: 878879 - DNA, 66 bp, Artificial Sequence
  ENSG00000284543_19 (sequence is synthesized)
ggacgcggtggctcacgcctgtaatcctagccctttgggaggccgggaaccccttccctacaaaaa

SEQ ID NO: 878880 - DNA, 77 bp, Artificial Sequence
  ENSG00000284543_20 (sequence is synthesized)
tctttcagtgagccaatattgcgccattgcactctagcctgggtgatagagccagactctgtctcaacaaaacccaa

SEQ ID NO: 878881 - DNA, 80 bp, Artificial Sequence
  ENSG00000284543_21 (sequence is synthesized)
ggaggtttcagtgagccaatattgcgccattgcactctagcctgggtgatagagccagactctgtctcaacaaaacccaa

SEQ ID NO: 878882 - DNA, 120 bp, Artificial Sequence
  ENSG00000284543_22 (sequence is synthesized)
acaaaaaaaaaaaaaagagagaaagaaaatgggagaagggggctgttccatgaaagggccttatatccaaaatgacccccaaatgccaaaggagctggaaaccagaaaaggagggaaaca

SEQ ID NO: 878883 - DNA, 120 bp, Artificial Sequence
  ENSG00000284543_23 (sequence is synthesized)
aggagggaaacaaattcagtttggtctagagtgttttactgggggagaacttacaggcagaagcgtagtcttgggattttagctgcaaggcagaagatagatctccacactgctactccc

SEQ ID NO: 878884 - DNA, 120 bp, Artificial Sequence
  ENSG00000284543_24 (sequence is synthesized)
cagacccggggcttctgtaccatagggaaagggcgtgtgtgtccagcaagacaataaaaggcagcctccagaacaggcaagaatgttacatgcatcatggcctatgatttgtgtgatgac

SEQ ID NO: 878885 - DNA, 120 bp, Artificial Sequence
  ENSG00000284543_25 (sequence is synthesized)
attcagattgtcatcttcttacactaaggatagtaaataaagtaagaatcagaaggcatttgcaggactggggctaattagaatacaacatggcacattcatatccaagatggagtcact

SEQ ID NO: 878886 - DNA, 120 bp, Artificial Sequence
  ENSG00000284543_26 (sequence is synthesized)
tcctgtctccacaggggcattgaaggaaaggtgacacttacaattctgattggtgcttagtgacattatgcataaataaagaaatatgcagttaacatatatagggtaaaaagttgtgga

SEQ ID NO: 878887 - DNA, 120 bp, Artificial Sequence
  ENSG00000284543_27 (sequence is synthesized)
atacgtaggggtcttaaggtctggagaggggtgattgattctaccctgcatttgtgcttcatctgataggcaaggttacaatcagtcatgccagtgaaatatttgacagactccacccta

SEQ ID NO: 878888 - DNA, 120 bp, Artificial Sequence
  ENSG00000284543_28 (sequence is synthesized)
gcaggcgagacttcagctttagttcataggccttatattagtacctgtttgtccagcctgcagccatcttgggctgtgttttaaaactttttctttcagattttcttttttctaaaaatc

SEQ ID NO: 878889 - DNA, 120 bp, Artificial Sequence
  ENSG00000284543_29 (sequence is synthesized)
tttcccttttggttaaattctccaaaagaggactttgaaaaccaaataatatatctgatggatttgaagaggacaggtcccctttgcttggaattatagggcataggggaatcaaattgg

SEQ ID NO: 878890 - DNA, 120 bp, Artificial Sequence
  ENSG00000284543_30 (sequence is synthesized)
aatttttaagtgcccttgttctatttttcactcctatatgaagttctgtcatttggtttgtcagtgaggatgcaaaaattcctgtatttcctttcagaatgcgagaggctctcctgtcat

SEQ ID NO: 878891 - DNA, 120 bp, Artificial Sequence
  ENSG00000284543_31 (sequence is synthesized)
gccaatatctcctcacgttatggagaaaagaggtgatcattgcaattagaattattttcttaggctgttcctcagatgcgatgatgtgttgcatggtcaaccatattgctgaagagcctt

SEQ ID NO: 878892 - DNA, 120 bp, Artificial Sequence
  ENSG00000284543_32 (sequence is synthesized)
ccatattgctgaagagccttgaggagttgggaggaagaataggccatttgatgtgttttataaaccttgggactttaggattgaaaaaatttaaaacaaggccgggcgcggtggctcacg

SEQ ID NO: 878893 - DNA, 120 bp, Artificial Sequence
  ENSG00000284543_33 (sequence is synthesized)
ctcctaaagccagagggaccatgagacattagtacctgagcatcacctctctccaagtgatttatcaaagctttatttccaatcacatactgagttttgataaaacagttttattctttg

SEQ ID NO: 878894 - DNA, 120 bp, Artificial Sequence
  ENSG00000284543_34 (sequence is synthesized)
tggcaactttcactgggcagtgaaaggtcagttgagaacaacaagcaataacaaccatacgaagaatctagcaaactcagactttacttctccttttcgtggtcctggaaacagctcaga

SEQ ID NO: 878895 - DNA, 120 bp, Artificial Sequence
  ENSG00000284543_35 (sequence is synthesized)
ataaagtggatctggacctctacagaagagagggagctccagattccagataggatttcactgtgttgtccaagctggagtgcagtggctcaatcacaggtcatggcagcctcgacctcc

SEQ ID NO: 878896 - DNA, 120 bp, Artificial Sequence
  ENSG00000284543_36 (sequence is synthesized)
tccacgtgatattgactatgatcatctggagggtccgtggttccagtgacttagcatcaaagacggcctaacacacacgtctggtgcctctgctgggatggctgaagcagccggaggctg

SEQ ID NO: 878897 - DNA, 72 bp, Artificial Sequence
  ENSG00000284543_37 (sequence is synthesized)
ctggtgcctctgctgggatggctgaagcagccggaggctggccagctactcaggaggcggaggcaaaggatc

SEQ ID NO: 878898 - DNA, 120 bp, Artificial Sequence
  ENSG00000284543_38 (sequence is synthesized)
aagctatcgctgactgccggtgcatgttggaaatgggccacagggctgggcatgatatgagctgcctggacattggagggggcttccccggaatggagggctccgggcccaagtttgagg

SEQ ID NO: 878899 - DNA, 120 bp, Artificial Sequence
  ENSG00000284543_39 (sequence is synthesized)
tttgagttatcttttgcatacggtgtgaggtaggagtccagattcattctttcacatgtggaaacccagttgtcccagcaataaacagttattcctgaagtatttattcaacattcattc

SEQ ID NO: 878900 - DNA, 120 bp, Artificial Sequence
  ENSG00000284543_40 (sequence is synthesized)
agatggaggtatgtagagggagggtagatggctgggcctgtgctaacagcactggacctctcttttctgtcctcagcaaggtttctctgcccagacatgcaggatttcttcagcaaagca

SEQ ID NO: 878901 - DNA, 120 bp, Artificial Sequence
  ENSG00000284543_41 (sequence is synthesized)
aagcagagtctgatcatctttccaggtaatacaagagtgttcctgcaaagtgagcctctgaagctttggaggggaagtgtattagtctgttttgcgttgctacaaaggaatacctgagac

SEQ ID NO: 878902 - DNA, 120 bp, Artificial Sequence
  ENSG00000284543_42 (sequence is synthesized)
tgggtgatttataaagagaagaggtttatttgacctatggttctgcaagctgtacaagaagcatggtgccaacatctgcttctggtgaggactcaggaagcttccactcatggctgaagg

SEQ ID NO: 878903 - DNA, 120 bp, Artificial Sequence
  ENSG00000284543_43 (sequence is synthesized)
caaaggggaagccggcatcacatggcaagagagggagcaagacagaggagggggtgcttcaggctcctctaaacaaccagatctcgtatggactcacagagtgagaactcactcattact

SEQ ID NO: 878904 - DNA, 120 bp, Artificial Sequence
  ENSG00000284543_44 (sequence is synthesized)
ctcacagagtgagaactcactcattacttcaaggacagcaccatgacattcatgaggggtgcgcccacatgacccaaacacctcccactaggccccacctccaacattggaggtcacatt

SEQ ID NO: 878905 - DNA, 120 bp, Artificial Sequence
  ENSG00000284543_45 (sequence is synthesized)
atgcaaaccatacagggagggaggagcagggtggtggatacagctgcacagactgggaaatgggccagaagcagctttccggcttgtgtaggtgctaggaaagacaggctggtaagacac

SEQ ID NO: 878906 - DNA, 120 bp, Artificial Sequence
  ENSG00000284543_46 (sequence is synthesized)
agaatgcctttcggtctccaagcgtccagcatggtctagatcagatctgcatataaggtcatcttatcagaagggttctttgagttctggaaaccacactctgcccctccactttcacat

SEQ ID NO: 878907 - DNA, 120 bp, Artificial Sequence
  ENSG00000284543_47 (sequence is synthesized)
ctggaatatcaggacaatatttgacatgtagcatacatcggttttggagcctaggaaattcccacctaccttcttccacccactacactcctttctgttcctcctgatgctaggcttgtt

SEQ ID NO: 878908 - DNA, 120 bp, Artificial Sequence
  ENSG00000284543_48 (sequence is synthesized)
cccgcctccgagccttcacactgctagccgttacctatgcctggaatgctctcccctggtgtctaatctgcctgatgcttcctcatccttcaggactgagttaaatgtccccacctcaga

SEQ ID NO: 878909 - DNA, 120 bp, Artificial Sequence
  ENSG00000284543_49 (sequence is synthesized)
gaagccttcgctgactgcctttgctcctcctgggcctggttgcccctagacccactctctgccccccaacacttagttctatcctgcaggagcactggcttccagcagagagcagctgct

SEQ ID NO: 878910 - DNA, 120 bp, Artificial Sequence
  ENSG00000284543_50 (sequence is synthesized)
ggggaccactgacaggagactgggaagacaaggaaaaagccctctcctctctgtcccaggtggcttcttaggtagcggctatgtcttcatggttccagcttctgcagagtggcgtccgaa

SEQ ID NO: 878911 - DNA, 120 bp, Artificial Sequence
  ENSG00000284543_51 (sequence is synthesized)
cctggcttgggaaataccgcttttccttttgcccctccggtccaggcatgattgcagcaattcagtcacttgtccgggttccactcctaattctagttcttttgctattttcaccacatc

SEQ ID NO: 878912 - DNA, 120 bp, Artificial Sequence
  ENSG00000284543_52 (sequence is synthesized)
acttctcccactgaagtctttaacacttcaaaggcatccttgagggttaaagtcaacttctttcaaactcctgttaatcttgatattttgacctcttccctggaatcacaaatgtcctta

SEQ ID NO: 878913 - DNA, 120 bp, Artificial Sequence
  ENSG00000284543_53 (sequence is synthesized)
acggcacaagaatggtgactcctttctagaatgtttccaatttgctttgcccagatccatcagaggatctctctgtagcagctatagccttacaaattgtatttcttaaataataagact

SEQ ID NO: 878914 - DNA, 120 bp, Artificial Sequence
  ENSG00000284543_54 (sequence is synthesized)
tgaaagttgaaatgactccttaatctatgggctgcagaatggatgctgtgttagcaggcatgaaaacaacttaatctctttgtacatctccatcaggactcttgagtaaccaggtgcatt

SEQ ID NO: 878915 - DNA, 120 bp, Artificial Sequence
  ENSG00000284543_55 (sequence is synthesized)
gtcaatgagctgtaatatttttaagggaatctttttttttctgagtagtaggtctcaacagtggacataaaatattcagtcaaccatgctgtaaatagatgtgctgtcatcaggctttgt

SEQ ID NO: 878916 - DNA, 120 bp, Artificial Sequence
  ENSG00000284543_56 (sequence is synthesized)
tgttgcatttatacagcataggcagagtagatttagcataattcttaagggcctaggatttttggaataataaactagcattggcttccacttaaagtcaccaactacattagcccctaa

SEQ ID NO: 878917 - DNA, 120 bp, Artificial Sequence
  ENSG00000284543_57 (sequence is synthesized)
caagagggtcatttagttatttgaagctttgaagccaggcattgacttctctctagtgatgaaagttctagataacatcctgttccaatagaaggctgttttgcctacactgaaaatctg

SEQ ID NO: 878918 - DNA, 120 bp, Artificial Sequence
  ENSG00000284543_58 (sequence is synthesized)
aatgatcttagctagatcttctggatgacgtgctgcaacttttatatcagcatttactgcttcacttgcccttttaagttatgcagatggtttctttcattaaacctcatgaaccaaccc

SEQ ID NO: 878919 - DNA, 120 bp, Artificial Sequence
  ENSG00000284543_59 (sequence is synthesized)
tcattaaacctcatgaaccaacccctgctagcttccaacttttcttctgaagcttcctcacctctctcagccttcatagaattgacaagagttagggcgttgctctggattaagctttgg

SEQ ID NO: 878920 - DNA, 69 bp, Artificial Sequence
  ENSG00000284543_60 (sequence is synthesized)
gccttcttgccacttatgtgttcaccggagtagcactttcaatttccttcaagaacttttcctttgcat

SEQ ID NO: 878921 - DNA, 120 bp, Artificial Sequence
  ENSG00000284543_61 (sequence is synthesized)
ccttcaagaacttttcctttgcattctcaacttggctaactggtgcaagggacccagctttcggtctctcttggcttttgataggtcttcctcgctaagcttaatcaattctagctttta

SEQ ID NO: 878922 - DNA, 120 bp, Artificial Sequence
  ENSG00000284543_62 (sequence is synthesized)
tttaatttaaaatgagaggcatgcaattcctcctttcatttgaacacatagaggccattgtagggttattaattgacctaatttcaatattgttgtatctttgggaacagggaggcctca

SEQ ID NO: 878923 - DNA, 120 bp, Artificial Sequence
  ENSG00000284543_63 (sequence is synthesized)
ggatgagagtgatgggggaatagctggtcagtggagcagtcagaacacacacagtatttattaagtttgccatcttgtatgggtgtggtttatggcacccccaaacttttacaatagtaa

SEQ ID NO: 878924 - DNA, 120 bp, Artificial Sequence
  ENSG00000284543_64 (sequence is synthesized)
catccaagatcactgattatagatcaccaacaccaacacagacataataacaatgaaaaaaaaaggtgttttttttttctgaaatggattctagctctctcgcccaggctggagtgcagt

SEQ ID NO: 878925 - DNA, 120 bp, Artificial Sequence
  ENSG00000284543_65 (sequence is synthesized)
aaccatgcctggtggatccagacatgatcaaagccatcaaccagggcaactatgggtgagaggccctagaggcaccctcagtgggcacacatgcatactcatgcatgtatacacgcatgc

SEQ ID NO: 878926 - DNA, 120 bp, Artificial Sequence
  ENSG00000284543_66 (sequence is synthesized)
agagtctgatcatctttccagcacctgccaggagaacaggcagtggcagtgtgaccaagaaccatgcctggtggatccagacatgatcaaagccatcaaccagggcaactatgggtgaga

SEQ ID NO: 878927 - DNA, 120 bp, Artificial Sequence
  ENSG00000284543_67 (sequence is synthesized)
taactcacgccgttgcactcagtggctcctccggagtccatttgaacacaatgagttcgtgctgataccaagcaccaagtgccaagaatgagttctgggtgtctgcggatcctgctggaa

SEQ ID NO: 878928 - DNA, 120 bp, Artificial Sequence
  ENSG00000284543_68 (sequence is synthesized)
ttctgccgagtatgctatctgttgacccaaaagcaaggtttctctgcccagacatgcaggatttcttcagcaaagcaaaagccctgcagattaccagatccatcctctcctaaagccaga

SEQ ID NO: 878929 - DNA, 120 bp, Artificial Sequence
  ENSG00000253462_0 (sequence is synthesized)
aacagcccagcagttcactgagactgtcctgcaaagcctctggtttcgggtttactgggtgcagcatgagcttggtccagcacacttcacaacaggaattggtgtgggtagcaacagtga

SEQ ID NO: 878930 - DNA, 120 bp, Artificial Sequence
  ENSG00000253462_1 (sequence is synthesized)
gggagttctaagggttactctccatgagtacagataaatcaacattcccaagtgacaccctttcaagtgcagtctaccttacaaggaccaacctgaaagccaagggcaaggccgtatatt

SEQ ID NO: 878931 - DNA, 120 bp, Artificial Sequence
  ENSG00000253461_0 (sequence is synthesized)
agtcacccagtctccatccacactgtctgcatctgtaaggagacagtgtcaccatcacttgccgggcgagtcagagcattggtagtaatttagactggtatcagcagaaaccagggaagg

SEQ ID NO: 878932 - DNA, 120 bp, Artificial Sequence
  ENSG00000253461_1 (sequence is synthesized)
ctccttcgcggttcggtggcagtggatctgggacagattttactctcaccatcagaatcctgcagcctaaagatgttgcaacttattactgtcaacagtataaaaattaccctatcacag

SEQ ID NO: 878933 - DNA, 120 bp, Artificial Sequence
  ENSG00000253467_0 (sequence is synthesized)
ttttcaatagaaaagtcaaataatctaagtgtcaatcagtggatgattagataaaatatgatatatgtaaatcatggaatactatgcagccagtatggtatgaattcagtgtgaccagcc

SEQ ID NO: 878934 - DNA, 120 bp, Artificial Sequence
  ENSG00000253467_1 (sequence is synthesized)
atataccaacggcttcacaggacggtttctattctccatggacacctctgtcagcatggcgtatctgcagatcagcagcctaaaggctgaggacacggccgtgtatgactgtatgagaga

SEQ ID NO: 878935 - DNA, 120 bp, Artificial Sequence
  ENSG00000259804_0 (sequence is synthesized)
gctcgtgggctctgccggcgccgcggcgtcctggctcccgctgggtggggcttcctgggcggaggccgccgcccctgggcggtgccggatccagtccgcttgaccttattccctagctgc

SEQ ID NO: 878936 - DNA, 120 bp, Artificial Sequence
  ENSG00000259804_1 (sequence is synthesized)
tgtctccggccccctgaacccgtacagggttggggaagtgggggtggctggaggaagcgcgcgcggggcaagccagtggggctgaggaggctcccgggcccggccccgcccagtctccgc

SEQ ID NO: 878937 - DNA, 120 bp, Artificial Sequence
  ENSG00000259804_2 (sequence is synthesized)
cccagccaggcccgacccgccctccgaatgtcttacagctgcccgccccagagtaaggcccggtcggttcccgcgcgctcccagctccgtgcccgcgagcgacgactggaagggctgtcc

SEQ ID NO: 878938 - DNA, 120 bp, Artificial Sequence
  ENSG00000259804_3 (sequence is synthesized)
cgagaggagagtgggagggcctcctcttggtgtccccaggccacctcagcccggagaggtggcggaaaaccagacttgatgctttaacacgttcatagcaatcgctttttactgaaagga

SEQ ID NO: 878939 - DNA, 120 bp, Artificial Sequence
  ENSG00000259804_4 (sequence is synthesized)
gtttctgtatttagcgctgtgtaattctgtggaaacgtgcatttcttgtctttgcgggagagctgttctctgtgggcggagaccttcagtcccacccctccccaggaggcgcctgcggac

SEQ ID NO: 878940 - DNA, 120 bp, Artificial Sequence
  ENSG00000259804_5 (sequence is synthesized)
ccttcccaacctgcagtcaagttgaccaagaactgactgcaaggtgctggtggctctgggatgagagccttttggtacttacagggaatatgactcttcccttagatatcaaatggaccc

SEQ ID NO: 878941 - DNA, 120 bp, Artificial Sequence
  ENSG00000259804_6 (sequence is synthesized)
aatatctagggagcagcttcttctccatccatctgaccgttccgttgtgagaatgctggcccaataacatactctttttttttcccctaaaggaataaaaaaatctgtatttttaagatg

SEQ ID NO: 878942 - DNA, 120 bp, Artificial Sequence
  ENSG00000257553_0 (sequence is synthesized)
atgagcaaatccaaatttattttaatgtcatgtcattttcaatgtgtttaaaaacctcataagttagtgggagccctagtttcctgggacagcatgccagaggtactgaaatttgtcacc

SEQ ID NO: 878943 - DNA, 120 bp, Artificial Sequence
  ENSG00000257553_1 (sequence is synthesized)
ctacgcctctggttcttggtttttctttcatgggagggagatcacaatatttcaaacagggaacaaaaccagtcctcagcgatagtttgctcctgttgctcgtcctcgcccgacatcttc

SEQ ID NO: 878944 - DNA, 120 bp, Artificial Sequence
  ENSG00000257553_2 (sequence is synthesized)
ctactaccaccactgcagcctcgtttcccctgagccgccgccgcctctgtctcccttcccagccacaggctgtggtcagagtcccctcgatcctcgaggagagggcgagcgaaagcgcga

SEQ ID NO: 878945 - DNA, 120 bp, Artificial Sequence
  ENSG00000257550_0 (sequence is synthesized)
aaaaccaacagaacagggatagagaagtgagcgagaggaggttcagtttgctcagtccctctttaaccactacttagagtacatggtctaatgcttagggccaaggagggaggtgaaggc

SEQ ID NO: 878946 - DNA, 120 bp, Artificial Sequence
  ENSG00000257550_1 (sequence is synthesized)
taaggaagtcagatttgagatgcataaccagcagcaaaagagcctctagaaacgccatggactttaggaagggccaagtgacaccttccatgatgtttggttctggtccagatggatctg

SEQ ID NO: 878947 - DNA, 120 bp, Artificial Sequence
  ENSG00000257550_2 (sequence is synthesized)
gaagacaaagatttggggagagtgaccacatggctggtagcaataacaaggcctctggctctgaattgcttcctatggtcctggtagaaactgcatagttcagagccaaggggagatgag

SEQ ID NO: 878948 - DNA, 120 bp, Artificial Sequence
  ENSG00000257550_3 (sequence is synthesized)
aagccttaacgtggaagagggacaagagagatgaattgctccctctgcaacccaactcttcaaagtaagaatggttgagagcaatagtcaccaatttcccaggccagaacctggggtcct

SEQ ID NO: 878949 - DNA, 120 bp, Artificial Sequence
  ENSG00000257550_4 (sequence is synthesized)
ttgctgggaccagttctgcactttccctctcctcttcctccctcctttcaatcttatactcaagtaaacccactcagcatcttggctatgacgcttcaagatcctggagcactgcatgta

SEQ ID NO: 878950 - DNA, 120 bp, Artificial Sequence
  ENSG00000257550_5 (sequence is synthesized)
aagagaagagagaagaaatgggttgaagaaactctggaggacctggaagacctagtggctaagctaggaacctggtgaaagagaaagaagatagtccagacggtgatgggcacttgtgaa

SEQ ID NO: 878951 - DNA, 120 bp, Artificial Sequence
  ENSG00000257550_6 (sequence is synthesized)
cagaagactctagctcagaaaagcagacagatgtgtgagggggagagatggggtagaacaaaggaactcgagagtcccctacatgacagcctccaggagggctgagtctgaagtagttac

SEQ ID NO: 878952 - DNA, 120 bp, Artificial Sequence
  ENSG00000257550_7 (sequence is synthesized)
agaagagagacaggggcggtaatgttgataggggaatgaagagagagaagcaggagcagaaaaatgaccaaagatgacaatatgctttggccggtaaactcttataaaacataaaggaat

SEQ ID NO: 878953 - DNA, 120 bp, Artificial Sequence
  ENSG00000257550_8 (sequence is synthesized)
cgattaatccctaacttgatggaacaagctttgaaatactttgttcctgtctgccctgatggttaaactaaagaaggagggaggggaggagacagaatcagccagtcagattctgggccc

SEQ ID NO: 878954 - DNA, 120 bp, Artificial Sequence
  ENSG00000257550_9 (sequence is synthesized)
aaatgaggtacccaaatagctctgcaaatagatgaaaaagaattagaactcttgagggtttctttctttttggtggcaggtagagagaaggaataaagcttatggaaaaactggaaaata

SEQ ID NO: 878955 - DNA, 120 bp, Artificial Sequence
  ENSG00000257550_10 (sequence is synthesized)
ctgctacttcatacatcaaaggtaaccttacattctccgtaagtgaatgttttaactagaattaaggaagaggaaaaaggaaacgggtaaataagcagctatgggagacctgagtcctga

SEQ ID NO: 878956 - DNA, 120 bp, Artificial Sequence
  ENSG00000257550_11 (sequence is synthesized)
gtccatggggtggctggggctgggtcagcgggtaatatgtcatcaaatctagcctccctctatctggcaggaagtggcatgctggtaaggaacaaaaaggtaacagccacggcttagtgg

SEQ ID NO: 878957 - DNA, 120 bp, Artificial Sequence
  ENSG00000257550_12 (sequence is synthesized)
gaagagagggaactgagaaaccccaaacctagaagtgccaagggttagtgttaaaagagacagatacacgtgcatggggcaggggtgattgttcggaccatctggaaaggcctttggctg

SEQ ID NO: 878958 - DNA, 120 bp, Artificial Sequence
  ENSG00000257550_13 (sequence is synthesized)
tggatgcatcagaaaccccaccctgggggatgatctatgaggctccggggctgggaggcccccagcacaggtgtcaaacgtacatgaccacatggctaaaaagccccatatctgtccatt

SEQ ID NO: 878959 - DNA, 120 bp, Artificial Sequence
  ENSG00000257550_14 (sequence is synthesized)
actcacaacacacaattccccccacccatattgccatgtccaaggcagatgggaggggataagatgacatctctcttggctcttgggcgggcgagctctggctgaggacctctccaccag

SEQ ID NO: 878960 - DNA, 120 bp, Artificial Sequence
  ENSG00000257550_15 (sequence is synthesized)
aggaggcatcatctgcccgcagactgggactgtggggtcatgattacatgcgattgtatcggcatgctcagttctgtcctttggctggccatctgagtgaggaccgaggtggccacagct

SEQ ID NO: 878961 - DNA, 120 bp, Artificial Sequence
  ENSG00000257550_16 (sequence is synthesized)
tcagctgcagagcgaacactgaggccattgctaggggctgttgctgagctgtgctgaatcacaggggctggagaacccgttggctctgagctttccttggggctttctgccaggaaggag

SEQ ID NO: 878962 - DNA, 120 bp, Artificial Sequence
  ENSG00000257550_17 (sequence is synthesized)
ggcaaagagcagagagcaattggttagaaaacagaatggggaaagaggcaggactaccttttgccataattctaaaggagcccaaaagggaaatgaaacccatcttttttttggggaaaa

SEQ ID NO: 878963 - DNA, 120 bp, Artificial Sequence
  ENSG00000257550_18 (sequence is synthesized)
cttcccagaatcctggcttctaagtcataaatgggctaggaaatgggaagttgtaagaagggaagaactaggccaaaattaacctatctattccaataaaatgaatctccaacatgttaa

SEQ ID NO: 878964 - DNA, 120 bp, Artificial Sequence
  ENSG00000257551_0 (sequence is synthesized)
gtcgaagcggggatctggccgccgcttggaaagaggcgtgcgggtgaaccgagcccaagtgcgcggtgagggcggcggccgaggcccctgccaggccctccggggccgcccccagatccc

SEQ ID NO: 878965 - DNA, 120 bp, Artificial Sequence
  ENSG00000257551_1 (sequence is synthesized)
ccacgccggcgtgcagaatgtctgcgatgcagaaggagggctttttgacggcggcggggtccaaggggaaggagcagccgcctgggccggccgaggagcagtaagcggccgaccagaggc

SEQ ID NO: 878966 - DNA, 120 bp, Artificial Sequence
  ENSG00000257551_2 (sequence is synthesized)
ccaggaagcacagtctatgagacccagaagtaactctggagatcctccaattacctctcactttacagtgaaggaaactgaggcccagatggagtcagtaggttacttgagatctcacag

SEQ ID NO: 878967 - DNA, 87 bp, Artificial Sequence
  ENSG00000257551_3 (sequence is synthesized)
aggcccagatggagtcagtaggttacttgagatctcacagttgcagaagtggactaaaagccatgtaaatagtgtgatctcgacata

SEQ ID NO: 878968 - DNA, 120 bp, Artificial Sequence
  ENSG00000257556_0 (sequence is synthesized)
tgagccaccacgccctgctggattttggattcttgatacgtatcatcaaccactctccagagtttggccagcttcacgctccatcagtggtctcaccatagaccttctaatcttgattgt

SEQ ID NO: 878969 - DNA, 120 bp, Artificial Sequence
  ENSG00000257556_1 (sequence is synthesized)
gttggctggtgtctattttctaatggtgtttggttttggaacctgcatttctttgaaaaagagtgagcatgtgcattttcccagatgcctggtatccaactgcacttctccatgtgtgca

SEQ ID NO: 878970 - DNA, 120 bp, Artificial Sequence
  ENSG00000257556_2 (sequence is synthesized)
ttgtcccctgagctggcaagaagatcctactagttggtctgcatgccatgccagctcggccttgcaccctgggggcccagctgttgtccacaccaagggtggcctacagagggaagtgag

SEQ ID NO: 878971 - DNA, 120 bp, Artificial Sequence
  ENSG00000257556_3 (sequence is synthesized)
agctgcctccagtcaagcccttgtttccagctttctgtgccctaaataaacttctgctgggattgagccatcagcattctgtggtgggcgtcgctgctgcgaggttgccctcgtgcacac

SEQ ID NO: 878972 - DNA, 120 bp, Artificial Sequence
  ENSG00000257556_4 (sequence is synthesized)
aagctcctcacaggacttccaggatgatatggaagagtgactgagagcagccgcccggtgcttcccaaccttagagggaggtcacgggcagtctccctgcgatgctggccacagggtctc

SEQ ID NO: 878973 - DNA, 120 bp, Artificial Sequence
  ENSG00000257556_5 (sequence is synthesized)
gcccaggctggagggcagtggtgtgatctggactcactgcagcctcgacctgttgggctcaagtgatcctctcacgtcagcctccaagtagccaagaccacaggcaggcgtcaccatgcc

SEQ ID NO: 878974 - DNA, 120 bp, Artificial Sequence
  ENSG00000257556_6 (sequence is synthesized)
accatgcccagcccccatgatgactttacttttcttcttgaacctggtgaatttctgtgttaacatgtctgatttgaacccttctgatattcctgagataaactttatgtgaccttggta

SEQ ID NO: 878975 - DNA, 120 bp, Artificial Sequence
  ENSG00000257556_7 (sequence is synthesized)
gccagaccctaagacctctgtgtgccccctccgtgtctcctgtctgcagctgttgtccacaccaagggtggcctacagagggaagtgaggaccttgggacttcctccaggacagccctcg

SEQ ID NO: 878976 - DNA, 120 bp, Artificial Sequence
  ENSG00000257556_8 (sequence is synthesized)
cgcaggcgggagaggctgaggattcttttgggaagcccctccgccggctgtaaccccagggccgtgccaccctcctgatcaccgcaagcatggaccccccagcacgctgcgggtgggaca

SEQ ID NO: 878977 - DNA, 120 bp, Artificial Sequence
  ENSG00000257556_9 (sequence is synthesized)
gtggggtggcttgactggcctggagttggggacgaagtccccgggcttggtcccccgagggcttggttgggcgtcccgggctgttgtccacaccaagggtggcctacagagggaagtgag

SEQ ID NO: 878978 - DNA, 120 bp, Artificial Sequence
  ENSG00000257556_10 (sequence is synthesized)
ccccaggttcccggcagggcggggaaggctggggcggggccagagccggagccgcgaagccgcgatggagagggcctggagggtgcgccaggagccggcgtcagggcctgcctccatctc

SEQ ID NO: 878979 - DNA, 120 bp, Artificial Sequence
  ENSG00000257556_11 (sequence is synthesized)
ctccaacccccaccccatttattcctgtaacaaatccctaccgggagctggcacagcagctgtgcgctggggacacacgagatgctcaccctccctgccctccaggagcttggactcagc

SEQ ID NO: 878980 - DNA, 120 bp, Artificial Sequence
  ENSG00000257556_12 (sequence is synthesized)
tgaggtctgcaggggccagcaggagcagggccgagggccctggtgggaaggtcgtggcccactagggaaggctgggcccggggggtcaggtggagggcaggctgagctgcgagctgtgtc

SEQ ID NO: 878981 - DNA, 120 bp, Artificial Sequence
  ENSG00000257556_13 (sequence is synthesized)
ttcagcctacagcaaggccaccactcccagcgcctggcctcctcgctcccgaaagctcagctcagcctacatgtgccgacccctctgtcccccaggcccaggttgggcactggtcaggac

SEQ ID NO: 878982 - DNA, 120 bp, Artificial Sequence
  ENSG00000257556_14 (sequence is synthesized)
ggtgctcccagagggacccagtaacaggaggagctagggtgagagcatgagggtggggggagcggcagagaggagggagaggcaggaggtgctcagggcaggagtgtctggagtgaggag

SEQ ID NO: 878983 - DNA, 120 bp, Artificial Sequence
  ENSG00000257556_15 (sequence is synthesized)
ggagaggcaggaggtgctcagggcaggagtgtctcgagtgggtctggacaggaacaggaagggcattccaggcagaggggcccaaagaagcaaaggtgcaccagggagaaatgcccgctg

SEQ ID NO: 878984 - DNA, 120 bp, Artificial Sequence
  ENSG00000257556_16 (sequence is synthesized)
tgctccaccacagtggaggtgcaaacctcagcatggaagatgaggctggagggaggggcctgggctggaacatggccaggatggcagtggggagccattggagatgtttgagccggggag

SEQ ID NO: 878985 - DNA, 120 bp, Artificial Sequence
  ENSG00000257556_17 (sequence is synthesized)
tgacagggtcagattcgagttttggaaagataacatcttgagccattaaacagatttctaggatttcaggtttatttatttatttatttagagactcacttcactctgttacccaggctg

SEQ ID NO: 878986 - DNA, 120 bp, Artificial Sequence
  ENSG00000257556_18 (sequence is synthesized)
gagcttcatcaaatgggcaggaccactttcccttaacttctccttttctggaacaacggacatatcctgtggattatctgttccccacaggtttgggatatgggtgctgtgaatgccact

SEQ ID NO: 878987 - DNA, 120 bp, Artificial Sequence
  ENSG00000257556_19 (sequence is synthesized)
gatatgggtgctgtgaatgccactgtgctgggggctttgggaagtgtgtgtttgttttcgtgcgtgtgcggtgggatacaggtgtggttactactttgatttctttctttcttttttttt

SEQ ID NO: 878988 - DNA, 67 bp, Artificial Sequence
  ENSG00000257556_20 (sequence is synthesized)
agagttgctgggattacaggcacccacaaccataccctaaattttgtacttttagtaaagatggggt

SEQ ID NO: 878989 - DNA, 120 bp, Artificial Sequence
  ENSG00000257556_21 (sequence is synthesized)
aaccataccctaaattttgtacttttagtaaagatggggtttcaccatttggccaggcttgtcttgaactcccaattaccaatttcttatgtgtccttttgaagactttctaagtacgac

SEQ ID NO: 878990 - DNA, 120 bp, Artificial Sequence
  ENSG00000257556_22 (sequence is synthesized)
caacctagtaaagtgagtcacccaccactgttttgtttgtttttgtttgtttgtttgttttttagaatggggtttcaccttgttgcccaggctagtcttgaactcttgggctccagcaat

SEQ ID NO: 878991 - DNA, 120 bp, Artificial Sequence
  ENSG00000257556_23 (sequence is synthesized)
tataggcatgagccaccatgcctggccccaccactcattcttaacctcttcttctttgcctttctctgttgcagagtcctggaagttaaatgctctatttcccagcctcccttgcagcta

SEQ ID NO: 878992 - DNA, 120 bp, Artificial Sequence
  ENSG00000257556_24 (sequence is synthesized)
aatgctctatttcccagcctcccttgcagctaggagcagtcatgtgactccattctggccaacgagatacaagaaacacttgctgacaggtgcaatcagaaagcgtttgcttttccagta

SEQ ID NO: 878993 - DNA, 120 bp, Artificial Sequence
  ENSG00000257556_25 (sequence is synthesized)
acatgtaggaccagtcacctttttgcatttcccctttcttcttgattcgaacattgcattgccgtcatgtttggagatgagtcagccatcttgcaaataggaggcagcaagactgaggga

SEQ ID NO: 878994 - DNA, 120 bp, Artificial Sequence
  ENSG00000257556_26 (sequence is synthesized)
aatgccatcctgcttcagagggcagaatggaaagagaagcctaagatggcaatggtacggttgggcagctgagtcaggactggggccactgcctctcggtttcaagggagaaaaataaac

SEQ ID NO: 878995 - DNA, 120 bp, Artificial Sequence
  ENSG00000257557_0 (sequence is synthesized)
tccgcttctgcttcgcgtccgccatcttcatcccctctcctgccgccgggtcttcttatcgcgagggggggaagggggaggcggagagggaagagaggggaggcagggggtgtgtgaatg

SEQ ID NO: 878996 - DNA, 120 bp, Artificial Sequence
  ENSG00000257557_1 (sequence is synthesized)
tttctatgagtgcgggccagaggagggctgggaacccggagccgacgctcgagacttccagtatcccacagagcactggggcggcgcacccggccgagcggacctcccttcctaccacag

SEQ ID NO: 878997 - DNA, 120 bp, Artificial Sequence
  ENSG00000257557_2 (sequence is synthesized)
aagccctcccgcccccagcacggccacccgtcaccggcggccaatctaacgtaacttcgcgagatccggactgggaggcgcccttcgaccagtgcgcatgcgccctgggcctgtgcccgc

SEQ ID NO: 878998 - DNA, 120 bp, Artificial Sequence
  ENSG00000257557_3 (sequence is synthesized)
cccaggaagagcgctcccgcgaactgcggcggtggtggctgggccaccagagggaagcgggtgtggcccaggcagcgggggctgggacagacctggaaaggaggaagcggggaaggaagg

SEQ ID NO: 878999 - DNA, 120 bp, Artificial Sequence
  ENSG00000257557_4 (sequence is synthesized)
ttgtcctgtcgggctgggggctcccgggaatccggaggccagcagtggaaccgcaaggctctacagggcagatctgcctcccgtgctgtctcagctacgccgagtcgttggctcagggcg

SEQ ID NO: 879000 - DNA, 120 bp, Artificial Sequence
  ENSG00000257557_5 (sequence is synthesized)
gaggattttcctattggccgcgttatttgaatggaatggaggataggtcgtgaagtaggtgctgctggttgatctttctaaggaactcagatgaacttgggcatgtcagaattaataacc

SEQ ID NO: 879001 - DNA, 120 bp, Artificial Sequence
  ENSG00000257557_6 (sequence is synthesized)
ttttaaaagtggggtctgtgtggccgagggttttaatgtcctacccagggagttgaccagaaccaacatggaaccaccctaacttgcttcagactccattgctagatcaatcctgatttc

SEQ ID NO: 879002 - DNA, 120 bp, Artificial Sequence
  ENSG00000257557_7 (sequence is synthesized)
tagatcatagcatctaatctttgccttgcctctggattacaagggtggaaccaagcagaggggttcacccaagccatctttgggtgcttccatgggaaagaaggatttcactgagaataa

SEQ ID NO: 879003 - DNA, 120 bp, Artificial Sequence
  ENSG00000257557_8 (sequence is synthesized)
taagtgacaccaaggctcaaaagaatgagagagaagtctgttggtctcttgaacagcagggatttgctcacagatctctggaagtagccagaatgtgacaggatctcaaaatgaatggct

SEQ ID NO: 879004 - DNA, 120 bp, Artificial Sequence
  ENSG00000257557_9 (sequence is synthesized)
gcttcatggaggctggaacataagcctgggactcccagtagccaaacatagctgtgccacaaacatggctgaaatgtagcagtttggtggatccgaggtcagtcattgaaaatgtattga

SEQ ID NO: 879005 - DNA, 120 bp, Artificial Sequence
  ENSG00000257557_10 (sequence is synthesized)
ttggcacctattctttgtgaatcattattctgggttctggggtcacaggagcaaatgaaacaaatgaagtacctgccatcaatgagcttacattctagtaaagagggacagaaaatgaat

SEQ ID NO: 879006 - DNA, 120 bp, Artificial Sequence
  ENSG00000257557_11 (sequence is synthesized)
acattttaaatgaataaattcagataccgctaaatgtagtgaagaaaaaaattgggctaaagagagcgaaaaacaatttctgaagttactagcagtgaagggtgggggaagagaagagac

SEQ ID NO: 879007 - DNA, 120 bp, Artificial Sequence
  ENSG00000257557_12 (sequence is synthesized)
ggatttaaccaggaaagatctgagctgagggtgtatccaggttttctggaacctgatattattacagtttagagattcttcttcaagaaaaagaatttaaaattacaaataattaacttc

SEQ ID NO: 879008 - DNA, 120 bp, Artificial Sequence
  ENSG00000257557_13 (sequence is synthesized)
aaaaaaaaaaaaaaaaaaaactataacagtaattgagtgtataaacactcaatttgtttcctcagctagatctagaaccaaggattctagaaaatatgtgtcaaaacccagctctcagtt

SEQ ID NO: 879009 - DNA, 120 bp, Artificial Sequence
  ENSG00000257557_14 (sequence is synthesized)
agttttgttagctatcacttaacatcagtttaaatcattcatttattcaccattcattaagccggtatttatgagtaccctattggtactctgtatgtactagtgctaaaactataacaa

SEQ ID NO: 879010 - DNA, 120 bp, Artificial Sequence
  ENSG00000257557_15 (sequence is synthesized)
tgtaaacactcattccctgcaatcaacaatatatactggccaaagattcaattccatgatcaagcatagcagcattaatagtagagcaacctccattatgtgcctaagcattacctaaat

SEQ ID NO: 879011 - DNA, 120 bp, Artificial Sequence
  ENSG00000257557_16 (sequence is synthesized)
tttagcctgagtttaaccaggtgttttagatcaaatatcactttactagaaacatgggagatagaagaacatattaaatgataccacacatacttaatcaaacaaacctgaaatgtagga

SEQ ID NO: 879012 - DNA, 120 bp, Artificial Sequence
  ENSG00000257557_17 (sequence is synthesized)
taatctctagggcactggcctggtttcttttaaaaagtcagtgttataaaaaattttaaataaaaatgttctagattaaaagatactgaaaatcataatgactaattaagcttgtaaact

SEQ ID NO: 879013 - DNA, 120 bp, Artificial Sequence
  ENSG00000257557_18 (sequence is synthesized)
ttgattaagttccggtttggaaaaaagttgtatgtaattgattattggaaaaattgaatatggattgtgttttagatgatattaaggaatttttgttatttctgttctaagatgtaataa

SEQ ID NO: 879014 - DNA, 120 bp, Artificial Sequence
  ENSG00000257557_19 (sequence is synthesized)
tgtgattatgtaggaatgtatccttaatttaaggagatgagtatgttaaatatgatgttgcaacttcctttcaaatgatttcatgaaataaaaaataaatacatacaaatgcatgtaagt

SEQ ID NO: 879015 - DNA, 120 bp, Artificial Sequence
  ENSG00000257557_20 (sequence is synthesized)
agacagtgcaagtttggcaagattttaatttctgaacttaggtaacaggtatccaagtgtctgttactattttttcagctttgctgtttgatattttttacaatgaaatattgagggaga

SEQ ID NO: 879016 - DNA, 120 bp, Artificial Sequence
  ENSG00000257557_21 (sequence is synthesized)
aaaagaatggattgtggggagactgtgttgtgattctctaatagagtcaatgccattactccagagatatttggacatgtgggtgaggtgtttttgattatcaaaatgattgtggaacac

SEQ ID NO: 879017 - DNA, 120 bp, Artificial Sequence
  ENSG00000257557_22 (sequence is synthesized)
tactgtcgtttagtgaggaagtgagtaataaataacttgtgatgtgtgggaattttccaaacaacaactaagtacccttcccaaaatgctaataactcccctgttgagaaatactaaaat

SEQ ID NO: 879018 - DNA, 120 bp, Artificial Sequence
  ENSG00000257557_23 (sequence is synthesized)
taaaccaataaatagctcacacaaaaaatattccattgaccttatatacaactctaatgtttgttctccaattcacaaaaaagtactcctgataaagagtcatttatattcatggcttcc

SEQ ID NO: 879019 - DNA, 120 bp, Artificial Sequence
  ENSG00000206187_0 (sequence is synthesized)
tggctgactaaccctgtggaacttaaaagttcaaagacagggatgcctggattctgtctctgcctctgcacgtgtgtctgtgcaggcatccgagctgaccggccagcttcccgctggtgg

SEQ ID NO: 879020 - DNA, 120 bp, Artificial Sequence
  ENSG00000206187_1 (sequence is synthesized)
aggtgggaggcataggctgcttctacacgcccaaagcctacccactacagagttacttgcagtcacacatgctgactaagggaggagagcaactccaatcaaacgaagctaaggaagata

SEQ ID NO: 879021 - DNA, 120 bp, Artificial Sequence
  ENSG00000206187_2 (sequence is synthesized)
gcacacaaactggcaagaaattcctgagaggaggaaaatgagctgcagaaggatcaaatgacctgcctgaggtgccctatctgttggcacaggccagagcacatggtggatgcaggggca

SEQ ID NO: 879022 - DNA, 120 bp, Artificial Sequence
  ENSG00000206187_3 (sequence is synthesized)
cccccttcccttctcctcccctccggctctttgctgacaggattctctcttgccttctctgatggtacctgtgctacgtgccacatcctttccctcaatgaatttcaggcagtggaaggg

SEQ ID NO: 879023 - DNA, 120 bp, Artificial Sequence
  ENSG00000206187_4 (sequence is synthesized)
gccgcagaagttccttgactcatgaggcgaggcattcagcggcctcgtgacacctcccaggatctgcagtcattgggctgcacttgccaatagcaacacctggcaaaaatagctaagaag

SEQ ID NO: 879024 - DNA, 120 bp, Artificial Sequence
  ENSG00000206187_5 (sequence is synthesized)
gagcaacccctgactggccagatggagactgtgttgagctctgcccaagccctgtgatcctggaaaacagtgaagttaaggagccatctgcattctagggaatggcccactgcaaaaaat

SEQ ID NO: 879025 - DNA, 120 bp, Artificial Sequence
  ENSG00000206187_6 (sequence is synthesized)
agccttccttataggacgtagaggactcatgatgtcccctcatttatgatgagccaacacacagcccttccaaattccgattctttgcttcataactgatgagctgttttgttcccactg

SEQ ID NO: 879026 - DNA, 120 bp, Artificial Sequence
  ENSG00000206187_7 (sequence is synthesized)
gtcaatcggaacaacattcttgctaaccagattttggttcagctcttctccctccccatgtacctgccctgtgtcctgtcctcatcctgagccagcacacacccctccttagtagctcct

SEQ ID NO: 879027 - DNA, 120 bp, Artificial Sequence
  ENSG00000206187_8 (sequence is synthesized)
cctgcagcaggctgacctcggactctccctgatccattgtccaaatatatcaccctttcaccctacatcctcacaccccattctttctagttttgttcattcctccctgtgaaagatgaa

SEQ ID NO: 879028 - DNA, 120 bp, Artificial Sequence
  ENSG00000206187_9 (sequence is synthesized)
ccctctttgcctaaccccggacctgcttgcagactgctatgatggccagagtgtcccccctactgcaagagtcccttctgtcccttgcaacatcttttaaataaaatctctctttaccaa

SEQ ID NO: 879029 - DNA, 120 bp, Artificial Sequence
  ENSG00000206187_10 (sequence is synthesized)
agagtaggacagcacatatttgcaggctaacacaagcatttctgaaaggaaatgcatttggaaactgagtggtattgaagcatctatttttcttgctagcagcacaatctgccaccagga

SEQ ID NO: 879030 - DNA, 120 bp, Artificial Sequence
  ENSG00000206187_11 (sequence is synthesized)
aggttttaaacactttcctgacagagagtgcctgcctgaattttttggtaattaatcatgcataatactttaaattccacacaggcggctggctgaaaaccctccagggattgctgcatt

SEQ ID NO: 879031 - DNA, 120 bp, Artificial Sequence
  ENSG00000206187_12 (sequence is synthesized)
tgctatccgaaagtcaactcctatgccttcggagagtgaggaagatcagagaggggcatttttgcctgttttaatgtcgccatcagtcaccaggcaagtctgcaatctttgctgcatcct

SEQ ID NO: 879032 - DNA, 120 bp, Artificial Sequence
  ENSG00000206187_13 (sequence is synthesized)
tccatggtatcggcacaagcaaggctaaaccaggaaatataaacagttgtcactaagtatctttggaggattagtccgaggacctccctcaaataccaaaatccagggatgctcaattcc

SEQ ID NO: 879033 - DNA, 120 bp, Artificial Sequence
  ENSG00000206187_14 (sequence is synthesized)
agatgagcctgcagcctgtgctgatgcctggatttcagcctgggagactctcagcagaggactcggctcaaggctgtctacagtcctgatctaccagaaccatgagataataaacaggca

SEQ ID NO: 879034 - DNA, 120 bp, Artificial Sequence
  ENSG00000206187_15 (sequence is synthesized)
ttgtttaggtagtgaaatgtggttacacataaataggaacccagtgcagcgtaagatgccctggcatatcaagggcggttcatgagtgggtgccttcagcttgggaggaagcaggcatag

SEQ ID NO: 879035 - DNA, 120 bp, Artificial Sequence
  ENSG00000206187_16 (sequence is synthesized)
ggctgatgcatcgcagtgtccacatatgcagggaggctggtttcctaggaagcctcccaatgaggaaattgttgggaatgtgctgcaaggcgctgcctcgctctggagccagacgagagg

SEQ ID NO: 879036 - DNA, 120 bp, Artificial Sequence
  ENSG00000206187_17 (sequence is synthesized)
ccggagcatccgccccaacatggctggctgtgtgagcctcaggaacgctggcagctctgcaagactctctgccatctgcaaaatgcggctggctgaaaaccctccagggattgctgcatt

SEQ ID NO: 879037 - DNA, 120 bp, Artificial Sequence
  ENSG00000206187_18 (sequence is synthesized)
acaagagcatccatgaaccaacttctgagaattgctgttgctgagaaaggcctagtgagcccctgtttcctcaggccaccttcctcttcctcccattgccaagggctcctgtcgcccccg

SEQ ID NO: 879038 - DNA, 120 bp, Artificial Sequence
  ENSG00000206187_19 (sequence is synthesized)
tctgcgttctcctgcctggcgctctgtcacctcctgtggaggccccacgtgttcatctgagggctgctgctgcccttccagtattatccacacctgccattattactgggtcttgctctc

SEQ ID NO: 879039 - DNA, 120 bp, Artificial Sequence
  ENSG00000206187_20 (sequence is synthesized)
tgacaaaggggctacagcgctccttcctggtacacatgcagccctcctgcccttgctcaaggaccgcacctcaacagggcacctgctctcatctggccatcgcctcggcataggtagctc

SEQ ID NO: 879040 - DNA, 120 bp, Artificial Sequence
  ENSG00000206187_21 (sequence is synthesized)
ctcaaggagcttagagtgtgtcggtggagagggagaagcccaacgggagatcttattccacctctgcacgtcttcaggacccctgtggaaacatgtgatctctaacagtctctctggggc

SEQ ID NO: 879041 - DNA, 120 bp, Artificial Sequence
  ENSG00000206187_22 (sequence is synthesized)
tctgcccacccccagcagtgtcacctcacatcaccgcacaataagaactttctcatcatgaacatagctttctctggagaagctgggaagtgcttaactatgccagaagctggacaattc

SEQ ID NO: 879042 - DNA, 120 bp, Artificial Sequence
  ENSG00000206187_23 (sequence is synthesized)
aggtagaagtgtaaatgttggcctaaccttcaaaggacagaaatagctttctttgaaagttctcaaaggtgtttcagaactctggaaaattttaaatcttaaaataacactacaattgtc

SEQ ID NO: 879043 - DNA, 120 bp, Artificial Sequence
  ENSG00000206187_24 (sequence is synthesized)
aaaggtactatggctgaaagggaacagggaggaaggactcaggaagccttgtgtgctcagtctaaacacctggctacccagcaaaaagcagggccagtgctatgttccggggatgcagtc

SEQ ID NO: 879044 - DNA, 120 bp, Artificial Sequence
  ENSG00000206187_25 (sequence is synthesized)
tatcacgtaagacaacgtaggcgaaacaaaggtactatggctgaaagggaacagggaggaaggactcaggaagccttgtgtgctcagtctaaacacctggctacccagcaaaaagcagag

SEQ ID NO: 879045 - DNA, 120 bp, Artificial Sequence
  ENSG00000206187_26 (sequence is synthesized)
ttgctacttcctatgatggggacaaattcaaatgatacagctttgagagaaaggtgttacatggaacatagggtgcctgctgtgagttgcttttagaggtgaaaggagtagattcgcaca

SEQ ID NO: 879046 - DNA, 120 bp, Artificial Sequence
  ENSG00000206187_27 (sequence is synthesized)
gacagctgcaggagggacaggcggactccaccatcattggtggaggggccggagccgaagcagccccccagggagttggtattgcctagggaaatgaacgtgggagagaaaaatcctgcc

SEQ ID NO: 879047 - DNA, 120 bp, Artificial Sequence
  ENSG00000206187_28 (sequence is synthesized)
attcaaaggatggtgatccttgtctccacacaccctcacctacccctgccaaagcagcagctattcgtttgttgtcactgttgcactcttccagtgacctaaagcagcaacttctaaatg

SEQ ID NO: 879048 - DNA, 120 bp, Artificial Sequence
  ENSG00000206187_29 (sequence is synthesized)
tgtaatggaaaacaagcagtgcagctcaacagcttgtggtttctggggtctctgcaattgaactaggctatctgctctttgagcctggttgctaacctgtgtgcttcgtgctccacgtac

SEQ ID NO: 879049 - DNA, 120 bp, Artificial Sequence
  ENSG00000206187_30 (sequence is synthesized)
tccaaatgcagggaagggcagggttactccacgctcctgggactgaactaacgcatatcacggagaacagaagactggcttcttcgtggttgttggagacagagtctggctctgtcaccc

SEQ ID NO: 879050 - DNA, 66 bp, Artificial Sequence
  ENSG00000206187_31 (sequence is synthesized)
acccaggctggagcttcttgcctcagcccgagtagctaggattacaggcatccgccaccatgcctg

SEQ ID NO: 879051 - DNA, 120 bp, Artificial Sequence
  ENSG00000206187_32 (sequence is synthesized)
caccgtgcccagccagaaccctggcttctcatcatcaggaaagaactgatcagacagaaccaatccaaagattcagtgagttgcccaggtggtttacaaggacatgcaatgtttgggaat

SEQ ID NO: 879052 - DNA, 120 bp, Artificial Sequence
  ENSG00000206187_33 (sequence is synthesized)
acgtggcgtgaaatgcagatttgccagagcccagagagccgcaaccagtacagttgcagataaaagattttcagaggccagattttcagcgctctgcagttttaaaaaccaaatgcacat

SEQ ID NO: 879053 - DNA, 120 bp, Artificial Sequence
  ENSG00000206187_34 (sequence is synthesized)
ttgccctttctggtttgaaagccttgcgctcatgctaaaagtgcagtggagtgtgcgcactcacacccaaactctcccccacacgtacactaatacacactcaggcccactcaccggaac

SEQ ID NO: 879054 - DNA, 120 bp, Artificial Sequence
  ENSG00000206187_35 (sequence is synthesized)
acattcaggctcacagtcacatactgtgtccagcattgaaatcccagtgggtttttggtcttgctgacttcaagaataaagtcgtggaccctcgaagtcagtattacagctcttagagat

SEQ ID NO: 879055 - DNA, 120 bp, Artificial Sequence
  ENSG00000206187_36 (sequence is synthesized)
ggcctgtctggagttctttcctccagatgttcagatgtgaccagagtttcttccttctggagggttccaggttttgctgacttcatgagtgaaaccgcagacctttgcagtgagcgctac

SEQ ID NO: 879056 - DNA, 120 bp, Artificial Sequence
  ENSG00000206187_37 (sequence is synthesized)
agctcttaaaggttgtgcctcaggtagcacctctggcgttgttccttcctcccagtgggtttgtggtcccgctggcttcaagagtgaagctgcacatcttcctagtgagggttacagctc

SEQ ID NO: 879057 - DNA, 120 bp, Artificial Sequence
  ENSG00000206187_38 (sequence is synthesized)
ttaaatgtaacacagacccagtgaacagcagcaaaatttattgcaaaaagcgaaagaacaaagcttccacatcacagaaggtgacccaagcagattgttgctgctggctgggggtggcca

SEQ ID NO: 879058 - DNA, 90 bp, Artificial Sequence
  ENSG00000206187_39 (sequence is synthesized)
ttggtccattttacagactgctgattggtcataatcctttagctagacggaaaagttccccaagtcccgaccggacccagaagccaagtc

SEQ ID NO: 879059 - DNA, 120 bp, Artificial Sequence
  ENSG00000206187_40 (sequence is synthesized)
aaaagttccccaagtcccgaccggacccagaagccaagtcagcttcacttgtcaatactcacattcacactctgatgctctcggacctgaggccgggcagcatccctagcagcatgactc

SEQ ID NO: 879060 - DNA, 120 bp, Artificial Sequence
  ENSG00000206187_41 (sequence is synthesized)
caagggcagtcggtccgtgagccaactggcaacactggggggcaccaactgtgtgccaggcattgggctaagggccagggagatagtgttgcatggactagaagtggtttatctgtggcc

SEQ ID NO: 879061 - DNA, 120 bp, Artificial Sequence
  ENSG00000206187_42 (sequence is synthesized)
taacagaattacagggaggacaagcattaaagaaagagtgacaagtaatcaaatgtatcattacacgtatgtgacaggccagcacggagcatgtggtaatgaattcaagagtgtggggaa

SEQ ID NO: 879062 - DNA, 120 bp, Artificial Sequence
  ENSG00000206187_43 (sequence is synthesized)
ggtttcccccagaatgtacaaggtcttggtgtctccataagaagcgagtgttgagatttgagggggccttgaatagtactggacagtcccgggatagccttggccaaccggctatctccc

SEQ ID NO: 879063 - DNA, 120 bp, Artificial Sequence
  ENSG00000206187_44 (sequence is synthesized)
cactttacttcttgcctgtggtttgcagagtaagtgtggcgtgtgctgggaatgcaatatcctgagacagggagaaactgcccagaacagtgggccttgttcctgcccctcctagggaag

SEQ ID NO: 879064 - DNA, 120 bp, Artificial Sequence
  ENSG00000206187_45 (sequence is synthesized)
gtgatatcttggggaggggctgtcttagacagcccaggcttagtttctctctctcccggaagcagcacgtccttcaaagctgttaaaataaaaacttcagctagacgaattaaattgaaa

SEQ ID NO: 879065 - DNA, 120 bp, Artificial Sequence
  ENSG00000206187_46 (sequence is synthesized)
ggaatttaattgagcaatgaacaatttgcgaatcgggcagcccccagattcacagcagattcagagagacgccaggggtgtctcgtggtcacaacaaatttatagacaaaaaaagggaag

SEQ ID NO: 879066 - DNA, 80 bp, Artificial Sequence
  ENSG00000206187_47 (sequence is synthesized)
aaacagaaatcaggtttgccttgtttgagtagtttgaacactcagcagtctgtgagtggttgaagtatggctgctgggat

SEQ ID NO: 879067 - DNA, 120 bp, Artificial Sequence
  ENSG00000206187_48 (sequence is synthesized)
gtatggctgctgggattggccaagacttaatattgttacaagcacatactccttagttaggttttcaatctttgcctattaagctaggttatagttcatccacaaggactcaaatataga

SEQ ID NO: 879068 - DNA, 120 bp, Artificial Sequence
  ENSG00000206187_49 (sequence is synthesized)
ttctcaggccatatttcgtttgctttagcaaagcttttcctagtgagccacgtgtcccctgagttctagaacccagggtgggctgcctgccaggtttcctcagctgtagtggaagcgggg

SEQ ID NO: 879069 - DNA, 120 bp, Artificial Sequence
  ENSG00000206187_50 (sequence is synthesized)
cagatgaagtcgagactccatctgctctgggaaggcttcttgagccttgggggactggctcacagtggaacctagtcttctttcgtcccctgctccctatctgtgagtaataaacctatt

SEQ ID NO: 879070 - DNA, 120 bp, Artificial Sequence
  ENSG00000206187_51 (sequence is synthesized)
ctggacataccaaccctggaaaacgacaaccgcggacagttccccagacctgagacagagctttcctcagctggaaagccagaggaatactacctgccgctccgccttcacctgcggccc

SEQ ID NO: 879071 - DNA, 120 bp, Artificial Sequence
  ENSG00000206187_52 (sequence is synthesized)
catctccgttctaaggcaaactctgacgggcactaaattggtcctgttctcaggctaggataggacagatgacccagttgcaggccccagcctgtccctggccaggcctttgttaccacc

SEQ ID NO: 879072 - DNA, 120 bp, Artificial Sequence
  ENSG00000206187_53 (sequence is synthesized)
caggcaacatcttttgagacgaatcttccctgacactgccgtgagggcccattctgcagtgctcctggaaccccacctttacctgaaattgaaaaagaatcctgtccacatcttgcagta

SEQ ID NO: 879073 - DNA, 120 bp, Artificial Sequence
  ENSG00000206187_54 (sequence is synthesized)
atgctgcctgctccatgtacaccccaccccacacgtgagggtcctgtctgcttttgggggtctggcagaaaccttcatgggcttctgggagaggaacggaacctccactgtggctggagg

SEQ ID NO: 879074 - DNA, 120 bp, Artificial Sequence
  ENSG00000206187_55 (sequence is synthesized)
cgctggaaagcctcccttaagagagactgcagtgtgttatgtgctcacgtgccctcctgagtcataaggttgtccgagcaagtggtgctgcttgttcccactttgctcagatgcacaccc

SEQ ID NO: 879075 - DNA, 120 bp, Artificial Sequence
  ENSG00000206187_56 (sequence is synthesized)
tcttttccttcaattcctgaagctgaaagatggaaacccagctctccctccatgtccagtatcccacctccacacaagagaccacattgaaatatttaaacgtgacatttccaaggtttt

SEQ ID NO: 879076 - DNA, 120 bp, Artificial Sequence
  ENSG00000206187_57 (sequence is synthesized)
gcacagagcccaaggggaaggatcttagcgtgtctagaagtagtgtggtacttgctctcactgacttttaagaatgaagccatggcccctcacgatccccggctccatgctgtcgcttcc

SEQ ID NO: 879077 - DNA, 120 bp, Artificial Sequence
  ENSG00000206187_58 (sequence is synthesized)
gaggctcaggccaggacacagaacccacaccccacggcccggaccgcgcagagcgtcccctccacataggagcgccccttctaggagggctgccgccctcctgcccaagccctccaagac

SEQ ID NO: 879078 - DNA, 120 bp, Artificial Sequence
  ENSG00000206187_59 (sequence is synthesized)
aggaaggaagcagaacctacagaggatcagacaacaggctcaggacaggaagtgccgggtcggatgcttcctccagcccgtgtatcctgagaccagtgccatgtggggccgccagagtcc

SEQ ID NO: 879079 - DNA, 120 bp, Artificial Sequence
  ENSG00000206187_60 (sequence is synthesized)
tgcctggtgcccagcactcctcttcctggaaacgcatccctgtttagcgtagcaaaaatggggagctagtaaacctcgtgtcatgggctatgaatggagacataaaacactgaaaattct

SEQ ID NO: 879080 - DNA, 120 bp, Artificial Sequence
  ENSG00000206187_61 (sequence is synthesized)
actactgcgaaagtgaaacagtcttgctccaaatatggccttgactaaattaattattaaaatataaagggaaacaacttcctttcacatacttggttgagaaagcaactaaaaaattta

SEQ ID NO: 879081 - DNA, 120 bp, Artificial Sequence
  ENSG00000206187_62 (sequence is synthesized)
tttcttctcccatgagaaacactaccttttaagataaaatttattttctgtatatttgcattaagagaaaatatgaaaatatttaattgacattttttattaaaagactatcagcattga

SEQ ID NO: 879082 - DNA, 120 bp, Artificial Sequence
  ENSG00000206187_63 (sequence is synthesized)
aagacaaatttcacaggaaaagcattgaatcattaagttttgtagtcacaaaggtaagtataatttgcttaatgctgccctcagtttacaatgggtctttagtattttctaagctataat

SEQ ID NO: 879083 - DNA, 120 bp, Artificial Sequence
  ENSG00000206187_64 (sequence is synthesized)
gtgagtttgccaaaatatagcattggtttgctacatagaatttgctcagtgataaaacacaaaggagttacttatgttaaaatgtaaataataaatttatgcaaaatttctgaaagtata

SEQ ID NO: 879084 - DNA, 120 bp, Artificial Sequence
  ENSG00000227189_0 (sequence is synthesized)
taaagtctggagggtgctgaggcagcagggggctggtgtattagcactgccctgagcgtgtgcacacctggccaggctgcaacagtgcccaggctcgccctgactttactctgagatcaa

SEQ ID NO: 879085 - DNA, 120 bp, Artificial Sequence
  ENSG00000227189_1 (sequence is synthesized)
agtggacactgacagcagggagaagccaggcagcagaagcaggcacttccaaacctgcgaaggccggggatggggcttcctgggccccctagagtgcagagatgcctgggtctgcagcca

SEQ ID NO: 879086 - DNA, 120 bp, Artificial Sequence
  ENSG00000227189_2 (sequence is synthesized)
tggtttgggtggctgtagctgcgcctaggagaggggcttctctctgctcccggcttccaggagcacagggatgcctgggtctgcagccatgacttgggcagctgcatctgtgcccagagg

SEQ ID NO: 879087 - DNA, 120 bp, Artificial Sequence
  ENSG00000227189_3 (sequence is synthesized)
ggtggggctcctgcctgctccatggagcagaaggcctggatctgcagctgggacttgggtggggcttctgcctgctctgtggagcaggaggtctgggtctacagctgtgacttcagtggc

SEQ ID NO: 879088 - DNA, 120 bp, Artificial Sequence
  ENSG00000227189_4 (sequence is synthesized)
tgcagctgtgcccaggagagtggggcacccatctgctcccggcccgagagcacagggatgcctaagtctgcagagagctaccacccaactcggaaggggcagggctcctgcttgtccgca

SEQ ID NO: 879089 - DNA, 120 bp, Artificial Sequence
  ENSG00000227189_5 (sequence is synthesized)
gctcctgccagttccatggagcatgcagccctggctgtgcctccctgctgcagctggcatgatggcaccagccactttagatggaccgtggtgtcatcactgagaccctgtcttgacaca

SEQ ID NO: 879090 - DNA, 120 bp, Artificial Sequence
  ENSG00000227189_6 (sequence is synthesized)
gctgtcaggacactctctagccacacttgccttcctgctgccagtgccgccgtggctcaggtggctgcagttccttgagatgtcccagtgggtcctgggtgagcccatccagctgatggg

SEQ ID NO: 879091 - DNA, 120 bp, Artificial Sequence
  ENSG00000227189_7 (sequence is synthesized)
ccatgaggcaacaggcaagtggacaggccagcactgtcccccttcctcttcttctgccccttcaactgcaggctggaaaattcatatgttaccaggaaaacagccggctacccagggcta

SEQ ID NO: 879092 - DNA, 120 bp, Artificial Sequence
  ENSG00000227189_8 (sequence is synthesized)
tttacctcaggggccaagcttcccgtgggatgagatcgttgggctcagagaacgtgttgagcaaacacagtactttctgtgagctgggttaggcttgtacagactccagagtcccaaata

SEQ ID NO: 879093 - DNA, 120 bp, Artificial Sequence
  ENSG00000227189_9 (sequence is synthesized)
tcatccacagtgtcggagcagcagcgagggctctaagaccacccagctctcttcctggctattttttccatgctactcatcccaaaacttgatctcacattgctctgtttctttctctgc

SEQ ID NO: 879094 - DNA, 120 bp, Artificial Sequence
  ENSG00000227189_10 (sequence is synthesized)
ctccatgcttgatgcatttacttaatctttcgcaggatgggtcattactttttgcaatagcacactcaaaggtaatgaccaagataaattgaaaagaggattcaacagtattcattgtaa

SEQ ID NO: 879095 - DNA, 120 bp, Artificial Sequence
  ENSG00000227189_11 (sequence is synthesized)
ttcaacagtattcattgtaagattgaatgggatataaaatacgtaatcagcacttgtgaggaatatcactagattctcttcttcctactccccctccttttttttttttttttttttttg

SEQ ID NO: 879096 - DNA, 120 bp, Artificial Sequence
  ENSG00000227189_12 (sequence is synthesized)
atgttgattgtggcctaaatgttaagcatattctggattttctacaccgttctgacaccacaggtacttgtttctttctcagaaggcaggtgaagctcagctgtgtggggctgtgcttgg

SEQ ID NO: 879097 - DNA, 120 bp, Artificial Sequence
  ENSG00000227189_13 (sequence is synthesized)
tggcagtgtgggaaacgtgtggaactcaccatggtgttagcagcttttactagccgtttgcttggaaaacagtctccgatctgcacttgcacacccaccacgatgccttctccccatggc

SEQ ID NO: 879098 - DNA, 120 bp, Artificial Sequence
  ENSG00000227189_14 (sequence is synthesized)
tctgtggacaccaggaggtcagggcacagaggacgtgcgacttgtgctcctgtcttgctgcacagtctaaagacctcacgtacgttttgaatgttcaaccactattagagtgagaaatgg

SEQ ID NO: 879099 - DNA, 120 bp, Artificial Sequence
  ENSG00000227189_15 (sequence is synthesized)
catccaagatgcttttactgaggaacattgacaactggaaaacaaatcaagcttggattccagggaacactgtccagatttcctgttttatgaattttaccattcactcttaaggctgtt

SEQ ID NO: 879100 - DNA, 120 bp, Artificial Sequence
  ENSG00000227189_16 (sequence is synthesized)
aggtttgaataacttgataaatgatcaagagaaaaccatgcagcattatgttcactgccaagtaatatggacgtagaggatggcagaattctgtaaaaccacttctggagttcaacattt

SEQ ID NO: 879101 - DNA, 120 bp, Artificial Sequence
  ENSG00000227189_17 (sequence is synthesized)
aaccgagcacattttacttacctgttaccagtgtgtcgcttggaatgtcttctattaggcatttctcctcacgttcccctgcgtggaaataaaaggcagttgaaaatggaaaaccaaaac

SEQ ID NO: 879102 - DNA, 120 bp, Artificial Sequence
  ENSG00000285634_0 (sequence is synthesized)
agtccagagaggaggtgtctgcagctagcctgtgtgtcttggactcaaagagtgtcaggcaggcttcaaaggccagaggcaaggcagataaaacagatttttaaaaattgaagtgaaaag

SEQ ID NO: 879103 - DNA, 120 bp, Artificial Sequence
  ENSG00000285634_1 (sequence is synthesized)
aaacagattttattttgagaatttatacactgagagtaggcagcactgatgtaaagtgaaaaaggatttttttaatgtcatgccttcatttgtacaccacctacagcttcaaaatccttt

SEQ ID NO: 879104 - DNA, 120 bp, Artificial Sequence
  ENSG00000285634_2 (sequence is synthesized)
tatatgtatccatctaatccttgaggtgggtatgagcctcttttggcggtcggcaaggatgggaaagatgacatgatttcacgactcataaagaaagtgatggagctgtagcttgaattc

SEQ ID NO: 879105 - DNA, 120 bp, Artificial Sequence
  ENSG00000285634_3 (sequence is synthesized)
ttttacttcaaatccacaatgccatgccttgctccagtgaaggacggactgctgttctgtctcctaaaacccacacagctcgcctggagcttcaaatgtgagaacacattccagctgcag

SEQ ID NO: 879106 - DNA, 120 bp, Artificial Sequence
  ENSG00000285634_4 (sequence is synthesized)
gatcagaggacttttcctacagcccataagtgcctgcagctctatcggatttgcaaatctacaaaagagagcacatcctattgttcccggttttgagtttttttaatagtatgtcttgta

SEQ ID NO: 879107 - DNA, 120 bp, Artificial Sequence
  ENSG00000285634_5 (sequence is synthesized)
aaatgctggttgctggtggacaggggtgttttacagataggtgtgactcaggaggggaaatgggtgggcagagacagccacaaggaattccacacatgaaggaaatgctcccacttgtgt

SEQ ID NO: 879108 - DNA, 120 bp, Artificial Sequence
  ENSG00000285634_6 (sequence is synthesized)
tttctatttgtgttttaaatttggggagcgactcacaggcactcagcaaaagtaactaattatattaaccttatcagtagtgaggtttcctggtctctcatcagacactcagctcactgg

SEQ ID NO: 879109 - DNA, 120 bp, Artificial Sequence
  ENSG00000285634_7 (sequence is synthesized)
ctggtatttaattgggagcctggtggccagtgaaaacagtgtgggatgagtcacactttaacaagtttttatagtacagcaaccttgctgtataatagccagacattattaaaattcaga

SEQ ID NO: 879110 - DNA, 120 bp, Artificial Sequence
  ENSG00000285634_8 (sequence is synthesized)
tatggtacactgacttgtttgttttccttattcacatgaaacagatgctcaggactcattttacttacacacagtaaatgagggtcagctgtgttgagggaagtgagtactttgttctgg

SEQ ID NO: 879111 - DNA, 120 bp, Artificial Sequence
  ENSG00000285634_9 (sequence is synthesized)
aaggatagatgttgtagcaattgtcttgctctgattgtatttgaaaagaatgaatgttgttagtacaatttggtattcttccaatgcctagttggagttcaagggatataaaactgggcg

SEQ ID NO: 879112 - DNA, 120 bp, Artificial Sequence
  ENSG00000285634_10 (sequence is synthesized)
cttgaggagtgggatggaaaaggatggagaaggaaggtcaaatatggctttgaaggggatcagcagaagccagaggccgcagtggtgaacactccttgtgaatggccctttgcacccacg

SEQ ID NO: 879113 - DNA, 120 bp, Artificial Sequence
  ENSG00000285634_11 (sequence is synthesized)
gcttggtgaacccagcatggaccgtggagagaggacctgcctaaaaaccagagacggggtttgcctctccgcatcaccactggcttgctgcatcaagaatctgcctttcagcttcttcac

SEQ ID NO: 879114 - DNA, 120 bp, Artificial Sequence
  ENSG00000285634_12 (sequence is synthesized)
ctgaaacaaggtgattgggatagctggttttatttatttatttttgaggccattctagcactttgtaaagtccaagggggtgtggtattgtaattcttggaataatacaatgaacatcag

SEQ ID NO: 879115 - DNA, 120 bp, Artificial Sequence
  ENSG00000285634_13 (sequence is synthesized)
atgctttgaagttttccgttcggtggattctgggattcttttctgaatgagtgattactagccaacaggaatctcatggttcaacctcaaactcaaaagttatttcggggatggaaaatg

SEQ ID NO: 879116 - DNA, 75 bp, Artificial Sequence
  ENSG00000285634_14 (sequence is synthesized)
cctcaaactcaaaagttatttcggggatggaaaagtttgactatggatcatcaagtcaccatgcaacctgaactg

SEQ ID NO: 879117 - DNA, 120 bp, Artificial Sequence
  ENSG00000285634_15 (sequence is synthesized)
catcaaatggaagtggtatatacgtgattgggcttaagcagatcctgaaggccaagtaagttacataaggaagtggctcaaatgcccatgatctccactcctgccaccctaccttctctc

SEQ ID NO: 879118 - DNA, 120 bp, Artificial Sequence
  ENSG00000285634_16 (sequence is synthesized)
caagtaagttacataaggaagtggctcaaatgcccatgatctccactcctgccaccctaccttctctcctccagcctgcaccaatggcctcatagggagttccctatgatcagttgacag

SEQ ID NO: 879119 - DNA, 120 bp, Artificial Sequence
  ENSG00000285634_17 (sequence is synthesized)
acagctgtggcactacagtccctttctaggatatccctggaggacagcgtgaaaggaaatcttcccagtgggcagaacttcgagcagtacaccttgttgtgcactttgcatggaaggaga

SEQ ID NO: 879120 - DNA, 85 bp, Artificial Sequence
  ENSG00000285634_18 (sequence is synthesized)
gtttggctggatggtcagggacttggaagtagcatgattggagaattggtgacaaagaatgtgttaaaagctgtgaagatatttg

SEQ ID NO: 879121 - DNA, 120 bp, Artificial Sequence
  ENSG00000285634_19 (sequence is synthesized)
gctgtgaagatatttgtatcctatgtgagtgctcactgacagatgacctctgcagaggaggatttcaataatcaagtggataggatgacccattttgtggacaccactcagcctctttcc

SEQ ID NO: 879122 - DNA, 120 bp, Artificial Sequence
  ENSG00000285634_20 (sequence is synthesized)
cactcagcctctttccccagctactcctgtcatcgcccactgggcccatgaataaagtggccatggtggcaggggtggaggttatgcatgggcttagcaacatggacttccactcaccaa

SEQ ID NO: 879123 - DNA, 74 bp, Artificial Sequence
  ENSG00000285634_21 (sequence is synthesized)
ttgccagcagcagagaccaacactgagactttgatatggcaccattcctcggggtcatcagccagctacctggt

SEQ ID NO: 879124 - DNA, 80 bp, Artificial Sequence
  ENSG00000285634_22 (sequence is synthesized)
tgcttctgccaagactaccatccatggactcacagaacgccttatccactgtcatggtattccacgcagcactgcctctg

SEQ ID NO: 879125 - DNA, 120 bp, Artificial Sequence
  ENSG00000285634_23 (sequence is synthesized)
cttatccactgtcatggtattccacgcagcactgcctctgaacaagaaactcactttacagctaaagaagtgtggcagtgagttcatgctcatggaagtcacttgtcttaccatgttccc

SEQ ID NO: 879126 - DNA, 120 bp, Artificial Sequence
  ENSG00000285634_24 (sequence is synthesized)
ctggattgatagaatggtggaatggccatttgaagttacaattacgatcaattacaatgccaactagatgataatactttgcatggctgcggcaaagttctcccaaaggttgtgtatact

SEQ ID NO: 879127 - DNA, 120 bp, Artificial Sequence
  ENSG00000285634_25 (sequence is synthesized)
gcatggctgcggcaaagttctcccaaaggttgtgtatactctgaatcagcgtccaatatatggtactgaatctgccataggcaggattcacagatccaggaatcaaggggtggaagtgga

SEQ ID NO: 879128 - DNA, 120 bp, Artificial Sequence
  ENSG00000285634_26 (sequence is synthesized)
tagtgattcgttagcaaaatttttgcttcctgttccctctacattacgttctgctggcctaaaggtcttagttctagagggaggaatgctgccaccaggagacatgacaatgccattaaa

SEQ ID NO: 879129 - DNA, 120 bp, Artificial Sequence
  ENSG00000285634_27 (sequence is synthesized)
ctggaagttaagattgccacctggacactgtgggctcctcctacatttaagtcaacaagctaagaagggagttacagcattggctgtggtgattgacctggactgtgaagatgaaatcag

SEQ ID NO: 879130 - DNA, 120 bp, Artificial Sequence
  ENSG00000285634_28 (sequence is synthesized)
tctactattccacaatggagggaaggaagagtatgtatggaatacaggagatccattacggtgtctcttagtattaccatgacctgtgattaaggttaatgggaaactacaacagcccaa

SEQ ID NO: 879131 - DNA, 120 bp, Artificial Sequence
  ENSG00000285634_29 (sequence is synthesized)
tctggtcaggactacaaatgacccaggcccttcaggaatgaaggtttagttcactccaccaggaaaaaagctatgacctgctgaggtgcttgctgacagcaaagggaatacagaatgagt

SEQ ID NO: 879132 - DNA, 79 bp, Artificial Sequence
  ENSG00000285634_30 (sequence is synthesized)
ctgaggtgcttgctgacagcaaagggaatacagaatgagtagtagaagaaggtagtcattaataccagctataaccagg

SEQ ID NO: 879133 - DNA, 70 bp, Artificial Sequence
  ENSG00000285634_31 (sequence is synthesized)
ctgttaactttctgtaatagtatttgggttgaggattggtgcatttccggttgtacgaaggatagttgta

SEQ ID NO: 879134 - DNA, 68 bp, Artificial Sequence
  ENSG00000285634_32 (sequence is synthesized)
gtgatctcaggagacgtgtatgggttcaagttgacaaggggcagacttgtgatggttaatactgagtg

SEQ ID NO: 879135 - DNA, 120 bp, Artificial Sequence
  ENSG00000285634_33 (sequence is synthesized)
tctcaggagacgtgtatgggttcaagttgacaaggggcagacttgtgatggttaatactgagtggcaacttgattggattgagggatgcaaagcattgatcttgggtgtgtctgtgaggg

SEQ ID NO: 879136 - DNA, 86 bp, Artificial Sequence
  ENSG00000285634_34 (sequence is synthesized)
agattaacatttgagtcagtgggctgaggaaggcagacctacccttattctgggtgggcaccatctaatcagctgctgctacactg

SEQ ID NO: 879137 - DNA, 73 bp, Artificial Sequence
  ENSG00000285634_35 (sequence is synthesized)
catctttctcccgtgctggatgcttcctgtccttaaacatcgaactccaagttcttcagcgttggaggatctt

SEQ ID NO: 879138 - DNA, 120 bp, Artificial Sequence
  ENSG00000285634_36 (sequence is synthesized)
aattctgtccctctagagaaccacgactaacacagagataaacaatgagaacacatggacacataaaggggaacaatggacactggggcatacttgagggttgagagtgggaggacagag

SEQ ID NO: 879139 - DNA, 120 bp, Artificial Sequence
  ENSG00000285634_37 (sequence is synthesized)
ttacctgggtgatgaaataatctgtataccaaagctccatgacacatggtttaccaacacagcaaacctgcacatgtacctaaaataaaagtcaaaaaaaatttgctccaggaccaaaga

SEQ ID NO: 879140 - DNA, 120 bp, Artificial Sequence
  ENSG00000285634_38 (sequence is synthesized)
ataaaagtcaaaaaaaatttgctccaggaccaaagaactttccctggtttctctcaatgtcagcactagaaactaaagtgcacaaaaatcatgggaaattccattggctttatcaagcag

SEQ ID NO: 879141 - DNA, 120 bp, Artificial Sequence
  ENSG00000285634_39 (sequence is synthesized)
tcaactttgatcaatctatgtgaactgtaagaataaaataggaatttgggggttttagatataaaaatcagctgttcattatctgaaaaaatatttgttagtggatcagacaaagattta

SEQ ID NO: 879142 - DNA, 120 bp, Artificial Sequence
  ENSG00000285634_40 (sequence is synthesized)
tggtatctattatctgtgaaaatgtttcaaattgccttttcgaatgcaataattgtcttgttccccgccccccctcagtgcatttagttgctgtcagattgtttgctttttcactttgtg

SEQ ID NO: 879143 - DNA, 120 bp, Artificial Sequence
  ENSG00000285636_0 (sequence is synthesized)
acagtccaggggagcctaaggaggataagaactaaatgtggtcccagacaagatcctggaacagaaaatgaacactaagggaaaactaaggaaatatgaacaaggagattccatgaaagg

SEQ ID NO: 879144 - DNA, 120 bp, Artificial Sequence
  ENSG00000285636_1 (sequence is synthesized)
agagaggctggcacagctggttgttctatggccatgaggagaagcatgacaagagagaagagatgccactagatgaaaagaactctccagagaagagtggaggcccaaactgggaagtta

SEQ ID NO: 879145 - DNA, 120 bp, Artificial Sequence
  ENSG00000285636_2 (sequence is synthesized)
gctgtagcagctgatgtcacaaagcctggctgaggaccaaagagaaacaggttcgtttggaagttcgtatctgagcagactggctcaaccagaagtccagaaaagtgtggaccagcttca

SEQ ID NO: 879146 - DNA, 120 bp, Artificial Sequence
  ENSG00000285636_3 (sequence is synthesized)
acaggacagcactaacacagactactgcagtctctgcacagagaggcctaaaggagaggtcacagcagtactctgcagataagcaggagctaactgcaaataaagttaactgaaagactt

SEQ ID NO: 879147 - DNA, 120 bp, Artificial Sequence
  ENSG00000285636_4 (sequence is synthesized)
caaatttttttataagtttctggacaacctcagcctcagtactaagttaatatttcataaagtgctttcacttgctggcttccaccctattttctggagattaacttctgaagacaccaa

SEQ ID NO: 879148 - DNA, 120 bp, Artificial Sequence
  ENSG00000285636_5 (sequence is synthesized)
tcaactctactgttgtggcccctggtacacgaatcataatgtgaaaagcagcaagacagaaagctcgaaacattcaccaatgtaattgccatccatagacttgttagactttctgccatc

SEQ ID NO: 879149 - DNA, 120 bp, Artificial Sequence
  ENSG00000285636_6 (sequence is synthesized)
ttgttagactttctgccatcaccatcaccttcttctggaaactccttttattcacaaggtttatgtcaggtgcttccagagacaagggaaaaatgtatttatcttttttttttttttttt

SEQ ID NO: 879150 - DNA, 62 bp, Artificial Sequence
  ENSG00000285636_7 (sequence is synthesized)
actgcaaccaggcgcccaccaccccacctggctaattttttgtatttttcatagagacaggg

SEQ ID NO: 879151 - DNA, 120 bp, Artificial Sequence
  ENSG00000285636_8 (sequence is synthesized)
catgagccaccgcgcccggccttgtatttatcaatcaaaaataaatgcatcagattattctgcttctgataaagttggagtagctagtatcagactaagcctcccacaagtaacaaatag

SEQ ID NO: 879152 - DNA, 120 bp, Artificial Sequence
  ENSG00000285636_9 (sequence is synthesized)
gaactctgaacaagatagaaaaaatagctctgcatagaacgcaggacacaaaaagtgaaccacaatataaactgtgaatgttagttcataataatgtatcaatattggcttatcaattgt

SEQ ID NO: 879153 - DNA, 120 bp, Artificial Sequence
  ENSG00000285636_10 (sequence is synthesized)
aactaatgtactatactaatgtaagatgttaataataaggaatgtatgagaactctggccttgcctctcaatttttctcttaacctaaaacttctctaaaaaataaagtctattgtttaa

SEQ ID NO: 879154 - DNA, 120 bp, Artificial Sequence
  ENSG00000285636_11 (sequence is synthesized)
gttttaactgcctttaaggaggtagagcaaaactttccactctgtaagtgcatgtaagtgcagaccatgcataacgacttttttttttttccccaaaaagtacttcatggaaagaaaaac

SEQ ID NO: 879155 - DNA, 120 bp, Artificial Sequence
  ENSG00000285636_12 (sequence is synthesized)
agtaactttacaaatactatctcaagccaggtgatcaaggttaacatcaacagtgataagtcataatgatagtatgtacccttcaaattatatgatgagaatgccatcttacctctctgt

SEQ ID NO: 879156 - DNA, 120 bp, Artificial Sequence
  ENSG00000285636_13 (sequence is synthesized)
cttcctcccaaaaacatattaaccatgaggaaaacatcaaattccagttaaaggagattctacaaaataggcctgaccagtaatcttcaaaattgtgaagatcaccaaaattgtcaagat

SEQ ID NO: 879157 - DNA, 120 bp, Artificial Sequence
  ENSG00000285636_14 (sequence is synthesized)
acgagcagagaatcccaaaggaggtgatttagtgatgatctccatcagccctagagagggatcgtcgtggtcaggagacccagttttagagcccgaatcctggccattcattgcctatgt

SEQ ID NO: 879158 - DNA, 120 bp, Artificial Sequence
  ENSG00000285636_15 (sequence is synthesized)
gaccaggttactgaatctcctcttcataaagtaattatgaggattcagtgagttgctacaggcaaaacgcttagaacagcgcctgttatataacaactaacatcaatgtagacttgctat

SEQ ID NO: 879159 - DNA, 120 bp, Artificial Sequence
  ENSG00000285636_16 (sequence is synthesized)
tttcactggtatttttttttttttttgactagccacttaaattctgatgtgtctcatgtttggttattagtgtcacctaaaagaaataaaaccagttccttgttgcttttttccatgaaa

SEQ ID NO: 879160 - DNA, 120 bp, Artificial Sequence
  ENSG00000285637_0 (sequence is synthesized)
gccactgcatttgaggaatggaaaaataaaccaaaatcgttcatcgggcctgagaaaccttgagaagcatattaccctacggttgttttttcatcgaaaagttgaaggatttctgacatc

SEQ ID NO: 879161 - DNA, 120 bp, Artificial Sequence
  ENSG00000285637_1 (sequence is synthesized)
tcaattagtaacgcatctggaatgtttgctctccaggaatagatgtacccaccaaaagccttgcttgcagccacctccacgtctctcaacctgcctgagtgcagggcttatgttacaagg

SEQ ID NO: 879162 - DNA, 120 bp, Artificial Sequence
  ENSG00000285637_2 (sequence is synthesized)
aattctcaaagctgtgttatcaaagctgtgaaatcaaagtctctacccctctgaagtttacccggatggcctgactcatcccagaagtggtggagtctacgtcccctctcctggagactg

SEQ ID NO: 879163 - DNA, 120 bp, Artificial Sequence
  ENSG00000285637_3 (sequence is synthesized)
agtggagctttgtgactgctgcagccattggagtatggcagaagtgctgttatgtcacttatgagattggatcataaaaatgccacacacttccttcctctcttggaatgctgaggccat

SEQ ID NO: 879164 - DNA, 120 bp, Artificial Sequence
  ENSG00000285637_4 (sequence is synthesized)
gttgtgaggaagtccaatgagcccctgtggagagaccatatagaatgactactttgagatgttccagcttacagccctgctcggccctagccaacagccagcatctttcaccagacatat

SEQ ID NO: 879165 - DNA, 120 bp, Artificial Sequence
  ENSG00000285637_5 (sequence is synthesized)
gagtgacgaccctccagatgattccagcttccagccagtgaatcacatctagctttcaagtcttcccagccgaggccccaagcattgtgaagcagagaatgacctcatgtctttctacct

SEQ ID NO: 879166 - DNA, 120 bp, Artificial Sequence
  ENSG00000285637_6 (sequence is synthesized)
gaagcctgctataccatttgttgcacacaacttctacaatctctatggactttatacaatgtacttaataatgaaaagcactgaagagagaggaagaaacagggaaaagggagaccaagt

SEQ ID NO: 879167 - DNA, 120 bp, Artificial Sequence
  ENSG00000285637_7 (sequence is synthesized)
catatcaggatttgaatttgaaaatcatccaggaaatcagatgatgcctggaagtgtattaactatcctgagctgacaacatgccgacccactaatggaaaattgtgactaacacacctg

SEQ ID NO: 879168 - DNA, 120 bp, Artificial Sequence
  ENSG00000285637_8 (sequence is synthesized)
ccaggttactagatttttcccttcatagatattttcttggtgcatgtttgaatgaatggatgattaattgataagattttaaaagagttcggttgacaccaatcataactggaagcaaaa

SEQ ID NO: 879169 - DNA, 120 bp, Artificial Sequence
  ENSG00000285637_9 (sequence is synthesized)
gagattcatctgagttctttcaaattatgcttgcctgacaccttctccacttcaacttgttgaaaggcccagggtgaatcacctgcctgcacaatataacaaagggaacagcacatgcac

SEQ ID NO: 879170 - DNA, 120 bp, Artificial Sequence
  ENSG00000285637_10 (sequence is synthesized)
ccatgggcctctgctaatctctgggctgacctctgttagccccatggttattctggtctagacaggcttatgctgagaaatactttacattttctgaagacaagtgttatgtaattctgg

SEQ ID NO: 879171 - DNA, 120 bp, Artificial Sequence
  ENSG00000285637_11 (sequence is synthesized)
tgcttagagaatacttaaatgattcttccaaattgtgctcctaatttctgaatgtcatcaaacgtcaaactagtattttttagttttgtgtaatacaaaagtatctctgttttgtatgat

SEQ ID NO: 879172 - DNA, 120 bp, Artificial Sequence
  ENSG00000285637_12 (sequence is synthesized)
ataaaagtattttttagtttcggataactgaaaaatacaaaagtcatttttaattagttacctgtcattgtaaacattcagttcctgttctttgaaaagatttgtctctgtagttcttca

SEQ ID NO: 879173 - DNA, 120 bp, Artificial Sequence
  ENSG00000285637_13 (sequence is synthesized)
aacatttataataatccaaggggagctagaaaatgtcaggcacaaggagatggaggacgtctaagttagggtgcccaggctttagagagcaacttcatttatgtgttagtttgacactgt

SEQ ID NO: 879174 - DNA, 120 bp, Artificial Sequence
  ENSG00000285637_14 (sequence is synthesized)
acagatcagattgacagcagaggtaaaatgtgacccttgtgcagtctgataagtaacatttcttaaacttgtcacataaaacattctgttatgcttcaggctgttgaaaataatttcatg

SEQ ID NO: 879175 - DNA, 120 bp, Artificial Sequence
  ENSG00000285637_15 (sequence is synthesized)
cacaggagcatagtcacctgaggcaattctgttgttctgcaacagccttaggacaaatgaacagcttggaggtggaaattttgggttatcatatgattgtaatcattacccagactgaac

SEQ ID NO: 879176 - DNA, 120 bp, Artificial Sequence
  ENSG00000285637_16 (sequence is synthesized)
aagagtgattcggtagagtgagaacgatagcaatgtggattaacctactttcactttttaatgactatttcttctaccccaaagatcaaagaatatttgtcattgagaaaatttcagatg

SEQ ID NO: 879177 - DNA, 120 bp, Artificial Sequence
  ENSG00000285637_17 (sequence is synthesized)
ttctttaaaaggcacatttcttttttaaaaagctgacccgttttgtgtttattccacaagattttcaaatgtattctgttgtatcaacaaatttgctcaatcatctaggagaaaggctaa

SEQ ID NO: 879178 - DNA, 120 bp, Artificial Sequence
  ENSG00000285637_18 (sequence is synthesized)
caaataattcaaggacttcaaatgcttttatgcagaagagggaaaatactcaaatcacttaggtatttgcatacagatttcctgtgatacttccaaacctaagtgcttccctgaatattg

SEQ ID NO: 879179 - DNA, 120 bp, Artificial Sequence
  ENSG00000285637_19 (sequence is synthesized)
accttgagaaaggggctggaattgaagacacagagggagccaggggaactgacaaaagctcttatgctttctctcttatctcagagatatggcattttacctacggagaagtggtcatta

SEQ ID NO: 879180 - DNA, 120 bp, Artificial Sequence
  ENSG00000285637_20 (sequence is synthesized)
tgagacgttttttcccccatatatagttcagttgaaattagtgataggagcataatcagaatcaattattgattatagaaagttcagcattaaatgaaagcagggagaaggtgattgagc

SEQ ID NO: 879181 - DNA, 120 bp, Artificial Sequence
  ENSG00000285637_21 (sequence is synthesized)
tgctacatttccccagtgtttccttctgtgtttatagtagttacggaatcacctcacacatccccagaaagtttaagattgataagaggaaaagacactcaggtgttttttgtttgtttg

SEQ ID NO: 879182 - DNA, 66 bp, Artificial Sequence
  ENSG00000285637_22 (sequence is synthesized)
gataagaggaaaagacactcaggtgttttttgtttgtttgattgattgattgattgattgattttg

SEQ ID NO: 879183 - DNA, 84 bp, Artificial Sequence
  ENSG00000285637_23 (sequence is synthesized)
gggttcaaatgattctcctgtctcagactacagagtaactggggttatggacgtcttagagacgggatttcactatgttgccca

SEQ ID NO: 879184 - DNA, 120 bp, Artificial Sequence
  ENSG00000285637_24 (sequence is synthesized)
ttacaggcatgagccaccacgcctagcccactcaggcgtttttcagctgaactattgtctctaatttccccagaacaatcacagaatatttctctgaacccattagctgaacaatgctat

SEQ ID NO: 879185 - DNA, 120 bp, Artificial Sequence
  ENSG00000285637_25 (sequence is synthesized)
acagaatatttctctgaacccattagctgaacaatgctataaaaatttggtgctgggatattataaattatgaattagatggtcaaaacattactttgaatttcatcatattgttgaatt

SEQ ID NO: 879186 - DNA, 120 bp, Artificial Sequence
  ENSG00000285637_26 (sequence is synthesized)
gtatttttttgcccaaacattaaataatggctaagataattaatgagaaatgaacgtatacatttatcaactgtgcttttgtttaaccttttaagtagccctgtttttaattgagtattg

SEQ ID NO: 879187 - DNA, 120 bp, Artificial Sequence
  ENSG00000285637_27 (sequence is synthesized)
ctgtctgggtttcacaagcaccaaactttagcatactaacaattttaatcattagtcagacttggtcttgagctgtaacatatgaaacccagtagaaatgtggtaggattagggtaggac

SEQ ID NO: 879188 - DNA, 120 bp, Artificial Sequence
  ENSG00000285637_28 (sequence is synthesized)
tgccatattcaaattgtgactagagttgggttcctggggaatttaacacagacattttgtaccagatgtgattggaggaagcagattctaaagtcacccttctgctgggttgcccacttg

SEQ ID NO: 879189 - DNA, 120 bp, Artificial Sequence
  ENSG00000285637_29 (sequence is synthesized)
ttggctagaagtgagaatgacatcacccatgctgtaccagagcaactgttccactttcatcagtgctgaaaagaggtgaaatataagtggaatgaacccaatagtgggcagaatgtctta

SEQ ID NO: 879190 - DNA, 120 bp, Artificial Sequence
  ENSG00000285637_30 (sequence is synthesized)
aggtaaatattggaaatgttaatgaatgtctgagtgttatcaccaatttagggtgaagtgtaaagccagatgacctcctaaacagcacaaatggtctttcatctttctcaacacaggaag

SEQ ID NO: 879191 - DNA, 120 bp, Artificial Sequence
  ENSG00000285637_31 (sequence is synthesized)
aaaaagctaaatgtcaggcccaggacttaagggaagtagagatgtatagtgagttgaattctcaatccctggaagtcttctctgtcaaggtcaggtccattattgtgtgtcaacaaggtc

SEQ ID NO: 879192 - DNA, 120 bp, Artificial Sequence
  ENSG00000285637_32 (sequence is synthesized)
ctgaaacttgggatggaggcattcaggtacatgcattgaaaattttcattcttcttcttctcctgaaccttctggggttacacaactagcccattcctctctaccaaagactaatgctcc

SEQ ID NO: 879193 - DNA, 120 bp, Artificial Sequence
  ENSG00000285637_33 (sequence is synthesized)
tcccttacctgaagatgatgcataggcctctcccttgcaagacaacattgaacaccccaggactgactgtcttctccactcttggccattagaccacttacgtaggacaaactcacaaaa

SEQ ID NO: 879194 - DNA, 120 bp, Artificial Sequence
  ENSG00000285637_34 (sequence is synthesized)
aaactcttggtctgggacattataggcatgcagggggtaggaaagagacctcaatgagacctaacatgaagcaacagtaaagaatacatatgagtctgaatcttaagaatactggaacaa

SEQ ID NO: 879195 - DNA, 120 bp, Artificial Sequence
  ENSG00000285637_35 (sequence is synthesized)
agtgagaggagggagttaggttaggcaattagacagggagggactcagcagaagagcaacagtaatagaaacgcctgcagaacagcagcaacaccacctctgcagctagcgggaagatca

SEQ ID NO: 879196 - DNA, 120 bp, Artificial Sequence
  ENSG00000285637_36 (sequence is synthesized)
acagtcataggaacacccgtgggacagcacccacactgcctctgcagctaaagggaagaaatgtagttaagaacttccccttatgccaggaggtctgctcagaagggactgtcccagctt

SEQ ID NO: 879197 - DNA, 120 bp, Artificial Sequence
  ENSG00000285637_37 (sequence is synthesized)
aggtgcaggcacaataaatcaacctaaatacccttaacttaacccagctcattataatgtcattaacatgatattagcattgcagttttagcctcctccaccatgtgtgtttcagttagg

SEQ ID NO: 879198 - DNA, 120 bp, Artificial Sequence
  ENSG00000285637_38 (sequence is synthesized)
cactcatgggtaataaccaagatggagttaccatgaccaactccaggcatgcacagatacaacacccctaggaggtgtatctattgtatctctgccctctcccatttaggcagaacccac

SEQ ID NO: 879199 - DNA, 120 bp, Artificial Sequence
  ENSG00000285637_39 (sequence is synthesized)
agaagacttccttgttcttgccacataaaacacccagaactcagccccattgcttacaacccactttcagggtcccctttcactgcttggagctttccttttgcttaataaattctgctc

SEQ ID NO: 879200 - DNA, 120 bp, Artificial Sequence
  ENSG00000285630_0 (sequence is synthesized)
tcccctctcagcgacaggcagcgaggaggaagatcattggcttctcttagggcctgtggctggagggaaagtcaagttcagtgcaacaactgtgacataaggaatcagtagagtccattt

SEQ ID NO: 879201 - DNA, 120 bp, Artificial Sequence
  ENSG00000285630_1 (sequence is synthesized)
ctctctgtgaggaatcttcaggaacttaaccactacaatatgtactgacatagtcagacgttaacaacgatgtactaatggcgaagggaaaaaagcagcggttcctggtcaaatctcctc

SEQ ID NO: 879202 - DNA, 120 bp, Artificial Sequence
  ENSG00000285630_2 (sequence is synthesized)
tagaaactcgaagaaagggaaggggcaggtggttttgttggtcttgttttgttttgcttggcatggcttaagagctgctccttctggaggaagtggccttgggcggcccaagcgctgtgt

SEQ ID NO: 879203 - DNA, 120 bp, Artificial Sequence
  ENSG00000285630_3 (sequence is synthesized)
tactgggctgcgggccggtacttgggaagaagtcctccgcagttcagcatcccaggatgcatctagcagatttgctgcctcatttgaggactcaggacacacaggtccctccactgctgt

SEQ ID NO: 879204 - DNA, 120 bp, Artificial Sequence
  ENSG00000285630_4 (sequence is synthesized)
cagcacagctcacccacacctgctacacacctgtcactcctgcagcaccaacaccccccagaggagcctcccaggggagaaaatggaaccaccaacaggttctcctatgagagcgtggat

SEQ ID NO: 879205 - DNA, 120 bp, Artificial Sequence
  ENSG00000285630_5 (sequence is synthesized)
ccagagaatatccctgagcttatttcaaatattagttccaaagggctagaactgcagggcttagaacaatcaatataaagatcgtgttaaaatctactggaaaatatgattcaaattgca

SEQ ID NO: 879206 - DNA, 87 bp, Artificial Sequence
  ENSG00000285630_6 (sequence is synthesized)
atcgtgttaaaatctactggaaaatatgattcaaattgcaaaagctgaattttcatattctgcttatcaagagtgtattcagggaat

SEQ ID NO: 879207 - DNA, 120 bp, Artificial Sequence
  ENSG00000285630_7 (sequence is synthesized)
acttctcaaaagaagacatatatgtggtcaaaaaacaagtgaaaaaaacctcaatatcactgatcattagagaaattcaaatcaaaaccacaataatgtaccttctcacactagtcagaa

SEQ ID NO: 879208 - DNA, 83 bp, Artificial Sequence
  ENSG00000285630_8 (sequence is synthesized)
aatatcactgatcattagagaaattcaaatcaaaaccacaataatgtaccttctcacactagtcagaatggctattactgaaa

SEQ ID NO: 879209 - DNA, 90 bp, Artificial Sequence
  ENSG00000285630_9 (sequence is synthesized)
tttacactgttggtgggaatgtaaatgagttcaaccattatggaagacagcatcgtgattcctcgaagacctaggtctactgggtatgta

SEQ ID NO: 879210 - DNA, 120 bp, Artificial Sequence
  ENSG00000285630_10 (sequence is synthesized)
gttcactgcagcactattcacaatagtaaagacgtgggattaacctgaatgctcatcagtgacagactggataaagaaaatgtatatataaaccatggaatactatgaagccataaaaag

SEQ ID NO: 879211 - DNA, 64 bp, Artificial Sequence
  ENSG00000285630_11 (sequence is synthesized)
gactggataaagaaaatgtatatataaacggatggagttggaagccattattctcagcaaacta

SEQ ID NO: 879212 - DNA, 87 bp, Artificial Sequence
  ENSG00000285630_12 (sequence is synthesized)
tgcatgttctcacttattttgggaggagcaacacacactggggcctgttgtgggtaagtcatggagggagagcatcaggaagaatag

SEQ ID NO: 879213 - DNA, 71 bp, Artificial Sequence
  ENSG00000285630_13 (sequence is synthesized)
ggtaccccaaacttaaaagttgaaaaaaaaaatcaaggtgtagttcacccttcccctgccccccactgcaa

SEQ ID NO: 879214 - DNA, 120 bp, Artificial Sequence
  ENSG00000285630_14 (sequence is synthesized)
atcaaggtgtagttcacccttcccctgccccccactgcaaaataaaagagcatattcaggggatctttagaatttagagagactttcaaaagctgcttagtacaataacatttattgcat

SEQ ID NO: 879215 - DNA, 120 bp, Artificial Sequence
  ENSG00000285631_0 (sequence is synthesized)
gagtgcaagtggaaagtctgacttgcttctaaccaacataatatggcaaatgtgatggaatgtcactactgatggaatgtaattacgttgcattatatggcaaagccgatttgatgtcac

SEQ ID NO: 879216 - DNA, 120 bp, Artificial Sequence
  ENSG00000285631_1 (sequence is synthesized)
tcctatgatttatgtatgatttatgttatgatatataaaactccatcttagttaactagggtgagagactttgctagctttgaaaaaacaaacagccatataaactatctatgaaaaggg

SEQ ID NO: 879217 - DNA, 120 bp, Artificial Sequence
  ENSG00000285631_2 (sequence is synthesized)
ccatatgggaggaactgtgggtcatctcaaggacctgaaggggacctccagctgaaagccagtaagaagttggggcctcagtcatacagctgcaaggaaatgaatttttccaacaacctg

SEQ ID NO: 879218 - DNA, 120 bp, Artificial Sequence
  ENSG00000285631_3 (sequence is synthesized)
gatgagcttggaaacagattctaccccagtcaagtactcaggtttctacagcaatgttatcttgaatggtttgtcaacatgtttcactgagaaaacttaaagcaactctggtaattacaa

SEQ ID NO: 879219 - DNA, 120 bp, Artificial Sequence
  ENSG00000285631_4 (sequence is synthesized)
gtggaaccttgttacaagtggaaccttgacaacttcagaagtgaccatcacaaccaaacattccctgctctgaatcacctgacattcactgtctcattcacaccagcttcttcaggtggc

SEQ ID NO: 879220 - DNA, 120 bp, Artificial Sequence
  ENSG00000285631_5 (sequence is synthesized)
ccttgatgatctgcctgcctccacagaggctcagaaaattagccttttctttttttctagatttcactcttcatgatggatgtgaaagacagtaaagtatgctagttaaaacccagcctc

SEQ ID NO: 879221 - DNA, 120 bp, Artificial Sequence
  ENSG00000285631_6 (sequence is synthesized)
ttgcacaattttacttaacctctctgaacctgaaatcaggctagttacagcatattagtgaagcattcatcacagaacctgaacatagggagtcctcattaatgacagttattatcatcg

SEQ ID NO: 879222 - DNA, 120 bp, Artificial Sequence
  ENSG00000285631_7 (sequence is synthesized)
ttattaatatattataatcacatggctattgctttgtacttatcacatagtcattaatgtccctagaatagtgcagatcggatgacaccagttataagaccctgagaagcttaactcagc

SEQ ID NO: 879223 - DNA, 120 bp, Artificial Sequence
  ENSG00000285631_8 (sequence is synthesized)
aaaactaagttgtttaaatctatgttctagctcagaggttggcaaactttctctgaaaagggccagatagtaaatattttaggcttgcaggccatatggtctgtgttgcaactacttaat

SEQ ID NO: 879224 - DNA, 120 bp, Artificial Sequence
  ENSG00000285631_9 (sequence is synthesized)
tctgctattataactcaaaagcagccatagacaatacaaaagaaaatgagtatgtttgtgctccaattaaatgttatttacaaaaagaattggctgtttggatttaacgtgtaggtcata

SEQ ID NO: 879225 - DNA, 120 bp, Artificial Sequence
  ENSG00000285631_10 (sequence is synthesized)
gtctgccaacccctgctctagccccttgtccatgtacagcaaggtactcccaaacagaatgctaatgggaagggcacgtggcacagtagacacaatagagtttgagtctcgattttgtca

SEQ ID NO: 879226 - DNA, 120 bp, Artificial Sequence
  ENSG00000285631_11 (sequence is synthesized)
tgtcctgactgtagcattcagggaatattacttaactctgtagaattctgagaatattacttaattcctccatgccccagtttcttcctctgtaaatcctaggcaatagtacttcctggg

SEQ ID NO: 879227 - DNA, 120 bp, Artificial Sequence
  ENSG00000285631_12 (sequence is synthesized)
cagggtttctgaggatagatgaccccaagtatataaaagataattaagtaaaagagataacatatgtaaatgagataatgtaagtgtgtatatttcaggcttttttgcatgaatttactt

SEQ ID NO: 879228 - DNA, 120 bp, Artificial Sequence
  ENSG00000285632_0 (sequence is synthesized)
tgggcgagtagcgggcccggatgccaggcgaaaaggtcttagttccacagggaggaatgctgccaccaggaaccacaacgattccactgaactggaaattcagactgacacccagccact

SEQ ID NO: 879229 - DNA, 120 bp, Artificial Sequence
  ENSG00000285632_1 (sequence is synthesized)
ttgggctcctcatgcatctgagtcaaaaggccaagaagggaattactatgttgctggggtgactgatccagactatcaaggggaaattggcctactactccctagtgaagtgctaataaa

SEQ ID NO: 879230 - DNA, 120 bp, Artificial Sequence
  ENSG00000285632_2 (sequence is synthesized)
aagcagtttaattgactcacagttcagcatagtggcggaggcctcggaaaacttcccatcgtggcagaaggggaagcaaatacgtccttcttcacatggcagcagcaagaagtgccaagc

SEQ ID NO: 879231 - DNA, 82 bp, Artificial Sequence
  ENSG00000285632_3 (sequence is synthesized)
aaacttcccatcgtggcagaaggggaagcaaatacgtccttcttcacatggcagcagcaagaagtgccaagcaaaaggagta

SEQ ID NO: 879232 - DNA, 120 bp, Artificial Sequence
  ENSG00000285632_4 (sequence is synthesized)
tcaatttgactggattaaggaatacctatagaactggtgaagcatcacttctgggtgtgtccatgagggtgtttctggaggagattggaatgtgagtctgtggattgagtgggggagatc

SEQ ID NO: 879233 - DNA, 120 bp, Artificial Sequence
  ENSG00000285632_5 (sequence is synthesized)
ttggaatgtgagtctgtggattgagtgggggagatcaatgcaggaaggcaccatccaatcagctggggtctcagaacaaagaagacagagaaaagggccgggtgcggtgactcatgcctg

SEQ ID NO: 879234 - DNA, 66 bp, Artificial Sequence
  ENSG00000285632_6 (sequence is synthesized)
gttcgagaccagcctgatggcgcgtgcatgtaatcctcgctattcaggaggctgaggcaggagaat

SEQ ID NO: 879235 - DNA, 65 bp, Artificial Sequence
  ENSG00000285632_7 (sequence is synthesized)
tcactgcactccagctctgagtctccagagtgagactccatcaaaaaaaagaaagaaaagaaaaa

SEQ ID NO: 879236 - DNA, 120 bp, Artificial Sequence
  ENSG00000285633_0 (sequence is synthesized)
cacattacaggcaaaattaatccctcttctctgtattctcatcattcattgaaatttttcttgcttcacttttttggaagttctttataagtagtttttgcattataattaatggttaca

SEQ ID NO: 879237 - DNA, 120 bp, Artificial Sequence
  ENSG00000285633_1 (sequence is synthesized)
aaatattttttctattgtaagaccttgattttgtcttagtcactgaaatggtttggctctgtgtccccagccaaatctcatcttaaattgtactcccatagttcccatgtgttgtgggag

SEQ ID NO: 879238 - DNA, 74 bp, Artificial Sequence
  ENSG00000285633_2 (sequence is synthesized)
tgtgggagggacccagtgggagataatctgaatcatgggggtggttatggttttatcaggggtttccgcttttg

SEQ ID NO: 879239 - DNA, 120 bp, Artificial Sequence
  ENSG00000285633_3 (sequence is synthesized)
tcattttctcttgctgccacgatgtgcctttcacctcccaatatgattctgagtcctccccagccatgtgaaaacataagtccaattaaactttttatacccagtctcaggtatgtattt

SEQ ID NO: 879240 - DNA, 73 bp, Artificial Sequence
  ENSG00000285633_4 (sequence is synthesized)
ctaatacagtaaattggtaccagtagagtagggtgctgctgaaaagaaacctgaaaatatgaggactcagaag

SEQ ID NO: 879241 - DNA, 120 bp, Artificial Sequence
  ENSG00000285633_5 (sequence is synthesized)
ccatttggaggactcagaagacaggaaaacatgggaaagtttggaacttcctagagacttcagtggctttgatcaaaagcctgatagttatatagactataagatctaggctgaagtaat

SEQ ID NO: 879242 - DNA, 120 bp, Artificial Sequence
  ENSG00000285633_6 (sequence is synthesized)
ctcagatgaagatgaggaacttgttgggaactggaccaaaggtgactcttgttatgttttaaaaaaaaggctggtgggatttttctcctgctctagagatttatggaactttgatcttga

SEQ ID NO: 879243 - DNA, 90 bp, Artificial Sequence
  ENSG00000285633_7 (sequence is synthesized)
ttttctcctgctctagagatttatggaactttgatcttgagagagatgatttagggtatcgggtggaagaaatttctaaggagttaaagg

SEQ ID NO: 879244 - DNA, 120 bp, Artificial Sequence
  ENSG00000285633_8 (sequence is synthesized)
aaatttgcagcctgacaatgtgacagaaaagaaaaacccatcttctaagtagatattcaagccagctgcagaaatgtgcataagtaacaaggagccaaatggtaatccccaagacaatgg

SEQ ID NO: 879245 - DNA, 120 bp, Artificial Sequence
  ENSG00000285633_9 (sequence is synthesized)
cacagcagcccctcccatcacaggcctgtgggggcctaggagaaaatgatttcatgagccaggcccagggtctctgtgctatgctgtgtgcagcctaaggacttgatgccctgccccaca

SEQ ID NO: 879246 - DNA, 75 bp, Artificial Sequence
  ENSG00000285633_10 (sequence is synthesized)
atttcatgagccaggcccagggtctctgtgctatgctgtgtgcagcctaaggacttgatgccctgccccacagct

SEQ ID NO: 879247 - DNA, 120 bp, Artificial Sequence
  ENSG00000285633_11 (sequence is synthesized)
ctttggcagcttccacatggtgttgagcctacaaaggcacagaagtcaagaactggggtctggaaacctctgcctagatttcaaaagatgtttgaaaatgcctggatgcccaggcagaag

SEQ ID NO: 879248 - DNA, 120 bp, Artificial Sequence
  ENSG00000285633_12 (sequence is synthesized)
gggcagtgcagaagggaaatgtggagtcagagtccccacacagcatccctactgggacaccccctagtagagctgtgagaagagagctaccatcctccagcacccagaaaggtaggtccg

SEQ ID NO: 879249 - DNA, 120 bp, Artificial Sequence
  ENSG00000285633_13 (sequence is synthesized)
cccctagtagagctgtgagaagagagctaccatcctccagcacccagaaaggtaggtccgctggcagcttgcatagtgcacctggaaaagacgcagacactcaatgccagcctgtgaaag

SEQ ID NO: 879250 - DNA, 84 bp, Artificial Sequence
  ENSG00000285633_14 (sequence is synthesized)
atgacctggatgtgagacttggagtttccactgggttttagatttgcatgtgccctgtaaccccattgttttggccaaattctc

SEQ ID NO: 879251 - DNA, 120 bp, Artificial Sequence
  ENSG00000285633_15 (sequence is synthesized)
tgcatgtgccctgtaaccccattgttttggccaaattctcccatttggaagggctatatttaccaaatacctgtacccccattgtctctaggaagtagctagcttttgattttacaggct

SEQ ID NO: 879252 - DNA, 120 bp, Artificial Sequence
  ENSG00000285633_16 (sequence is synthesized)
cataggtggaagggacttgccttgtcccagatgagactttgaactgtggacttttgggttaatggtgaaataagactttgggggactgttgggaaagcatgattggtttcgaaatgtgag

SEQ ID NO: 879253 - DNA, 83 bp, Artificial Sequence
  ENSG00000285633_17 (sequence is synthesized)
ggggactgttgggaaagcatgattggtttcgaaatgtgagaacatgagatttggaggtgccaggggaagaataatacggtttg

SEQ ID NO: 879254 - DNA, 71 bp, Artificial Sequence
  ENSG00000285633_18 (sequence is synthesized)
agtccattttctcttgctcccaccatgtaagaagtgccttttgcttcccaccatgattctgaggcctcccc

SEQ ID NO: 879255 - DNA, 120 bp, Artificial Sequence
  ENSG00000285633_19 (sequence is synthesized)
acccagtccaggtatatctttgtcagcagcatgaaaatggactaatacagtcacaaacacatagaacttagcaattgatgaaacttacacatacaggtaggtgtccatttttcttttaaa

SEQ ID NO: 879256 - DNA, 120 bp, Artificial Sequence
  ENSG00000285633_20 (sequence is synthesized)
ttaattaagatgtaaaacttaaaaagaaaaccaagccgatagaaaaattataagtctcaatgttgaaggaaagaagtcagataaaagagggtaaaacaaatcttaaagaaacagggaaat

SEQ ID NO: 879257 - DNA, 120 bp, Artificial Sequence
  ENSG00000285633_21 (sequence is synthesized)
gatgcagtggaggagaggaaagttgagtaaactcaccaaaaataccatcattcttcttagcaaaggaaggagagtagctggcatgacacagaataactgagatttaaagagcaagagact

SEQ ID NO: 879258 - DNA, 120 bp, Artificial Sequence
  ENSG00000285633_22 (sequence is synthesized)
aaccagttagaacagtgataaaagcatattatgaagtaaaaaagggagaaacaatagatggtggtagaggacttagggttatgtcataactagctcaaaatatgaatattattttataat

SEQ ID NO: 879259 - DNA, 120 bp, Artificial Sequence
  ENSG00000285633_23 (sequence is synthesized)
tctgccttttgtaataatccattttgacagtccagccactattgttagagaaagattatcagaatattgcaatgaagaattcaatgtcttaaactactaccaatagaaccaaagctctcc

SEQ ID NO: 879260 - DNA, 120 bp, Artificial Sequence
  ENSG00000285633_24 (sequence is synthesized)
atcgaatttcttgacagagttatgagaaccaagtaaaatatatctgcagacttaatcccgctcacaggcaactggtgtgtcacctttactttggagccattcaatatatataaaaattat

SEQ ID NO: 879261 - DNA, 120 bp, Artificial Sequence
  ENSG00000285633_25 (sequence is synthesized)
aaagaaggactttgttccctccccatcatctcctccaatgaacatcattgcaaatccagaaatggagccagtgaaggctgggaaatctcactattcttcgaagtttattaagcatattca

SEQ ID NO: 879262 - DNA, 120 bp, Artificial Sequence
  ENSG00000285633_26 (sequence is synthesized)
tttgtttatgtcatagtgatatactcattattctaaaactaatgtgattagccctcaacaattatgtgtcaatagaagtgataccaaaattaaaaattgatgagttaaaaaaaaaacaag

SEQ ID NO: 879263 - DNA, 120 bp, Artificial Sequence
  ENSG00000285633_27 (sequence is synthesized)
aatgcagttgatttgtctgattttcataggacctctgaccaatgaaggttgaaaacaatgggtatgcatgataaagaaaagaagctttaataaccagaatagattcactgagaataattc

SEQ ID NO: 879264 - DNA, 120 bp, Artificial Sequence
  ENSG00000285633_28 (sequence is synthesized)
aagttaagtaaacttattttcttattttataggtttctagactgataaactagagaaatgaactatttttcccaggtctctggttcattcctacttgtttggtatgggataatagtgaaa

SEQ ID NO: 879265 - DNA, 120 bp, Artificial Sequence
  ENSG00000285633_29 (sequence is synthesized)
tggtgaagactaaaggaaaacaagtttaggagaaagaatacattaaattcatggtatcttgagatatacctgtagtgatgtgaggtagagagttgaatacaaaaatgtgaagattaaaag

SEQ ID NO: 879266 - DNA, 120 bp, Artificial Sequence
  ENSG00000285633_30 (sequence is synthesized)
tattggttggagaaatatattttgaaaaggatggagaggcaggagaaacaaagtaaatggagaggtagaaaacaattggatcacgaggtctcttagaatttggaaaagaaatgtttcaag

SEQ ID NO: 879267 - DNA, 120 bp, Artificial Sequence
  ENSG00000285633_31 (sequence is synthesized)
atcatggtagtaaactgcattgttgagttctgctagggaatttagtaaggtcaggaaagaaacgtttccattaagtttggaaacacggtatttctctaatgacttattattatgtcttca

SEQ ID NO: 879268 - DNA, 120 bp, Artificial Sequence
  ENSG00000285633_32 (sequence is synthesized)
atgtaatttttctcttatttgtaacttcagtttctcagttgttacctgaaataagtacagatgaagtttgtcaaaagtaatgtacatctctttttcttatagaatatcactcgtttgcct

SEQ ID NO: 879269 - DNA, 120 bp, Artificial Sequence
  ENSG00000285633_33 (sequence is synthesized)
gaggaaaattcacatcttaattactttgaggaaatctccaagtgcactgacattatcaatagcacgtcagaataggatctattttaaggcactgagaaagaaaatacatcaatttgaaaa

SEQ ID NO: 879270 - DNA, 120 bp, Artificial Sequence
  ENSG00000285633_34 (sequence is synthesized)
actgaagcaagaacatcaaatttatagtgaagcttgggtgaaagaaatggtgaaattgtcgatcctttatgaaaagcttatgagaacaatgccccacataaatcagcagtttacaaaagg

SEQ ID NO: 879271 - DNA, 120 bp, Artificial Sequence
  ENSG00000285633_35 (sequence is synthesized)
ataacacattttaagaagggacagtaatttggaagatgaagcctgcagcagcagaccatcccaattttccaggaaaaaaaaaattaacctttttcatgccatcattgaagaggactgatt

SEQ ID NO: 879272 - DNA, 120 bp, Artificial Sequence
  ENSG00000285633_36 (sequence is synthesized)
attaacagcagaaacaagagccagcactacaaatatcttgattggttcagcttatgcaactctaaaaaattaaatttgagcaaactttctactcaataaatgccaaaactgctgtgccca

SEQ ID NO: 879273 - DNA, 72 bp, Artificial Sequence
  ENSG00000285638_0 (sequence is synthesized)
agggagccggctccggccttggccagccaagaaaggggctcctacagtgcagcggcgggctgaagggcagcg

SEQ ID NO: 879274 - DNA, 120 bp, Artificial Sequence
  ENSG00000285638_1 (sequence is synthesized)
gaggactgccagcatgctgtcacctctcaattacacaccatggtcaaatcctctcatagtacaaggtattttaacaacttgcaaaacccctatctgcaatactcaagaagactaatttca

SEQ ID NO: 879275 - DNA, 120 bp, Artificial Sequence
  ENSG00000285638_2 (sequence is synthesized)
aagaagactaatttcagaatacttatctgtgaagctggaaagccaaaatgagatttcagagccctcacagtgctggaggaacaaagttgaactttaagctcagccagggtgcagtgtact

SEQ ID NO: 879276 - DNA, 120 bp, Artificial Sequence
  ENSG00000285638_3 (sequence is synthesized)
aggttcctcatctataaaatggagataataaaagaacctatttcatatggttcattaccccaccaaatgagctaaccaatgagaggaacttaagaaaactcctaacacatggcttttggt

SEQ ID NO: 879277 - DNA, 120 bp, Artificial Sequence
  ENSG00000285638_4 (sequence is synthesized)
aacccatagaagtatttgatcagagatatgaaataatcaatgcaattgtttaagaagatcatctgacagtggtgtacagatatattggagtaaaataacacacaccagtgagatgaggtg

SEQ ID NO: 879278 - DNA, 120 bp, Artificial Sequence
  ENSG00000285638_5 (sequence is synthesized)
ggaagcaagaacaattgtccccatgagagacaaatgcattaacagtggaagctgctgaaaagattttccattcatggattttaatgagaaaggatgaaaaatcaaagtagttttaaggat

SEQ ID NO: 879279 - DNA, 120 bp, Artificial Sequence
  ENSG00000285638_6 (sequence is synthesized)
taagcaaaggattgggagtctattcaaaatgccacattacatttggatgccatgtctccttaggttcctgtgggctgtgtcaatttctgtgacatttttgatgatgttgacactttggaa

SEQ ID NO: 879280 - DNA, 120 bp, Artificial Sequence
  ENSG00000285638_7 (sequence is synthesized)
gactattggtaaagtactttgtcgtatgcacctttatcctctaatggaatttaaatttatctaatgtttatctcatgattagactgaggttatctgttttagggacacaggtcacagaga

SEQ ID NO: 879281 - DNA, 120 bp, Artificial Sequence
  ENSG00000285638_8 (sequence is synthesized)
tgaggtgtcatttttatcacatcacataaaggaaacactatcaagtgattaatgactgttgatgtggacctcgattccctggcagagcgggagtttgccaggtttctccactctaaactt

SEQ ID NO: 879282 - DNA, 120 bp, Artificial Sequence
  ENSG00000285638_9 (sequence is synthesized)
actcttctccactctcttactatactagactctggaaggaagacattacatgtatcacacacttaagaaatggggactaatactccctctccttggtaatggagaatctacaaaaatcat

SEQ ID NO: 879283 - DNA, 120 bp, Artificial Sequence
  ENSG00000285638_10 (sequence is synthesized)
ttatttgttcttataattatttatttatatcatgatgttctcatcaacatatattttgtattttgtattacattaatacaactttcattttcttgctcaaattgtttcaggattggccat

SEQ ID NO: 879284 - DNA, 120 bp, Artificial Sequence
  ENSG00000285638_11 (sequence is synthesized)
aggattggccattgagaggtctttcagttggctcttgtgttctgtcgatatatctccataggcattttttgtttgtttgtttttgcttttggacacctcctcattttccagcatgacaag

SEQ ID NO: 879285 - DNA, 120 bp, Artificial Sequence
  ENSG00000285638_12 (sequence is synthesized)
atgagctgtgttcatcttgtgtatttctaggcccatctctagaatgagccatttatccaaagagctttggtttcttttattggaatatattagaaaacaagatctggatgcaaactgtgc

SEQ ID NO: 879286 - DNA, 120 bp, Artificial Sequence
  ENSG00000285638_13 (sequence is synthesized)
aagttctactggggtgtcatttcttttaggacctcttagcacctttcaaatatatgtctatatatttgtctttatatatttacatataaataaacatttccatatttgacaatctatatc

SEQ ID NO: 879287 - DNA, 120 bp, Artificial Sequence
  ENSG00000285638_14 (sequence is synthesized)
tatattacactaatagcctgagatcttcacctctatgttttattgattgatgtgtcttactgatttttccaaacctcatctatcactatataaattattctggcctcttgcccttacttt

SEQ ID NO: 879288 - DNA, 120 bp, Artificial Sequence
  ENSG00000285638_15 (sequence is synthesized)
tacataaatactcacttcaacaaatagaaacttcactctcatgatttaccatctatttactttattgttcaattccagtgtacgtgtatagaagtatcaagattgtccaccagtatccca

SEQ ID NO: 879289 - DNA, 120 bp, Artificial Sequence
  ENSG00000285638_16 (sequence is synthesized)
atgggaaaaacttcattagccggtatagtgcttttgtgatgtttctttcgcctttagacttacatacatctctcatttccaaaattacttagttcatcagctacccacccccctcgccca

SEQ ID NO: 879290 - DNA, 120 bp, Artificial Sequence
  ENSG00000285638_17 (sequence is synthesized)
ccttctcactgaggttgtttcatgtatttataaatagcattacattctattgtcaaagtctgcattgcttcctaggattctccaatctcctaaatgatatttttgtttgcatacattaag

SEQ ID NO: 879291 - DNA, 120 bp, Artificial Sequence
  ENSG00000285638_18 (sequence is synthesized)
gctcacgctgtgctataagtttatggatttaaacaactggataatgtcatgttttccaccatgacagtatcatatagaataatttccctcccctacatattccctgttattcacctgttc

SEQ ID NO: 879292 - DNA, 120 bp, Artificial Sequence
  ENSG00000285638_19 (sequence is synthesized)
atccctgtccttgtcccccaacatctcaacctaccactgctattttcactctctctagttctgcctttttcaaagtatcatctaatgggaatgatacagtatttacccttttctgactgc

SEQ ID NO: 879293 - DNA, 120 bp, Artificial Sequence
  ENSG00000285639_0 (sequence is synthesized)
gagcccgcgggggcggggcgcgcggctccggtcacgtgggttagcaacaggcagcagccaatgagaacgcgagtcaggtggtgcgtgcgcccgccgcgcgcgggagattcaccttgcctt

SEQ ID NO: 879294 - DNA, 120 bp, Artificial Sequence
  ENSG00000285639_1 (sequence is synthesized)
ccaacaaagacacatccctggagaaatgttgcttctgctaatggagtgctaagctgaaggatgctggtagaaaaattcaaaagaaaactatacttttaaaaagaaaatctagagtggaca

SEQ ID NO: 879295 - DNA, 120 bp, Artificial Sequence
  ENSG00000285639_2 (sequence is synthesized)
aagagaaatacaagagaagggaaaggctggacagcattgctgacgaggttgcagggtaaaagtcaactggagtataaaggagccatgaagagaccatcagacgaacgctgggcaccttag

SEQ ID NO: 879296 - DNA, 120 bp, Artificial Sequence
  ENSG00000285639_3 (sequence is synthesized)
acagtaaacactagataaattccataaattaggtatcttcaaagggggttttatgcttggccatatggtctgtgatgtacaattcttcctcatttctttatgacagcatcagtaactttg

SEQ ID NO: 879297 - DNA, 120 bp, Artificial Sequence
  ENSG00000285639_4 (sequence is synthesized)
tatatatgtatgtagttttccaaaacacccccacctccaaaggaattcagctgaacaggaacctgaaaacttccacctgtagaaggatatccccagcagagtcttgggacaggaaatagg

SEQ ID NO: 879298 - DNA, 120 bp, Artificial Sequence
  ENSG00000285639_5 (sequence is synthesized)
atggtctgggccggaaatgtgagaaggtcagttggctggagccataaagcgtcaggtagggagagacaggagatggggcctgatggacaataagcaggaggcaggtcttggaggtcccta

SEQ ID NO: 879299 - DNA, 120 bp, Artificial Sequence
  ENSG00000285639_6 (sequence is synthesized)
tgtcttacaggacttgtggacgttatctcatagattacttggaactaccaaagagccttaaatgggagtgtcttagatttgtaacttaaactgagcatgtggctgcagctggaagacaga

SEQ ID NO: 879300 - DNA, 120 bp, Artificial Sequence
  ENSG00000285639_7 (sequence is synthesized)
ttggagtggtcaagattggagacagggagactaattagggttttattttgcaacaaacctcatccaggtgatggatgaggatggtggaataaggatcgtggtagtggggagaaagaaaca

SEQ ID NO: 879301 - DNA, 120 bp, Artificial Sequence
  ENSG00000285639_8 (sequence is synthesized)
cacaggtatgagaactctccaaaggatagaatgggcaaaacggagtgattgattggactgaggttaggtgagggaagggtttctgtgatgtttcttaggtttcttggaatggatactgtt

SEQ ID NO: 879302 - DNA, 120 bp, Artificial Sequence
  ENSG00000285639_9 (sequence is synthesized)
gacaaaacaaacaaacaaacacacaaagcatatatagagaagacccgttgtgtgagcctttttaaattgttgcttatttcttttgttgtctgtaaggaagctatgagttcagtttcgaac

SEQ ID NO: 879303 - DNA, 120 bp, Artificial Sequence
  ENSG00000285639_10 (sequence is synthesized)
tagaaatcattaggatacaggcaaataaatgatacagagggatgggttcaccccagaatatcagcacagtaagaagggtcatggggcaagcacagagctttggaaagtgatgtctggagt

SEQ ID NO: 879304 - DNA, 120 bp, Artificial Sequence
  ENSG00000285639_11 (sequence is synthesized)
tagagataggactctagggtttaggactccaatgactgagtagatgttgacctgattatttcaggcaggcacctttagctgcagtaactgggactcgttcaatttatctcaagagaaggg

SEQ ID NO: 879305 - DNA, 120 bp, Artificial Sequence
  ENSG00000285639_12 (sequence is synthesized)
aggttttgtggaagggtctggatcagacccggagacctcagcaaatgaggcaggtctgggggtatccatctctctccaaccctatttatttctgtatatcctcttcattttcacagtatt

SEQ ID NO: 879306 - DNA, 120 bp, Artificial Sequence
  ENSG00000285639_13 (sequence is synthesized)
gactttattatctcttctctagggccaatttctccaaaatttggaaggtctataaacatcttaaaactgtaagcaaattgttcatttatgcatttctctgcaaggggagtctgtagcttt

SEQ ID NO: 879307 - DNA, 120 bp, Artificial Sequence
  ENSG00000285639_14 (sequence is synthesized)
tgtaagattctcagggtaatctaagatacaaaagaagcccaaaacctcctccttatctctgtctgtctctctccagaaagaaagaagccttggcttgcctcagccccaccttaaccccac

SEQ ID NO: 879308 - DNA, 120 bp, Artificial Sequence
  ENSG00000285639_15 (sequence is synthesized)
aatatccattcacttcccgatcacttgcaaattacaaaattctttttattttcctagttcagattttaaaattagaggatatgattgatccagtttttttacattaggccaaagttaata

SEQ ID NO: 879309 - DNA, 120 bp, Artificial Sequence
  ENSG00000285639_16 (sequence is synthesized)
ggattattgctgtggagtcagggttagctagcaagggggtgtgatgacagaatataaacccaggctgcctgagaaggaggttaggtaaagaagcttcccttggaagggatgcggtgcaga

SEQ ID NO: 879310 - DNA, 120 bp, Artificial Sequence
  ENSG00000285639_17 (sequence is synthesized)
caggatggaaggtaaaggcttggcctacgcagcatgcccgttaccattaaagaggagtagattgtgtatcccacatattgtgtgagatgatcaatagctggctggttgcaattacccaaa

SEQ ID NO: 879311 - DNA, 120 bp, Artificial Sequence
  ENSG00000285639_18 (sequence is synthesized)
gagattggattacaggattgatattaaactggaagatatctaatggaatgctacagattttgtagaagatcccaaccttatcttttcaacatttatgttaattaaagtttatcaaacatg

SEQ ID NO: 879312 - DNA, 120 bp, Artificial Sequence
  ENSG00000285639_19 (sequence is synthesized)
aatatcaaatttgaagctgggggtgacataatatattggaagacagagctgagtctcaaaacgatcttggcaagttggaacaagagatcaaaacaaacaagattaaatttagtggggctg

SEQ ID NO: 879313 - DNA, 120 bp, Artificial Sequence
  ENSG00000285639_20 (sequence is synthesized)
aatataaaatattgtatttagaattattaaattcaaacacacaactaccacatcaggaagaagtggccaattatatgttcatatatagctttaaataatctctaaccaatttgatcccaa

SEQ ID NO: 879314 - DNA, 120 bp, Artificial Sequence
  ENSG00000256609_0 (sequence is synthesized)
acttccttgaatgagacactcatacgtggtcagataagatagggctgcctcttagagattcataaactacattagtgacttaaaggctctgataagtcctgcagtgagaagacctgttta

SEQ ID NO: 879315 - DNA, 120 bp, Artificial Sequence
  ENSG00000256609_1 (sequence is synthesized)
taattttgtttttactggcaccatacaagaccttgaactctcctgctcctgtttctagatgcctagtaacagcttgaagtacattggtaaattctgatcttgtctacctcttcataagac

SEQ ID NO: 879316 - DNA, 120 bp, Artificial Sequence
  ENSG00000256609_2 (sequence is synthesized)
agatccagccatcctgactcagaaccagccagagaggcctgacattgaatgtcagacactgccagggagaagtgggtaatctcagctcccaatgaccccattttacagacgtggaaattg

SEQ ID NO: 879317 - DNA, 120 bp, Artificial Sequence
  ENSG00000256609_3 (sequence is synthesized)
agactgcatgactcacccaaagcctctggattagtaagatacttagctgagatctcaacatggagctgccagaccccacctgttatgaagcacctacaaaagaggatggtgaaaaaccct

SEQ ID NO: 879318 - DNA, 120 bp, Artificial Sequence
  ENSG00000256603_0 (sequence is synthesized)
catctcaaaaagaaaaacaaaatcaatttaaagccatcacatttttaaaagataaaggagaatttgtggcacagctgcattaacaaaacaagacaccagtctaaagtgcaacactaaaca

SEQ ID NO: 879319 - DNA, 120 bp, Artificial Sequence
  ENSG00000256603_1 (sequence is synthesized)
ggtgttctctcttcccatggtggaatacatacacacaattacacgtaagatttcactgaagatatggaatgaggcaaataaccctttgaaatgaaccacccaaggaatagagacaggcta

SEQ ID NO: 879320 - DNA, 120 bp, Artificial Sequence
  ENSG00000256603_2 (sequence is synthesized)
tctgtcttctttcctcagccacatccaaatccagaaaggcttctgtaccctatgctcaaaacgcaacctcagccaggtgtgagccacaatgccgggatgcatcatttctttaaacaatgg

SEQ ID NO: 879321 - DNA, 120 bp, Artificial Sequence
  ENSG00000256603_3 (sequence is synthesized)
ctttaactgttgaatgagctctgacaagccatatgcatctcataagcaagccaaaatactgtcttcatatctgtttttcttgcaaacatgtatcatccaagtaaaaaaaaaaaaaaaaaa

SEQ ID NO: 879322 - DNA, 120 bp, Artificial Sequence
  ENSG00000215022_0 (sequence is synthesized)
tggcttgtcctcttctgggtgggggctctgaatggaccccaggaccatggaccccagggacccccctgccacactggacaaggtgtcagtgaccactccaggtagaacagcaatggtatc

SEQ ID NO: 879323 - DNA, 120 bp, Artificial Sequence
  ENSG00000215022_1 (sequence is synthesized)
tccacataggaaacaccaagcctttgtgaccacatgagccgcagcgtcttcatcatggatgaggaggggaaccagttctggaattctggctcagggaaggcataaatgttggctgactgt

SEQ ID NO: 879324 - DNA, 120 bp, Artificial Sequence
  ENSG00000215022_2 (sequence is synthesized)
aatgttggctgactgtcaaatgcttgtgggaggtccccacggagtggagaagcgggagactcagcttaatcacagacaaagttgtgcatgagagacggagtctcactctgttgcccaggc

SEQ ID NO: 879325 - DNA, 77 bp, Artificial Sequence
  ENSG00000215022_3 (sequence is synthesized)
agtctggagtgaaccgaagactaagcataaatgctgcaggtcaggggctgtttcttatgcctgaacatcgcggggcc

SEQ ID NO: 879326 - DNA, 120 bp, Artificial Sequence
  ENSG00000215022_4 (sequence is synthesized)
aggtcaggggctgtttcttatgcctgaacatcgcggggccttggacaccgtctttccaaatcaagacagcatagagcacaagtgctcagagggaatgagcgaggatgcagctggctgctg

SEQ ID NO: 879327 - DNA, 120 bp, Artificial Sequence
  ENSG00000215022_5 (sequence is synthesized)
cctctcagagtcacagttggtgcacggaccccagcactaacaaacggccaccaggacgctcctctgtgtgcatgggctcatgtccctgaccacgaaaggctcagaagacgcacctttggc

SEQ ID NO: 879328 - DNA, 120 bp, Artificial Sequence
  ENSG00000215022_6 (sequence is synthesized)
cctttggcctggtgctggctgtagccttcggggcatctggaacctgaagtccttccttgaatgctgcaaaaataatctttgcagccaaagtcaggcccgcctcggcctcccaaagtgctg

SEQ ID NO: 879329 - DNA, 120 bp, Artificial Sequence
  ENSG00000215022_7 (sequence is synthesized)
ggcgtgagccactgcgcctggccgcaggcatgtcttttttaaaaagacaaagcatgtaatttttatattagtctcagtttggtcagagaaaatgactggtctgttgctatcagcctcagt

SEQ ID NO: 879330 - DNA, 120 bp, Artificial Sequence
  ENSG00000215022_8 (sequence is synthesized)
tactacgctttattttttatttttcttactagtgcattacagttaaatagaattttattgaagaagttattgggctgaaggcagatcactgtaaagcagcccccatcactggcatctggt

SEQ ID NO: 879331 - DNA, 120 bp, Artificial Sequence
  ENSG00000215022_9 (sequence is synthesized)
agaagaaccttcacagggccaggaagtgatgatgtaggttccctacctgccggaaggcgccacatctctgcccgcaaaagcagatatggaagttgcccctctgttctccagtctctctct

SEQ ID NO: 879332 - DNA, 120 bp, Artificial Sequence
  ENSG00000215022_10 (sequence is synthesized)
tagaagcagttatcccctctcaagctccttatttctaacccccccagccagtcccaggggagggcaaatgctaaaattccaaggccatttccctgggagaagaaaggagaggtgagcagg

SEQ ID NO: 879333 - DNA, 120 bp, Artificial Sequence
  ENSG00000215022_11 (sequence is synthesized)
aacagagaggcaattatttgattgtggagacccgcaaaacctatgaactatttggggtccccatccctagtgtcacctaccctagggagatgggtgtggaaaggaagactctttactcgc

SEQ ID NO: 879334 - DNA, 120 bp, Artificial Sequence
  ENSG00000215022_12 (sequence is synthesized)
tcattaccaaatcatgcagttagtcaagttctccgcaaaatcatatcaactttgttaagagataggaattaaataaatgtctaagtatttctctgtgaccgtcttttagcaagcaacctt

SEQ ID NO: 879335 - DNA, 120 bp, Artificial Sequence
  ENSG00000215022_13 (sequence is synthesized)
aaaactgggtgaattttggggatccagcaaccaattctgaaaaatttgatgaaaatctgatttaaacaactttttttttttctaagtgtctagacctttctgtatcagaaatgaaagttt

SEQ ID NO: 879336 - DNA, 120 bp, Artificial Sequence
  ENSG00000215022_14 (sequence is synthesized)
atcacagtgtctttttcgagccccagtcatttcaaggacacgatgagaaaaagctaatgcatctctcctgctcttctcactactcaagctcaggaaaaactgcaccctgcatccaaagag

SEQ ID NO: 879337 - DNA, 120 bp, Artificial Sequence
  ENSG00000215022_15 (sequence is synthesized)
tgggtgggcttaaggatgtaaagggtccaaccttgacgggtgggacagcgactggctggtgaagtcacttagctcttgctctagtctccaccagggtgaccccagccagtcgtctggcca

SEQ ID NO: 879338 - DNA, 120 bp, Artificial Sequence
  ENSG00000215022_16 (sequence is synthesized)
ttcaggcacttgtttgtccagctcttgctaattgggttggcatttggcttgtcaccaggtatttgggatgctcgcagggaaagtgtggagaaatacaaaccatcaccttaataattggta

SEQ ID NO: 879339 - DNA, 120 bp, Artificial Sequence
  ENSG00000215022_17 (sequence is synthesized)
tgatatttcaggatctctgaatttcttcctttgtgtgatatttctggagagaaaaatccactaataaacctttttaaaattaatattaatgggcctcttaactgtagctaagatatgaga

SEQ ID NO: 879340 - DNA, 120 bp, Artificial Sequence
  ENSG00000215022_18 (sequence is synthesized)
gtatctttctctcaagatggtcactgtaggaggctgattaaaaacactttgacttcgtcagacagaagggagtattgtatcttgcatgtcatcaattaattaaacttttcagcatcatcc

SEQ ID NO: 879341 - DNA, 120 bp, Artificial Sequence
  ENSG00000215022_19 (sequence is synthesized)
agactacgaaatgccgaccaagtcacaaggccacagtgagcacggtagaaagatcattcctggacccccgagggcctctgagtttgagacgctggctgagatcaaatgataagaattcca

SEQ ID NO: 879342 - DNA, 120 bp, Artificial Sequence
  ENSG00000215022_20 (sequence is synthesized)
atttttgttttcctaagtctttcatctgctaatctacccaacatgaaccacgggccacatgaagggccagacacattcttaagcggctcacagcctagaggtgcacatctgtgattacaa

SEQ ID NO: 879343 - DNA, 120 bp, Artificial Sequence
  ENSG00000215022_21 (sequence is synthesized)
gttgggcgtgacttagactttcactgcccatgtagaaggcactgtacattcttgcagcatctcagttggccagcaagagagatggggcctcactctggtcacccaagctggagtgcagtg

SEQ ID NO: 879344 - DNA, 120 bp, Artificial Sequence
  ENSG00000215022_22 (sequence is synthesized)
gatggggcctcactctggtcacccaagctggagtgcagtggcaccaccttggctcactgcagcctcaacctctcggactcaagtaatcctctcacctcagcctcctgagcagctgggact

SEQ ID NO: 879345 - DNA, 120 bp, Artificial Sequence
  ENSG00000215022_23 (sequence is synthesized)
accgtgggcctttgactgagctgcagggagggagagagatggacccagtcagccagaagggttgaccatggcacttggtcctgtctgtgaacttgcaggtgtggaaaataaggttcagtg

SEQ ID NO: 879346 - DNA, 120 bp, Artificial Sequence
  ENSG00000215022_24 (sequence is synthesized)
acagcaatggtgaaaggcagttttcctcgaatgagagcatcagacaggcatgcccgggaccagctgtgggaatcctgagagacagacatgaagcacttcacttggaaatgctttcttagt

SEQ ID NO: 879347 - DNA, 120 bp, Artificial Sequence
  ENSG00000215023_0 (sequence is synthesized)
cacggacaggttgtgggtctcggcgaagcggtagaggatgttgagcaccgtgctgctggccgtcttgtgcgtcttcaggaacatgatgttggtgaccggcggcccctcagcctggccccc

SEQ ID NO: 879348 - DNA, 120 bp, Artificial Sequence
  ENSG00000215023_1 (sequence is synthesized)
aaacaggctgggagggaaggcacacgcagccttcagcaagggtgcagatgccccaacccccgcccaacagcgacccccagcccggcaaccgcaaggagagacctcccaacctgagccccc

SEQ ID NO: 879349 - DNA, 120 bp, Artificial Sequence
  ENSG00000215023_2 (sequence is synthesized)
caactctaggccagggggccaactggacccagcagctgccgggtgtgaatgttacatagagaccgtaaagaaaatgtggcacatctacaccacggaatactgtgcagccataaaaaagaa

SEQ ID NO: 879350 - DNA, 74 bp, Artificial Sequence
  ENSG00000215023_3 (sequence is synthesized)
taacacttgaacaatgagaacacgtggacacagagaggggaacagcgcatcccagggcctgtcggggatggggt

SEQ ID NO: 879351 - DNA, 90 bp, Artificial Sequence
  ENSG00000215023_4 (sequence is synthesized)
cataagtgggacttgaacaatgagaacacgtggacacagagaggggaacagcgcatcccagggcctgtcggggatggggtgtaaggggaa

SEQ ID NO: 879352 - DNA, 76 bp, Artificial Sequence
  ENSG00000215023_5 (sequence is synthesized)
aaactacctgtgtcccagaacttaaagtaaattttttaaaaattaaaaaataaaaggagaccatggcccagcagaa

SEQ ID NO: 879353 - DNA, 120 bp, Artificial Sequence
  ENSG00000204850_0 (sequence is synthesized)
cactttcctgcgagtcgctctccgaagtgtcgctgtccaccggctcctcgtccggggtgtctctcacagccagcagggccactaagtcggggacaccatttttgtcttctttggtgttca

SEQ ID NO: 879354 - DNA, 120 bp, Artificial Sequence
  ENSG00000204850_1 (sequence is synthesized)
agcggatggattcggccccagctggctccttctctgcctcttctttcttcgatttgtcggtgacggtgaccagagccaagaactcgcggggaccgtcttcttccccctcggagttgcagg

SEQ ID NO: 879355 - DNA, 120 bp, Artificial Sequence
  ENSG00000204850_2 (sequence is synthesized)
gcgcccactgcctaaccagctccctggcagcggcctgcagcgtggcgtacagcgcgctctggtcctcttctccgctcaggtcgccctggtcgatctcctcgatcacgatgcccaggctct

SEQ ID NO: 879356 - DNA, 120 bp, Artificial Sequence
  ENSG00000204850_3 (sequence is synthesized)
cgtcggaagagtcctcggcctcactcctcgcgggagcagacggccgtcctcctcggcttctcttcttgcccttctgggtcaacctgttgcgtctggttctgtttctgcgaccccgacggc

SEQ ID NO: 879357 - DNA, 120 bp, Artificial Sequence
  ENSG00000204850_4 (sequence is synthesized)
ccctccttgggttcctggctgccccaagaagcgagccagcctgccctgttacctccccagaatcctgggcctgcgtctccgaagcgggaggggtgggtgcctccccgggggtcccagcct

SEQ ID NO: 879358 - DNA, 120 bp, Artificial Sequence
  ENSG00000204850_5 (sequence is synthesized)
ccgcggcctgcgtgggcccgtcatccagcagcaggcgtctcatctgcctcaggaccctcgtgtcctgcgcacggtccttccacagaaccctccagaccccatccttgcctgggatctccc

SEQ ID NO: 879359 - DNA, 120 bp, Artificial Sequence
  ENSG00000204850_6 (sequence is synthesized)
tgggaatggcagcgtgattgacgtcctccacaaactccaccagggcggcctgggccttctcgttcatcaaagccttcatgtgtcgcaacctgaacgtgcccaggggcaggagggtcggct

SEQ ID NO: 879360 - DNA, 120 bp, Artificial Sequence
  ENSG00000204850_7 (sequence is synthesized)
gcaggacggcttcgacgtctgcctgctccaggccctccgggatgccggtgaccagcagggccctgtgcgcgtccacgtccaggctccggcaccagtcctgcaaaaggctcatggccatgg

SEQ ID NO: 879361 - DNA, 120 bp, Artificial Sequence
  ENSG00000204850_8 (sequence is synthesized)
gcaaccctagaaagccacttgcagggcttagagtcccggttccggtgaatgtggcaaggctggagtggggctcggggctcgggggctctagctgcctgctggccggctggacgcagtgac

SEQ ID NO: 879362 - DNA, 120 bp, Artificial Sequence
  ENSG00000204850_9 (sequence is synthesized)
cttcccccgggacccctctccagagctgtctgaggatccgcggggggcttacgtgtctgctttccaggacagctccctccctctctccctgacacaggcctgagtgactcggcaccgcag

SEQ ID NO: 879363 - DNA, 120 bp, Artificial Sequence
  ENSG00000204850_10 (sequence is synthesized)
ccaggtgcaggggggcggcgccgagtgcacctggagaggcgtgggaggtagcagccgcagcttgcctggcgctcgcgccgcgtctgagcgcgcaccctgggcctgaatctcagcagttcc

SEQ ID NO: 879364 - DNA, 120 bp, Artificial Sequence
  ENSG00000204850_11 (sequence is synthesized)
gctgcgacgcggctgctcgcgcgtgcgcctgcgcagagggagccgcacaccctcccctgtcccccgcccaaccgtctccatggcaacggtgcagccttgagctggggtctgcgtcgctgt

SEQ ID NO: 879365 - DNA, 120 bp, Artificial Sequence
  ENSG00000204850_12 (sequence is synthesized)
ggcctgagacgcttttcttaaaggtcccgatgacaaggacttggggcctggaagcaccactttcattaaccagcaaaaaacaaggccgaaaccacagagggccagaaatcactcaaggat

SEQ ID NO: 879366 - DNA, 120 bp, Artificial Sequence
  ENSG00000204850_13 (sequence is synthesized)
acccgacctcattcaggggatagaggcctccttccagagggtaccggcatcactgggggttacaattcccccttccaggggccaggtggaattcaggattatataggcctaaatcaaagg

SEQ ID NO: 879367 - DNA, 120 bp, Artificial Sequence
  ENSG00000204850_14 (sequence is synthesized)
gcactggccttgcagcgtaggaccaggacttactcgggatactggcctcattcacagtatatgggtctcagtatcaaataggggggcccaggcaccacctgtgagcaagacaccattcag

SEQ ID NO: 879368 - DNA, 120 bp, Artificial Sequence
  ENSG00000204850_15 (sequence is synthesized)
ggtatatgggcctcacttgcagggtacaggccccactcgatgggaccggccctcactcccatacacgttcctgtattctgaactatgcatgcacaataaatcctgtggttttgcacacgc

SEQ ID NO: 879369 - DNA, 120 bp, Artificial Sequence
  ENSG00000274863_0 (sequence is synthesized)
agggaagtggaagaaagctagcaatcactggcctcatccagctcccatgcagccggcagttctaaaggtctcatctcctctaagcacttggtgggaagagttcagcctcatccctcatgg

SEQ ID NO: 879370 - DNA, 120 bp, Artificial Sequence
  ENSG00000274863_1 (sequence is synthesized)
cagctccagtcaacacccaacagagaccaaccaaagccaagttgctggaaagggactctgagtggccagtttgggtcatgtgactccattgcccacgggagcagtctctctgagaagaaa

SEQ ID NO: 879371 - DNA, 120 bp, Artificial Sequence
  ENSG00000274863_2 (sequence is synthesized)
cagtgtcagagcaggtggataagcaacattcctgcctcagtcataggccccagtgttctccactgtccgtcagtaagccaggcttgcttgtcctgcacatctcactgacaccaacagtgg

SEQ ID NO: 879372 - DNA, 120 bp, Artificial Sequence
  ENSG00000274863_3 (sequence is synthesized)
aagtgctgatttcttcctgctgggaccaacgggagctggtgatgactgtgccatgttcgggaggtcacatgaggccagcagaggatggaagagaccagcaaaaagtaagcaagcagaatc

SEQ ID NO: 879373 - DNA, 120 bp, Artificial Sequence
  ENSG00000274863_4 (sequence is synthesized)
gcctccaaccctaaaagacaaggttcaaggcagtttccacaacagtccagctcatcagtggcaccgttggagctgtgtctaccccacgggttggaggaaactatcccacctggatatgaa

SEQ ID NO: 879374 - DNA, 120 bp, Artificial Sequence
  ENSG00000274863_5 (sequence is synthesized)
gtcttgagcaagccacaggtaaattcagaatttcctttggaacaagtttggttgaaataaggagccaacatccaaatctgaatccttataaagtcatcttttttataatttataagaatc

SEQ ID NO: 879375 - DNA, 120 bp, Artificial Sequence
  ENSG00000274863_6 (sequence is synthesized)
ttagccagcccctgcaaatcaactaatttcagagaaatcttctttttaaccttctggagtgaggataaaaattcaaattttcctaaagaagaggaaaaaaaatgagttaaaccacaaagc

SEQ ID NO: 879376 - DNA, 120 bp, Artificial Sequence
  ENSG00000274863_7 (sequence is synthesized)
cagggttatttctcctaggcaactggattaaggccaaagatcccaatggcagggccagttgactttatgacactcacatgcttagatggcaccttattctcccaataccaaatgtctgaa

SEQ ID NO: 879377 - DNA, 120 bp, Artificial Sequence
  ENSG00000231742_0 (sequence is synthesized)
ggttgacgtgggaatacagctgggcacacaggaggccctcagtggaggctggtttctttggcccagtgccacatggagcccgtccactggctgagctgggggcctgattgtggccactca

SEQ ID NO: 879378 - DNA, 120 bp, Artificial Sequence
  ENSG00000231742_1 (sequence is synthesized)
acgtctctgtaaagctcagggtctgccttgagatcctgcacttaccacggagtggccctgccttggggacccatctcacctcacttctgccctcctttctggttcatgactcagccatcc

SEQ ID NO: 879379 - DNA, 120 bp, Artificial Sequence
  ENSG00000231742_2 (sequence is synthesized)
actaacctcccgtggtagcactgtggccactctgtaaacgacagcaccactggtgtctcattgggggccagtctggaagagggagaccaccctaggcatttcagacagaagggatggaat

SEQ ID NO: 879380 - DNA, 120 bp, Artificial Sequence
  ENSG00000231742_3 (sequence is synthesized)
acaggcattgcttacacagaggacggacgagccgagatgcagaaaggccaggtgaagcattggccacagctggaggcgctccaccctaggccagcgggacagaaggaagctgggtccgag

SEQ ID NO: 879381 - DNA, 120 bp, Artificial Sequence
  ENSG00000231742_4 (sequence is synthesized)
attccaacacagaccacaacacctatggacctggaaaacattgtgctcagtgaaagaagccagacacagaaggacaatgttgtatgagggacacattccagcaaaaagacacaaagtgac

SEQ ID NO: 879382 - DNA, 120 bp, Artificial Sequence
  ENSG00000231742_5 (sequence is synthesized)
agaatggctgcctttgagtgggggtgagaagaggtggatggcaggtaccagaagagaagggaataaatatatgaagaaatacaaccccctcgggcagtgcctggcacagcataaatgccc

SEQ ID NO: 879383 - DNA, 120 bp, Artificial Sequence
  ENSG00000231742_6 (sequence is synthesized)
aggaaaaagaggcccagttgcttacgttcccggcgacagggccgggaccagcgccggcttcctggtgaaggaggccaccctttcctcttgaggggtctgagtatgcatgtcagcacccgg

SEQ ID NO: 879384 - DNA, 120 bp, Artificial Sequence
  ENSG00000231742_7 (sequence is synthesized)
tgggcacccagcacccagctgaccaggggccttcacctctgtgggggttaccggcctggccctgagaactggatgaaagctggaataattctttctgtaataaagcaaacgcaaccacgt

SEQ ID NO: 879385 - DNA, 120 bp, Artificial Sequence
  ENSG00000231742_8 (sequence is synthesized)
acagcaaccttaccagcccctccagcttagaggtggcagtggctctctgcggctgcgatttctttctcggagcgtcctccccatcccgttcggcctctgcctccaccgtcgtctctgtaa

SEQ ID NO: 879386 - DNA, 120 bp, Artificial Sequence
  ENSG00000231742_9 (sequence is synthesized)
cccgttccctgtgggagagtctctgttgcggtgttcaggggtttcggttttctggctgaacagtgattaacgcgagggaaggcgctgacggcaaggtggcagaacattccaacacagacc

SEQ ID NO: 879387 - DNA, 90 bp, Artificial Sequence
  ENSG00000231742_10 (sequence is synthesized)
cagacacagaaggacaatgttgtatgaggctggactgcagtggtgcaatcctagctcactgcagcttcgacctcccgtgctcaagtgatt

SEQ ID NO: 879388 - DNA, 120 bp, Artificial Sequence
  ENSG00000231742_11 (sequence is synthesized)
gccaccacgcctggctgatttttcttgtatttttttgtagagatgggggtatcgctatgttgcccaggctggtcttgaacacttgggctcaagtaattctcccgccttggcctcccaaag

SEQ ID NO: 879389 - DNA, 120 bp, Artificial Sequence
  ENSG00000231742_12 (sequence is synthesized)
gcctagtgtgaatgcatttaatgccactgaattgtacacttaataatggtgaaaaatataaatattctgttaaatattttaccacaataaaaaaatgtgtgacagttgtcagaatcaaaa

SEQ ID NO: 879390 - DNA, 120 bp, Artificial Sequence
  ENSG00000231742_13 (sequence is synthesized)
gggatgatggaaaagttttggatacagagagttatgacgagtatacagcattgtgaattttttttcttttctttgttttttgtgacaaggtcttattctgttgcccaggctggactgcag

SEQ ID NO: 879391 - DNA, 120 bp, Artificial Sequence
  ENSG00000231740_0 (sequence is synthesized)
cctaagaagatgtagataaagtgactgcaaggacctccgctgacctgagcacttcctgcatgaaaggggctcaataccaaggaagaaaacagatacatgcaccctttctaagtagcaaaa

SEQ ID NO: 879392 - DNA, 120 bp, Artificial Sequence
  ENSG00000231740_1 (sequence is synthesized)
gatgaagtcccactatattgccaaggctggacttgaatccctaagctcaagtagtgttcccacctcaccctcccaagtaactgagactacaggtgcacaccactgtaccagcataattgc

SEQ ID NO: 879393 - DNA, 120 bp, Artificial Sequence
  ENSG00000231740_2 (sequence is synthesized)
atatcttatcaatcaatccacagccactaaatacctactgaggtatctgtgtcccctgggctttttccaagagctttcaatatggttagatttgtttattaaatttgcataaatatgtga

SEQ ID NO: 879394 - DNA, 80 bp, Artificial Sequence
  ENSG00000231749_0 (sequence is synthesized)
tcaccaatgctgctcattgcaatgtatggagtgaaagaggctgccatcggtatccagaagaaggtgttacttcggtaccc

SEQ ID NO: 879395 - DNA, 120 bp, Artificial Sequence
  ENSG00000231749_1 (sequence is synthesized)
ctgccatcggtatccagaagaaggtgttacttcggtacccatactcataatccatatgctcctgaaatcatgtggaacatgcaactaggaccttctgaacacgtagcctgatttacttat

SEQ ID NO: 879396 - DNA, 120 bp, Artificial Sequence
  ENSG00000231749_2 (sequence is synthesized)
tacagttaataacttgtaagagcccagcacagcacagatttacaaaatgatacacaaagacctcagaggtgagtcaatgatttacctccctacctcctctttagttgctttgtgcaacaa

SEQ ID NO: 879397 - DNA, 120 bp, Artificial Sequence
  ENSG00000231749_3 (sequence is synthesized)
acattaaggttaagtaaacttgcagaatctatttctaaaacaaactctcccatgtcgtatttttcattttttaatttattttctgtttggcctcatatatgctttctaaaacatacagag

SEQ ID NO: 879398 - DNA, 120 bp, Artificial Sequence
  ENSG00000231749_4 (sequence is synthesized)
cttgtaagagcccagcacagcacagatttacaaaatgatacacaaagacctcagagtttccagtcttccaactacagcattaactctaacccaagtttccagcctggtgttctgccttgt

SEQ ID NO: 879399 - DNA, 120 bp, Artificial Sequence
  ENSG00000231749_5 (sequence is synthesized)
ggatttcagatttgccaagccccacaattacataatgaaattccttaaagaagcgaacttttgctattgcacagacctgctgcctccagagcgccacgccactgattgttttccttgttt

SEQ ID NO: 879400 - DNA, 120 bp, Artificial Sequence
  ENSG00000231749_6 (sequence is synthesized)
ttgtccccaaattccaatatctaaaacataagatcaatattttataaagtgccattttagttatgcattatttagcttttcctatgataaattttcctacaaaggtgtcaaagttaccct

SEQ ID NO: 879401 - DNA, 120 bp, Artificial Sequence
  ENSG00000231749_7 (sequence is synthesized)
cttgggccaagatacaagtaatctaatgtatgacattattagagcaactattgaagaaatgggaaagaagcagaaagtattgatataataaaagaaaatcttgtgttttctgattttaaa

SEQ ID NO: 879402 - DNA, 120 bp, Artificial Sequence
  ENSG00000231749_8 (sequence is synthesized)
cttgtaagagcccagcacagcacagatttacaaaatgatacacaaagacctcagagagtcttgctttgttgtccaggctggaatgcagtggctcaattttggttcactgcaacctgcacc

SEQ ID NO: 879403 - DNA, 85 bp, Artificial Sequence
  ENSG00000231749_9 (sequence is synthesized)
agcctcccgagtagctgggattacagtggtacatcctgtagttgagggcttcttacacctgatgaaataccataggttctgcatg

SEQ ID NO: 879404 - DNA, 120 bp, Artificial Sequence
  ENSG00000231749_10 (sequence is synthesized)
ttcccgggttcaagcaattctcctgcttgtgatttcctccatttggattagataagactgtgctgcaataggacttttttgggcttagaatgagaaaaaaggagggcattctcaacaagg

SEQ ID NO: 879405 - DNA, 120 bp, Artificial Sequence
  ENSG00000231749_11 (sequence is synthesized)
caacaaggaagtccatttcagagtgaaaacatgaaacagtaaaatacttcagtagttgggcagaagacagaagaataatgtcttaactggactgcggtaggatacaatgagtttatatct

SEQ ID NO: 879406 - DNA, 120 bp, Artificial Sequence
  ENSG00000231749_12 (sequence is synthesized)
agcagaacctttcatttagcatattatagttatgatatcataactaaaattaacttttctgagacaaggttcagtttcatgtagaaatgagcaattaaaaaataaagatatatttattcc

SEQ ID NO: 879407 - DNA, 120 bp, Artificial Sequence
  ENSG00000231749_13 (sequence is synthesized)
gcctcccaggcttaccacagtgctctacggcctcagctaaaatatctcaatgtttaaagaacataaaaggttttctttttgctcagtgtcataaaagtgatgactcatccaacactgggt

SEQ ID NO: 879408 - DNA, 120 bp, Artificial Sequence
  ENSG00000231749_14 (sequence is synthesized)
caaaaatcaatcaccattcctaacataaggtatctgaaacatgtattttactgaatattggaaacctcacgtgtttgtgtatttgggttcacccatatatggtaactagtgaccaagtaa

SEQ ID NO: 879409 - DNA, 120 bp, Artificial Sequence
  ENSG00000231749_15 (sequence is synthesized)
tcatctggcgccctgagtattggcaaacatctacaggataaggctgtctttaagtcaaataaatttggaaagtttcaagtcaccaagtctgcatggtcatctgctcaactcatttataaa

SEQ ID NO: 879410 - DNA, 120 bp, Artificial Sequence
  ENSG00000231749_16 (sequence is synthesized)
gggaggagttaaagcaaaaatcagcagctaatgaggggcaatctgtaaaccaccaaccaccccttcccccaacctttactcctgttccaagtgaatttctgctgctaagttatgggtaga

SEQ ID NO: 879411 - DNA, 120 bp, Artificial Sequence
  ENSG00000231749_17 (sequence is synthesized)
tgctaccactgcaggtggggcaggaagcttccagttcccattcccaagcaaagataatttgcagctgagatttgcaacaaggacccagcacggatacaaagcagagacaggctctcacca

SEQ ID NO: 879412 - DNA, 120 bp, Artificial Sequence
  ENSG00000231749_18 (sequence is synthesized)
cggcgggggagaggacgctctcacaggtccagaacctctcaacagatacaagtcaccaatgctgctcattgcaatgtatggagtgaaagaggctgccatcggtatccagaagaaggtgtt

SEQ ID NO: 879413 - DNA, 120 bp, Artificial Sequence
  ENSG00000231749_19 (sequence is synthesized)
cttgtaagaaacacctcattcaaagttgttatggaaacaccataatcctcaatgccttggttagaacatctatcaagatccctgtaaagttctaaaagtggatacaaaaacagattataa

SEQ ID NO: 879414 - DNA, 120 bp, Artificial Sequence
  ENSG00000231749_20 (sequence is synthesized)
ctaatcagaaacaaaattgtgatacagatgatctcatttctaaaatgatccatatagtatgttacttttcatgtctttttgagatcaaagtctaatctaaacatttattttttcactctt

SEQ ID NO: 879415 - DNA, 120 bp, Artificial Sequence
  ENSG00000231748_0 (sequence is synthesized)
aagaaaatttcttgaaaagttctatttcttcaatcatgcctcccacaacggccaggccagcaccgcagagctgggccgcccgccgggacacggctccgcacacctccttcaccacgatgc

SEQ ID NO: 879416 - DNA, 120 bp, Artificial Sequence
  ENSG00000231748_1 (sequence is synthesized)
caggcaatagagcagggagtcaggacctgcttcccaggaccccgggatgtgcccagtgtgacccacagcctccccattcttagatgcccttacaggagggaggagaaattgacccaggca

SEQ ID NO: 879417 - DNA, 120 bp, Artificial Sequence
  ENSG00000231748_2 (sequence is synthesized)
atggctaggctggagcagaatgccttagaagccgagactcaagaaggtccaccacccctggaagttccatcaactttaaaaaataaagtgtgaatgcctctggtgttcagcatgttcata

SEQ ID NO: 879418 - DNA, 120 bp, Artificial Sequence
  ENSG00000230298_0 (sequence is synthesized)
acagttggaagcctggaaaaagtttccaggcagactgtggaggaaggcctagagaactgagcgtgccagttggatctgctctccccagcctgattctcggcaggatctggaggagactcg

SEQ ID NO: 879419 - DNA, 120 bp, Artificial Sequence
  ENSG00000230298_1 (sequence is synthesized)
agtcgctcatttagaagcacttgacttgggtgggcatccctatgagctggaggggcccaggctgcagaggctctcatgggagttctgtggctggaagtgggttgttggagcaactcgaac

SEQ ID NO: 879420 - DNA, 120 bp, Artificial Sequence
  ENSG00000230298_2 (sequence is synthesized)
ccgaagttgagttcattcattatcccaggaaagggccatcagttaaaagggaactcatactttcaagaccagcctgctttcaaggtgtcaactgatcgtgtagacaatgtctcaaaaaac

SEQ ID NO: 879421 - DNA, 120 bp, Artificial Sequence
  ENSG00000224577_0 (sequence is synthesized)
gcgtcggccaggaacctcggccccatgcgggcgggccagcgcggccaggagggccgggaagaggggtccccggggccccggatgcgctgaactccggggaggggatgggcaggagagaga

SEQ ID NO: 879422 - DNA, 120 bp, Artificial Sequence
  ENSG00000224577_1 (sequence is synthesized)
gagagagagcacactcctggagccgcgacgtccaaacccggacgcacttgaacccgcagcgaggcccgtggctcgcggccttcggagagcacccgcgccccgcgcagaccggacgccggc

SEQ ID NO: 879423 - DNA, 120 bp, Artificial Sequence
  ENSG00000224577_2 (sequence is synthesized)
cttgcccgatcctcggcatccttcggcggggcgatacgtgatcatttaacacacgggtgttaagttcattcttgctgcaaaagaaggccattgtacctcctgaccctgaaagcaagatga

SEQ ID NO: 879424 - DNA, 120 bp, Artificial Sequence
  ENSG00000224577_3 (sequence is synthesized)
agtcactgagacaccaaaggttaattgcttgcccaaagccatgtagcaacttggttgaagttactttagtgtcgaaagctccacatatgtgcttttcgcaaaatcaatagtcaccccatg

SEQ ID NO: 879425 - DNA, 120 bp, Artificial Sequence
  ENSG00000224577_4 (sequence is synthesized)
cacactggaatgcaccttgggcagcccgtggatcattttccccagtatgaagcatgggaggagctggaaaatgaactcatgagccagttgagccagcacaacaagctggagccaggatat

SEQ ID NO: 879426 - DNA, 120 bp, Artificial Sequence
  ENSG00000224577_5 (sequence is synthesized)
gcagctgggagcgagtgtccagccaacagcccgtgtctcaggccctgccaggggatgaatcaattagcaagagaagcaatgatgcaaatgctccggggtcacttgggatgctgtttgcct

SEQ ID NO: 879427 - DNA, 120 bp, Artificial Sequence
  ENSG00000224577_6 (sequence is synthesized)
ttttgatagagaaagcacaccataaataacatcacacctcaggaaatcattccaggaggccccgatgctggcagggctgctgccagggacggaaggaatcgtttgctcattgtgtgtatt

SEQ ID NO: 879428 - DNA, 120 bp, Artificial Sequence
  ENSG00000224577_7 (sequence is synthesized)
tcccccagctcagtcaatgggagatttgtagtaaaatcaaagtatttaaaaggaggacagtatgtggtaacagaggcatgtttagcaatttttttagtaccagaacctgtgatttatgac

SEQ ID NO: 879429 - DNA, 120 bp, Artificial Sequence
  ENSG00000224577_8 (sequence is synthesized)
ccagagttacagccaactttattacaaaaatgacttcacccataataaccttattcagggccctctgatgaatgatgtagtatccaacagcattataatctagtaaatattcaaacacaa

SEQ ID NO: 879430 - DNA, 120 bp, Artificial Sequence
  ENSG00000224577_9 (sequence is synthesized)
aagatacctaattattatcatcatctttcacaaaaacatatgtgatttttcccccctacccaaatgttttagtgaaaactgcaactgtgcattaaaaggcagttttgcatgcatatattc

SEQ ID NO: 879431 - DNA, 120 bp, Artificial Sequence
  ENSG00000224577_10 (sequence is synthesized)
aactcctctgctctgtaatccttggattacaaaacaagttgtttctcctttccagggacaagaggagcttccctattgttcttaattcttagggcagagaaaaaggcacaatcatattaa

SEQ ID NO: 879432 - DNA, 120 bp, Artificial Sequence
  ENSG00000224577_11 (sequence is synthesized)
cttgtagcagacgagaaggaattgggtagattagtgaaatcctttattcctgctgatttttttttctttttaagacgaggtcttgctcttttattcaggctggagtgcagtggtgtgagc

SEQ ID NO: 879433 - DNA, 120 bp, Artificial Sequence
  ENSG00000224577_12 (sequence is synthesized)
ctgcagcctcaaactcctgggctcaagtgctgctcctgcctcagcctcctgcaaagctggaactacagaggcagcactcaagctctgattctcactgttgcccagcgtcagttgtttagc

SEQ ID NO: 879434 - DNA, 120 bp, Artificial Sequence
  ENSG00000224577_13 (sequence is synthesized)
ttaattgcttgcccaaagccatgtagcaacttggtgagtaccagtatttaaaatcttacactcttgcttccttaacaatggaacaaagttattgcttgtatcacaggagattggtgtcaa

SEQ ID NO: 879435 - DNA, 120 bp, Artificial Sequence
  ENSG00000224577_14 (sequence is synthesized)
tgaacaatggagcaaaggggtcacatattgcttgttttaaaattgtagactctttctcatattaatggagtcctttactgtgttttccaggttgaagttactttagtgtcgaaagctcca

SEQ ID NO: 879436 - DNA, 120 bp, Artificial Sequence
  ENSG00000230294_0 (sequence is synthesized)
caatctgcaggtgtccacggtgagtcctccccagtaggaggagacaggagtctctctggaaggcgaacgccacagctgcccagatgttctcctgcaggggaaccagacaccatcatgacc

SEQ ID NO: 879437 - DNA, 120 bp, Artificial Sequence
  ENSG00000230294_1 (sequence is synthesized)
caaaagggctgcacttctcggggtttgcagaatgtggcagaggtggaaaaactcgaaagtccctaaacacagattttttggaattaattcgaagtacattgcaatcacgatggcctttta

SEQ ID NO: 879438 - DNA, 120 bp, Artificial Sequence
  ENSG00000230294_2 (sequence is synthesized)
cttctaaattctacactctgcacctctaaaatatacaagcatgtcccaggaccaccctcaactacttcaggtccctcggaaaagggtaaggtcagccaggctggacaccacgctgtgggt

SEQ ID NO: 879439 - DNA, 120 bp, Artificial Sequence
  ENSG00000230294_3 (sequence is synthesized)
ggccttaggtcctgcaagcaactgtggccaccagcgtcgcagcagcaaggaggcttgtgtcacttttacaaccagcgaagtcacgtgtaggttccgtgtccaggaagagaaccccaccgc

SEQ ID NO: 879440 - DNA, 120 bp, Artificial Sequence
  ENSG00000230294_4 (sequence is synthesized)
ctccttctggatggcaggtgtccctctcggctgagcaggtgtctgggaccatgacatccaacctgggctctcctggcccccagagaagagctgcccagtgcatgtgctggctgcaccgtg

SEQ ID NO: 879441 - DNA, 120 bp, Artificial Sequence
  ENSG00000230294_5 (sequence is synthesized)
acgtcccctatgaacgaggcccacaggcagtggctggctggggggatgcccctgccctgagctggagtctccccaggtggctgcttcttccccaccccgagggtcacagcccagcccaag

SEQ ID NO: 879442 - DNA, 120 bp, Artificial Sequence
  ENSG00000230294_6 (sequence is synthesized)
ctccaagggaatggagcagctgcctgcaccaagcttccctcctctggagaaagcacctcctcttctccctcacgtgctccctgatgaccgccaggctccttgacatggttcccaggacca

SEQ ID NO: 879443 - DNA, 120 bp, Artificial Sequence
  ENSG00000230294_7 (sequence is synthesized)
gcctctcccagggtccctactcccagtaccccagtcctcaccatttgtgacccttcagcccctgctgaaccctgccagccccaggacaggccacagctgtcatgccacctcccagccatg

SEQ ID NO: 879444 - DNA, 120 bp, Artificial Sequence
  ENSG00000230294_8 (sequence is synthesized)
gagtgggaggctgctttctcatcgggctgaggagggttcagaggattgtggtctctttgttttcattcaaggctccatcagccggggccctggcaggaaccagagttcactcaaccgttc

SEQ ID NO: 879445 - DNA, 120 bp, Artificial Sequence
  ENSG00000230294_9 (sequence is synthesized)
acagaagggtgccttgcagaggcgcaggcagggtgagcaaggatggcgtggaactcgagggggggtgccacagtggatgttgtcgccacctgtggcctgaggagcagggcaggagccatg

SEQ ID NO: 879446 - DNA, 120 bp, Artificial Sequence
  ENSG00000230294_10 (sequence is synthesized)
ctgctgggtcccagggaggccatgcggggcactccacagaagctgggtctggagactgggggtccccgtgaggccatatggggcactctacagaagctgggcctggagactgggggtccc

SEQ ID NO: 879447 - DNA, 120 bp, Artificial Sequence
  ENSG00000230294_11 (sequence is synthesized)
cgtgaggccatgcggggcactctacagaagctgggtctggagactgggggtccccgtgaggccatatggggcactctacagaagctgggtctggagactgggggtccccgtgaggccatg

SEQ ID NO: 879448 - DNA, 120 bp, Artificial Sequence
  ENSG00000230294_12 (sequence is synthesized)
cggggcactctacagaagctgggcctggagactgggggtccccgtgaggccatgcggggcactccacagaagctgggcctggagactgggggtccccgtgaggccatgcggggcactcca

SEQ ID NO: 879449 - DNA, 120 bp, Artificial Sequence
  ENSG00000230294_13 (sequence is synthesized)
cagaagctgggcctggagactgggggtccccgtgaggccatgcggggcactccacagaagctgggtctggagactgggggtccccgtgaggccatgcggggcactccacagaagctgggc

SEQ ID NO: 879450 - DNA, 120 bp, Artificial Sequence
  ENSG00000230294_14 (sequence is synthesized)
ctggagactgggggtccccgtgaggccatgcggggcactctacagaagctgggtctggagactgggggtccccgtgaggccatgcggggcactccacagaagctgggtctggagatgagg

SEQ ID NO: 879451 - DNA, 120 bp, Artificial Sequence
  ENSG00000230294_15 (sequence is synthesized)
gtccccgtgaggccatgcggggcactccacagaagctgggcctggagactgggggtcccagctcttgccagcagcacagccccatgcagggagggcacgaggaataaatgccgcgacctc

SEQ ID NO: 879452 - DNA, 120 bp, Artificial Sequence
  ENSG00000230292_0 (sequence is synthesized)
cctatgacagacaaggcaagctctactctcagaagcaaaaattatatatctaggagtcagagtatgaatcaagaagaatggacttctgcttcttatctacctaatgccagataatgatga

SEQ ID NO: 879453 - DNA, 120 bp, Artificial Sequence
  ENSG00000230292_1 (sequence is synthesized)
ctggaaaaccggtttaaaagaaaggtgactagttattggtcttgctctgacagccgtggaaaccatttgctgatgaaagcacaagcaacaacaacaaaaaagatgaataaactggatttc

SEQ ID NO: 879454 - DNA, 120 bp, Artificial Sequence
  ENSG00000230292_2 (sequence is synthesized)
aacaaaaacacatttgtgcttcagagaacataatcaagaaagtgaaaaggcaacccaccaatgggagaacacagtttcaaaacatatatctaataaaatatttgagtccagattatctaa

SEQ ID NO: 879455 - DNA, 120 bp, Artificial Sequence
  ENSG00000237741_0 (sequence is synthesized)
gcggccgcggcagcatcacacacttacacactcacagggggcggagcctggacagctagaagccgcgacatggagcagcaggaggaccaagcagaagcagaaggagccagcaagaggcag

SEQ ID NO: 879456 - DNA, 120 bp, Artificial Sequence
  ENSG00000237741_1 (sequence is synthesized)
gagagaagagacaagtggtgccggctgctgcttcaaaagaggggcaggggctttcccttcctgagatcaaaaccaagcaggaaggttgggttgggtggaaggagcccccacttcctagcc

SEQ ID NO: 879457 - DNA, 120 bp, Artificial Sequence
  ENSG00000237741_2 (sequence is synthesized)
actctcctcaaacagagatgaggttaagacaggcaacactgaaggggccaggctgtccctgaggcctctttggccgggcctggcacctgctcactgagcatcagctactgagcaagatag

SEQ ID NO: 879458 - DNA, 120 bp, Artificial Sequence
  ENSG00000237742_0 (sequence is synthesized)
ttacttgttacagcagaagcttcaagaatttacactcattggaataataaaatagaagtaagcaaccgtgcattaaaaagctatgaaaagatgaagagaatatgccttcaaatgggaagg

SEQ ID NO: 879459 - DNA, 120 bp, Artificial Sequence
  ENSG00000237742_1 (sequence is synthesized)
aatacttaactgtgaataagacctagttcaacatggaacttcctggtggccaagtcagaagagaagcacagaacaaaaacggaggcacagagaggtcaattgattggtctaatgacacag

SEQ ID NO: 879460 - DNA, 87 bp, Artificial Sequence
  ENSG00000237742_2 (sequence is synthesized)
aactgtgaagactagagtgaccttggagatctcatctggaagatggtagaactgctatcagcctggcttcccaaatgacctcctgga

SEQ ID NO: 879461 - DNA, 120 bp, Artificial Sequence
  ENSG00000237742_3 (sequence is synthesized)
agaactgctatcagcctggcttcccaaatgacctcctggatcacagctacccatggcctgaaatgttgaccttggagttgttgcataggaaagaaataaacttctttgttctttgagcca

SEQ ID NO: 879462 - DNA, 120 bp, Artificial Sequence
  ENSG00000237742_4 (sequence is synthesized)
aagtgcgagcaggcgcgtgtgacgtcgggaggcgccgcggctcctcggccgccccactcggtggtcccctgtctggatccaaactgctgactggctgacccgagtggtcacatttgccct

SEQ ID NO: 879463 - DNA, 120 bp, Artificial Sequence
  ENSG00000237742_5 (sequence is synthesized)
ctggggcttttgaaaaccttaaatcaaaattgcttttgaatctgacaactcctgaggctactttcgcggcctcggggctgtttcatataaggacgcgagttttcctgatcaggtctgtcg

SEQ ID NO: 879464 - DNA, 120 bp, Artificial Sequence
  ENSG00000237742_6 (sequence is synthesized)
gccacgttacgatttccaatttgcgatccatcagttacttccattgggtcttcagcccccagggactgtggatcctagaccccgcggagaagcccgtggactggagctgtgtcagctctg

SEQ ID NO: 879465 - DNA, 120 bp, Artificial Sequence
  ENSG00000237742_7 (sequence is synthesized)
atggaacaaaaacggaggcacagagaggtcaattgattggtctaatgacacagatctagcaagtggtggaaccaggactgaatccaggtaacttgctcctgatgtttgtccattggtgct

SEQ ID NO: 879466 - DNA, 120 bp, Artificial Sequence
  ENSG00000237742_8 (sequence is synthesized)
ctcatacttttttccctctctcttcctgttagaatgtgcttccaggactttgtttacactggggaataggtgtctaataaacttaacatgcgtttattacgggggtatttacaaaagcag

SEQ ID NO: 879467 - DNA, 120 bp, Artificial Sequence
  ENSG00000237742_9 (sequence is synthesized)
aagcattaagacaaaggaataaacctctaattgtagaattctagtcaccagccaatgggcacattttttttgtttatttttgggaaaataatctttaataatgcttctcaactcacatca

SEQ ID NO: 879468 - DNA, 120 bp, Artificial Sequence
  ENSG00000237742_10 (sequence is synthesized)
ctctatccactcaattattaaagatttattgagtacataatgggcatgtcacagcttgtgttttctggaagcagtcaccgagatggaatgcggggtgccggatattcattagggatcaac

SEQ ID NO: 879469 - DNA, 120 bp, Artificial Sequence
  ENSG00000237742_11 (sequence is synthesized)
acctgtgaaaaggagtgggtagagacagaattgggccaagggagaagtcactatccagagtagggctgagaagaacttggcccacttgatagggagctctggagtcagaattggccatca

SEQ ID NO: 879470 - DNA, 120 bp, Artificial Sequence
  ENSG00000237742_12 (sequence is synthesized)
gaggggtccctgattagcttcaggcctttgtccccttcactctcccctctttgcccctacccccaactcctttctcagttattggataccagcatgacctgaaatgaagcagtttttatt

SEQ ID NO: 879471 - DNA, 120 bp, Artificial Sequence
  ENSG00000237742_13 (sequence is synthesized)
tacagctgaggccagctcttacagagctgattggaggctggaggctgactgcaccccagcagctgagcagcaagtccttttttgaagggggatctaacacatctttgtctatcacaagtt

SEQ ID NO: 879472 - DNA, 120 bp, Artificial Sequence
  ENSG00000237742_14 (sequence is synthesized)
ccaataattcttgattgctcaaggccctagttgagggtttttcctgttcatggacaaatagcaacggtatagtaaaaatagcacagacagacctgggtttgcccttgaggaagtcatttt

SEQ ID NO: 879473 - DNA, 120 bp, Artificial Sequence
  ENSG00000237742_15 (sequence is synthesized)
tcctgagccttagtttacttatctatatgatgaatatgaccatatcctttggagagagttctagaaaggagacaaggtatttataaatttcctaacaaataattttaatacttagtaagt

SEQ ID NO: 879474 - DNA, 120 bp, Artificial Sequence
  ENSG00000237742_16 (sequence is synthesized)
gatcaataaatggcagtaattagttataatatattattactaccctactcatcctcactgactgctaccattggccataagtttcctgtgggcttctgccatctctgtcctttgttttga

SEQ ID NO: 879475 - DNA, 120 bp, Artificial Sequence
  ENSG00000237742_17 (sequence is synthesized)
ccagtacctctcttctcaaatatgtctaggtcctcacattatatttcaaagctctttatctctctgcttcctatgagttgacttctgtctgcctttcccaccctttctgcctccattttt

SEQ ID NO: 879476 - DNA, 120 bp, Artificial Sequence
  ENSG00000237742_18 (sequence is synthesized)
ttcctttctaggaaaattttccttaatgcttctattccatccttaagctttattgccttggctacaacttatgtctaagaagtgtgcactgtttggctcagcagatattcttacatatca

SEQ ID NO: 879477 - DNA, 120 bp, Artificial Sequence
  ENSG00000237742_19 (sequence is synthesized)
aaccattttatttatttataaattcctctagaatgactagaaaaggcagcaaattctcattatccttcacgattccttcttagctattagcatgctttctatttggcgtacatataccat

SEQ ID NO: 879478 - DNA, 120 bp, Artificial Sequence
  ENSG00000237742_20 (sequence is synthesized)
cagcctggtgacagagcgagacttcgtctcagaaaaaaaaaaaaaaaaggaactcattattaggaacagagaaccattcagttgtaaagccagaagtaaggttaagaacttttggcctcg

SEQ ID NO: 879479 - DNA, 120 bp, Artificial Sequence
  ENSG00000237742_21 (sequence is synthesized)
gaagtaaggttaagaacttttggcctcgtctttctcatttagaagtaaggaaattgatcctagaaaaattaattcaaatactcatatttacacagctagttaaacagacactggaaccct

SEQ ID NO: 879480 - DNA, 120 bp, Artificial Sequence
  ENSG00000237742_22 (sequence is synthesized)
ggtaattaaagttgttcagctgtatgctatctgtctattctttgttttctgtgtcaataatgccatattgttttatgttcctagagtacaaataaatgaatcaatatagtcaccagagaa

SEQ ID NO: 879481 - DNA, 120 bp, Artificial Sequence
  ENSG00000237742_23 (sequence is synthesized)
tcattcagctctgaaattctgtttaatttctagagtcaaaacattcatttgtttcttctttatttaacaagaatcaattacttattttatggaagccactattccaaagagaagaatcat

SEQ ID NO: 879482 - DNA, 120 bp, Artificial Sequence
  ENSG00000237742_24 (sequence is synthesized)
cattagccttatggatcttttgtcctgggaacaacacagagtggagactactggaatttttaataaagttcctttcctgggcagtgccagtccagacctaatttccagacttagttaaga

SEQ ID NO: 879483 - DNA, 120 bp, Artificial Sequence
  ENSG00000237742_25 (sequence is synthesized)
ttagaccagtgtgctgaagaatcaaaacatctagatattttccttgctccattctgcttacagccccacaaaaactactcaccccacagggtttcttgcttgagattccagacaattcct

SEQ ID NO: 879484 - DNA, 120 bp, Artificial Sequence
  ENSG00000237742_26 (sequence is synthesized)
gtatgttttattagaatacactctgtgtttcatccaactaggaagcctttggctccgacttaaagcattaagaacggaccactttggtatggaaaattatcagttttgggggaaaagccc

SEQ ID NO: 879485 - DNA, 120 bp, Artificial Sequence
  ENSG00000237742_27 (sequence is synthesized)
ctgtttctctgatctgtgctctgaatttggcagctttgtaggctttctcaaagagccgcaactgtgaaccatgtcatgttgtcattatctctgatatgctctgtgcattggaaatcctgt

SEQ ID NO: 879486 - DNA, 120 bp, Artificial Sequence
  ENSG00000237742_28 (sequence is synthesized)
gtgagactggcaggggacagagggaatgaagaaatcacattcatcagaacaagctgctcaacttccttaagtaaggagtttgtctaacatccagtggtttcctctgacagagtgtgtact

SEQ ID NO: 879487 - DNA, 120 bp, Artificial Sequence
  ENSG00000237742_29 (sequence is synthesized)
ttcttaacatacggacaagattagtacatagccagaatgactgtctgcaggtcctaggctgcttttcagaggcagctttaatcttcctaattgaatatttagcttttctaggcctgcaca

SEQ ID NO: 879488 - DNA, 120 bp, Artificial Sequence
  ENSG00000237742_30 (sequence is synthesized)
aaatgtaaatcacaatgtttacaatctgtgaaataataggagagtacataatgtcattgcaatattttgtaatcactgttaaatgactaaaatctattaaactcaatcattttaaattaa

SEQ ID NO: 879489 - DNA, 120 bp, Artificial Sequence
  ENSG00000214773_0 (sequence is synthesized)
ctattttaaagttaccagttcagaaaaagctggttctagcacgtaggtctgatagaccatattctaaaggtcagctaaaaaggactttcaaaccagggcaagtaagattgtccgtagcat

SEQ ID NO: 879490 - DNA, 120 bp, Artificial Sequence
  ENSG00000214773_1 (sequence is synthesized)
tttggggccagaatggctttagtctctgagttgccacagggtaaggtaagaactatgagcaggtccttccaactcatgattcctaagttccagaaaagttaacaggccacagcttacatt

SEQ ID NO: 879491 - DNA, 120 bp, Artificial Sequence
  ENSG00000214773_2 (sequence is synthesized)
gggagctgaagattatctgggtcagttggctgtctttggtatttggctcgactttatgatatatgatgggaataatcagcttctgaatgccagtaaggttggggaagtgctgagaggagg

SEQ ID NO: 879492 - DNA, 120 bp, Artificial Sequence
  ENSG00000214773_3 (sequence is synthesized)
gactaggcagatttattaccaagtggttaatttttcatctctctggcctctgtataagtatgcagataagttacatgtaattcttctctacaaaactctccatcagttagtggtagagcc

SEQ ID NO: 879493 - DNA, 120 bp, Artificial Sequence
  ENSG00000214773_4 (sequence is synthesized)
tgttaaagtagcagcttggtattatgaatctgctaggctcttaaacacttacggacttctaggtatgaatgtagctggtataagctggcacctgtacatattccatttagtttgtaccga

SEQ ID NO: 879494 - DNA, 120 bp, Artificial Sequence
  ENSG00000214773_5 (sequence is synthesized)
cttggctcttattatttggtcctactcctaactcacctgataactccaacttttggtagattttgttcctgtctcttatagtgtcccaacttggtttcttcctaccaaacaaaaagacac

SEQ ID NO: 879495 - DNA, 120 bp, Artificial Sequence
  ENSG00000214773_6 (sequence is synthesized)
gggaagtatctgtagtagaatgtttctggtatccagttggcaaatggaaactgaggttggccccaactgttcttagaccacctttaggttttgttgatcttaatgaaatacacagcattg

SEQ ID NO: 879496 - DNA, 120 bp, Artificial Sequence
  ENSG00000214773_7 (sequence is synthesized)
catttcattccttttcatttaaactataaaattatatcaaatgatgcctacattaagattctccctataagactgccattccagatggcaaaaggtgaatagtcataatagaaaccaatt

SEQ ID NO: 879497 - DNA, 120 bp, Artificial Sequence
  ENSG00000214773_8 (sequence is synthesized)
cttaagcacatgtgtggtattcccttgaccacaccctgggccatggtatctgttaatatgaaagcacatggggaaccacagaggagaatggcctaggtggtggctgctgtttgctgaggt

SEQ ID NO: 879498 - DNA, 120 bp, Artificial Sequence
  ENSG00000214773_9 (sequence is synthesized)
tggctgctgtttgctgaggtgtgctgcttactcaagcaggagggcacctctgactgcttgggatctccttttttttttttctttttttagacagagttttgctcttgtcactcaggctgg

SEQ ID NO: 879499 - DNA, 61 bp, Artificial Sequence
  ENSG00000214773_10 (sequence is synthesized)
gctcttgtcactcaggctggagtgcaattttgtagtcttggctcacctcaacctctacctc

SEQ ID NO: 879500 - DNA, 120 bp, Artificial Sequence
  ENSG00000214772_0 (sequence is synthesized)
gaggacgggcaccaaatctgcattgtccattgctatttcccaggttgagttgctgaagcggcttcattgtctggggacatacccaaggttcgtcatcgcgtgacgagaagattaaggaca

SEQ ID NO: 879501 - DNA, 120 bp, Artificial Sequence
  ENSG00000214772_1 (sequence is synthesized)
cagacgcaaacacggagcgggtcaagtagcggaaagtttaataggcaggaaagaagagaacagctcaccggtagagagccgtcaatggtgtgccagataagaagctatgcactgaaaaga

SEQ ID NO: 879502 - DNA, 120 bp, Artificial Sequence
  ENSG00000214772_2 (sequence is synthesized)
ggaggaagactgaagcacaaagcttctctcgtctgtgtcaccctctgcaaggagtttgcagttggactggaaaacccacatttcccactgagtgctttaccactctcagtggaacttagg

SEQ ID NO: 879503 - DNA, 120 bp, Artificial Sequence
  ENSG00000214772_3 (sequence is synthesized)
ttctgatactgagaacaaaggagagaatggacaatgaagggatcactagcagttttcattacaaatagtatcttgaaaaaaccttaacaataaggtgaggtgtggtggctcatgcctgta

SEQ ID NO: 879504 - DNA, 120 bp, Artificial Sequence
  ENSG00000214770_0 (sequence is synthesized)
ggcggcgagtctcccggatgctcctcagctctggggacgcggtgcagaagtgtgagggcgcccggcttccaggcagtaatgggcgggtccctgcgcgggagcgtggcgggcgctggactc

SEQ ID NO: 879505 - DNA, 120 bp, Artificial Sequence
  ENSG00000214770_1 (sequence is synthesized)
tacagcagatgtggaactggagagcttggcgcgccttccgactttgtcacacacctgcgccgccagactggggtcgggcccctccgcgttctgctctggagtgcctgggtctgggcccag

SEQ ID NO: 879506 - DNA, 120 bp, Artificial Sequence
  ENSG00000214770_2 (sequence is synthesized)
caccgcgcttttagaatctcctcagctgaatctgacgctcagcagtgggtgaagcgcagccccctgtttcaggccctgccgagctggaaggagtgtcagagctggagcgcgcgtggcccc

SEQ ID NO: 879507 - DNA, 120 bp, Artificial Sequence
  ENSG00000214770_3 (sequence is synthesized)
ctctgtgttggggtcaccccggggttgccagggctcagggagggtcgtagtctggattttgtcacccgcacgtccccaccccccagcaggtctggggttggagaatccacgcgggcttca

SEQ ID NO: 879508 - DNA, 120 bp, Artificial Sequence
  ENSG00000214770_4 (sequence is synthesized)
taagctagatgccagttaactgtcgagaggggacgctccctcctcgtaggcgtccacactggagaaggaataagatgggcgattgcctgggaagcctgacagggcggcggcagctgggat

SEQ ID NO: 879509 - DNA, 120 bp, Artificial Sequence
  ENSG00000214770_5 (sequence is synthesized)
gctggagaggactggccccttgagttactgagtccgatgaatgtgcttgctctgctggaggaaccgcgctcaggttacagtcatcccaatatggttctgaagttctcaaagtttgcacaa

SEQ ID NO: 879510 - DNA, 120 bp, Artificial Sequence
  ENSG00000214770_6 (sequence is synthesized)
gcggatattttagaggtacagtgtaatataagagcttctgaaaatgtccacttaagttgttttatacctgagcaagtgaaattaagaagggaattgaagcaaatattcctgacatccaag

SEQ ID NO: 879511 - DNA, 120 bp, Artificial Sequence
  ENSG00000214770_7 (sequence is synthesized)
atcccaccaaaggaacaggtttaggtggagacaaccaaataccgatgcctaggacactgcagtgtttagaattcaaggagatgagaaggaaacaggagggaagattgaaaagaagagtcc

SEQ ID NO: 879512 - DNA, 120 bp, Artificial Sequence
  ENSG00000214770_8 (sequence is synthesized)
agtgtgttatgaggaaaaccccaagagcatgctgccttacaagacaggtgaaaaatgtgttctgtgaaagaaagagtaattaactgttaaatgttacagactgatcaaataaaatgaaga

SEQ ID NO: 879513 - DNA, 120 bp, Artificial Sequence
  ENSG00000214770_9 (sequence is synthesized)
ctgagaatggcctgtttgtaaggtaataaaaatacataaaatcttatgatagaaatatttatacataaagttagtaaggaaacagtgtttactcctttttgtagaagtgtaaatttttac

SEQ ID NO: 879514 - DNA, 120 bp, Artificial Sequence
  ENSG00000214770_10 (sequence is synthesized)
aaccattttgaagggcagtttgatattatctacaacttaaaattgtgcttccattgataatttcacctgtggaagtttatcctacaaaaatattaatatgtgcacacaaatatgtgtaaa

SEQ ID NO: 879515 - DNA, 120 bp, Artificial Sequence
  ENSG00000214770_11 (sequence is synthesized)
cctacaaaaatattaatatgtgcacacaaatatgtgtaaaagtgtttatcacagcttgtacacatatatatttataaatgtgttgtccaggaacagtggcttatgcctgtaatcccagca

SEQ ID NO: 879516 - DNA, 120 bp, Artificial Sequence
  ENSG00000214770_12 (sequence is synthesized)
ccgagtagctgggattacaggtgcctgctgccatgatgattaattttatgtgttaacttagctgggctgtgttgcccagatagttggttaaacattattctggatgtttctgtgaagatg

SEQ ID NO: 879517 - DNA, 120 bp, Artificial Sequence
  ENSG00000214770_13 (sequence is synthesized)
gaacatctgaagagaccaaaagactgaccttctgcaagcaaagaaaaattctgccaacagacagccattggacttgaacttcaacattgactcttcagtctattggcccaccctgcaaat

SEQ ID NO: 879518 - DNA, 80 bp, Artificial Sequence
  ENSG00000214770_14 (sequence is synthesized)
tcaacattgactcttcagtctattggcccaccctgcaaattttggacttgccagtaagtgtctgaaatctagtgaggcaa

SEQ ID NO: 879519 - DNA, 88 bp, Artificial Sequence
  ENSG00000214770_15 (sequence is synthesized)
ttttttgagacagagttttgctctttttgaccagaaaggagtgcaatgtggcagcctctctagtagctgggattacaggcgcctgcca

SEQ ID NO: 879520 - DNA, 120 bp, Artificial Sequence
  ENSG00000214770_16 (sequence is synthesized)
tacaggcgtgagccaccatgcctagccgggtagtttatcttgacttgacttcaggctcaccaatccttttggctgcaattctacgatagaaaaggacataaaaaactttaaattagcctt

SEQ ID NO: 879521 - DNA, 120 bp, Artificial Sequence
  ENSG00000214770_17 (sequence is synthesized)
ttagccttagaataaagagatgttatcattccctagcaattagtattcaaagcaagatccaaatatgtaattagtcatttatgtatctaagctgtttgtatgtatgatacaagttttcac

SEQ ID NO: 879522 - DNA, 120 bp, Artificial Sequence
  ENSG00000214770_18 (sequence is synthesized)
acaagttttcacatacaaatttcttctttctttctttctttctttttttttgatagaggcagggtttcacgacattgcccaggctggtcttgagctcaagtgatccatctgccttggcct

SEQ ID NO: 879523 - DNA, 120 bp, Artificial Sequence
  ENSG00000249924_0 (sequence is synthesized)
acaatgttttgctgctgttatccagaattaacctttgattttgaggagtgactttaaagtttggcagaaaagaagcagagtcaaggaccaggaattgcttcagtaaagttgcaagatacc

SEQ ID NO: 879524 - DNA, 120 bp, Artificial Sequence
  ENSG00000249924_1 (sequence is synthesized)
acaaaaatgaatagcatttctatatcatagaaatgaaacagctgaaacaagagagcaatcccatttacaatagctacaaaaaaaagggatcaatttcaccaaggagataaaaaatctcta

SEQ ID NO: 879525 - DNA, 120 bp, Artificial Sequence
  ENSG00000249924_2 (sequence is synthesized)
taaggtaaaaaccataaaacactgatgaaagaagttgaaaaggacacaaatggaatgtcatcccatgctcatgaagtggaagaattaatatgattaaaataaacatacttcccaaagcaa

SEQ ID NO: 879526 - DNA, 120 bp, Artificial Sequence
  ENSG00000249926_0 (sequence is synthesized)
gcctttcaaaatttttaataaacatggaatcttgctatgctggccaggctggtcttgaactgctagcctcaagcgatcctccctccttggcctctcaaaatgttgggattataggcgtga

SEQ ID NO: 879527 - DNA, 120 bp, Artificial Sequence
  ENSG00000249926_1 (sequence is synthesized)
accactgtaaccagcctcaagacaggctttctaagacacaagattccgcgtgtcaactgtatccacggaaaccattccttagtttattgtcaccgccattcctaactctgatgtgaaaat

SEQ ID NO: 879528 - DNA, 120 bp, Artificial Sequence
  ENSG00000249926_2 (sequence is synthesized)
ccctgcgttcatcaacataacccagttagggtcgcactcatcacggggcccccattgcctctggcgcaccccacgactgacatctgcggggccttcgcgctaggcttcgagtttcagctt

SEQ ID NO: 879529 - DNA, 120 bp, Artificial Sequence
  ENSG00000249926_3 (sequence is synthesized)
ccgcaccaggcctgcctttctgcaggggccagggtgggggtcgtgtgctgattgggccctctgaaccgccaccgctgcagaggggctgttccttccgtcacatcccttgtgcccgaatcc

SEQ ID NO: 879530 - DNA, 120 bp, Artificial Sequence
  ENSG00000249926_4 (sequence is synthesized)
accctgtgtcttctcttttctcagcaggacattttaaaagcccagaccccctccttacagagcaaatgtccaggcttcggaggtcactgtcacatcccaagaacccccttcaccaggtgc

SEQ ID NO: 879531 - DNA, 120 bp, Artificial Sequence
  ENSG00000249926_5 (sequence is synthesized)
cactcttgagactggactgaagccccctggagagttccacttgcctttgtcctgctgcctgagatgagggcatggacagccgggtacaagacgggacaggcaacctcgcagtggtggtaa

SEQ ID NO: 879532 - DNA, 120 bp, Artificial Sequence
  ENSG00000249926_6 (sequence is synthesized)
cctgtgcatgaaccctgggcctggcacgtggacctcctgtgaccgtccccacaggcccgtgaggctgagcttggcactgcccaagaccacacagtccatgcgcagtggagctggggtcca

SEQ ID NO: 879533 - DNA, 120 bp, Artificial Sequence
  ENSG00000249926_7 (sequence is synthesized)
ggctgcccaccagggcagtgactgcaatggtggcagcaggggacagtcaccatggtgagctcaagccaggcgctgcactgaccttgagggagggctccatgcttccccttcccacagctg

SEQ ID NO: 879534 - DNA, 120 bp, Artificial Sequence
  ENSG00000249926_8 (sequence is synthesized)
cagtgagggctaggagagcagggtcggctgcaggcttgagtcctggggtgcctctgggctgacgggccctgcctgacctgctcctccagtgccccagccctgccccacccacgtcccctc

SEQ ID NO: 879535 - DNA, 120 bp, Artificial Sequence; identical to SEQ ID NO: 811854
  ENSG00000249926_9 (sequence is synthesized)

SEQ ID NO: 879536 - DNA, 120 bp, Artificial Sequence
  ENSG00000249926_10 (sequence is synthesized)
cccatggctttgagcccatgagatggccttggacaaagcggcaatgggcccttcctgagacacagtgcggccatctactgggaaactgcccagtgtgactctgatgactgtgatgtgaat

SEQ ID NO: 879537 - DNA, 120 bp, Artificial Sequence
  ENSG00000249926_11 (sequence is synthesized)
cccacagcaaagttgagcagtgcgcaacctgggctactgcacctggcagccctggctcctcctcctctgcctcttcctgctccttcattctcccccagagctctaattgtcactgagatt

SEQ ID NO: 879538 - DNA, 120 bp, Artificial Sequence
  ENSG00000249926_12 (sequence is synthesized)
ttatgtttcgtttaacaaatgactgtctccccgcttgaacagaacctccatggggggagggaagagtgtctgttgtataaatagttgtatttcagtgcataaaacagtgcctgcctcaaa

SEQ ID NO: 879539 - DNA, 120 bp, Artificial Sequence
  ENSG00000226465_0 (sequence is synthesized)
ggatcaacattatcatggcaaccctgaggaggctgtgagagtctctggggtccttgccggcctgcagaaaatcaagctttgagcgggaagcttcgaggagacacagtgtcacaattacaa

SEQ ID NO: 879540 - DNA, 120 bp, Artificial Sequence
  ENSG00000226465_1 (sequence is synthesized)
caccttcaaaactttcaaaggaagagttaatacagagtatggatcgtgtagatcgagaaattgcaaaagtagaacagcagatccttaaactgaaaaagaaacaagtaaaagtctttgcct

SEQ ID NO: 879541 - DNA, 120 bp, Artificial Sequence
  ENSG00000226465_2 (sequence is synthesized)
taggatacaaagaaagcctgcagctaccaggtccacgggctgatagccccacctctacggagaaggctacacggcgcatgctcgaagggcgtgacaaggggcggggcgagaaggaagggg

SEQ ID NO: 879542 - DNA, 120 bp, Artificial Sequence
  ENSG00000226465_3 (sequence is synthesized)
acgcttccctcagcaaggcagaactgcactggacgcatggaagtgtgatttggaaagcgggaccttcgtacggaatgttcggagttgtagtatctgttctactcccagcctgttggttct

SEQ ID NO: 879543 - DNA, 120 bp, Artificial Sequence
  ENSG00000226465_4 (sequence is synthesized)
agggctgcggactataatcccagcatgcactgggtttgggtaagagactgaagcatccaggtgaagaactggcattgcttctacctgtggagagaggacacctgtaggctgcacgattga

SEQ ID NO: 879544 - DNA, 120 bp, Artificial Sequence
  ENSG00000226465_5 (sequence is synthesized)
aacagtaggcaccctacaaatactgatttttccccctcctttaaaaagtttgatctcttgttagatggtgttgagtaatacagaaatggcaggtatgcatgtgattggtgcttaaatgca

SEQ ID NO: 879545 - DNA, 120 bp, Artificial Sequence
  ENSG00000226465_6 (sequence is synthesized)
cacagttccccataccacaagaggaaacacaccacagcctgatcattaggaccaacagcaaaataagtttgcctttaatctattcactgcatatctaaactttgatcaagcccatggaca

SEQ ID NO: 879546 - DNA, 120 bp, Artificial Sequence
  ENSG00000226465_7 (sequence is synthesized)
cacctgaagacatggggtttccttcttctgggcacaatcatcctttgatcagtgtctgctctgtaaaacaggattccccctaactctaccaaccagcagatgggaagtagtaatccaccc

SEQ ID NO: 879547 - DNA, 120 bp, Artificial Sequence
  ENSG00000226465_8 (sequence is synthesized)
acacgccccagaatattggtcatagcggtccacccgggactgcgcgacccggaatccttggaaggacttctcggaaggactcctctctgacagacaacacctttttgcttttcttccaca

SEQ ID NO: 879548 - DNA, 120 bp, Artificial Sequence
  ENSG00000226465_9 (sequence is synthesized)
tcttcacactccttcaggatcaaaaacctaagccacatgactggatgagccgtcacttggccttcattcgggtagtgatggtcctcactgtagtggatgttttgcctccagatatgcttg

SEQ ID NO: 879549 - DNA, 120 bp, Artificial Sequence
  ENSG00000226465_10 (sequence is synthesized)
aatcactgcattttgggaataacttcaaatgcaagtccttgatctaaataaacagagtgacgaggggcctatgtatctataccacctgtctcctgagtatacaccaggccagcataatca

SEQ ID NO: 879550 - DNA, 120 bp, Artificial Sequence
  ENSG00000226465_11 (sequence is synthesized)
ttaaacataaatttacaaataacattgtcagtgtcctcttttttcttttttgttccctcaatttgtctttcagtagtgacataatattcttcactgtggcttcttccattgtgacccaga

SEQ ID NO: 879551 - DNA, 120 bp, Artificial Sequence
  ENSG00000226465_12 (sequence is synthesized)
ccaatctacttaaggtccgcaaatactgctcacgttctcccatgaagtccatcatgtggggagtgttttccttgtaggattacgctgctctcaagtgcatacatgatgatctttttgtcc

SEQ ID NO: 879552 - DNA, 120 bp, Artificial Sequence
  ENSG00000226465_13 (sequence is synthesized)
aagcatcagaggtgatcccagcatcttcacagtaccagcctttccccaagatcctcgccagagaaaagggttacccagatcatcctgccactggttccagcatttggaggcaaacatgaa

SEQ ID NO: 879553 - DNA, 120 bp, Artificial Sequence
  ENSG00000249923_0 (sequence is synthesized)
ataattcagcggcaacgcagctggggcctggcacacagggtccctgtgatgaggaggggctgcccctgccggaatgcaccagaggctgccaccagggagagagttacaaggaccacttcc

SEQ ID NO: 879554 - DNA, 120 bp, Artificial Sequence
  ENSG00000249923_1 (sequence is synthesized)
gtggacctggcaggtcctagggccccctttaaaattgtgcctggggagagtccctggcgctgctccggaggatcatggagcccgactctactcacaggggagaccacacagcttctgcgg

SEQ ID NO: 879555 - DNA, 120 bp, Artificial Sequence
  ENSG00000249923_2 (sequence is synthesized)
ggcaagacagctgaggagcatgtcaggacagtgccatctgccaccaaggcagctccagagagtgggacagctgtgagaggcgggacctgtccaggctccctgatgggcactcacagcccc

SEQ ID NO: 879556 - DNA, 120 bp, Artificial Sequence
  ENSG00000249923_3 (sequence is synthesized)
tccctgatgggcactcacagcccccttcaccctcagcgaggcacttgccccaatgaaaactgagcagttggacaatctgatgtcttggagggtccagagtctcactctgttgcccaggct

SEQ ID NO: 879557 - DNA, 71 bp, Artificial Sequence
  ENSG00000249923_4 (sequence is synthesized)
tcaagtgatcagcctgcctcgggggcatcctcttaattagagtgtgaggcctgcggatatgggctggggaa

SEQ ID NO: 879558 - DNA, 120 bp, Artificial Sequence
  ENSG00000249923_5 (sequence is synthesized)
cttaattagagtgtgaggcctgcggatatgggctggggaataagttgatgctgacagaaaataacttaaaccattgaaaggaacaggaagtaaacagaagcaaatatttaccgaatccct

SEQ ID NO: 879559 - DNA, 120 bp, Artificial Sequence
  ENSG00000249923_6 (sequence is synthesized)
ggtgagaaggaactttccaagaataaagggaaggatgagttcactttgactgtgtggaagctaaattctcaggtggctcaaaggaaaacatcaagctaaaagacaagaaatgaggcgggt

SEQ ID NO: 879560 - DNA, 120 bp, Artificial Sequence
  ENSG00000249923_7 (sequence is synthesized)
aaatttttgacactaacatgacaaaaaattaatagcattaacacggcaggaacttatctgaagcagcaacaccaagggcaatgtgagtgaactgcagacaaggcaacccggacgccatgg

SEQ ID NO: 879561 - DNA, 120 bp, Artificial Sequence
  ENSG00000249923_8 (sequence is synthesized)
aacacatcccagcccctccggccgggcaccacggaaggccctccctcctccactgagggcagggatcacagggccaggtttttgtcatcggacaaggggtgtcccaagtcatgagatgct

SEQ ID NO: 879562 - DNA, 120 bp, Artificial Sequence
  ENSG00000249923_9 (sequence is synthesized)
taacccatgaatgccccctcttggagtctatgctaattaaacacgtagaggggcggacttcactctgccagctcagataatgaccacagcatatttataaccacaaagaggtggaaacag

SEQ ID NO: 879563 - DNA, 120 bp, Artificial Sequence
  ENSG00000249923_10 (sequence is synthesized)
ctacactatccaacagtggggaaatgtttaagtcaatgctgggagagtaacaccatggaccagccccgaagagacatctgtggtgagtgaaatgcacgccatacaagcccagagagactg

SEQ ID NO: 879564 - DNA, 120 bp, Artificial Sequence
  ENSG00000249923_11 (sequence is synthesized)
tgaacttggaagaaagaataggtgcacacaataagactgggaggaaatgaacaaactatcatcggccatgaggttctcctttacttacaataagtatatgcagcacagacatgagaaagg

SEQ ID NO: 879565 - DNA, 120 bp, Artificial Sequence
  ENSG00000249923_12 (sequence is synthesized)
cattcctggagtgtgaagcccagggcaagaggatgcgggtgtcctgagcaagcaataatgccagcaccttctgcaaggagctctgctgggccacctcttgggcaacaaaccatcctggga

SEQ ID NO: 879566 - DNA, 120 bp, Artificial Sequence
  ENSG00000249923_13 (sequence is synthesized)
catcttgcagacaaggaaacaggcttcaggaggcaatggtgcctcttgaagggcagggcacacagccacagggccaccttctgcatggctcccaccgcagctgagtctccaaggaagctg

SEQ ID NO: 879567 - DNA, 120 bp, Artificial Sequence
  ENSG00000249923_14 (sequence is synthesized)
ggtttttacaggggcaggtcctcaaggtggatacccctttgctaaaggctctgccccagcaacccacaagcagccacttgccctgggctccaggcggctgccctccccttgctgtcctct

SEQ ID NO: 879568 - DNA, 120 bp, Artificial Sequence
  ENSG00000249923_15 (sequence is synthesized)
ggactgtttagtatgcagaaggaccagccctgcaaggccaccataaatcctgcccctgtcctacagcagatcaattgccaatcggctccaaatcccctagatgtctcagcagcttggccc

SEQ ID NO: 879569 - DNA, 120 bp, Artificial Sequence
  ENSG00000249923_16 (sequence is synthesized)
agctgtaggagccacggccatggttggctctagatgctgctggctatatatattgaacttgaagcatcggattacatgtttgttcaatagcaataaactcccaaagttttatggggtcat

SEQ ID NO: 879570 - DNA, 120 bp, Artificial Sequence
  ENSG00000261044_0 (sequence is synthesized)
gacaggcttggcaggtactaagccagatggaggcatgaccctgggagggggtggagtgcaaagaggtgcagagcaccccataaaataaggggttgggcatcaccatgccccctgcaggct

SEQ ID NO: 879571 - DNA, 120 bp, Artificial Sequence
  ENSG00000261044_1 (sequence is synthesized)
ttgccacccatcagcaccagcaagtcgccccacccagagctctgcaaagaacaccgccagctctttccttccgggtgctcttgctggggggtcaggctggtcccctctgactggcactgc

SEQ ID NO: 879572 - DNA, 120 bp, Artificial Sequence
  ENSG00000261044_2 (sequence is synthesized)
ggcggggctgagctcaggaggcgcctcacagcgggtgcctccagcctggtctgagcacgggatgaagaaccaggcaccgctcatcgtgcatctccacaaggcactgtgtgacttcatgca

SEQ ID NO: 879573 - DNA, 120 bp, Artificial Sequence
  ENSG00000261044_3 (sequence is synthesized)
agccgctcaacctctctggccccacgtccttgtccacaggggcagagtggactgaatggaggctgaggtccctctcagcttgggtggtgtggcagagggtgaggaggagcccatgggccc

SEQ ID NO: 879574 - DNA, 120 bp, Artificial Sequence
  ENSG00000261044_4 (sequence is synthesized)
tggatcaccagcctccctccacccagaatgccccgtccactccactgcccaccaccctctgtgcaattgacaaacgtcctggtgttaacgcctaagcataaagagtcggctttgctgtaa

SEQ ID NO: 879575 - DNA, 120 bp, Artificial Sequence
  ENSG00000253927_0 (sequence is synthesized)
tgtgcagcaggctcctagctggcctcaccacctccaccttgctccctacagcgtcttcttagtacacagctaggagtcctgttaaaatgtcagctcatgccacacatctgctcaaaaccc

SEQ ID NO: 879576 - DNA, 120 bp, Artificial Sequence
  ENSG00000253927_1 (sequence is synthesized)
tccaaaagcttcctctcattctgagtaaaagccaaggctctactcaaaggatatctgctttatttcctgcttagaactaactgctgttttgcagttagttctgtctctctccttagaagg

SEQ ID NO: 879577 - DNA, 120 bp, Artificial Sequence
  ENSG00000253927_2 (sequence is synthesized)
cagacgcatggttttgtgggtgaggctcctgctgggtcctgtgcttggtgtctcaggcattctggcaatggcaggaacataaccagagatgtccctattgctttctcagtgtgcacactt

SEQ ID NO: 879578 - DNA, 120 bp, Artificial Sequence
  ENSG00000253927_3 (sequence is synthesized)
agcgcatagccagggaggaatcaagatcctcagcccaacaagcttggcaggaggaactgaatcctgccaaagccatgtgggcttggaagcagatctttcccccaacggagcctttagagg

SEQ ID NO: 879579 - DNA, 120 bp, Artificial Sequence
  ENSG00000253927_4 (sequence is synthesized)
agaccacactgcctctgtcaacaccttaactacagccttgcgggagaccctgaatcagaggaacacaggagctcctgcaccacgcatgccttcctcatgcagttagtataagagtccaaa

SEQ ID NO: 879580 - DNA, 120 bp, Artificial Sequence
  ENSG00000253927_5 (sequence is synthesized)
gaaagaagcggttgaaaagcacttcagaaattctcaaaccctgcaccaatgtaaggaactacagaactgcaggaggctttactcccttgttggttaatcacttttcaaatgtgttccttg

SEQ ID NO: 879581 - DNA, 120 bp, Artificial Sequence
  ENSG00000253926_0 (sequence is synthesized)
ctcaaacctaaggcagtgccgactactcatggctggtttgttattctctgccctctctttcatcattccagctggccagaactacaaatatagaaatctttcacttggacgttctgcttc

SEQ ID NO: 879582 - DNA, 120 bp, Artificial Sequence
  ENSG00000253926_1 (sequence is synthesized)
tctccctacaaacttcaaaagaggtgtacaaaggaacttaagagccattttctgcttacccacctctttagaaggtggggaggatgactcaggaaaatgcagtaactgactgatgctaat

SEQ ID NO: 879583 - DNA, 120 bp, Artificial Sequence
  ENSG00000253925_0 (sequence is synthesized)
tggcagcataagaaaaagaagaaaaaaagtgcatagaattctgccttgaacatcactgtccacgggctgccttcaaaagacagaagggctctaccacggaatgcctgtttcagatttaaa

SEQ ID NO: 879584 - DNA, 120 bp, Artificial Sequence
  ENSG00000253925_1 (sequence is synthesized)
aaataacctgctgagatatgctggcagggcttccttcagcagccacaagaagcttctcaggtgagaagaaacccactgctgttagcactatagatttctttaaggtcacaggcctcttcc

SEQ ID NO: 879585 - DNA, 120 bp, Artificial Sequence
  ENSG00000253925_2 (sequence is synthesized)
aattaggggtatcatccatctctggtggcctttccctcctgaagctggggaaatatttcctccccctccaacccatttaccacccgctccatataaccgccttgaagacctctttgggct

SEQ ID NO: 879586 - DNA, 120 bp, Artificial Sequence
  ENSG00000253925_3 (sequence is synthesized)
tgaagaataacttaagacagttttcctattgagtgctgaacatttgcctccccctccccctccagcctgtcactctttccgggcttgtgactgcttcagaattgtgaacttcaaatttcc

SEQ ID NO: 879587 - DNA, 120 bp, Artificial Sequence
  ENSG00000253925_4 (sequence is synthesized)
ccactgttttgttgatcctgggcttttgattcaagggcctgtctggcaggagatggcctaagcacatcagcaatagcagatgacaaatgccaaaacagaaagaaaataggatacaaatga

SEQ ID NO: 879588 - DNA, 120 bp, Artificial Sequence
  ENSG00000253925_5 (sequence is synthesized)
tttcctcctacatatttacatttacctgctccagagattgtgcatttggggttctacccgttattaagtaggagcctacgttatgcctataatgacctcatcatgctgcgtgattatggg

SEQ ID NO: 879589 - DNA, 120 bp, Artificial Sequence
  ENSG00000253925_6 (sequence is synthesized)
ctgcagccgccaaacactttcagacgacactgtgaactttaaattggcactccaatctcccagtggcctgtcagtcatgagaatcgcgtctttatgccagcaagccccttggatggagtc

SEQ ID NO: 879590 - DNA, 120 bp, Artificial Sequence
  ENSG00000253925_7 (sequence is synthesized)
tgacattgcaatcttcagtaaattaccctgtcactgacaatcttgcagttatctcgcaaacaatcaagcaggcaatcaaactgttctgaattgccagttcaggacctgagaggtggccga

SEQ ID NO: 879591 - DNA, 120 bp, Artificial Sequence
  ENSG00000253925_8 (sequence is synthesized)
tgtctccattcaacagcagagggaaagcggcctggccctcctatgacaatggacgatttctttatttatttatctacctacttatttgttagtctggttggctttttcctggggaagggg

SEQ ID NO: 879592 - DNA, 120 bp, Artificial Sequence
  ENSG00000253925_9 (sequence is synthesized)
tgcagagtcctcaaaaagggcccaatactgactcagcggttatgggaaagcgacttaggccttctgaatcagcccacactgcggtggctcatgtctgcttaatcttacttcactcagtga

SEQ ID NO: 879593 - DNA, 120 bp, Artificial Sequence
  ENSG00000253925_10 (sequence is synthesized)
aacggggccaaaaagaattatctaggtgttttctgtcagaacggacgctaaatcacagctctggttctagtctactcatacacgtcataagctaattgtaatgacaatttcagagaaatg

SEQ ID NO: 879594 - DNA, 120 bp, Artificial Sequence
  ENSG00000253925_11 (sequence is synthesized)
tgatcatggagaaactttctgggaatgataccaaggcattctatttattgcttttgataaagcaaatcagagagattcttccataacagttctggcaacgtgaaacaggttcattaatgc

SEQ ID NO: 879595 - DNA, 120 bp, Artificial Sequence
  ENSG00000253925_12 (sequence is synthesized)
tgaattgaaacctttggattagaagtcccaaggtaaaaagccaaaaattctacacagcatcagaggtgacagcctggcctctggaatcagatggatttgggtttgaagctcgtctctgct

SEQ ID NO: 879596 - DNA, 120 bp, Artificial Sequence
  ENSG00000253925_13 (sequence is synthesized)
agttccctggctgtgtgagcttggaaaggaggggtgacgcttccttccccaaggaagtctgaagacaaggcagtggacacccatcaacaggggaaagagaaaatgaatgaatgggagctc

SEQ ID NO: 879597 - DNA, 120 bp, Artificial Sequence
  ENSG00000253925_14 (sequence is synthesized)
tgtaaaccacatcagcaacctcgaaaatgtccaactgcaaagacccatgtctacaaattgctgtcagccagaggaatggctgtaacttccttggtgccgagagatgggatttcactatgt

SEQ ID NO: 879598 - DNA, 120 bp, Artificial Sequence
  ENSG00000253925_15 (sequence is synthesized)
cgcccgccttggcctcctgaagtgctggaactataggcgtgagccaccgtgcccggtcaagataatttcttataggacaacaggacaggatcacccaggaaaagatggactccctgctca

SEQ ID NO: 879599 - DNA, 120 bp, Artificial Sequence
  ENSG00000253925_16 (sequence is synthesized)
acaggatcacccaggaaaagatggactccctgctcagttcctacttacagtatctgagtcacttaactaaatgcaatcggcccagctgcaggcaccactgctcgggccactataagaacc

SEQ ID NO: 879600 - DNA, 120 bp, Artificial Sequence
  ENSG00000253925_17 (sequence is synthesized)
agcccctgagcttccggacaggaaacagcatctgcatttccagactgtagcagctcatcatgccaggctccacaggcaagaatcaagcagatggaagctacagaggaaacaaacagggtt

SEQ ID NO: 879601 - DNA, 120 bp, Artificial Sequence
  ENSG00000253924_0 (sequence is synthesized)
gaccagggaccaaggcttcggagaagactctggagaaggctcggaggaaactgggtagagcccccacatttaggctaaatctctggactcatggctactctgtggaggggacggtattgc

SEQ ID NO: 879602 - DNA, 120 bp, Artificial Sequence
  ENSG00000253924_1 (sequence is synthesized)
tgcaggagccatgcttatcaccttctcacatatatttggaagctggttctttggcccaaagtgcttttacagcctacctgtattttaccggccctcctagacggggggaactcccctgtc

SEQ ID NO: 879603 - DNA, 120 bp, Artificial Sequence
  ENSG00000253924_2 (sequence is synthesized)
ctctgcaggaatgtcaaaagccacccatctttaaccacctaatgctcccatcagcagagaggcacacagcacagtgaacgtcgagcatgcacaccaggaagcccaggttcgagttctgac

SEQ ID NO: 879604 - DNA, 120 bp, Artificial Sequence
  ENSG00000253924_3 (sequence is synthesized)
cgtcacttactggtggtaatgtaagtaactcagcttgcttacttactcacttactgtaactcagcttccttatctctagaatggggcagtaattgattctacctttccaagttactgtgt

SEQ ID NO: 879605 - DNA, 120 bp, Artificial Sequence
  ENSG00000253924_4 (sequence is synthesized)
gcactggaataaagtctggcacacagtaggcaatataatactatgtttgttaagctaaatagaatcagtatatttccttttaaaataattaatcagacaatgatttattaaataaccatg

SEQ ID NO: 879606 - DNA, 120 bp, Artificial Sequence
  ENSG00000253924_5 (sequence is synthesized)
agaaatcacagtgcctggtgctacagataaatctcgcatgctttaaaaaggttgcagtctagtacaggaactaagacaagtgtgcaattaagtactaaacaaatagaatcaagattatac

SEQ ID NO: 879607 - DNA, 120 bp, Artificial Sequence
  ENSG00000253924_6 (sequence is synthesized)
attttctaagtatgaattcctaaagaaaatatcaataaggtataattaaaaaaccatattaggccaccatatctggcctaatatggtttttataagaattactagtacttaataatgaga

SEQ ID NO: 879608 - DNA, 120 bp, Artificial Sequence
  ENSG00000253924_7 (sequence is synthesized)
taataatgcatgagtcccagaaataaatgggacagaactgatagcccgtgaacagaccccaactcatataagaatctgtgtgtagtgcagaaagcttcaccttgattccacagggaccag

SEQ ID NO: 879609 - DNA, 120 bp, Artificial Sequence
  ENSG00000253924_8 (sequence is synthesized)
ccgcagccctgcatgctgacagtgcagtgcagcgcaggctgtggggggtgcagtccgcacacaggctcagagcccagctccccagcttccaggccctgtcattgtacgtgaagtgtgtga

SEQ ID NO: 879610 - DNA, 120 bp, Artificial Sequence
  ENSG00000253924_9 (sequence is synthesized)
cagtgccacagccccctttcctcatctctaaaacggggtgctaatagttgcatcacttcactggattcctgcaaggaagaagcagtgcatgtaaagcacagagtacttgctcaataagcg

SEQ ID NO: 879611 - DNA, 120 bp, Artificial Sequence
  ENSG00000253924_10 (sequence is synthesized)
gctcaataagcgcagaatatatggtacaatctttttttaaaataatttttaaacaataatttacatgttaattcctaacttgtaaatataacacaataaattccagacaaattaaaaaat

SEQ ID NO: 879612 - DNA, 120 bp, Artificial Sequence
  ENSG00000253924_11 (sequence is synthesized)
ttgagcttaaagccagcctagaaaaaatagtatgtttgctctggcaggactaaggtaaaatcaatggaagaaattaaaaacaacaaaaacaataggtttgactttataagatttgaaaag

SEQ ID NO: 879613 - DNA, 120 bp, Artificial Sequence
  ENSG00000253924_12 (sequence is synthesized)
aaagttaaaggcacctacatcaaaacatcataaattataaaagctattaataaagtagaaataagaaataattgtaacaaacatgtaatgtataactaattcccagattaaaaaacatat

SEQ ID NO: 879614 - DNA, 120 bp, Artificial Sequence
  ENSG00000253924_13 (sequence is synthesized)
aaatggcaaagaatgggaaacgacaagtcacatacgaagaaagccaaatggacactttttctaaatgtctactatgcatgcccaggaaaaaaagtgatcattaccacaactatgagtaaa

SEQ ID NO: 879615 - DNA, 120 bp, Artificial Sequence
  ENSG00000253924_14 (sequence is synthesized)
tgagagctgttcacagaagttgtctaaaactggggtttctcacctgaaattgattgacaaaagaaaacattttaattctcgttgttttccccagtgacattccctttatgttatcttcta

SEQ ID NO: 879616 - DNA, 120 bp, Artificial Sequence
  ENSG00000253924_15 (sequence is synthesized)
taacctcattcttgcaccctttgggcccagctctctacttctaaactgacacttccaggtggaatttcagaccctgatgcagggctggccatgagagcttcatcagagtcctccactggt

SEQ ID NO: 879617 - DNA, 120 bp, Artificial Sequence
  ENSG00000253924_16 (sequence is synthesized)
ccccggccttcagctagagggggaccctatgaggcattttagggcctaccctggaaatggtacatttcagtgctgcacatatttcactggccagagtgcagttattggctcaaaattaat

SEQ ID NO: 879618 - DNA, 120 bp, Artificial Sequence
  ENSG00000253924_17 (sequence is synthesized)
gccagaaaggctgagagaaacaatctgtgtgcgcaggaagaggaactgggattggtgggcatctagctggtttcagctacattatgacacattcaaagcatggaatattaagtagcacta

SEQ ID NO: 879619 - DNA, 120 bp, Artificial Sequence
  ENSG00000253924_18 (sequence is synthesized)
taaagggatgtttctgaagaatatttgatgacatggaaaaagcctcattttatggtcatgattcaaaacaaaatgttggatcagacaattagcatcaacctaattaagtaaaaggcataa

SEQ ID NO: 879620 - DNA, 120 bp, Artificial Sequence
  ENSG00000253924_19 (sequence is synthesized)
atagatgtgactaaaagttatatatcaaaatattaacaattgataaattacagatacctcacatttatttttctacttttcctttttccaaaccatgtgtgagaagcatgtattacaatt

SEQ ID NO: 879621 - DNA, 120 bp, Artificial Sequence
  ENSG00000253924_20 (sequence is synthesized)
attttaaaatttaaaaaagagtgagaaactttcctttgaagatggagatttcagcttagcattcaactgcatggagccacgaaactatatgaaattatatcaatagatttaccactactt

SEQ ID NO: 879622 - DNA, 120 bp, Artificial Sequence
  ENSG00000253924_21 (sequence is synthesized)
ttacacatattcctttttgcatttcatactttccattcaacatactatttctacctgaaatagagaactaataattgtcttatttcctcttcaatcttgaaatactgttttgctgggttt

SEQ ID NO: 879623 - DNA, 120 bp, Artificial Sequence
  ENSG00000253924_22 (sequence is synthesized)
ttctcttggcacaatgaagataatctcccctctctggcatccattgttactgctagaaattcagctgtcagtctaatttctgtgtctttgtaagtgatctctcttttctaactagtcatt

SEQ ID NO: 879624 - DNA, 120 bp, Artificial Sequence
  ENSG00000253924_23 (sequence is synthesized)
ctctttggtctgaatttgtattactgcgtgtagatttctttgtattttaattggctttggaattgttgggtttcctggatttgggccttggtatctttcaacaattcagtaaaattccca

SEQ ID NO: 879625 - DNA, 120 bp, Artificial Sequence
  ENSG00000253924_24 (sequence is synthesized)
ggcccccaggaacttcctgttctaggacacccccagcaagtcagggcccctcctgaccagggaccaaggcttcggagaagactctggagaaggctcggaggaaactgggaagctggttct

SEQ ID NO: 879626 - DNA, 120 bp, Artificial Sequence
  ENSG00000253921_0 (sequence is synthesized)
aaatctgcaaaatctgtcttaaagaaaatggtcagtctttcctttcttctaaacatctctgattttttcatcttgtttcctgactattcacagacagcaacaataacagattctggaaag

SEQ ID NO: 879627 - DNA, 120 bp, Artificial Sequence
  ENSG00000253921_1 (sequence is synthesized)
aaggatttgtagtatacaccacttgcctcactgctttatccaccaacggaccctttatctgggaccaaagattctgagctgaaagggccctcagagcagccaaggcatgcatgagaagag

SEQ ID NO: 879628 - DNA, 120 bp, Artificial Sequence
  ENSG00000253921_2 (sequence is synthesized)
gggtctacagacacattttattcagtccctaaaccacagaaagtgaggacttctaatatgtggtaccagagtgtgcagcaaagaaccttctgcaaagagctttggctgcagatgttcaag

SEQ ID NO: 879629 - DNA, 120 bp, Artificial Sequence
  ENSG00000253921_3 (sequence is synthesized)
atttgccatggactccagaactctcaaatcacttggaaatttgtctatgcagcattatctggtgtcatgcctgagatattgaaggaaaagccccagcctttcaggggtttctgagaagaa

SEQ ID NO: 879630 - DNA, 120 bp, Artificial Sequence
  ENSG00000253920_0 (sequence is synthesized)
tgttgggggcagcactttctcactcatccagaaagtctgagtcaggagcctgcagtgtctgtggccttgggatagacagccaggatcacctgccagggagacagcatagaagactccgtt

SEQ ID NO: 879631 - DNA, 120 bp, Artificial Sequence
  ENSG00000253920_1 (sequence is synthesized)
agtgtccagtcttcagggattcctaagaaattctctggctccagctcagggaacatggccaccctgaccatcactgggattcaggttgaagacaaggctgactattactgtcagtcatgg

SEQ ID NO: 879632 - DNA, 120 bp, Artificial Sequence
  ENSG00000259925_0 (sequence is synthesized)
gagcaagcctctgatgctctggtcccctgaacccgccttttaaatgcttattctgtctctttctaactcctttgtgtctgtcagacttggggtacccactgggtggtgtggggctggttt

SEQ ID NO: 879633 - DNA, 120 bp, Artificial Sequence
  ENSG00000259925_1 (sequence is synthesized)
ccccaacatctggcacccaacgtggggctccccataatctctacaaataatccagtgaagaaacgccagagcgtggaaagtggaggacgactgacaaaggttgcccgagtacgttttcac

SEQ ID NO: 879634 - DNA, 120 bp, Artificial Sequence
  ENSG00000259925_2 (sequence is synthesized)
ttcaggctctacggaagagaatcagcttcctgtctgggtgcccacaagacatcttaagctgtgccatgagccagaatccaaggaagaggaaaagacctcggaacatccctgcacccccag

SEQ ID NO: 879635 - DNA, 120 bp, Artificial Sequence
  ENSG00000259925_3 (sequence is synthesized)
ttcatcagatggctcagatgaacatctctgttgagcagatggaaaccagtaaaactcgccaagcaactccactgacctgggggcaggtgaagagcctagctcacattgcagaagagaacc

SEQ ID NO: 879636 - DNA, 120 bp, Artificial Sequence
  ENSG00000259925_4 (sequence is synthesized)
tgaggtctctgaacaagctgctgaccaccagtaatctaatgatggttgctcagctcagaagtcttagagaaattctgatgcctctcctcacatttgctctgtcggcaaatcctggtgtca

SEQ ID NO: 879637 - DNA, 120 bp, Artificial Sequence
  ENSG00000259925_5 (sequence is synthesized)
caagagggctcaggagggtttctggatgccaacgagaccccagccacagccggtccccagattcttgacatcatcacaagaaagaattcacagatggtgcacaagaaggctctcgccaga

SEQ ID NO: 879638 - DNA, 120 bp, Artificial Sequence
  ENSG00000259925_6 (sequence is synthesized)
ttggacttcccagcctccagaactgtcagcgttgcttccactgcacctctgaaagtactcagctctgccccaaacctggagagtgccgcatttctccagactgcaagaaacagtgtggat

SEQ ID NO: 879639 - DNA, 120 bp, Artificial Sequence
  ENSG00000259925_7 (sequence is synthesized)
aagaaacagtgtggatgactcagtggagatcataatggcatctgagtgatcaacgacagcctccagttgccacttggtgagagaacaaaggaaccggggcatgctcagctatggctgcaa

SEQ ID NO: 879640 - DNA, 120 bp, Artificial Sequence
  ENSG00000259925_8 (sequence is synthesized)
gggcacttacccccttcattccattctcctcaggataacagattaaaattccagaagtgtgcacctgttgtgtattcaggagattgtcgttgtgcataaagagaccacttgaggccctgt

SEQ ID NO: 879641 - DNA, 120 bp, Artificial Sequence
  ENSG00000259925_9 (sequence is synthesized)
aagcaaagactaatggggctgagtcaaaatctgggaatctgatgaactaacacactcaaatgaaactgatttgtgggcaagtacgaatagaataaatgccctggcgttgtgacgacattg

SEQ ID NO: 879642 - DNA, 120 bp, Artificial Sequence
  ENSG00000259925_10 (sequence is synthesized)
cagttagtgctttcttatccttcaaggtctgctgccaaaacaaagcttttccagagggtatttttatgagactgcaagttctcgaatgcaggtgaaagagggagacatccttacgttgtc

SEQ ID NO: 879643 - DNA, 120 bp, Artificial Sequence
  ENSG00000259925_11 (sequence is synthesized)
ttagcacaggttttgaccactaaaaacaagactcatgataataatggatttagcgagataagagtttgtttctctctcacgtgagttttccagccagtgtggcaactcattccgtgaagt

SEQ ID NO: 879644 - DNA, 120 bp, Artificial Sequence
  ENSG00000259925_12 (sequence is synthesized)
catcaggcgtgcaggcttctctcaccttggtgctctgccatccccaagatgctgcccccatctgcaagcaccaagacggcaccccactgtgtccacattctaggcatcaggattggggaa

SEQ ID NO: 879645 - DNA, 120 bp, Artificial Sequence
  ENSG00000259925_13 (sequence is synthesized)
aagaggaagggagagtatgcctctcttaagggcacagtacagaagttgctcacatctcattggtcaaaacttagtcacctggccacacaaactcatatctgggctttattctaggcagcc

SEQ ID NO: 879646 - DNA, 120 bp, Artificial Sequence
  ENSG00000259925_14 (sequence is synthesized)
ctgtgcccagctaaaaattgaggccctggctcctgttgaatagggtttctcaacttgagcactactggtattttgggtcagataattatttattgcagggggctgtccagttcattgcag

SEQ ID NO: 879647 - DNA, 120 bp, Artificial Sequence
  ENSG00000259925_15 (sequence is synthesized)
catattcaggagcatctctgactttcacctacaagatgccagcagcatccctccatcaagttgtgacaaccaaatatctccagactttgtcaaatgtccccttggagacaaaattgtctc

SEQ ID NO: 879648 - DNA, 90 bp, Artificial Sequence
  ENSG00000259925_16 (sequence is synthesized)
tctacttgaatcatagtttctttgctcctgggagacccctgctattcccagtgatgctgcgaactggggttcaaagtggggtggcctggt

SEQ ID NO: 879649 - DNA, 120 bp, Artificial Sequence
  ENSG00000259925_17 (sequence is synthesized)
aaatccatgtcccgtggagaactgcctgcatcccttacagaacctgccacatatttctgcagcttccaagaggaaggctggaatttactgagcttactgaagccaattatcccaagagta

SEQ ID NO: 879650 - DNA, 120 bp, Artificial Sequence
  ENSG00000259925_18 (sequence is synthesized)
tgtgatccagaagcaagataaagatcaaaaggactcagctgggatttggccttctccaagtggaaggaataaaatctgcaattggctctgaaaataaaaaccaaacaaaatctcaggcaa

SEQ ID NO: 879651 - DNA, 89 bp, Artificial Sequence
  ENSG00000272456_0 (sequence is synthesized)
cagagacacacagaagacacagagaaaaggtggccatctacgagccaccttctacaagagaggcctcagaatgaacctagccaccagaa

SEQ ID NO: 879652 - DNA, 120 bp, Artificial Sequence
  ENSG00000272456_1 (sequence is synthesized)
tggtgaggacataaattcctgttgcttaagccacccagtctgtggtattcgttacagcagtcacagaaaaatagtacacaggccttgagaaacagacgtgaacactgctccaatccctgg

SEQ ID NO: 879653 - DNA, 120 bp, Artificial Sequence
  ENSG00000272456_2 (sequence is synthesized)
agtaacagggattcctgtgagctgcctgactgcaggcagcactgtcagcatccccatcccccaggatcgcctgggacctccctcttatcacatcgctccacctcagctccttggcagcca

SEQ ID NO: 879654 - DNA, 120 bp, Artificial Sequence
  ENSG00000272456_3 (sequence is synthesized)
ggcctccagcgggaggcagagggcatcctcaagctgggcaattggaggagcatttaatgaaggggctctttacaaaggtgtgggcagggttttgggaggtcagagaggaatgatgcagcc

SEQ ID NO: 879655 - DNA, 120 bp, Artificial Sequence
  ENSG00000272456_4 (sequence is synthesized)
ggagtgcccgctggaacccagggccaggacagggcctgtgcagaggagtccaccttcagcaagacggaccaccaatactctgcgacttagagaaggagactgaggaataaatgcccagac

SEQ ID NO: 879656 - DNA, 120 bp, Artificial Sequence
  ENSG00000272456_5 (sequence is synthesized)
cgtactccgctcctgccctcctggtttcctgccagagtctccccttgtctgaagccaacctgaagacaccccttgaggaccccttcactgtactgggaccatggggggctgagcctctgg

SEQ ID NO: 879657 - DNA, 120 bp, Artificial Sequence
  ENSG00000272456_6 (sequence is synthesized)
gatcagtcacctccctaacctcctgcatgaggaacaacttgacgaacacacatttcaacctgtaacagggtggacaagcagaacccttcttcagaagcacatttatgaagttcccgcagt

SEQ ID NO: 879658 - DNA, 120 bp, Artificial Sequence
  ENSG00000272456_7 (sequence is synthesized)
aactggctcagagagaaatgctgctgtaacagctgagagaaaactgataaccctgaaaataaagtgtccatggaaatctcatatattgcctattgtttaaaaacaatgtctcacataaaa

SEQ ID NO: 879659 - DNA, 120 bp, Artificial Sequence
  ENSG00000259926_0 (sequence is synthesized)
gttgggattacaggtgtgagccaccatgctcagtcagcttagttactttaaagattaggcagctgagcccagaaactagctgctgggaacaaagctaagattgaactcagatctcctggt

SEQ ID NO: 879660 - DNA, 120 bp, Artificial Sequence
  ENSG00000259926_1 (sequence is synthesized)
tcctggttcttagtttcatactggctgtgaaggcctctgggaagaatgtgttacattgttggtctccaggtttgatttgtcctggtccctctctggctaattagggtgagagccgccatc

SEQ ID NO: 879661 - DNA, 120 bp, Artificial Sequence
  ENSG00000259926_2 (sequence is synthesized)
catgaaataaaggttttggagtatataaaccatttttacagcggctacaaattttagaatgtgtgactgctattatgtatgatggtaatcttttcatatgattgtattgggcaagtatgt

SEQ ID NO: 879662 - DNA, 120 bp, Artificial Sequence
  ENSG00000259926_3 (sequence is synthesized)
ctcatttctaggatttttatctgttttgtttgtcttttatggcatatgtgtacttagaagtaaatatagttggtactatatataatatgtacaatacaataaaaaataatttcattgtcc

SEQ ID NO: 879663 - DNA, 90 bp, Artificial Sequence
  ENSG00000259926_4 (sequence is synthesized)
tataatatgtacaatacaataaaaaataatttcattgtccttattttgttctcactggacctgttgaggtgctgcagtgagctgagattg

SEQ ID NO: 879664 - DNA, 120 bp, Artificial Sequence
  ENSG00000259921_0 (sequence is synthesized)
tatatatatgtgtgtgcatatatatgtatatatgtatgtgtgcatgtatgcccacaccctcttctcagcgcacctaagtcctgtttacttttcactcctctccgttaagttttttttttt

SEQ ID NO: 879665 - DNA, 120 bp, Artificial Sequence
  ENSG00000259921_1 (sequence is synthesized)
aggcgtgagccactgcgcccggcctctgttaagcttttcttatcagaggttaacgccatctcaatttcctagaaaaccatacatacatacatatatacacactcacacacatatatatat

SEQ ID NO: 879666 - DNA, 120 bp, Artificial Sequence
  ENSG00000259921_2 (sequence is synthesized)
acacactcacacacatatatatatagttgttcctcagtatctgtgggggattggttccagagcccccaaggatatcaaactccaaggatgctcaagcccttgtacaaaatggtgtcacat

SEQ ID NO: 879667 - DNA, 120 bp, Artificial Sequence
  ENSG00000259921_3 (sequence is synthesized)
tccaaggatgctcaagcccttgtacaaaatggtgtcacatttgtatataacctagacaaagcctcctgaatactttatatcatctctagattgcttataatacctaatacaatgtaaatg

SEQ ID NO: 879668 - DNA, 120 bp, Artificial Sequence
  ENSG00000259921_4 (sequence is synthesized)
gtttttattgttgtattgttatttttattgttttttcccatataatttttgatctatggatatggagggctgactatgtatttttttcaactctaacctatcatggcaaatcttggaaat

SEQ ID NO: 879669 - DNA, 120 bp, Artificial Sequence
  ENSG00000259921_5 (sequence is synthesized)
gaaaaactttatttcccttaccgtctgtagacctcctcccccacagctcttttctcatccttaatcccccctccacccccgccttctgtcagctagggaacacgggcttttatgccgata

SEQ ID NO: 879670 - DNA, 120 bp, Artificial Sequence
  ENSG00000259921_6 (sequence is synthesized)
tacctatgtttctcaggccaaagtagggccacaatcaccaggacaaattggagtttcaggatgtttctcagtcacccaaccccagggagagagaggggccttccaggggcctcagactcc

SEQ ID NO: 879671 - DNA, 120 bp, Artificial Sequence
  ENSG00000259921_7 (sequence is synthesized)
ctccccattcccccctcacatctctagaagacaaggggagtgctcaggtcagaataatggggtaggtttgccccctcatgccccactccatctagttcctcagccattttttcctccaaa

SEQ ID NO: 879672 - DNA, 120 bp, Artificial Sequence
  ENSG00000259921_8 (sequence is synthesized)
atagatcttgaatgcatccattgttttccatctttagtcctgccactcatcatctcttgcctggaccgctctaacaagttcctatctctcagctgctttttccatgcttgccctcttcta

SEQ ID NO: 879673 - DNA, 120 bp, Artificial Sequence
  ENSG00000259921_9 (sequence is synthesized)
atccactcagaataaggaagccatggtgatgtttccaaaaagcagatctgaccactgaacactcacttgtaaaagccagtccactggctccccgatgccctcaggataaaccagaatcct

SEQ ID NO: 879674 - DNA, 120 bp, Artificial Sequence
  ENSG00000259921_10 (sequence is synthesized)
gacatggcccacagtaccgtccacgacctggactccactgacatttccaggctcatttttgcctcctctccctgatccatgttcctgccacactggccttttctaattcccacttccggg

SEQ ID NO: 879675 - DNA, 120 bp, Artificial Sequence
  ENSG00000259921_11 (sequence is synthesized)
cagtgccagcttctgtttcctcctcctggaaggcccttcctcattcatctccaggccaatgctaacccattcttcatttcttaccagcttctctgattcctctccccaggcttcattaga

SEQ ID NO: 879676 - DNA, 120 bp, Artificial Sequence
  ENSG00000259921_12 (sequence is synthesized)
tactccccattattcttccttagagaatccatttgatgtcatcaaatatttgtaagtatatattcatgtggatatttaacatctatcttgcaactagaccgaacctgtgaaagcagagac

SEQ ID NO: 879677 - DNA, 120 bp, Artificial Sequence
  ENSG00000259921_13 (sequence is synthesized)
cctcttgcctgtggtgaggagtgatgagcagagaggtggatgcatgtttggccacaggccagctgactgttctgactcctgtgggccatgcatcagttcccctgtactgcctggcttccc

SEQ ID NO: 879678 - DNA, 120 bp, Artificial Sequence
  ENSG00000259921_14 (sequence is synthesized)
tcacccagatcagtgttgatcaaaagatgcacctcactctcctaagctgccctcgaagattttagcaaactggctcttttcattctagggccactgccagcccatccaatgcccttatca

SEQ ID NO: 879679 - DNA, 120 bp, Artificial Sequence
  ENSG00000259921_15 (sequence is synthesized)
taatagaaaaagctgccccttcctcaggtagataccgcccatgttggagaggaccataggctggatttcagccctccccatgctcctgccaggcacccttgtgtgtggcaccacctgccc

SEQ ID NO: 879680 - DNA, 120 bp, Artificial Sequence
  ENSG00000259921_16 (sequence is synthesized)
agccaaacatggcagtctcatgctgttctcaccatttggttgcaaacctctcactgtgggttctagcaggtgttggccaacaagggccgggcccagggacagtcccggagccaagaatgg

SEQ ID NO: 879681 - DNA, 120 bp, Artificial Sequence
  ENSG00000259921_17 (sequence is synthesized)
ggctgtgctcaggccatcccaggtgttcccacagcacatggccatgggcactgtggaacatgatatttgagggatgaaatgccttttaaggtaaaatgtaagtgaaggtcactctgccac

SEQ ID NO: 879682 - DNA, 120 bp, Artificial Sequence
  ENSG00000259921_18 (sequence is synthesized)
aggttaagctactccgtgagggtttgtcttctagttgtgccactcttttgctcaagaatcttctgtgacttcctcagcctggccactcactggccctcaacaggccatgtgttcctcctg

SEQ ID NO: 879683 - DNA, 120 bp, Artificial Sequence
  ENSG00000259921_19 (sequence is synthesized)
tgctcccagtggcccataccctcttctcatcccacctaagtcctctttactcttcactcctctctcttaagcttttcctagcagaggttgatactatctcagtttcctagaaacccgtgc

SEQ ID NO: 879684 - DNA, 120 bp, Artificial Sequence
  ENSG00000259921_20 (sequence is synthesized)
catttaacttccttcacatctccccgtttccgcagtcaggctgtaggcggcatccaaagctttatctgggaaagggagtctccccgggtcttctccccatcactggctcctctaagtctg

SEQ ID NO: 879685 - DNA, 120 bp, Artificial Sequence
  ENSG00000259921_21 (sequence is synthesized)
acagtgatattttcccacagaaatatcaccaaacccagcactctcagcagtccaagtccttgctctcagaacttgggagatgtgatgggctttaccctcaggcaagtctagatttaaatt

SEQ ID NO: 879686 - DNA, 120 bp, Artificial Sequence
  ENSG00000259921_22 (sequence is synthesized)
ctagtccctcatgtacctcagtggggcctcactgctgagttacacaatcactctgcctctacagagattcctctttcacctgagaaatttatttctgcctcatcagcacctgtaatgtgg

SEQ ID NO: 879687 - DNA, 120 bp, Artificial Sequence
  ENSG00000259921_23 (sequence is synthesized)
ttcccctaccccggccctatcccctaacttgtattattgccaacaaaaggattaaacgccctccttgtccttctgtttgtggagcacttttgggacccctttggggctgtgtcatgagga

SEQ ID NO: 879688 - DNA, 120 bp, Artificial Sequence
  ENSG00000259921_24 (sequence is synthesized)
agctcccatggtccctgctgtatttgccagttaaattcagcatccatgctctgcagctgatgtcgtgccttcatgtggaagatcgtggaagaatttctggagaaagtatggaggattgac

SEQ ID NO: 879689 - DNA, 120 bp, Artificial Sequence
  ENSG00000259921_25 (sequence is synthesized)
atactttaacagggtttccccctgcatattttggtgtctgaagaagctaatatcaggaaatactatgtcctgaccaattcataatttttattccatgttagtataaataaattggataaa

SEQ ID NO: 879690 - DNA, 120 bp, Artificial Sequence
  ENSG00000259921_26 (sequence is synthesized)
ccaaacaaaatgtcatgtcatgttggaatgtttactttcagtttcctaaacgatttcctatgagaatagccaagcctggagtgtgttcaggatgttctatacatagataatttgcccagg

SEQ ID NO: 879691 - DNA, 120 bp, Artificial Sequence
  ENSG00000259921_27 (sequence is synthesized)
caggaatgctatattttcacttctgtaagaatagcattgtggacagagggagaaaagcatgggactaaaatgtatgaaaattagactgggcattgtggctcgcgcctgtaatcccagcac

SEQ ID NO: 879692 - DNA, 120 bp, Artificial Sequence
  ENSG00000259920_0 (sequence is synthesized)
cttttaaagggaaaacacatagctattctactctagtggatggaaatagagtgttctaatttaaactaatggtatagaaagccaaataaatactcttgatgtcaggctaaatgagaaaat

SEQ ID NO: 879693 - DNA, 120 bp, Artificial Sequence
  ENSG00000259920_1 (sequence is synthesized)
gatcctacttttatcccatgtaatctgttcttattatatgaatgttacgagtatttttgcttagagattgatatattacaagccagtaatagatttttcttaaaaactccttttgaagaa

SEQ ID NO: 879694 - DNA, 120 bp, Artificial Sequence
  ENSG00000259920_2 (sequence is synthesized)
gagagatctaaattgaaagacaaccatagaatgtttaatgagttgtgagagatgaagataccaagatattgtgagggacgtgtgaggtctaaatgagttaatatgtgtaaagcacttggt

SEQ ID NO: 879695 - DNA, 120 bp, Artificial Sequence
  ENSG00000259920_3 (sequence is synthesized)
ggggtgcctggcacacaagaagcactgtattattgctgccgctgttcttattaagaacttcaagtagcttgcaatccagtggtagagataaacgcataagctgacaacaagtaatgtgat

SEQ ID NO: 879696 - DNA, 120 bp, Artificial Sequence
  ENSG00000259920_4 (sequence is synthesized)
aaatgatgtaatttagctatgatcaaaattctgtgggcattccaaggggacagggtctgccagggaatagggagagtggcaggaaaacaagatggcacccagagatcccacagctgcaga

SEQ ID NO: 879697 - DNA, 120 bp, Artificial Sequence
  ENSG00000259920_5 (sequence is synthesized)
gtgagcacgttgctagaactagagcaacgcaacctttttcagaaacactttatttgttggtaaatcttttactactaaaggctttacttcttagaatccacaatgtttaaagtttccaca

SEQ ID NO: 879698 - DNA, 120 bp, Artificial Sequence
  ENSG00000259920_6 (sequence is synthesized)
gtttcaagcactcctttgcctctggtggttgggggaagggggccactgggcagaagggcaaggctttcaccaagatgatatgagaatggggaacagggggaagaggtctctgaagcttat

SEQ ID NO: 879699 - DNA, 120 bp, Artificial Sequence
  ENSG00000259920_7 (sequence is synthesized)
gaagatgtggcccagtactcaaaggaagttctggcctcatctagaagtccaacgaggatgttcagactccaggaggggaagacacattcccatcccccaggctcctgtccctctctagta

SEQ ID NO: 879700 - DNA, 120 bp, Artificial Sequence
  ENSG00000259920_8 (sequence is synthesized)
gaggagaaacagtggagcacagacttggtgatgtgtacattgagcaagagggaaggggtaggcggtggagctgtggcccaacttggcgggcactgcccaaaaaagcccacctttttcctc

SEQ ID NO: 879701 - DNA, 120 bp, Artificial Sequence
  ENSG00000259920_9 (sequence is synthesized)
caaacccatgccaggtgtctagcacactaactcagtgtttcctaagccaaatgacatggaaggctgcttaaaagtctacattctttactacaggccattaactttatgtaggcaaaacat

SEQ ID NO: 879702 - DNA, 120 bp, Artificial Sequence
  ENSG00000259920_10 (sequence is synthesized)
atttatgttcctctggttcttcaataaacagagtagagaaactttctgtgggtagttcactctgggccggtgaaaagagggcagctattctgatgtgaataactaataaaacatatacag

SEQ ID NO: 879703 - DNA, 120 bp, Artificial Sequence
  ENSG00000259920_11 (sequence is synthesized)
agaaaaaaaagttcaaaattaaacagaggaacactgttgctagaattaaatagatacaactttttgggaaggcattttggcaatagctatcaaacttgacccagctattccactgtttca

SEQ ID NO: 879704 - DNA, 120 bp, Artificial Sequence
  ENSG00000259920_12 (sequence is synthesized)
cctgacacatgtctaagaacaaacaatgctgtattatttgaaaaaaaaattcaaactggaaacaacctaaatgtccatcgacagggtgctagttatgaggttgtctaacatgtaaagctt

SEQ ID NO: 879705 - DNA, 120 bp, Artificial Sequence
  ENSG00000259920_13 (sequence is synthesized)
cccaatgttacatgaaaaagcaaagttcaaaatagtatgtatattgtaatcctggttgtctaacatatatgtaccatgtatctaaacatttatagttacatttataatattggtatagat

SEQ ID NO: 879706 - DNA, 120 bp, Artificial Sequence
  ENSG00000259920_14 (sequence is synthesized)
gtatacgtattagaaatgctggaaagatctaggtggggcaaattggcagcacaggaacaaatttaatctgcaggaagatttgtttattggtggtggttgttttttcacttaaatgggaat

SEQ ID NO: 879707 - DNA, 120 bp, Artificial Sequence
  ENSG00000259920_15 (sequence is synthesized)
gcctttaggagaggctcccatacagttcctatttattcctcaatgtattccctgttatcttacactctctgcttccctcagttccttctggccctcagaggcaaatgaggaaagaaatca

SEQ ID NO: 879708 - DNA, 120 bp, Artificial Sequence
  ENSG00000259920_16 (sequence is synthesized)
tggtggtgggggcagctgaagggatgctttagtctttcctttctgtttcaacactgtaagcaaacattacttcataatttaagggagggtagactaggaacttccatcatttcacatcca

SEQ ID NO: 879709 - DNA, 120 bp, Artificial Sequence
  ENSG00000259920_17 (sequence is synthesized)
tgagaagaaggaatagaggaaaataaggattctggaagaagaggcactgagtgggaagtgattgctatagtctagataaggagcaaggagagttcgaactagccagtgacagcaaggata

SEQ ID NO: 879710 - DNA, 120 bp, Artificial Sequence
  ENSG00000259920_18 (sequence is synthesized)
aattgtgaaactcaggtttaaagcctctttctgaatcccttcttggccactgcagttaaaggaatgcacaggctccctcatcccttctttctccaccatgaaacattgcagcctgtggtt

SEQ ID NO: 879711 - DNA, 120 bp, Artificial Sequence
  ENSG00000259920_19 (sequence is synthesized)
gatcacatgggctgctgggcagagcttgatcacatgggctgttgtgctctatgggagtctaactctgcccatagcacacccagagagtctcattctcctgtccctgcaagttaagttctc

SEQ ID NO: 879712 - DNA, 120 bp, Artificial Sequence
  ENSG00000259920_20 (sequence is synthesized)
actcttcacagtgctggcaccagctgtgtaggaagcaggagctgtcagcaccaaaggtactagggaaatcaaacccgaatgtcccggagccaaggtctaccagagagtactgtcctggcc

SEQ ID NO: 879713 - DNA, 120 bp, Artificial Sequence
  ENSG00000259920_21 (sequence is synthesized)
catgtctacaacataggatcagtggtttccccagttaacatcaagataatattgaaaactctacaatctgcaaagtaaagatttaccttaaaagaagaacaaggaacacttccaagtgaa

SEQ ID NO: 879714 - DNA, 120 bp, Artificial Sequence
  ENSG00000259920_22 (sequence is synthesized)
acattcttttgtttttggcagcagctaaaagtcagactggtgcaagagtcctggaggccgtattttatctattttatctactgaaaattcttcagttgaatgaaattacttatttaaaca

SEQ ID NO: 879715 - DNA, 120 bp, Artificial Sequence
  ENSG00000259920_23 (sequence is synthesized)
ggtttcactgaatttaggctggtatttcagagactttctcctctgtggtctaagcagtggggaatggaatatggtactaaagtggggagaatgaaccatgaataaagtcagatccatgaa

SEQ ID NO: 879716 - DNA, 120 bp, Artificial Sequence
  ENSG00000272457_0 (sequence is synthesized)
ccgaacttctggcaaggacagagccgaagagtatcaatgtagccaaaaaattcgatctgagaaaagttatctgcagaaagaccttcagctgcccgaagggctgcacttcagagagccttg

SEQ ID NO: 879717 - DNA, 120 bp, Artificial Sequence
  ENSG00000272457_1 (sequence is synthesized)
tcctccttttaggccagattctatttgacagtctgaggactgtcaaaaaatagccacaaaatggaatcatcagtaccgtattcctggaagcactggtccttagggatccagaatacttgg

SEQ ID NO: 879718 - DNA, 120 bp, Artificial Sequence
  ENSG00000272457_2 (sequence is synthesized)
aaccaccacttccctaatcaatcatgttggctactgaacagcaaccagagtgcctttatgcagacgaaaatcgccacagcctaaatccgtatgaacaatgtcttgcccatttcaaatgga

SEQ ID NO: 879719 - DNA, 120 bp, Artificial Sequence
  ENSG00000272457_3 (sequence is synthesized)
aggttttcattcatgcttaaatagcagcatttcataaaggaaatatccatagcagaataaatgactcctgtaccaaaaatttctgagactctttagaattaaagtcacagttcaaataga

SEQ ID NO: 879720 - DNA, 120 bp, Artificial Sequence
  ENSG00000259929_0 (sequence is synthesized)
agcagacccttgctttattcactcaatagttttttccaaaggctttttaagaagaggactttggagttgtaaagaatttagatacgtggaaatgagagaaaggccttccaggcagaggaa

SEQ ID NO: 879721 - DNA, 120 bp, Artificial Sequence
  ENSG00000259929_1 (sequence is synthesized)
acaggatgaacaaagtcttggcaggaagcatggttatgtcccctgaagccctggtccacatgaagctcttcctgcttttcttcagaggaagatgcaggagctggttaatggaatggattt

SEQ ID NO: 879722 - DNA, 120 bp, Artificial Sequence
  ENSG00000259929_2 (sequence is synthesized)
gaataggatttgctgtatagaatcactatagtcaccatcacactgagtatcaacaacatctcttgttatcctcacaactgtgcaaaacaggtaaggaggagagtatgacaccgtattagt

SEQ ID NO: 879723 - DNA, 60 bp, Artificial Sequence
  ENSG00000259929_3 (sequence is synthesized)
tgcaaaacaggtaaggaggagagtatgacaccgtattagtccattctcacacagctataa

SEQ ID NO: 879724 - DNA, 120 bp, Artificial Sequence
  ENSG00000259929_4 (sequence is synthesized)
ctgcgtggtcgagctggctgccccctcagccgcctgcctttgtgcctccagcctccttggctccctgagtgcctcactttgccttctcccctgtttctcccacctctgaggccgagtagc

SEQ ID NO: 879725 - DNA, 120 bp, Artificial Sequence
  ENSG00000259928_0 (sequence is synthesized)
ggctcagagaggctgaatgtcctgcccaaggttttgcccctgcttgccccgattccaggctgctttgtcctggctcagtggggctctacttttccttcctcctgccctgaagcctgtggc

SEQ ID NO: 879726 - DNA, 120 bp, Artificial Sequence
  ENSG00000259928_1 (sequence is synthesized)
tctggcttgtccacccggagctgggggccctgcagaagccccctctctcccctcagcttctctgcccccctcctcagcccccctaagctgcctcttgccttcccagcctgagttggctgg

SEQ ID NO: 879727 - DNA, 120 bp, Artificial Sequence
  ENSG00000259928_2 (sequence is synthesized)
ggagcttgtaaaacagccccaccagcaggcttatcctgagcggtgctgatgcgggagttggagcagggctgcgaatcttctttgggactctgatgatctgtctggttggagagtcactgc

SEQ ID NO: 879728 - DNA, 120 bp, Artificial Sequence
  ENSG00000259928_3 (sequence is synthesized)
aagccaagatgtggcattggccaatggtgtttcccagctgcctcaggtatgccatgatctcatgcctcatgcttgacatgggcaggatgaaggagggaggaaggaggcagggtgcaggga

SEQ ID NO: 879729 - DNA, 120 bp, Artificial Sequence
  ENSG00000259928_4 (sequence is synthesized)
ggaatcctctgcctggaggatgcccaccgggcttctctgtgctcgccaggcttattggtcctggatcttggccaccttggggcaggtgtgcatcactggtgcagaggaaatgcctcctcc

SEQ ID NO: 879730 - DNA, 120 bp, Artificial Sequence
  ENSG00000259928_5 (sequence is synthesized)
tcctctgtcaactcagatcctctgaggccctgctggtgcctctctctgctaggaccctttcagggatcaaggccaggagggcagccccctgagggcagcccccgctgaggctcagcgggg

SEQ ID NO: 879731 - DNA, 120 bp, Artificial Sequence
  ENSG00000259928_6 (sequence is synthesized)
attttccagcattagttttccctccagggtcaaatgataagttcttataaggtctgaggctgtgtcatcatctccctcttcacccccagcccccgagagctgtgcacacagcaggtgcgt

SEQ ID NO: 879732 - DNA, 120 bp, Artificial Sequence
  ENSG00000259928_7 (sequence is synthesized)
gatctgtggtgttggctgagcagtttggtgcgttggtcagcaacttcctgcagcttctcagcccatgcatatcctcagttctgcagtgctgggcttgtgtataatcccgcccagacatct

SEQ ID NO: 879733 - DNA, 120 bp, Artificial Sequence
  ENSG00000259928_8 (sequence is synthesized)
cctggaatggggaacttggcggggggcagtgagccaatgagaaaggggtgtgtgtgcacgcacacacgatgggggcagagagtgaagagttctcagagactccacttcgagagttggtgt

SEQ ID NO: 879734 - DNA, 120 bp, Artificial Sequence
  ENSG00000259928_9 (sequence is synthesized)
gaatcctggcttgggagttagagctggctcgagtctctgctctctcacttttgtgctgcttaacctggataaggcttttgccctctccggttggggtattgatagcctttggtgaccttg

SEQ ID NO: 879735 - DNA, 120 bp, Artificial Sequence
  ENSG00000259928_10 (sequence is synthesized)
aagaccattttcagttctgagggtgatgggtctgtggttggaccggaactccaggcccaccctgacacctgaacactgaggtttttgtccaagattccggggtcccctttgcccctcttt

SEQ ID NO: 879736 - DNA, 120 bp, Artificial Sequence
  ENSG00000259928_11 (sequence is synthesized)
ggtcccctttgcccctctttggggtggcggtggcggtggggaaaaaaagagagatcagactattactgtgtctatgtagaaagaagtagacgtaagagactccattttgttctgtactaa

SEQ ID NO: 879737 - DNA, 120 bp, Artificial Sequence
  ENSG00000249699_0 (sequence is synthesized)
agtaaagccatctcttgtgtccgtgtaggagagtcctgaggtggagaagggctgggatcaagccaaccactcacccacttaagaaaattcatctgaagcttcctccactgccagacagat

SEQ ID NO: 879738 - DNA, 120 bp, Artificial Sequence
  ENSG00000249699_1 (sequence is synthesized)
tgccagacagatcttcctgcatcaggtccggtgctgcccctgacatgaaatgctcaagatttctagacattgaaacactctgaagaattgaaaggctttggtatcaggatgatgctggcc

SEQ ID NO: 879739 - DNA, 120 bp, Artificial Sequence
  ENSG00000249699_2 (sequence is synthesized)
ctctgcacatggagtttggtgacacgtttacaagagatcacctgtgatgaggacaaaggtcggtggaaagctgttcaaacagagagacttggccttgaggagcccatttgaacctcaact

SEQ ID NO: 879740 - DNA, 120 bp, Artificial Sequence
  ENSG00000249699_3 (sequence is synthesized)
cttgacctgttcattgactgtgttggctaattgggtcttcagtgcaaagcaagaaacaatgctcagctttgctaactgtctgtgtagccagaacatgaaaatcaatctaccgatgaccaa

SEQ ID NO: 879741 - DNA, 120 bp, Artificial Sequence
  ENSG00000249699_4 (sequence is synthesized)
aagggcatagcaaacaacatccctgtggagttgggtgtttttggccttggcgttccacagatgtgacctgagaattcacacaacttacatgaagatgcaattcatataattaatatgttc

SEQ ID NO: 879742 - DNA, 120 bp, Artificial Sequence
  ENSG00000249699_5 (sequence is synthesized)
actgcatgaagattttattcaccataagttgggatggtgagagacggacagaaaacacagaagcccgaggtgggaagctctttgctctcttttaagatgcttactgctgaagtaagtaca

SEQ ID NO: 879743 - DNA, 89 bp, Artificial Sequence
  ENSG00000249699_6 (sequence is synthesized)
tacaaaacagacggagtctagcatctcagctcactgtaagctccacctaccaggttcacgccgttctcctgcctcagtttcccgagtag

SEQ ID NO: 879744 - DNA, 120 bp, Artificial Sequence
  ENSG00000249699_7 (sequence is synthesized)
caggtgtgagccactgcacctggcctgtttctaattttatgaggagaataccctacctatctttcttctcaaagcaagtcatttaagttccaggaaattatcccttaagtctggcttttc

SEQ ID NO: 879745 - DNA, 120 bp, Artificial Sequence
  ENSG00000249699_8 (sequence is synthesized)
tcccttaagtctggcttttctgtgtgtctcagtttccattcctctctccctcctgctactgtactagatcaggtccccattttctctgatctgcactaaaataatgaacttcttatggac

SEQ ID NO: 879746 - DNA, 120 bp, Artificial Sequence
  ENSG00000249699_9 (sequence is synthesized)
agagctgaaggttctaattcacaaatctgattacatcaccctccacttcagaactccccatttttaaggtcataatcttaactcatgtacatggcatgccatgcccttcatgaactggcc

SEQ ID NO: 879747 - DNA, 120 bp, Artificial Sequence
  ENSG00000249699_10 (sequence is synthesized)
actccttgcttttgtagagttatctattgccactctttacttcttactccacactctactctaccattattgaactacttgtcattttgcccgatggtctttcagacttccaagtctttg

SEQ ID NO: 879748 - DNA, 120 bp, Artificial Sequence
  ENSG00000249699_11 (sequence is synthesized)
catgtggcattccctggaatatcctcctgccttgacaaagttgtacctacatatatgatattgtgaaaacacgtaaccagtttttctaccattatagctcacattcttttgacaatgtca

SEQ ID NO: 879749 - DNA, 120 bp, Artificial Sequence
  ENSG00000249699_12 (sequence is synthesized)
aaattgtattttaaaagtggattctgggacttttgcttctggcaaataagatatcactcatacttactaaaatggttaaaatcaagaacatcgactattccaagtgttggtaaaaacaga

SEQ ID NO: 879750 - DNA, 120 bp, Artificial Sequence
  ENSG00000249699_13 (sequence is synthesized)
gaggaaatggaactcccatacattgctggaggaaatgccaagttggtgtaacaactttggcacacagtttggcactttctttaaaagctacacgtgtctactacatgacccagcccttct

SEQ ID NO: 879751 - DNA, 120 bp, Artificial Sequence
  ENSG00000249699_14 (sequence is synthesized)
gtcccttggtatttatccaagagaaatgaaagcacatacccatactaaggctgctacgccaatgtttgtagcagctttatttgttatagccccaaactggaaacaacacaaatgtccatc

SEQ ID NO: 879752 - DNA, 120 bp, Artificial Sequence
  ENSG00000249699_15 (sequence is synthesized)
aacgggtaaatgaataaacaaattgtcgtatatccatgcagcacaatactacccagcaataaaaggaatgcactatcgacacactttacaatgtgaaatagtatcaaaataattatggtg

SEQ ID NO: 879753 - DNA, 120 bp, Artificial Sequence
  ENSG00000249699_16 (sequence is synthesized)
aatgatagaagccagatcaaaaaacagtgcgtattgtatggttccatttatatatacagaagaatctctgtatctgaggattctgcatttgtggattcaatcaactacagataaaaaata

SEQ ID NO: 879754 - DNA, 120 bp, Artificial Sequence
  ENSG00000249699_17 (sequence is synthesized)
ttaaaatgcaacataaaaataatacaatgcagtataacaactatttatatagcatttataatgcatcaggtattatcaataatctagagatgatttaaagtataaaagagaatgtgggaa

SEQ ID NO: 879755 - DNA, 120 bp, Artificial Sequence
  ENSG00000249699_18 (sequence is synthesized)
agaatgtgggaaagttgttcaaatactgcacaattttacataagggacttgagcgtccatagattttgatatccacaggaatgtcctggaaaaaaatccctgaggatacttgaggggaca

SEQ ID NO: 879756 - DNA, 120 bp, Artificial Sequence
  ENSG00000249699_19 (sequence is synthesized)
acagtaaatccagtaaatccagggaatataacctaatgcatagtgacagagagcagatgaaagattacttgggatgagggtgtcatgaagaggggatgggaaggaaaggggggaatggat

SEQ ID NO: 879757 - DNA, 120 bp, Artificial Sequence
  ENSG00000249699_20 (sequence is synthesized)
tgaaaatgggcatgagaaaacttatggttggggtgatgcttttttattatgttaattgtggtgatgctttaataggtatatacatatgtacaaacatattaaattcttcatttaaaatgt

SEQ ID NO: 879758 - DNA, 120 bp, Artificial Sequence
  ENSG00000249697_0 (sequence is synthesized)
tgtgtcttcatgactgtcaatgactctacgatggtgtcactgggagtctggcccgtgtctgtgggaagtcctcctgactgcaagtagcacctaagtgggtagagggccaggctgggtggg

SEQ ID NO: 879759 - DNA, 120 bp, Artificial Sequence
  ENSG00000249697_1 (sequence is synthesized)
catcctgctttccttctgaagaactatgagcatcactgaggaccagaagcagagcttgagccacaccacctccaggaagccctcttagctatgcaaggagagaatctctccagacccttg

SEQ ID NO: 879760 - DNA, 120 bp, Artificial Sequence
  ENSG00000249697_2 (sequence is synthesized)
gatttcagctgcttctggcatccataggagcacctgacagctggacggtttggaactttgggatccttgaaggaccccgtggcctagcagatgagcaccctgcctgcggctgcagggcaa

SEQ ID NO: 879761 - DNA, 120 bp, Artificial Sequence
  ENSG00000249697_3 (sequence is synthesized)
tgtcacagagaacccctagggggaagcactcaggcacaagtctcagtgagattctcagcggcagggctgtgcatgcatccggggacaccatctcctgtttctcacataaagattacggca

SEQ ID NO: 879762 - DNA, 120 bp, Artificial Sequence
  ENSG00000249697_4 (sequence is synthesized)
caggcaaagataaggaacattttcctaacagtaagaaggctttgaatccaagaaagcaacaaaccagagcagactcatttgaaacatgaacagagtgatgtggccaaaggaatccaagcc

SEQ ID NO: 879763 - DNA, 120 bp, Artificial Sequence
  ENSG00000249697_5 (sequence is synthesized)
acactggatgtttatatgagaatcccagtgtatagcaatcataactagataataattatgcttaagatttggtcctctttccatatatggattcagtccttttctgtcattttgtcattt

SEQ ID NO: 879764 - DNA, 120 bp, Artificial Sequence
  ENSG00000249697_6 (sequence is synthesized)
tcatggaatctggagttacggaaccatccaatgtttattacagagaatgaccacccataagcctctccatgcttatggaagcaacagttctggggccgctggctgcatattccttccagg

SEQ ID NO: 879765 - DNA, 120 bp, Artificial Sequence
  ENSG00000249697_7 (sequence is synthesized)
tgtttatttctgggtctacatcatgtccctcactcatcaatttaactctatccagagaattcctctatggtcttcatcagattaggaagtaaatcatcagtcacttcaaatatttcaagc

SEQ ID NO: 879766 - DNA, 120 bp, Artificial Sequence
  ENSG00000249697_8 (sequence is synthesized)
ttggttttctttgacataaatcagttctcctgactacaattcctggaaaatattgtagagcccagcagcattgcagtatttcaaccttcatttgagttgcctgtgacccagatgtgagct

SEQ ID NO: 879767 - DNA, 120 bp, Artificial Sequence
  ENSG00000249697_9 (sequence is synthesized)
agtgcttccacagtctcagatgtctgggtgaatccaccaattctacacctgtgaacatccctgcctttgattctttctaattgtcaggaaacttgcactcataatccctcctgcctctgg

SEQ ID NO: 879768 - DNA, 120 bp, Artificial Sequence
  ENSG00000249695_0 (sequence is synthesized)
ctctttcctgtgagcttctgcaaggtctgcagcaaatacctcacaagcgttggggaaaaaggatgtatgttccctgcctctgaagaaacaggcctgacggttgggaagcacacccttccc

SEQ ID NO: 879769 - DNA, 120 bp, Artificial Sequence
  ENSG00000249695_1 (sequence is synthesized)
ctctcagaggctttctcatcggctcttcctcatcggctgcttcttgggagagtgctgcggtttgggctgttttagtctccaaggggatgggtgatttatatccttttattcggcaaacag

SEQ ID NO: 879770 - DNA, 120 bp, Artificial Sequence
  ENSG00000249695_2 (sequence is synthesized)
ctttgtacagaatgaataccgcttgctgaatgtcaccaggcgggggcaggggagccgtatagaatcccagtgaagccttccaggcctgggcaaaatggcacctggcgactcgatgaggac

SEQ ID NO: 879771 - DNA, 120 bp, Artificial Sequence
  ENSG00000249695_3 (sequence is synthesized)
accgaggcccagagaggtgtcctgccaaagccacacagcacagaggagcagagcccgggtccagctatttctcctatctcaccacgctgcctcttctcactggaagagtgtaccaacgcg

SEQ ID NO: 879772 - DNA, 120 bp, Artificial Sequence
  ENSG00000249695_4 (sequence is synthesized)
ggagtctggcccctacccatcccaagcctgatccctacctaaggtccacagagcgtctccaccagcagctccaggagggatgataaattgtcaaaagccaccaagagtcagggacaggaa

SEQ ID NO: 879773 - DNA, 120 bp, Artificial Sequence
  ENSG00000249695_5 (sequence is synthesized)
ctcagttctgcccagctgagggctgtgcagggatttcaaggtacctgtgcgaaccccagccctcactcattgaactcagtcagaaaaccaccgcgtcagtggatttagaaatgtgacagg

SEQ ID NO: 879774 - DNA, 120 bp, Artificial Sequence
  ENSG00000249695_6 (sequence is synthesized)
gatttcagagggcaatgggtccagccctcacaacccagcaccactctgcaggcatggaaacgcaggcccagaggacaggggcttctcaatatgggcacacagcaccaagacagctccata

SEQ ID NO: 879775 - DNA, 120 bp, Artificial Sequence
  ENSG00000249695_7 (sequence is synthesized)
aatagaagtgaaatatccaagctcccactccagggaagctgaccactgggtggatgactcccccagcgtccaaaccctctctggcagtcccttgctgctccaggagcgaggatgaaaggg

SEQ ID NO: 879776 - DNA, 120 bp, Artificial Sequence
  ENSG00000249695_8 (sequence is synthesized)
agagctcttcccagggcctccggggagacacttctgctgactgtccccaaggagaaagaggggagagaaatgagggagggtccctgaagaatggagaccttcaagaaggaggccaacctc

SEQ ID NO: 879777 - DNA, 120 bp, Artificial Sequence
  ENSG00000249695_9 (sequence is synthesized)
ggggaccagtggaagccagaaagagcacgggggcatggcaggggctgaagccgatgtcccagggaaggagtagctgcaaggcccctcagcctcagaggagcgccagccccgccctgccat

SEQ ID NO: 879778 - DNA, 120 bp, Artificial Sequence
  ENSG00000249695_10 (sequence is synthesized)
tctggacaaggcatgagtgtgaagagactcttgcctgtccacactatcaaggctgagcgggggcaaaggcagccccctgggggtccccaccctgctactggactttaaaaccattttctt

SEQ ID NO: 879779 - DNA, 120 bp, Artificial Sequence
  ENSG00000249695_11 (sequence is synthesized)
tggttttaaagaaacaatttttctttggtcatgattttgttggtagatttatctttatggaattgtagtattttcttgctctaaaaccctcagtttaaccccttcttttttctgtctcac

SEQ ID NO: 879780 - DNA, 120 bp, Artificial Sequence
  ENSG00000249695_12 (sequence is synthesized)
aaccttggagaatgggagggtcctgggggaggggggctgaggggctcttcaccaggcagagatgaaccccagtgctgacacaagccctttccttttcctggtttctcttgccctggagag

SEQ ID NO: 879781 - DNA, 120 bp, Artificial Sequence
  ENSG00000249695_13 (sequence is synthesized)
tgacaggcagaaagggctttttgtctctttggaccatttctgtatccctgctgcctcaaacgaagcctggcctggggcgaactcaatcaatgactctgacgggagacagggctccggccc

SEQ ID NO: 879782 - DNA, 120 bp, Artificial Sequence
  ENSG00000249695_14 (sequence is synthesized)
actggggtgatgggctaaagaggggattctggttcctgtggacaatctggaagctggaagctgttagaactggagcgaggatttcaccaaggagctcacagagagagcccgggcaggaac

SEQ ID NO: 879783 - DNA, 120 bp, Artificial Sequence
  ENSG00000249695_15 (sequence is synthesized)
tctccaatcatctggcggctgaggccctttcgctggaggaggaaatgggccacaccgatgggggtgtccgggatgaagccgcgtgagatcaggaactggatgcccttgtcggggtttctg

SEQ ID NO: 879784 - DNA, 120 bp, Artificial Sequence
  ENSG00000249695_16 (sequence is synthesized)
gaggtgggggtggggagaagcagtagagagtgagctgaagccatccatgactctttcctccctgtcttccacccatagaagtacccagaggttcttggaaatccagttccccattgaagc

SEQ ID NO: 879785 - DNA, 120 bp, Artificial Sequence
  ENSG00000249695_17 (sequence is synthesized)
ttctctcaccagagcctcaacccactgaatgtcctcacgcagaggatggtgtgtgaccagaaggaggacaggggagatctgcaaacaaagtccccaccgcagacgccccaaccctggaga

SEQ ID NO: 879786 - DNA, 120 bp, Artificial Sequence
  ENSG00000249695_18 (sequence is synthesized)
gagggtgggagaaacagaggtgagacctccgccacaccacctcttccctttgcaagctttgaagccatgctgctccctgagctgttcctcacaggtccgggaggagataagtacagaaac

SEQ ID NO: 879787 - DNA, 120 bp, Artificial Sequence
  ENSG00000249695_19 (sequence is synthesized)
acaaggtctgccgagtactagctatttcatcgtgtgcatttcgccttactggtgtgagccggcttcttttctgtaaaacagcatggtaatacctctgtgtagatactgctggaagattac

SEQ ID NO: 879788 - DNA, 120 bp, Artificial Sequence
  ENSG00000249695_20 (sequence is synthesized)
agatgctttatgtaagggagcacatggtcttgaggctccacgtgctgagcgcgtcgtcgatggacttggccagggattgcacctgctcggtgaaggagtcctccagctcggctctcggcc

SEQ ID NO: 879789 - DNA, 120 bp, Artificial Sequence
  ENSG00000249695_21 (sequence is synthesized)
gtgggtgaccgcaccttgcgcagggagatccgccgtggcaggcggctctccagaagcgagttgcggattttctcgaagttcttgctgagctggtattggcggaaggcggtttggatggtg

SEQ ID NO: 879790 - DNA, 120 bp, Artificial Sequence
  ENSG00000249695_22 (sequence is synthesized)
caagcggcgcgccgggacaccagttcatgtcagagatgcatacagaagtacttatgggtaaaatgcatgatatcttgaagttgtgttaaaatattctgtcaaaaaatgtggaagagttag

SEQ ID NO: 879791 - DNA, 120 bp, Artificial Sequence
  ENSG00000249695_23 (sequence is synthesized)
atgacacaatattaatgttaataaatattaataaaatggttacagctggatgatagctacgggggagtttataacactgtcgtttctacttttgtgcacactttaaaacaataaacaatg

SEQ ID NO: 879792 - DNA, 120 bp, Artificial Sequence
  ENSG00000249695_24 (sequence is synthesized)
gaaaaaggatgtatgttccctgcctctgaagaaacaggtacaatcttgcataaaattgcttgttaacattgatctgtgcgtggaatcagtttgtgttgcagggaaatgaagcgtcctaca

SEQ ID NO: 879793 - DNA, 120 bp, Artificial Sequence
  ENSG00000249695_25 (sequence is synthesized)
cgcctgtgatcaaaatgaatttcatcatctcaaccttcttttttttttttaatgatagcaagacagtgtctggcagacaaaggaactggttgggagctgaaaataggtaatggtagcagc

SEQ ID NO: 879794 - DNA, 120 bp, Artificial Sequence
  ENSG00000249695_26 (sequence is synthesized)
agggatttttaattggctggaagagacggcgaagatctggaaggtgaagccctagctcgtgctcctggctgagactaagcccaggtttcaggattaggaaggaaatctaaaccacctatt

SEQ ID NO: 879795 - DNA, 120 bp, Artificial Sequence
  ENSG00000249695_27 (sequence is synthesized)
gccacggaatgtagaaaccctggctttatttggcagttgttggcttctacaattcaattaaaaatatccccatcctccagagagttattttattcgtcagaattcataacatgctcaaca

SEQ ID NO: 879796 - DNA, 120 bp, Artificial Sequence
  ENSG00000249695_28 (sequence is synthesized)
aaggtcaaggcgttttggcaaagtgcgatgcggctaagaaaatagaagagaaggaagctgatgcaggatctgccagtgttcctggtgatgtcatgaggacgaagaaactctcttttgagg

SEQ ID NO: 879797 - DNA, 120 bp, Artificial Sequence
  ENSG00000249695_29 (sequence is synthesized)
gggcctgggtagggctggctgccactcacaccttgagactcaggtacccaaagaactaagttcaaactacccttacaatttagaagccctgagctgatttttcttttgctgggctcggca

SEQ ID NO: 879798 - DNA, 120 bp, Artificial Sequence
  ENSG00000249695_30 (sequence is synthesized)
gcatccctgtttgctggtgggtctcaaactgagtgatgcattggaattgcgtggcgggtttattagtgcacggattgctgggccccgagccgcagagtctgattcagtgggcctggagcg

SEQ ID NO: 879799 - DNA, 120 bp, Artificial Sequence
  ENSG00000249695_31 (sequence is synthesized)
ggaactgagagtttgcattgctaacaagcttccaggtgaagctgacgctgctggtccagggaccaccttttggaagcactgctctatgccaataacagtgggtggattaagaaaaggccg

SEQ ID NO: 879800 - DNA, 120 bp, Artificial Sequence
  ENSG00000249695_32 (sequence is synthesized)
tggagctgttacttcaagtcatggagcctcttggtggctcatttcctcaccttgagaatggagacaacactgagaacatctactgggcaggggtgttatgagtgttaaaggaggcagtgg

SEQ ID NO: 879801 - DNA, 120 bp, Artificial Sequence
  ENSG00000249695_33 (sequence is synthesized)
gtgtgaagttcctggtatacaacagggcttaatacatgatcattttcattaggtgtgggctgacccgcctgtcagtggacaggacccctccctgccccaccgactaattctgcctggaat

SEQ ID NO: 879802 - DNA, 120 bp, Artificial Sequence
  ENSG00000249695_34 (sequence is synthesized)
tgtatcattagacagccatccgtcggccctttaagatatacatgcaccagagagaggaagctaaatctggctcagacctcttgagacttacgaatcagtttctcagctgtgctttcttcc

SEQ ID NO: 879803 - DNA, 120 bp, Artificial Sequence
  ENSG00000249695_35 (sequence is synthesized)
gcaaagactccagcgcccccctcccctgctagtgcctgccactttctgcttctccatcttctcctgccctttgcaggacagggccctctccacctcggagagaagcaaggcagtcagtga

SEQ ID NO: 879804 - DNA, 120 bp, Artificial Sequence
  ENSG00000249695_36 (sequence is synthesized)
cctatggacttcagggaggggctcctttctgtggcgctgagtcagcatgccaggcctgcagggctacacaatcaagcatgagggattgcggctttcaccagggcatatcagggcttagct

SEQ ID NO: 879805 - DNA, 120 bp, Artificial Sequence
  ENSG00000249695_37 (sequence is synthesized)
ctgcactcaaccttgcccaagccagggttccggctggaggccccttgctcttctcactctctttccatgctcctgcttctcacctctccccatccacacctgggtctgtacgttccctga

SEQ ID NO: 879806 - DNA, 120 bp, Artificial Sequence
  ENSG00000249695_38 (sequence is synthesized)
cacacacacacacacacacacgggtgcccagcgtggccccattctcaacacacaataaataagtgctcgatgtttgttgaatgaataacaaatggccaactcattcccccatgaaccctg

SEQ ID NO: 879807 - DNA, 120 bp, Artificial Sequence
  ENSG00000249695_39 (sequence is synthesized)
atgaataacaaatggccaactcattcccccatgaaccctggcaccccagcactgccctgcatgaaccctggcaccccagcactgccctgcatgaacgctggcaccccagcactgccctgc

SEQ ID NO: 879808 - DNA, 120 bp, Artificial Sequence
  ENSG00000249695_40 (sequence is synthesized)
atgaacgctggcaccccagcactgccctgcatgaactctggcaccccagcactgccctgcatgaactctggcaccccagcacggccctggggcctgtgggctgctctggcaggatgacaa

SEQ ID NO: 879809 - DNA, 120 bp, Artificial Sequence
  ENSG00000249695_41 (sequence is synthesized)
tttcaccaaccctgggagctaatgcgttttccctggcttcatatccacccgaatgattgctgcgtaatcctcaaacggcctggactgttatttacttaatactgtcttttcttttacatt

SEQ ID NO: 879810 - DNA, 120 bp, Artificial Sequence
  ENSG00000249695_42 (sequence is synthesized)
ctcttacttttcaaaccctagcttcatcttaagctgtaacagttgtgaaagcatgtgtctgatgtgttatttttttcctttaatctttcttaaaataaactcaggatgattaaaataaaa

SEQ ID NO: 879811 - DNA, 120 bp, Artificial Sequence
  ENSG00000249690_0 (sequence is synthesized)
gcttttagcctctagagtttctttctctcacttggtctcctttaatagaatatagtatctcctgcagaaggagctgccagttcgttttaatacaccatcaaggagctgctgatggacttc

SEQ ID NO: 879812 - DNA, 120 bp, Artificial Sequence
  ENSG00000249690_1 (sequence is synthesized)
tatactaacatacataaaagcagaggtgacaggggctcttcaattacagcctcctcggataccgtttcccccttcaattattcaaccagaggaagagaggaccgcaaaggcgcagctgaa

SEQ ID NO: 879813 - DNA, 120 bp, Artificial Sequence
  ENSG00000249690_2 (sequence is synthesized)
gctgctcttagagcagaggcagccagatggagaagcgtaggggcaaggatgcgagaaaacttagccgagcttgacagagccgccagtggaggtgcagcggagtgtccggcgagtggtggc

SEQ ID NO: 879814 - DNA, 120 bp, Artificial Sequence
  ENSG00000249690_3 (sequence is synthesized)
gcgaaggtccgctcggcctgggacgccccacccgagagaagaggagaaggcgcaggacttgcggcgcggcggcggagccatgcgaaccaactccgccacccctgaggctgtttgcaaaca

SEQ ID NO: 879815 - DNA, 120 bp, Artificial Sequence
  ENSG00000249690_4 (sequence is synthesized)
ctcactctcgggagcgtcgcgggccgggccattcgcgaaccagacgcaacgacgaagcgaccacctcgagagtggggcgggaaagctccgcaccctctatccccgccaccagtctccgcc

SEQ ID NO: 879816 - DNA, 120 bp, Artificial Sequence
  ENSG00000249690_5 (sequence is synthesized)
cagtaactgcccccggagaagcaaccacggagcccctcccggccagtcgcgctctcccggcagcgcagtgccctccggcccaggcagttcccagagcgccggcaaggcctcccgggttag

SEQ ID NO: 879817 - DNA, 120 bp, Artificial Sequence
  ENSG00000249690_6 (sequence is synthesized)
agccgggctcccacaggcgcgaactccgagggcgcgaggtcccctagatccttaggcggcgaggcgttccgggacgcacgcggcctccccggagaaggctggaggtcaagcagcccaagt

SEQ ID NO: 879818 - DNA, 120 bp, Artificial Sequence
  ENSG00000249690_7 (sequence is synthesized)
ctctgccactccagagaagttaactaaagctctggagtccaagagtcgcgcggacacttaattctgactcttcttcctaatcgcgggaagacaaaccctaagcaacaaatccgagatagt

SEQ ID NO: 879819 - DNA, 120 bp, Artificial Sequence
  ENSG00000249690_8 (sequence is synthesized)
ttttttttaagcaaatattccttagaaagggacttatggcaacgagagaggaagggtgacaaactgcctgtggtccgcaccaggtatgtaagaaagaaccaagaggcccaattgtctgat

SEQ ID NO: 879820 - DNA, 120 bp, Artificial Sequence
  ENSG00000249690_9 (sequence is synthesized)
tcacccggccggactttaagagggtaagtcaagccctcccaaggggttttgaaaaagccgaactaccaggtttctaaaacgaagtcttcacccaaatggacgcatagatttttattttta

SEQ ID NO: 879821 - DNA, 120 bp, Artificial Sequence
  ENSG00000249690_10 (sequence is synthesized)
tcgcataacccagggctggaatataacctcccaaatcaaactaaaaataatcacatctacctgaaatacgttaaaaagattcagaatccagacatcttaggttcatacataaaccctcag

SEQ ID NO: 879822 - DNA, 120 bp, Artificial Sequence
  ENSG00000249690_11 (sequence is synthesized)
tatcaagcaaatcagaaacaatgttctagctttttttttcacccaaaagtatggaaaggctacagtgggtacaactcgtttaggataatacatatactaaaagcacatgcatgcctttca

SEQ ID NO: 879823 - DNA, 120 bp, Artificial Sequence
  ENSG00000249690_12 (sequence is synthesized)
ttgaaatgcctagggaggagtgaagccatctgtgtaatcaataacaggatagttatagatttttgtggcagtgaagtcttttaaaagcaagagtcaattatgaaaataaaatcattttac

SEQ ID NO: 879824 - DNA, 120 bp, Artificial Sequence
  ENSG00000249690_13 (sequence is synthesized)
aaatgaaactctgtacctgtaccccctaagaatacattcacaattagatttacaacagtaagattttaagaaaactttaggtttacatttacttgccttgtttttcattaagtttgaagc

SEQ ID NO: 879825 - DNA, 120 bp, Artificial Sequence
  ENSG00000249690_14 (sequence is synthesized)
aattttagtagcttattttaaaagtatatcctactaagttctacgacatgtaagtttgcaccatttctcacaacttagatattttctctctcgtaactagttaattcttgtaacgataaa

SEQ ID NO: 879826 - DNA, 120 bp, Artificial Sequence
  ENSG00000249690_15 (sequence is synthesized)
ataatggtattaaatacatgtgaatcttaattatgaaataattatcaaacaaggtgcttggactagtttttgccctgccctgtttttaaacagcatatcgaaattactaaaaagagattt

SEQ ID NO: 879827 - DNA, 120 bp, Artificial Sequence
  ENSG00000249690_16 (sequence is synthesized)
ataaaccctcaccttatatccactccaaccctcactggtgcacatatacagcaactgctctgattcttggcaacaatgggaggggaggggaagagaaaggaggatgactttaaaggagga

SEQ ID NO: 879828 - DNA, 120 bp, Artificial Sequence
  ENSG00000249690_17 (sequence is synthesized)
aaaaacctggaaaaattaggtcctttcccagattcccctttcgcttcccatttgccttcaagccaaagtaattttgttacagtttgcaccttctactacacaatgttgatagaatcattt

SEQ ID NO: 879829 - DNA, 120 bp, Artificial Sequence
  ENSG00000271998_0 (sequence is synthesized)
gggattacgggcatgagccactgtgcgcaatctgattttagatttcaaacagtataggataaaattgagagaaccatttggcaataaaaaatattaaaactgagttttgcagagaagggc

SEQ ID NO: 879830 - DNA, 120 bp, Artificial Sequence
  ENSG00000271998_1 (sequence is synthesized)
atgatctatatatctactattaaaaaccattcaactgaatatatttccatggccatcacaccattattaaaacctctgaaaagactaacatgtaccagagtaaagatccacataagacat

SEQ ID NO: 879831 - DNA, 120 bp, Artificial Sequence
  ENSG00000271998_2 (sequence is synthesized)
gtgtattagggttctccacagagacagaaacaataggatatatgtatatataaaccagagtttattaagaattggctcacacaattagaaggtgaagtcccatgatgactgtctgcaagc

SEQ ID NO: 879832 - DNA, 120 bp, Artificial Sequence
  ENSG00000271998_3 (sequence is synthesized)
tggaggagagaagccagttgtgtgtctcagtccaagtccaaaacccttaaaaccagggaagctgacaacgcagccctgagtctgaggccaaaggcttaagacccactgagtggccaccag

SEQ ID NO: 879833 - DNA, 120 bp, Artificial Sequence
  ENSG00000271998_4 (sequence is synthesized)
tgcaagtcccagagtccaaaggctgaagagcctggagtctgatgtccaagggcagcaggaaaggaagcgagcatctggcatgggaagaagaaagattcagaagactaagcaagcaaacga

SEQ ID NO: 879834 - DNA, 120 bp, Artificial Sequence
  ENSG00000271998_5 (sequence is synthesized)
atcccaccttcctttgcctactttgttctagtcatgctggcagcaaactggatggtaccactcacactgagggtgggtctatttctcccagtctactgactcaaatgtcaatctcctctg

SEQ ID NO: 879835 - DNA, 120 bp, Artificial Sequence
  ENSG00000271998_6 (sequence is synthesized)
gcaacaccctcacagacacacccagaaaaatactcttccagccatctaggcatccttcagttcaatcaagttgatgcctaatattatccattacaatatgtcttgaagggaaccatgaat

SEQ ID NO: 879836 - DNA, 120 bp, Artificial Sequence
  ENSG00000271998_7 (sequence is synthesized)
gtggctgttggcacctggaattttctgaaatccaatgctaagaagtagattaagttgttgtaagagatgtacctccaaaggaatcaccagactgaattaaaagagattccaagtattaaa

SEQ ID NO: 879837 - DNA, 120 bp, Artificial Sequence
  ENSG00000271998_8 (sequence is synthesized)
gacttaaaagaacccttggatcaccaaacatttagggttggaagtggtctgagaaagctgtatggacatcaagcaaaatgtattccccgatgcctactttagatgtgtcagatagtatga

SEQ ID NO: 879838 - DNA, 120 bp, Artificial Sequence
  ENSG00000271998_9 (sequence is synthesized)
tggaaaagaaagctggggccatggagaattatggagaatgaggcttcttgcacagagcgtatttaagggctgagctgacatcctcagacctagggtagacctcccaatatcggttcaagc

SEQ ID NO: 879839 - DNA, 120 bp, Artificial Sequence
  ENSG00000271998_10 (sequence is synthesized)
atctctcatttttcctctttccaaagaggaatgtttgttggagtcatctgttccctgtttcatctttgtaagttaggtgtgtgtggggtaggtaacttgtctttttactgcataactctc

SEQ ID NO: 879840 - DNA, 120 bp, Artificial Sequence
  ENSG00000271998_11 (sequence is synthesized)
cagaacaagaggagccacacccaggcccagtttagtgactgggtatcacctgaacaggctgaattgtgtccccccaaattcatatgttggagccctaacctccagtgcatttggagacag

SEQ ID NO: 879841 - DNA, 120 bp, Artificial Sequence
  ENSG00000271998_12 (sequence is synthesized)
ggcctttaggaggtcattaagatgaagtcaagtcataagtgggggggccctgatccaataggactggtgtctttataagaagaggaagagacatcagtaatgcatgcacacagaaaaata

SEQ ID NO: 879842 - DNA, 120 bp, Artificial Sequence
  ENSG00000271998_13 (sequence is synthesized)
agccatgtgaggacatggtgagaagacggccatctgcaagctaagaagagcggacccaggagaaaccaaacctgaagataccttgatcttggacttccaccctccaaaattttgagaaag

SEQ ID NO: 879843 - DNA, 120 bp, Artificial Sequence
  ENSG00000271998_14 (sequence is synthesized)
ttttattaagcttctcggtctgtggtattttgttatgggggccctagcaaactaacatgctcctgatgaagatagtaccatgcattacccagaggtacttgatccgtgactgaatgagac

SEQ ID NO: 879844 - DNA, 120 bp, Artificial Sequence
  ENSG00000271998_15 (sequence is synthesized)
ttttgagttgtctctcctggggagagaataaatgaattttgctcaagaaagaaacactgaactgatcatttggtgactggagaggtggattgtagctacatgaggactccagacattcac

SEQ ID NO: 879845 - DNA, 120 bp, Artificial Sequence
  ENSG00000271998_16 (sequence is synthesized)
caatattccagcatggcaggattatacttccatgtccccttggatgtaggaatggtcatgtggctcacgtggccaattaaatgtaagcagaaatgacaggtgtttcttctaggcagaatc

SEQ ID NO: 879846 - DNA, 120 bp, Artificial Sequence
  ENSG00000271998_17 (sequence is synthesized)
aatcccttaagagctaaagtacaatttgccgtgttcccttcctcctgtcactgcaatctgtgacattccagatggtagagtgtgagccagcctgtgttcctgaatgcagatgacatggag

SEQ ID NO: 879847 - DNA, 120 bp, Artificial Sequence
  ENSG00000271998_18 (sequence is synthesized)
cagagttccagccaatctgcaatagttgtgggcatgggtgagaaataatgtttaaagttaatgaatttttggaattgtttattactgtggcataatctagtctattttgactgatctaat

SEQ ID NO: 879848 - DNA, 120 bp, Artificial Sequence
  ENSG00000271998_19 (sequence is synthesized)
caatattaacggtagggaaaatttccaaaatcctcatagaattcagttgtatggtgtgatcaattaattcaatgtattgggttttgtccttcagtaaataaagaagtagagctgacatcc

SEQ ID NO: 879849 - DNA, 120 bp, Artificial Sequence
  ENSG00000271992_0 (sequence is synthesized)
aacttaaactatctaaactttaatgttcttcctcataggaaaaatggggctaataatgtttcctgacataatgcatttaaagcatggatgcattaggtgctcaataattgttatctatcc

SEQ ID NO: 879850 - DNA, 120 bp, Artificial Sequence
  ENSG00000271992_1 (sequence is synthesized)
ctttggcttagtaaaaaccattgtcaaagtttttgtgtatatgacttttaagttttctctaaattatatagacagtattttgaatattggaatcatggcaaataaaactgtccatctaaa

SEQ ID NO: 879851 - DNA, 120 bp, Artificial Sequence
  ENSG00000271993_0 (sequence is synthesized)
ggagtattctgttaatggtagaatataagtggtggatgcagaagtgattgctgtaaaattctttcaactttgctgtgtgtttgaaatttttcctaataaaataatagtttaaactggtta

SEQ ID NO: 879852 - DNA, 120 bp, Artificial Sequence
  ENSG00000271993_1 (sequence is synthesized)
ttgtgaatagactttaggggagcaaaggtgagagcaggaagaccagttaggctataacaataattcaggtagcagtggaagtggtaggaagtggttgggagcagatgtggtgtttgaatt

SEQ ID NO: 879853 - DNA, 120 bp, Artificial Sequence
  ENSG00000271993_2 (sequence is synthesized)
ggtaggaaatacaaatgtatgaatccacctaaagattaggaaaacaaggacaaatgtcttgagaattaaaagaaaatgctcagaagtgtaccctaaagcctcttactcatgcttttgttc

SEQ ID NO: 879854 - DNA, 120 bp, Artificial Sequence
  ENSG00000271993_3 (sequence is synthesized)
taggctggttttggttgtagatagttatcagttattatatactgccattcagattatttatatgtattactgtccacaactcacttgtgttctaaagggttttttttaataatgttcttg

SEQ ID NO: 879855 - DNA, 120 bp, Artificial Sequence
  ENSG00000271993_4 (sequence is synthesized)
tcttcccaagcagattacatgctttttgagaaaagatctatttttttgtatacaccccgcaatgccatattcctagaaggcattttcaatgttcacagaataaaaatatttgaatacaga

SEQ ID NO: 879856 - DNA, 120 bp, Artificial Sequence
  ENSG00000271991_0 (sequence is synthesized)
ggcggggcgtttgcagtggcccttgtgaactatgtttctgccgttaccagtgttggacccgccttcctcttttcctagaaaaggcgcagatgcgtggtcgcaaactgatttccaagtccg

SEQ ID NO: 879857 - DNA, 120 bp, Artificial Sequence
  ENSG00000271991_1 (sequence is synthesized)
ttgtctgatgctgcgagacactatccgtttgttacagcgaattgggggccgatgacgctggaggtggaagaagccgcggttctgtttcttaatggcgaattagcctgcggacgtcctgtc

SEQ ID NO: 879858 - DNA, 120 bp, Artificial Sequence
  ENSG00000271991_2 (sequence is synthesized)
tgtctaccctgaaacgctttgtgtcgacattccaccaggtctgttccacggtccaaacttctctaccttttttgaccctctagaattgtgttacgattagtagtatattgtgtcgagagt

SEQ ID NO: 879859 - DNA, 120 bp, Artificial Sequence
  ENSG00000271991_3 (sequence is synthesized)
ctgggatctttgatgttagttatattccctggctgtttatgccaaagggaaatccaaatagtaatttattacgtacattacgtataattcaaattaaaattttgtaagaacagttgccaa

SEQ ID NO: 879860 - DNA, 120 bp, Artificial Sequence
  ENSG00000271996_0 (sequence is synthesized)
ggacacttaggttggttttctatttttttatgataaacacagtttagatgatctgcctagtagtttaatctttgcacacatgcttaataacttcctaaagatagagttataaatttgaca

SEQ ID NO: 879861 - DNA, 120 bp, Artificial Sequence
  ENSG00000271996_1 (sequence is synthesized)
ttggtcagcgaacaaaatgtgcacttttaaggcttttgaatatactggacacttctgtttcttacattttagctgtgcagtctcaaatctaacgatgaatgtaacttcttttctagggtg

SEQ ID NO: 879862 - DNA, 82 bp, Artificial Sequence
  ENSG00000271996_2 (sequence is synthesized)
tccaaagtgggagttcccagcattaggcttgtgggggtggaagcttaatccgcctccttccaaaaactgaaatctggccaga

SEQ ID NO: 879863 - DNA, 120 bp, Artificial Sequence
  ENSG00000264116_0 (sequence is synthesized)
gaatcacgcagctttcaggagggcagggcagcacgctgcagagcagcactgaatgatggcttggcctggcgtccctggtggcagcagtggccgcaccaggcaccgtgttctcattcaaca

SEQ ID NO: 879864 - DNA, 120 bp, Artificial Sequence
  ENSG00000264116_1 (sequence is synthesized)
aagactcagttttgatgtgaggactgtgaacatctccagaacaggagacatttggaagagcttgtgcccactggtatctgaaacttggctgctcatactcaggctaaggagcagagatct

SEQ ID NO: 879865 - DNA, 120 bp, Artificial Sequence
  ENSG00000264116_2 (sequence is synthesized)
gggagaacaggcccttttcatggaagatgagaagtacaaggggaagaaccaaagcacacaattgcttttaaagcttctgctcagatgtgctgcacatcacactcctcacgctgttgtggg

SEQ ID NO: 879866 - DNA, 120 bp, Artificial Sequence
  ENSG00000264116_3 (sequence is synthesized)
caaagcaagccacaggccaagcctggtagtggatcagctccctcaagtctcatggcgatgggcgagtgtatctgctgttactgagaaaagagaggggtaaatagttgtgacagatgatac

SEQ ID NO: 879867 - DNA, 120 bp, Artificial Sequence
  ENSG00000264116_4 (sequence is synthesized)
aaatgtgcacacctcagctgacacaactccagtggaacaggctgtctgttgtactggaaccaatgtgagcttttggattttcgtcgtctgtgcatgagagagattccactggacaccaag

SEQ ID NO: 879868 - DNA, 120 bp, Artificial Sequence
  ENSG00000264116_5 (sequence is synthesized)
cttatccacagcctccatccagagatatctggatttaatgaacacccagtcactgcctgcaaacaggagatactgagtttccagtacataagaactcctagatgcatgaatacctaagaa

SEQ ID NO: 879869 - DNA, 120 bp, Artificial Sequence
  ENSG00000264116_6 (sequence is synthesized)
gaaattaaatgtgaagatctgatcagaaacatagtggaaccagtgaacactggccaaaagaaaaaaaaagtcccattccactgcctggacaatagcaggaaggaattccttatagtttca

SEQ ID NO: 879870 - DNA, 120 bp, Artificial Sequence
  ENSG00000264116_7 (sequence is synthesized)
tgccctgtattggctttagagtcattaatgaacagtatctatgtcgtatgatccatgaagtagtgagaattgttcacacctgaaaccattttcctactggctacagaaacgttaccatca

SEQ ID NO: 879871 - DNA, 120 bp, Artificial Sequence
  ENSG00000264116_8 (sequence is synthesized)
tcttattgaaaagacagacgaggctgcatgaaaatgcttagcacatgggtaggaagcagtggatgaaaatagcagaagtgggacccagaagatgaactcttttacatttgattattcaga

SEQ ID NO: 879872 - DNA, 120 bp, Artificial Sequence
  ENSG00000264116_9 (sequence is synthesized)
ttatatgtaagttcccatcctgctgaaatctcttcagcagcaagttaacctccaacctaagaaagatggaagaaatcaagagttgaagatggaggggacagggacagtctctgtatctgt

SEQ ID NO: 879873 - DNA, 120 bp, Artificial Sequence
  ENSG00000264116_10 (sequence is synthesized)
gtgctccctgaggtgggggcccctgcctctcccatctttgcactcctcatgcctactgtgtacctggtgcagaccagctgccctgaaatgtttgaggtgctgtgttaccattgcctcttt

SEQ ID NO: 879874 - DNA, 120 bp, Artificial Sequence
  ENSG00000264116_11 (sequence is synthesized)
tgattgcccaccgagtgcctcctgagtcatgcaccccatcacagccctcacgcaaggcctggagacaaacccagcacacaccggcctagtattaattcataaccatcatcatgtacctaa

SEQ ID NO: 879875 - DNA, 120 bp, Artificial Sequence
  ENSG00000264116_12 (sequence is synthesized)
gattctacctacctggatgttgattgatgaaatttataaagtattagaaggacttcaaatcgacttacaactatcacatatgaaatgcacaaaaccagcttttaaagccttctataattt

SEQ ID NO: 879876 - DNA, 71 bp, Artificial Sequence
  ENSG00000264116_13 (sequence is synthesized)
tgaaatgcacaaaaccagcttttaaagccttctataatttgtttaagactgaagaactttaagaccattac

SEQ ID NO: 879877 - DNA, 61 bp, Artificial Sequence
  ENSG00000264116_14 (sequence is synthesized)
cacgaatcaatctcctgaccttgtgatctcctcgcctcggcctcccaaagtgctgagatta

SEQ ID NO: 879878 - DNA, 120 bp, Artificial Sequence
  ENSG00000264116_15 (sequence is synthesized)
agtcagtaaggcctcggaagtcaagtcctggaagttgggcttgcaatcattaggtggagatattgtttgttctgtgctcagaattccctggagtgagactcaggacaatattaaatccaa

SEQ ID NO: 879879 - DNA, 120 bp, Artificial Sequence
  ENSG00000264116_16 (sequence is synthesized)
gaatatggtgttcattttcaaactgaaaaaggaaataattacagttactatttacagtgtctggcttttcaagcttcatgctacaagcagctaactctttgtcaaacaattaattttgtt

SEQ ID NO: 879880 - DNA, 120 bp, Artificial Sequence
  ENSG00000264116_17 (sequence is synthesized)
gtttcacagtgaggattttaacactaatcctggtaaagcctgcatatcagcggggagtcagggtaaaacaatcgaaaatgtggtccttcccattgaataacctgtgaccttacagcaatt

SEQ ID NO: 879881 - DNA, 120 bp, Artificial Sequence
  ENSG00000264116_18 (sequence is synthesized)
cctgtgaccttacagcaattgaactattggctgccatcactgcaagttaataacctattttatagaacggagcctacagactgtttgaaatggctgttttttttttctttctttctttct

SEQ ID NO: 879882 - DNA, 120 bp, Artificial Sequence
  ENSG00000264116_19 (sequence is synthesized)
caccaggcaccgtgttctcattcaacaaagactcagctggcacagagctttagcaccttaagttgctcaatttgatctctgcactcaggaacaagaatcttcctggtttgtggaaagagt

SEQ ID NO: 879883 - DNA, 120 bp, Artificial Sequence
  ENSG00000264116_20 (sequence is synthesized)
gctattctgacattggatgctgctgagaatcgggcaacagtcttagtgaggtgaccatcatctgaggagttttgatgtgaggactgtgaacatctccagaacaggagacatttggaagag

SEQ ID NO: 879884 - DNA, 86 bp, Artificial Sequence
  ENSG00000278811_0 (sequence is synthesized)
agctgctgcaacccgctgccctctggtgtcctgctgtgggagctttgttctttcactctcgtaataatctctgtgagctgtaacac

SEQ ID NO: 879885 - DNA, 120 bp, Artificial Sequence
  ENSG00000278811_1 (sequence is synthesized)
tcaccgcgaggttctgtgccttcgttctttaagtcagggagaccacgaacccaccgggaggaacaaacaactgtgatgcgccatctttaagagctgtaacattcaccgccggggtctgcg

SEQ ID NO: 879886 - DNA, 80 bp, Artificial Sequence
  ENSG00000278811_2 (sequence is synthesized)
ccatctttaagagctgtaacattcaccgccggggtctgcggcttcattcctggagtgccatctgaacagctgaaggaaca

SEQ ID NO: 879887 - DNA, 120 bp, Artificial Sequence
  ENSG00000278811_3 (sequence is synthesized)
gggagtctccgtggcttcattcttgaagacagcgagaccaagaacccaccagaaggaatgaattccgcacacagcaacagcacaaagttaaaccaggaagtccctctgccttgctaggga

SEQ ID NO: 879888 - DNA, 120 bp, Artificial Sequence
  ENSG00000278811_4 (sequence is synthesized)
tccaggtttgccttcctgttgaggtatcccatttcattacagttgacctaagtttgaacaaacactgccacctgatgcatgaaagctctactgtgacctacgttaaaaggagctgacact

SEQ ID NO: 879889 - DNA, 120 bp, Artificial Sequence
  ENSG00000278811_5 (sequence is synthesized)
ccctcaggctaccttagtcagtgggggcttactgcagcatacctgtggcgatgagagagagaggcacatcacaggagcatctggcaccagtggcatcctgaatttaagatgaaacaatag

SEQ ID NO: 879890 - DNA, 120 bp, Artificial Sequence
  ENSG00000278811_6 (sequence is synthesized)
agaaagaaccaagaagttacatacattcatcagaattgctggagagtcctgacctctggccatcgatcaaagggaagcgttcactactgaaggtttgtcttcactgtactgggtattcaa

SEQ ID NO: 879891 - DNA, 120 bp, Artificial Sequence
  ENSG00000278811_7 (sequence is synthesized)
cttccttgaaattaaaaggaagaaggataaaaagtggtatgctgaatggattaaaggtaatattttgattatatcaatagttttcaaacttttataactcatgagctgtttgggaatatt

SEQ ID NO: 879892 - DNA, 120 bp, Artificial Sequence
  ENSG00000278811_8 (sequence is synthesized)
tgagcatatggtcaatccacatctgaattatcctgcccacaaaaatgtcaaggaaatacttctactgccccttctgaagccatcttaattccaggagttgaatcaatttcaaagtcattg

SEQ ID NO: 879893 - DNA, 120 bp, Artificial Sequence
  ENSG00000278811_9 (sequence is synthesized)
ataactgcatcagccaaaatttgtccaaatgttttgaaatgcatttctatttcctgtcacacctacctctttggctaatgcattcattttatgagtttcaaaaattaccatctccctgtc

SEQ ID NO: 879894 - DNA, 120 bp, Artificial Sequence
  ENSG00000278811_10 (sequence is synthesized)
ccaggtctttaaagttgttgaataagcaaatctctgttcactttatttgtactatttatggttatatagatttaattacttctaattagatttccatattggaagtacaaatctaacctt

SEQ ID NO: 879895 - DNA, 120 bp, Artificial Sequence
  ENSG00000278811_11 (sequence is synthesized)
aaacaaaaaattctttttataattctcaatatctccaattattttgagcttgtgctctctggatcttttcaagttatggcaaacttggttttgaggcatagcagcaagaactacataaat

SEQ ID NO: 879896 - DNA, 120 bp, Artificial Sequence
  ENSG00000278811_12 (sequence is synthesized)
cttttcaaacagagatataccagtataaagcttgctttccagtatagtccttaatgattttcttcattttctaggtctttttgcctgatgcagaatattggtacatatgctggggtcaac

SEQ ID NO: 879897 - DNA, 120 bp, Artificial Sequence
  ENSG00000278811_13 (sequence is synthesized)
atttaatgactctgggtctttttcttgagcagaatctaagggatagtctttcattttatagatgtgttttagattactcataaattcattactttttcctcacacacattataacatctc

SEQ ID NO: 879898 - DNA, 120 bp, Artificial Sequence
  ENSG00000278811_14 (sequence is synthesized)
ccattgacacgaatctcaggattattctataatgtctctcttctctggggtgtcttctttctggggagatttgtatatcttggagtctgagacttcactatgtactccttccttatcatc

SEQ ID NO: 879899 - DNA, 120 bp, Artificial Sequence
  ENSG00000278811_15 (sequence is synthesized)
atttataaacctattcaacagactctgccccagaatggattcttgagcaatcttgaataattacacgagtatccaaagatactgattttaggagaacaaggttgttgggtacaggtagtt

SEQ ID NO: 879900 - DNA, 120 bp, Artificial Sequence
  ENSG00000278811_16 (sequence is synthesized)
aattattcctaaaactgaatatgtccaatacctatgtcttgagaagctctaagagagtaacagaagagcaacaatggaatgtgacaattgcctgcactgtctttctaggttgaaaatcca

SEQ ID NO: 879901 - DNA, 120 bp, Artificial Sequence
  ENSG00000278811_17 (sequence is synthesized)
agaaatttacatgcactgaattttatttcctttatttgcctatttattcacaccaagaattcagggtccatgttgctgtagtggaaattggttatttctgttttagtcttgaattgtcta

SEQ ID NO: 879902 - DNA, 120 bp, Artificial Sequence
  ENSG00000278811_18 (sequence is synthesized)
attttgttcaacttgcctggtacggaggggagattcaccagtgggcctcacctgtaagtgagggtcacatctgtaattctctgatctcgtgatgcagaagtaggccacatcttccatttt

SEQ ID NO: 879903 - DNA, 120 bp, Artificial Sequence
  ENSG00000278811_19 (sequence is synthesized)
catccttggattcctgtggaatttacagatgcacagatagaagtcatttagtcttagatagataccttcatctgctttgtcaattgatgatgaataagactgagttgaatgtatttagaa

SEQ ID NO: 879904 - DNA, 120 bp, Artificial Sequence
  ENSG00000278811_20 (sequence is synthesized)
tgtcttggctataaattcctccatatagcttaacccactgtttcctgcagtatgcacccctttaccaagagagagaaagagagaaagaatttcatgtttctgtgggttttagaaggctat

SEQ ID NO: 879905 - DNA, 120 bp, Artificial Sequence
  ENSG00000278811_21 (sequence is synthesized)
aggaagggatttttgtttgctcattttcagaacttattaatagacagttattgaatacctaccttgggcacagaaataatcacattctctcctgagaattttcaacccacagccaagtac

SEQ ID NO: 879906 - DNA, 120 bp, Artificial Sequence
  ENSG00000278811_22 (sequence is synthesized)
aggtgtggaaatttgatgatagaattaataccaatggaaaaaggggcccacagaactgaaaaagtggccactggtgatgacagtgacctgggagggagcgaggcaacctagagagacaat

SEQ ID NO: 879907 - DNA, 120 bp, Artificial Sequence
  ENSG00000278811_23 (sequence is synthesized)
gtggggaatcatcacgttccattacagcgcccttctcttactctcttggagcttctcaagccacaggtgtcagtcatattggttttagagattattagtaactacccaaacccaacaatt

SEQ ID NO: 879908 - DNA, 120 bp, Artificial Sequence
  ENSG00000278811_24 (sequence is synthesized)
ttgttttcctgaaactagaaatgtcctgtttccaactttatattttcatcaacttctttttctatgatgtgtgagaaactagaatattcagtgtgctttcttgaataccagccttgtttc

SEQ ID NO: 879909 - DNA, 120 bp, Artificial Sequence
  ENSG00000278811_25 (sequence is synthesized)
aactctttaatgagtggactattctctgaagctggccctcagtcttactctgggttcatcaaccaaggtcaagatctgtccacatgcacgtaacaggagcacttttccgagaattgtaaa

SEQ ID NO: 879910 - DNA, 120 bp, Artificial Sequence
  ENSG00000278811_26 (sequence is synthesized)
ggagccacggtgcaaagccttctggacctgggtctcatgtgaaaactcagcaatgagcctcctggcctgagatgagcctgcggagcaccttgttacagcacgcatatgatgtatataaaa

SEQ ID NO: 879911 - DNA, 120 bp, Artificial Sequence
  ENSG00000278811_27 (sequence is synthesized)
aatgaacacatgtattccaattacactgatttgatctttacaaactatatggatgtattaaattgtcacatgtaccctcaaaatatgtacatctattatgtatcaataaaataattaaca

SEQ ID NO: 879912 - DNA, 120 bp, Artificial Sequence
  ENSG00000278811_28 (sequence is synthesized)
agaaggataaaaagtggtatgctgaatggattaaaggacaaggaccaaacttcaattatcatcacagaaattaacatatgtggtctcatcaatgaacaaatctttaccaggtcaataaaa

SEQ ID NO: 879913 - DNA, 120 bp, Artificial Sequence
  ENSG00000278811_29 (sequence is synthesized)
agggtatttcacatcgcactgactcctcggaaaaaagggcccatctagggtacaatggtatttctcatctactttgccagaatgatgcaagagatccagagaaaggaatgaaagcaagtg

SEQ ID NO: 879914 - DNA, 120 bp, Artificial Sequence
  ENSG00000278811_30 (sequence is synthesized)
tattatgctcaaaagtaggacaaagacaagacaaactggaggtaatattcaatagcatgtaattggtctcttcatgaacccaggtgaactatcaaattttttcaacaggtaaattggggg

SEQ ID NO: 879915 - DNA, 120 bp, Artificial Sequence
  ENSG00000278811_31 (sequence is synthesized)
gaagggtacaacatgtctgatatatctactattgcacaaagaagaattataataagattttttaagagaaattgttcctttgaagataatcaaaagagagttgaaacatctgaaataaaa

SEQ ID NO: 879916 - DNA, 120 bp, Artificial Sequence
  ENSG00000278811_32 (sequence is synthesized)
gtacttcttctgtcttctataaaatgttcatttagccctgcagaaatcgaactcgaaaaaaggtttcaatttaattgactctatataggcctaaactagtattttttaaagggagttacg

SEQ ID NO: 879917 - DNA, 120 bp, Artificial Sequence
  ENSG00000278811_33 (sequence is synthesized)
aagaaaagatgaatatgtggagcacataggatttttagggcagtgaaactactctgtatgatactataacagtagatatcatggtattgtacatttgtccaaacctacagaatgcacacc

SEQ ID NO: 879918 - DNA, 120 bp, Artificial Sequence
  ENSG00000278811_34 (sequence is synthesized)
accaagagtgaacccgaatgtaaactatggactttgagtgatagcgatgtatcaatgtaggttcatcagttgcaacaactgtgccactctggtggggtatgttgataatgggtgaagctg

SEQ ID NO: 879919 - DNA, 120 bp, Artificial Sequence
  ENSG00000278811_35 (sequence is synthesized)
tacaagtgtggggacaggggacagctgtacatgtgtggggacatatgcatgggaaacatctgtagtttctgttcaattttgttgtgaatctaaaattactctaaaatataatgtatattt

SEQ ID NO: 879920 - DNA, 120 bp, Artificial Sequence
  ENSG00000278811_36 (sequence is synthesized)
aaaaagaaggggttatataaaaactaaggctacactgtaagtttacctctgacaaggtcttatgcagcagggagctttggtttttcaacctgtgagcttcatccacaacaagaacactcc

SEQ ID NO: 879921 - DNA, 120 bp, Artificial Sequence
  ENSG00000278811_37 (sequence is synthesized)
aagggaatctgtgagagaaaacccaagctttcagttttgtgtaatttaaacacatatttcacaatcaaaagtcttactacaaaactgtgactgttattaaaaagacttaacagtaagccc

SEQ ID NO: 879922 - DNA, 120 bp, Artificial Sequence
  ENSG00000278811_38 (sequence is synthesized)
cttctattacaaatgccaccaaattaccttcctgagaggctacatgtgcataatacaatatctggataaggtagtaaaaccaagggatttttttttttaacaaaatgggaaagacctatg

SEQ ID NO: 879923 - DNA, 120 bp, Artificial Sequence
  ENSG00000278811_39 (sequence is synthesized)
cagaaaggaagaagccagagacagaaaggaaaaggaaacatttatgatctcctactttgtgccagacactaacctcagggctttatgtgttatttagtctaaaagagtatagcaagcaga

SEQ ID NO: 879924 - DNA, 120 bp, Artificial Sequence
  ENSG00000278811_40 (sequence is synthesized)
caattgtgctcattttactaataaagacactaaagctcagaaaggttaggtgacttggtgaaggtcataaagacagagctgatgttcaaacagaagaaaaaaatcaagatagacagtggt

SEQ ID NO: 879925 - DNA, 120 bp, Artificial Sequence
  ENSG00000278811_41 (sequence is synthesized)
gttgtaggaacttaagaagtgtgactttaaaatgggtaagtggtgagcagagtcaaatctcacagagatgtccaggaagatatatccactgaatttgttgacatggaagtcattagtggc

SEQ ID NO: 879926 - DNA, 120 bp, Artificial Sequence
  ENSG00000278811_42 (sequence is synthesized)
tgttgccagagcacattttgtagcatactgtgtcacatcagcaatttctcaagaagtttcagtcataaaagcaaatactttgacagatactactgagaagctatttaagaaaaattcaaa

SEQ ID NO: 879927 - DNA, 120 bp, Artificial Sequence
  ENSG00000278811_43 (sequence is synthesized)
atacagaaaaagatatatgtgggaatgtttcaagttgtattatttaaaacagcaaaaaatggaaaataacctaaatgtccaataataggtagtaaaatattacatggcattttaaataat

SEQ ID NO: 879928 - DNA, 120 bp, Artificial Sequence
  ENSG00000278811_44 (sequence is synthesized)
aaatatgattatgttgcaatttaaaaggcctatagaataataaaaaagatataaatatcatgtatcctcttttacaaatgtgaaagccatgcaaaagataataaagtgaaaattataaga

SEQ ID NO: 879929 - DNA, 120 bp, Artificial Sequence
  ENSG00000272719_0 (sequence is synthesized)
cggggtcggggcgtccctgggtccagcagggagtggcctcccggaagacgccggcgagggaggcccaagtgcctgctccgagaaatctcagcgaggcctccttgggagaaaagtgcaagg

SEQ ID NO: 879930 - DNA, 120 bp, Artificial Sequence
  ENSG00000272719_1 (sequence is synthesized)
cggtgacgtccagtctgtaaaatgtgaaaaacgcccaggccgaaaccacccagaacccgttcctgcagggaggagggtgggtgggaccaacaggggatcagtcactgcgccaaggcaggg

SEQ ID NO: 879931 - DNA, 120 bp, Artificial Sequence
  ENSG00000272719_2 (sequence is synthesized)
gtgttccccagacacagacgggttcctactgtctggccccacttatgtgaagttctagaacaagccccacattttctggtgacagcaaacaggtggcattatttatagatgtaggggcag

SEQ ID NO: 879932 - DNA, 120 bp, Artificial Sequence
  ENSG00000272719_3 (sequence is synthesized)
gtatttatgggagggggcacagagaagagcatgagctgggggtggaggggggcatccactgattctgagatcctatatttctttgagaaaacaactgaataaaacatagcaaaataataa

SEQ ID NO: 879933 - DNA, 90 bp, Artificial Sequence
  ENSG00000272711_0 (sequence is synthesized)
cgcccctgagatgggacgtgtggtccgtggctaaaggctgggacggaaaggcgcatgagccaccgccgcgtcaggctcggctatgggtgg

SEQ ID NO: 879934 - DNA, 120 bp, Artificial Sequence
  ENSG00000272711_1 (sequence is synthesized)
gcgcatgagccaccgccgcgtcaggctcggctatgggtggggggagcgtgatcgcggacccggggtgtggggcgactggaaaaacgggcctctggaccagcacacgccctgtgcggagag

SEQ ID NO: 879935 - DNA, 120 bp, Artificial Sequence
  ENSG00000272711_2 (sequence is synthesized)
acactgtctggcatctcgggatcatgtgaggggctcccactgcccagtcacacgtctaaagcatcctagttcttacctattgtagcacggccggaaagtgagccgccttagctgctgatt

SEQ ID NO: 879936 - DNA, 120 bp, Artificial Sequence
  ENSG00000272711_3 (sequence is synthesized)
gtactagagcaggcaatacaagagtcggcccatcctcaaaaccactgataggatgtgagtttcactaaccccgttttacagatgaggaaattgaggcaaggccagggctcacacctgtaa

SEQ ID NO: 879937 - DNA, 120 bp, Artificial Sequence
  ENSG00000272711_4 (sequence is synthesized)
tcccagcactttgggagtccaaggttggagggttgcttgagaccaggagttcatgaccagcctgggcgacatagtgagacccccatcttcccaaataaaaataaataaatcagccggaca

SEQ ID NO: 879938 - DNA, 79 bp, Artificial Sequence
  ENSG00000272711_5 (sequence is synthesized)
aataaaaataaataaatcagccggacatggtggcatgtgcctgtagtccctgctgctcagaaggctaaggtggaaggat

SEQ ID NO: 879939 - DNA, 120 bp, Artificial Sequence
  ENSG00000272711_6 (sequence is synthesized)
gtctcaaaaagaaaagagacttacacgaggtcacatagctaataagtggcagatagggaagagaacccttgtccctctactttaaggccctattcgcttgccccattatcccatgctgcc

SEQ ID NO: 879940 - DNA, 120 bp, Artificial Sequence
  ENSG00000272711_7 (sequence is synthesized)
tctctaagagccagagaagtaggaggtagaaaaagagcatctctgcagctctgggactgatgatgtgaatgaactgggtagatggtaagtgtgtaactgggtgatcttggacatgggatg

SEQ ID NO: 879941 - DNA, 120 bp, Artificial Sequence
  ENSG00000272711_8 (sequence is synthesized)
gggtgggtgaggaggcttaccaatgctgagaggagtggaagctccaaccccagctaatgctagacaccagactccaaatttaaacacacagtggaaactggcaagaatgaaatactgact

SEQ ID NO: 879942 - DNA, 120 bp, Artificial Sequence
  ENSG00000272711_9 (sequence is synthesized)
tcaatacagatttcaagagacatgacattagcactggtggagaatggcaagcctaaggttggaaaaggttcagggaaggaagatgaaggtctgccatgttctactgaggaggagtttttc

SEQ ID NO: 879943 - DNA, 120 bp, Artificial Sequence
  ENSG00000272711_10 (sequence is synthesized)
aaacagtggggtgctgtctgcaatgtgtacagccttaaaattattatataagtaatcaatactcattgttgaaaaataatatatggataaacaggaaaaataaacaaaaatcataatcca

SEQ ID NO: 879944 - DNA, 120 bp, Artificial Sequence
  ENSG00000272715_0 (sequence is synthesized)
atgcagataggagcgaaggagctgaaaggacttttaaaggccacggattccaacctctaccatacagaggccttaagtgtttcggtgaggtgcccaaggattcacagggaaggggcaaaa

SEQ ID NO: 879945 - DNA, 120 bp, Artificial Sequence
  ENSG00000272715_1 (sequence is synthesized)
tgcccactccccggtggctagggtgggcctgtctccttccttacccagctccctccctctcctcggcgcctgtggcactgattagaacagcaccccacaaagacacccatttaaaaaaca

SEQ ID NO: 879946 - DNA, 120 bp, Artificial Sequence
  ENSG00000272715_2 (sequence is synthesized)
aacaaaacccaagtgtattaatagctatagtacttcatatagaatgtactcttaagacttaatatttattgctctaagtggacaccactgattgccaataaagactcatttttcccccta

SEQ ID NO: 879947 - DNA, 120 bp, Artificial Sequence
  ENSG00000233246_0 (sequence is synthesized)
gtcacacctccgtgagcggcctcgggctcgcggttgaggctgattgaggaagtgggttcaggcggcccgccgtgcctggcacacggtcagagtcccctgacaggactttcccctttctct

SEQ ID NO: 879948 - DNA, 120 bp, Artificial Sequence
  ENSG00000233246_1 (sequence is synthesized)
gagatgacaatcaggccgctttgctttgcactgccctcagagaagcagtgtgcccagaagtcaagtgtgagctcttgagtcaaaatgcttggatttgaattccaactctgctgcttacca

SEQ ID NO: 879949 - DNA, 120 bp, Artificial Sequence
  ENSG00000233246_2 (sequence is synthesized)
atggggtgagtgagttacctgacctctctgtacctctatgtcatcatctttaaaatggagcccacagcaaccagggaaatagtctaacagaagcctaggatgaagaatttcgggaaagaa

SEQ ID NO: 879950 - DNA, 120 bp, Artificial Sequence
  ENSG00000233246_3 (sequence is synthesized)
gaaacgtccagcaaggccaagtccctttgtgtgtcagtctgctttctctctcacacatacgtgcacacaggctcgtacacacaaagatgttaagcaaaatataaagcccctccactgata

SEQ ID NO: 879951 - DNA, 120 bp, Artificial Sequence
  ENSG00000233242_0 (sequence is synthesized)
ccgcctctgcctcccaaagtgctggcattacgggcgtgagccaccacgccctgcctagaccaacatttatttgagaagggaagcacctgttcttcccacgaaagtggcagtaggacatca

SEQ ID NO: 879952 - DNA, 120 bp, Artificial Sequence
  ENSG00000233242_1 (sequence is synthesized)
acagtgcacagctgaattgggatgaggggccaagacaaagcagaaatctgctgcagagagcaggaaagataaaggatattctgcagcaggatctgggcaagtggcactcatccatatcct

SEQ ID NO: 879953 - DNA, 120 bp, Artificial Sequence
  ENSG00000233242_2 (sequence is synthesized)
ttgcattgcaaagagaggagctacttccttcctttttattttccagtttattggtggctcttagaacctctgagaactaactgattttgacctcttaacagttgcctttcaactaccatt

SEQ ID NO: 879954 - DNA, 120 bp, Artificial Sequence
  ENSG00000233242_3 (sequence is synthesized)
catccactgcaagcctactgtgtaacaggccctttttagccatttcagatattattgtctcttgcccagcttcaagtgactctcttagggagggattagcctcacctcactagtatggaa

SEQ ID NO: 879955 - DNA, 120 bp, Artificial Sequence
  ENSG00000233242_4 (sequence is synthesized)
caaagctgcatttcaaaattgaactttagcatggagtctatgatgactggctcatgtctctccacccagcacctagcccaaggccaagcacagagaaggctcacagtggacacttttgga

SEQ ID NO: 879956 - DNA, 120 bp, Artificial Sequence
  ENSG00000233242_5 (sequence is synthesized)
atgagtagattttgtatggaatggttggtaaatgaaggcctgggcatggtgtgaacagtgttatgggacagcagaggagggggtggtggctgattaggggacatggggaagcctctgcag

SEQ ID NO: 879957 - DNA, 120 bp, Artificial Sequence
  ENSG00000233242_6 (sequence is synthesized)
aggaacagaattgagtgaggcctggagaaataagtagtcagacaaagacggacaattcagcattctcacagcaaagaccactaacaggcaattcacagaacaagaaacccaaaggccgtg

SEQ ID NO: 879958 - DNA, 120 bp, Artificial Sequence
  ENSG00000233242_7 (sequence is synthesized)
aataggtgctctgcatcactaacagtcagaaaaatgcaaattatctcatgcacagtagatgagaatacaaactggaaaagtgtgttaggagagctatttaatagcatctatcgctattat

SEQ ID NO: 879959 - DNA, 120 bp, Artificial Sequence
  ENSG00000233242_8 (sequence is synthesized)
gaggtcgagcacactgaactacctggagtaaaggggcatcatgtctgaaactgatgcttaagtggctcagaaaaaaaattctgggagctagagggagagagagacagaggagtgtggtaa

SEQ ID NO: 879960 - DNA, 120 bp, Artificial Sequence
  ENSG00000233242_9 (sequence is synthesized)
aaagttatcatttggggggtctgcgtaaaaggtatatgaggattctttgtacggattttgcaacttttctcccagtctgaaattatgtcaaaatataaaattaaaaggcaaaattaaaag

SEQ ID NO: 879961 - DNA, 120 bp, Artificial Sequence
  ENSG00000233242_10 (sequence is synthesized)
actctgaatatccaggactagcatggtgtggggagacggggattagagggataacgagcagcataacccacaaatggacacatttccctgctacctaagattagaagtaaagactttagg

SEQ ID NO: 879962 - DNA, 120 bp, Artificial Sequence
  ENSG00000233242_11 (sequence is synthesized)
cctacattatacccagcctcaagagttgcaagacataacatgagttctcatggcggctcagtctttgcattggcagtgtctcttcatccagtgactgtgtggaacaatggaaacccgaga

SEQ ID NO: 879963 - DNA, 120 bp, Artificial Sequence
  ENSG00000233242_12 (sequence is synthesized)
atcatggctgaaagggacatctagtccaactctctcattttgcagaagggacaactaagatgcaaaatgaagaagagatttgcaaggtcccagcaaaggttagtgttaaaactggcctct

SEQ ID NO: 879964 - DNA, 120 bp, Artificial Sequence
  ENSG00000233242_13 (sequence is synthesized)
gatgtgcgcatgcgtagtgggtgcgaaccgttctctgccccgcccataattattaggcggaacacagttcacactgggcgcctccaactctctggaattctaggcaacagattaacactt

SEQ ID NO: 879965 - DNA, 120 bp, Artificial Sequence
  ENSG00000233242_14 (sequence is synthesized)
tgtgaatctcgaagagctgcactcctgctaaatattggagttaatgctgatcctttggaagtctctgaaggttgcaagattgtgctgggagcctctggcttcatttgcccttctcacacc

SEQ ID NO: 879966 - DNA, 120 bp, Artificial Sequence
  ENSG00000267055_0 (sequence is synthesized)
ttcgcctaggaaccagaaagaatccacagccactacagccactggaaataggcccaccaactgtggtctccactatgaacctactatcaggtgtaagatctgggactacattctattttc

SEQ ID NO: 879967 - DNA, 120 bp, Artificial Sequence
  ENSG00000267055_1 (sequence is synthesized)
tgtaaattgtgcagagcaagtgtgtggtgaccgttttttccccctcggattttaatctactggatatgcccatagagtttgcaggaataacggctggttctggaagctgttggagatgtg

SEQ ID NO: 879968 - DNA, 120 bp, Artificial Sequence
  ENSG00000267055_2 (sequence is synthesized)
gagaagaaagggcaaagggatgggaactaatatagatataccaaattatgtgcaacacacacaagagaaagaggaaaaagaatgagaaagagaaagagacatttgcttcccagccatccc

SEQ ID NO: 879969 - DNA, 120 bp, Artificial Sequence
  ENSG00000267055_3 (sequence is synthesized)
agtgttcatcaacaagaacaacaacaacaacagcaacaacaacaaaatcaaaggagtgacaatctgttcttagactgtcttcacagttccccaccagaaaaaagagtattccttttctgc

SEQ ID NO: 879970 - DNA, 120 bp, Artificial Sequence
  ENSG00000267055_4 (sequence is synthesized)
agcacttaaatcctatactggcagcaatgaaaacccaagggaaattatctacaagtatgaacagacagtcctcaatttatttacgagttcgacctacgatttttttgacttcacagtggt

SEQ ID NO: 879971 - DNA, 120 bp, Artificial Sequence
  ENSG00000232591_0 (sequence is synthesized)
atccaggctttatgagtggctgcgaccatgctgtccaattagtatggtgtcaccaatatatggatccatgcgattgattatctgtggagtgtccggatggtccaggacccttcagattat

SEQ ID NO: 879972 - DNA, 120 bp, Artificial Sequence
  ENSG00000232591_1 (sequence is synthesized)
attacgatggagaacaggaaaattaaccaaaacctgggcaagactgcgaatgtgtgctactatccatcccagttctggaggccggagttggaaatcagtttcactgggcacacatggagg

SEQ ID NO: 879973 - DNA, 120 bp, Artificial Sequence
  ENSG00000232591_2 (sequence is synthesized)
gctgtgtggggctgagctgttgttctagaagaaaaaaggatgtcttgtcctgtgtgaactggaacagcgcttagaaatcgaggagcgtggccctgggaacagaggctgtgtgctgttgtt

SEQ ID NO: 879974 - DNA, 120 bp, Artificial Sequence
  ENSG00000232591_3 (sequence is synthesized)
tttgcttcctcattaatgagcatgggccttcagtgagctcctttcccttgctggccttcatttgtaaaatgttggctgacggctaagggtgtttattcctctaaaatcacctaattagaa

SEQ ID NO: 879975 - DNA, 120 bp, Artificial Sequence
  ENSG00000232591_4 (sequence is synthesized)
acagcaagagttatgttacaaggatagcatagacagccctgcctattgcaagagtaatgcatcaggtgtgaaacagatctttaatgctgtgtgaagcaggctcttttaaggtccaattag

SEQ ID NO: 879976 - DNA, 120 bp, Artificial Sequence
  ENSG00000232591_5 (sequence is synthesized)
actgcgaatgtgtgctactatccatcccaggtgaatgtgaacttctttggattccctttattgatggggaattaggagaacgcttatatgctactgctcttcagagaacaattgaaacac

SEQ ID NO: 879977 - DNA, 120 bp, Artificial Sequence
  ENSG00000232591_6 (sequence is synthesized)
ccagaggctctcagggagaatcccttccttgtctgttccagctctacctcctcctctgctgtggacagtatctggaaggtacaccaggaactgctgaggagtggaactaggactctgaga

SEQ ID NO: 879978 - DNA, 120 bp, Artificial Sequence
  ENSG00000232591_7 (sequence is synthesized)
aactaggactctgagacaaaaggggtttgcttttcattttaaactgtattattatttgaattttttaaaaatcaaggactgttcaggtgcaatggctcatgcctgtaatcttagcacttt

SEQ ID NO: 879979 - DNA, 120 bp, Artificial Sequence
  ENSG00000232591_8 (sequence is synthesized)
gtttgagaccagcctggacaacatggtaagaccctgtctctacaagacaaaaaaaaaaaaaaatgccgagcgtgatggtgtgtacgtgtggtcacatttactcaagaggctgagatggga

SEQ ID NO: 879980 - DNA, 90 bp, Artificial Sequence
  ENSG00000232591_9 (sequence is synthesized)
gttgaggctacagtgaactgggagagtgagactctgtcctccaaaaagaagtcaaggaccatgtgattttcctaaatagagggagtaggt

SEQ ID NO: 879981 - DNA, 120 bp, Artificial Sequence
  ENSG00000232591_10 (sequence is synthesized)
gtcaaggaccatgtgattttcctaaatagagggagtaggttatcactacgttacggaataggacatttagcaatgtttattacttactgacttatattcatggcagaccacatcacattc

SEQ ID NO: 879982 - DNA, 120 bp, Artificial Sequence
  ENSG00000232591_11 (sequence is synthesized)
tttttgaatattcatattgagcctgttatgaagcatttcacataggaaaagcaatgtgtgaatcaatgaggaaatgaaactatgtatttattgacggtatttgtgagatatgcaagtgtg

SEQ ID NO: 879983 - DNA, 120 bp, Artificial Sequence
  ENSG00000232591_12 (sequence is synthesized)
cagagtcttctgataacctcagaatgctgatacatttagcaaacctcattcttaaagttggccagataatgacttattttgctgaagtctccaaaaaagctgagttgtgaagcctttgaa

SEQ ID NO: 879984 - DNA, 120 bp, Artificial Sequence
  ENSG00000232591_13 (sequence is synthesized)
aaaacaaaattaaatataagcagcatgttccacattttagacttacttagattcttatctctctgcaataatcctaatgctaattcactttctcagaggtgtccagcgcaggatgggctt

SEQ ID NO: 879985 - DNA, 120 bp, Artificial Sequence
  ENSG00000232591_14 (sequence is synthesized)
agatcatccgtggaattgcttgttctataagctttagttactttgatgactggaagtatgtaagttcagagacatgcattaaatacatgtttctggttttccccaaatgacccatggaca

SEQ ID NO: 879986 - DNA, 120 bp, Artificial Sequence
  ENSG00000232591_15 (sequence is synthesized)
gataggtgcctgtatttattttgtgtcaaatttcatcttattcatttagttggagacatagttatctgatgggttctctggggtaatcatttagaactcctgaactttagcaagaagctg

SEQ ID NO: 879987 - DNA, 120 bp, Artificial Sequence
  ENSG00000232591_16 (sequence is synthesized)
taagaaagtccaagttctttttcttaaaacttcaaataaggttccccagtgagtctggggaaggccatgacattgtcagaaaagctgttccgtatctgtgcctccgaggttcctgcacgg

SEQ ID NO: 879988 - DNA, 120 bp, Artificial Sequence
  ENSG00000232591_17 (sequence is synthesized)
cactgctgaatggccaatttgctgcgaatacgcatcgatcgtctgatgcacggcgctctgcactgaggacaccgtgaagatgaaccgtggttcattccaggggttagctgagttctgaaa

SEQ ID NO: 879989 - DNA, 120 bp, Artificial Sequence
  ENSG00000232591_18 (sequence is synthesized)
ctggaaagtgaacgaccatttatcagtaggtgaaacagaactgtgctggaacacagccagcgggagttcaattaggcagaaacaaatcggggggaaaggaagggatggcgttctgcatgg

SEQ ID NO: 879990 - DNA, 120 bp, Artificial Sequence
  ENSG00000232591_19 (sequence is synthesized)
ggctcaggcaccatctccttagaaacggctgctgcaaagccgccgcaataaatgctctgctgagtctgtccacagccccacccggtagagaggccactaagggacaaagccaggaaactc

SEQ ID NO: 879991 - DNA, 120 bp, Artificial Sequence
  ENSG00000232591_20 (sequence is synthesized)
tggcagctttctctgccacagaaagtgaactggtagcagcaaagctggtttaaatacatcttagaacagaaatagggaagctagcttcttggggagctgttctgtgttcttggcttgttt

SEQ ID NO: 879992 - DNA, 120 bp, Artificial Sequence
  ENSG00000232591_21 (sequence is synthesized)
gtgtgtttggcaagaaatacaatggaaaaagcctctcctatcaaacacaaaggatgctttcattaagtcatccttccttttcattggatcaaatggttttcaaaaatgggatttctgatt

SEQ ID NO: 879993 - DNA, 120 bp, Artificial Sequence
  ENSG00000232591_22 (sequence is synthesized)
caattaaatgatgtggggaaaacttgggagcttccaattaagcttattttcctctcctttaaaattccctccccccatttttctggatgttttataatgtatctactatattcatacaat

SEQ ID NO: 879994 - DNA, 120 bp, Artificial Sequence
  ENSG00000232591_23 (sequence is synthesized)
aggatcagcatgactgtagtgttcctggcttaaccctgagaggttgctgttcccagtgactatctaggctgaagcccatgtaggatttgaagagactgatccaggctttatgagtggctg

SEQ ID NO: 879995 - DNA, 120 bp, Artificial Sequence
  ENSG00000232590_0 (sequence is synthesized)
ggaagatagagttgtactgtgaccacggttacctaggagtctgtatttttagtttaattttttattgatctataaagtggtgcaccagagcaggctagtcccaggtagttaactatgcat

SEQ ID NO: 879996 - DNA, 120 bp, Artificial Sequence
  ENSG00000232590_1 (sequence is synthesized)
aagcagttgcaaagttcgattttgctgtataatattgagccacatattcttcacagtatattttgctcatacctactgcagacttccacatgacagctgaattgcaaactgtaaatggct

SEQ ID NO: 879997 - DNA, 120 bp, Artificial Sequence
  ENSG00000232590_2 (sequence is synthesized)
tttatatccagcccatgaggattttgactgattccattgagcaagctcaggtgaaaaacggaagggccaagacaaattaagtgacttgtccaggatcacacaaccagttattagctctac

SEQ ID NO: 879998 - DNA, 120 bp, Artificial Sequence
  ENSG00000232590_3 (sequence is synthesized)
tgagaaaaaaatacacatctcttgacgcccagatgagtgttttgttttcgttatttagcatttcgagtgcttctgtacaacataccatttgtattctttgaaacaaactcttcggatatt

SEQ ID NO: 879999 - DNA, 120 bp, Artificial Sequence
  ENSG00000232590_4 (sequence is synthesized)
tccaggtgtttttcacatttctgacctgagagaaagtatacctaatggtataagtagacttaaaatctatttaaaattctcaaaagtttctaattctgttcttttagtaactacttaaaa

SEQ ID NO: 880000 - DNA, 120 bp, Artificial Sequence
  ENSG00000232597_0 (sequence is synthesized)
tggcctcgccccagcctctcttgtactgcctttggccaataaccattcatcaagcatttgtttgccatgagcctatgagacaggatcgtctgcccaagtggaatcagaagcatttcacct

SEQ ID NO: 880001 - DNA, 120 bp, Artificial Sequence
  ENSG00000232597_1 (sequence is synthesized)
aagaattgggaagaatttcatgtctgcttgaaaatatgcttttccagggcagttttccctgctcatctataattatggaattgaacaatgctgatctctgactctgtcaagccatgcttc

SEQ ID NO: 880002 - DNA, 120 bp, Artificial Sequence
  ENSG00000232597_2 (sequence is synthesized)
taggtaaaggagcttggtcacactcatttggttactgatacagaaactcaaatctggaagcaactgtgctggaaaagggtagtgcgagaaagggtctttgcagatgcaattcattaagat

SEQ ID NO: 880003 - DNA, 120 bp, Artificial Sequence
  ENSG00000232597_3 (sequence is synthesized)
agtaatacacccaccagggaaggtaggtttgccagagaaaatcgcatgccgagctcaccttgtccgtggaccagcacacaagccatgcctggacacctccctccaccaaggctgccagtc

SEQ ID NO: 880004 - DNA, 120 bp, Artificial Sequence
  ENSG00000232597_4 (sequence is synthesized)
aggggatttcagcttctactcagcagggggaagaaaaatggaccatgttataacaaataacatggcggtgaactctgtggatggtggagttgttctgtgtgctccagttcctaccgagat

SEQ ID NO: 880005 - DNA, 120 bp, Artificial Sequence
  ENSG00000232597_5 (sequence is synthesized)
tgtgcctaactcatcatgaatctcagcagcagcagcatggacaccatcaccagcagaagcgtttgcaagtatccaattatgggttagagactctgcaaggaaattacattcacccagcac

SEQ ID NO: 880006 - DNA, 120 bp, Artificial Sequence
  ENSG00000232597_6 (sequence is synthesized)
agtctccatgaaaggcagcagtggtggaaaatcaggtaagatctctaggcaaggaccagaactcatggcctgtgtaacccagggtttctcaccctcggagcaattggtatttgggctgga

SEQ ID NO: 880007 - DNA, 120 bp, Artificial Sequence
  ENSG00000232597_7 (sequence is synthesized)
taattctttgttatgggaggctgtctgtgaggtgtatggtctttagcagtctttctggcctctgtccataaggagatagtagcattccctctccatatgacagccaaaacagtctccaga

SEQ ID NO: 880008 - DNA, 120 bp, Artificial Sequence
  ENSG00000232597_8 (sequence is synthesized)
cattggtaaatgtcctctgggaagcaaaattgcccctggttgagaatcactatttcagaccatgaaaaaggatttatgttcatcctatgagttttaccaagtccttggcctttgagcttt

SEQ ID NO: 880009 - DNA, 120 bp, Artificial Sequence
  ENSG00000232597_9 (sequence is synthesized)
gagcaggagaattacagggcctgatcgacatgaggacaactctggacatgagaataagaaggaaatcagcagtgggaaggcaatgggaaagatccagggtctttgcagatgcaattcatt

SEQ ID NO: 880010 - DNA, 120 bp, Artificial Sequence
  ENSG00000232597_10 (sequence is synthesized)
catgagacatctggtgactgagttcgcaatggcactgcctcagtgtgtgtgcccataaaaaggcaagctgacagtacccgtctaggacagggttcaccaggcttgtctgtgcctgcctct

SEQ ID NO: 880011 - DNA, 120 bp, Artificial Sequence
  ENSG00000232597_11 (sequence is synthesized)
gctaagatgctctcaagggactgctagattcccaccctctttatttaacagttcttccaacagagaggcagaacctacttcattcagctgctttcctctctccccagtttcagaattact

SEQ ID NO: 880012 - DNA, 120 bp, Artificial Sequence
  ENSG00000232597_12 (sequence is synthesized)
ataattgcccattgcagttgttcggcattcatgtcaatttcagtacaagctggagaattcaggagaagttgtaaggtgtgagggttgggagttgcatccacttgtcagggaaattgcgat

SEQ ID NO: 880013 - DNA, 120 bp, Artificial Sequence
  ENSG00000232597_13 (sequence is synthesized)
gtccgaggcaggtctgaggcctttgctacttggatcgctccagcagaatgcattgagggaggtctccaggaagaaatgtccctccatggccaattgcatgccgcattggggagggaggtg

SEQ ID NO: 880014 - DNA, 120 bp, Artificial Sequence
  ENSG00000232597_14 (sequence is synthesized)
tcaaacaatggtaaagtggatagatagtaaagtgtcttttaccatctcttataaagacaagtgacactctgagataaaaagccacaaggcctcttctaaagtttatatttacagaggctc

SEQ ID NO: 880015 - DNA, 120 bp, Artificial Sequence
  ENSG00000232597_15 (sequence is synthesized)
tgtgactgcatggccacttttctcagcagctatagcaggtcttggaataacattgcttcattcaacatcactttattataatgttgatgagaaaaaatatcgattctcagctaaggccac

SEQ ID NO: 880016 - DNA, 120 bp, Artificial Sequence
  ENSG00000232596_0 (sequence is synthesized)
aagggaggccccaacagcgatggctgcaaacccttggaggtggcattgccaaaagcggacgtcaatagatgtaatgcaaaaatagtgtcttgtgttcaaaaaaggttgggaaatactgag

SEQ ID NO: 880017 - DNA, 120 bp, Artificial Sequence
  ENSG00000232596_1 (sequence is synthesized)
tgaaaggtcaatcaaagagtgaggagctgacagaagagtttgagccacagcttcctgcgagacaggaaaaatctggaagagtgaagggtcacaggagtcaagaggagatgtgttccaagg

SEQ ID NO: 880018 - DNA, 120 bp, Artificial Sequence
  ENSG00000232596_2 (sequence is synthesized)
aggaagtaagacaaaaacagtgcctgctgctcagtcaatgcctgatgatggagtgaacagatttctgctttctgtggccacctctgggccacagaaaggcccagaggttacaagcaacct

SEQ ID NO: 880019 - DNA, 120 bp, Artificial Sequence
  ENSG00000232596_3 (sequence is synthesized)
ctggtctttgaagaaggagcaaaaggacagagaagtatgaaaaggagccccgtttggatgcacccactgagcactgaaggggaggactcttaggtggccccatcctttgcaaacaggctc

SEQ ID NO: 880020 - DNA, 120 bp, Artificial Sequence
  ENSG00000232596_4 (sequence is synthesized)
agtggttctcccgcgctcaccccaaggcccagaatccatgcatacatgtagggtggggcaggccggctcacgctgacacgtccagcctctgcccagctcctctgctggagtctctgcagg

SEQ ID NO: 880021 - DNA, 120 bp, Artificial Sequence
  ENSG00000232596_5 (sequence is synthesized)
cttggtcattccttcactaattcagccgttgtagaaaagccacccagttaacaggtctgagccatttcctctcatcctggggactagaggtgactgccactttgaggccagttaagagtt

SEQ ID NO: 880022 - DNA, 120 bp, Artificial Sequence
  ENSG00000232596_6 (sequence is synthesized)
cttggcccttcctggaaaccctgcactgctgggaagtgggtggacacacacttctgagaatgaattccaagcgaattttcccatcatttctttccccctagcagtgcaaggctggggcac

SEQ ID NO: 880023 - DNA, 120 bp, Artificial Sequence
  ENSG00000232596_7 (sequence is synthesized)
acagggagagaatgtctctctcacatgtcaactcccatggtctcaactaggcctcgggggaaagagaatggggcattccaggatgggaattccagggtgggcattccaaggagtaagagg

SEQ ID NO: 880024 - DNA, 120 bp, Artificial Sequence
  ENSG00000232596_8 (sequence is synthesized)
aattctgggaaggaggacactcgtgatgcatgcatggcccatccagaaggtccaggatcatctccccagcccaagcctttaatcacatctgcgaagacccccctcttcctatagaaggtg

SEQ ID NO: 880025 - DNA, 120 bp, Artificial Sequence
  ENSG00000232596_9 (sequence is synthesized)
acacggtcccaggttctgggaattaggacacagacacctctgttcagctgaccacagccactgggggacccactgttgatcccccatccattctgataaaggctttcatgatgtcagaaa

SEQ ID NO: 880026 - DNA, 120 bp, Artificial Sequence
  ENSG00000232596_10 (sequence is synthesized)
tgaaagaatagtgcacaaaccataggcacacagctcaaggaattatcaggaattgaacatgtccacgtgtgcccaacccagctctccagcacaccttcccagcctcaacccatcatctgg

SEQ ID NO: 880027 - DNA, 120 bp, Artificial Sequence
  ENSG00000232596_11 (sequence is synthesized)
attctgaggttcttggctccagtgaggacgttattgctgagaattagatgctgaagttggcaccatcaaataactagtcctggatgcatgtcactagtagcagccatctcactgcctcag

SEQ ID NO: 880028 - DNA, 120 bp, Artificial Sequence
  ENSG00000232596_12 (sequence is synthesized)
aattctaaaaaaggagagaacatctgattggcaaagcctaggtgatacaaatatctggaattctcatcttttgtaatgggaagtaactctgcttgctgttaagattcacagagctttgga

SEQ ID NO: 880029 - DNA, 120 bp, Artificial Sequence
  ENSG00000232596_13 (sequence is synthesized)
gtaaaccagagtaaaagcaaccaaaacagagtccaagtcagggtccttccatcctcaaaccaggctccagtggtctgctctagctcaggcgtgattagatttgcattttagaaagaaact

SEQ ID NO: 880030 - DNA, 120 bp, Artificial Sequence
  ENSG00000232596_14 (sequence is synthesized)
ttggctaccacatggagaaataatgaggagaagcaaatgagaagaccgcccaaagcagcagttctggcaggagatgggcactgggtctcctagttggtggctgagtgcagatgctggcag

SEQ ID NO: 880031 - DNA, 120 bp, Artificial Sequence
  ENSG00000232596_15 (sequence is synthesized)
gatgtcctgaaggtagaatggagtgcataattctgcaggtgtgatgtatcttcaaatattagaaaagcaggaacatgctgagagcgaaacagaaaaataaatcaaaaagaaatcaaaaga

SEQ ID NO: 880032 - DNA, 120 bp, Artificial Sequence
  ENSG00000232596_16 (sequence is synthesized)
gtctacacagatgacagaacatatccacatccctaagcagctttggagtaaaccagagtaaaagcaaccaaaacagagtccaagtcagggtccttccatcctcaaaccaggctccagtgg

SEQ ID NO: 880033 - DNA, 120 bp, Artificial Sequence
  ENSG00000232596_17 (sequence is synthesized)
ataatcaccagctcctggaggggctcgtgggtaggtatggagagagatgagcaatggtctacacagatgacagaacatatccacatccctaaggaattggctcaggcaatggtgaagatt

SEQ ID NO: 880034 - DNA, 120 bp, Artificial Sequence
  ENSG00000232596_18 (sequence is synthesized)
tggcaagtccaaaatctgatggaggagtctggcgggatggagactccgaaaagagttgcagtttgagtcaaaaggcaagctgtcagtgagctaggaagagccgacgatgttgcagttcaa

SEQ ID NO: 880035 - DNA, 120 bp, Artificial Sequence
  ENSG00000232596_19 (sequence is synthesized)
gtccaaagaccctctgccagcaaacttccctcctgctcggaggagctaaatcttttgttctatttaagccttcacctaattggataaggcccacctgcattatggagctcatctgctcta

SEQ ID NO: 880036 - DNA, 120 bp, Artificial Sequence
  ENSG00000232596_20 (sequence is synthesized)
ctcaaatctactaatttgaatgctaatctcatccaaaaacactgtcacagatacattcagaataatatttggccaatatctcggcccaatcaagttgacacataaagttaacctccacaa

SEQ ID NO: 880037 - DNA, 120 bp, Artificial Sequence
  ENSG00000232596_21 (sequence is synthesized)
tctgtggctctcaagccatttccaggaattgagtagaaactctctctctctctctctctctccccacccaaacaatattccctgaaagctattaattcctgcaagcaggagctcaactca

SEQ ID NO: 880038 - DNA, 120 bp, Artificial Sequence
  ENSG00000232596_22 (sequence is synthesized)
aacaaatgtttctataaatggccagtcagcaatgggcggcttgggagatgtggcatcttgtccctggggaccttcagtaagagaatgcaaatcatctgttccgttgcgtctagccagggc

SEQ ID NO: 880039 - DNA, 120 bp, Artificial Sequence
  ENSG00000232596_23 (sequence is synthesized)
acccactggcttatgcaggagcctgcgccagatgttttcctgaggtctcttcttgctcaaggatctgatgacaccaactcttcatttcttctgaatcaacagctgctgatttcattcaaa

SEQ ID NO: 880040 - DNA, 120 bp, Artificial Sequence
  ENSG00000232596_24 (sequence is synthesized)
taatctaatttgaaattctgtttctggaacacagacagcttcatccgcccaggcagaacaaaggaagtggaacaggggccttaataggagatattttgagtgttttcagacatagaagtc

SEQ ID NO: 880041 - DNA, 120 bp, Artificial Sequence
  ENSG00000232596_25 (sequence is synthesized)
aacaatctgttcattcataagggctctgacctcttgttttgaaggaaaacaggaaaaacaagctgggtacaaagaacataaatattttactttcacccattctccaatctgggctgaaac

SEQ ID NO: 880042 - DNA, 120 bp, Artificial Sequence
  ENSG00000232596_26 (sequence is synthesized)
aggaaacaaatgtctcctctccaccttccccacctccaaacacatctgtgagaagcaacgtggagatcagatgatggaagtggatttaaaaagtaatttgccacttttcaagaaatataa

SEQ ID NO: 880043 - DNA, 120 bp, Artificial Sequence
  ENSG00000232598_0 (sequence is synthesized)
caaactccaaaccaggggtagcagtcatctgaaaaatgcagagactattttaaaggacagacaagtgcctcagatagcatcagagaacaatgcctaaggtgcatggatggaagccagtct

SEQ ID NO: 880044 - DNA, 120 bp, Artificial Sequence
  ENSG00000232598_1 (sequence is synthesized)
gcacaaaatgctgaaaataggtcgttctgagcaagggggtcatggagaagaaagtaccagccctccattccttacgcccactagggcttatgtctgggatcctcacagagactagaagtg

SEQ ID NO: 880045 - DNA, 120 bp, Artificial Sequence
  ENSG00000232598_2 (sequence is synthesized)
agtccctggcacttcctggattgtcgagcggctccctgcctctgcccttttgtattcggagctacagccttgcctcccctgttcccaccaccctgaccacccctcaacaccatcccgctg

SEQ ID NO: 880046 - DNA, 120 bp, Artificial Sequence
  ENSG00000232598_3 (sequence is synthesized)
tcagctccgccgccaactgaggcgacacctgttcatggaaaccctgtgagcctcttctgtatccatacacaataggtaatgttgttttacgtgtttcaaaacatcagtgttgtccaacag

SEQ ID NO: 880047 - DNA, 120 bp, Artificial Sequence
  ENSG00000247157_0 (sequence is synthesized)
aggctgcccgagccagcagtggcaacgcgctcgggtccccttccacactgtggaggctttgtcctttcgctctttgcaataactcttgctactgctcactctttgggttcacactgcctt

SEQ ID NO: 880048 - DNA, 63 bp, Artificial Sequence
  ENSG00000247157_1 (sequence is synthesized)
gtcttgctctgtcgcccaggctggagtgatgaggcgcgatcatcactccacctgggctcactg

SEQ ID NO: 880049 - DNA, 76 bp, Artificial Sequence
  ENSG00000247157_2 (sequence is synthesized)
cctggaattacagggaatacaaccaacctcttcatcacatgaagacatttttttcatgcttttccatgttcctgaa

SEQ ID NO: 880050 - DNA, 120 bp, Artificial Sequence
  ENSG00000247157_3 (sequence is synthesized)
acatgaagacatttttttcatgcttttccatgttcctgaaatgccctcccctaggagcttcctccaatttatctactctttcacattcaagaagagttgaatcaagatgtttaagtctct

SEQ ID NO: 880051 - DNA, 120 bp, Artificial Sequence
  ENSG00000247157_4 (sequence is synthesized)
ggagagttaagtattttgtaggaggaagaatatcaaggttgtggaaaaaaaaaaaaaaaaaccttgttgtggctgagaaactgggctggagtcaggaggctggtgatggccccagttcta

SEQ ID NO: 880052 - DNA, 120 bp, Artificial Sequence
  ENSG00000247157_5 (sequence is synthesized)
ccactaactagccatgtgcctacgatgcttcatttcacctcttgagatctaaatttccccgtacgtcaaagcaaagagacagatctcgctttgtcgcctgtcaacggctagagtgcagta

SEQ ID NO: 880053 - DNA, 120 bp, Artificial Sequence
  ENSG00000247157_6 (sequence is synthesized)
gcgtgatcatagcttactgcagcctcgaactcctgagctcaagcaaccctccctcctcagccttcccaggtctcctgatttcaagtacagttcttgccaacacacagtggtaaagggtat

SEQ ID NO: 880054 - DNA, 120 bp, Artificial Sequence
  ENSG00000247157_7 (sequence is synthesized)
gattacctaagccttagcacagaaggtagcaccccttactggtgagctatcatgaaactatgcgacaattttctccatcttttttagagttgttttccttgtcttcctcctcatcacgat

SEQ ID NO: 880055 - DNA, 120 bp, Artificial Sequence
  ENSG00000247157_8 (sequence is synthesized)
tattattgctttttcattcagcaaaaaatctggtaggagactgcacagaagcatgatcacttgctatcaacagtgtaaccctacctaacttccctaatccctagcaaatgaaggaaaaat

SEQ ID NO: 880056 - DNA, 120 bp, Artificial Sequence
  ENSG00000247157_9 (sequence is synthesized)
catatacaggcactgacaaatagcaacacaagaaagggcaacaaaattactaaagagtaacgccatcctccccaactcaaaccagggaaagtaagcttgcctaggaacttaggctgaaac

SEQ ID NO: 880057 - DNA, 120 bp, Artificial Sequence
  ENSG00000247157_10 (sequence is synthesized)
tcaccacagtgccaaaaacctgttttcttgaaaagaggtagtgcagatagtgaatccactgagccacatagggtgggagtttgctttaagtgcttttcttcttgcccacaaactagcgta

SEQ ID NO: 880058 - DNA, 120 bp, Artificial Sequence
  ENSG00000247157_11 (sequence is synthesized)
ggctgtgactggctccagctgatccttatcaaggcagctagttctgagggcttggttaagaagctcttcgtttacttaagggagcaaagagaagacacgtgaattggaaaaggatatcta

SEQ ID NO: 880059 - DNA, 120 bp, Artificial Sequence
  ENSG00000247157_12 (sequence is synthesized)
aaatgtcccctaaggcttcataaagttgacatctttcgtcatgacttctacagttcaggaaaccaggtagcagtaaacaattatgaactctactcactcgccctatcactttcacatcaa

SEQ ID NO: 880060 - DNA, 120 bp, Artificial Sequence
  ENSG00000247157_13 (sequence is synthesized)
tgtccctgctccatgtctgctgatctgcaggaagcagagagagcagggctgttcgactccgtttccctaatgatgtcccagcctctttcagttctgtgagcaaaaccaaggctgggtttg

SEQ ID NO: 880061 - DNA, 120 bp, Artificial Sequence
  ENSG00000247157_14 (sequence is synthesized)
ttagcacagcctgtgacagagcctgggcaggtccttgtattctggcaaaggctgaaccaaagagcagtctcattgcactatttactttctttttgttatactctctctggctcagcacaa

SEQ ID NO: 880062 - DNA, 120 bp, Artificial Sequence
  ENSG00000247157_15 (sequence is synthesized)
tcagtgcagtccgatgctgcagaagacagactgttccctctctcttcccacagtgtttctcgtctaccttttgcccttattcaatagtgggaagaaatttcttcttgacctcagcaatcc

SEQ ID NO: 880063 - DNA, 120 bp, Artificial Sequence
  ENSG00000247157_16 (sequence is synthesized)
tttctgacaattaccatatgcctcaagagacctgggaagcttcgccctgtctggcacagggagacaattcctatccagaataaaactgaaagctttcaaaaaaaaaaaaaaaagaagaag

SEQ ID NO: 880064 - DNA, 120 bp, Artificial Sequence
  ENSG00000247157_17 (sequence is synthesized)
aagaaaagaaagaaagaaagaaagagaaaaagaaagaaaggaaagaaagaaagactgtaataagttaccttgtctctgggagattctgtaacaatgaattgcacaggctaattatcccct

SEQ ID NO: 880065 - DNA, 120 bp, Artificial Sequence
  ENSG00000247157_18 (sequence is synthesized)
ctattaaaaagtttttaaaaggttcctcttcatcatttagagtatgttgccttggcaccggcctggagagggttagcacaggagccaggctgagtttaattaaagaatttccgtgtgtca

SEQ ID NO: 880066 - DNA, 120 bp, Artificial Sequence
  ENSG00000247157_19 (sequence is synthesized)
gcagcaggagactttgattaaagtgagaagcagccaagattccgggaagcgcgtctttctcctgtctcctccccaagatgtgcgggtgtccttcccccaacaccatggaagaaggggtcc

SEQ ID NO: 880067 - DNA, 120 bp, Artificial Sequence
  ENSG00000247157_20 (sequence is synthesized)
aggaagaaaatgtcacacttgcctgtgacccccacctggtctgcagaaaggcagagaagacctgcttatggaggaaaaagacggcctctgtctggagcttctatgaattacataacgaat

SEQ ID NO: 880068 - DNA, 120 bp, Artificial Sequence
  ENSG00000247157_21 (sequence is synthesized)
aagtgatttcactacaaagcagtgaaatttttaaaagttaaccagtggcagaagtgtcaggacagtctgcacgggcaagaatgatacctaaatcactactcaggcacaggagagagcagg

SEQ ID NO: 880069 - DNA, 120 bp, Artificial Sequence
  ENSG00000247157_22 (sequence is synthesized)
actggcatggctggcagttctctatgtagcaggcgctgtactttggccaagccaatctccatttgcaacatgtttctcccttacttgactccactatagagagagtaaaagctaaatttt

SEQ ID NO: 880070 - DNA, 120 bp, Artificial Sequence
  ENSG00000247157_23 (sequence is synthesized)
gatgttccacccccacccccttattgatatgagaaataagtcttctggtgcattcctctccaatttctgtcttctttccacttgagctgccaggagatgcaacagtcgttttgaaaccaa

SEQ ID NO: 880071 - DNA, 120 bp, Artificial Sequence
  ENSG00000247157_24 (sequence is synthesized)
aaagataaaaactgcatactaagaatgcatgaacctaaagatttacagagcctgggacactggggatacttggagtcaatgtatcagccttggactgattcccatgggacttcttattac

SEQ ID NO: 880072 - DNA, 120 bp, Artificial Sequence
  ENSG00000247157_25 (sequence is synthesized)
ccaagtgaaacagtccttcctttcatctgttaagccactatggtatgttttgctggttctcgtagccaaatacagttttgactgctatacccatttttttcttatggatgttcatgactt

SEQ ID NO: 880073 - DNA, 120 bp, Artificial Sequence
  ENSG00000247157_26 (sequence is synthesized)
cttttatattgtggattgtattgtgaatatgtatcttatttgttgcaaatattttctcagtctttttgtcctttaatttaagatattattcaatgcttgtaaggtttttatgtttatgct

SEQ ID NO: 880074 - DNA, 120 bp, Artificial Sequence
  ENSG00000247157_27 (sequence is synthesized)
gttatatatatccattttttctgatttattcaattgaaaaattgagaaacgtaattgataattttgaacattatcgaagaagacatcaataaaacaaaacatagtctagcaattacaaaa

SEQ ID NO: 880075 - DNA, 120 bp, Artificial Sequence
  ENSG00000247157_28 (sequence is synthesized)
tttttttttttttgcttttttagagacagggtcatgctctgtcacccagctcatagctcactgcatcctcaaactccagggcccacgggatcttcctgccaagcaactgggactacaggc

SEQ ID NO: 880076 - DNA, 120 bp, Artificial Sequence
  ENSG00000247157_29 (sequence is synthesized)
tcagcccaccatgcctggctgttttttttcttttggtggagatgaggtctcactatgttgcctggggctggtcttgaactcctggtctcaaggaaatcctcccacttatgactcccaaag

SEQ ID NO: 880077 - DNA, 120 bp, Artificial Sequence
  ENSG00000247157_30 (sequence is synthesized)
ttacaggcgtgagccaccttgcccagccatgttcattatcttgattgtgtcagttgcctctttggtgtaaaataggtcgaaatttactatgttgtacactttaaaaatctattaataggt

SEQ ID NO: 880078 - DNA, 120 bp, Artificial Sequence
  ENSG00000247157_31 (sequence is synthesized)
taataggttaaataacatgaaataattgttttttaattcctaatatttgcctagggaatacaaccaacctcttcatcacatgaagacatttttttcatgcttttccatgttcctgaaatg

SEQ ID NO: 880079 - DNA, 120 bp, Artificial Sequence
  ENSG00000247157_32 (sequence is synthesized)
ccctcccctaggagcttcctccaatttatctactctttcacattcaagaaggtaatggagttccatcttcctccattaactcccccatactgaaatctgctatatctttcattcatttga

SEQ ID NO: 880080 - DNA, 120 bp, Artificial Sequence
  ENSG00000247157_33 (sequence is synthesized)
atcttattgttacagtacatacgatggaaatctataatatttttattgctatagttatcatttcagttgttatgttttctgcttatttttgtatcagagttgaatcaagatgtttaagtc

SEQ ID NO: 880081 - DNA, 120 bp, Artificial Sequence
  ENSG00000247157_34 (sequence is synthesized)
gaatgagctatggaagatgggagagaagaatgaggatggatgactaagagcaatgaaagcttacaaagaaacccaagaaggcgaaatatttgcttatgaataaacaggaagggaagaaat

SEQ ID NO: 880082 - DNA, 120 bp, Artificial Sequence
  ENSG00000274002_0 (sequence is synthesized)
agattttgccatagagaaatctcttgcttttcaatctctccaatttgggaaccaaccaaccaaccagtctaccaaccagccaacgaaccaactactcaaccggtcaactgactcctcccg

SEQ ID NO: 880083 - DNA, 120 bp, Artificial Sequence
  ENSG00000274002_1 (sequence is synthesized)
gagacaaagattggagaattgcttgaatctggtacaaagactaaagcaaagtaatactgtatcatgcacagacctcaactctgtgaagacagtccctcatgctgtaggaagtcagccttg

SEQ ID NO: 880084 - DNA, 120 bp, Artificial Sequence
  ENSG00000274002_2 (sequence is synthesized)
aatatctaggcttaggggaggctgagaaaggtcaccactggagaagtaagcggttggggcaggtcaggatccagggctctcaattcttatggagagattttgcttttttaaaacatcaga

SEQ ID NO: 880085 - DNA, 120 bp, Artificial Sequence
  ENSG00000274002_3 (sequence is synthesized)
ctagaaaacttccttgtgccccaaatcacatcactgatgtgatttctatcactatagctgagttttgtctatcctagaactttgtgtaaattgtccttttcttttgactttatgtagttt

SEQ ID NO: 880086 - DNA, 120 bp, Artificial Sequence
  ENSG00000274002_4 (sequence is synthesized)
ttttctcatgtggaagaaaaagaattattgtaggtttatggtttttaaaaaatattcaaatcggattcatctgacatttattttggtgtagtgtgtgaaaggcacagatctaatctcatt

SEQ ID NO: 880087 - DNA, 120 bp, Artificial Sequence
  ENSG00000274002_5 (sequence is synthesized)
tattttctcccagagagctacctggttgtttcaacatcatttattgacaaatgtatcttttttctcactggtttaaatgccacctttatcatacattaaattcccaagtgtgctcaggta

SEQ ID NO: 880088 - DNA, 120 bp, Artificial Sequence
  ENSG00000274001_0 (sequence is synthesized)
tctgtttttacaatggtgggattcgtattctttcatgcaaaagtagtggcagtaaaaaaaaaatgaaaaagaaaatatttcaaaagaatgaagttgtcagggaagagagtttgttatatt

SEQ ID NO: 880089 - DNA, 120 bp, Artificial Sequence
  ENSG00000274001_1 (sequence is synthesized)
ggttctcagtcttggctgcaaatcagaactgcaagtgcaactgaaaaaaaaaataattaatgtagagactctatcccaaatatacattgaatcagaatctctaggagttaggcctgagca

SEQ ID NO: 880090 - DNA, 120 bp, Artificial Sequence
  ENSG00000274001_2 (sequence is synthesized)
tgttttgctttgcttttttgttttgttttaacctctatgtatgagttagatgcataattaagtttgaaaaaataaaaacaccctattcccaagccactcaaataaaagctgttctttgga

SEQ ID NO: 880091 - DNA, 120 bp, Artificial Sequence
  ENSG00000218672_0 (sequence is synthesized)
atgcgggtgtgaatgtgtacatgtacacgaatgtgagtgtgagtgtgcatgagcgtgagcgtgcgtgtgcgtgcgagtgtgcacgagcgtgactgtgagtgtgcgtgcgtggaagcgcgg

SEQ ID NO: 880092 - DNA, 120 bp, Artificial Sequence
  ENSG00000218672_1 (sequence is synthesized)
cggggagcctggctgaaggcctgctgcctgcatggctgtcagagaaaaacagaagtgggagcctgctgcgggctccgagaggacttgatgggagccctggcgcgcgctgggcaccgcgcg

SEQ ID NO: 880093 - DNA, 120 bp, Artificial Sequence
  ENSG00000218672_2 (sequence is synthesized)
gagaacaatattgccaagaatatctggatggatggaggtggccggcaaatcgtcagaagcaactcagacagtccagaggaggatggtgcagagccagaggaggcacagggaggcggcagg

SEQ ID NO: 880094 - DNA, 120 bp, Artificial Sequence
  ENSG00000218672_3 (sequence is synthesized)
cagatctgagaggcatcaccaaggcagcgctaaggaaggagggtagggacagtgactgcctcgggctgctgcagctcaggaggccgaatgatgcccttcaccaagcaacacacgattata

SEQ ID NO: 880095 - DNA, 120 bp, Artificial Sequence
  ENSG00000218672_4 (sequence is synthesized)
ggtttaattgttttcaaaagacttcgccctgctctgtaggattggcggctcgattggcattctgcctgcttcacagatgtgccagccgaggcttggacaaatgcagtaatttgcctgtga

SEQ ID NO: 880096 - DNA, 120 bp, Artificial Sequence
  ENSG00000218672_5 (sequence is synthesized)
tcttgtagctagcaagggctgaaaccagaactagggcctctgctccaaactgagcgctgttttgactgttccacagctacttcccaggaccccacagaacagccaatgcagggaactgtg

SEQ ID NO: 880097 - DNA, 120 bp, Artificial Sequence
  ENSG00000218672_6 (sequence is synthesized)
ggctcctcccacagtttcccagacccccgaggtcccagcactcacactgcggggccgacaaacagcaggtgtccttgcgtctgactaaaatgacatccacttagtgtggtgacattggtt

SEQ ID NO: 880098 - DNA, 120 bp, Artificial Sequence
  ENSG00000218672_7 (sequence is synthesized)
attctgggttgcccagatgcttaactcgttgttgaatgtgagaactggggagaactaatttcttcttaattcatgtcctctttgttagtggaacaatttcatttcaaaatgaaaacacac

SEQ ID NO: 880099 - DNA, 120 bp, Artificial Sequence
  ENSG00000218672_8 (sequence is synthesized)
ttgggagaaatttttaaaaagggattctagtagtgaagagatggagaacagctgttcaggaatctttattcctttccactctgccccagctccctggatcctaccccagcaccccaggcc

SEQ ID NO: 880100 - DNA, 120 bp, Artificial Sequence
  ENSG00000218672_9 (sequence is synthesized)
atttaatcactctgttccctgccctttctgagctcttccttccttaattgctcataactagcatctcaacacttcatgattgtctcccagatacgggttggggttgtcatccagtgggaa

SEQ ID NO: 880101 - DNA, 120 bp, Artificial Sequence
  ENSG00000218672_10 (sequence is synthesized)
cctgggttttctagctggtgaagacactcctgcaggcatgaaccttgttttggtttggttgttactctctgtttccgcataccctccacagtgcttgagacataatagtagctcaacaga

SEQ ID NO: 880102 - DNA, 120 bp, Artificial Sequence
  ENSG00000230365_0 (sequence is synthesized)
cagaactctgcattttgaagaagctttggaagttgaggcttgaacttggcctttaagaacaacttcaggcacgtctcagcatgcctccctctcatggaagttcccaggaagcccaccatg

SEQ ID NO: 880103 - DNA, 120 bp, Artificial Sequence
  ENSG00000230365_1 (sequence is synthesized)
ggagccggctgattacacaaagaacaaaggtatttctatgtttggttttgctcccttatctgtgcagctgcagcttgatttttcaggctgtttctatgtttaaaagaattctaccaagaa

SEQ ID NO: 880104 - DNA, 120 bp, Artificial Sequence
  ENSG00000224863_0 (sequence is synthesized)
ggcatagaggagatgctcagcaaatgccagctgccatctccccccaaccccatgctacatctaactgtgtctcagttttctgctgcacttagaggataaggatgagagctgagggtgggg

SEQ ID NO: 880105 - DNA, 120 bp, Artificial Sequence
  ENSG00000224863_1 (sequence is synthesized)
agagaaggaagagcagcagcagtagcagcttcaggaggctcctgatcacttagaagagatgaaggctgagctacagtaggagagactcaggttaaccctgagagggacttcccatactga

SEQ ID NO: 880106 - DNA, 120 bp, Artificial Sequence
  ENSG00000224863_2 (sequence is synthesized)
gaccctggaggaagccacatttcaaaggccccgcgaaacattcaaggaccttcttccaagggcacaatactgagcaacatggacaaggtctggccctatggtaaagtcaggtctggatca

SEQ ID NO: 880107 - DNA, 120 bp, Artificial Sequence
  ENSG00000224863_3 (sequence is synthesized)
tggaattgaatggggtgtgttgccaggcacccgcatgaggggctggctcctccccgtgaattctgggcacagacacccagacctgagcaggcccctcaccccacagcgactggggagccg

SEQ ID NO: 880108 - DNA, 120 bp, Artificial Sequence
  ENSG00000224863_4 (sequence is synthesized)
agcccgagtccctcccacctgctccctcggtttctgagggtctgtctcatcctgcagctggacagacgtgatcttcagccccaagttacagacgcttagagaagctggagacttgcacaa

SEQ ID NO: 880109 - DNA, 120 bp, Artificial Sequence
  ENSG00000224863_5 (sequence is synthesized)
tgtctcagaggaaagagagccagaacctggacccgtgttgtaccccaaccaaaccctccatggtggaaggaataggagtgggaaggggaggaggagacatatggtccaggaggttccata

SEQ ID NO: 880110 - DNA, 120 bp, Artificial Sequence
  ENSG00000224863_6 (sequence is synthesized)
tgtacccacacatggacctcaaagaggcccccacagcaagacagcaaatgacatccacagtcacagatcacggagtgatttcagatgaagatggtgctggcaggtagttgtcacgagtca

SEQ ID NO: 880111 - DNA, 120 bp, Artificial Sequence
  ENSG00000224863_7 (sequence is synthesized)
gaggttaggggtcagcactggagctggcgctggaggtggggaggttgatgactccaaacatcagctcaggagatactagagaaagcccaagccgaaaagaagtctgcgcctagcataggg

SEQ ID NO: 880112 - DNA, 120 bp, Artificial Sequence
  ENSG00000224863_8 (sequence is synthesized)
cttcccatttattcagtccttcgagctggtatctgccaccacttttccccaggctaattccagccaaaatagaattctacctccatcttaaaatctgcaaatatttaacctaaagccaaa

SEQ ID NO: 880113 - DNA, 120 bp, Artificial Sequence
  ENSG00000224863_9 (sequence is synthesized)
ctaagagcagagggcaagggctgcctgagccttgtgaagctcaattctgccccctggtgcccagaatgccgcgccagcaatgggatgcaggaagaagaggcaggagacacctgaggtctc

SEQ ID NO: 880114 - DNA, 120 bp, Artificial Sequence
  ENSG00000224863_10 (sequence is synthesized)
ttaccttttccaagctactcagacctccctcttacagggcagggaacacagggcaccagccctactaacccaatctgaggggaaactctgaggctccctctcctgcagagatctcagact

SEQ ID NO: 880115 - DNA, 120 bp, Artificial Sequence
  ENSG00000224863_11 (sequence is synthesized)
ctgtggtagagttggtgtggggggacacgtgacgtcagcaatagccctgtccatccagcacctggacaccccgagtggttccttctatgggaggcagaggcagggctgccccctctgctg

SEQ ID NO: 880116 - DNA, 120 bp, Artificial Sequence
  ENSG00000224863_12 (sequence is synthesized)
tgcaattcctggggtcttcatctgagttaaattcttttaagtcaggatttttctggctgaaatttcacatttgtgttcagtgggagtactcaaaaaatgtagcatgcatggatgaattcc

SEQ ID NO: 880117 - DNA, 120 bp, Artificial Sequence
  ENSG00000224863_13 (sequence is synthesized)
atgggaggcccatatctgggctcaccagccctgccatctttgtcacagcctctgtccaggccaatgtgtcctccagctcagcttactccttcattcattttttcaggaaacattcaagga

SEQ ID NO: 880118 - DNA, 79 bp, Artificial Sequence
  ENSG00000224865_0 (sequence is synthesized)
ctcttgcacacggtggaagctttgttttttagctctttgtagtaaatcttgctgctgctcgttgtttgggtccacagtg

SEQ ID NO: 880119 - DNA, 120 bp, Artificial Sequence
  ENSG00000224865_1 (sequence is synthesized)
cctgaggccagcaagaccacgaacccacggggaggaatgaacaactccccacgggaggaacgaacaactccccacaccttaaaagctgtaacactcaccgggaagatctgcagcttcact

SEQ ID NO: 880120 - DNA, 120 bp, Artificial Sequence
  ENSG00000224865_2 (sequence is synthesized)
gctgtaacactcaccgggaagatctgcagcttcactcttgaagccagtgagaccacgaacccaccagaagaaacttcgaatacgtccgaacgtcagaaggaacaaactccagacacacca

SEQ ID NO: 880121 - DNA, 120 bp, Artificial Sequence
  ENSG00000224865_3 (sequence is synthesized)
tgagtgggaggagaggaggcaacgtttggtgaccagcagaaacagagattgatagactctttgatagaattggaattaggcataattcttcaggagtgcacctgggatgcatggcaaagt

SEQ ID NO: 880122 - DNA, 120 bp, Artificial Sequence
  ENSG00000224865_4 (sequence is synthesized)
ttatcctcacaggcttccctccctggctggtatcaaccatgtatgaggaacaggtggagttctccttgtccaggcctgacacccaggcttactgtggaattaaagagctgtggacagtag

SEQ ID NO: 880123 - DNA, 120 bp, Artificial Sequence
  ENSG00000224865_5 (sequence is synthesized)
cctgaacatccagattgtcaacagccaaagacaagatggccacctggaagaggagctgggggacagttctggacaaattcaagtcaggtttgctggcttttccaccatgggcagatgatg

SEQ ID NO: 880124 - DNA, 120 bp, Artificial Sequence
  ENSG00000224865_6 (sequence is synthesized)
ccacagagaggggttatcagtgagcagtaccatgcaacatgcagtgcagcagaaacaacagctaagaaaagacatttcctcatgattaatttcagaccatacatctttggcaagagtttc

SEQ ID NO: 880125 - DNA, 120 bp, Artificial Sequence
  ENSG00000224865_7 (sequence is synthesized)
acagaaacttctcatcgcatcttatcaggcggcacacgattctgttttgtcttggaatgaaggatgctgactttgatcacttgcttgccgtagtgtctgccagccgtctccaccatcaag

SEQ ID NO: 880126 - DNA, 120 bp, Artificial Sequence
  ENSG00000224865_8 (sequence is synthesized)
ctactcttttcttctttcagggtgtggctgtgctaggaaagagacttggcccacagcctcacagtgattcagaagacgctgggtgaggacctctgtgtccctgctccaaggaccctgaga

SEQ ID NO: 880127 - DNA, 120 bp, Artificial Sequence
  ENSG00000224865_9 (sequence is synthesized)
tgacccatcccaggacactcaatcctgcctgcagatgctaggctctgaggagatgcctgctatagcaccagcacattctgcagacatgttttgaaatgtgttaataaataactggagaac

SEQ ID NO: 880128 - DNA, 120 bp, Artificial Sequence
  ENSG00000224865_10 (sequence is synthesized)
cagtcagtcccaaagattctgaggaagagaagacaacattgcaggatgagctcttctccccttttgtccccaaaacttgggccaggacatttcctcatgattaatttcagaccatacatc

SEQ ID NO: 880129 - DNA, 120 bp, Artificial Sequence
  ENSG00000224865_11 (sequence is synthesized)
ctcaggtctccacactccatgctcattgtctcatgctgcccaagctcctcatctccgtggagccccacacaccatgccgggtttagccctggccaccctctcatgcctctgtcacagcct

SEQ ID NO: 880130 - DNA, 120 bp, Artificial Sequence
  ENSG00000224865_12 (sequence is synthesized)
cagcctcgatatactgttggtctccaacacctccgtgggccactgcatgtcccctctgctctggcacaggtgcctgctcttctaggtctccctaatggtttgcggattgaatagtttaag

SEQ ID NO: 880131 - DNA, 120 bp, Artificial Sequence
  ENSG00000224865_13 (sequence is synthesized)
ctctgccccctgccttctctgcaggaatgctggctgatggcccctgcctcatctccaggcccccatgtcttcaagatgcttgtttacccagttgccacagcctccccaggaactcgtggg

SEQ ID NO: 880132 - DNA, 120 bp, Artificial Sequence
  ENSG00000224865_14 (sequence is synthesized)
agcaagctctgcatggctgacagccccatttagaagagggcgctgtggaatgaatggtcccccctgcagctcagcctcatctccttaatggatcctaattacccctgtcctgcttatagc

SEQ ID NO: 880133 - DNA, 120 bp, Artificial Sequence
  ENSG00000224865_15 (sequence is synthesized)
actgtctagtagggcggggacgcaggaactttcagtcagtcccaaagattctgaggaagagaagacaacattgcaggatgagctcttctccccttttgtccccaaaacttgggccagatt

SEQ ID NO: 880134 - DNA, 120 bp, Artificial Sequence
  ENSG00000224865_16 (sequence is synthesized)
aatcagataagggagaaggaataccagggttctgcttttaagtcacatctactcagaacaaaggagtgaaaccttcccctcctctgctacgaatatagtctcacatgctctaggaattaa

SEQ ID NO: 880135 - DNA, 120 bp, Artificial Sequence
  ENSG00000223487_0 (sequence is synthesized)
tcacctgtgaagatggtaattcctaccagtgctacagatgtcactgcaaatggacaagccaagtctagaagacgctaggtcgggattggacagccagaggctggaagatgattctaagac

SEQ ID NO: 880136 - DNA, 120 bp, Artificial Sequence
  ENSG00000223487_1 (sequence is synthesized)
tctgctaggttctgaggattcagagaatgaattatttcctttccactaagaagtcggttagaacttcaatcgagagaacacacagagcaaactgggtgatcaacctgccttgtgaaaaca

SEQ ID NO: 880137 - DNA, 120 bp, Artificial Sequence
  ENSG00000223486_0 (sequence is synthesized)
gtgcacaggcggaagcgggggagggcgggggacgccaggcctaaagcgcctcgtgggtttagagaactcagagagggcaccgggtgggggtgggaagaagactcaacccgtagctaaatg

SEQ ID NO: 880138 - DNA, 120 bp, Artificial Sequence
  ENSG00000223486_1 (sequence is synthesized)
tttggcctttggctattttttaaggaaacgaatctcagggaggtcggggcgcgggggatgggggcatcatcgcgcctcggagatgggaagcgagttcccctccgctttctgggaaaagcc

SEQ ID NO: 880139 - DNA, 120 bp, Artificial Sequence
  ENSG00000223486_2 (sequence is synthesized)
ttgtctcccttctttcccctccccccatcctgctgagggtttgcgttgacccatctctccgctcgggaccggcaggaggacggagccgcaggggctgaccgcggcccagaggctgcccag

SEQ ID NO: 880140 - DNA, 120 bp, Artificial Sequence
  ENSG00000223486_3 (sequence is synthesized)
gggtcgcgctgctgccggcctgcgcttccgcactcccgggttcggtgcgtcgcctctcgcggcagcgcctcgcttcttccagactgtaattccacactcccgcaagcgctggggctgcgg

SEQ ID NO: 880141 - DNA, 120 bp, Artificial Sequence
  ENSG00000223486_4 (sequence is synthesized)
aatcgtttgagggagttggaactgcatcagatgagcacgccgggagacacgaaaattggacacgtggagaattagccctgctggagaagcgctgggtgcagactcaaacaatggtttcca

SEQ ID NO: 880142 - DNA, 120 bp, Artificial Sequence
  ENSG00000223486_5 (sequence is synthesized)
gcgccgaagctgaggcatcaccttccccacctccaccctcaaatggcagctgcctctatatacagcgggcacaccccttcactacccaccccctcccccaaagcctggttagggacctat

SEQ ID NO: 880143 - DNA, 120 bp, Artificial Sequence
  ENSG00000223486_6 (sequence is synthesized)
gtgggctgcacgctctggagccccttgcccggacacaaaccctaggtgggcctgggctgcccgctgagtagctcattgcgcctgggatcccctgggatttagaagtatagggctctctat

SEQ ID NO: 880144 - DNA, 120 bp, Artificial Sequence
  ENSG00000223486_7 (sequence is synthesized)
ttttccctaggaaggtcctgtctcaaagatgccacccccaaaaattaatgtgtaaaaacccaaccaagctccagtctctgtgtcctttggcaaatctatctttcctagggcatactttcc

SEQ ID NO: 880145 - DNA, 120 bp, Artificial Sequence
  ENSG00000223486_8 (sequence is synthesized)
taagctgctgggaccttgccccccatctgatgagccatacgcaggtggtctggcctcttcagagcagcttcctttagttattgtcttctccagaggccccatcctccacggcagccctaa

SEQ ID NO: 880146 - DNA, 120 bp, Artificial Sequence
  ENSG00000223486_9 (sequence is synthesized)
tcttagccccccagcctctctgagcccccatcccacccccacactgcgctgagctggcagcagccacagctcccccaggcagttcctctctcactgcgcggcctgtgcatctcgctgggg

SEQ ID NO: 880147 - DNA, 120 bp, Artificial Sequence
  ENSG00000223486_10 (sequence is synthesized)
cacacactccgcacagaagctccctcgcctcctggagctggtttcctcttacaggctccccttagagctgctggtgctgtgacaacgcctgcatctctgtgtctccctgcagcgctgcga

SEQ ID NO: 880148 - DNA, 120 bp, Artificial Sequence
  ENSG00000223486_11 (sequence is synthesized)
ctctcgcagggccgcagttcagttctggcctgcagagcttctacactgcaacttgaatatgggaatggggtgggcatcgtgcaagggagcagtcacactcaagccaggaggcagggacaa

SEQ ID NO: 880149 - DNA, 120 bp, Artificial Sequence
  ENSG00000223486_12 (sequence is synthesized)
aagggtgtgcgattcagggagggaaacactgaggacaaccctcagaaagcagtgcaggatttgcagctaaagactcaaaagagggagagaaaacgaggaaaaggctgttactaggtcgtg

SEQ ID NO: 880150 - DNA, 120 bp, Artificial Sequence
  ENSG00000223486_13 (sequence is synthesized)
agtcctgaagtgtaggcctttctcctcccaccccgtgggttgccctaggggaaggccagaagaggcctcaggtgtctgcactgtgtcctgtgcagttcctagggccatgcacttccggtg

SEQ ID NO: 880151 - DNA, 120 bp, Artificial Sequence
  ENSG00000223486_14 (sequence is synthesized)
aggctgcactttactccaagcaggagtcagaagcatggaattcagtggccgcaggagctcaagtcggctgcagccctttcaaagagggaccccgaagaggcctttctgccaccccagccc

SEQ ID NO: 880152 - DNA, 120 bp, Artificial Sequence
  ENSG00000223486_15 (sequence is synthesized)
cagagaggctatgaggctctacaagcagcagagagaatgatacggagaaaaatgagaggaaacgctattaaacttgcttcctctaaagagcgctacccaccgttttctctgaactgtacc

SEQ ID NO: 880153 - DNA, 120 bp, Artificial Sequence
  ENSG00000223486_16 (sequence is synthesized)
taaaaagtcaggagagaactcgttaacttttgtttggtttaacattgccagcttcaagtcaaccgtaggccccccgaaggttttgtaaaatatttaatctagctcagacaatttcctgca

SEQ ID NO: 880154 - DNA, 120 bp, Artificial Sequence
  ENSG00000223486_17 (sequence is synthesized)
gtccctaaccagaccaccccacttactgagccgctgccaaaaaggatgcttgactgcagactggcaaccagaggccttccagtcgcctggctggccttgacctccactcgaggcgccagg

SEQ ID NO: 880155 - DNA, 120 bp, Artificial Sequence
  ENSG00000223486_18 (sequence is synthesized)
aaagacccttcccggaatcccgagagaccaagacctgggtaatcctggaggtctaaacccgtgaggaagcccaagaaatggagttaaagacccttttcgcacaaccgattgttgtctgtg

SEQ ID NO: 880156 - DNA, 120 bp, Artificial Sequence
  ENSG00000223486_19 (sequence is synthesized)
tgaccttctgcggcccttgccctctctgaaccctctaaaatgggcatgaggatgtctcaccttcctctgggtgttatgcattttgaagcgtgggcactatgggagaggctgacgctctgt

SEQ ID NO: 880157 - DNA, 120 bp, Artificial Sequence
  ENSG00000223486_20 (sequence is synthesized)
gttccccagcgccctccactcccaccccttcactgttttcttcgacattatctccctagagaacacagcaagcaggagcgggatccttcgactcggctgactctcaactccttccaaacg

SEQ ID NO: 880158 - DNA, 120 bp, Artificial Sequence
  ENSG00000223486_21 (sequence is synthesized)
tgaggctgacggggagaactcctgctctgcccagtttccattcccgcctccagaataacgagccgaaaacatgtgtactgtaaataaagcctgtctaaataaagcactcgggtaaaggct

SEQ ID NO: 880159 - DNA, 120 bp, Artificial Sequence
  ENSG00000223485_0 (sequence is synthesized)
cctggccgtggggtcagctgcacaggccaggagctcgagggtggtggctggcagaaagtgcagtccaaagtactctgttttgttttgattgtgttttaaaatgggacaaataacagcatg

SEQ ID NO: 880160 - DNA, 120 bp, Artificial Sequence
  ENSG00000223485_1 (sequence is synthesized)
tgtgtttgctgatggggagaatccaggagaaaaacagtgaagttgaggtgagcctcacagggtcagggggaagacaggggatcccgaagataacgtctgctacgaactcaattgcatccg

SEQ ID NO: 880161 - DNA, 120 bp, Artificial Sequence
  ENSG00000223485_2 (sequence is synthesized)
cgggccctaagttgaagccctaatccccacgttgactgcatttggagaaggaccttcagcacatgatggagggaccgagatgcccaaatcctggccctcctgctggactttcattttaaa

SEQ ID NO: 880162 - DNA, 120 bp, Artificial Sequence
  ENSG00000223485_3 (sequence is synthesized)
gaacaataaaattaatgttaacttctagcagcttccaagctctgtggccccggagagggtcagcgaggggcctccactgtctgagtccgctcctggcaacgcctgctctctgcactcaga

SEQ ID NO: 880163 - DNA, 120 bp, Artificial Sequence
  ENSG00000223485_4 (sequence is synthesized)
ggcccggtcccggcagctgccacgttgctcagaagttctggcagggggagcctgaaacccctgtctgctggcgacactcccggagcagcaggaaatctctacattttattttttttctta

SEQ ID NO: 880164 - DNA, 120 bp, Artificial Sequence
  ENSG00000223485_5 (sequence is synthesized)
aacaaaacactgaccttggtccacagacaacacccacgtccacgtggtgggtgggactggctccgtcagaggatgggaagatgagaagtgcttgtcgcaggcctggagatggggaccacc

SEQ ID NO: 880165 - DNA, 120 bp, Artificial Sequence
  ENSG00000223485_6 (sequence is synthesized)
caggcatgcaggggatgctgcctctcctccatccaacaacaagcctgcgtgtgcccagccccctctggtacacgcattgctccccatcctcggcattgatcaattgaaaataagaccttg

SEQ ID NO: 880166 - DNA, 120 bp, Artificial Sequence
  ENSG00000223485_7 (sequence is synthesized)
agaacttagtctttgagatttttattttcttcttaaaaaaataaaaatgaaatcaaagcagaagacactggttgagcagacagcacactagcacattccacttcgcaacaaaacctgcgt

SEQ ID NO: 880167 - DNA, 120 bp, Artificial Sequence
  ENSG00000223485_8 (sequence is synthesized)
cctttcctgtggaaggagttcagggcgggagggaagtgctggggtaggaggggcaggcagaacctggaaactgcgccccattctttcttctcggaactccattgccagagggcttggagt

SEQ ID NO: 880168 - DNA, 120 bp, Artificial Sequence
  ENSG00000223485_9 (sequence is synthesized)
gcttctcggcgatttggcatctgcttctcctctgcccctcattcagagttctcattgcaagaaaagcagggaaaaggttcaaaaaacccttcagacttggagccgttcctcggtgataat

SEQ ID NO: 880169 - DNA, 120 bp, Artificial Sequence
  ENSG00000223485_10 (sequence is synthesized)
tgaaccaccagaggtgctggcagggccatggcgagaggcacctctaggaaatctcacacaacccacactgctcccctctcctgcatggcagtgaccctcccataaaagggtacagcctgt

SEQ ID NO: 880170 - DNA, 120 bp, Artificial Sequence
  ENSG00000223485_11 (sequence is synthesized)
tgtgccagctttgcaactgggatcattgcagtctctggctttttgactccaggcgggctccgtgccctccggggcctcttcttccttgtcaggccagtgggagccacagaggcctcattg

SEQ ID NO: 880171 - DNA, 120 bp, Artificial Sequence
  ENSG00000223485_12 (sequence is synthesized)
gcttcctatgaatattaaatgggattctctgtgggggaagcttccataaggcaggaaggggtccccggttgttggctattagtgttattttcttttaaatcatctgtgctccttcaaaga

SEQ ID NO: 880172 - DNA, 120 bp, Artificial Sequence
  ENSG00000223485_13 (sequence is synthesized)
cgacgtaagaagcttgtgccctggcgttgcagaaatctctggctgtagggattaaacctacatgtcttcctgatggggtggtgaggacgtaaacggtgaatagtgccagccacagggagc

SEQ ID NO: 880173 - DNA, 120 bp, Artificial Sequence
  ENSG00000223485_14 (sequence is synthesized)
attgcagagagtaaccaagtgtgtgataaacatgctgtcatatgtgtgtaaacggccaagagaccactgcttttgcctgagtgacctccgcaaggacacagaaataaaacatacaaaaaa

SEQ ID NO: 880174 - DNA, 120 bp, Artificial Sequence
  ENSG00000223485_15 (sequence is synthesized)
cggggctggagacacactcctgagagggagatgggagagagggcgcctcgcggatcccgaggaaggctgaagacaggagaagggaggggtcgcacacgttaaacgctgccgaaaggccag

SEQ ID NO: 880175 - DNA, 120 bp, Artificial Sequence
  ENSG00000223482_0 (sequence is synthesized)
aaagtactttttctggaacaaagaaacttagcataaatagttaaaatattaagagttgtaattaagggaaatttcagctcaatatgacttcaacagtttaaaaaatgtattatttcacat

SEQ ID NO: 880176 - DNA, 120 bp, Artificial Sequence
  ENSG00000223482_1 (sequence is synthesized)
aagaccatggagagaggaattggaagccccagaattgattgggtcagaaattgaaaatgatactatcagtgacccaggtttgaatgtctctctccacagcattgacttcactaatggatg

SEQ ID NO: 880177 - DNA, 120 bp, Artificial Sequence
  ENSG00000223482_2 (sequence is synthesized)
tgacctggttggcagcagtagcttgcacaacatgcttgtttgcagtgagtagtagagagaaggttttgctttcccagaaactctgaaaaaggtcatcaaacctaaatttccttagccttc

SEQ ID NO: 880178 - DNA, 120 bp, Artificial Sequence
  ENSG00000223482_3 (sequence is synthesized)
ttcttccatgagcaaatcactagcagatgattgctagcaaggtgttactattacaatgaacccctaagtgtcagagaaagagttagtttggggaaatatcctctccaccacaatcttagt

SEQ ID NO: 880179 - DNA, 120 bp, Artificial Sequence
  ENSG00000223482_4 (sequence is synthesized)
aattataggtagcctttagttctacaagtgacatctcaaaagggagatgattcatcaatttcaaactttccctgcaagtaatactggatgaaaattaacttggccaacataattaataat

SEQ ID NO: 880180 - DNA, 120 bp, Artificial Sequence
  ENSG00000223482_5 (sequence is synthesized)
catgggttattaattacttctgcaagaaacttaaatcctcagtgtgacacaactcagtccttctactgcagcagctcttttataaaagcctcccaaagctccaagaaggaacaaagaatg

SEQ ID NO: 880181 - DNA, 120 bp, Artificial Sequence
  ENSG00000223482_6 (sequence is synthesized)
tgacccagtaagctcacaccataagtctatattgcagaaacctttgttcaacaaaactgcagatgctctgttgaatccactggagattgtcctgatactaaggacaagctcatatgacat

SEQ ID NO: 880182 - DNA, 120 bp, Artificial Sequence
  ENSG00000223482_7 (sequence is synthesized)
taacagacaagacacttttcagaaagacaggttgttcttttgggccacatctaagaaatctttgtctagccaaaagccacaaataatttctcattttttggcttctggaagatgtacagt

SEQ ID NO: 880183 - DNA, 120 bp, Artificial Sequence
  ENSG00000223482_8 (sequence is synthesized)
taaatgttatatttgggactgttatctaatttgattaaattgcactctacaatatgatatttgaattgatgaaaaattagtaaatgttaatattttttaaagtagccaaatcttgcaatt

SEQ ID NO: 880184 - DNA, 120 bp, Artificial Sequence
  ENSG00000223482_9 (sequence is synthesized)
tatatataatagagaagactagaaaatcccccatatttatttcctcttacttcgtactactaaaatttgtatttaggcatttggtttctcagataaacattacattccccagtatatggt

SEQ ID NO: 880185 - DNA, 120 bp, Artificial Sequence
  ENSG00000223482_10 (sequence is synthesized)
cccgtccgcgcagctcgtccggcccgcccgcaggccagcttctctcgggagcctccacccaggcgcatggctccatgaagcaagaggaggaggcagagcgcgagagatcccgtccgcccc

SEQ ID NO: 880186 - DNA, 120 bp, Artificial Sequence
  ENSG00000223482_11 (sequence is synthesized)
agccgcgtctgggccaggagaaaagcaaaaccatattcctgctgctgtcagttttgatgcactgagaaaacttcagagacctaagctttttccagagaagagaagctttactggtgttcc

SEQ ID NO: 880187 - DNA, 120 bp, Artificial Sequence
  ENSG00000223482_12 (sequence is synthesized)
agccctaaggctcatatgacattaacagacaagacacttttcagaaagacagatggagtctctctgtcacccagactggaatgcagtggcatgatcttggttcactgaaacctctgcctt

SEQ ID NO: 880188 - DNA, 120 bp, Artificial Sequence
  ENSG00000223482_13 (sequence is synthesized)
aatttgatagtacattttgatagtacaggaggcgatacggcatggtgacagaaaagcgccggcttggttagcgggaccacctggcagggctgcaggctgtgccacttaccaggcagggga

SEQ ID NO: 880189 - DNA, 120 bp, Artificial Sequence
  ENSG00000223482_14 (sequence is synthesized)
ccttgggccagctgcttggcctcactcaccctgtttcctcagctgcaattgggatgaacagactgcctgcttcggggttgcctaaaactcacattgcttaatgatgtgaaatgcttagcg

SEQ ID NO: 880190 - DNA, 120 bp, Artificial Sequence
  ENSG00000223482_15 (sequence is synthesized)
cagtgcctggcatagagagaattctcattagatgatacctcagctgggctttaggagctacagaagaagctgcatctccatgagctcagcgtgtttctagctttcctttttgttttctat

SEQ ID NO: 880191 - DNA, 120 bp, Artificial Sequence
  ENSG00000223482_16 (sequence is synthesized)
tcaacctttcacccaactcagcttctcaatccctaaatgacaaaggtttgggaaggaagacttggaccgatgcttgcatttgtttctgagaattaaacgttatgttttcttcaatccaaa

SEQ ID NO: 880192 - DNA, 120 bp, Artificial Sequence
  ENSG00000223482_17 (sequence is synthesized)
ctaaggctcatatgacattaacagacaagacacttttcagaaagacaggcaacgtgttggaccttccggagcttctcagaagacagagggttttcttttgagtaccgtctggcaaatgat

SEQ ID NO: 880193 - DNA, 120 bp, Artificial Sequence
  ENSG00000223482_18 (sequence is synthesized)
ctgcttggatcctcctggctttttgagaatcggctggcatcagggtgctgactgacaaacttcccggggtctgggcacggtggggacggagcctgcagacggcggtgtccccgctagaag

SEQ ID NO: 880194 - DNA, 120 bp, Artificial Sequence
  ENSG00000223482_19 (sequence is synthesized)
agccgtggggacgtgattaacaggtcaggccgggccgcgaggtggcggaggggccgcgcttgcgggcgtggggcgctggcagaacgcgatccgcggcctgtggcccgcagccggacccga

SEQ ID NO: 880195 - DNA, 120 bp, Artificial Sequence
  ENSG00000223482_20 (sequence is synthesized)
gcgccagcctcccgcagcgtgtctccagcgccctctactgttcagcatcctccccgccgcgaggggagccgcggaaggggattctggctgtgaccgcagagcaggtattaaaggatggat

SEQ ID NO: 880196 - DNA, 120 bp, Artificial Sequence
  ENSG00000223482_21 (sequence is synthesized)
ttggaggtgcgaggccatacattgacaacgggtataccatgcgtcccaaaaccttccagcgtgtccccttccaaacactacctctccctccccaccaaaataaccaaaataaccaacgac

SEQ ID NO: 880197 - DNA, 84 bp, Artificial Sequence
  ENSG00000223482_22 (sequence is synthesized)
cctctccctccccaccaaaataaccaaaataaccaacgacctgatttttatggcaaacactgcttttaccacctaaccatgcaa

SEQ ID NO: 880198 - DNA, 61 bp, Artificial Sequence
  ENSG00000223482_23 (sequence is synthesized)
acacacacacacacacatatatatgaagcctgttgtgattttggttgggattgcattgaga

SEQ ID NO: 880199 - DNA, 120 bp, Artificial Sequence
  ENSG00000223482_24 (sequence is synthesized)
gggttgcactgagtttataagtcaattcaggggagaattgacatctttaaaatactgggtcatctaatcagttcacatggtatgtacttctgtttatttacctcttctctcatttctcta

SEQ ID NO: 880200 - DNA, 120 bp, Artificial Sequence
  ENSG00000223482_25 (sequence is synthesized)
aataataaagtgtcatggacatcttttcattaaatttttccccagacatttgaatttttatgctaccataaatggtattgttttaaaatgttttattttctaactcttgctggtgtacag

SEQ ID NO: 880201 - DNA, 120 bp, Artificial Sequence
  ENSG00000223482_26 (sequence is synthesized)
aaataaagttggttttcctattttgaccatttattcagtcatgctaaactcactaattctaataacttgtctctggattcttttgagttgttaataatacatacatagttttgtatctta

SEQ ID NO: 880202 - DNA, 120 bp, Artificial Sequence
  ENSG00000223482_27 (sequence is synthesized)
ggtccaatcttagtatttttatttcaacttttttgccttattactcttgttaggaataccaggaaagtattgaatacaagtgatgataatggacatcttcgtcttatttctgttctcagg

SEQ ID NO: 880203 - DNA, 120 bp, Artificial Sequence
  ENSG00000223482_28 (sequence is synthesized)
aatgtttccacatttcattattaaggaaaatatttaccatagttgtagctccttgagataaacagtgttaaaattttttggccactctccattgatttaatgtatggttttctaaaaacg

SEQ ID NO: 880204 - DNA, 120 bp, Artificial Sequence
  ENSG00000223482_29 (sequence is synthesized)
aaatattttacatactgtttctgagtaagattttttacccaatgcactgtaaacaccaaaatcatatatttttatatagttttacttggcttaccttgtttttttgctttaacttgaaaa

SEQ ID NO: 880205 - DNA, 69 bp, Artificial Sequence
  ENSG00000223482_30 (sequence is synthesized)
ttccctgtgcgaggcgggaggttcacctaagcctgagagtctgagaccagtctggccaacatggagaaa

SEQ ID NO: 880206 - DNA, 120 bp, Artificial Sequence
  ENSG00000223482_31 (sequence is synthesized)
catatatgattcatccatttaaaatgtataattcgatggttattggaatatttacatttctgtttaattccctcaattaatttttaaatcaacttgtcaactcgtataggccatccctca

SEQ ID NO: 880207 - DNA, 120 bp, Artificial Sequence
  ENSG00000223482_32 (sequence is synthesized)
gggactttgtttattgttgaattaactctgtatagtacatcttcccaaacagcaggagcacagtagagtgttccactaattcttgtctccttttatttccctcatgatatttaaatcatt

SEQ ID NO: 880208 - DNA, 120 bp, Artificial Sequence
  ENSG00000223482_33 (sequence is synthesized)
tctcactgcctccggtggctgctgggataccggaggactcgggtcccggctcgactcagtcctccagccgcccggggaatacctctagttcttcccggccgccgccgcctccgccccgcc

SEQ ID NO: 880209 - DNA, 120 bp, Artificial Sequence
  ENSG00000223482_34 (sequence is synthesized)
cataaatttccttaatttgatactgtaaatggagtaatttggtgatgtaaatggtaatatgtaagggatttttgcttcagatcttacaacttaaaatatttttctaaaattagtttttgt

SEQ ID NO: 880210 - DNA, 120 bp, Artificial Sequence
  ENSG00000223482_35 (sequence is synthesized)
cagtcagtccaggcttctataacaaaatatcatggactgaattgcttacacaacagacatttctcacaattgtagaagctggaaagtgcaagattaaggtgctagcaaatttgtttcctg

SEQ ID NO: 880211 - DNA, 120 bp, Artificial Sequence
  ENSG00000223482_36 (sequence is synthesized)
gtgagggtcctcttccgggcttgctgtatcctcacatagcagatagagagagaaagagagagagagagagcactctatagactctcttcctgttcttataaggacactaattccgttgat

SEQ ID NO: 880212 - DNA, 120 bp, Artificial Sequence
  ENSG00000223482_37 (sequence is synthesized)
gagggccctatgctcatgactttgtctaaacctaattaattctcaaaggcctcacttcccaatactgtcacattgtggggtagggctttaacatatgaaatttgagggaaaaggaatgtt

SEQ ID NO: 880213 - DNA, 120 bp, Artificial Sequence
  ENSG00000223482_38 (sequence is synthesized)
cagtctagaacaaagccccatacatttcaaaaagctgtgggacaggagggaatggggatggtattcaatggtaccacatccaagcaagtcttgtatggttaaaacaaatcaatataataa

SEQ ID NO: 880214 - DNA, 120 bp, Artificial Sequence
  ENSG00000223482_39 (sequence is synthesized)
catgaaattttacacagaaacctatctgattataaactgtatgcttaccataatcaacactgatgtacattgttttaaaaatacttaatagtgttctttgtttaaccaaacaatagaggt

SEQ ID NO: 880215 - DNA, 120 bp, Artificial Sequence
  ENSG00000223482_40 (sequence is synthesized)
attaactagtttcctagtgctgccaaaagaaattgctacaaaatttgtggcttaaaatagtaaaaaaagaaaaaaaattctcaattatagaggccagaagaccaaaatcaaggtggaggc

SEQ ID NO: 880216 - DNA, 120 bp, Artificial Sequence
  ENSG00000223482_41 (sequence is synthesized)
agagccatacaccctctgacggctctagggaagaatccttccttgcctcttctagattctgttggctcctggcactccttggcttgtgacagcataactccaaccttagtctctatcttc

SEQ ID NO: 880217 - DNA, 120 bp, Artificial Sequence
  ENSG00000223482_42 (sequence is synthesized)
acatgaccttgcttgtgtttctgtgtcccaaatacccatgactcactctaaattcaggatgatctcaccctgagatctttattatatctgtaaagctcctatttcaaaataaggtgatat

SEQ ID NO: 880218 - DNA, 120 bp, Artificial Sequence
  ENSG00000223482_43 (sequence is synthesized)
ttacaggtactggaatgggagagggtctaggactcagacgcacccttatgaggatactacatgacccattacaaggcacaaagtaattaccataggcaaaccgctgatgagagctcactc

SEQ ID NO: 880219 - DNA, 120 bp, Artificial Sequence
  ENSG00000223482_44 (sequence is synthesized)
cagtttggaatatattcatgtttccatataagagaaaaattcatccctggttcagttcatcttggcatcagtacacggatgggattcagagacatgtaggtgtggaataccagattccac

SEQ ID NO: 880220 - DNA, 120 bp, Artificial Sequence
  ENSG00000223482_45 (sequence is synthesized)
caaacttaaaaagctggcatactaagttgataaaacgatgtagagtgtgaagttgagttgagaatgcttatgccatacagtttatgtatcttataatagccttaatcacacttccagtaa

SEQ ID NO: 880221 - DNA, 120 bp, Artificial Sequence
  ENSG00000223482_46 (sequence is synthesized)
ttttccctatcattgggtgctaaaaaataaaattaaagaattagaataaaaaatatatatatacctctttgagtggaagaatgctgtcagcacattttgttattttattccattgtataa

SEQ ID NO: 880222 - DNA, 120 bp, Artificial Sequence
  ENSG00000223482_47 (sequence is synthesized)
agtctcggtagtgctctcttcataaatgtgttgaaggtttggctaaattgtatcaaatttgtgattaaatacaaatgtgaatagtataaaacattacaaaggacaatctgaatactatgc

SEQ ID NO: 880223 - DNA, 120 bp, Artificial Sequence
  ENSG00000223482_48 (sequence is synthesized)
tataccaattttacaattttacaatgacttacagatgccataaatatttactttaagggagtaaaataagttataaagtcatatttaagaacacctaaatccttgaataaatttaaaatg

SEQ ID NO: 880224 - DNA, 120 bp, Artificial Sequence
  ENSG00000223482_49 (sequence is synthesized)
aaattctgggccgaaatgatccgcctgcctcagcctccaaagtagctgagactacagacaaatcaactcaatcaaagaaaccaactcaaagaaagatgggtctacatacaacaaaactga

SEQ ID NO: 880225 - DNA, 120 bp, Artificial Sequence
  ENSG00000223482_50 (sequence is synthesized)
acaaaatctgcaagaagagtgattcatacatgggctattgaggcaacatgagatggacattaatcgactaagtaaaaaacagatttcttgaagaattaataaagaacttttgttttggaa

SEQ ID NO: 880226 - DNA, 120 bp, Artificial Sequence
  ENSG00000223482_51 (sequence is synthesized)
ccctggtcctcacagccctgatttggaccagaatctcaggtgctcagaagaaagatcctgtttagtgatgacccagctctacctgctgaatggacctgcaggcagtttaagtatagtgtg

SEQ ID NO: 880227 - DNA, 76 bp, Artificial Sequence
  ENSG00000223482_52 (sequence is synthesized)
attcgggaccaacctggccaacatgtgaaaccccatctccactaaaaaatccaaaaattagccaggcatggtggtg

SEQ ID NO: 880228 - DNA, 120 bp, Artificial Sequence
  ENSG00000223482_53 (sequence is synthesized)
gatcataaagctttatcagttttggaaagttctcagcctatatttatttaactgttccttctgccccatcttcctcccttcttctaagactccagttacgtatgtattaggcctgttcac

SEQ ID NO: 880229 - DNA, 120 bp, Artificial Sequence
  ENSG00000223482_54 (sequence is synthesized)
cacttcccacaagtatcttatgttctttgctgtattttccatactctttgtctctgtttttcagcttagagtttttattctgtcctgtattacagttcaaagaatgttccttctgctaaa

SEQ ID NO: 880230 - DNA, 120 bp, Artificial Sequence
  ENSG00000223482_55 (sequence is synthesized)
tctaattgtagttaacccatatgctaagtacttaatttcagttattgtatttttaagttttaaatttccatttcattctttcttatagattccagttctttgatgaaagtctctattcca

SEQ ID NO: 880231 - DNA, 120 bp, Artificial Sequence
  ENSG00000223482_56 (sequence is synthesized)
cccatcaagtctgtgtctgataacaccaatatctgggtcattagtggctccgttttgttgtgtctgttttcccctccttcctgttttgtggtgtgtttgatcacttattgttgaatgcta

SEQ ID NO: 880232 - DNA, 120 bp, Artificial Sequence
  ENSG00000223482_57 (sequence is synthesized)
gggagcctggaagagcagctggggagattggcgtcctaccccactgccggtcttcccagggactgagagagggaacaggaaattggtaatgtctattctccaagagagttttccttggcc

SEQ ID NO: 880233 - DNA, 120 bp, Artificial Sequence
  ENSG00000223482_58 (sequence is synthesized)
tgtggccaggctgctcaaatagaatgcagaaacaaagaatttgcctgaattctgctagccactctccaaggtcttctcctgcgatgggtggagggactttcagggcaaccctgttctaag

SEQ ID NO: 880234 - DNA, 120 bp, Artificial Sequence
  ENSG00000223482_59 (sequence is synthesized)
ggggaacttgggactttttggcagtattgtctatggctctggctcattaattcagccctcgtgttcccgtatctgcaagggcataactgcagtcccctcagttctctgggtaatgtgact

SEQ ID NO: 880235 - DNA, 120 bp, Artificial Sequence
  ENSG00000223482_60 (sequence is synthesized)
ctcactgcaaacctcaacatggaaagctcttgctaaggtgggaaggtctcagtcctccaaaggaaacgaagttgtggcagcctttttactagaaggatcaacttagtaattaacaaaaat

SEQ ID NO: 880236 - DNA, 120 bp, Artificial Sequence
  ENSG00000223482_61 (sequence is synthesized)
acttaaaataatgaagaggaggtgggtgtaatcaagaactatgattattcaggatctctgtaggagtaaatgtattacttcaaaattctccagttttgcacgcccatgtttattgcagca

SEQ ID NO: 880237 - DNA, 120 bp, Artificial Sequence
  ENSG00000223482_62 (sequence is synthesized)
gctcatatgacattaacagacaagacacttttcagaaagacagatttcctagcagacttaacatctggcattggggaatccttaaacccaaggaaggaactgctggcaggaaattttctg

SEQ ID NO: 880238 - DNA, 120 bp, Artificial Sequence
  ENSG00000223482_63 (sequence is synthesized)
tggatgttaggattgggaaaaggggagatgaaataagggatgtgcttccttaagattataaactctatccacaaagcccctgtctggaattctgggttgaattgtatcctccccaacccc

SEQ ID NO: 880239 - DNA, 120 bp, Artificial Sequence
  ENSG00000223482_64 (sequence is synthesized)
caccgaaaaaaaagacatgctcttcaacatatcttcctaacccccagtatctcagaatgtgaccttatttggaaataggatcattgcagatataattagttaaataaaaatgaggtcata

SEQ ID NO: 880240 - DNA, 120 bp, Artificial Sequence
  ENSG00000223482_65 (sequence is synthesized)
tgaagacagagactggagttatgcagctgaaaaccaaggaacagcttcttatgtacttaatttgtgtcagatttcactacgtgtcaaagcttgctataaaaccaccagaagctaagaaga

SEQ ID NO: 880241 - DNA, 120 bp, Artificial Sequence
  ENSG00000223482_66 (sequence is synthesized)
gaggaaggattcccctacaggtttcagaggaaacacggctctgcttacaccttgatttcagatgcaacgtgttggaccttccggagcttctcagaagacagagggttttcttttgaggta

SEQ ID NO: 880242 - DNA, 84 bp, Artificial Sequence
  ENSG00000223482_67 (sequence is synthesized)
ggacctactaccgtactccagcctgggtgacaaagaaaaactccgtctcaaaaaataataataataaaaaagtatagtgtgcct

SEQ ID NO: 880243 - DNA, 120 bp, Artificial Sequence
  ENSG00000223482_68 (sequence is synthesized)
tctttcccaggctgtgggttgtgcccttcactccttgccctcctccattccctgtcctgatctgaactcctctccttgccacgctccctcacccttatccctctgcacactccaaaattt

SEQ ID NO: 880244 - DNA, 120 bp, Artificial Sequence
  ENSG00000223482_69 (sequence is synthesized)
tttattttgtcgcctttattctctttctctttatttttcttttcttctttcttacattgtatttctgtttggaaaagaccatgtacaaacagagtaatatgtggatccatgcctatccat

SEQ ID NO: 880245 - DNA, 120 bp, Artificial Sequence
  ENSG00000223482_70 (sequence is synthesized)
cttagtataatcatgtattcattgtactttgttgtatacatttggtacgtattctaaatatggacatatgctatgtatcataatgtacataaccatttctctattgatagactgttacag

SEQ ID NO: 880246 - DNA, 120 bp, Artificial Sequence
  ENSG00000223482_71 (sequence is synthesized)
tattttcaatttctgataacagcaaaaatgatccttcagttgctatcatcaatatttatttgtacatatcaatgatcattttagaggattaaaaacagaagaagaatttttagggaaacc

SEQ ID NO: 880247 - DNA, 120 bp, Artificial Sequence
  ENSG00000223482_72 (sequence is synthesized)
ccaaatatcataaagatacttgcatgttttataagtaattaataactactttctcataacagtaaaaactattttgttttgtatgagaggatttttctctctaagttttaaaaaatcatt

SEQ ID NO: 880248 - DNA, 120 bp, Artificial Sequence
  ENSG00000223482_73 (sequence is synthesized)
gcaaatatatcacatcaaacccaaaagccattgctagcacactggttcctgtcttaatattaagtatgagataaaaggcctttatcttccagaaggttgttcataacatgccaaatatat

SEQ ID NO: 880249 - DNA, 120 bp, Artificial Sequence
  ENSG00000223482_74 (sequence is synthesized)
gaacacccaatagtcaaaggacattatctctatgatgtaattttgaaagttattaaaataattgtttatcaatttcatcttacaagcacacaatttaaaccattcttttaaagtggattt

SEQ ID NO: 880250 - DNA, 120 bp, Artificial Sequence
  ENSG00000223482_75 (sequence is synthesized)
tagaagattggaataggaagttatagaagtcaatccctccacaaaaactgccattaaactggaaaaaataagaattaacctttttggaactctggatcctaatcagataaataacaacca

SEQ ID NO: 880251 - DNA, 120 bp, Artificial Sequence
  ENSG00000223482_76 (sequence is synthesized)
ttagtagactgcttgatgctgttggcctttagtaagaaaatggctgtatgcacacaccagataccatcactcattcttattcacaagagtcaaaaagtgaaaacaaacctgtatgtgtag

SEQ ID NO: 880252 - DNA, 120 bp, Artificial Sequence
  ENSG00000223482_77 (sequence is synthesized)
ataaacaaaatgtggcatgtacatacaagggaagattatttagccataaaaagggaatgatgttctgatacatgtttacaacatgggtaaaccttgaaaatattatgctaaataaaataa

SEQ ID NO: 880253 - DNA, 120 bp, Artificial Sequence
  ENSG00000223482_78 (sequence is synthesized)
tgttatttcaaggctcatatgacattaacagacaagacacttttcagaaagacagaaactactctgaaaaactctcttaatgctttttacggccgggtgcggtggctggagcctgtaatc

SEQ ID NO: 880254 - DNA, 120 bp, Artificial Sequence
  ENSG00000223482_79 (sequence is synthesized)
gctgatgataccaccaccaagaaatcatcaccattaatattttggcttttttgttttcagattttttccattatgaaattgttgatatttgatccttttgacctataaaaatgttaatat

SEQ ID NO: 880255 - DNA, 120 bp, Artificial Sequence
  ENSG00000223482_80 (sequence is synthesized)
catatagcttactcgaacatatccaaataatgtcatatatattattttatgtaccaaaaagcatactaaacagattgttttatagcttacttttctcatttttaacattataatttaagc

SEQ ID NO: 880256 - DNA, 120 bp, Artificial Sequence
  ENSG00000223482_81 (sequence is synthesized)
atttgttcataatattaaaactttttgaaaacattattatgaatgactatttcaatatgtggatgtaccacaacttacctaatgatttacctactggtaatcattgagttggactggttg

SEQ ID NO: 880257 - DNA, 120 bp, Artificial Sequence
  ENSG00000223482_82 (sequence is synthesized)
gacatgagttgtttctaatttgtcgctattacaaataatgctctgataaatatgtataattaatttgtgtttcagattatttttatttctagaaatgagattcttggttataggctaaat

SEQ ID NO: 880258 - DNA, 120 bp, Artificial Sequence
  ENSG00000223482_83 (sequence is synthesized)
acaatgcctggaaggaaataaatgtaatggcccgtagcagttggccttcagatatcaagtttaagtccctttaagcagaacagcaaattgagcacagaatgaactggtttcatggtagcg

SEQ ID NO: 880259 - DNA, 120 bp, Artificial Sequence
  ENSG00000223482_84 (sequence is synthesized)
tactgcaattagatgcaagaatagggaaagcagggtgcttcaattggtgacacaattagtatagcactgggggacttctctttccacttcttcaactccgcctgcattccgctggctgaa

SEQ ID NO: 880260 - DNA, 120 bp, Artificial Sequence
  ENSG00000223482_85 (sequence is synthesized)
gagttgatgacatccctgaaaaatcttccctctcttgtttctctgatgccacctctgtgttctccgcctcactggccacacttcctttacctcccaaacttttaactctgagtgtcccaa

SEQ ID NO: 880261 - DNA, 120 bp, Artificial Sequence
  ENSG00000223482_86 (sequence is synthesized)
acttgtctcatcacctacccctgctgcccagctccccagcctgttccccttctgacacgggcactctccttctgctgtcttgggagagaaacaatgaaggcctagttggcacttttattt

SEQ ID NO: 880262 - DNA, 120 bp, Artificial Sequence
  ENSG00000223482_87 (sequence is synthesized)
ctattcaaggaaccagactgtgaacaagtttaccatttagtcctttggactgtgtcttgaattcatccctcttctccattctcaccagcaccatcatcatgatggctaatatttcctgag

SEQ ID NO: 880263 - DNA, 120 bp, Artificial Sequence
  ENSG00000223482_88 (sequence is synthesized)
cacctttcatccaggcatgatgccaggtgcaccaacttacttaatcctcatagccaccacctgagcaagctcctgttttataaatggaccagttcttgttgctattgtacaagttatttt

SEQ ID NO: 880264 - DNA, 120 bp, Artificial Sequence
  ENSG00000223482_89 (sequence is synthesized)
ctttctataacgtcctccttgtcctccttccacattcttaaagaaacttgcccttcctttaaagtactcagggagccctgcattgcttcttgaagccttctccagcttcatcatctcaca

SEQ ID NO: 880265 - DNA, 120 bp, Artificial Sequence
  ENSG00000223482_90 (sequence is synthesized)
gtggtctctcttttcactaaatgtccaatatgctgcacataagtaccccaaagttagcacagaattgttccatggctgtcatatatgttaaaaatcattaaaagttcattttttctctca

SEQ ID NO: 880266 - DNA, 120 bp, Artificial Sequence
  ENSG00000223482_91 (sequence is synthesized)
tgaatgggatattggcccattttttcttccagtttattacactgaatattgacatgttattttccaatattgagacaatcaatgacaagactttaagagtaacaatgtaaaaattataga

SEQ ID NO: 880267 - DNA, 120 bp, Artificial Sequence
  ENSG00000223482_92 (sequence is synthesized)
agttgtctgagtttatcaacaatcccctggattagaaccccctaccagttctaggtcatctaatatatagacattgtgttcagtagaaataaatatatatattttttaatatactttaag

SEQ ID NO: 880268 - DNA, 60 bp, Artificial Sequence
  ENSG00000223482_93 (sequence is synthesized)
caggcccggaatacatttttaaatcatttttaaaggtgttattacattctgattgaacat

SEQ ID NO: 880269 - DNA, 120 bp, Artificial Sequence
  ENSG00000223482_94 (sequence is synthesized)
attacattctgattgaacattttcagaaagaataaataatttaatacaagaagtgggccacttcatgtaacaaaacaaaccaccactacagcaacaacaacaaaaaacactaatgaatgt

SEQ ID NO: 880270 - DNA, 120 bp, Artificial Sequence
  ENSG00000223482_95 (sequence is synthesized)
gggattacaagcgtgagccactgcacctagctggttatgcatattttcaagtctattgatacctagtgccaggaacttgatttcaagaagaaatatatgttgtatgaatgcaagggctgt

SEQ ID NO: 880271 - DNA, 120 bp, Artificial Sequence
  ENSG00000223482_96 (sequence is synthesized)
ctgtgtttgcttttgctcacctgtttctgcagtggccaggctttttgtcacattaaaggtactcagtaaaacatttgctcaatgaataaatgtatggcacctgccactgaaaattaagaa

SEQ ID NO: 880272 - DNA, 120 bp, Artificial Sequence
  ENSG00000223482_97 (sequence is synthesized)
agtagctgagactacaggctggtcttgaactcttgggctgaagagattctcccacctcagcctcccaaggtgttgagattacaagcatgagccacctcacctggccaagagctagttgtt

SEQ ID NO: 880273 - DNA, 120 bp, Artificial Sequence
  ENSG00000223482_98 (sequence is synthesized)
aaaagagcctagcactacccccctctttcttgtttcctctctcaccatgtgatctccacacacattggcttgccttccctttctgacatgagcggaagcagcctgaggccctcaccagat

SEQ ID NO: 880274 - DNA, 120 bp, Artificial Sequence
  ENSG00000223482_99 (sequence is synthesized)
gtggatgccagtgccatgcttcttgtacaatctgcagaatcataagctaaatacacctcttttctttataaattacccagccttgggtattcctttatagcaacacaaacggagaaagac

SEQ ID NO: 880275 - DNA, 120 bp, Artificial Sequence
  ENSG00000223482_100 (sequence is synthesized)
atatgcaatttgccattttaatcatttttaactgtacaatttggtggtattaattatatttacaatgttgtgcaaccgttaccaccatctattaccaaagccctttcatcaccccaaata

SEQ ID NO: 880276 - DNA, 120 bp, Artificial Sequence
  ENSG00000223482_101 (sequence is synthesized)
gaaactgtgcttattcagcaaaaactcccattttcctctccttccagcccctggtaacctctggtaacctctaatctacctcctgtctctatgaatttgcctattgtaaatatttcacat

SEQ ID NO: 880277 - DNA, 89 bp, Artificial Sequence
  ENSG00000223482_102 (sequence is synthesized)
cttatagcatgtatcagtattccattcttcttttctatggctgaataataattgtatgtatatactgcatcttgtttatccatttatct

SEQ ID NO: 880278 - DNA, 120 bp, Artificial Sequence
  ENSG00000223482_103 (sequence is synthesized)
cttttctatggctgaataataattgtatgtatatactgcatcttgtttatccatttatctttttgtttgtttgttttttaaagacagggttttaccatgttggccaagctagtctcgaac

SEQ ID NO: 880279 - DNA, 120 bp, Artificial Sequence
  ENSG00000223482_104 (sequence is synthesized)
ttacaggcgtgagccatcgtgcctggcctatccgtttatcttttgatagacattttggttgtttctaccttttgtctattgtgaataatgctgctatgaacattagtgtacaagtcactg

SEQ ID NO: 880280 - DNA, 120 bp, Artificial Sequence
  ENSG00000223482_105 (sequence is synthesized)
gctatgaacattagtgtacaagtcactgtttaagttgttgttttcaattcttttgggtattgtattaggccattcttgcattgatataaagaaatacctgagactgggtaagtgccaaag

SEQ ID NO: 880281 - DNA, 120 bp, Artificial Sequence
  ENSG00000223482_106 (sequence is synthesized)
gtacaggaagcatagcagcatctgcttccagggaggcttcaggaagcttccaatcatgatggaaggcaaagtgggtgcaggtatgtcacgtggcaaaagccagagcaagagaggaagtgg

SEQ ID NO: 880282 - DNA, 120 bp, Artificial Sequence
  ENSG00000223482_107 (sequence is synthesized)
gtcacgtggcaaaagccagagcaagagaggaagtggggaggtgctgcacacttttaaacaatcaaatcttgtgagaactcacaatcttgatgacagctagagatggtgaagccactcatg

SEQ ID NO: 880283 - DNA, 120 bp, Artificial Sequence
  ENSG00000223482_108 (sequence is synthesized)
atccaatcacctcccaccaggccccaactctaacaccggagattaattacatttcaacatgagatttgcataggaacaaacagtcaaactatatccggtatatacttaagagtagaatta

SEQ ID NO: 880284 - DNA, 120 bp, Artificial Sequence
  ENSG00000223482_109 (sequence is synthesized)
cttaagagtagaattactgggtgataattctgttttacgttttgaggaattgccaaactatcttcctcagcagttaaaccatttacattcccaccagcagtatactaggtttccaatttc

SEQ ID NO: 880285 - DNA, 120 bp, Artificial Sequence
  ENSG00000223482_110 (sequence is synthesized)
tccacatgttcaacaacactagttattttttcttctaattatagccattctagtaggtacaaagtggtatctcattgtggttttagcatcttttgagttgcttattgaccatttacatgt

SEQ ID NO: 880286 - DNA, 120 bp, Artificial Sequence
  ENSG00000223482_111 (sequence is synthesized)
cttttttttagagaagtgtctaagtattttgtccattaaaaaattgagttatttatcttttatttgttgagttgtaggattctttatgcattcaattcttttgggtattgtattaggcca

SEQ ID NO: 880287 - DNA, 120 bp, Artificial Sequence
  ENSG00000223482_112 (sequence is synthesized)
ttcttgcattgccataaagaaatgcctgagtatattagttttttgtcagatgtatgatttgcaaacattttctccaattttttgtgttatcttttcactttctttatagtgtcacttgat

SEQ ID NO: 880288 - DNA, 120 bp, Artificial Sequence
  ENSG00000223482_113 (sequence is synthesized)
acacaattttgatgaagtccaatttatcagttgtttcatcacttgtacttttgatgttatatttaagaaaccgttgtcaaacccaaggtcatgaagatttttcagtatgttttcctctaa

SEQ ID NO: 880289 - DNA, 120 bp, Artificial Sequence
  ENSG00000223482_114 (sequence is synthesized)
gagttttatagcatttaatatttaagtgttttatagcattaaattttggtctttgatccattttcagttaatgtttgtacattgtgtaaaagtataggtccaacttcattcttttgcttg

SEQ ID NO: 880290 - DNA, 120 bp, Artificial Sequence
  ENSG00000223482_115 (sequence is synthesized)
tggatatctagtttccccaacaccatttgttgaagagattgtccttttccccattgagtgatcctggaacccttgctgaaaattaattacccatagatgtgagtgttagttctggcctct

SEQ ID NO: 880291 - DNA, 120 bp, Artificial Sequence
  ENSG00000223482_116 (sequence is synthesized)
cgattctattccattggtctatattgtctacctctgtgccaagtccatgctatttcaattattatagctatgtagtaaattttaatatcagaaaatgtgagtcctacaactttgttcctc

SEQ ID NO: 880292 - DNA, 120 bp, Artificial Sequence
  ENSG00000223482_117 (sequence is synthesized)
ttcagattattttggctattttgggttccttgaaattttatatgaattttagaataggtttttccatttctgccaaaagcgctgttgggattttattagcgtgattacattgactctaca

SEQ ID NO: 880293 - DNA, 120 bp, Artificial Sequence
  ENSG00000223482_118 (sequence is synthesized)
tttccagaatgctttgtagttttcagtgtacaagtcttctgccttcctggttaaattgatttctaaatattttattcttttgggtactactgtaaataaaaaattcttaatttccttttc

SEQ ID NO: 880294 - DNA, 120 bp, Artificial Sequence
  ENSG00000223482_119 (sequence is synthesized)
agattttgtactgctagtgtgtagaaacacgactgatttttgtgtgttgattttgtattctgcagccttgctaaatttgtttattagctttaagaggctatttttggtattctttagggc

SEQ ID NO: 880295 - DNA, 120 bp, Artificial Sequence
  ENSG00000223482_120 (sequence is synthesized)
tttctacacttatatcacttgcaaatagagatagttttacttcttcctttctaatttggatttattttatttctttttcttgcctgatgggtctggctagaactgccaatactatgttga

SEQ ID NO: 880296 - DNA, 120 bp, Artificial Sequence
  ENSG00000223482_121 (sequence is synthesized)
atagaagtggcaaacacaggcatccatggcttctgattttagtggaaaagcttgaaatttttccccattgagaatgatgtcagtcgtgagtttttaatacatggtctttatcatgttgag

SEQ ID NO: 880297 - DNA, 120 bp, Artificial Sequence
  ENSG00000223482_122 (sequence is synthesized)
acagttcctttctattcctggtttgttgaacagttctatcataaaggaggaatggattttctcaaatgttcttctatatcaattgagatgatcatgagtttttcactccttcattctatt

SEQ ID NO: 880298 - DNA, 120 bp, Artificial Sequence
  ENSG00000223482_123 (sequence is synthesized)
acttggtgtattacatcgactgattttcatacgttaaaccactcttaaatttctgggataaatctcagttggtcatagtgtaaaattcttttaagggctgctgaatttaatttcctagta

SEQ ID NO: 880299 - DNA, 120 bp, Artificial Sequence
  ENSG00000223482_124 (sequence is synthesized)
ttttgttggggatttttgtatctataatgcattcataggggacatttggctatagttttcttgtattgtctgtctagctttggtatcagggtaatgttggcttcatagaatgactcagaa

SEQ ID NO: 880300 - DNA, 120 bp, Artificial Sequence
  ENSG00000223482_125 (sequence is synthesized)
agggttctgtttctcaactttttggaggagttcgagaaggattagtgttaattcatttctaaacgtttggtagaattcaccagcgaagtcatcagttcctgggcttttctttgttaggag

SEQ ID NO: 880301 - DNA, 120 bp, Artificial Sequence
  ENSG00000223482_126 (sequence is synthesized)
agttttggttgctgattcaatcagaattgaatatcattactttttatagatctattcagatttattctttgttcttgagtcaactttgttggtttgtatgtttctaggaatttgtctgtt

SEQ ID NO: 880302 - DNA, 120 bp, Artificial Sequence
  ENSG00000223482_127 (sequence is synthesized)
tcatctaggttatccaattttttgacatatagctcttatacgaattctcttacaatcctttttattcctataaatcagtagtagtgtctttcatttctgattttagtagttgagtattct

SEQ ID NO: 880303 - DNA, 120 bp, Artificial Sequence
  ENSG00000223482_128 (sequence is synthesized)
ttttccttaatctagttaaagctttgtcaactttgttgatctcttcaaagaactaattttttgtttcattgattctattgtttttctattctctatttcatttatttttgctctaatcct

SEQ ID NO: 880304 - DNA, 120 bp, Artificial Sequence
  ENSG00000223482_129 (sequence is synthesized)
tattatttccttcctctttatggcttcaaactcaattgaacataaagtattaagaaatttgactttttttctcaaatgtctaaaatgtaagaagaaatatgtctagagtcatcaaaaagc

SEQ ID NO: 880305 - DNA, 120 bp, Artificial Sequence
  ENSG00000223482_130 (sequence is synthesized)
agcctgtttgtcagatttactgtttaatccatgtaaacagctttcatataattcatgatagaatattactatgtgctttggaagacactgaggaaagacaaaaggtcattgggcagaacc

SEQ ID NO: 880306 - DNA, 120 bp, Artificial Sequence
  ENSG00000223482_131 (sequence is synthesized)
accctagattgactgttaaggccatcttctagtttgcaggacttgtggtagacagacagaataatatcctggacctcttgggtgtatacaggacaaactgaaataaactctcatttttag

SEQ ID NO: 880307 - DNA, 120 bp, Artificial Sequence
  ENSG00000223482_132 (sequence is synthesized)
atcataatgtcatcatgaaacatatcaattcggtctatttctgaagaaaacaagcacaatgataaagtttgaatgtttgtctcctccaaatctcatgctgacatttgatccccaatgttg

SEQ ID NO: 880308 - DNA, 120 bp, Artificial Sequence
  ENSG00000223482_133 (sequence is synthesized)
gaggtggggcgcactgggaggtgttttggttacgggggcagatccctcatgaatggcttggtgctgtcttcatgggattatgttctcactcctacttcctgtgagatcttattgttaaaa

SEQ ID NO: 880309 - DNA, 120 bp, Artificial Sequence
  ENSG00000223482_134 (sequence is synthesized)
agaatctgataccttcctcccctctcttgctctcttcctccctgatcatgtgacacacgggttcccctttgccttccaccacgatggaggcttcctgaggccctcaacagaagcagatgc

SEQ ID NO: 880310 - DNA, 120 bp, Artificial Sequence
  ENSG00000223482_135 (sequence is synthesized)
tggtgccatgcttctcgtacagcctgcagaattgtgtgagccaaataaacctcttttccttatatattacccagcctcaggtatttgtttatagcaataaaaacagactgagacacatga

SEQ ID NO: 880311 - DNA, 120 bp, Artificial Sequence
  ENSG00000223482_136 (sequence is synthesized)
tgaagaccctttgatatcctataaatattgatttctctccctgagagaagagcatgaatctaagtgatgccattactgtaatgtgaattccacaacttttctcaaagatgtggcccatat

SEQ ID NO: 880312 - DNA, 120 bp, Artificial Sequence
  ENSG00000223482_137 (sequence is synthesized)
gtttctaataatggctttctaagaatctgttctgaaggggtaccttctctctgattttcatttgcatttcctgcttagcttacacacttcaacttgcctatccacctgtcctgaccccaa

SEQ ID NO: 880313 - DNA, 120 bp, Artificial Sequence
  ENSG00000223482_138 (sequence is synthesized)
taacctccatcatcagacatctcatcttacctacctactttctacttttcccagtccttcccgtgcttcataaaccatgatcatgagctagagacacaaggtcatagctaaggagttggg

SEQ ID NO: 880314 - DNA, 120 bp, Artificial Sequence
  ENSG00000223482_139 (sequence is synthesized)
atcagaaaatcaccttctgtgattttccattattctcaatacgtaacttcaacaaaatcaagaaaatcatgaaaggacatcctaaggggtcaggtgaggttgcagtggggttagtcggtc

SEQ ID NO: 880315 - DNA, 120 bp, Artificial Sequence
  ENSG00000223482_140 (sequence is synthesized)
aatagtttctttatgccaattaggatttctgcagaaaacaatgaaacactggtttaaacagtaaaaatattttaattccttacagaagcccatggaacatacactccaggtttaattcat

SEQ ID NO: 880316 - DNA, 120 bp, Artificial Sequence
  ENSG00000223482_141 (sequence is synthesized)
cagctcaatagcatcatcaacgacttaggttctttccactttctgcttgtcatctgtgttggctttattttcaagctagctcctccctggttgcaagataattgcagcaggtttagttat

SEQ ID NO: 880317 - DNA, 120 bp, Artificial Sequence
  ENSG00000223482_142 (sequence is synthesized)
catattcggacatgctaacgcccaggctagtgatcccttccttacatttctttctcattttaagaacaaagtgtttaaaaaattatacttaaaattattggcatctctgtcaattgaaag

SEQ ID NO: 880318 - DNA, 120 bp, Artificial Sequence
  ENSG00000223482_143 (sequence is synthesized)
agacaggtaagtcatttgttaaaatctcactactgttgtttaacagaaacatatatatgcatgtatatgtgtgtactgtatggaaaaagtggaattagagtttatctagaaaagaaaaaa

SEQ ID NO: 880319 - DNA, 120 bp, Artificial Sequence
  ENSG00000223482_144 (sequence is synthesized)
catctaagtgcagaaatgaataatacttaaaccataccatacaattctctatcatatttccacagataagtcaaaaatttaaaaaatcttattgttcatgcataaatgcagaaaacaata

SEQ ID NO: 880320 - DNA, 120 bp, Artificial Sequence
  ENSG00000223482_145 (sequence is synthesized)
acttcccagacagccaatgccacatcccaggcagcccctgctctgcccttggggtctgtgcctggcagaagggcggcagaccctcggcccctcttggcctgggccccagctcctccgggc

SEQ ID NO: 880321 - DNA, 120 bp, Artificial Sequence
  ENSG00000223482_146 (sequence is synthesized)
cctggaaccagcagaaacacccaccctgcgcctgatggactggacatgcttgttcccattggtgatggtgtgttgggagggaactgttttagaaaccaatgtaaatctgtgtctacatca

SEQ ID NO: 880322 - DNA, 83 bp, Artificial Sequence
  ENSG00000223482_147 (sequence is synthesized)
aggtggaaggatcacttgagcgctgcactacagacagcctcctgcatgacagagccagaccctgtctcaaaatttggggggga

SEQ ID NO: 880323 - DNA, 120 bp, Artificial Sequence
  ENSG00000223482_148 (sequence is synthesized)
gcatgacagagccagaccctgtctcaaaatttgggggggagtaaagttctctattgtttgaaataataacgaaacattaaaggctctaaagtcagctaacgaatagtcctaaaaatagaa

SEQ ID NO: 880324 - DNA, 120 bp, Artificial Sequence
  ENSG00000223482_149 (sequence is synthesized)
tagctttctgtctgcctatttttaccttgtgtttgtaacttactattataaaatatgcgtctctgtgcattgtcaacattatttacaataacatggagtggattgacacgtattctctat

SEQ ID NO: 880325 - DNA, 120 bp, Artificial Sequence
  ENSG00000223482_150 (sequence is synthesized)
atttggattaaaggagatagagtatgtgaaattaaatgggagaagtatctgatacataacaggcaatacaaatattatcacatagcgtcaacttatttgtgaatattgaaagctccaaaa

SEQ ID NO: 880326 - DNA, 120 bp, Artificial Sequence
  ENSG00000223482_151 (sequence is synthesized)
aagaaaaaaggttttttttaattcccgtaatcacttattgcagtattgtgtacatacaaagtgctcaatcattttggaggaataacaattttttttcctcatcatgaagtaaggtatgct

SEQ ID NO: 880327 - DNA, 120 bp, Artificial Sequence
  ENSG00000223482_152 (sequence is synthesized)
tgctcactgcaaaaaatctagaaaataaagaggaacatactaaagaaaagaatactcccatataatctctgtcttcataaataatcttttgtaacacttatacactgctggtgggaatgt

SEQ ID NO: 880328 - DNA, 120 bp, Artificial Sequence
  ENSG00000223482_153 (sequence is synthesized)
tagttcagccattgtgaaaagtagtgtagcaattccttgaaaaacttaaaatagaattaccgttcaacccagcaatcccattattgggcatatacccagtggaatgtaaatcatcctgcc

SEQ ID NO: 880329 - DNA, 90 bp, Artificial Sequence
  ENSG00000223482_154 (sequence is synthesized)
atgcccatcagtagtagactgaataaagaaaatatggtacatattcaccacagaatactaagcagccataaaaaagaaaaagatcatgtc

SEQ ID NO: 880330 - DNA, 120 bp, Artificial Sequence
  ENSG00000223482_155 (sequence is synthesized)
cagaatactaagcagccataaaaaagaaaaagatcatgtcctttgcagcaatatggatggagctagaggccattatcctaagcaaactaatgaagaaacagaaaaccagatactgcatgc

SEQ ID NO: 880331 - DNA, 120 bp, Artificial Sequence
  ENSG00000223482_156 (sequence is synthesized)
tctcacttataagtgggagatacaccatgagaacacatgaacacaaaaagcggaaaaagagacaccatggcctacttgagggtggaggctgggaggagggagagaatcaaaaaacttcct

SEQ ID NO: 880332 - DNA, 120 bp, Artificial Sequence
  ENSG00000223482_157 (sequence is synthesized)
atggagtactatgcttattacctgcgtgatgaaataatcactttgaacgtggtcagtacattatcttctaatctagactcttttctatgttctatatacacacagaaatacacatgcaaa

SEQ ID NO: 880333 - DNA, 120 bp, Artificial Sequence
  ENSG00000223482_158 (sequence is synthesized)
gctgaacacatgtgtgaaacaaaattcagacactcaaattttccgccaacacgtgataaaatcttgcacaatagcttcctccacagaggaaaatgtctttactacatcttaaaaatgggg

SEQ ID NO: 880334 - DNA, 120 bp, Artificial Sequence
  ENSG00000223482_159 (sequence is synthesized)
taaatgaatagttaggctcttcagtgtaataatcatgataaatattctcaatatgcgaaaatacaaacaaaggactttctctcccagcaaatttagacccacatgaaaatttaagcacaa

SEQ ID NO: 880335 - DNA, 120 bp, Artificial Sequence
  ENSG00000223482_160 (sequence is synthesized)
tcattttaaacgaatttatcctggagcttagtggtttgagttcaaggttgaggagcagtctggggacatcagctcttaatatttttcaagttttggagcaagtggtttctaggttctgag

SEQ ID NO: 880336 - DNA, 120 bp, Artificial Sequence
  ENSG00000223482_161 (sequence is synthesized)
tgaagtgaaacagaatctctaggggcatgtggtaaagataatcccatactatgtactgcgtagagttaaagagaagaggcgagagcatgaagataaaccagtacaatcagtcgttcacat

SEQ ID NO: 880337 - DNA, 120 bp, Artificial Sequence
  ENSG00000223482_162 (sequence is synthesized)
accactaactacaatgatactcccatttgcttcctgtgaagtagttactaataatcactgatgtcgctttttaatttcatacatcctttaactgtcttcatataggtattgaaagagtca

SEQ ID NO: 880338 - DNA, 120 bp, Artificial Sequence
  ENSG00000223482_163 (sequence is synthesized)
acataaaagccacatccattttctaattttgaacaatagttagagaaacctaatatcttctcatatttttgtcttgcttctgtctcatgagttcccaaaatagatatattatctgaatga

SEQ ID NO: 880339 - DNA, 120 bp, Artificial Sequence
  ENSG00000223482_164 (sequence is synthesized)
agagttcatgggcaaatgtcacacttttcttggtttggctaattatatttctgcttttgcttagaataagattaattttcctattctgctaataaaccacgtgatggcaaaatgccttat

SEQ ID NO: 880340 - DNA, 120 bp, Artificial Sequence
  ENSG00000223482_165 (sequence is synthesized)
tctgagaaaagaagcctttggtattttaaagaattgggaagctatttcagataagctatcatatgcatgaagattaatttattcatatgaaatgttcaataaccagaaaagactgtttta

SEQ ID NO: 880341 - DNA, 120 bp, Artificial Sequence
  ENSG00000223482_166 (sequence is synthesized)
tgtggaagtaaaccaggggtgacatggattatcaaatattgtggatcagagtggctgtatcattttactttcctaccatcagtatttgagaattacagttgttctaaatcatcaccaaca

SEQ ID NO: 880342 - DNA, 120 bp, Artificial Sequence
  ENSG00000223482_167 (sequence is synthesized)
caaaagatgatgagtatttttaattgtatttattctagtaggtgtggaatggcatctcatttaatttgtatttctctaatggctaaagatattgaacatctttcgatgtgattatttgct

SEQ ID NO: 880343 - DNA, 120 bp, Artificial Sequence
  ENSG00000236901_0 (sequence is synthesized)
ggtgcagaggatttgaacagaatgagagtcctcctctgtgcagggagaaaggcttcagtgggtctccccctccctgctagggatcctccttgccagccctgggctgggcgctggcaggcc

SEQ ID NO: 880344 - DNA, 120 bp, Artificial Sequence
  ENSG00000236901_1 (sequence is synthesized)
cgttcccaggtctcccgccgagggcaggagaggagccaggcctcaggagagaagtgcttactgagtaatttaccaagagcgataggcttcccactgagccagacgggatccccaggaggg

SEQ ID NO: 880345 - DNA, 120 bp, Artificial Sequence
  ENSG00000236901_2 (sequence is synthesized)
gagtcagaggcgggcctggcatgcatgcacagagagagtgtgcccacttggggagtgtgaagggccttgctgtgggacccgagaggatgagcagagtcaagtggcaggtgggacacacag

SEQ ID NO: 880346 - DNA, 120 bp, Artificial Sequence
  ENSG00000236901_3 (sequence is synthesized)
tctgcagtcacttcttaaaaggccctgggtggtgtgtccttcaatgatgaccattgtccacaatagtgagttccagagggtcgattgggacagttggatagccaaggaccagagtcagga

SEQ ID NO: 880347 - DNA, 120 bp, Artificial Sequence
  ENSG00000236901_4 (sequence is synthesized)
ggcaaggctgatgagcaagaggctgttgccattggccaggcgaggcgtgagggaggctgatggagcgcagcagcagagggatggagaggcaggaatggcatctcctcacaggccaggctc

SEQ ID NO: 880348 - DNA, 120 bp, Artificial Sequence
  ENSG00000236901_5 (sequence is synthesized)
ctctgccggattgggtagggacgggaagatgatggcccccaaccctgggccaaggaacaatagcacccatccgggggcgggggacctgctggagtacttctcctggaccactgctcagtg

SEQ ID NO: 880349 - DNA, 120 bp, Artificial Sequence
  ENSG00000236901_6 (sequence is synthesized)
ggcaatagagggaacaatggtgtttctgaccaggacgggggaaggcaggggaatggaggaagatactgacagggtacagaggaggtagaatggagcgagggccatctccaccgggctagg

SEQ ID NO: 880350 - DNA, 120 bp, Artificial Sequence
  ENSG00000236901_7 (sequence is synthesized)
aaatggggctttggtgggccacactccattgtgctggagcactctggcatctccattggcagtggggaggggcttgtgacctatcagcatcttcaccctttctgagtttccgccgggctg

SEQ ID NO: 880351 - DNA, 120 bp, Artificial Sequence
  ENSG00000236901_8 (sequence is synthesized)
ggctctccagccaggagtcacaggtaccgggtggttgttcatgctgaggccttttgcttggcaaaaagttaatccatttgtgttcatttttaacctaagcaagggttggagcttgttgga

SEQ ID NO: 880352 - DNA, 120 bp, Artificial Sequence
  ENSG00000236901_9 (sequence is synthesized)
ttcagcatctgtggaacacagtctgtagcccatgggaagacgtggacattctttcccaagttcttgaaggacggaaaggaccatgaacttgtgaggtgaccggaggattggttttgggtg

SEQ ID NO: 880353 - DNA, 120 bp, Artificial Sequence
  ENSG00000236901_10 (sequence is synthesized)
tcagttttgtgtctgtcccagtgctgccacttttgctttgaaatggacggggagagctgaaggccagcatgggtttctgcacctgtttcctacagctctgctggggactgtggctcaggt

SEQ ID NO: 880354 - DNA, 120 bp, Artificial Sequence
  ENSG00000236901_11 (sequence is synthesized)
ggcagctgtggacacggatcctgtcagcctttgggtggccagagctccaaggccaggtgtctcttagctgcaagcagccttcactgttaatcaacaggctacacaaatctcacctctaaa

SEQ ID NO: 880355 - DNA, 120 bp, Artificial Sequence
  ENSG00000236901_12 (sequence is synthesized)
gaggtgaaatgtgaaaatatatgggaagcgctgccttagccctgtgtccacaaatcctttctgtaaagggccagatagcatttcaggctttatggaccatgtggtctctgccacaactgc

SEQ ID NO: 880356 - DNA, 120 bp, Artificial Sequence
  ENSG00000236901_13 (sequence is synthesized)
tcagctctgccactgtagcacaaaagcagccagagacagtgcgtaaatagatagcatggctgtgttctgatgaagcttcacttacaaatacacagggctgtagtttgccaacccctgcaa

SEQ ID NO: 880357 - DNA, 120 bp, Artificial Sequence
  ENSG00000236901_14 (sequence is synthesized)
agtagggagtattttgccaaacttggctgtatttcaccaaccccttagactatagagatgacttaccctttggcttaatcatgactggaaacttccttcccatccactgcctggatccat

SEQ ID NO: 880358 - DNA, 120 bp, Artificial Sequence
  ENSG00000236901_15 (sequence is synthesized)
ccacctccccacaaaggcttcctgagcatctcctccgtgtgagcactggctcaatgcacaggacgatgtagttcctgcccatatggaacttaggttttgagtgacacgtgggacattgga

SEQ ID NO: 880359 - DNA, 120 bp, Artificial Sequence
  ENSG00000236901_16 (sequence is synthesized)
agaggagagcaggtggctaaagagcatcatacagaacagggctcagggaagtcccaggtgatagaatctcaaagagaagggctgagggtgaatcaggaaagccctgaaggcaggcagctc

SEQ ID NO: 880360 - DNA, 120 bp, Artificial Sequence
  ENSG00000236901_17 (sequence is synthesized)
cggagtcgggtttagacgaggaggctgcagttctccaggaagggaagcaggaccagataacggatgagattgtgtcaaacaatgaggaggcctgcatagtcacacaggcgcatgaggtct

SEQ ID NO: 880361 - DNA, 120 bp, Artificial Sequence
  ENSG00000236901_18 (sequence is synthesized)
gctcgtaaaggaccaggagggccaggctcaggggtgtggactggattctctgggctgtagggagccactggacagctgtgctcaggagggtcatgtgatcacaaatgcttattagaaatg

SEQ ID NO: 880362 - DNA, 120 bp, Artificial Sequence
  ENSG00000236901_19 (sequence is synthesized)
tcactggctatggaggaccatgtctgtggttgtaagttacgcctttccgtttagtctggacttcctggtcaaggtacttttggtattagagtggggaagagaggcccagagagttggaca

SEQ ID NO: 880363 - DNA, 120 bp, Artificial Sequence
  ENSG00000236901_20 (sequence is synthesized)
ggttttctgaccattggcttatagtcagtgagcaccccacctttattttgacatgacagagctttacagaatcttccttcttcaggcgttttctttcctgctatcctaaagattcacgta

SEQ ID NO: 880364 - DNA, 120 bp, Artificial Sequence
  ENSG00000236901_21 (sequence is synthesized)
cgagggcaggataaatgaaacattctgtctccaatctaagttcggcttggggcctcagaatatgaaggtaaaggggcggggacggactgactgccccttgcttcagaatcaagtcacatg

SEQ ID NO: 880365 - DNA, 120 bp, Artificial Sequence
  ENSG00000236901_22 (sequence is synthesized)
gcgggaacgctctatggagcagattgcttcctttgtacatgccctaggcccgtgttcagcaggcctcagagaagcagaggtgctggcctctcgtctccagaggctgccagctactaaggg

SEQ ID NO: 880366 - DNA, 120 bp, Artificial Sequence
  ENSG00000236901_23 (sequence is synthesized)
aggtggaagcaactacccctgggggtggactgctctgggccgggcccgacgtcaggcgtaggggactgaggtgaatcagacgtggtggctgcattgaggaatgctcagtgtagttggggt

SEQ ID NO: 880367 - DNA, 120 bp, Artificial Sequence
  ENSG00000236901_24 (sequence is synthesized)
ggacgtgagctgctgccagtctgacgtgaacagaaggtgggaatagctggcgctgccgtgcgttgataggagcacagtgtccgctgcgaaggggcggctagggctggagaaagatggcct

SEQ ID NO: 880368 - DNA, 120 bp, Artificial Sequence
  ENSG00000236901_25 (sequence is synthesized)
gatagaagcgcctccacaggcgctgattcagcgaagccccagcagccccgcggggcaggcgaggatcacatgcagctcggagaagaggaggcacttgcccctctgcctgagctgggaggt

SEQ ID NO: 880369 - DNA, 120 bp, Artificial Sequence
  ENSG00000236901_26 (sequence is synthesized)
ggtggccagctgcacacagggctgtcccaggatgctgacgaggcgggaccagccacaggccggcagcgctgcactgtgactccctttcacggggcccagccttgtctctggccttccggg

SEQ ID NO: 880370 - DNA, 120 bp, Artificial Sequence
  ENSG00000236901_27 (sequence is synthesized)
actgagtcaggaggcgagggctacgttgctgccccagcacagtcgggccaggtgtggggaaaggcgggagggaggtgtgctgtgctctgagcagcctggcaggccctggagaggcaggaa

SEQ ID NO: 880371 - DNA, 120 bp, Artificial Sequence
  ENSG00000236901_28 (sequence is synthesized)
gccactgcaaacttcagaaactgggtgctgcttcctctcggtgaagttgtgttttgctaatctctgataatcaggtcagggatacagaaggaagagttgcccctgggtggctgctgtctt

SEQ ID NO: 880372 - DNA, 120 bp, Artificial Sequence
  ENSG00000236901_29 (sequence is synthesized)
tagacttgtcgggctccctctggtacagaagtgcctctcggattttgctgcctggtcttctctcttatggacatggagtagctctcaggctcttatggtacagctctaagaaggaacact

SEQ ID NO: 880373 - DNA, 120 bp, Artificial Sequence
  ENSG00000236901_30 (sequence is synthesized)
tcttgcattgtctagtgaagtttctgggtttatggaagggaaactgacaaactggagccggcacagatggacactgggtaaagagaatgcagcctgtccctggctgcagtgccaggtgtg

SEQ ID NO: 880374 - DNA, 120 bp, Artificial Sequence
  ENSG00000236901_31 (sequence is synthesized)
gcctttcctgtgacagcaagtcacgtgctgtggctccagcttcataggaaggctcttgtctgtcaggcagtggagttacttacagacaagagccttgctcaggccagccctgcccctgcc

SEQ ID NO: 880375 - DNA, 120 bp, Artificial Sequence
  ENSG00000236901_32 (sequence is synthesized)
tacaggcacaggtgctttgccatctgtcccgttttcctgcttagggaaccaagatggtcagaaagttgcttgactctaacctaaatatttctgccgcttttgcgagtcagactctttttc

SEQ ID NO: 880376 - DNA, 120 bp, Artificial Sequence
  ENSG00000236901_33 (sequence is synthesized)
ttttccttgttcatggaaatggatcaaggagtaggagttttagatagctagggaggtggtgagaagttccgtctccacctgtaatttacaagtcgtgtcttaggtttccagcctctttcc

SEQ ID NO: 880377 - DNA, 120 bp, Artificial Sequence
  ENSG00000236901_34 (sequence is synthesized)
tctgttctgggtatctcgtgctctccaccctttagggattttggtgtggtgggtccgtggcaagacactcgatccagacacacgcatttccgaggcacttccatgtcacttaccaagcct

SEQ ID NO: 880378 - DNA, 120 bp, Artificial Sequence
  ENSG00000236901_35 (sequence is synthesized)
ccttgtgtgtggatatcacttcactggctccctcaggctgcagccctgacccccaaggtagtgatggcagctggtgcatgaggtttgatttggaagtagccaggcaagccctggttgcaa

SEQ ID NO: 880379 - DNA, 120 bp, Artificial Sequence
  ENSG00000236901_36 (sequence is synthesized)
aaaatacctcttctattccgacagcgggccagaggccgctgccattagacgcatccctctacttacccccgatcacttttcatggtcaggccggccttgcacaagcaggttctgttcact

SEQ ID NO: 880380 - DNA, 120 bp, Artificial Sequence
  ENSG00000236901_37 (sequence is synthesized)
gcgcacccccatttcttagatggggtactgagcactgcttttcccttagctcacttcatgtggcagcttctcagggatgggacctaccatggctgtgggagatgctttgctactacttac

SEQ ID NO: 880381 - DNA, 120 bp, Artificial Sequence
  ENSG00000236901_38 (sequence is synthesized)
tacctttccgagggaggagggctcatttttagaaatgttactggggagccaaattgtaggcctccgaccagagggcctcgctctctccatctcccaggaaccaagggtagctctggctct

SEQ ID NO: 880382 - DNA, 120 bp, Artificial Sequence
  ENSG00000236901_39 (sequence is synthesized)
ctgaggagctgtctccagcctccaggtggacgtcctttccagcataccagggcttatggaggcaaaatgaaagctggtccacgtgggaactccctactgttgtcctttccttgggcagac

SEQ ID NO: 880383 - DNA, 120 bp, Artificial Sequence
  ENSG00000236901_40 (sequence is synthesized)
accatatactttttagctcctagcagtgtttatcccgttttccccaaagcatccttggactcaggcctttcatcctggacccatctgtctggcctgttgtgctgagcctttggtctaagt

SEQ ID NO: 880384 - DNA, 120 bp, Artificial Sequence
  ENSG00000236901_41 (sequence is synthesized)
ggttggttggtcccagccacttcttcaaaagaaggtttcctgaggtaaccataaattagggcaatcgtacttccaggaacagtgaggctgatgggcctgttcccaagggtactttggcag

SEQ ID NO: 880385 - DNA, 120 bp, Artificial Sequence
  ENSG00000236901_42 (sequence is synthesized)
ggggtgctggggaaggggctggcctagggccaggttcatcataccgttagccctgcagccccatgcctgtgtgtcctggtttacccgccgtgtagtggtcctgcaggagtggagcctgta

SEQ ID NO: 880386 - DNA, 120 bp, Artificial Sequence
  ENSG00000236901_43 (sequence is synthesized)
ggacttgcttctcagcggctccaagcagaactctgtctgggaaggtgggaggtgcagccagtctagacctgaagccctcacactaaggactaaggtaggcctgctcagccttagcccttc

SEQ ID NO: 880387 - DNA, 120 bp, Artificial Sequence
  ENSG00000236901_44 (sequence is synthesized)
gtcaggcccaagggtgggggaggcaggaggaggctgagcgtagtcgtggatagaaacctttccctaccgcacggttacacacatggcatgggactcctggctgtagctcactcgggtcta

SEQ ID NO: 880388 - DNA, 120 bp, Artificial Sequence
  ENSG00000236901_45 (sequence is synthesized)
ctgaagaccaagttggtttttagaaatctatttaaaatatctatcatgtatctatttactgtgtttttctgaatacgcaagtgtaaatagtataatttgcagtgcaaaatccttggcaat

SEQ ID NO: 880389 - DNA, 120 bp, Artificial Sequence
  ENSG00000236901_46 (sequence is synthesized)
aactttgtgtattatgtttaaaaacactggaaaccgtgaccaccatggactgcccttcccctctgaggcaattattacatgtaggactctgaactttaaaccttcagcgtgactgaagca

SEQ ID NO: 880390 - DNA, 120 bp, Artificial Sequence
  ENSG00000236901_47 (sequence is synthesized)
gcagcctgcacatgtggatggtcatcagtgcctcgcccagagatacctggccttcatccaaagggaccctgctgccacaagtcctccaggcagcacccgcactgtggctccttcgcactg

SEQ ID NO: 880391 - DNA, 120 bp, Artificial Sequence
  ENSG00000236901_48 (sequence is synthesized)
agtatgttggactctgccatagactgaccctcttgtctggctgctgcagtttgtctgtaatgccctgacatgttgcattctccccatttggataaataaaaacaaacaaatgcttctgtc

SEQ ID NO: 880392 - DNA, 120 bp, Artificial Sequence
  ENSG00000236908_0 (sequence is synthesized)
atcttctgcttcaccccatgctcggtccctgagccagttctgtcattggttctttcagaccagggcaggaaaagtcaagaaagcaaaagcggattctaggctgtggggtttgctgtttgc

SEQ ID NO: 880393 - DNA, 120 bp, Artificial Sequence
  ENSG00000236908_1 (sequence is synthesized)
tagccccctggcagagatgcctgtccttgcagtcctgaactggtggccaagtgtgcatgcatgcacgtgcaggtgtgtgcatgtgcaggtgtgcatgcgtgtatgtgcgcacacacattc

SEQ ID NO: 880394 - DNA, 120 bp, Artificial Sequence
  ENSG00000236908_2 (sequence is synthesized)
atgcttgtacatgtttgtgtacacgcacacttttttctgctttcaatttcaagctgttgcctccctgatgtgtctgtttagtgacttgagccagaaagattcccggttctatgtgggatg

SEQ ID NO: 880395 - DNA, 120 bp, Artificial Sequence
  ENSG00000236908_3 (sequence is synthesized)
agaatgaacgcaggcaggtctccacagaagtgagtaaagtagagctgagaagaaggacattgtctcatgccagcctgtccaatagccactttgccccagccctgcctcaagccccagaga

SEQ ID NO: 880396 - DNA, 120 bp, Artificial Sequence
  ENSG00000236908_4 (sequence is synthesized)
gatgacaaggctctctctgtttgtcgactccttgaagctcagaaaggtgggtcaagaggtgcccgtcaagcgtttaggcaagcacaggaccctgatctttactaagtctccacatctctc

SEQ ID NO: 880397 - DNA, 120 bp, Artificial Sequence
  ENSG00000236908_5 (sequence is synthesized)
ttgcacagccctgggctcagggcttggtcccctctgggcaggccatccagactaagtgacagtcagattgtgtgtggggaggctagagacatccattcttcatggatcagcctgaatggc

SEQ ID NO: 880398 - DNA, 120 bp, Artificial Sequence
  ENSG00000236908_6 (sequence is synthesized)
tggacagatcttgcaaatggattgtgtaagacagagtgtggaagaggaggctgtgatcagtggcttggagagcagagtgtggtcaggcgctaaacctaaggcttttctgggaagagctgt

SEQ ID NO: 880399 - DNA, 120 bp, Artificial Sequence
  ENSG00000236908_7 (sequence is synthesized)
taagattagactgttctcccaaaaagccaataattctgagtgtctccattaatgcctaggtagcccatactctcacccagccggtgcccttcagcctggaacctttggatggaggattgg

SEQ ID NO: 880400 - DNA, 120 bp, Artificial Sequence
  ENSG00000236908_8 (sequence is synthesized)
accttgtgaccttcaagttcccttccgaaccaaatatgctctaacccaggagatggtgctgttgcccaggaagccggtcaccatgacgagagtacccgctcagatgaggatgcaggcgga

SEQ ID NO: 880401 - DNA, 120 bp, Artificial Sequence
  ENSG00000236908_9 (sequence is synthesized)
ggcggtgaaggtgctggaggccaggatgctgaggtagctgctcctctccaccagggtccagatgcccatggccaggacagctgcccccctgacctgcaggagaccaccaggttggagcag

SEQ ID NO: 880402 - DNA, 120 bp, Artificial Sequence
  ENSG00000236908_10 (sequence is synthesized)
ggggtggcgggggcctcaggagctgccattccttgagtgcccgctgggtaccaggcacttctcgtgcattgtcttattcaatttaggcctcctaagagcctgtgagaacagtgtggtggc

SEQ ID NO: 880403 - DNA, 120 bp, Artificial Sequence
  ENSG00000236908_11 (sequence is synthesized)
ctagctttacagatgaggaaacggaggctgagagaggtttgcaggcttgtccaaggtcacacatgtaagcgagctgcagattttgaatctgggtctgacttctgattctgtgcatcttac

SEQ ID NO: 880404 - DNA, 120 bp, Artificial Sequence
  ENSG00000236908_12 (sequence is synthesized)
gttcctactgcatatgaggcggggagaaatgacttcagttttggggatgactaatatacctgagtcccttcgcctcccctcccctcagagcgctccctccctctgtccacgtttccctga

SEQ ID NO: 880405 - DNA, 120 bp, Artificial Sequence
  ENSG00000236908_13 (sequence is synthesized)
tggatgtggaggtgccattttgagcacctccccttgttcaatccttatatttgcccattggggaagcacggctgggccccttatccctccctgttctacagaggaaggaactgaggccca

SEQ ID NO: 880406 - DNA, 120 bp, Artificial Sequence
  ENSG00000236908_14 (sequence is synthesized)
tggaggagaggtaaatggcccgagttaggggcagggccaggaccaggactcagagcccagggcctgcttgctcagtctcgctgcctccatgatggaagggccactgtgctggacaagttg

SEQ ID NO: 880407 - DNA, 120 bp, Artificial Sequence
  ENSG00000236908_15 (sequence is synthesized)
gagctccctgggaccacaggaggagggaggagagccttctttgctgtctgactccctttcagtcctgagagggggcagggacgggacactgctgatttgcaggtctgggggatgccttct

SEQ ID NO: 880408 - DNA, 120 bp, Artificial Sequence
  ENSG00000236908_16 (sequence is synthesized)
tggaaatagagtacctgggaaatgtagctggggtggtggggcttgactgttctttcctgccatgaagctgaggagccttttagtgactgttatcctcagcagagcatagtgggtgggtgc

SEQ ID NO: 880409 - DNA, 120 bp, Artificial Sequence
  ENSG00000236908_17 (sequence is synthesized)
aagtgtcctcaaggtgccagatgggggctgtttggagtgttttcccaggatttgggtcctctgggacctctgaccatctctgtcatttgctcctgggaaggtggacttctgtctcccagt

SEQ ID NO: 880410 - DNA, 120 bp, Artificial Sequence
  ENSG00000236908_18 (sequence is synthesized)
ctctctgcccgccatttagggacgggtccatttcctctgatggtcagtagatgcttcctcaaggggtcttgggtgtagccaaagctagagaagccctcccgggctctgttcacatcccct

SEQ ID NO: 880411 - DNA, 120 bp, Artificial Sequence
  ENSG00000236908_19 (sequence is synthesized)
gatgcttttccctgcaagttgtctcccgtctgccccaggaagactctctgtataacctaacctgtcacttcccagttctctgttccggggagtcgcagaccttggctgagtaaatggaag

SEQ ID NO: 880412 - DNA, 120 bp, Artificial Sequence
  ENSG00000236908_20 (sequence is synthesized)
gtggttcttagcaatgaacaggcacctacattactcaactcgcaagtattttaccattttgccattttctcttctgagctttgcaacagctctgtgaggatggggccgggcaggaggggc

SEQ ID NO: 880413 - DNA, 120 bp, Artificial Sequence
  ENSG00000236908_21 (sequence is synthesized)
caggctatccctgtcttgcagataagaaaattgaggcttggagagaataagaatgtgcccaagatgacaccatcagagggtcagaattgaggtgcaaacccagttatttgagggcaaatc

SEQ ID NO: 880414 - DNA, 120 bp, Artificial Sequence
  ENSG00000236908_22 (sequence is synthesized)
caggcctctgtccttggatcccccagagtaggctgggcctgcttctctcttacttctacgtttttaatagacatgatttcttcaaagtgccattttatctccataggtacctccagacac

SEQ ID NO: 880415 - DNA, 120 bp, Artificial Sequence
  ENSG00000236908_23 (sequence is synthesized)
cacccaggctgcagcaaatggaatgggagaggctaacacaccataatttttcaattccatgatgcccattttttctcacattttaacgtctctaaaattggggcacatcttatgattgat

SEQ ID NO: 880416 - DNA, 120 bp, Artificial Sequence
  ENSG00000236908_24 (sequence is synthesized)
ggcatcttacaattacacttggcagtactttttcttggtgatacaaaaaaacaacagtgtatcttacaactgatagcttagattcagtgaaatcctagaatacaacaggtttgaaaattc

SEQ ID NO: 880417 - DNA, 120 bp, Artificial Sequence
  ENSG00000232628_0 (sequence is synthesized)
ttcgggagctgcagaacttcagtgtccatcagtcagaggcaatgcccctgacccagacgcctctagttgagagatagacagagctggatttatagcaccacagacctgacctggaatgag

SEQ ID NO: 880418 - DNA, 89 bp, Artificial Sequence
  ENSG00000232628_1 (sequence is synthesized)
tggcgaatgcagtggcgtgatcttggctcaccaaaaattctgcctcctgggttcaagtgcctccacacccagctaattttgtattttta

SEQ ID NO: 880419 - DNA, 120 bp, Artificial Sequence
  ENSG00000232628_2 (sequence is synthesized)
gttttctgagactgcatccactttgatagtttctactgagtccaaattagaacatcccagctggtgggctgtctcccaggaagccctcggagaggagcggtgcatagggggcacctggac

SEQ ID NO: 880420 - DNA, 120 bp, Artificial Sequence
  ENSG00000232628_3 (sequence is synthesized)
acagcccacctcccccgagtagcgtcaggtaggcttgtctatctacatcctttcgccctttctcaggaaactatcagatgatgtgctcccccagatgaagaagtagtgccaggaaaaagg

SEQ ID NO: 880421 - DNA, 120 bp, Artificial Sequence
  ENSG00000232628_4 (sequence is synthesized)
agacacgggatacagggatcctgaagccggcggaggacaagggagctcctgggaggacagctgtgctccggcctagcaatagcgagcagctggtccagactgccgccgtgactcagaaga

SEQ ID NO: 880422 - DNA, 120 bp, Artificial Sequence
  ENSG00000232628_5 (sequence is synthesized)
tgcccaggttgaagaagatgaaaggccctgcctcccagagcgcccggggacactggtgatctcttccaggtctgtttccacccactgcagctgtgatggaatcttgctctgttgcccagg

SEQ ID NO: 880423 - DNA, 120 bp, Artificial Sequence
  ENSG00000232628_6 (sequence is synthesized)
tacactgccttataaggctgaaatgctgctgccagagagctgtggggcccaggccttgaattcttggtgcaccagtgcttgacaggctccccttatttcccactggcaccgctgggccta

SEQ ID NO: 880424 - DNA, 120 bp, Artificial Sequence
  ENSG00000232628_7 (sequence is synthesized)
ggggttttcctattgtttttctaaaggcattccaaggccaggacaatgttaatttaagttcctccaggctgaattttttttttttttaattacagaggggtgtcactatgttgcccaggc

SEQ ID NO: 880425 - DNA, 120 bp, Artificial Sequence
  ENSG00000232624_0 (sequence is synthesized)
cttggatctggacttttagaactggtcaggacctgacagatcctccagcccagttctcccggctctcaaacactggcatcatttataattccctggaaaatcaccagcaggtaaatgaag

SEQ ID NO: 880426 - DNA, 120 bp, Artificial Sequence
  ENSG00000232624_1 (sequence is synthesized)
gagaaaagaaaagaacaaaatccaccgggaaccagagacttccaggctccaaagacaggcaatctccaccaggaaggctggagtgcagctgaggtctggctttagccaaggagagcacct

SEQ ID NO: 880427 - DNA, 120 bp, Artificial Sequence
  ENSG00000232624_2 (sequence is synthesized)
tgaaacctggcagagaattacagtgaaccagaagactaagtgaagcatgaactggcataatatgctttcctggctgaaaaccatgaatgacccagaatagttcatatctttggaagatcc

SEQ ID NO: 880428 - DNA, 120 bp, Artificial Sequence
  ENSG00000232624_3 (sequence is synthesized)
ttattttccttgtaaatgaaagtcatgcatttggaataataacatgaaatgatgtgaatgacaatttggccaggaagtgaccagcaatggaaaaagggaaataatcagcacatctgcatg

SEQ ID NO: 880429 - DNA, 120 bp, Artificial Sequence
  ENSG00000232624_4 (sequence is synthesized)
tgtgcccatctcagagacacaaactgtgaataacaactcacttggcttcataaccaagacctactctgaggaattgcatctcttccttggagaccttgattggcctgctaggttaaaggc

SEQ ID NO: 880430 - DNA, 120 bp, Artificial Sequence
  ENSG00000232624_5 (sequence is synthesized)
ggaacccaaaggtgtgaagtaaaagctggaaaccaagattgctgggaaagttcagagaaagtagagattacttcgtttgttggagatcacatgcaagtatagacaggatttccacatgtc

SEQ ID NO: 880431 - DNA, 120 bp, Artificial Sequence
  ENSG00000232624_6 (sequence is synthesized)
gcccaggctgatctcagactcctgacctggatcttcccacctcagccactgaacgtgctgggattacagaggatgtccagctatcattccatttgtctgctttttatgcctaaaattcat

SEQ ID NO: 880432 - DNA, 120 bp, Artificial Sequence
  ENSG00000232624_7 (sequence is synthesized)
ggaagagtcagctgggcatgccatctcaccacctcacctcttctccatgccagtcgggctcccacttctgctgcttgatggtgactcctgctccagagacaaggtcttgctatgttgccc

SEQ ID NO: 880433 - DNA, 120 bp, Artificial Sequence
  ENSG00000232624_8 (sequence is synthesized)
aggctggtctcaaactactgtccttaagtgatcttcctgcctcggccacccaaaatgctgagattacaggtgtcagccaccgtgcccagctcaccgtaagcctagaattgtacgattgga

SEQ ID NO: 880434 - DNA, 120 bp, Artificial Sequence
  ENSG00000232624_9 (sequence is synthesized)
actcaatgacgttcacgctattcttagaaacagttgagccagtggcggtggagtctgaaggctctggaatcttttccttcgtgtggcagcaacttatttttcctgcggaggctcggtggt

SEQ ID NO: 880435 - DNA, 120 bp, Artificial Sequence
  ENSG00000232624_10 (sequence is synthesized)
agttcacaactgccaaaaccgcgtgttcagactgaaaggctgggagcatttcagacgcatttatgaacttccaccaagatgatccggcaggctgaaatcgcagggagagcgtctgttcaa

SEQ ID NO: 880436 - DNA, 120 bp, Artificial Sequence
  ENSG00000232624_11 (sequence is synthesized)
caaaccctttcttcttgattgaattagtgttacccactaacaggatgaggaattcccactccacaagctgactttttttcctctttccacctcccgcctccctccattaaaatgtaaact

SEQ ID NO: 880437 - DNA, 120 bp, Artificial Sequence
  ENSG00000232624_12 (sequence is synthesized)
aacgtgctgggattacagcctgcaagcagcagctggtgcccagcgtgcaaatgtatcactaccagcaccagaggttaacagatactacagctggagctgcagaaagagcctcctgaggag

SEQ ID NO: 880438 - DNA, 120 bp, Artificial Sequence
  ENSG00000232624_13 (sequence is synthesized)
agtgactttatggtgtacagtctggaccttcaaattggagggggtgaggagaaccctaaagcccaggcatcgatggggaattctggagacaaaagctaattaaagttcatttcaaacctg

SEQ ID NO: 880439 - DNA, 120 bp, Artificial Sequence
  ENSG00000232624_14 (sequence is synthesized)
gagttggctctgtccttaaattttgcagcaggagaattattgagctgttcttgggatgatttttagcctatgtatgtctacacttaggaggctgacatcttataaatgcatatggttttg

SEQ ID NO: 880440 - DNA, 120 bp, Artificial Sequence
  ENSG00000232624_15 (sequence is synthesized)
ttcaaatgaatacgtagttgacaaatacttggctagaagttataatgacaaatttaatagccctactatagcctgaactgtcatctttatttgggttaagcttgctaaatgtcaactgga

SEQ ID NO: 880441 - DNA, 120 bp, Artificial Sequence
  ENSG00000232624_16 (sequence is synthesized)
caaaaatattctacagattcatgctcaggaaagccaaatgctctacaataggatgaagtggctccaggagagttctgtttactactttaataagtgactaaatatatggtatttacgcat

SEQ ID NO: 880442 - DNA, 120 bp, Artificial Sequence
  ENSG00000232624_17 (sequence is synthesized)
ggagtccagagtcctcgaagggaaatctgacacaaagaagcaggtgtgagaccggcccctttctcccatgccttagacagggctccagggactgcttcaggggagatgtcagagggcagc

SEQ ID NO: 880443 - DNA, 120 bp, Artificial Sequence
  ENSG00000232624_18 (sequence is synthesized)
ctccaaagacaggcaatctccaccaggaatatagacaggatttccacatgtcgcccaggctgatctcagactcctgacctggatcttcccacctcagccactgaacgtgctgggattaca

SEQ ID NO: 880444 - DNA, 78 bp, Artificial Sequence
  ENSG00000232624_19 (sequence is synthesized)
atagtcctcctgcctcagcttcctgagttgcgactacagccatgaaccactgcatccagttcaggtaagcctagaatt

SEQ ID NO: 880445 - DNA, 120 bp, Artificial Sequence
  ENSG00000232624_20 (sequence is synthesized)
tgaggagtgtagtggcatgatcatagttcactgcaacctctgcctccctcccagactcaagcaatcctctggcctcagcctcaccaagtagctaggactacagattcatgacttcaattg

SEQ ID NO: 880446 - DNA, 120 bp, Artificial Sequence
  ENSG00000232624_21 (sequence is synthesized)
agagatgagtttcaagccacctttcaaggaatcctgggtagaatgaaatctgttccatggaatcttaagaagaagaagaaaaaaaatcaagatccctgtgggcaaagtcatttgctgtca

SEQ ID NO: 880447 - DNA, 120 bp, Artificial Sequence
  ENSG00000232624_22 (sequence is synthesized)
tgcttggaaggagtagaaccaagtgtttatgagcatggactttggagtcaggatactctcctgatataccacgatgcagaatgtcaagtaggaaaagaagctgttgcattgggcaattaa

SEQ ID NO: 880448 - DNA, 120 bp, Artificial Sequence
  ENSG00000232624_23 (sequence is synthesized)
gaagtcattggtgagagaagtttcagtctgaagtggaatcatagtaaattacagaaaaatagtctttggagagagaaggaatctggttaatccacaggccacacaatcatggttgaaaat

SEQ ID NO: 880449 - DNA, 120 bp, Artificial Sequence
  ENSG00000232624_24 (sequence is synthesized)
tagtgaatgagcgaatgatggatccatctcttgaagcaatacttgaatcgcagaattcttatattgatagaagcagaaggaaaccagaagtgctccaattaaaggcctccatttttcaga

SEQ ID NO: 880450 - DNA, 120 bp, Artificial Sequence
  ENSG00000232624_25 (sequence is synthesized)
aattcaggagtgtgtcctggctctgcaagggcatcacccatgtgggctcaccgcttgcctctgggactgaagacaatttggccaggaagtgaccagcaatggaaaaagggaaataatcag

SEQ ID NO: 880451 - DNA, 120 bp, Artificial Sequence
  ENSG00000232624_26 (sequence is synthesized)
acctatagcaatttatgagaaatgaaggaagtgggagagatgctaagttactttaagggatgttctgaaatcatgaatctagctggaatagctggtgttggctgtgtccagaagagctgg

SEQ ID NO: 880452 - DNA, 120 bp, Artificial Sequence
  ENSG00000232624_27 (sequence is synthesized)
atcattttttcctcatcaatttctgggacagttcctgtatagacaggatttccacatgtcgcccaggctgatctcagactcctgacctggatcttcccacctcagccactgaacgtgctg

SEQ ID NO: 880453 - DNA, 120 bp, Artificial Sequence
  ENSG00000232624_28 (sequence is synthesized)
ggattacagttgaaggtctggaatggaaactcctattgtgatcttaagggctgtaacccagagaatctggttcttcctggagtatttcagcagggatcagcctgtttcctctgatcagct

SEQ ID NO: 880454 - DNA, 120 bp, Artificial Sequence
  ENSG00000232624_29 (sequence is synthesized)
tcaggagactgagtgaggaagatttgccttccccagtgtagatggccatcatccaaccactttagggccctgatacaacaaaaaggccgaggaagggcaaatttgctctctcttctgcag

SEQ ID NO: 880455 - DNA, 120 bp, Artificial Sequence
  ENSG00000232624_30 (sequence is synthesized)
ctggaacatccatctttttcccccatcttcagacatcagaactctagattttctggccttcagactccagacttgctccagcaccctctgagccccattctcctctcattcccaggcctt

SEQ ID NO: 880456 - DNA, 120 bp, Artificial Sequence
  ENSG00000232624_31 (sequence is synthesized)
ctgcttcaaattgaggctgacaacattgactctcctggttctcagacctctggatatgagacctctggcgcaactcacccctggcttgcaccaaacattcttaaaatgtttattggggtc

SEQ ID NO: 880457 - DNA, 72 bp, Artificial Sequence
  ENSG00000232624_32 (sequence is synthesized)
tacaacaagcagttaagcgggcccgagactctaccaacttcaaaaactgtttccaagatggccctggggatc

SEQ ID NO: 880458 - DNA, 120 bp, Artificial Sequence
  ENSG00000232624_33 (sequence is synthesized)
cgcattcatggtgactcaacctgttagcagttcctttcttctgggatccagcctgttgcggcctctttagtatcagcagtggctgtgcagaacattgccaagcccttagcaacctattca

SEQ ID NO: 880459 - DNA, 120 bp, Artificial Sequence
  ENSG00000232624_34 (sequence is synthesized)
gcagctctgtggggatggctggggagccccaggtttgcaaatgcaacggcgagtcagcctggaaagtcggcaccacggtgccctctccctgccaggctccttccaagaaattcccagcta

SEQ ID NO: 880460 - DNA, 120 bp, Artificial Sequence
  ENSG00000232624_35 (sequence is synthesized)
ccctgctgtttattaaacagctcagtaaagaaagcacagggggcaaaacagccatcctacatgagcagaaggcattcacaagttgccagagtgattttgtctgagtgttcggcctggagg

SEQ ID NO: 880461 - DNA, 120 bp, Artificial Sequence
  ENSG00000232624_36 (sequence is synthesized)
ttggaaaggcagcagcaggacaaggatcagtggcaggcaaagaggcaaaaaaagcaggacccgggttccataggcaactgctttatttacagttccaaaaacggtgcttgttcaactatc

SEQ ID NO: 880462 - DNA, 120 bp, Artificial Sequence
  ENSG00000232624_37 (sequence is synthesized)
ctgaacttttgtagaagttcaaacttggaaattgtagtgatgaaatgagagctgtgttttaaaaattacttttaactgtctatgaagcaagtctacattttggcaaaatgggctgctttt

SEQ ID NO: 880463 - DNA, 120 bp, Artificial Sequence
  ENSG00000232624_38 (sequence is synthesized)
aatctggtcatgtgggatttaaaaaaagatttaattcagctggattttgcaaagcccttgcattgtatgacatgaggttatttaaggtatagttttgtcttcaaagagaagaaataagac

SEQ ID NO: 880464 - DNA, 120 bp, Artificial Sequence
  ENSG00000232624_39 (sequence is synthesized)
acacgcatggatttttagagtaaaaataacgagagaatgttattacccaagagcatatattagctcacttgcagtgatgttgaactgggaacattccagaaggattccacgtgaagcagt

SEQ ID NO: 880465 - DNA, 120 bp, Artificial Sequence
  ENSG00000232624_40 (sequence is synthesized)
gtttgcatttgtatgtttgaaatgctccataacaaaattgaaaaactgtaagagcaaaataaataataatacggattatgaagtaattaaaatgaagcagagaaaaaacctgtaggatgc

SEQ ID NO: 880466 - DNA, 90 bp, Artificial Sequence
  ENSG00000232624_41 (sequence is synthesized)
tgtgagactttttttttttttttagttacgtgtggcccaagacaattcttcttcttctgatgtggcccagggaagccaaaagactggcca

SEQ ID NO: 880467 - DNA, 120 bp, Artificial Sequence
  ENSG00000232624_42 (sequence is synthesized)
cttcttctgatgtggcccagggaagccaaaagactggccacctctggttcaaataaacatttacagcctcagtcacatatattagaaaatgaaaaagactgaaaaatttgccagctactt

SEQ ID NO: 880468 - DNA, 120 bp, Artificial Sequence
  ENSG00000232624_43 (sequence is synthesized)
gcttgacacagtacaacagaaaaacaacagcaaagcaagcagaaagaaggcagaagaaggaaggaaaccataaagataaggagagcaattaatgagctagaaaacaaagtaataatgcag

SEQ ID NO: 880469 - DNA, 120 bp, Artificial Sequence
  ENSG00000232624_44 (sequence is synthesized)
aaatcaacccaactaaaagccggttccttgaaaagagtgataaagccatctctggcaagaatgaccaaggacgagagaagaaaaagcatgaaaaagaaacagagcataactactgatgga

SEQ ID NO: 880470 - DNA, 120 bp, Artificial Sequence
  ENSG00000232624_45 (sequence is synthesized)
gattttaaagcctgtaagagaatactatggacaagttcctgacaatacatttggaaacagagaaatcagacaatctcctagaaaaatattaattacaaaaactgatgaaagaaaaagctg

SEQ ID NO: 880471 - DNA, 120 bp, Artificial Sequence
  ENSG00000232624_46 (sequence is synthesized)
gaatatacctataatcaacaaaagaagtgaatcaagttaataatctacagccttccttccccggatgcctccctctccaaaaaacaggccagacacagccaagtttacaaaatcttcaaa

SEQ ID NO: 880472 - DNA, 120 bp, Artificial Sequence
  ENSG00000232624_47 (sequence is synthesized)
gaacagataagcactactttgtataaactttttcaaagaatagaaaaaggacaacttcccacatcattttgtatgcataaccttgataataaaactgaacaaataaaatagagtgtagca

SEQ ID NO: 880473 - DNA, 120 bp, Artificial Sequence
  ENSG00000232624_48 (sequence is synthesized)
ggtcattgttaattatgaaatgagtgtaatgatcttaaataaaatattagtaaaccaaatctatcaaaatatttaaataatacatttttgaccagttagtgtttatcctaatgtggcagg

SEQ ID NO: 880474 - DNA, 120 bp, Artificial Sequence
  ENSG00000232624_49 (sequence is synthesized)
gtggcaggatggtttacattaggaaatctttttaatgtaattcaccacatctgtacgtttaaagatgttcaaatgttactatatattgcttacagttttatgtctgtaaaatataaaaat

SEQ ID NO: 880475 - DNA, 120 bp, Artificial Sequence
  ENSG00000232624_50 (sequence is synthesized)
atagtcaattactgtctatctctggtgatggagagtaaacaatgaaatggggatgctttagctggcactaaaatattttctttctcaaaaaataaaaaggtaactaaaggaaagatagtg

SEQ ID NO: 880476 - DNA, 120 bp, Artificial Sequence
  ENSG00000232624_51 (sequence is synthesized)
ttaaggataatacttcttagatctagtggatgaaccccttggtcattgtcattgttttcatttcttctgaattgctgagatattacacaactaaacatatttgagaaaaaaagagaaaag

SEQ ID NO: 880477 - DNA, 120 bp, Artificial Sequence
  ENSG00000232624_52 (sequence is synthesized)
ggcaggaacccagactcctgctagctcagtgctctgtcttccttagctttttgttccttggacttaaggtccaagatggctgctgaggttccagccatcacactaaaattgcatccgact

SEQ ID NO: 880478 - DNA, 120 bp, Artificial Sequence
  ENSG00000232624_53 (sequence is synthesized)
aacgtatctgcttgtatttcatttgccagcactcgatcacagaacaaagatgtttgtgaaatgcttgaataactggggttctgttattaaaagaaaggtaataattgctcttgaggggct

SEQ ID NO: 880479 - DNA, 120 bp, Artificial Sequence
  ENSG00000232624_54 (sequence is synthesized)
acaaccatctggagttgggataatacaactgccacactgaattctatgaaagccaattctattggctattgttgtatgcaaatatccctctctttggtgaaacagcaagcagctaattat

SEQ ID NO: 880480 - DNA, 120 bp, Artificial Sequence
  ENSG00000232624_55 (sequence is synthesized)
gttaagggatgccttctttttggtctctttcttttgtaacaatctcaagagttcaagtttccaaagtgaactctctttttcagtcgtttggagctttgtagcttgattgaaaagaatgct

SEQ ID NO: 880481 - DNA, 120 bp, Artificial Sequence
  ENSG00000232624_56 (sequence is synthesized)
gtgattcagctggccacgttgctaggctgcctgacaatttacctctagcagtggggaggaaacagttgtgttgttggaaatatttaacttaaaaatggatgaaaatcattcttcaagttt

SEQ ID NO: 880482 - DNA, 120 bp, Artificial Sequence
  ENSG00000232624_57 (sequence is synthesized)
attttttaatagctaaattattttgcttagaagggctaaaacatttctgtgtgttcctctttcgttttttttttttttaaaggaggtaataaataaggtgaataaaattgtaaacaaaaa

SEQ ID NO: 880483 - DNA, 120 bp, Artificial Sequence
  ENSG00000232624_58 (sequence is synthesized)
ctttggctcctggggatccacctgcagcccacaggggcctggaagtgccgggggaccatggtcctgaacacccagagacttggcagaacatcagctgatgctgctccctttaaaacactt

SEQ ID NO: 880484 - DNA, 120 bp, Artificial Sequence
  ENSG00000232624_59 (sequence is synthesized)
gggcagttttgccatcagagtggaggtgaggggtctgttgtggtggcagtcagcagctgcctgaggatctgggagagacctagcaggcagtgaggacagtggatggcaaggggcctcaga

SEQ ID NO: 880485 - DNA, 120 bp, Artificial Sequence
  ENSG00000232624_60 (sequence is synthesized)
tcttcatccagtatcttctaacgttaacaacctgcaagaccacagcataatatcaaaatcaggaaattggcattggtacattccgaagagtttattcaaatttcaaaagttttgcatgca

SEQ ID NO: 880486 - DNA, 120 bp, Artificial Sequence
  ENSG00000232624_61 (sequence is synthesized)
tgatctgaaactacccatatgggccaacaccacagagttctgtccccacgggccaaggagggcttctcaggatcctcaacttcttgcctggttgccagaccaatcactagaggtaagcct

SEQ ID NO: 880487 - DNA, 120 bp, Artificial Sequence
  ENSG00000232624_62 (sequence is synthesized)
aaaagtgacacagttttcaccttgttcactgggatacctgcaacaggaccctgagccggccatcttgtgacgaagtccagaccacgtggagatggcgcatggtctcactctgttgaccag

SEQ ID NO: 880488 - DNA, 120 bp, Artificial Sequence
  ENSG00000232623_0 (sequence is synthesized)
agaatctgaccagtcccagctcttttgccagggcacacgtttccaagggcatgggccagccactggacaggccctcttcgggtgagcgatggcaaaatatagggtccctcctaagaacag

SEQ ID NO: 880489 - DNA, 120 bp, Artificial Sequence
  ENSG00000232623_1 (sequence is synthesized)
tcattaggagagcagcagctgtgagggctgattagcctagaagggaacattggatgtgtcagccaatcctctagcacaacagaattaacataaaacaagcattttggatgagggatactc

SEQ ID NO: 880490 - DNA, 120 bp, Artificial Sequence
  ENSG00000232623_2 (sequence is synthesized)
aagatgaggaagagcagcaccacgaaggcagccaggctcacccagaatgcgatcacgatggaatctgcgggaggaggagatgcatctcagcgctgggttatgtcaacataaagcaacgct

SEQ ID NO: 880491 - DNA, 120 bp, Artificial Sequence
  ENSG00000232623_3 (sequence is synthesized)
gaggggcagtaaggagtcccagggtattgtggaatgagggccctgagtttcggttgtcctccagcctctcagctgttaccatggggaagatctcccattaacaataactttgggaaagaa

SEQ ID NO: 880492 - DNA, 120 bp, Artificial Sequence
  ENSG00000234509_0 (sequence is synthesized)
gggaaacgtccagaaccccgaaatgtggagaaaacaaccttcttttcacgggggcgtggcccgccggttgcagtacgcgaaattggcaaaatgatgtaaacagggaagttcggcagattt

SEQ ID NO: 880493 - DNA, 120 bp, Artificial Sequence
  ENSG00000234509_1 (sequence is synthesized)
cagttcattgtaaacttgccaagggatccgcccacagacacgagagagctgctttgggacagtgaattactcttcttttgagacggtctaatgatgcctgggtggtgccttcgtaggatg

SEQ ID NO: 880494 - DNA, 120 bp, Artificial Sequence
  ENSG00000234509_2 (sequence is synthesized)
gtcgtcacacctgaacaagggggtccctggccccaggccccatgctttactgggccctgttctgtccctcttctggcatcatctcccatggagaaaagaatgtgttgaagccaagaagat

SEQ ID NO: 880495 - DNA, 120 bp, Artificial Sequence
  ENSG00000234509_3 (sequence is synthesized)
gctccccccgcaagaatatcatctctgctagaacaggggctggagtgtaacggcatgatctcggctcactgcaccctcgacttcctggattcaggtgatcccctcacctcagcctcccta

SEQ ID NO: 880496 - DNA, 75 bp, Artificial Sequence
  ENSG00000234509_4 (sequence is synthesized)
gtgttacagctcttaaggcagcgcgtctcaagttgttcattcctcccggggggttcgtggtctcattggcttcag

SEQ ID NO: 880497 - DNA, 68 bp, Artificial Sequence
  ENSG00000234509_5 (sequence is synthesized)
agacaaagcttccacagtatggaaggggacccaagcagcttgccactgctggctcaggcagcctgctt

SEQ ID NO: 880498 - DNA, 80 bp, Artificial Sequence
  ENSG00000234509_6 (sequence is synthesized)
cacccagtcccatgccgtgcacccgcactcctcagcccttgggtcgtcgatgggactgggcgccgtagagcagggggcgg

SEQ ID NO: 880499 - DNA, 120 bp, Artificial Sequence
  ENSG00000234509_7 (sequence is synthesized)
tcctcagcccttgggtcgtcgatgggactgggcgccgtagagcagggggcggtgcttgtcggggaggctccggcagcacagcagcccacagagagggggaggctcaggcatggcgggctg

SEQ ID NO: 880500 - DNA, 120 bp, Artificial Sequence
  ENSG00000234509_8 (sequence is synthesized)
catgccccgcagggaggcagctaaggccggtgagaaatcgagcccagtgccggtgggcggcactgctctgagtacagggcctccacagccgctggccctggtgctaagcccctcattgca

SEQ ID NO: 880501 - DNA, 120 bp, Artificial Sequence
  ENSG00000234509_9 (sequence is synthesized)
tggggccggcagggcctgccggctgctccgagtgcgggcccgccaagcccacgcacacctggagctccagctggcccggaagtgcccgcacagcccctgttcccgctcatgcctctccct

SEQ ID NO: 880502 - DNA, 120 bp, Artificial Sequence
  ENSG00000234509_10 (sequence is synthesized)
aggactgccagcatgctgtcacctctcactgggactacaggtgagcacccacacacccggctaattttttttttattttttggtagagatggggtctccctatgttgcccaagctcattt

SEQ ID NO: 880503 - DNA, 87 bp, Artificial Sequence
  ENSG00000234509_11 (sequence is synthesized)
caagtgctaggattataggcatgagctaccgcccccagcctcaaagttgttttttaaaaatgtaattatctattccctttaaggcac

SEQ ID NO: 880504 - DNA, 120 bp, Artificial Sequence
  ENSG00000234509_12 (sequence is synthesized)
tgttttttaaaaatgtaattatctattccctttaaggcacataattttcttaatgaacctctaccctactaggtgggtaggagttgggtgagacttaaacttgaaatgataatgcctaaa

SEQ ID NO: 880505 - DNA, 120 bp, Artificial Sequence
  ENSG00000234509_13 (sequence is synthesized)
aaacttgaaatgataatgcctaaagtttgtgcggtttaaaccccaggggtccccatcacctgggccatattggcttcaaattggctatatttgaagaattgtcttgggccacacataaaa

SEQ ID NO: 880506 - DNA, 120 bp, Artificial Sequence
  ENSG00000197880_0 (sequence is synthesized)
ctccaggctgcggattttattgagagaacggagactgctggtgaactctcaagagggttaattggagttttatcaagccagatttcatggtgtctgcttaatgttaatctctccaagctt

SEQ ID NO: 880507 - DNA, 120 bp, Artificial Sequence
  ENSG00000197880_1 (sequence is synthesized)
ggtgcccgtggcaggcctcagctgaccctggagaggccattaagacctggctgtcgcctccacagctgctcggaggcagagaaaggtggctttgtaagaagaaaagagatcattcttttt

SEQ ID NO: 880508 - DNA, 120 bp, Artificial Sequence
  ENSG00000197880_2 (sequence is synthesized)
ccaccatgtgaggacccagcaagagggtggctgtctgcaaacccagggagagagccctcaccaggaatctgctggcaccttaatcttggacttcccagcctccacaactgtgaggaataa

SEQ ID NO: 880509 - DNA, 120 bp, Artificial Sequence
  ENSG00000197880_3 (sequence is synthesized)
ggaggcagctgggctgcagctcagaaagcaacgctcatctgcaagttgggacagcagaggcccttcattcctccccagggctcccacaccttgggagggactgtgaagagtgactcttgt

SEQ ID NO: 880510 - DNA, 120 bp, Artificial Sequence
  ENSG00000197880_4 (sequence is synthesized)
ccagtggttttcaaactgggttcctctaagccctggggtattagtgccccagggacccctgaagtttgttactgctgctctgaagcttttcagcatttcttgaaataatgaattccagta

SEQ ID NO: 880511 - DNA, 120 bp, Artificial Sequence
  ENSG00000197880_5 (sequence is synthesized)
acactgatagctcttggccggcccaccatgaagcccttgatcccagcctggctgagaatagactgtttcacacatcactaactctgccccagcctctggctcagagctagtagcaggaca

SEQ ID NO: 880512 - DNA, 120 bp, Artificial Sequence
  ENSG00000197880_6 (sequence is synthesized)
tgaaggtttactgaacaccaaacagatggtgagtgccctgctaagaacttcacatacatctgccccctccatcctcctcactgtgaggaagtgtcatcgtccccaccagaaaaacaagga

SEQ ID NO: 880513 - DNA, 68 bp, Artificial Sequence
  ENSG00000197880_7 (sequence is synthesized)
ctgtgaggaagtgtcatcgtccccaccagaaaaacaaggactgggaggtgtcctgacttgcccaggca

SEQ ID NO: 880514 - DNA, 83 bp, Artificial Sequence
  ENSG00000197880_8 (sequence is synthesized)
cggttatagaacagagacggtgtttcaccaggttgcccaggctggtctcgaactcccggcctcaagtgatctgcccaccttgg

SEQ ID NO: 880515 - DNA, 90 bp, Artificial Sequence
  ENSG00000197880_9 (sequence is synthesized)
taatttacacacatttaaacacgcgtgtaaagggaggggagagagagagagagcacgttgtgcatgaatcactgctacagagtcacactc

SEQ ID NO: 880516 - DNA, 120 bp, Artificial Sequence
  ENSG00000197880_10 (sequence is synthesized)
ccggtccaagttcctgcacttccagcctcatgtgggctctcatcatgctgagtgtgatcctgctgttcaaatggtttttatgtggtgtggccccagatacaagccaaccatttcacctgt

SEQ ID NO: 880517 - DNA, 120 bp, Artificial Sequence
  ENSG00000197880_11 (sequence is synthesized)
ggtgagcggaaggcgcagctatctataacacctgagaaaaaaagaacctgctgtactagctgtcagctgctggagaccttgctttctgtttcactgggaaacagaagcaatcagaaggaa

SEQ ID NO: 880518 - DNA, 120 bp, Artificial Sequence
  ENSG00000197880_12 (sequence is synthesized)
acttcctcagactccacctctcccttcactcccgcctgtatccgtgcctgttacctggacgccttgtggaacttgaattctacgccctccactgggacactgcccttcatcctctctcac

SEQ ID NO: 880519 - DNA, 120 bp, Artificial Sequence
  ENSG00000197880_13 (sequence is synthesized)
gaaactgctcttgtcaaggtcatcgatgacctcccgctgacaaactcaactgtcccatctctacaccccaaactgacccatcaggaatagcatgagctccaccttccaaagcttccgcaa

SEQ ID NO: 880520 - DNA, 120 bp, Artificial Sequence
  ENSG00000197880_14 (sequence is synthesized)
agcatgagctccaccttccaaagcttccgcaatctcaccgtctccaccgttactacctgtgtccgaggcaccactgtttcttgcctggagttgtagacgggatttcaccgtgttagccag

SEQ ID NO: 880521 - DNA, 66 bp, Artificial Sequence
  ENSG00000234503_0 (sequence is synthesized)
aggagacacgggttgaatgctgaaaacacgcacagccaagcccagatgccagtcttgttagctgcc

SEQ ID NO: 880522 - DNA, 80 bp, Artificial Sequence
  ENSG00000234503_1 (sequence is synthesized)
gaaagaaattaatggagagaggagaaaacttgagaatccacattgctgtcctgtctcagtatttcctgtgaccacctcct

SEQ ID NO: 880523 - DNA, 74 bp, Artificial Sequence; identical to SEQ ID NO: 870544
  ENSG00000234503_2 (sequence is synthesized)

SEQ ID NO: 880524 - DNA, 80 bp, Artificial Sequence; identical to SEQ ID NO: 870545
  ENSG00000234503_3 (sequence is synthesized)

SEQ ID NO: 880525 - DNA, 120 bp, Artificial Sequence
  ENSG00000234506_0 (sequence is synthesized)
gggtgaggttttgggggctctgatgtgcaagtgttgccacctttaaatggccccttactctcataatcagtgctgagtagtggcaagggggagaaaatggaaaagttggcatgggagaga

SEQ ID NO: 880526 - DNA, 120 bp, Artificial Sequence
  ENSG00000234506_1 (sequence is synthesized)
accttcaagatggctgaagaacaagacgctttctctccatgtctatgctgtttcactatgctgcaaatattcccagccttttccccttgatgcccaaaataaattcctcaaataccctga

SEQ ID NO: 880527 - DNA, 120 bp, Artificial Sequence
  ENSG00000234506_2 (sequence is synthesized)
tacaggcatgagccaccgcacccggcctgatgggtgaatttttaagaggaagaataataagcaaatagactagtttaaaagcaaggtatcatttccttggtggatctcttgagaaggaga

SEQ ID NO: 880528 - DNA, 120 bp, Artificial Sequence
  ENSG00000234504_0 (sequence is synthesized)
cactaaccttggcactggatgccctgggcattggatgagaattttgtactcactgttgctgagggcagcctccgaacccaccgcgtatatttattgcttcttttcattctcatctcctgc

SEQ ID NO: 880529 - DNA, 120 bp, Artificial Sequence
  ENSG00000234504_1 (sequence is synthesized)
tggactcagggtgtccaaagacacctcagggaaagacgctccaggctgatgacaatgggcgtggatggtccaggagaggtggtcaccgccagggtagaggtgaaaagctagatttgtacc

SEQ ID NO: 880530 - DNA, 120 bp, Artificial Sequence
  ENSG00000234504_2 (sequence is synthesized)
atttccaagactatggagttgctggaaacagttgctgtgaattcactgggacagtaagggagcagggtcatgtgaggttaagtggacttgcccaaggcttgaccctctgctgccactctg

SEQ ID NO: 880531 - DNA, 120 bp, Artificial Sequence
  ENSG00000234504_3 (sequence is synthesized)
gtttcataggtacctcaggcattagagctgcctagtgagaagagaccgtctgcacagcctcggggcagatgatttgggaggactagaggcagaggtgttgatctcactgttcctagatct

SEQ ID NO: 880532 - DNA, 120 bp, Artificial Sequence
  ENSG00000234504_4 (sequence is synthesized)
gcagagctgatgatggatttggggaaggctcccatcatcttccttccaggtgaaatattcagagtgcttatacctggatgtctcactacagatactgcagaaaagaatgaggccctgtac

SEQ ID NO: 880533 - DNA, 120 bp, Artificial Sequence
  ENSG00000234504_5 (sequence is synthesized)
agttcacagcaataaaggctacatgaattgagtgccataagggagaaataagcaggctgagctgacccagggaggcttctcagagaaggtgttttcaggaatcaccccaagtcacaaatg

SEQ ID NO: 880534 - DNA, 120 bp, Artificial Sequence
  ENSG00000234504_6 (sequence is synthesized)
gcctcagcacccaagaggatgaaatcagcccaggatcatgccagcccgtgccacccacagccactgaagtgcttgtctgagtcttgctggaaacatgggcccatgttagtgattatgagc

SEQ ID NO: 880535 - DNA, 120 bp, Artificial Sequence
  ENSG00000234504_7 (sequence is synthesized)
cttgcagcagcagactcaaagctttctctgctgagaagtttccagcagttccatcagtgcgagccgggaactgatgacctgaacgacctggagcatggtgagatccctgctgctgggggt

SEQ ID NO: 880536 - DNA, 120 bp, Artificial Sequence
  ENSG00000234504_8 (sequence is synthesized)
tttgggagaggccaggctacctctctgagctgctggcaagcgattctgagtttggggcagagggcatgcccccatgaccttccatgtgggctgatgcgcccagctctgaccctactgagt

SEQ ID NO: 880537 - DNA, 120 bp, Artificial Sequence
  ENSG00000234504_9 (sequence is synthesized)
cagctcctgtctgtatgttcccaactttaaaagccaggctctcacttttcctctgcctttttgcttttcctgtttccttgctgattcaggctgtgggtagagatagttccttgtgcctgt

SEQ ID NO: 880538 - DNA, 120 bp, Artificial Sequence
  ENSG00000234504_10 (sequence is synthesized)
aggacagaggtccctgttttccttgctgtctgtcagggtagggctgttcccagcttctcgaagggcccacattcctttgtttgcagcttttctctgtcttcaaaccagcaaatgtgaccc

SEQ ID NO: 880539 - DNA, 120 bp, Artificial Sequence
  ENSG00000234504_11 (sequence is synthesized)
agtccctctcacctgtgagtctctacttctttgctcctctctttcttccaactgggaagggagtgccattgtaattacaatgggcccacctggatgacccaggctagtcagttgctgtat

SEQ ID NO: 880540 - DNA, 120 bp, Artificial Sequence
  ENSG00000235321_0 (sequence is synthesized)
gctatgaatacatagtttaagttctgggcaaaaaccatctatccccgtatgtagataaaatatttacttactgtgttctgggtctgttttctcctaggtatggcaaccgtaacttgagta

SEQ ID NO: 880541 - DNA, 120 bp, Artificial Sequence
  ENSG00000235321_1 (sequence is synthesized)
gacaagcaacttcctaaggttacactgctagtgagtgtgggccagggttcaagcccaggcagcttgatgttggagccgatgctcagaaccaccatgctgtattattaaaaaggatttgag

SEQ ID NO: 880542 - DNA, 120 bp, Artificial Sequence
  ENSG00000224286_0 (sequence is synthesized)
cattctgtacaacgtaagcaaattctaacctctctgcctaagctccctatcagtaaaatgaaagtaatggtaatacctacgtcacaggctgtcctggaaataacatgtgagaagtactta

SEQ ID NO: 880543 - DNA, 120 bp, Artificial Sequence
  ENSG00000224286_1 (sequence is synthesized)
gaatactgcttggcacatgtgcaccaagtcccctccaaggagagaccctgggtaatgatgatctttggtgtcaactaagattcttaagaactggatcctcgtgattcctatgtgacctga

SEQ ID NO: 880544 - DNA, 120 bp, Artificial Sequence
  ENSG00000224286_2 (sequence is synthesized)
agatgtggccagtccaccaccaaagcaaggaaggagatatgagaaggaagtttcgtctcctacccagtgcatcattactggcaacagtgagaagcagagctgggaatttgagaagcaaac

SEQ ID NO: 880545 - DNA, 120 bp, Artificial Sequence
  ENSG00000224286_3 (sequence is synthesized)
caatgccttctgcttctcatcattattcctgacaacagacagaaaagaggcaaaccttcaccttctgtggtcgcttctgatactcagccgggaacctcattctcagtagctacagatttc

SEQ ID NO: 880546 - DNA, 120 bp, Artificial Sequence
  ENSG00000224286_4 (sequence is synthesized)
cctaatcactcatcttaacttgacactgcgttctagtgcctttcgtgagaagggtcttgggaggccataaacctatgttgctgggaaaagaatgtactgcaataaagagagcaggagagg

SEQ ID NO: 880547 - DNA, 120 bp, Artificial Sequence
  ENSG00000224286_5 (sequence is synthesized)
agctgcagatttccagctctcacagcttgttcacttgtggagactaggctgcaatgtgctcttgaaatcattggggtgggccttgtttctgaggaaataaagaggccccagaacctccca

SEQ ID NO: 880548 - DNA, 120 bp, Artificial Sequence
  ENSG00000224286_6 (sequence is synthesized)
agtgagcgaaaaaatgatttccagatactcaaatggagtggccttctggctacatgagctggatgtgcttggcagtctttccatctggctggccagtatcctgaggttagcaaagcagaa

SEQ ID NO: 880549 - DNA, 120 bp, Artificial Sequence
  ENSG00000224286_7 (sequence is synthesized)
aatctttggggagctaaaagacatgtgcacgtgccagtatttttgacaaatgctcagttaattgttttctatgattcttctcccgagacacaaactgtgtgcaccaggcaccaagaacta

SEQ ID NO: 880550 - DNA, 120 bp, Artificial Sequence
  ENSG00000224286_8 (sequence is synthesized)
tccccatcccaccaccccagatcccaagggaaacttcataattacacacgtttgggccaaacatctaccccacaggaaatggacacatcagcccctagggatgaaagaatgatgcagggc

SEQ ID NO: 880551 - DNA, 120 bp, Artificial Sequence
  ENSG00000224286_9 (sequence is synthesized)
atgggaaagcagagaaatctcctgagtgagaaagaagacaaattcacagaagcctgagagcctatataccagtaggagaaactcagaatttcttttcaggatactaaggaaatggtggtc

SEQ ID NO: 880552 - DNA, 120 bp, Artificial Sequence
  ENSG00000224286_10 (sequence is synthesized)
agaagaggcccgggacggatgaaattcaccaaagtctctaccacagacattctcagatggtcctaataaaaagaagaaacccaaaccagaactggtggtccacattgtgagagttgctga

SEQ ID NO: 880553 - DNA, 120 bp, Artificial Sequence
  ENSG00000224286_11 (sequence is synthesized)
atatcatcacaaagcaataattatccaacagcatgcttggtggctcaacattctgaaaggcaaatgtcaagggcacatagtctcaaccatgttgctgatgggagctcatgttttttgtgt

SEQ ID NO: 880554 - DNA, 120 bp, Artificial Sequence
  ENSG00000224286_12 (sequence is synthesized)
tgggtggtcttgtgttctgcctggtggtctttcttctgcctgctatgacagcactaatgatttcatgtacacagtattcacttgtctccctttagtagtgcatgacaagtcataaaagac

SEQ ID NO: 880555 - DNA, 120 bp, Artificial Sequence
  ENSG00000224286_13 (sequence is synthesized)
agactgcccagaaatgacactgcagtattccagacattttctctcttggtggtgacagttccaaatcaagctggctcagtgcttttaagtcaaagcatttgtcgaagtggcagtttgaaa

SEQ ID NO: 880556 - DNA, 120 bp, Artificial Sequence
  ENSG00000224286_14 (sequence is synthesized)
cacagccttagatctggagaatcaaactaggctcttctcacctctcccatcattgctggtaataaatattcaactgctggaccacagctagcagattatgatagatgacacagaatagaa

SEQ ID NO: 880557 - DNA, 120 bp, Artificial Sequence
  ENSG00000224281_0 (sequence is synthesized)
ggcgccggcttccggcccggcgaggtttgagcgcgtccgcgggctgggaggccgctggacccgggcgcatggcctcccccgggcagttatctccttgccgcgaccttgaggtcttcggta

SEQ ID NO: 880558 - DNA, 120 bp, Artificial Sequence
  ENSG00000224281_1 (sequence is synthesized)
agaactggcgttcctctttctaacgccggctttcggccttcgcccttgacgcccaggcccggggaggccgtcactcagaaactgctccatccgagtccgccgcctcggagatgccgagag

SEQ ID NO: 880559 - DNA, 120 bp, Artificial Sequence
  ENSG00000224281_2 (sequence is synthesized)
cctggtcctgccctctgcccccggccccttcctagactcactacttcagaccgtgtgctgtcctggagccagtgaaaccagacgaaattaagggaacagcagacgaaggaactgccaccg

SEQ ID NO: 880560 - DNA, 120 bp, Artificial Sequence
  ENSG00000224281_3 (sequence is synthesized)
tgccccagaccctggtttgcaaatacagttcgacaaagatcttgccaggaattggcctgggagagtccaaaggactgggctgggggtggggaaatgattttagccagaagacaaatatag

SEQ ID NO: 880561 - DNA, 120 bp, Artificial Sequence
  ENSG00000224281_4 (sequence is synthesized)
aggttgtacccagaaggttaagaggcttaggaaggttaagaactacgttaacatttggctcccaggaccccaggtaaagtgcccttggattgaatagatttctgaactccagaaacattt

SEQ ID NO: 880562 - DNA, 120 bp, Artificial Sequence
  ENSG00000224281_5 (sequence is synthesized)
agaggaatcaatagaattagattggcagccattgtgccaatggacaagtgcttactgagccccttaatcccttcactgggtaagcatttgccacacatgtcctcaaaaacctacttgtta

SEQ ID NO: 880563 - DNA, 120 bp, Artificial Sequence
  ENSG00000224281_6 (sequence is synthesized)
cgtgtctgaataatcataacaatgtttataaaaataaggacgactgttgaaaactgcaactgcagctgaaccttatgtgcccagacttcagaattcccataggcaaaatgccagcaggcc

SEQ ID NO: 880564 - DNA, 120 bp, Artificial Sequence
  ENSG00000224281_7 (sequence is synthesized)
tttgcacactgaacacatagtgttcatatccttcactttcctttcctgccctctcctatcttctccagatctgcctgtgaaaggacccaattctaggaccccccaggatggttaggccct

SEQ ID NO: 880565 - DNA, 120 bp, Artificial Sequence
  ENSG00000224281_8 (sequence is synthesized)
tcctctgaaagtacactttgcaatttgttagtctcctcaagaaccccagcgatcgaaactgatgcacacaaattgcatgtgttcaaaggagcaattttgaatctagctttgttgatcctg

SEQ ID NO: 880566 - DNA, 120 bp, Artificial Sequence
  ENSG00000224281_9 (sequence is synthesized)
ggagaaatctttgacctgtgttagtgaaaggctatggtgtttctcagctgattataatagcgaggtagctgaatgcaaaaaaacagtttcagagaatggtagagtatatcctccaaaggt

SEQ ID NO: 880567 - DNA, 120 bp, Artificial Sequence
  ENSG00000224281_10 (sequence is synthesized)
gatactcgcttctctattctggtgagagaaacaagagctaaagcaaaattctacagagggctttatttggagagaggtggattttatttataatgcatttaaaattcaaaatctttctag

SEQ ID NO: 880568 - DNA, 120 bp, Artificial Sequence
  ENSG00000224281_11 (sequence is synthesized)
tttgaactcttgacattctgattaatgcatttttattcaactgttaattattcctcgatacacctcgccatcacttgtgtatcccttttctacatgtgacctttccctggccacatctgc

SEQ ID NO: 880569 - DNA, 120 bp, Artificial Sequence
  ENSG00000224281_12 (sequence is synthesized)
tactctctttgagcatgatgcctctactgtattctattccagagctcattgttttgtcagttttttttctctccacaaaaaaagatgatcaaataattacatagaatttttcccttctca

SEQ ID NO: 880570 - DNA, 120 bp, Artificial Sequence
  ENSG00000224281_13 (sequence is synthesized)
gggcggacgtaaaaggcacacgcgcttcccggcgccggcttccggcccggcgaggtttgagcgcgtccgcgggctgggaggccgctggacccgggcgcatggcctcccccgggcagttat

SEQ ID NO: 880571 - DNA, 120 bp, Artificial Sequence
  ENSG00000224281_14 (sequence is synthesized)
agggcgggccgggactgctctccgcgccgcccgtgctcgccctcggcacctgacccggcgagaggaaggggcgggtccagagaacacccgggacttgaacgctggaccctgagagaggcc

SEQ ID NO: 880572 - DNA, 120 bp, Artificial Sequence
  ENSG00000224281_15 (sequence is synthesized)
ttggtattttgctaaatccacggtgagctggagctcccgtagtcacctatcaccgcgtgtattttaaggagtcagatattctcgaaactgttaagatcatgaaagacaaagagactaagg

SEQ ID NO: 880573 - DNA, 120 bp, Artificial Sequence
  ENSG00000224281_16 (sequence is synthesized)
aactgtcacagattaaaggagactaaagatacttgacaactgaatgtaatatatgacactcaaccggctcctgtaccagaaaaaggacattggttatattggtgaggtttgaatatctgt

SEQ ID NO: 880574 - DNA, 120 bp, Artificial Sequence
  ENSG00000224281_17 (sequence is synthesized)
agattaccaatactattcttggttatggtggttatgtaagatttagagaagttgaataaaggatataaggacatttttgtactatttttgcaacatttaaaaaagtctgaaagtttaaaa

SEQ ID NO: 880575 - DNA, 120 bp, Artificial Sequence
  ENSG00000224281_18 (sequence is synthesized)
ggtcctgccctctgcccccggccccttcctagactcactacttcaggtcactaaaggcgcctcccaccagtttgacttctgttctgcctctgcgccccgctctggcctctcctaagccgc

SEQ ID NO: 880576 - DNA, 120 bp, Artificial Sequence
  ENSG00000224281_19 (sequence is synthesized)
ttccctggccatgtctttagagttcgctccccgccacccctcgggcgcccgccttctgtgcgacccttccccccacttcctggttgggctcctggatcccaggacgtacctgcagcagca

SEQ ID NO: 880577 - DNA, 120 bp, Artificial Sequence
  ENSG00000224281_20 (sequence is synthesized)
gcttgacccgctcgatgggcgctaccgccgtcttggagatggctgcggccactccacctgccaggaagtccttggcgaaggacacagcggcatctgtcatgttgaaagaggaggcagact

SEQ ID NO: 880578 - DNA, 120 bp, Artificial Sequence
  ENSG00000224281_21 (sequence is synthesized)
gctgcaggacgggactgggccgggaaccggctttgactccggcgctgcggggcggagcgaagcaaatggccgatttatatagggggagccggagctggagcggcaggcgtcggaggcggg

SEQ ID NO: 880579 - DNA, 120 bp, Artificial Sequence
  ENSG00000224281_22 (sequence is synthesized)
aaaaacccttggagcaggaccaggactagggtgagacgcatttgctacagggatgccaaaagaacccttcagtcatcgagataaacagtagtcaatgcgatactttaaaaaagtcgtatg

SEQ ID NO: 880580 - DNA, 120 bp, Artificial Sequence
  ENSG00000224281_23 (sequence is synthesized)
ggcaaactacatcctactggccggcccccttgttttgtaaataaagtttaattggagtgtcaaggctgggtttagggtgaggcaagcgagacaaggtcatgcaagtgcaggttgggatcc

SEQ ID NO: 880581 - DNA, 120 bp, Artificial Sequence
  ENSG00000224281_24 (sequence is synthesized)
tgtctgtatttcaaatgttgatcatttgttcatcatggatttttgcattgcttctgatttttttaaaatagtacatgaaaaatcatttgtcttaattactgagttgtttttcaccaaggt

SEQ ID NO: 880582 - DNA, 120 bp, Artificial Sequence
  ENSG00000261257_0 (sequence is synthesized)
atataaaactcttcagaacagcacagggtgatttgggtatagctatctccagataccttggcccttgttcttggagttttaggaattcagagaaaggaagaaaggatctgaaggacctag

SEQ ID NO: 880583 - DNA, 120 bp, Artificial Sequence
  ENSG00000261257_1 (sequence is synthesized)
tgaagactctccttgaggccactcatttcagggaagcgaagggaagagggtgggagaagtagcttttgttgtgtacccaacagaccagaaatctataatacaatatctttttcaagcctc

SEQ ID NO: 880584 - DNA, 120 bp, Artificial Sequence
  ENSG00000261257_2 (sequence is synthesized)
atgattggctgagttttacaaatgaggaaattaaggacagagaagtaaagtaagtcatccaaggtcacacagcaaggaggtggcagagccaagaatcgacccaggcgggtcagattcaag

SEQ ID NO: 880585 - DNA, 120 bp, Artificial Sequence
  ENSG00000261257_3 (sequence is synthesized)
cttgcgttcctgtcactaggcataggacaggaagtggggtggtaagatgtcacccctaggccaagggggcagtggtttaaatgggggctcaggtcagaaaagcatcctatctatggtaat

SEQ ID NO: 880586 - DNA, 120 bp, Artificial Sequence
  ENSG00000261257_4 (sequence is synthesized)
gcgggaacctggctttgttctgatactgaactcagatctgagacgccacccaggtgtatgttatatgggttctgagaggtccagcagcaagcagggcagttgggcccaccccagagcagc

SEQ ID NO: 880587 - DNA, 120 bp, Artificial Sequence
  ENSG00000261257_5 (sequence is synthesized)
tgtacgcccttggagatggcctgaaattggccaagctctggaatgagggtctgggcattgctcccagcatctgaccttggaaggaagcagaagcagagctgtggttttgaagattttcct

SEQ ID NO: 880588 - DNA, 120 bp, Artificial Sequence
  ENSG00000261257_6 (sequence is synthesized)
tccccaacggagacccattgcagcctgttatgaaggacccagcacaggtagagagagccaacaaggtggaatggggggctctggcttggtgagatgggggaggagaaagaggggtcactc

SEQ ID NO: 880589 - DNA, 120 bp, Artificial Sequence
  ENSG00000261257_7 (sequence is synthesized)
gcagctgggggccaggccgtgaccaatggggaatgcaggttgggagcgcagcgaatgcagtttgtagagcaaggctttcatgcactgatgggagccccactcacaaagccaggctgacat

SEQ ID NO: 880590 - DNA, 120 bp, Artificial Sequence
  ENSG00000261257_8 (sequence is synthesized)
gcccccgcgcttccaactttgatatcccagccccgccttgggggagccgcacatccccaagctgtctgtgcccaactgccccgctgtggccctcgagtgatgatggggtgaagagtggag

SEQ ID NO: 880591 - DNA, 120 bp, Artificial Sequence
  ENSG00000261257_9 (sequence is synthesized)
agctcagatcccaactcccctcaaccccaccaggattcctagacaccaacatctccttgtccgtctctctccacctcgggatgtctgaggaatggacagggggaaacagcctccagctcc

SEQ ID NO: 880592 - DNA, 120 bp, Artificial Sequence
  ENSG00000261257_10 (sequence is synthesized)
tgagggctgagagagatggatggagagacagaaagatggaccacgagagaggccgcgggcctcaggcagcccctgctctgagcaggtcacagaaactccttgaggccacccactccaggg

SEQ ID NO: 880593 - DNA, 120 bp, Artificial Sequence
  ENSG00000261257_11 (sequence is synthesized)
aaatgaataatgttagaggtgggggtttcactcctggcttggacatctgaatactttctgcattccaaagctgctagctccccttctccagccccagtctcttttcccactggccgattc

SEQ ID NO: 880594 - DNA, 120 bp, Artificial Sequence
  ENSG00000261257_12 (sequence is synthesized)
actcagtgtggggtccttcaggactgcccttttctgccttctcaattatccactgccccctccctcctggtgtctctgtgctcctgcgcttcctctcctcctgggtgttaataatgacag

SEQ ID NO: 880595 - DNA, 120 bp, Artificial Sequence
  ENSG00000261257_13 (sequence is synthesized)
tgctttacagtttacaaagcacaatcacctgcagtaactcgtttgattcttataggagccctgtgcagcagggactctgatcctcattgcatgcaggaagagaagaaggaagaggaggtg

SEQ ID NO: 880596 - DNA, 120 bp, Artificial Sequence
  ENSG00000261257_14 (sequence is synthesized)
gaggcttgatgaggaggtggtggcctgtgatggcaagagtgagatggggagaatgtccagcgggagaagtaagggccaggagcttgaaggaactgtgaaataaagatatttcaccttgaa

SEQ ID NO: 880597 - DNA, 120 bp, Artificial Sequence
  ENSG00000261250_0 (sequence is synthesized)
attatgcaagcagctagcttaagggctggtatactgcagattgttgggctcaaaatcatcagaaatgtggaggctttgaaggccttccttagaaattcaagggccaccatggctcaccag

SEQ ID NO: 880598 - DNA, 120 bp, Artificial Sequence
  ENSG00000261250_1 (sequence is synthesized)
tggtgttatggtgcaatgggcgctctgcagtttggactctcctatctagaaggctcagcaggtcattctgccaatacgcctgcattccacatccttggggaccatgtctggatggctctg

SEQ ID NO: 880599 - DNA, 120 bp, Artificial Sequence
  ENSG00000261250_2 (sequence is synthesized)
atgtgtcccatcttagtggaagagcaccgcaaggcgtccttccttcactttaaggaagccagagagacctgtgaagtcttctcaacatccctggttcatccatagggaggtttgtgacca

SEQ ID NO: 880600 - DNA, 120 bp, Artificial Sequence
  ENSG00000261250_3 (sequence is synthesized)
cagggtagcttttctctctcttgggactttgagactttggcagaataatgtaaggatgaaataaatgattggtgtttgtttggtggtagcactggaacagatggtgaggaactattgtgc

SEQ ID NO: 880601 - DNA, 120 bp, Artificial Sequence
  ENSG00000261250_4 (sequence is synthesized)
ctgatctaaagctagctggttcctgtctgttcccagcctagttcttcaaaacttcccttcaaatccttgaaccccccagcatcctttcaatacattatcttttttcatgggcttgcaaga

SEQ ID NO: 880602 - DNA, 120 bp, Artificial Sequence
  ENSG00000261250_5 (sequence is synthesized)
gtaggtgcttgtaacaaaaccacctcagctaatgtgggtccatgatgccaatcacctcattctaattgtagtggcagcagatataactctggaatttagagactaagccttctacgcaat

SEQ ID NO: 880603 - DNA, 120 bp, Artificial Sequence
  ENSG00000261250_6 (sequence is synthesized)
ggagctgacatggtatttggcacattctaagggacaaggctcatgttcagggatggggcctactgatttgtatggaaatgacaactcatgcctgcaaagtggaaaatcaataaaaattat

SEQ ID NO: 880604 - DNA, 120 bp, Artificial Sequence
  ENSG00000261250_7 (sequence is synthesized)
tctgcaaccccacaaaaagtccccaaattttctagagctatccaggaatttctctgggaaggagcaaagataaggctggctctgttccgtcaggcagcagctgtaattatgagccaacag

SEQ ID NO: 880605 - DNA, 120 bp, Artificial Sequence
  ENSG00000261250_8 (sequence is synthesized)
cttcagctcgtctgtcatttgggccaggagcactgccaagtttctgaagaatttcatgttttcttttcgcagaggtaaagagtggaactgaccagactccatctagtagtcttaggtata

SEQ ID NO: 880606 - DNA, 120 bp, Artificial Sequence
  ENSG00000261250_9 (sequence is synthesized)
tactaaggaatgttgaaacccatccctcacacagtttaatgatggccaatgacaggcctggccagggttggcttaaataaagatggggactctagagttgggatttctgaggctagaaga

SEQ ID NO: 880607 - DNA, 120 bp, Artificial Sequence
  ENSG00000261250_10 (sequence is synthesized)
acaggtaaaggtctaaaattctaggagataaacccaaagaaacaccaaatatgtggaatcaatgcaggtgtagaaatcttgccacaggtgttcagagataagagcaaaggcaagtgagcc

SEQ ID NO: 880608 - DNA, 120 bp, Artificial Sequence
  ENSG00000261250_11 (sequence is synthesized)
aggagcagtgaggcagcagggagcccttgctgagtgactgcccagaacatccagttgtcacttgcaactgatttttgcaggttagtccatctcttgtgcctagatggattcagggtcatg

SEQ ID NO: 880609 - DNA, 120 bp, Artificial Sequence
  ENSG00000261250_12 (sequence is synthesized)
aacagagcagacaaatgagacagtaaaagcaagaaatagagattctgggtgaatcttcagcaacacaggcccctatgaaggaaaccatctgaacaatggcctggtggcccttcactattg

SEQ ID NO: 880610 - DNA, 120 bp, Artificial Sequence
  ENSG00000261250_13 (sequence is synthesized)
ctgtgaccgtgtcttataatcactgggcctcagttttaccttctgagaatatctcctccacctactttgcagggttattgcaaagatcagataaattataaaaatgtcagaaatcataag

SEQ ID NO: 880611 - DNA, 90 bp, Artificial Sequence
  ENSG00000261250_14 (sequence is synthesized)
caaagatcagataaattataaaaatgtcagaaatcataagaaatccgaaaatgctgcagaaacctaacagcatcgtcaagattttctctc

SEQ ID NO: 880612 - DNA, 63 bp, Artificial Sequence
  ENSG00000261250_15 (sequence is synthesized)
tagtagagacggggttttgccacgttggcgagtctggtctcgaattcttccaccgtgcccagc

SEQ ID NO: 880613 - DNA, 120 bp, Artificial Sequence
  ENSG00000261250_16 (sequence is synthesized)
tgcccagcctagatcttctcttttaaattgaaaaactaatgtttttttatttgccagtcttgtctgcagagttcaaagttttcaaaaagcattattttctcgagagaaactgacatttca

SEQ ID NO: 880614 - DNA, 120 bp, Artificial Sequence
  ENSG00000261250_17 (sequence is synthesized)
cagacctctgttaggaaatcaattgaagaggctaacaaacttgcataagctatttttaatgcgggaagtgagctaatgcacctgactccctacagccatcgctgtgacttaaagagaaaa

SEQ ID NO: 880615 - DNA, 120 bp, Artificial Sequence
  ENSG00000261250_18 (sequence is synthesized)
tgctcttgcgttgtaggttatggcttttctagtggctgttacaaagggggtccctccaactgagccacatcagctctataacgcagtgatatctggggtgtgttcagtggatagagccat

SEQ ID NO: 880616 - DNA, 120 bp, Artificial Sequence
  ENSG00000261250_19 (sequence is synthesized)
tgtgaaccccagagctctgtggacactacttgggttttgttttgtcattggatgtagtctggattccagatttaatgttgagagcaccgtccttgcatggtacctctaaaaagacaaaaa

SEQ ID NO: 880617 - DNA, 120 bp, Artificial Sequence
  ENSG00000261250_20 (sequence is synthesized)
cagctagaatattgtagtaataatatcttatatttactaagggtttttaattttacaaagcagttttacattttttctgcctgggtaaccctcaagctacaaataagctatgtgccacaa

SEQ ID NO: 880618 - DNA, 120 bp, Artificial Sequence
  ENSG00000261250_21 (sequence is synthesized)
atttgactctaaattggttattggcattcagaatgcatttcccaagttcaagtgtggtcatttaactgtttgagttctgggtcctggggcaggacagaatgtggtcaaggagtgaagaag

SEQ ID NO: 880619 - DNA, 120 bp, Artificial Sequence
  ENSG00000261250_22 (sequence is synthesized)
agaaagaacatctcctccttccctcttgtacacaaccgaagcttggtgaaaaaaaattcaaatggaaacagtcttcagaatcttcccttaaccattcctgagcccttctgttgtctcccc

SEQ ID NO: 880620 - DNA, 120 bp, Artificial Sequence
  ENSG00000261250_23 (sequence is synthesized)
aaccctttctttccaggctcctgtgcacagaccttgatggcctctggccatcaagcctgctccccccaacatgcacgtgaaaaacagccccgtgacgctgcttcccaatttgaatccttc

SEQ ID NO: 880621 - DNA, 120 bp, Artificial Sequence
  ENSG00000261250_24 (sequence is synthesized)
agactggctgctgccatctccatcttacatgtggttgcctttgtattactatttgcactttgtattactgttagtgtaacttctccacacccaactgtagaccccactgagatccaggac

SEQ ID NO: 880622 - DNA, 120 bp, Artificial Sequence
  ENSG00000261250_25 (sequence is synthesized)
taagccatattcatctttgcaaacttccctcttgattcctttttcagtcacagctcagagcacagtgatttgctaattattaaaaatactgacataaaaataaaaataaatacatcccct

SEQ ID NO: 880623 - DNA, 120 bp, Artificial Sequence
  ENSG00000261251_0 (sequence is synthesized)
tggcgacccgtgtcatgggagcgggtttctgttacgtgggctttagcgcgagctgggcggtcggcccggtcccaccgaactgcatagggccgtgtagccgggggaagtcagccccctgct

SEQ ID NO: 880624 - DNA, 120 bp, Artificial Sequence
  ENSG00000261251_1 (sequence is synthesized)
ctgagaagcagactctgcatctgtaaaaggctaagcgtgcccactggggcctgtggtcaggattggctgcagtgaggtccgcaaagcccctaccgcatcctgcgccttcgttagggtgag

SEQ ID NO: 880625 - DNA, 120 bp, Artificial Sequence
  ENSG00000261251_2 (sequence is synthesized)
cagtcatggggactcgcattgtgccaccacgtagcgggtctcactgggtccgcttgtctgctcgaggagacagccggtgaggacgggagctggcctgctttgcccaggctgtaacctcag

SEQ ID NO: 880626 - DNA, 120 bp, Artificial Sequence
  ENSG00000261251_3 (sequence is synthesized)
tcatcttcaatccagagggttttccttgttccaggaaacgtctcacctccatgtgcagatttaatttttacagaaactgaaatttccctcatttattatctagatgagcccctaaaatct

SEQ ID NO: 880627 - DNA, 120 bp, Artificial Sequence
  ENSG00000261251_4 (sequence is synthesized)
attcaataaggtttgatctttgatggaacagaccagagttgtataatgtgacagtggccccaaggaacagtttgtaggaggagattgttgtcttctctgaaaaaaacttcccagaagaca

SEQ ID NO: 880628 - DNA, 120 bp, Artificial Sequence
  ENSG00000261251_5 (sequence is synthesized)
ttgatggttcccttaggtgccctgcagtgggtccacttccaacaggctgaagcctggatttggtgggtgagggtcctaccttttcctagataccattcagcatcactgaagccagtaaac

SEQ ID NO: 880629 - DNA, 120 bp, Artificial Sequence
  ENSG00000261251_6 (sequence is synthesized)
tcacctcctgaggaaccgttaccatctgtactatttacacccatggcatgagtctgctgctcaagacctttgatgagaatcttgaaaaggaaaccatgaattgctggagaaaatatcttt

SEQ ID NO: 880630 - DNA, 120 bp, Artificial Sequence
  ENSG00000261251_7 (sequence is synthesized)
atattcgctaaatgagtgaattattactaagacagagggccgagtggaagcgccataaatcacgtgagtgaatgtaattgttgtcgctgaccctatggagcacttcccttgccaggcact

SEQ ID NO: 880631 - DNA, 120 bp, Artificial Sequence
  ENSG00000261251_8 (sequence is synthesized)
cacccatcctaggtatgtactttacatgtaattgtcatcttcatttgtcttcacaacaaccctgtgaggtgggtgctgtggttactcccattttacagataggtaactgaggcacacaga

SEQ ID NO: 880632 - DNA, 120 bp, Artificial Sequence
  ENSG00000261251_9 (sequence is synthesized)
gcattttgttcaaggacacactgccagtcaggggtaggagcagaatgagaacctatggagcttgctcttaggcaccctgccacactgctcactgtgggagagaagcagccaggcagacgt

SEQ ID NO: 880633 - DNA, 120 bp, Artificial Sequence
  ENSG00000261251_10 (sequence is synthesized)
acatggctgcggcaggtcaattaggtgccctggtgtgtgctgcaaagatggatactatgcggtccctgctgggcactctgactacttcactgggcagctagttttcctgttcaccaagag

SEQ ID NO: 880634 - DNA, 120 bp, Artificial Sequence
  ENSG00000261251_11 (sequence is synthesized)
aattctttcccatggcttgtctcagacctcccgcactcactacttcctcaccggactcaatgaccatgggtcttatcccattgagaaaatgtaatgcataagaatggaatgcactccttc

SEQ ID NO: 880635 - DNA, 120 bp, Artificial Sequence
  ENSG00000261251_12 (sequence is synthesized)
acaatcactttggcattcatcgcctcttttcctcttgccccaaaagagggtctcttacagaggccagtccctctaactgtgtcctggatccctccccatttgccttctttattataggca

SEQ ID NO: 880636 - DNA, 120 bp, Artificial Sequence
  ENSG00000261251_13 (sequence is synthesized)
gtgctctaagtgtggtctgggaatccctggggatcctgagaccctttcagactgtccatggggccaaaaaatactttcataacacttaagactttacttgctttttcattgtttttctct

SEQ ID NO: 880637 - DNA, 120 bp, Artificial Sequence
  ENSG00000261251_14 (sequence is synthesized)
cataagtatatggggggattttccagaagctacatgatgtgtgatattgcaacaaattgaatgcaaaagaaggtaagagatccagcggtcttgtactaagccagatgttaaagagatctg

SEQ ID NO: 880638 - DNA, 120 bp, Artificial Sequence
  ENSG00000261251_15 (sequence is synthesized)
caaaaatagaaaactgcccctcttttcacttttttggaaagtgtaatttttcattagagaacgttaacatctaatgggtttattatttttaatgagttaataaattttttatcaattgta

SEQ ID NO: 880639 - DNA, 120 bp, Artificial Sequence
  ENSG00000261253_0 (sequence is synthesized)
aaaaaagaaaaaaggagaaaaggaaaaagagctgcatacctggcaggcctactgtgtgcaaagcccttgagtgacacaccctatgacccacagcactgtggcaatcccagggccgcacca

SEQ ID NO: 880640 - DNA, 120 bp, Artificial Sequence
  ENSG00000261253_1 (sequence is synthesized)
gctctctctccttcccctcctcagggccacaccaactgtggggttccagctatcactctgtgcaaaggactcctaacatgggtgtcctccgtctcaccccataagccacactggccaagg

SEQ ID NO: 880641 - DNA, 120 bp, Artificial Sequence
  ENSG00000261253_2 (sequence is synthesized)
ccaggcaggcaccacacatcgcgagacacatgcttggtcactgggctgtggaacatacaggagccccgtgctccggaacacggaccacccgacaggagcacggacacagcagtcggggcg

SEQ ID NO: 880642 - DNA, 120 bp, Artificial Sequence
  ENSG00000261253_3 (sequence is synthesized)
ggttactactgagtttcaacttgactggactaaaggatgtgtaactgttcctgggagcatcttgaggaagctgccaaaggagattcacattgagtcagtggacggggagaggccgacgaa

SEQ ID NO: 880643 - DNA, 120 bp, Artificial Sequence
  ENSG00000261253_4 (sequence is synthesized)
ccctccatctgggggggcatgatctcatcagctgccagcacggcagatctgcggaagcactggactggctgagtcttccagcctccatctttcttccatgctggatacttcctgccctcg

SEQ ID NO: 880644 - DNA, 120 bp, Artificial Sequence
  ENSG00000261253_5 (sequence is synthesized)
tggacctacaccagtggtttgccaggggttcttgggccttcggccacagactgaaagctgcgctgttggcttcccgacttttgaggtttggggactcggactggcttcctggctcctcag

SEQ ID NO: 880645 - DNA, 120 bp, Artificial Sequence
  ENSG00000261253_6 (sequence is synthesized)
ggtttggggactcggactggcttcctggctcctcagcttgccaacagcctattgtgggacttcacctcatgactgtgtgagtcaatactcccaataaactcccctccatatatacattta

SEQ ID NO: 880646 - DNA, 120 bp, Artificial Sequence
  ENSG00000261253_7 (sequence is synthesized)
gattccctctgctccacaggagatgcagcgagcaccaaagagccttcctccaggattaagcctgatgcagaagtggttacactgactacggcaagctgagccctgccggctgttgtgcgc

SEQ ID NO: 880647 - DNA, 120 bp, Artificial Sequence
  ENSG00000261253_8 (sequence is synthesized)
tccgtggaaagggagaagcacggtctccagcggctgcgtcaggagtggtgccttgtgcacacctcacagggagagaagtctccaacggactgagcggaggaaaaaagaaaaaaggagaaa

SEQ ID NO: 880648 - DNA, 120 bp, Artificial Sequence
  ENSG00000261253_9 (sequence is synthesized)
aaaggaaactagtccactctcatcagggccaactcacgcacctggcaatctctactcatactgaacacaagtatgccctatagcccagcaatgccattctggacatacacgtccaaaaga

SEQ ID NO: 880649 - DNA, 120 bp, Artificial Sequence
  ENSG00000251273_0 (sequence is synthesized)
gaacgccgcgcggcggaggccattaaggcgtggacggcccggaaggcggcctagggacgcaagcaggcttggccgcctctttcggccacggagccgcgcagatccggttcccgggtgacc

SEQ ID NO: 880650 - DNA, 120 bp, Artificial Sequence
  ENSG00000251273_1 (sequence is synthesized)
actctgtcgccattgggcgagacctacctagtcctgacgacaacggacaaaggccttaaggggcctgaaagcaacctccagtcctgcaagcttcattcctgaatggtagaaagcagtctt

SEQ ID NO: 880651 - DNA, 120 bp, Artificial Sequence
  ENSG00000251273_2 (sequence is synthesized)
cagcctgagacccatccctagactctatggcacaaagaggcactacagaaaatcccagaatttattctgactgaagcaatatgcaactggcaaaactggcagctgaaaggatcctgaata

SEQ ID NO: 880652 - DNA, 120 bp, Artificial Sequence
  ENSG00000251273_3 (sequence is synthesized)
ggagcaagacagaagaatttacccggtagcagggtaggaagatgaccatctttgcatcagaataactgtatagtagtgtagacaggaagtaaaatgcaagtatatcttaaaagaaaacaa

SEQ ID NO: 880653 - DNA, 120 bp, Artificial Sequence
  ENSG00000251273_4 (sequence is synthesized)
cagtatctctgtgattgatacatgaagtggccatctcaatatgatcaattatgtttggaaagagaaattccctcaaacatataagaatggacttttagtctcacctcccttattccagtc

SEQ ID NO: 880654 - DNA, 120 bp, Artificial Sequence
  ENSG00000251273_5 (sequence is synthesized)
tttgtgtaatcttgaaagtgacacagccttttgtggtatttttctgggttgtaaaatgtgaaaaaagattattcgcatctcaaaattactatcaggattaaatgaaagaatttgcataag

SEQ ID NO: 880655 - DNA, 120 bp, Artificial Sequence
  ENSG00000251273_6 (sequence is synthesized)
gcgcagatccggttcccgggtgaccactctgtcgccattgggcgagacctacctagtcctgacgacaacggacaaaggccttaaggggcctgaaagggaacaagatgtggaggttgaaga

SEQ ID NO: 880656 - DNA, 120 bp, Artificial Sequence
  ENSG00000251273_7 (sequence is synthesized)
tcagagcacaagcatggtgaagaggaatctgtgtcaggaagaaggtggaagagatatgacattggtcaaacagagaattgataaaataagaaaacaagttgaaaaactaaaacaaaacca

SEQ ID NO: 880657 - DNA, 120 bp, Artificial Sequence
  ENSG00000251273_8 (sequence is synthesized)
ctgatgattaaactggatgtatcagtaatgaaatcatggaatctaaaaaaaatcaatataaatgtatgtatgcatatatggagagagagagacagagaaacagacagagggagaggccaa

SEQ ID NO: 880658 - DNA, 120 bp, Artificial Sequence
  ENSG00000251273_9 (sequence is synthesized)
gcaactggtacaagtgataccctaatcgcaatgaggacactgaacccccagatcttggttctcaataacatgctccattgaaaagaatgaggcctgattctggagctggtgcagaaaaat

SEQ ID NO: 880659 - DNA, 120 bp, Artificial Sequence
  ENSG00000251273_10 (sequence is synthesized)
tacaagatgatcctggaatatatattgttaaaaattaagacaatgttgaaaggataataaggtcatcctgaaagattaaattgttgtcagtttgagaatttaaataattaatggcaaaat

SEQ ID NO: 880660 - DNA, 120 bp, Artificial Sequence
  ENSG00000251273_11 (sequence is synthesized)
ggattactactcattgaatcaaagagaaaaacatgagcccatattgttataaatacgtaaatgcatatattgaaagcttaattagaaacatagtttcaaaataaactcccctaaaatacc

SEQ ID NO: 880661 - DNA, 120 bp, Artificial Sequence
  ENSG00000251273_12 (sequence is synthesized)
aataaaactcactcactaactcagaagaaatttgaaagactatgaaaatctttgaatacaatgtagaagtttttattccaaaacagtgaaaaggagagagagtagaagaggagagaagag

SEQ ID NO: 880662 - DNA, 120 bp, Artificial Sequence
  ENSG00000251273_13 (sequence is synthesized)
agcaagtagtgtcttaaatgggagaaaaagtgataaggaaatagtttaatttattaaagtcaaagttcaataaaagtaaattaactgctttaatatgtaaagtattttaacaaatgaatc

SEQ ID NO: 880663 - DNA, 120 bp, Artificial Sequence
  ENSG00000251273_14 (sequence is synthesized)
acaaaaggctgtgaagttaattatggatcctcaaaatgcatatttgaaaagaattgtctactttggattagaaatacataatatttattattgtagtaccagaatcctcatctttactca

SEQ ID NO: 880664 - DNA, 120 bp, Artificial Sequence
  ENSG00000251273_15 (sequence is synthesized)
agtaattccctaggctttttatataagcaataaaaattctaatacattgctgtttctgagattaaaataaaatccagtagttttgaatcaatcagaaacaaaatcaaatacctcttagat

SEQ ID NO: 880665 - DNA, 120 bp, Artificial Sequence
  ENSG00000251273_16 (sequence is synthesized)
ttaattgtgtgggtattatcttaaagagaagcagggtgacgcattgaaaagactatattttttcagcatgcgaaccttggtttaaatgtgctacttgttatgtaaaaattgaaagaaaaa

SEQ ID NO: 880666 - DNA, 120 bp, Artificial Sequence
  ENSG00000251273_17 (sequence is synthesized)
tctttggttaacaaatgtgaatttcatttatttatctgaaaaattacaataataaaacatacgtttgttacctatgtatatgtgaatatatatataaacacacatatatacctgtgtgta

SEQ ID NO: 880667 - DNA, 120 bp, Artificial Sequence
  ENSG00000251273_18 (sequence is synthesized)
tacctgtgtgtatcagacagaatttatgtgtttcatgtatagacagaagtttgtacatgtaaaaacaaaaattttattcaataatatgttatttaaaattaaaattgattgtgacttgta

SEQ ID NO: 880668 - DNA, 120 bp, Artificial Sequence
  ENSG00000251273_19 (sequence is synthesized)
agggccctctggccccgggccggcggatgaactggggggcctcgggacaggccgagccctctgccctgcagacaccggaggcctctgctgtggctgcccactggctgtgctcagaccttg

SEQ ID NO: 880669 - DNA, 120 bp, Artificial Sequence
  ENSG00000251273_20 (sequence is synthesized)
aagccgcagcgaacctctctttcccaccccacctcggtgactgatggcggccgtggcgtctcccagcccggcccccgccggcacccgggtctcccgacccaagcctgctgggcctcgacg

SEQ ID NO: 880670 - DNA, 120 bp, Artificial Sequence
  ENSG00000251273_21 (sequence is synthesized)
taggccatttaataatataaaatagtctctaaatgttccatggaaaggaagagttgcaagtctctcgctttcaactgaaagtcagaaatgattaagtttactgaggaaagcatgccaaaa

SEQ ID NO: 880671 - DNA, 120 bp, Artificial Sequence
  ENSG00000251273_22 (sequence is synthesized)
cacaaagacaggccaaaaactagatctcctgcatcagttaactacattgtaaatgcaaaggaaaaattttggaaggaagttaaagtgctgctccagtgaactttatgaatgatgataaaa

SEQ ID NO: 880672 - DNA, 120 bp, Artificial Sequence
  ENSG00000251273_23 (sequence is synthesized)
ccaaagaggcctatagatgatatggagaaaatattagtgatctggatagaggatgaagcaagccatagcattcttttaagccaaagcctaatctacaacaaggctctattctcttcaatt

SEQ ID NO: 880673 - DNA, 120 bp, Artificial Sequence
  ENSG00000251273_24 (sequence is synthesized)
gctgagagaggtgaggaagctgcagaggaaaatttaaagatagtcgtagtgagttctagagatttaaggaaagaagctgtccccataacataaaagtaccagatggagtagtaagtgttg

SEQ ID NO: 880674 - DNA, 120 bp, Artificial Sequence
  ENSG00000251273_25 (sequence is synthesized)
aagtgttgatatagaagctgcggctagttatacagaagatctagctgagctaaatgatgaaggtgtctacattaaataacagatttgtattgtagataaggcaatcttctgttggaataa

SEQ ID NO: 880675 - DNA, 120 bp, Artificial Sequence
  ENSG00000251273_26 (sequence is synthesized)
aagaagtcattgcctggtttcaaagctttaaaggacaggatgactttcttgttaggggctaaagcagcttgtgataagtggaagccaatgctcattcatctttccattaatcctagggcc

SEQ ID NO: 880676 - DNA, 120 bp, Artificial Sequence
  ENSG00000251273_27 (sequence is synthesized)
cttaataattaaatttactctgcctgtgctctatcaatgaaacaacaaagcctggataatagcacatctatttgtagcatggtttactgaagatttatacccatttttgagatttactgc

SEQ ID NO: 880677 - DNA, 120 bp, Artificial Sequence
  ENSG00000251273_28 (sequence is synthesized)
tattactgctcattgacaatgcacctagttacacaagagccctacaaagagatcaatgttgtttgcatacataacacagcatccattctgcagcacatggatcaaggagcaattttgact

SEQ ID NO: 880678 - DNA, 120 bp, Artificial Sequence
  ENSG00000251273_29 (sequence is synthesized)
atggatcaaggagcaattttgacttacaagtgttattagttaagaaatgtacttcataaacctatagctgctataaatagtgattcctctgatggacctgtgctaagaaaattgaaaatc

SEQ ID NO: 880679 - DNA, 120 bp, Artificial Sequence
  ENSG00000251273_30 (sequence is synthesized)
ttgtggaaagaagtcatcattctagatgctattaagaacattcatcatttatggaaaaaggtgaaaacatcaacgttaacaggagtttggaagaagtggattccaaaccccatggatgac

SEQ ID NO: 880680 - DNA, 120 bp, Artificial Sequence
  ENSG00000251273_31 (sequence is synthesized)
cttcagtggaggaagtaactgcagatgttgtgaaaataccaaaaacctagaattagaagtggaccctgaagatctgaataaattgctgtcatctcatgataaaattttaatggaagagga

SEQ ID NO: 880681 - DNA, 120 bp, Artificial Sequence
  ENSG00000251273_32 (sequence is synthesized)
ttttaatggaagaggaagtgcttcttatagatgaacaaaaggaatggtttctctagttggaatgcactcatagtgaagatgttatgaacattgttgaaatgacaacaaataatttagtgt

SEQ ID NO: 880682 - DNA, 120 bp, Artificial Sequence
  ENSG00000251273_33 (sequence is synthesized)
attacataaacttagttaataaggaagtagcaaggtttgaaaggattgactccatccaattttgaaagatgttctattgtgggtaaaatgccatcaaatggcatcacatgctacacataa

SEQ ID NO: 880683 - DNA, 120 bp, Artificial Sequence
  ENSG00000251273_34 (sequence is synthesized)
atatttcatgaaaggaagagtcaaataatgcaacaaactgcattgctttcttattttaagaaattgccgcagccaccccagtcttcagcaactaccatcctaatcagtcagtagccatca

SEQ ID NO: 880684 - DNA, 120 bp, Artificial Sequence
  ENSG00000251273_35 (sequence is synthesized)
aagttgaagaaagaccatacatctgaaaaagattacaactcactgaagatgatagttaacatttgttagcatgaagcattttaattaaggcatgtatgtttgtagacatgatgctatttc

SEQ ID NO: 880685 - DNA, 120 bp, Artificial Sequence
  ENSG00000251273_36 (sequence is synthesized)
acacataatagactaaggtatagtgtaatcataacttttatatgcactgaaaaaccaaaaaaattgtgacacctgctttattgtgatattcacgttaatgtggtggtctgaaactgaacc

SEQ ID NO: 880686 - DNA, 120 bp, Artificial Sequence
  ENSG00000251273_37 (sequence is synthesized)
cacaatatctcgaagttatgtctgtaaaccaatatgcgtttattgctgtgaaaatattttgtatatgccattaacgtctacaactggttcactttaaataaaggagtttatctccggtaa

SEQ ID NO: 880687 - DNA, 120 bp, Artificial Sequence
  ENSG00000262786_0 (sequence is synthesized)
gaagggcggtcggcgccgcagcggctccgatgcccgcccggaagggagcgctctggccccggcctcgcagctgcgggacagccgggagcggagcagagggcagccgcggccagttgtctc

SEQ ID NO: 880688 - DNA, 120 bp, Artificial Sequence
  ENSG00000262786_1 (sequence is synthesized)
cagccgcggccagttgtctccccagcggactgggaagggaactttatctcggcctggactcccgctgtacctttgttgggggttagtggtgaggctgcggtcgtccgagctcctgggtgt

SEQ ID NO: 880689 - DNA, 120 bp, Artificial Sequence
  ENSG00000262786_2 (sequence is synthesized)
cgcgggcgccgcgatcccctcttcccgtagaagggcccagggcgctgctcgaggcgcgggaacccctggccagaggcgggcactggcgcagccccgcggctgctgctggccaagccgact

SEQ ID NO: 880690 - DNA, 120 bp, Artificial Sequence
  ENSG00000262786_3 (sequence is synthesized)
gcagggatgagaaattccttgtaagagtggctggaaggctccgcggagagggaagaaactcttcccagagcgagctcccactgctccttgggaatggtgcactttccagttccagttgga

SEQ ID NO: 880691 - DNA, 120 bp, Artificial Sequence
  ENSG00000262786_4 (sequence is synthesized)
ccctctgggattgtcacaggaagcgctgccatgtatgaggagccctctgcaaactacagaaggatggatgctcttagcttataaataagattttgacgccctggttggtttgatgacttg

SEQ ID NO: 880692 - DNA, 120 bp, Artificial Sequence
  ENSG00000262786_5 (sequence is synthesized)
tgtcatgaggagtaggggtgtgcgctgattccaaattcttccacgcggcatcctgctccggagcctcccttgtctcctagagaaagggacagggaatcgaaggatggggagtctgaggga

SEQ ID NO: 880693 - DNA, 120 bp, Artificial Sequence
  ENSG00000262786_6 (sequence is synthesized)
gaggcccctattccgcacgctgtctcctggctggctcctgaagggctggctgcttcccccacctggaagtccaggcccctgttcggaagtcctctccgcacagcctgacagtcccttggt

SEQ ID NO: 880694 - DNA, 120 bp, Artificial Sequence
  ENSG00000262786_7 (sequence is synthesized)
ctgggtgtcctcttctcctccagctcctttgtaagtcccatgctcctctatttacctagtggagggtgtcatgccaggaccctggcatatgatacaccagagctgcattgcttttccgaa

SEQ ID NO: 880695 - DNA, 120 bp, Artificial Sequence
  ENSG00000262786_8 (sequence is synthesized)
tctgctcaagctgtacaacatttctgagcctcagtaccaccagccatctgtggtcctccatttgtcctcttctcctacaaatacctccagcccctctcttccttcatgatgcttctagca

SEQ ID NO: 880696 - DNA, 120 bp, Artificial Sequence
  ENSG00000262786_9 (sequence is synthesized)
ttggaaatcctccaggacaattctgccttcaagtttcctagcctgagccactgagttgatggaggaaaatgtgatagagatgactcgtcctcctttaattttcccacttctataagcata

SEQ ID NO: 880697 - DNA, 120 bp, Artificial Sequence
  ENSG00000262786_10 (sequence is synthesized)
taaacgtgccctgcaactctcctaagtgtccccagaagacccgctttcccagtctctgagacaaacatttcttagccttctctcctgcaagagataacatttctcaaagtttctttgagc

SEQ ID NO: 880698 - DNA, 120 bp, Artificial Sequence
  ENSG00000262786_11 (sequence is synthesized)
atgtagatgctgacaggggatgatctatcccttccaccaccaaacctccacaccagttggcactccacccttgttatagtggaggaagctgcaggctagttccagcacagtgaaccccag

SEQ ID NO: 880699 - DNA, 120 bp, Artificial Sequence
  ENSG00000262786_12 (sequence is synthesized)
tagtgtttcgcttctcagcctttgccatctcctcatccctgagccatctccctgtggcagacactgatgggccaccagcactgcatcagtgaaggacttgctgccccagctgctggcgtg

SEQ ID NO: 880700 - DNA, 120 bp, Artificial Sequence
  ENSG00000262786_13 (sequence is synthesized)
ctgtcagcacagcctcctgcagtccgcctctccacgattgcggaaagcatctaggctgaagggtgcaggtgctgtatgcattggtttatatgcttcctgtacatttcctcaggaacccaa

SEQ ID NO: 880701 - DNA, 87 bp, Artificial Sequence
  ENSG00000262786_14 (sequence is synthesized)
ttggtttatatgcttcctgtacatttcctcaggaacccaacctgcacccgtccttctctaaagtatggttaccatcagcatccagac

SEQ ID NO: 880702 - DNA, 120 bp, Artificial Sequence
  ENSG00000267366_0 (sequence is synthesized)
catttgatgctactgccagttttattattgttattatgctcattaatattaatactcagccactgtacctatttaagattgaagaggagaaaggcaaggttttgctgaaatcatgatagc

SEQ ID NO: 880703 - DNA, 120 bp, Artificial Sequence
  ENSG00000267366_1 (sequence is synthesized)
agtgacaatgggtttggggcgggtgggcatgaggggcttgaaggctccttgaagcgaccttcctagttataatatttgaaaatgtagaataatttatgggtcagattgccaatggttcct

SEQ ID NO: 880704 - DNA, 120 bp, Artificial Sequence
  ENSG00000267366_2 (sequence is synthesized)
tctaaaaaccaattctgaatttgcttcaccatatttttgatgatgtgttttatggcctcacaaactcccagctggttccctcgatgatctcgtctctgtggttactgtcaacaatccaca

SEQ ID NO: 880705 - DNA, 120 bp, Artificial Sequence
  ENSG00000267366_3 (sequence is synthesized)
ttcgtgttgtggcatatcatcttacagaagcatttaaagcagctcagggcttctttcctctgatgtagattttctccattgttactcaacgaggctctgacatcagcctcctttcagttc

SEQ ID NO: 880706 - DNA, 120 bp, Artificial Sequence
  ENSG00000267364_0 (sequence is synthesized)
ccggtggaagttatcgggtggcagcagagttggaatgggataggtagttccccgtttccaggaccccagacggcctgctgggacagtgtatatgagtccggaatgggctggaccagggtc

SEQ ID NO: 880707 - DNA, 120 bp, Artificial Sequence
  ENSG00000267364_1 (sequence is synthesized)
aggctagcccagacttcaggtacgggctgtgatgacgaggagtgggctagtctcccgggtcggtcaccgctgaactctcagagacaatcaagctttcgatgatcatgtgatgaggtttcc

SEQ ID NO: 880708 - DNA, 120 bp, Artificial Sequence
  ENSG00000267364_2 (sequence is synthesized)
agtcagttccaggtgaagacaccactggccatcaagaagctaccctctccccaccagacagagcaggatgagagttctataatcctcaataggaggaagcactcaattgaacaagtgcag

SEQ ID NO: 880709 - DNA, 120 bp, Artificial Sequence
  ENSG00000267364_3 (sequence is synthesized)
gaaccagctggctgcctcagcactgacagaagcaaattccatttgcttggacccactgcattccatcccttgtggaagagagcatgacaggaccttcaggcctctgaaaaaaaaaggatc

SEQ ID NO: 880710 - DNA, 120 bp, Artificial Sequence
  ENSG00000267364_4 (sequence is synthesized)
gaaactcaccagatcacctcaccagatgctggacccctcattcaccatgtttgcttccttgcctctccctagttcttattttcttacacattgttacatttcttccctgctatatcaacc

SEQ ID NO: 880711 - DNA, 120 bp, Artificial Sequence
  ENSG00000267364_5 (sequence is synthesized)
cctagttctagtcagtcatggagatggatttgagactgatctcccatcccctcagctacaccacctgattaaagccttcttccttggcaataatcattgtctcagtcattggctttctgt

SEQ ID NO: 880712 - DNA, 120 bp, Artificial Sequence
  ENSG00000267364_6 (sequence is synthesized)
tccttggcaataatcattgtctcagtcattggctttctgtgcagggagcagcaggacctagactaaacccctggtgttttggtaacaaaataaggccaggcacagaaagacaaacatcac

SEQ ID NO: 880713 - DNA, 120 bp, Artificial Sequence
  ENSG00000267364_7 (sequence is synthesized)
tgaactcatagagatagagagtagaaggattattaccagaggctgggaagtgtggttgaaggagttggtgggcagtggggatgtagaatgtgtccaaaaaaaggaatagaatgaagaagt

SEQ ID NO: 880714 - DNA, 78 bp, Artificial Sequence
  ENSG00000267364_8 (sequence is synthesized)
catttaactgtacattttaaaataacttaaaaggtgtaattgggttgtttgtaacacaaatgataaatgcttgaagga

SEQ ID NO: 880715 - DNA, 120 bp, Artificial Sequence
  ENSG00000267364_9 (sequence is synthesized)
gtgcattgcatgcctgtatcaaaatgcctcatgtacctcataaatatatatacctactatgtacccacaaaaattttttaagaaaatataccactgcttttccatttgtcaagtgaaaaa

SEQ ID NO: 880716 - DNA, 120 bp, Artificial Sequence
  ENSG00000267364_10 (sequence is synthesized)
catcccttgtggaagagagcatgtaagcaagtgagtgcaggaactggctggctgctttggtgctggcaggagcaaacaccatgaaggccccatggcagagtccaggacaggaccttcagg

SEQ ID NO: 880717 - DNA, 120 bp, Artificial Sequence
  ENSG00000267364_11 (sequence is synthesized)
aggctagcccagacttcaggtacgggctgtgatgacgaggagtgggctagtctcccgggtcggtcaccgctgaactctcaggttgctgcaaaggccattattttgttcctttttctggct

SEQ ID NO: 880718 - DNA, 120 bp, Artificial Sequence
  ENSG00000267365_0 (sequence is synthesized)
aggatgctgcgaggcgttgccagcggagggaacctgccgccgcctcgtccccctccaccctcggagcccggccggggagtcgggcccgggccggggaggaggaagttgcggcccagctgg

SEQ ID NO: 880719 - DNA, 120 bp, Artificial Sequence
  ENSG00000267365_1 (sequence is synthesized)
gacagcagcaggtgggaagctccgcgcccggctgttgcggctgcctgattgcagcctggccttgggcaaagcttcctactccgtctggagccccacacacttcccggttcccccgctctt

SEQ ID NO: 880720 - DNA, 120 bp, Artificial Sequence
  ENSG00000267365_2 (sequence is synthesized)
gggccgcttgccctgcgtgctcctcgaggggcctgcgaggtgccagcgccgggtagagacctttgccgcaggggcaggattgttcgtcggtcccggcgcgtctccctctccactccctct

SEQ ID NO: 880721 - DNA, 120 bp, Artificial Sequence
  ENSG00000267365_3 (sequence is synthesized)
ctgccggagcccctcggcccttcgaagccccccgcggaggctgcagcgcccggagaagccactgagtcaatggggcgagggactggggcgggcgcgcagagcccccaggattgagacgcg

SEQ ID NO: 880722 - DNA, 120 bp, Artificial Sequence
  ENSG00000267365_4 (sequence is synthesized)
cgcaagtgcggccactgcagcgccgcttggctgtttgttctcccgactgttcgcgaattacttacaaggcgcctaggcttctccgaagggtggacggctcgttccctctcgccttgtccg

SEQ ID NO: 880723 - DNA, 120 bp, Artificial Sequence
  ENSG00000267365_5 (sequence is synthesized)
ccctcagtctctccaccaccgcccggcacgctttgctgatctaaaatcagaacaattagagagtaatgattttttttggaatagcaactcctacagacactcagatctgccctcgcttca

SEQ ID NO: 880724 - DNA, 120 bp, Artificial Sequence
  ENSG00000267365_6 (sequence is synthesized)
gcgcctcccagccctccttcccagcagccaggcgagagcgcgcagacccctaaaaagcaacttcagtgttaaccgggtctggatcctggaactttataaactaatccgtgtgtgtgtgtg

SEQ ID NO: 880725 - DNA, 120 bp, Artificial Sequence
  ENSG00000267365_7 (sequence is synthesized)
tgtgtgtgtgtgtaaaccgaagagtaagtgcctattatttctgagtacttcggtgtcctaacgaagctttgctcctaaaggacaggatatattttaggagtctttctttccactgagttt

SEQ ID NO: 880726 - DNA, 120 bp, Artificial Sequence
  ENSG00000267365_8 (sequence is synthesized)
tttaaatgtttattttctcgagcgatcaaatgtgtcttttgtgcagtttatttaaacctcgtaaggcctccttgagtcgctgaactaattcagcaaactagctggtattgtggacggcgc

SEQ ID NO: 880727 - DNA, 120 bp, Artificial Sequence
  ENSG00000267365_9 (sequence is synthesized)
agtcggggtggatttttgtgtgtaggagaggtgaaactgacaattcaaggaaaggttctgtgcgagtccccacctcccatcctcatatccacacgtggcccctaggaggtgctggtgaaa

SEQ ID NO: 880728 - DNA, 120 bp, Artificial Sequence
  ENSG00000267365_10 (sequence is synthesized)
taacaagtgtgccttttttcttagcactgagcaaggtacttaaattaaaagggtgtgcaagagatgatgcactcggtgtggctgctctgatagccaaatggcgatgtggtcccagttaat

SEQ ID NO: 880729 - DNA, 120 bp, Artificial Sequence
  ENSG00000267365_11 (sequence is synthesized)
gtgttgagattatactgttcaccaagccctgttacgaactctgttgccatgcacgtgggaataatgcctgccccaagggaggtcttctttaacatctatttagtcatgtgttatttataa

SEQ ID NO: 880730 - DNA, 120 bp, Artificial Sequence
  ENSG00000267365_12 (sequence is synthesized)
acagcttgaattaatactgtaaaatagacggatgtctaagaatctaggctgtagcctaaagctaaatgaacctgagggtagacaagttcactctgtattaaccaaaggataatgaatgag

SEQ ID NO: 880731 - DNA, 120 bp, Artificial Sequence
  ENSG00000267365_13 (sequence is synthesized)
ttcaccgctcagttcaataagcttcttctgaaatatgcttcctcctggacttctaagaaacaggccaaaagtttaattatcccttaaaacatgttaagcctaaatagaaaaaggaaatta

SEQ ID NO: 880732 - DNA, 120 bp, Artificial Sequence
  ENSG00000267365_14 (sequence is synthesized)
atcatttatagattttctcttctttattatgattcagttggtgcatctgtagatggctaagaattttccaaaccacgtgaattcagagaggcaacacttttgttgttgttgtttttccag

SEQ ID NO: 880733 - DNA, 120 bp, Artificial Sequence
  ENSG00000267365_15 (sequence is synthesized)
gtaatgagctcgctttgaaaaccagtcactcggaaagggatggcatttttatgcaacttggattgaaatggttttgctttagtattctactctaattagaaagaatacaccacaggccga

SEQ ID NO: 880734 - DNA, 120 bp, Artificial Sequence
  ENSG00000267365_16 (sequence is synthesized)
aatagtttcatatgataggaaaatctttaaagaaaggaacacagagttattagattatggttggctgtataaatttagctgggcagcgggaggaaggtcataataaatgtatcctgctct

SEQ ID NO: 880735 - DNA, 120 bp, Artificial Sequence
  ENSG00000267365_17 (sequence is synthesized)
ctctcatcaattatcagcagcacatcccccaacattctctcctcccaaagactgaaggatgtgcagcaaagcttagatcttgaaggagaaggttcgggaaaaattaatgattttaattag

SEQ ID NO: 880736 - DNA, 120 bp, Artificial Sequence
  ENSG00000267365_18 (sequence is synthesized)
aactttccaatctaagtagaatcattaccttaattagctaaataaggaagtatgaaggatgaaattttgcaaatgaaattttgtaaatgtatggtagcgtagaatacccccattgcttca

SEQ ID NO: 880737 - DNA, 120 bp, Artificial Sequence
  ENSG00000267365_19 (sequence is synthesized)
ttttaaaaaaagaaaatataaatgcattttaattaataaatgacttttcatcatgtccctattaggaaaattctgtgtgccaatgctttcagtgtttgatttaatacatcttttgaagtg

SEQ ID NO: 880738 - DNA, 120 bp, Artificial Sequence
  ENSG00000267363_0 (sequence is synthesized)
tattttaataattctttttattgtttttttaatggagtgttgatttccttacataaatttaattgtaaacatgtacataggaccgtgattttgaattaaaaaaatactttgggccttcgg

SEQ ID NO: 880739 - DNA, 90 bp, Artificial Sequence
  ENSG00000267363_1 (sequence is synthesized)
taggttttgatacggcgtcttgctctgtcgcccagaaaataaacaaataaaagtcttcctcagcgacaaaagcaaacgcaagcccgagct

SEQ ID NO: 880740 - DNA, 120 bp, Artificial Sequence
  ENSG00000227945_0 (sequence is synthesized)
ccagctgtatcttcttttaccgatgaggacactgacagagacagggtctcactctgtcacccaggagtacagtggcacgatcatagctcaacgtaaactggaacttctgggcttaagcga

SEQ ID NO: 880741 - DNA, 120 bp, Artificial Sequence
  ENSG00000227945_1 (sequence is synthesized)
tgctctcgcttcagcctcccaagtacctgggaccacagcagggaaaaagcaaatcctggaggaagctcaccttctccacactgctcatcgcctggaaatagatgttgtatcctttgcgcg

SEQ ID NO: 880742 - DNA, 120 bp, Artificial Sequence
  ENSG00000227945_2 (sequence is synthesized)
gagccaaaggagggttccaaaagccttgtccttcaatccacatttcaattaacttccttgttctcccaatacctcatattgagtgatgattccatttggatccaaaggttctttccagtt

SEQ ID NO: 880743 - DNA, 120 bp, Artificial Sequence
  ENSG00000227945_3 (sequence is synthesized)
gaagagattttactgtgaacttcacacatgacattatccagaaatgtagtttcaaagtatatagcaattttgtgaggattgaaataaattaaaaatcactggatcaagggaaatacattg

SEQ ID NO: 880744 - DNA, 120 bp, Artificial Sequence
  ENSG00000227945_4 (sequence is synthesized)
cattgtggctaggagcatcaagaaattctgaatgatatctcacgagagcaggatttatttcaatctacaaggagactatgaatgatactatgacctctgagacaggcaacataatttgat

SEQ ID NO: 880745 - DNA, 120 bp, Artificial Sequence
  ENSG00000227945_5 (sequence is synthesized)
acattgaggaaagaaacccacaataaacagaaaatatgccagcactaaactttagaagatatgttcaagccattgtcagccgaagactatgagagaagttaactgaatgcatccgctctc

SEQ ID NO: 880746 - DNA, 120 bp, Artificial Sequence
  ENSG00000224137_0 (sequence is synthesized)
agcccttttccctttctgccctctgccatgtgaggtcacagtgttcctccctcctgaggatgcagtgttcatgaaagcaaacactgggccctcaccaggcaacaaacctgctggtgcctt

SEQ ID NO: 880747 - DNA, 120 bp, Artificial Sequence
  ENSG00000224137_1 (sequence is synthesized)
catcttggacttcccagccttcggaactatggagcccgcactctccagttcatcaccaccccagcatccctactcttgcatctaacagtttccgctattttgcaccacctgcctggccct

SEQ ID NO: 880748 - DNA, 120 bp, Artificial Sequence
  ENSG00000224137_2 (sequence is synthesized)
aaggaagaaaggaaagaagagatagaggaaaaatggattcaacaaatgaaagtgttctttctgactactgctgtgtttacaaacattttaatcatcaaaacatgctttatttgatagaaa

SEQ ID NO: 880749 - DNA, 120 bp, Artificial Sequence
  ENSG00000224137_3 (sequence is synthesized)
gatcaaatctgcctttgtaaaacaagagactattttaatcattaagacaacacacatgtttgatttggaggcgtgttctcattcaaaaccttgcaaaatataatttcttcttgtctggga

SEQ ID NO: 880750 - DNA, 120 bp, Artificial Sequence
  ENSG00000224132_0 (sequence is synthesized)
gcaaattccaggctcctttggaagaatgacaatgctacagaaaagcacatggatttgcagcttcgtggacatcacctgtgagggtgacagctctttactctcaatggaggaaagtgaagc

SEQ ID NO: 880751 - DNA, 120 bp, Artificial Sequence
  ENSG00000224132_1 (sequence is synthesized)
tgctgaccagtctgatatcaagaagagaagtgattttccgatcctgcatccggtacagctgtgcggactctgctcttcctgccattccaccaagaaattaaaaagcaattttcttttgaa

SEQ ID NO: 880752 - DNA, 120 bp, Artificial Sequence
  ENSG00000261789_0 (sequence is synthesized)
aatgatggggacattccttagctgcacaaacagtcctgaaggctgtacagctaggtctgaacctgtccacgagccccttttgtgagctgggtgggttgccctgttgagctgctttttaga

SEQ ID NO: 880753 - DNA, 120 bp, Artificial Sequence
  ENSG00000261789_1 (sequence is synthesized)
agccttcatccatcaaggcaggccagggggcaagctgcctctggagtgccggcaccttggatcctggtatctgcccatcctgcctgcaaggccctcataacttgccctcagccaccccag

SEQ ID NO: 880754 - DNA, 120 bp, Artificial Sequence
  ENSG00000261789_2 (sequence is synthesized)
gcagccctgtctctagtaacaatttttgtcttgaagtctatcttgtctgagaagatcccactctcctctggtcactgcttgcaaggaatatcttttgttattttttaatttttttgagat

SEQ ID NO: 880755 - DNA, 62 bp, Artificial Sequence
  ENSG00000261789_3 (sequence is synthesized)
gcaaggaatatcttttgttattttttaatttttttgagatgattctgcctcctgggttcaag

SEQ ID NO: 880756 - DNA, 72 bp, Artificial Sequence
  ENSG00000261789_4 (sequence is synthesized)
tgccccgctggaatatctttttatatcattttacttttaacgtatttgtgtcttgtctttttttccatcaga

SEQ ID NO: 880757 - DNA, 120 bp, Artificial Sequence
  ENSG00000261789_5 (sequence is synthesized)
ttgcctcagcctcccaaagagctgagattacaggtgcatgccactgtgcctggccctatttgtgtctttgaatcttaaatgtgtctcttgcaaacctcatatagtagttaggtcatgttt

SEQ ID NO: 880758 - DNA, 120 bp, Artificial Sequence
  ENSG00000261789_6 (sequence is synthesized)
tttttttgtgtgtttgtttgttttttatctattctgccaatctctgcttttttttgtggtaaaatacccataatattaaagtataaaaatattttagtattggccgggcttagtggctca

SEQ ID NO: 880759 - DNA, 120 bp, Artificial Sequence
  ENSG00000261789_7 (sequence is synthesized)
gagtgagactccatctcaaaaacaaacatatatataaaaatgcaaagaaaaattagccaggcatggtggcgcgcacctgtatttccagctactcaggaggctgaagcacgagagtcactt

SEQ ID NO: 880760 - DNA, 120 bp, Artificial Sequence
  ENSG00000261786_0 (sequence is synthesized)
tcaccccacccctgcccagaactctttcctcaaggctagcctaggggagcacaaccttgggctgcttcccctgcatgcttagatccagccagagcccccctgctgggccacagacctcca

SEQ ID NO: 880761 - DNA, 120 bp, Artificial Sequence
  ENSG00000261786_1 (sequence is synthesized)
tccccatagcggcttcttttccaaagtgcattcacctcattgagaacagcctctcccctcctgaacattccagacattccactcaggctgacttaatgccacctggccagaaaaaaacag

SEQ ID NO: 880762 - DNA, 120 bp, Artificial Sequence
  ENSG00000261786_2 (sequence is synthesized)
tgtccattcccccttttctaaaaccttgattttgtgatcgtttgaacctttgagtttagaatcactgtattataacttccttgggatcctacctttgcagctagccacattccaaattat

SEQ ID NO: 880763 - DNA, 120 bp, Artificial Sequence
  ENSG00000261786_3 (sequence is synthesized)
aagactctctctggaagcccgttgtagacaaccaaaagccctgatgatgtaagggagctcgccagacacacactttcatactcaccaccttgtcttaagctgcttaccatctgctggccc

SEQ ID NO: 880764 - DNA, 120 bp, Artificial Sequence
  ENSG00000261786_4 (sequence is synthesized)
cagtcagctcttctgggaaaagctgcgtttggaaaaggagttccccgaatgtatttaatatcaaatggagcaatggttctcaaagtgtgctccctggagcagcagcagcaccagcatctc

SEQ ID NO: 880765 - DNA, 120 bp, Artificial Sequence
  ENSG00000261786_5 (sequence is synthesized)
ctgggaacgctttagacatgcacatcctccagccccacccacccctgctgagttagaagctctgcggtgaggccagtgcactcaagtttgggaactaccaatatagagtaaaagatgggg

SEQ ID NO: 880766 - DNA, 120 bp, Artificial Sequence
  ENSG00000261786_6 (sequence is synthesized)
gagaaaaccccttgagtatcaaatttagaaggccacaatagtgaagcgtctgtgcctactgtttgcagaatgtggaaggtttagggtgtttactactgtatgttgaataatgattctctt

SEQ ID NO: 880767 - DNA, 120 bp, Artificial Sequence
  ENSG00000261786_7 (sequence is synthesized)
aaaacttttgtgaattgtaaaagtaaatccctaggaatgctgggcagtgataacctgactctcccattttcacctgcatacacatacccagaacatccttttctccttcacaacagggaa

SEQ ID NO: 880768 - DNA, 120 bp, Artificial Sequence
  ENSG00000261786_8 (sequence is synthesized)
gttggaaggtaaaagttattttctaccaatataaagtcttagatttttatttactaaattcttaacacagtacatggcacagttaccttttaaaggctttccatttctttaatctgagcc

SEQ ID NO: 880769 - DNA, 120 bp, Artificial Sequence
  ENSG00000261786_9 (sequence is synthesized)
cacagcaaccccattttaaggagaggaactagagccagagagatttaggagccagcctgtacctcaggaatgagagacattacttgcgggagcagagatttgagctcggcaatactccca

SEQ ID NO: 880770 - DNA, 120 bp, Artificial Sequence
  ENSG00000261786_10 (sequence is synthesized)
gacccacacttgcccttgcttttgattttctacctccctaatgaacaagtggggatcatgaaagtcagctgtgcccagcttacttagagcacctgtttctgtctgagcaatgaaaagcca

SEQ ID NO: 880771 - DNA, 120 bp, Artificial Sequence
  ENSG00000261786_11 (sequence is synthesized)
tttgattggcggtcaacttggagaaaccttgaccctaaaagataatgccataaagaccaaacacactgggcgatcatatcatttcaacttgacaaaatttgtcgtactcttttctcgagg

SEQ ID NO: 880772 - DNA, 120 bp, Artificial Sequence
  ENSG00000261786_12 (sequence is synthesized)
tggacttctttttttgctagtggcaggggtagatatccttgttttgctggtaattatcaccatttaccttagacttcataggtggttttttatgtattcctcatgaaagccatagccaaa

SEQ ID NO: 880773 - DNA, 120 bp, Artificial Sequence
  ENSG00000261786_13 (sequence is synthesized)
gaccttttcaaccccaagcatctgtctcttggtaggtactggcttcaggcaagtggcttctctcattaagaaaatacagtaatttgagtgtcattgctacaagggaagtgttcctatgta

SEQ ID NO: 880774 - DNA, 120 bp, Artificial Sequence
  ENSG00000261786_14 (sequence is synthesized)
ctccatcacaccaactgcagtgagactatcaggaaagctttgggtaccctccccaggaaaactgcacatcactctgctgaaatttcaggaaaagtttacgggtctcaaggacagagttga

SEQ ID NO: 880775 - DNA, 120 bp, Artificial Sequence
  ENSG00000261786_15 (sequence is synthesized)
agtcaaaaaatttcaccttcatgttaattttttatggattttttaagggtggggggaggcaaaaagatttatttcaccattccctttgtcttcttaaaactcagaagaaacctcacagac

SEQ ID NO: 880776 - DNA, 120 bp, Artificial Sequence
  ENSG00000261786_16 (sequence is synthesized)
caatgagagagtttgaaatcgctattttaagaggcatagcataaaagaattttgatagaaaagtagagcaaaataagcagtaaaacctcatccctaacattctccagctgcctgacatcc

SEQ ID NO: 880777 - DNA, 120 bp, Artificial Sequence
  ENSG00000261786_17 (sequence is synthesized)
tggttcagttccagagacttggaccactgctccctagttccagggggtggcacaggagccaaaaacgagacctgaggctgaagcccaacagaagatgaaacttgggagcagcctcagctt

SEQ ID NO: 880778 - DNA, 120 bp, Artificial Sequence
  ENSG00000261786_18 (sequence is synthesized)
cgggaatcctcacttcctggcacagcaggtttgggtgccacagagcccagggctagacacctgccagcagtccatcagtcacagtctcagatgagtggcatcaaggtggagcccactgag

SEQ ID NO: 880779 - DNA, 120 bp, Artificial Sequence
  ENSG00000261786_19 (sequence is synthesized)
gtgaaggaaggagctgtgagggacacctgcatcctgctgcagaaatgtctgccccccgccttgtcccaccgcagctctatctcacagttggagaagcagaagcaaagcaacctgtcctgg

SEQ ID NO: 880780 - DNA, 120 bp, Artificial Sequence
  ENSG00000261786_20 (sequence is synthesized)
accatgcagcctggtcctctgtttccagagccagaggtctttgtgctctgaaacaaagacagtgaccccattaacccactggcacttactgtgtgccaggcactcagcctgtgttgtctc

SEQ ID NO: 880781 - DNA, 120 bp, Artificial Sequence
  ENSG00000261786_21 (sequence is synthesized)
ggaagcagtgtcatcattcccatttttcaggtgaggcacaggctcagaaaggtcaagaaacttgctcacggtctcacagctggtgagtaggttgtcagactccaaagatgtgtgctgcta

SEQ ID NO: 880782 - DNA, 120 bp, Artificial Sequence
  ENSG00000261786_22 (sequence is synthesized)
accctgcccaaagggacttcatcctcctccctccttcccaggcagttctcccaaccacccaccaacaggcaacgtaggtgtgattgccttcaaagttttctacttgccttcaagcttgaa

SEQ ID NO: 880783 - DNA, 120 bp, Artificial Sequence
  ENSG00000261786_23 (sequence is synthesized)
gcactggagactgagggaagagagcactggaagtggaggaagaaaaaagagctgttccctccaaggttgttcccttgggcctgactcgactggaagaagcagggtgtatatgtgtgtgtg

SEQ ID NO: 880784 - DNA, 120 bp, Artificial Sequence
  ENSG00000261786_24 (sequence is synthesized)
tgtgtaattgactttgtgaccatgaaactgagttaatactcttctgtctttgcctgtttcttcttgtacatcacctagaggaatacccattaatgtttagaggcagagaacaatagaaaa

SEQ ID NO: 880785 - DNA, 120 bp, Artificial Sequence
  ENSG00000261786_25 (sequence is synthesized)
tagcactgttcaaggaccaaaaatttaaaaagactgctgacatacagcatagaatgtgaaagtccctgataatcttatccctagggataaccacttgccatttttttacaatttcaattt

SEQ ID NO: 880786 - DNA, 120 bp, Artificial Sequence
  ENSG00000261786_26 (sequence is synthesized)
tttatgattataaaagtcatacacatttaaaaatacttcaaaataaatacaaaataaaaataaatgcttcattgcttaggttaccttggtacatgcaaggtctgagaccacatccatcaa

SEQ ID NO: 880787 - DNA, 120 bp, Artificial Sequence
  ENSG00000261786_27 (sequence is synthesized)
tgcagtttgctgcgtggattaccagatctctccaacattgacctcaattttttactctgagagcaaacagaatgggcaagggctgacctgaaatccttttgaaacacaagctggatccta

SEQ ID NO: 880788 - DNA, 120 bp, Artificial Sequence
  ENSG00000261786_28 (sequence is synthesized)
gggctttgacctccactgctcactgccacatgggatccgtctctgtgccccactctgccccagccccactggccttcctgctgctgctcacacaggcctactcttaaggcctttgcatac

SEQ ID NO: 880789 - DNA, 120 bp, Artificial Sequence
  ENSG00000261786_29 (sequence is synthesized)
tctgttccctgcagaggcctctgcctctgaacaaatgtgggacccatctctgccaaggctgggaagcaaacagcccccactttgccttgtcagcctgtgtttgcaccattcctgtggtgg

SEQ ID NO: 880790 - DNA, 120 bp, Artificial Sequence
  ENSG00000261786_30 (sequence is synthesized)
cctctcccagctgctttcacgtgggatttgagctctgggaagctggaagtttgtggagtccacttccctcattttgcatatatggatgataaagcccacaggcaagggctctgacaaaag

SEQ ID NO: 880791 - DNA, 120 bp, Artificial Sequence
  ENSG00000261786_31 (sequence is synthesized)
gaaagattccttccatttggcattgtgatgcagaggctgtcacagacaagcctgggaatttgggatacatcttgctgagcctagagacagaaaagagcttctaggctgccttccctgagc

SEQ ID NO: 880792 - DNA, 120 bp, Artificial Sequence
  ENSG00000261786_32 (sequence is synthesized)
cccgggccaggcccctccaggacacacttgcatggcaccctgttctttaaaacactgcacaccaacgactatgcaaaggattaactgacttctcaatattcttgttttctaccgagtgat

SEQ ID NO: 880793 - DNA, 120 bp, Artificial Sequence
  ENSG00000261786_33 (sequence is synthesized)
aagcttcagaaggacaaggtatgagtccgttttgctcttttgccttccccagcacatggcacaatgcccagcacatagtgttttgagagacagctgactggctgtctcatacaaggccct

SEQ ID NO: 880794 - DNA, 120 bp, Artificial Sequence
  ENSG00000261786_34 (sequence is synthesized)
gctctgttgggcacaagggctgcttaacacattcctatgctacaaaagacagtgctcctctccaggaaccaccaaataaattcagatactaatgccaaaaagaaggcagcatcagcttgg

SEQ ID NO: 880795 - DNA, 120 bp, Artificial Sequence
  ENSG00000261786_35 (sequence is synthesized)
gaaaagagtgcctttaaggcactgtttctctctatgaaggcagtgtggaatgatagggatgatctaggacctagaggagagaccttaagtcttacttgcagccaaaagccttcaaacctg

SEQ ID NO: 880796 - DNA, 120 bp, Artificial Sequence
  ENSG00000261786_36 (sequence is synthesized)
agctagccagaactgttacatcagaattctcacccatgacaagaagcctggagggagtccagggttgatggattgacttaaggtgtcatcaaaagcttagactttacccttctgctgcac

SEQ ID NO: 880797 - DNA, 120 bp, Artificial Sequence
  ENSG00000261786_37 (sequence is synthesized)
cacccttattgccttgttgtcacaagaggactactgctgttcaagtcatcacttccacattccagaaggaagaaaggagaggtagagggccagaagtatcccctccttttatcaggagcc

SEQ ID NO: 880798 - DNA, 120 bp, Artificial Sequence
  ENSG00000261786_38 (sequence is synthesized)
attaactttcccagaaacttccatgtccacccagcagacctccacttacatctcactaggcagaactcctatcacttggccaccccagcagtcagggaagctggaagggtgagcattcag

SEQ ID NO: 880799 - DNA, 120 bp, Artificial Sequence
  ENSG00000261786_39 (sequence is synthesized)
ctatagagagtggaagcacaagcagcaagggaagaacaggtcagtaattgctgtagagtttcctgcccagcagcatctgccaaaactaggtaaattattttttaacataatagtattttt

SEQ ID NO: 880800 - DNA, 120 bp, Artificial Sequence
  ENSG00000261786_40 (sequence is synthesized)
gtggattttcttacaaaagcaatgcatatatattgttactttgaaaaataaagattttaaatcttcaacaagcccattactcaggagtgatgactgttattcttggtttattagctttct

SEQ ID NO: 880801 - DNA, 120 bp, Artificial Sequence
  ENSG00000261786_41 (sequence is synthesized)
agatctttgtattttttttaacgtgggtagaaccacaatatgggttgctctgaaattagcctttacacttggcattgtgaaaaatctttccaaatcattaaatgttctctgcagaattac

SEQ ID NO: 880802 - DNA, 64 bp, Artificial Sequence
  ENSG00000261783_0 (sequence is synthesized)
aactcctgccttcaggcattcctcccatgttggcctctgaaagtgctgggattacagatggagt

SEQ ID NO: 880803 - DNA, 71 bp, Artificial Sequence
  ENSG00000261783_1 (sequence is synthesized)
caatctcagctcagaagtagctgggactacaaatgagtacctgcacgcctgtctaatttttgtatttttag

SEQ ID NO: 880804 - DNA, 120 bp, Artificial Sequence
  ENSG00000261783_2 (sequence is synthesized)
tcaaactcctgggctcaagtgatatgcccatctcggcctcccaaagtgcttagattacaggcatgagccactacgcccagcaatccctttacctttaaaaaaataaataaataaaccttt

SEQ ID NO: 880805 - DNA, 120 bp, Artificial Sequence
  ENSG00000224138_0 (sequence is synthesized)
gctcagatttatccagagcaacctactgcctccacaatagctaaatcgatagagattctgactaaagatatggacttcctcctccagaaacatgcgcagaagtgcatacaccatttactt

SEQ ID NO: 880806 - DNA, 120 bp, Artificial Sequence
  ENSG00000224138_1 (sequence is synthesized)
cgtttcactgcactggaagatgatttactgaacataagcaatatttgtaaaggattatgcctccgttctcttttgaaagaaaaatgactgtttcctggaaaaaaaatttagaaaattctg

SEQ ID NO: 880807 - DNA, 120 bp, Artificial Sequence
  ENSG00000224138_2 (sequence is synthesized)
aatgagttgaaactgtgctttggcttttgacatagcaacatatacttcatctttgataacccattacaactttttccctatggcaacaagtgctgaaatccttgactcacaaagttctca

SEQ ID NO: 880808 - DNA, 120 bp, Artificial Sequence
  ENSG00000224138_3 (sequence is synthesized)
aaatgtggttctgagaccaccacctttaaaaatgcaccatattatgtatttttacaagcaccagaaagagctgtggtaatttttcctgttttcctgaatcttctttgcaactcttaaaag

SEQ ID NO: 880809 - DNA, 120 bp, Artificial Sequence
  ENSG00000261781_0 (sequence is synthesized)
gagaagaaggccatgcaacacgagaggcagaatcagagagagaagatgccatgctgatggcttcgaaaatgaaaaaagggtcctgagtcaaagaatacaagtggattctaggagctagga

SEQ ID NO: 880810 - DNA, 120 bp, Artificial Sequence
  ENSG00000261781_1 (sequence is synthesized)
aagtcaggaaacaggctgtgctctggagcctccataaaaaaccagtcatgtgaacaccttggtgttagcccgtgtgatcatcatcagaggaggaggaaggaagttgagaaggaggaggaa

SEQ ID NO: 880811 - DNA, 120 bp, Artificial Sequence
  ENSG00000261781_2 (sequence is synthesized)
ggaagttgagaaggaggaggaaggggagcaaagatgagccgcagccgagatgttgccagctcagggggagtcagattctaggccagatccctggctctgtgccccacagcccaccctttg

SEQ ID NO: 880812 - DNA, 120 bp, Artificial Sequence
  ENSG00000261781_3 (sequence is synthesized)
catcccccgctccggcacctgtcatgcacacaccacgttatggtgatctctggtccagtctgcaaatatgttgttgcctgacacaaagtaaacagtcgatggatgctgctgtgctcgtca

SEQ ID NO: 880813 - DNA, 120 bp, Artificial Sequence
  ENSG00000261781_4 (sequence is synthesized)
tcgttaagtcatcactatcatcatttgctctggccaactcctggtgtttgctgtcctcttagaagctgtggtatgaattgcacggattgcattcatgcgtcaaccttccctgtgtctaca

SEQ ID NO: 880814 - DNA, 120 bp, Artificial Sequence
  ENSG00000261781_5 (sequence is synthesized)
tcccatgcctgtcactttgcagttctcctctctaaagaggcccactctgtttcccaccccttaagtctgggctggctttcacccatagaatgcgacggaagtaacagaggccagtcctga

SEQ ID NO: 880815 - DNA, 120 bp, Artificial Sequence
  ENSG00000261781_6 (sequence is synthesized)
gtctaggcctcaaggggcctcgcgcctttctgctctgtctttggcttcctggtctccaccatgagaatgtgcctgggctggccagcaggagaatgagatgtgtggagcagagctgagctg

SEQ ID NO: 880816 - DNA, 120 bp, Artificial Sequence
  ENSG00000261781_7 (sequence is synthesized)
ctgagaccatccgagagagtagccggcagccagccagcccccaacctgtgatcagcagagccactcggctgacctgcagatgagaacagaaacacgagcaggccagttgagctgaacctc

SEQ ID NO: 880817 - DNA, 120 bp, Artificial Sequence
  ENSG00000261781_8 (sequence is synthesized)
ataggctcacaagctgaataaatgcttattgttgcgcgctgctgaggttttgtggatatttgttaggcagccttatagtagcaattgataactgatacagaagccaccgaaaggagcaag

SEQ ID NO: 880818 - DNA, 120 bp, Artificial Sequence
  ENSG00000261781_9 (sequence is synthesized)
ctaagtcctagggaaaaatgttgccaggcgttcggtcttctcagagtgatagctgcttattagaaagaaaccaactttgactgtcaccttctctgccacttgcactccgttaaacccaga

SEQ ID NO: 880819 - DNA, 120 bp, Artificial Sequence
  ENSG00000261781_10 (sequence is synthesized)
agaacagtatctttgagaacccgagggcaaaatcctctgcaggagtaggaggcggctcttaaacagccccaggcgatgtggaaggtgggcggaggctgagctattgcactgctccccaaa

SEQ ID NO: 880820 - DNA, 120 bp, Artificial Sequence
  ENSG00000261781_11 (sequence is synthesized)
tcccagtgcctggctgcacccccacacctgaaacctgcctaccctggtttaagcctcccccagccttcctggtgaagacccctcatggattcttgttactctcaggattgtgcaataaac

SEQ ID NO: 880821 - DNA, 120 bp, Artificial Sequence
  ENSG00000261781_12 (sequence is synthesized)
ccttctccttcacgcagagtagacgtgacgggaaagtctatttctggcctgactgtattgcatcttgtttgacacctccgctcagctggcattcaggtgggcactacctgctcatggaaa

SEQ ID NO: 880822 - DNA, 120 bp, Artificial Sequence
  ENSG00000261781_13 (sequence is synthesized)
gtccaggagaaaatggaagagaagattttttagaaatcaacacacaattcaacgtctttctttctttccttctttgagagagaaagagagagagagagagagcagtagacaagtcaattt

SEQ ID NO: 880823 - DNA, 120 bp, Artificial Sequence
  ENSG00000261781_14 (sequence is synthesized)
cacaggggctgagtatttacaccagtctgaacctgggctggaaaactgttcaccccaagcaccatggtgagtggggaaggaggaggcagctgccgccttgaaatcaccaacacagctttg

SEQ ID NO: 880824 - DNA, 120 bp, Artificial Sequence
  ENSG00000261781_15 (sequence is synthesized)
tttcattggccctgagtcagccaaaacatcagacgttccaaatattagacaaccttccaggccaatgttagccccaaagcacaaccaaaaaccaaagagaagtgtctcaaatgttcctga

SEQ ID NO: 880825 - DNA, 120 bp, Artificial Sequence
  ENSG00000261781_16 (sequence is synthesized)
atgtttttacatttcttggacaactattctgctctgagggaatgtgagaagagctgtctgttccatggaggccccagagaaaatcatttcccatgccaaggctggagctggtggctgttt

SEQ ID NO: 880826 - DNA, 120 bp, Artificial Sequence
  ENSG00000261781_17 (sequence is synthesized)
ccctctggggaacggggtgggctccatcaccctcagacaagctataaagcaggctttcaaatagcatatactctgtgggagcaattccacttctggagatagattttttaaaaatcaaaa

SEQ ID NO: 880827 - DNA, 120 bp, Artificial Sequence
  ENSG00000261781_18 (sequence is synthesized)
gcaagatcttgaagagatgtgtacatactcatgttcgtagcagcatcatacacaatagcccagaggtagaagcaacccaggcgttcattgacggatgcatggatgaacaaaatgtgggac

SEQ ID NO: 880828 - DNA, 120 bp, Artificial Sequence
  ENSG00000261781_19 (sequence is synthesized)
atccatacaatggaacattcagccttcaagaggaaagggattctgtcaaggatgctgcagcgtggataaagcttgaggacagtatgccaagtaaaataaaccagtctccaaaaagacaaa

SEQ ID NO: 880829 - DNA, 120 bp, Artificial Sequence
  ENSG00000275871_0 (sequence is synthesized)
tcatatcttactcaagtttaatatcccaaaagggctccccattgccctcaggctgaattctgaagcccttcccaaagcctgcgagggtctgccgcatctagccccagtgacctcttcctc

SEQ ID NO: 880830 - DNA, 120 bp, Artificial Sequence
  ENSG00000275871_1 (sequence is synthesized)
ggctcccagggactgtgctgctccccgtcactctccctgcccatctcttcctcctgtgctaggtctctaatcaagtggccactctgggaaaccctccttgacttttttttttttttgaga

SEQ ID NO: 880831 - DNA, 120 bp, Artificial Sequence
  ENSG00000275871_2 (sequence is synthesized)
cagagacacaacagaatggaaagcgaattgacagggagcattctgttgtggaatggatcagttgctccctgtgaatttgctttcagtcctatttaccgtggggtacaaagcctcagtttg

SEQ ID NO: 880832 - DNA, 120 bp, Artificial Sequence
  ENSG00000275874_0 (sequence is synthesized)
tgaagtgctgacgggtggagcgacacggaggagcctcagaaacacccaccatgctgctgcccggaagaggcaggcacggaaggccacgcgctctatgacctcatccatgggaaacgcaca

SEQ ID NO: 880833 - DNA, 120 bp, Artificial Sequence
  ENSG00000275874_1 (sequence is synthesized)
gaggcgaggcctgcccggggctgggaggagggggcacaggagcgccggctgtggggatggtgtttctcccgccgggggtggctggctcaccctggcactgcaccgcagtgggggtggacc

SEQ ID NO: 880834 - DNA, 120 bp, Artificial Sequence
  ENSG00000275874_2 (sequence is synthesized)
ggatgccgctgaactgcctggactttcaagaggtaaattccgagctctgctctgaggcctgaccgtccctggccgccaagtgtctgctgactgagagctccagctccggagaggtgccca

SEQ ID NO: 880835 - DNA, 120 bp, Artificial Sequence
  ENSG00000275874_3 (sequence is synthesized)
agagggacctgaaggagcaggtgcctcttcctcagacatctgcagtcacttcacagtgaatgaggctccagccgggtgccctgagaagtggccaacaccctacccaagaggagaccgcac

SEQ ID NO: 880836 - DNA, 120 bp, Artificial Sequence
  ENSG00000275874_4 (sequence is synthesized)
agccacggccaacgtggagctctaactcagggctccagcctccagcccagtccttttccttgagtagggacgacccccacagcggcctctctgcattgcttaggtggggagcacatgtgg

SEQ ID NO: 880837 - DNA, 120 bp, Artificial Sequence
  ENSG00000275874_5 (sequence is synthesized)
tgaagatgggcagcctgcaggtgcctgctacacgtgggggccacggccgacggaaagctcagtcatgagtgaaaacagaggaaatgtttctgaaaatataacaagtcagtgggaaatcaa

SEQ ID NO: 880838 - DNA, 120 bp, Artificial Sequence
  ENSG00000267098_0 (sequence is synthesized)
gtgcagaacatgcaggtttgttacaatttgccttattgtgtgatttagagctcatctgcagtatctccaagatcccagatgctgccacattccttgcaatacagccccttccactatctt

SEQ ID NO: 880839 - DNA, 120 bp, Artificial Sequence
  ENSG00000267098_1 (sequence is synthesized)
gctgccacattccttgcaatacagccccttccactatcttcaaggtcctagcctgagtccttccttgctcaatgaggagtctaaagacctttcacggctttggagttaagagggtgaaag

SEQ ID NO: 880840 - DNA, 120 bp, Artificial Sequence
  ENSG00000267098_2 (sequence is synthesized)
tagaatgagtaaaagatgacaaattcctacctttgctttccacattaaccactgcttgaagatatcaacatgtcggccacactgaatagttttatccgccgtgtcaaagtcaacattgta

SEQ ID NO: 880841 - DNA, 120 bp, Artificial Sequence
  ENSG00000267098_3 (sequence is synthesized)
gagtttacctgactggaaaagatattcagcttgcatctgattacatgcatctagaaggccctaaaaaaggaaaaacatatctaacatccttttgtctcatatgaaaaatgtggaaaacat

SEQ ID NO: 880842 - DNA, 120 bp, Artificial Sequence
  ENSG00000267098_4 (sequence is synthesized)
tcctcctcagtgttaaagacttcaagaagctttcctttggaagattaagaaataatcactagaaaaggacatgttacccatcattgagacagaaatgttttctcagtatgtatgttgctt

SEQ ID NO: 880843 - DNA, 120 bp, Artificial Sequence
  ENSG00000267098_5 (sequence is synthesized)
cagcacatcaaaacctaaatttatgtgcattgatggggtataatttaaatgttaattaagcagaactatttgtacaagaggtaaataacattatatgtatttatgtgtttgctatatgct

SEQ ID NO: 880844 - DNA, 120 bp, Artificial Sequence
  ENSG00000267098_6 (sequence is synthesized)
ttccatttcacattacatcatttgatcctcatggaaaactgatggtgtaggtactataatgacaacatttttatagattgaagaaactgagaatattaacatgttaagtaattttcaaga

SEQ ID NO: 880845 - DNA, 120 bp, Artificial Sequence
  ENSG00000267098_7 (sequence is synthesized)
atgaatttgggagctgaaaaaagggcagtttgacttgaggtttgtggaaacacaacatcctaaggaagataactcacactctgtttcaggctaggcttgtggatctataggaaggaccac

SEQ ID NO: 880846 - DNA, 120 bp, Artificial Sequence
  ENSG00000267098_8 (sequence is synthesized)
aatgtgacggtcagtgttgaagtatttcagggaaatagaatagaaattataactcaaaaatgaaaatagtttatgaatctgtattttgggtgtcctatttacacatgtaaatattttctt

SEQ ID NO: 880847 - DNA, 120 bp, Artificial Sequence
  ENSG00000267098_9 (sequence is synthesized)
tcttcttaggctcttttgaaccccctttttaatcttttgttagagcaggcctagagactattgtaaacactttaaaacagtatcatcaagatgagtttctgcacagcaaaagaaactacc

SEQ ID NO: 880848 - DNA, 120 bp, Artificial Sequence
  ENSG00000267090_0 (sequence is synthesized)
cgcagcgcgggtgttagctgccccagtctgagaggccccgctgccaccaccccctccaccactgctgtcaggcacggtagctgtagctcgttcgcgaggaccatctccatgcaagccatc

SEQ ID NO: 880849 - DNA, 120 bp, Artificial Sequence
  ENSG00000267090_1 (sequence is synthesized)
gatgggcgcagccgcgggtgcgggcgcggacacaggcgggtgtggccagagcaggagtgattctgcggtccgccggctgccgttcagaaggtaatggtggtggcggcttccaagtctcca

SEQ ID NO: 880850 - DNA, 120 bp, Artificial Sequence
  ENSG00000267092_0 (sequence is synthesized)
gagcctaggatgggtggggcctgagtgggaggtgggcggggctcgggcggggcctgacgagtccttacaaggcagcggccagccacgcagaccccctgggcacccgggctgcaggcggtg

SEQ ID NO: 880851 - DNA, 120 bp, Artificial Sequence
  ENSG00000267092_1 (sequence is synthesized)
gggccggggacccctgttcgagctccagtccccctctaccaagcttcatcaggcaaccatcactttgggcagatgaagcccagagatttggccaaagccacacatcgaggctgaggcaga

SEQ ID NO: 880852 - DNA, 120 bp, Artificial Sequence
  ENSG00000267092_2 (sequence is synthesized)
gccaggactggaccgtaggtgctctgcgtccagcaacctgggactcgcagacactgttccaagctctaggatacagaagcaagaattcaatcagtgtgcagatggatggccttaaaaaag

SEQ ID NO: 880853 - DNA, 120 bp, Artificial Sequence
  ENSG00000225420_0 (sequence is synthesized)
ggctgatgcaggcagcacccttctgtagaagtagttgccttactgagaaaactttttgcctgagtgctggttcttcttttcggcaccgagcacttgtttctaacagagacatgtgccacc

SEQ ID NO: 880854 - DNA, 85 bp, Artificial Sequence
  ENSG00000225420_1 (sequence is synthesized)
cggcaccgagcacttgtttctaacagagacatgtgccaccacgcccggttaatttttctatttttagtagagacgggattctgcc

SEQ ID NO: 880855 - DNA, 120 bp, Artificial Sequence
  ENSG00000225420_2 (sequence is synthesized)
agggttagccacaacgcccagccatatttaattttaatatgtattatctttagaataatttcttttttgaaaatcttttggagtgttttactttctttcttgcccttgaaacctggcata

SEQ ID NO: 880856 - DNA, 120 bp, Artificial Sequence
  ENSG00000225420_3 (sequence is synthesized)
tagcaggtgctcaacaaatattgaaggaaggaatgagggtgagagagagcagcggttttccaagggcccgcacaggaaagagacagaagggctccagttgtcttctgtaactgcccccag

SEQ ID NO: 880857 - DNA, 120 bp, Artificial Sequence
  ENSG00000225420_4 (sequence is synthesized)
cagcttcaggctccaggcagggagcaaggaagctatcagtacctggcaatatcagattctgtgctgcgccccaccaccatgatgtcaactctatggatgcttttgtctttttttggcctt

SEQ ID NO: 880858 - DNA, 120 bp, Artificial Sequence
  ENSG00000225420_5 (sequence is synthesized)
gggagggaccccgtggcagaggctgcagagaccagactgggggcttgaagcaggccccttcgaggctactttctcagacctctgctctcagatgcttttactctccccaactcttaagga

SEQ ID NO: 880859 - DNA, 120 bp, Artificial Sequence
  ENSG00000225420_6 (sequence is synthesized)
tccttcagagtactgcaagtactgctctgaatcacaaaacgtcagattgaaaccccaagggtgatgctccacaaatacagaccttgaggtccctgtgcatcagtcctttactgtgaagaa

SEQ ID NO: 880860 - DNA, 120 bp, Artificial Sequence
  ENSG00000225420_7 (sequence is synthesized)
acatcgtccattcatccagtctttgaggttttcttttctgcacagctgcatttgaatgtaaagatacacctttggtgaactgggctggagtttttctgtggtgtttttagtgagatctaa

SEQ ID NO: 880861 - DNA, 120 bp, Artificial Sequence
  ENSG00000225420_8 (sequence is synthesized)
acttaaagtggttggtcttggaggagaaatagacaatgtagcttcagaagaagatttgctactggtgggcttgaaagcagttagtttattagcacaatggttgccaatatgcaatcgatt

SEQ ID NO: 880862 - DNA, 120 bp, Artificial Sequence
  ENSG00000225420_9 (sequence is synthesized)
agttttcggctcttctttactggaagcattatcacagccagaatcttcaaatactattgaagaggaggttctctcccttgaccttacataaggagaagcttcagaaggacaaagttcaaa

SEQ ID NO: 880863 - DNA, 120 bp, Artificial Sequence
  ENSG00000225420_10 (sequence is synthesized)
ggagtgcccctcatcattgccatccatagtcccatcttccacatcacagtctgtaaggcaactgtcctggaggttgtatgctgcatccactgactcactgatgtcctcatggtccattcc

SEQ ID NO: 880864 - DNA, 120 bp, Artificial Sequence
  ENSG00000225420_11 (sequence is synthesized)
tgagaattccagtggtgagaactggctctcagatgaacttgtctggtcacaggaaatccctactgaaaaagacctgcttctttgtggtgaaggagctatgatttcaatatgttcttttgt

SEQ ID NO: 880865 - DNA, 120 bp, Artificial Sequence
  ENSG00000225420_12 (sequence is synthesized)
agcgaaaggatccattctgcgtattttaactgatggtgcatccattgggctaggagagctgagtggccagtctgtgctaaaagtgggagaaatacaaaggggtaagagtgaatatatatt

SEQ ID NO: 880866 - DNA, 120 bp, Artificial Sequence
  ENSG00000225420_13 (sequence is synthesized)
gattcaagtacctgaactgcaccctctgtttaaaaagcttcaactgtaataaggccacttaccaaatgacaacaaaacaacatacaaactaaataaaaacatgcaatgtgagatacagaa

SEQ ID NO: 880867 - DNA, 120 bp, Artificial Sequence
  ENSG00000267095_0 (sequence is synthesized)
tgttggaccagtgcggacgcgtcttggagttcgggtcgaatcctgagtggaggctgtagcgcggacgcggcttccgtttccccggcgatggtgtcctggactgaagagactgactggagt

SEQ ID NO: 880868 - DNA, 120 bp, Artificial Sequence
  ENSG00000267095_1 (sequence is synthesized)
gcatgttactgccgacaaagtttcagaacaccggccagcgcaagaccaccgacatcagactgagatacaacggcagcgatcctggatttgcagggccaggataaacaagggactgtagag

SEQ ID NO: 880869 - DNA, 120 bp, Artificial Sequence
  ENSG00000267095_2 (sequence is synthesized)
gccccaagctaccccgcgaaggaggaggagggccacggataaatagtgtgcttcgagaatcttaactcttcggggtcaacctctccttctacgccaaggaaacaggatcttcctgcaacc

SEQ ID NO: 880870 - DNA, 120 bp, Artificial Sequence
  ENSG00000267095_3 (sequence is synthesized)
ccccgagacaaccaccgaacagtcacccaacttagcactagggcccagacgttccgtcgatcgaatgtaccacgctcgatttctaggtctttagcacaacgcaggataagtcgattggtc

SEQ ID NO: 880871 - DNA, 120 bp, Artificial Sequence
  ENSG00000267096_0 (sequence is synthesized)
caaggtcaagaggtggcagtgagcaggtgagtgagcgaggtggtggggccagggctgagtggcaggccttggagggctgcctgggtcttggaacgaccgcttattttgacaccttgtcgg

SEQ ID NO: 880872 - DNA, 120 bp, Artificial Sequence
  ENSG00000267096_1 (sequence is synthesized)
gggtgagcggggggtggggggcagctagctggctttgcggtttctgagacacccagtagagatgtcaaggaaaaattagctggacaggtctgtgttcccagcatgagggctgatggacac

SEQ ID NO: 880873 - DNA, 120 bp, Artificial Sequence
  ENSG00000267096_2 (sequence is synthesized)
tcaggtgtctgtcgaggccctgcttgggatgtcggagtggtttgcccagggagagcagggttggggagggcggctggagaggtggaaggagcatcttagaaaaggggcatggggaaggcc

SEQ ID NO: 880874 - DNA, 120 bp, Artificial Sequence
  ENSG00000267096_3 (sequence is synthesized)
gggctgccctctggtgctgggatggagcttggctcaagcaggggctgaggaaacatttgtgggaagaaggaatggagagaccctggcctttgggatcagctgacctgttttgcatattaa

SEQ ID NO: 880875 - DNA, 60 bp, Artificial Sequence
  ENSG00000267096_4 (sequence is synthesized)
ccctggcctttgggatcagctgacctgttttgcatattaaatttattgcatcggcggccc

SEQ ID NO: 880876 - DNA, 120 bp, Artificial Sequence
  ENSG00000267097_0 (sequence is synthesized)
gaaaagtgaaagcggaatacctggttatccggaggtcactgtctccacacagagtggtgtccttgatgctagcttggggcaaagaagccagagacacgttctgatttccaacaagctgga

SEQ ID NO: 880877 - DNA, 120 bp, Artificial Sequence
  ENSG00000267097_1 (sequence is synthesized)
ccctaccccctcatcctgcctcaaccagtcatgcagagagatgctgaatggctgcctgctctcaggggaatgatttgtggaggtttaattaaaataatttaatcaatcaaatccaacaaa

SEQ ID NO: 880878 - DNA, 120 bp, Artificial Sequence
  ENSG00000267097_2 (sequence is synthesized)
gaggtcagaataaagaagccttgagggtttaaatcgcttcttgaaaagaaatgcccgtgtgtcaaggagctaagggagaccagcccaggaggagctgaatcctgccaacaatcacttgag

SEQ ID NO: 880879 - DNA, 120 bp, Artificial Sequence
  ENSG00000267097_3 (sequence is synthesized)
tgaacttgagagtgaatcctctccatgttaagccttgagtgaaagcggaatacctggttatccggaggtcactgtctccacacagagtggtgtccttgatgctagcttggggcaaagaag

SEQ ID NO: 880880 - DNA, 120 bp, Artificial Sequence
  ENSG00000267097_4 (sequence is synthesized)
ctttaaatgcgtggatttatcatcacctcaaatcgcctgtcactgtgatggaacaaaaatagaaagttgggctaatatcttcctgctagcatgtttccatctgtgagtttgatcaaagca

SEQ ID NO: 880881 - DNA, 120 bp, Artificial Sequence
  ENSG00000267097_5 (sequence is synthesized)
actttatctgcgaaattttgaagaatcagcttcatctccacttggcagcatgtggtaaatgaaggtatttctggaaatcccatcttcccagaattcagctaggatccagaagtgatgctg

SEQ ID NO: 880882 - DNA, 120 bp, Artificial Sequence
  ENSG00000267097_6 (sequence is synthesized)
gcctcttagctcagctccagttatttctctattgtagaaaaccaagagagagatgaataaggaatgaaaacatactccacatggactcaataaatcttgggtgaaatgatgctgtctgac

SEQ ID NO: 880883 - DNA, 120 bp, Artificial Sequence
  ENSG00000267097_7 (sequence is synthesized)
aaggtaaataaaaaatgcagcactcaagcaccagcactggggatgagatgaggacacaccaattaccagcacttctgcctgctttgctttgttgacaataaatatcaagttatgtcatca

SEQ ID NO: 880884 - DNA, 120 bp, Artificial Sequence
  ENSG00000267097_8 (sequence is synthesized)
ttgatttttcaaatatattacaatgataaagtgaccagttaatgtataagctctttgtgaaaggtggtgcctacagatggtcgactgataggaaacagtaaatgtgcaaactgctcattt

SEQ ID NO: 880885 - DNA, 120 bp, Artificial Sequence
  ENSG00000267097_9 (sequence is synthesized)
cccttgagattggagtcataaagtgatctcagtaagatatgagaagaaaatacccatttaacccctttctctgcagcaacccaaacatggtagtgcactgaattgttttgtatgtgtctg

SEQ ID NO: 880886 - DNA, 120 bp, Artificial Sequence
  ENSG00000267097_10 (sequence is synthesized)
gcggaatacctggttatccggaggtcactgtctccacacagagtggtgtccttgatgctagcttggggcaaagaagccaggccagcttgtggttgcaataggaatagaagagacttcctt

SEQ ID NO: 880887 - DNA, 120 bp, Artificial Sequence
  ENSG00000229739_0 (sequence is synthesized)
ctgtaattcaagttacccggaaagttcaatttcatgtgtgattattattgcctattgaaagtgcatctgatttgttataacaggaaccctgtaggggaaataattgtatgttgttagcaa

SEQ ID NO: 880888 - DNA, 120 bp, Artificial Sequence
  ENSG00000229739_1 (sequence is synthesized)
tgaatatatgtaaacctttaaaaatgaattaatgtttttgatatagcatgtttaattcaagctagtctgtgttcaattattggaagcagggagtgaacgctctaagaaataaaataacct

SEQ ID NO: 880889 - DNA, 120 bp, Artificial Sequence
  ENSG00000229739_2 (sequence is synthesized)
agggtgaaacaccttattttatgaaaaactaatttttaggagcattttcttttatactatgtaaaaaaatccctgaaagatgaacagactttgacagctgttataggtgagagcctcaag

SEQ ID NO: 880890 - DNA, 120 bp, Artificial Sequence
  ENSG00000229739_3 (sequence is synthesized)
taaagataaaattaaatgttttccttaaatgctattgcccaaataatgaatatccataattgaaaactgagattaccttatactttgctttgttctctctgccagagtcctacccactgt

SEQ ID NO: 880891 - DNA, 120 bp, Artificial Sequence
  ENSG00000229739_4 (sequence is synthesized)
attagttgttagagttgtggaacttaaccgaagctttctctggattccagatgttttaagaatattttcagctgcatggcttgacagccttgggattccctcacacattcacagtctttt

SEQ ID NO: 880892 - DNA, 120 bp, Artificial Sequence
  ENSG00000229739_5 (sequence is synthesized)
tcagtctgatgtgagcatgaaaactgggagttgtggagcccacttaggaaatgattgcaattgtccaggagacagatgatggtaattaagtttccatcagcctggaactcaggacagaag

SEQ ID NO: 880893 - DNA, 120 bp, Artificial Sequence
  ENSG00000229739_6 (sequence is synthesized)
atacatattctgtatgtagagaatcactggaggtcaaatgtctttgccaatttgagtttttccacttgaacaagaaaagactgtcaagggaaagccaatcaatttcacaatgtttagcct

SEQ ID NO: 880894 - DNA, 120 bp, Artificial Sequence
  ENSG00000229739_7 (sequence is synthesized)
tagagccactcaacagtcctgtttgggccagtctcctggaatatgagaaaagatgaagaatgggagtgttatggagggcatacgcccctctgatcatcaccacaaagagtggagcccttc

SEQ ID NO: 880895 - DNA, 87 bp, Artificial Sequence
  ENSG00000229739_8 (sequence is synthesized)
tacgcccctctgatcatcaccacaaagagtggagcccttcatggtcccagctgaaagcctggagaggctgcgcagaggccaaggcag

SEQ ID NO: 880896 - DNA, 70 bp, Artificial Sequence
  ENSG00000229739_9 (sequence is synthesized)
ctgcaaactctgcctcccagattcaagcaattcttctgcctaagcctcccaagtagctgggattacagac

SEQ ID NO: 880897 - DNA, 120 bp, Artificial Sequence
  ENSG00000229739_10 (sequence is synthesized)
atctgagcatgtttcaattttactccacatatttttctatcttcacagggaatgcatcccaaatgcaacaaataatatgcttttcacattccattatgcatatttttgcagaaaatgaat

SEQ ID NO: 880898 - DNA, 120 bp, Artificial Sequence
  ENSG00000229739_11 (sequence is synthesized)
gaatgttattctcagaagagaactcaaaaaggatttctatgaagtctctggcagaaaaccgagaaattacaaatgcaagtggtattttcattttcctcttttaaagaccacgatgtaaca

SEQ ID NO: 880899 - DNA, 120 bp, Artificial Sequence
  ENSG00000229739_12 (sequence is synthesized)
tgagaaaacaaaataccagaagtgaaaggctgactccactaaagatgttcaataatgagatttgattttttaaaaaacacatcttttatgggctttcagggcatggaaacaagatcaaga

SEQ ID NO: 880900 - DNA, 120 bp, Artificial Sequence
  ENSG00000229739_13 (sequence is synthesized)
aaggtgtttttctggagactttccaatcaaagcaatgaagatttaaagtggaataaaaggattgggcaacaaataaatcgagtgtaaaagaagtctgattcctcattgctgacaggaaga

SEQ ID NO: 880901 - DNA, 120 bp, Artificial Sequence
  ENSG00000229739_14 (sequence is synthesized)
cagccatggattgggaaaagattagagtgaatcctgtgatgttggattgggattgaagataccgaaaataaactcctggatccatatttcacaccttaagaaagcactccaacccccaag

SEQ ID NO: 880902 - DNA, 120 bp, Artificial Sequence
  ENSG00000229739_15 (sequence is synthesized)
ggcatcaacttcaacaggaaaactgacccttcaacttaccaaatctttgaagtgactagttgtatagtacaacaagcagaaaatttgctatggaggttgtgttaactgttgacatttatg

SEQ ID NO: 880903 - DNA, 120 bp, Artificial Sequence
  ENSG00000229739_16 (sequence is synthesized)
ttaaggaaattagtcaataatgtcacatatgttactttttctaattggatctgccatgattgctataaaactttgtccttccactatgactcatgagtaacttcaataacaaactgcttg

SEQ ID NO: 880904 - DNA, 120 bp, Artificial Sequence
  ENSG00000229739_17 (sequence is synthesized)
ggaattcccaatgccacagtagaactagtatatgcaaacattatttattatcagggtgcacataaagggaaactaggacaaaaacctaccctgtttcaatttgatcttgttctcttaagc

SEQ ID NO: 880905 - DNA, 120 bp, Artificial Sequence
  ENSG00000229739_18 (sequence is synthesized)
atggaaaaagaatacttgttgctataactcaacaactaaaactcttgtttctcaggagaaaatgcaaaaagaaaaccagtttatttgtcatttttggttttgcaaatgctaatcaaagtt

SEQ ID NO: 880906 - DNA, 120 bp, Artificial Sequence
  ENSG00000229739_19 (sequence is synthesized)
ggtctttatgcaatgcaatttttcccactcttaaaactgactgataacagcaaatcagactgaacctaaaaatgactccttcaaaagtactaaaagcctgtgtgcttatgtttatatatt

SEQ ID NO: 880907 - DNA, 120 bp, Artificial Sequence
  ENSG00000229739_20 (sequence is synthesized)
tgtctgtgaatggggaccaaatccttttatatgctggggaagaaaattccttgactcttggtcattagcaagtcagtgtacttgggtgctcatgtcactaaaatacctcatttatccctc

SEQ ID NO: 880908 - DNA, 120 bp, Artificial Sequence
  ENSG00000229739_21 (sequence is synthesized)
caataacaccttcttctggccagaaggattatatttatcctgtttcaaaagggaaaatcctggagcacctgaggcataaatatgtcatcttctgcccaattagtgtttttttgtttgttt

SEQ ID NO: 880909 - DNA, 120 bp, Artificial Sequence
  ENSG00000229739_22 (sequence is synthesized)
gtttgtttgctttgcctggagtagaacatggagaaatatgatcatgattactgatttctctcaaatcctaggcaacctagctgatacggtttatctctgtgtccccacccaaatctcatc

SEQ ID NO: 880910 - DNA, 90 bp, Artificial Sequence
  ENSG00000229739_23 (sequence is synthesized)
tatgggggctgtttattctcataagatctgatggttttataaatggtattttttcctgtgtgctcgcttctgtctcctgccaccatgtga

SEQ ID NO: 880911 - DNA, 120 bp, Artificial Sequence
  ENSG00000229739_24 (sequence is synthesized)
gtgaattctcataagatctgatggttttataaatggtattttttcctgtgtgctcgcttctgtctcctgccaccatgtgaagaaggtccttccttccccttcaccttccaccatgattgt

SEQ ID NO: 880912 - DNA, 120 bp, Artificial Sequence
  ENSG00000229739_25 (sequence is synthesized)
gcataatggaaaatggaaagtaaaaactgctgtacagaaaagccatcttattacttagtgtaattatttatgaataaattttgcatctcaaaagacatgaaaatttttacttcgaaagaa

SEQ ID NO: 880913 - DNA, 120 bp, Artificial Sequence
  ENSG00000229739_26 (sequence is synthesized)
aactacaaaacaaagaaatggaaatttatttgataatttcaatagcttttcagttcccagaaaaatagagactcaatccagtctctttactttttaagactggattgttaatttggggta

SEQ ID NO: 880914 - DNA, 120 bp, Artificial Sequence
  ENSG00000229739_27 (sequence is synthesized)
ggaggttctgtcacacccactgtgattctgaagagtgttatgcagaatcctggaatctgggaaaaagtagcaagaataaatgtcacagactatttttaaacaattattatttaggaaaag

SEQ ID NO: 880915 - DNA, 120 bp, Artificial Sequence
  ENSG00000229739_28 (sequence is synthesized)
gagtaaaaaaggaagataagctaaactcttcaggggcttggcaatatctgaacatgcgacatattattagcaagacgtggaagttttaggtgcagaaatgagagatgtgatcagggagat

SEQ ID NO: 880916 - DNA, 120 bp, Artificial Sequence
  ENSG00000229739_29 (sequence is synthesized)
ctggggaacagagtaatacttttgagaaaaagagtcatcctgggtaggaggaaagtgataaccatctgggattttcagggtgttggagaactgaaaaggacagaaattggattttttttt

SEQ ID NO: 880917 - DNA, 73 bp, Artificial Sequence
  ENSG00000229739_30 (sequence is synthesized)
tgttggagaactgaaaaggacagaaattggatttttttttgattgtttgtttttgagacggagtctcacttct

SEQ ID NO: 880918 - DNA, 86 bp, Artificial Sequence
  ENSG00000229739_31 (sequence is synthesized)
agtagagacggggtttcaccgtgttagggagtctcacttcttcacccaggcaggagtgcaatgacgcgatctctgcctccctgcct

SEQ ID NO: 880919 - DNA, 120 bp, Artificial Sequence
  ENSG00000229739_32 (sequence is synthesized)
tgagttattgtagacttacgtacttgggtttctcctgatgacctgggggaacaacataaagaaaaatcaaaattcttatttttctgctcttctttgaatgtaaaactcctgactgaacca

SEQ ID NO: 880920 - DNA, 120 bp, Artificial Sequence
  ENSG00000229739_33 (sequence is synthesized)
tgtgggtaatggtttccatatagattcacatacatgttagcttaccctcagtccatccctgatccccttcatccctgagatttactctatccctgagacacacttagtcactcctactct

SEQ ID NO: 880921 - DNA, 120 bp, Artificial Sequence
  ENSG00000229739_34 (sequence is synthesized)
tcccaagtagaacttcctttgatccccaccctaatcctgaccctaccccattcctgagcttcactgcatttcacaaacttaacctatatcttaatggtgaaaatcaagaatgaagtttag

SEQ ID NO: 880922 - DNA, 120 bp, Artificial Sequence
  ENSG00000229739_35 (sequence is synthesized)
atatgtgtaaagatgaaggtgtttgtggtatgttattgaataattttttaattgtatttttaaagttttctcaaaattcaacctaaaattcttattactgtgtcaaaactgccatatcaa

SEQ ID NO: 880923 - DNA, 120 bp, Artificial Sequence
  ENSG00000229739_36 (sequence is synthesized)
aatattttcttctatttctgctttcctcagttattaccatttttgatacatcagggattcttctctataatttggaatacatgtttaaaggaacatatctgacctctctgaattttgtcc

SEQ ID NO: 880924 - DNA, 120 bp, Artificial Sequence
  ENSG00000229739_37 (sequence is synthesized)
ttggcctatgtgatgccatcaacagtgagttgacctgagatttaaagctcagtagaggacagagccactgaaattagatgtgaagactgctaaatttcagccaacagtaggagtcacaga

SEQ ID NO: 880925 - DNA, 120 bp, Artificial Sequence
  ENSG00000229739_38 (sequence is synthesized)
tttgggaaggactttagttattgtttctcggaacagtgggaaacactgcactgaaacgctgcttttctggaaagcccttttcgtcacaaatccctcccttcttttctttcctttccttcc

SEQ ID NO: 880926 - DNA, 61 bp, Artificial Sequence
  ENSG00000229739_39 (sequence is synthesized)
agatgtccaggctggtcttaaactcctgacctgaggtgatctgcctgcctcggcctcctaa

SEQ ID NO: 880927 - DNA, 120 bp, Artificial Sequence
  ENSG00000229739_40 (sequence is synthesized)
acaggtgtgagccactgcacccggccaccacttctatttatcattgtcctgtagaaaaataagcaaatgacaaaccaggtattttcagaggatatgactgaacacatgaaaagaagtttt

SEQ ID NO: 880928 - DNA, 120 bp, Artificial Sequence
  ENSG00000229739_41 (sequence is synthesized)
gaagttttaccttgtaagtgattggctaattaaaaccataattaataacattttacattcaatagattgaaaaattaaggaatacaacaataccaataaagatgatgtgcctcagtcttt

SEQ ID NO: 880929 - DNA, 120 bp, Artificial Sequence
  ENSG00000229739_42 (sequence is synthesized)
cacactgcagataggattttgaactgatagactctgagctcagaaagcaatttggcactatctcttagagttaagaattcacgtacactaaccattctacctctacataaatgccttaga

SEQ ID NO: 880930 - DNA, 120 bp, Artificial Sequence
  ENSG00000229739_43 (sequence is synthesized)
gaaattcttggatatgtgtacctcaagagtacacatgtgagaatgcttgtggcagccctgtttttaattactcaaatgtccgttgacaacaaaaaacaaattacgggttttgtaatttta

SEQ ID NO: 880931 - DNA, 120 bp, Artificial Sequence
  ENSG00000229739_44 (sequence is synthesized)
ttcagcagggagaatgacctacatacaacaacccagagtaatcttaaaaatgataaagcaagtctcagaagtctacatacagtatgctacagtttttataaagctataaaagaaacctaa

SEQ ID NO: 880932 - DNA, 120 bp, Artificial Sequence
  ENSG00000229739_45 (sequence is synthesized)
actgtattatgtaggaatatgtatatttgtgataaaactttttcttttaaaggagtcataaaactcaggatagtggcaaggtgtaacacatgaatacataaaacaatattagtgatactt

SEQ ID NO: 880933 - DNA, 120 bp, Artificial Sequence
  ENSG00000229739_46 (sequence is synthesized)
tcgttcttgagtaatgggtttcttgatcttcatttcatttacttaatggcactaacataaattttgggtggggttgtctgttactaacaaactaccctcaaacttaattagcttaaaata

SEQ ID NO: 880934 - DNA, 120 bp, Artificial Sequence
  ENSG00000229739_47 (sequence is synthesized)
acaaccatttcacttgcctcaatgctgtgagttgataggaatcagctgggtggttttgcgccacatgatggtgactttagctgcagttatctaggggctggattgggcttgaaacatctg

SEQ ID NO: 880935 - DNA, 120 bp, Artificial Sequence
  ENSG00000229739_48 (sequence is synthesized)
gtggtggctgggcttgctatcatttatggctgggatccaagaagcagcatcccaagtataagcatttcaagaagaggaaagtagaagctaagtccttttggggccttagcttggaaatcc

SEQ ID NO: 880936 - DNA, 120 bp, Artificial Sequence
  ENSG00000229739_49 (sequence is synthesized)
cagaacattattttcaccacattgtattggtcaaagtaatctacagggtcagcctagattaaagaaaaaaaaaaaaaacccctttttgatgggaaggggtcatgcatacacgagcaagaa

SEQ ID NO: 880937 - DNA, 120 bp, Artificial Sequence
  ENSG00000229739_50 (sequence is synthesized)
agaaattgatggcagaaatctttggtagttacaatgtaccccctggtcatagtaatttgtgttcctgatggaaaattatttcactacctcctaggaaaccttaaagtctcatctcaatat

SEQ ID NO: 880938 - DNA, 120 bp, Artificial Sequence
  ENSG00000229739_51 (sequence is synthesized)
gacatcaagttcaagctcaagacccagaatctcatgatctaaaccagtttcagtaacatatgaggcacctttactacagtttccctcaatccgaagatgtgtgaaactaaagacaagttt

SEQ ID NO: 880939 - DNA, 120 bp, Artificial Sequence
  ENSG00000229739_52 (sequence is synthesized)
tctttcccatattcacccagcctacgatgatttctataaaattgtcaaggtcatcttccaagagtgaaggatgatgaaaataaagatttgtaagaagtattgcaaagaatggaatatcaa

SEQ ID NO: 880940 - DNA, 120 bp, Artificial Sequence
  ENSG00000229739_53 (sequence is synthesized)
gaagaagggaaaaaataaattggagatacaatgattggcaaaaatgacatctttatttatttttaataaaagataaatgtaatgtagagccatggccttattcttctaaacttctgtggg

SEQ ID NO: 880941 - DNA, 120 bp, Artificial Sequence
  ENSG00000229739_54 (sequence is synthesized)
cgaagctttctctggattccaggtaactttgttcttttgtttttgtttttttcctgcagaatcgatatatgggcctgaaatatattaagttagagaccaaacttttgaaaattgactaga

SEQ ID NO: 880942 - DNA, 120 bp, Artificial Sequence
  ENSG00000229739_55 (sequence is synthesized)
gaaatgctgctgttgagtttactttcttctgaaagaatatcttttcctgtaatgggaggtacaatatttctgtacagagctacttcactcccacaagtcataggtcatcaagaagagcat

SEQ ID NO: 880943 - DNA, 64 bp, Artificial Sequence
  ENSG00000229739_56 (sequence is synthesized)
ggcgtggtggtgggtgcctgtagtcccagatactcgacatctcgccactgcactccagcctggg

SEQ ID NO: 880944 - DNA, 120 bp, Artificial Sequence
  ENSG00000229739_57 (sequence is synthesized)
actccaactcaaaaaaagaaaaaaagaaaaagaaagcctggggatatttaccaggacccttcctccttttcaggccctagattctaagatcctgctttgcagatctgaagtgggacccag

SEQ ID NO: 880945 - DNA, 120 bp, Artificial Sequence
  ENSG00000229739_58 (sequence is synthesized)
ctcccgaggtgccgggattgcagacatacagatattcttttacttgttctggagaaaatagaattttagaaattcataacagccatcttttttaaagtatctgtttatcttgtaaatata

SEQ ID NO: 880946 - DNA, 120 bp, Artificial Sequence
  ENSG00000229739_59 (sequence is synthesized)
agccatcttttttaaagtatctgtttatcttgtaaatatacatattcctgtacatattgtttgaattccattacagacattattatgaatggttcatatatattttgataatgacttata

SEQ ID NO: 880947 - DNA, 120 bp, Artificial Sequence
  ENSG00000229739_60 (sequence is synthesized)
tataaacatagtatttgggcagaaattgtcatgatgaattagatgatctctaaagttttttctagctttaatatgaggtgattctaagtagcaggtacaatggacaatatgtgtgtgtgt

SEQ ID NO: 880948 - DNA, 120 bp, Artificial Sequence
  ENSG00000229739_61 (sequence is synthesized)
acagaactctttcttgatttctcttttgcctttacctttggtctcaacacttggactggtcctgtaattttgtttctctttttgcaatccctatccagaatcactggaggtcaaatgtct

SEQ ID NO: 880949 - DNA, 120 bp, Artificial Sequence
  ENSG00000229739_62 (sequence is synthesized)
atgctgaagatacagggcacagcttccttcttgaattgcttgttgtttacctagttgacaatctactgggaaaaagaaattccttttccagaaaaggttttcaccaatttcaaggaatcc

SEQ ID NO: 880950 - DNA, 120 bp, Artificial Sequence
  ENSG00000229732_0 (sequence is synthesized)
tgtttgcagaaaggcaggaaactttattgaataatcttttctttggggtagagaagttgagaaaccaaagcgtatccaggtcagagaggagagagatccgaccggaagagaagagcacag

SEQ ID NO: 880951 - DNA, 120 bp, Artificial Sequence
  ENSG00000229732_1 (sequence is synthesized)
gggtgctgaagacagagggaggggacgccaggcagatttaaggcctacggacatcagaagtgcggcgaccagaggcattagaggtggtggtaacagaggggtctcctctctgacatgagg

SEQ ID NO: 880952 - DNA, 120 bp, Artificial Sequence
  ENSG00000229732_2 (sequence is synthesized)
gggtggatctctaaggccctgcctgctctgacacccacgggtcctgcagtcactatcctaagaaagaggctggagaggacctacttggcgtcctggccctcgagcaggctgcggtaggtg

SEQ ID NO: 880953 - DNA, 120 bp, Artificial Sequence
  ENSG00000263786_0 (sequence is synthesized)
agtgccgccatactctaatctgccagtaacgcgatcaatgctagaaacataatagaagggaaaaaacagagaatcctttaaaattacatatattggctggtctcgaacccctgagcttaa

SEQ ID NO: 880954 - DNA, 120 bp, Artificial Sequence
  ENSG00000263786_1 (sequence is synthesized)
gtgatcctcccacctcagcctccccaagtgctgctattactggcaagagccccagcacccagctgagagctttttgtatttatgtagctatttatcacagactagccaagtgcagtattg

SEQ ID NO: 880955 - DNA, 120 bp, Artificial Sequence
  ENSG00000263786_2 (sequence is synthesized)
ctttacaaagttcatttgtttttatagggagatgcttattcagcaagacattggttacctgcttggtgattttgtaaatgatgatttagggggcagatgtaaattttcagctaaccaacc

SEQ ID NO: 880956 - DNA, 120 bp, Artificial Sequence
  ENSG00000263786_3 (sequence is synthesized)
atattacgaattataggtggaaatgagctgtaatcattgacttaattatcttaaatcttggaggtatttattggcatttctgtaacaagtgctaaagacttgccgatgagtgcaaggttt

SEQ ID NO: 880957 - DNA, 120 bp, Artificial Sequence
  ENSG00000263786_4 (sequence is synthesized)
gtaagtgtcaggcagtagcagtcagtgaagtgcagcagtcacaaggccctctggtctagacagaagcagcagcttcctcttaaggccttttcctacccttatgttttgtggtgtgcttac

SEQ ID NO: 880958 - DNA, 120 bp, Artificial Sequence
  ENSG00000263787_0 (sequence is synthesized)
attttatttcaccctaatggcaaaatggtcaataaaagcttccgagtctcttgctcttgctctccctgctcctctctcaccgggcagagaagtttattaccttaaggttgttcctgaaca

SEQ ID NO: 880959 - DNA, 120 bp, Artificial Sequence
  ENSG00000263787_1 (sequence is synthesized)
aaagaggctgcacatattggatggctaagacagaaagatctcaccagtctggccttctgaagctgaaacaggctcacacagttgggaagaagaagaaccaagatataaactcagattttt

SEQ ID NO: 880960 - DNA, 79 bp, Artificial Sequence
  ENSG00000263787_2 (sequence is synthesized)
ctggagtgcaatggtgtgatctcggctggagtgcaatggcgtgatctgagcatctcccgcttataggcatgtgccacca

SEQ ID NO: 880961 - DNA, 120 bp, Artificial Sequence
  ENSG00000263787_3 (sequence is synthesized)
aggtatttttaagctccaaatccagttttttttccttttgttttggctacaccatgctacacattttatctaatgtatgttatggtcctaactataaagtcaagatgaataatgctttaa

SEQ ID NO: 880962 - DNA, 120 bp, Artificial Sequence
  ENSG00000286415_0 (sequence is synthesized)
gttactggatcgtgaagctagccgcccagagaagggtaggaggaccggctgcgtggcagctgggcgtggggaccacgcgaaggggagcgctctcggctctcgttattgggtatgggtaac

SEQ ID NO: 880963 - DNA, 120 bp, Artificial Sequence
  ENSG00000286415_1 (sequence is synthesized)
caaccatcttcagtctgtatgtctctccaatgcatcctgaatcactgggattcctttgaaaagagaaaatcaaccttcttcttcctgtttcctcctctgtcctctcttcatggatgaata

SEQ ID NO: 880964 - DNA, 120 bp, Artificial Sequence
  ENSG00000286415_2 (sequence is synthesized)
atcatgtctccataccacaggacatttccctctgtgaaaagtttaatttctgcattaaaccacttggcttaaaaaaaaatgaactgggaagacattataactcacattcccctctgtgaa

SEQ ID NO: 880965 - DNA, 120 bp, Artificial Sequence
  ENSG00000286415_3 (sequence is synthesized)
aagtttaatttccataaaccttaaatcacttgacttaaaaaaaaaatgaactgggaaaactctaactgagcaatctcttgaggaaggacaatgtttacagtatgcaaataacctatttgt

SEQ ID NO: 880966 - DNA, 120 bp, Artificial Sequence
  ENSG00000286415_4 (sequence is synthesized)
ctgctccccctttacggaactccagggtcaaagggcttcatagctcgggggaagggaacccagaagcctgacatgctggcaaacgagtaaaagttttttacccatcagacttctggcttt

SEQ ID NO: 880967 - DNA, 120 bp, Artificial Sequence
  ENSG00000286415_5 (sequence is synthesized)
tctctctctctgtgcaaactgtttgaatgaatgataaaaatcactgtttatatactctgaaacgttgtgattaatggaaaaaggatttgtgaggtgagtcttaagctatagagaatctgt

SEQ ID NO: 880968 - DNA, 120 bp, Artificial Sequence
  ENSG00000286415_6 (sequence is synthesized)
tagagaatctgtgatactttgtgttaagaatttctctttctgtatctttctatcagaaagaggggtaccttaggataaaatgtgggtctaggcccaaatgtccaacaatgatagactggg

SEQ ID NO: 880969 - DNA, 120 bp, Artificial Sequence
  ENSG00000286415_7 (sequence is synthesized)
gggtctaggaccccataagcccattgttcaagtcagcctgacaaactggtcagtagctaattttgctataggtctccgaagaaaaaaaatgggatgaggtctccgttttcttttacctac

SEQ ID NO: 880970 - DNA, 120 bp, Artificial Sequence
  ENSG00000286415_8 (sequence is synthesized)
ttgggagcttgaccttgtaaccacatggcaatacttttttggtctccgccgttttacagtggtggcccaggttcaatcctggcttagggaatgagtattttctggttaatatctgtgtga

SEQ ID NO: 880971 - DNA, 120 bp, Artificial Sequence
  ENSG00000286415_9 (sequence is synthesized)
ctttttccatttgctgattctcttcccctccatgaacaacttccataatagcttcctttcttaaatcttcctttctctgagttacctttaaagattctagattttgtaaaaactgcttac

SEQ ID NO: 880972 - DNA, 120 bp, Artificial Sequence
  ENSG00000286415_10 (sequence is synthesized)
cacctgtttgaaaataccttgtacactcacggttaagtcatagccttaggtgaggcttgttggtttcacctatgaggttacttttggcaaagtttaaaagccagaaatattggccacttg

SEQ ID NO: 880973 - DNA, 120 bp, Artificial Sequence
  ENSG00000286415_11 (sequence is synthesized)
attggccacttggtgtggctaaagttgggtaataagggatttaaaaggatatttttttgaaagagtgttatggttgaaagtcagcttaattagggcaaccccctttgggtcccctcccat

SEQ ID NO: 880974 - DNA, 120 bp, Artificial Sequence
  ENSG00000286415_12 (sequence is synthesized)
ataacagactgcattggaatcatctgtttgcttgtctgtttctctaccactcaataagctcctgaggggcctcattatctctccaatgcctggattatagtgttgttaaataaatttcca

SEQ ID NO: 880975 - DNA, 120 bp, Artificial Sequence
  ENSG00000286415_13 (sequence is synthesized)
cagaattgaacagacacagttcagaggccaaaagatcaaagattcagcaaaagaaggccccgaagtgcgtgctgattccagaagagaggctgcttgtctgtttgggaagaaaaacctccc

SEQ ID NO: 880976 - DNA, 120 bp, Artificial Sequence
  ENSG00000286415_14 (sequence is synthesized)
aactcttgcttatgatctctggtcctatctctttttctcctgcttcagtgagtagggggtttggcaatttaaaacatttttatttttattgttttgaatcgggcagcctccagaatcaca

SEQ ID NO: 880977 - DNA, 120 bp, Artificial Sequence
  ENSG00000286415_15 (sequence is synthesized)
gcagattcaaagagattccctcggggtggcaattttacctactctcagctcagggctgcctctgctcagcagacattagacaacagtgctgagaatattttcctcctaataagaaaattc

SEQ ID NO: 880978 - DNA, 120 bp, Artificial Sequence
  ENSG00000286415_16 (sequence is synthesized)
caatcacaatgatcatgctcagatacctaaagagctgctggaatctgagctctgaatacctggggaattactatactgtgaaaaaaggcagtctgaagaaagaaaggacaataagatggg

SEQ ID NO: 880979 - DNA, 120 bp, Artificial Sequence
  ENSG00000286417_0 (sequence is synthesized)
tgggcatgcgtgcgttaggtgtacctgtacacttgctgctcccctgatgatttgctcaacagtgtctgcaattggcagccagaaggagtccgcaagaagcaggagggttcggacctgaga

SEQ ID NO: 880980 - DNA, 120 bp, Artificial Sequence
  ENSG00000286417_1 (sequence is synthesized)
ccgcgccacaggaggaaggccaggatctgggagcgcaagactatcctaaacatcctgccattaattagctgaacagcccatctagtaaacaagaccgatggttgaggggctggaaaagag

SEQ ID NO: 880981 - DNA, 120 bp, Artificial Sequence
  ENSG00000286417_2 (sequence is synthesized)
aaagccatcccattcctgcggtaggcattctgtcaaagaaaaagaaatctgcaatgaattatcacatgaagtcaaacaaggaaaggaggcaaaaagcaagcagagccctcttcctgtttt

SEQ ID NO: 880982 - DNA, 120 bp, Artificial Sequence
  ENSG00000286417_3 (sequence is synthesized)
gtagactctgctggctacaatctaatagaatgcttaatctgaatatttctggtggcaaaactatagcaaccattctgtctattaaaaagtcagtgtggttaacaagtggttagtgattct

SEQ ID NO: 880983 - DNA, 120 bp, Artificial Sequence
  ENSG00000286417_4 (sequence is synthesized)
atttttgggaagtagcagatacataaaataagacatcccattttgttaactgattgggcttggttaggccaaagagatgtattgaatctgtttgtcttttataaacatgtgttctctatt

SEQ ID NO: 880984 - DNA, 120 bp, Artificial Sequence
  ENSG00000286411_0 (sequence is synthesized)
gatgttgccaagcaaatgcagcagaaccagcctgactgcctgaaactgtgcctcaaaatagggaaaaacagggagaaacctgtaagcaggagcactagatgctacagccctgctgctcaa

SEQ ID NO: 880985 - DNA, 120 bp, Artificial Sequence
  ENSG00000286411_1 (sequence is synthesized)
agtgtggtccatgaactagcagcatcaccaccacctgcagaagctcaggtcccactccctgctgaatcagaatctacagctcatgaagaaccccaggtggtttacaagcatactgaagtt

SEQ ID NO: 880986 - DNA, 120 bp, Artificial Sequence
  ENSG00000286411_2 (sequence is synthesized)
tgagaagtactgctttaaaagatgcattctaattggacttttcgacctaaaaagcacgaatagaggagaggaagttatggtcacaggtccaccttcatctggagtgcctatgtgctgctg

SEQ ID NO: 880987 - DNA, 120 bp, Artificial Sequence
  ENSG00000286411_3 (sequence is synthesized)
tgcttctgctgacctactggacatactttgtttggtttcaaagtcaaggagcgacattcccatatggatatttcctatgaaaaccaagtttgtgatttattcttatttcatcctggaaaa

SEQ ID NO: 880988 - DNA, 120 bp, Artificial Sequence
  ENSG00000286411_4 (sequence is synthesized)
tgtaacagtgtttatccttaactaaggagaaaagaacatgtttgttatttttttcttgctttgaacctgatgcagggaattttattttaattaacttaataaggacccatgaactcacta

SEQ ID NO: 880989 - DNA, 120 bp, Artificial Sequence
  ENSG00000286411_5 (sequence is synthesized)
cgtcatttaacaacaatccacatctaatcgtttggctaaggccccatgcaatctcctgacctcccccaagtgaagtaagctccatcctgaatcatgttcattattctctacatttctttt

SEQ ID NO: 880990 - DNA, 120 bp, Artificial Sequence
  ENSG00000286411_6 (sequence is synthesized)
acaattataaaataatattaattattttaaattttacatacaagatataatgctgtatctaatattttgggatttttttttcacttaacattacattgctaagattcgtccaaactcctg

SEQ ID NO: 880991 - DNA, 120 bp, Artificial Sequence
  ENSG00000286411_7 (sequence is synthesized)
tgctaagattcgtccaaactcctgtatgacgattatcgaaagggaatattattcatctgcttgcctactgatgagcatttgcattgtttatgggtttctgctcatgatacagaaaggaaa

SEQ ID NO: 880992 - DNA, 120 bp, Artificial Sequence
  ENSG00000286411_8 (sequence is synthesized)
tccctttaccactataaaattccacagtgcaaaaacaaaatattggcacctaaaatggagttgtgttccaacagattcagagctgtttgagactcacaatatatttccccgaagaaacaa

SEQ ID NO: 880993 - DNA, 120 bp, Artificial Sequence
  ENSG00000286411_9 (sequence is synthesized)
ttctctacatggtggttagtccactggctgatgcacagaaggctgcttaattcataataaaccaaaaaggacgacagagccaaaccattctggtacaacagccttcctgatgaaaatgca

SEQ ID NO: 880994 - DNA, 120 bp, Artificial Sequence
  ENSG00000286411_10 (sequence is synthesized)
cccaccagggaaatcacagcactcctatagaagcagaccaggcagcaggacaaggctcctgttttcttttcctgaagtctcacctagccttagccagaggcagcaactccagccaaggga

SEQ ID NO: 880995 - DNA, 120 bp, Artificial Sequence
  ENSG00000286411_11 (sequence is synthesized)
gggaacaggctggcctgaggcttctaggcccagggagatactgggagggagactctgaggccaagaactgaaagggaacggtgacttagaagaagtgacaagaactctagtggaaggagt

SEQ ID NO: 880996 - DNA, 120 bp, Artificial Sequence
  ENSG00000286411_12 (sequence is synthesized)
gagggatggtcaaaaagtgaatagtttcctctgcatttttagcactggtcagtggggatcaacagcaaggtggggtcaggaggcagccgcagggtgcctctaccaggtgacaggcttgca

SEQ ID NO: 880997 - DNA, 120 bp, Artificial Sequence
  ENSG00000286411_13 (sequence is synthesized)
ttttctttctcttcttcacagtcttacctcctctttcacaggggcacctacttgcacttaggatggggcatttgagaggcagaatatggggctcttggaagaggtggagaatactgaaag

SEQ ID NO: 880998 - DNA, 120 bp, Artificial Sequence
  ENSG00000286411_14 (sequence is synthesized)
gaggtgccacctcctctgtgtttttgtgtctgcagtggttgggagggagagcaggatggagcctctgggtgctatgcccacagtaactattgctctctaaggactggtcctatattggga

SEQ ID NO: 880999 - DNA, 120 bp, Artificial Sequence
  ENSG00000286411_15 (sequence is synthesized)
atatgtaggtcagagcctgtatactgaaagaaaatgcatacatttacctgttctaaaaaaagacgctgctatttttagggctttgaatgaggtatgcaggaatgtgtgagttacaactaa

SEQ ID NO: 881000 - DNA, 120 bp, Artificial Sequence
  ENSG00000286411_16 (sequence is synthesized)
acctctggtaagtttaacgttaggaaatctatttaaaaatttgggtcaaaatagttctataaaaatgtactacatttgcaatattttgttatagtttttgcaactgtatatatagcattt

SEQ ID NO: 881001 - DNA, 120 bp, Artificial Sequence
  ENSG00000286410_0 (sequence is synthesized)
acacaatgccacagcacagacatccaaggagagcatttcagtgaagctctagaattgtttcttacttaaggtataggagggaggcaggagcagatgtggctgcagaagagaagaaagcaa

SEQ ID NO: 881002 - DNA, 120 bp, Artificial Sequence
  ENSG00000286410_1 (sequence is synthesized)
tgtgaccacagaaacagagattggagtcatacagctaccagccgagaacaccggcaggcagctgccagaagatggaagaggcaaggaacagattctccccaagaccagaaggatccaatc

SEQ ID NO: 881003 - DNA, 120 bp, Artificial Sequence
  ENSG00000286410_2 (sequence is synthesized)
ctgatgacaccttgattttattcctatataactcattttgaatttatacttaattgtaattgttctggtttccagaactgtaaaaacaaaacaaacaaaaaaacccaaaaaacatttcta

SEQ ID NO: 881004 - DNA, 120 bp, Artificial Sequence
  ENSG00000286410_3 (sequence is synthesized)
ttgtcttaagccacaaggtttgtgctaatttgttacaatggcaatagataactaatacatgcatatttaaaacttcttggaattttaagcctaataaatgtccattatacattaatactg

SEQ ID NO: 881005 - DNA, 120 bp, Artificial Sequence
  ENSG00000286410_4 (sequence is synthesized)
actctgtgatataggcaaactacggaaaagtaaagattaacacagctaaagtggttcaaatcgctctgatgcctcctaactggcaaacataactagcatcttttgtgatccagttttcac

SEQ ID NO: 881006 - DNA, 120 bp, Artificial Sequence
  ENSG00000286410_5 (sequence is synthesized)
attttatattgttgacggcatttcccaactgctgttatatcatttcattaatagtgttcatcattctcaccccaaattcttctgaaacatgtagctgttatgattgacaatttttatgta

SEQ ID NO: 881007 - DNA, 120 bp, Artificial Sequence
  ENSG00000286410_6 (sequence is synthesized)
actctaacctaagatggtactgtgctaaaaatccctcaagcatagagacattcaagataaatttagattctactcacaccaccacattaaggcagagatattctagaatggtctgtaaat

SEQ ID NO: 881008 - DNA, 120 bp, Artificial Sequence
  ENSG00000286410_7 (sequence is synthesized)
aaccaggtggcatccttgttagtctccataggaatgcagtaacctgaggctaattgctactgctcttacagcttcagctaagccatctgtttaaagttaatcttgaaaaatgaaaaatca

SEQ ID NO: 881009 - DNA, 120 bp, Artificial Sequence
  ENSG00000286410_8 (sequence is synthesized)
atcaacattttgcctctcagatctcgcctacaaagagaatatctaataattttttcaaatcaataaatatcatgtacacacaagaattagatagccatgcagttataaatatgtgaaaaa

SEQ ID NO: 881010 - DNA, 120 bp, Artificial Sequence
  ENSG00000286410_9 (sequence is synthesized)
gaattttttaaatcttcttggaacttatgcaaacagaaagaaaggagcaacaatcatgtgaacatatatatattccagttactggcccaatgttgaatcttgttaatagcttttaaagat

SEQ ID NO: 881011 - DNA, 120 bp, Artificial Sequence
  ENSG00000286410_10 (sequence is synthesized)
tactgtatgtttaaagattactatacgaatgtataaatgcctttatattgtccctgcaagccacacaaaagtatatcagaatccagagcttagattactctctgaactttctatttccat

SEQ ID NO: 881012 - DNA, 120 bp, Artificial Sequence
  ENSG00000286410_11 (sequence is synthesized)
ttgaaatagatcttttctagccatgtgttgccatttttatttttctatagtggtactaattcccagatactttctgctaagatatccttccaatatttccccaatactatatcctcatca

SEQ ID NO: 881013 - DNA, 120 bp, Artificial Sequence
  ENSG00000286410_12 (sequence is synthesized)
aaatgattttttgttacaatctattatgttattggacaattactgtgccaaaatcattctgaataacttctaatcacgttaattggagtgctttcaaaaggaataaagcatttggtgaag

SEQ ID NO: 881014 - DNA, 120 bp, Artificial Sequence
  ENSG00000286413_0 (sequence is synthesized)
aggagcggcatatctcagctcagaagcagacggaggagctgcagctgaaggcgccagcttgagcaaacatatggaagtgggaagcacagagcatgtgaaggaaactgtttattacagttg

SEQ ID NO: 881015 - DNA, 120 bp, Artificial Sequence
  ENSG00000286413_1 (sequence is synthesized)
ggataaaataaaaggtaagtgttggaatgaaagaatgatttccaatgctggcctaaggattttatggtggcggtgggtaaaaaggacatgttcagaatggtgtcttggaagattaattca

SEQ ID NO: 881016 - DNA, 120 bp, Artificial Sequence
  ENSG00000286413_2 (sequence is synthesized)
attgagaaatataaaaatactaattagaaggcatcctctctaccagtttcattagtggagattatagggtagacagacaggacaagggcagaatcaattcaagagatagaacagtactca

SEQ ID NO: 881017 - DNA, 120 bp, Artificial Sequence
  ENSG00000286413_3 (sequence is synthesized)
ggatgcacctcccattgaggaagttatgtataaaaagagacaagagataggtccctgagttcccatcagaggtattgcttttactgttgttgctgctgatatttttaaaaacaggtagac

SEQ ID NO: 881018 - DNA, 120 bp, Artificial Sequence
  ENSG00000286412_0 (sequence is synthesized)
ccaaaggagcagtactatttataaaggatcactccagtagtagagacaaatggctttgaaaggggacaaaaggagcaatgcctgagattgggaaagtggaacaattcataccagtactac

SEQ ID NO: 881019 - DNA, 120 bp, Artificial Sequence
  ENSG00000286412_1 (sequence is synthesized)
caaagaccctttcacccaaagctgtatttcacagaggaagaacaattacataggatataaacggactgagatgtaagagacaccactcgaatattctgtggttatgcagcagggcaagaa

SEQ ID NO: 881020 - DNA, 120 bp, Artificial Sequence
  ENSG00000286412_2 (sequence is synthesized)
catcacacctggtggaggtagagtcagtactgggaggataccctggagatggcaaagcaaacaagaggaagtgcaaggatacaaataaggattttgtccaggatggataatgtcttgggt

SEQ ID NO: 881021 - DNA, 120 bp, Artificial Sequence
  ENSG00000286412_3 (sequence is synthesized)
cgaggagaaggaaggtgcccatcattcttctttattgccaagaacctctgggaacatgaacagctcccagctaacagcaggagaggagcaccattcccagaagatttattctaactcctg

SEQ ID NO: 881022 - DNA, 120 bp, Artificial Sequence
  ENSG00000286412_4 (sequence is synthesized)
aagctctacctatgtctgtacttttatgaaggaaatcaatatatagagtcatagaataacaatggataaacttcaagtgaaaaaaaaatatttaaatatcatttgaagtcaaaaaataca

SEQ ID NO: 881023 - DNA, 120 bp, Artificial Sequence
  ENSG00000286412_5 (sequence is synthesized)
ttgtgatagaagaaagacatattttaatccaaccatttttaacttaaataaagggtgaacaggacagaggaaaagaaaatgaatgtctaatatattataaaatatatgtaatgatattaa

SEQ ID NO: 881024 - DNA, 86 bp, Artificial Sequence
  ENSG00000286412_6 (sequence is synthesized)
aatatattataaaatatatgtaatgatattaactgaaaaatggagcacgtttttaaacttacaagttaccatttgacagagcccgt

SEQ ID NO: 881025 - DNA, 74 bp, Artificial Sequence
  ENSG00000286412_7 (sequence is synthesized)
cataaagatccttgaagaaaacctagacaatatcattcaggacacagacatgggcaaagatttcatgactaaaa

SEQ ID NO: 881026 - DNA, 90 bp, Artificial Sequence
  ENSG00000286412_8 (sequence is synthesized)
gtctaattaaactaaagaggttctgcacagcaaaacaaactaccatcagagtgacaggcaacctgcagaatgggagaaaatttttgaaat

SEQ ID NO: 881027 - DNA, 81 bp, Artificial Sequence
  ENSG00000286412_9 (sequence is synthesized)
atccagaatctataaggaacttaaacaaacttacaagaacaaaacaaccccatcaagaagtgatatgtagccaacaaatat

SEQ ID NO: 881028 - DNA, 120 bp, Artificial Sequence
  ENSG00000286412_10 (sequence is synthesized)
gatgctggagaggatgtggagaaaaagaaacgcttttacacctttggtgggagtttaaattagttcagccattgtagaagacagtgtggtgatttctcaaggatctagaaacagaggtac

SEQ ID NO: 881029 - DNA, 120 bp, Artificial Sequence
  ENSG00000286418_0 (sequence is synthesized)
aggtgacaagctgcacacagggccatacaggcatccagggcagcccctgcacccagctacctttctgctggaaggccgttttcacaaggcagccggaagcactcccgggtaatctcgtct

SEQ ID NO: 881030 - DNA, 120 bp, Artificial Sequence
  ENSG00000286418_1 (sequence is synthesized)
ggagatgactgcatttcattataatttaagcctttcttgggcttcatcaaaggctatgagtgtcttgaaaaagagaagcatctctttcctcagaaaaatggctgaacttgttaagccaga

SEQ ID NO: 881031 - DNA, 120 bp, Artificial Sequence
  ENSG00000286418_2 (sequence is synthesized)
gatcaaacaccccagcgggctgagtgcggacaagggaacacggctttaacatctgctgctctctttctgtgcgacacagagggctccccacagagaggaagggcagggaggtggaggcgg

SEQ ID NO: 881032 - DNA, 120 bp, Artificial Sequence
  ENSG00000286418_3 (sequence is synthesized)
ggtgtggttctgcgggtgtcccaggctgagtgctgtaccatgtggctcactgagtcacatcctcacacaaaccttcggagagaagtccgttattcttctcattttacccatcgggaagct

SEQ ID NO: 881033 - DNA, 120 bp, Artificial Sequence
  ENSG00000286418_4 (sequence is synthesized)
gaaattccagaaacagtaagtcacttgtccaagaacacccggaccggaagggcacgtttccatgtctgcatctcaaaatgagcagataatgtcagaaatgaattagaggacacccatcta

SEQ ID NO: 881034 - DNA, 120 bp, Artificial Sequence
  ENSG00000286418_5 (sequence is synthesized)
ttttcccctggagaactggtcgttagtgaggagaaacccacacacattttggtgagcagaagtgaagtgctctgtagtgagtggtgtgtgagtaggaaaagcaatgtgggttttcctatc

SEQ ID NO: 881035 - DNA, 120 bp, Artificial Sequence
  ENSG00000286418_6 (sequence is synthesized)
tgttatgataacaatcataggcatcgatagagtcctgcatggtatgatgagatgcagggacaataagagctctgcatggtatgctgagatgcacggtacgctgagatgcatggtacgatg

SEQ ID NO: 881036 - DNA, 120 bp, Artificial Sequence
  ENSG00000286418_7 (sequence is synthesized)
agagccctacatggtatgctgagatgcatggtatgatgagatgcaaggacgatgagagctctgtatggtacgctgagatgcacggtacgctgagatgcacggtacgctgagatgcatggt

SEQ ID NO: 881037 - DNA, 120 bp, Artificial Sequence
  ENSG00000286418_8 (sequence is synthesized)
atgctgagatgcacggtatgatgagctgcaaggacgatgagagctctgtatggtatgctgagatgaacggtacgctgaaatgtatggtacgctgagatgcatggtacgatgagagccctg

SEQ ID NO: 881038 - DNA, 120 bp, Artificial Sequence
  ENSG00000286418_9 (sequence is synthesized)
catggtatgctgagatgcatggtatgctgagatgcatggtacgatgagagccatgcatgatatgctgagatgcatggtatgctgagatgcagggacgatgagagctctgcatggtgcgct

SEQ ID NO: 881039 - DNA, 120 bp, Artificial Sequence
  ENSG00000286418_10 (sequence is synthesized)
gagatgcacggtacgctgagatgcatggtatgatgagatgcatggtatgaagagatgcagggacaatgagagccctgtacggtacaatgagatgcagggatgcagggcattaacaaaatg

SEQ ID NO: 881040 - DNA, 120 bp, Artificial Sequence
  ENSG00000286418_11 (sequence is synthesized)
caaatgcaaatgcaaatgcaaattcctgcgtgtgacgtgcacaatgaaaccaggagtgtggaaggaaaccaccagggcagcccaaggatggcaagtgacattggacccttggtgcctggg

SEQ ID NO: 881041 - DNA, 120 bp, Artificial Sequence
  ENSG00000286418_12 (sequence is synthesized)
aagcaataggaactgggatgaaccagaagacctgccttgtctccagctggagcccccacttggaaggagcctgctactgctatgtaggaactgcaggcccagatcatctaatacttcaaa

SEQ ID NO: 881042 - DNA, 120 bp, Artificial Sequence
  ENSG00000286418_13 (sequence is synthesized)
agaagctaatgatcttgacttgtaacatgacattcctgattactggttcaacgtgttgtaacaccaccagtgagcttaacaaaaatctgaggtttctggctcatgggcttcctgtttata

SEQ ID NO: 881043 - DNA, 120 bp, Artificial Sequence
  ENSG00000286418_14 (sequence is synthesized)
agacctgtattgaaaatggttttcaacctttcctcttgtggaccctttgaaaatgcaatgaatacaagtcaaaagaaaaggcccggtgtgagaagatatttgcaattcatataactgcca

SEQ ID NO: 881044 - DNA, 120 bp, Artificial Sequence
  ENSG00000286418_15 (sequence is synthesized)
aggattgatttctagaatatattaaaatgaaacccagcaaaaaacactttatgaatcaataaattaaaaacaatacaacccaatagaaaaatgggtaatagacttgaactgtactttata

SEQ ID NO: 881045 - DNA, 120 bp, Artificial Sequence
  ENSG00000286418_16 (sequence is synthesized)
cagctggtacacagtaagtgctcaagaaataagtagcatgaaagagcccgcctgacaggcggctgctgagaaattcacttggcttcaggccggtcaaaccttccagcgtggatgagaatc

SEQ ID NO: 881046 - DNA, 120 bp, Artificial Sequence
  ENSG00000286418_17 (sequence is synthesized)
cagtggtagcaggttgtacaatttcgttttatctcagacacccagagtttggaccttcaagatgcagagcacaaatggatgtaaatgagatgcaaatcaaactgtccccagataaacagg

SEQ ID NO: 881047 - DNA, 120 bp, Artificial Sequence
  ENSG00000286418_18 (sequence is synthesized)
aaaccaaatatctctagtgatagctctttcctctccttatggagatcaaggacatgggctgcctctgaaggcaatccaaagctcacatctgtcagacttcacgactaccaccagctctcc

SEQ ID NO: 881048 - DNA, 120 bp, Artificial Sequence
  ENSG00000286418_19 (sequence is synthesized)
cagacagacaatgccattgccaagcactgccatggcagtgctttcaggggccccaattccagggccttctttcccctcatcctccttgaggagtgagggcctcacaggctttgatctttg

SEQ ID NO: 881049 - DNA, 120 bp, Artificial Sequence
  ENSG00000286418_20 (sequence is synthesized)
gatcagaagaggtgaaatttcttcttgctcaggacttggtgagtgagatcagctccaagtagtgcccctgtcagaggcatctgcatgacaacagcaattataactgcaataatgtgatgt

SEQ ID NO: 881050 - DNA, 120 bp, Artificial Sequence
  ENSG00000286418_21 (sequence is synthesized)
aacaagaaatatatacttggtctctgcccctggttccaagcacagagctcctaaaacccttgtaatgttctgagcaacaagggttgtgaggtgcatcttttgttctaataatgtttggtc

SEQ ID NO: 881051 - DNA, 120 bp, Artificial Sequence
  ENSG00000286418_22 (sequence is synthesized)
tatgaccccagttcctgacagagctcctaatcccttggaatttcctgggtgataggggcattttttgttctaattaggtgactcttgttgggatcctgggtaacttcaggatgggggatg

SEQ ID NO: 881052 - DNA, 120 bp, Artificial Sequence
  ENSG00000286418_23 (sequence is synthesized)
gtccccagaaagacctggtcataattggaggcttgaaactttcagctccctcctcatcctccaggaaggagagggcctggggattaaattaataagtgaccatacgtatgtgatggcgcc

SEQ ID NO: 881053 - DNA, 120 bp, Artificial Sequence
  ENSG00000286418_24 (sequence is synthesized)
tgcataaaaatccctgaactacagggtttggagagtttctggattgctgaacacaaggaggtccctggagggtggtgcccctagagagagcatggaagctccacgccccttctctcttac

SEQ ID NO: 881054 - DNA, 120 bp, Artificial Sequence
  ENSG00000286418_25 (sequence is synthesized)
cttgctctaggcatctcttccatctggctgcttttctgtatcttttgtaacatgctttgtaataaatgtgtaaacacaaataattgccctgagttctgtgagctgctctagcaaagtcat

SEQ ID NO: 881055 - DNA, 120 bp, Artificial Sequence
  ENSG00000286418_26 (sequence is synthesized)
acaggccacagcctggagctcacgattcatatccgaagtcaggggcagtcttgtggaactcagccattaacttgtgggatatgatgccatctccaggcagataatgtcagaaatgaatta

SEQ ID NO: 881056 - DNA, 120 bp, Artificial Sequence
  ENSG00000286418_27 (sequence is synthesized)
ttgcccatagacacacctgcaggattgacaaaagtgaatctacctaccaataccaacactggtgaagatgtggaggaactggtactctcatgctggtgggagtgtaaacaggtagaaaca

SEQ ID NO: 881057 - DNA, 120 bp, Artificial Sequence
  ENSG00000286418_28 (sequence is synthesized)
ctctgaaaaatggtttgattacaaatagacatctttctttttaaaccttaggaggataatgatctgggtttggtgtattaaagcttaattatgtgtgcttgtctggtaaaactgagtatg

SEQ ID NO: 881058 - DNA, 120 bp, Artificial Sequence
  ENSG00000244310_0 (sequence is synthesized)
actgacccccatctccaggcatctgccctgatggcctccagggccccttctgtgcctgcagagatggcggcctgctctctaggtcaggccaggttcccgggagccgaggtctggctgtta

SEQ ID NO: 881059 - DNA, 120 bp, Artificial Sequence
  ENSG00000244310_1 (sequence is synthesized)
ttccaggagtgcccagccccagagctgccacctcaggcccctggaagttctgcagcctgagctgccgtcctcagaccactctgcctctgagcgtgcaagaggctcagggcctttccaggc

SEQ ID NO: 881060 - DNA, 120 bp, Artificial Sequence
  ENSG00000244310_2 (sequence is synthesized)
ctcccagagccaggcagcagcagggagccaagagcagcctgtggctccactgtggcaaaggacagcctatttaggctgagagtgggcctgagagatcacaaatcttttttctttgcccag

SEQ ID NO: 881061 - DNA, 120 bp, Artificial Sequence
  ENSG00000244310_3 (sequence is synthesized)
aacttttaatttaaccctgacttaaaagggtgttcagggagcatcatgctagaaatcccaaatacgatgaaagaatcccacaacagaggtgaacagaggcctgttcccaggttcatcccg

SEQ ID NO: 881062 - DNA, 120 bp, Artificial Sequence
  ENSG00000244310_4 (sequence is synthesized)
ggggcagctgatgtggcctgcgcacagggtgaggcagcaagggtaagagcttccagaactccagggaaggcagcggaagagggaaacgttcacagagcaccaagaggggcgcaagggagc

SEQ ID NO: 881063 - DNA, 120 bp, Artificial Sequence
  ENSG00000244310_5 (sequence is synthesized)
tcaactctactgccagaacctgcagtcaggggattctcatgaggacaaattagagcacctgtcactatagccagcactcaagaaatgggattatcatcagagggaaaaatgcacagcctc

SEQ ID NO: 881064 - DNA, 120 bp, Artificial Sequence
  ENSG00000244310_6 (sequence is synthesized)
accagctattaaacatatggaaatgatgacaatttaaagcttataaataacattagcggtggcttggatttattgttgtggcctccggaagaacttgggcacagtgtaacttcctggggc

SEQ ID NO: 881065 - DNA, 120 bp, Artificial Sequence
  ENSG00000244310_7 (sequence is synthesized)
ccgaggttgttaatcggtgaattgttcatgaaggacagtgctcactgtgaaggtgggtgtcctgggatgctctgcctggcccgcgggagacaaggctatggtctgacatccctcagcctg

SEQ ID NO: 881066 - DNA, 120 bp, Artificial Sequence
  ENSG00000244310_8 (sequence is synthesized)
tcctcattgtcctggctctgagaagaagctacaaaacacagtagaagaaaaagaaaacagtcttttaaagacttgtaatgagttgttaatgataaaagtaacacatgccaactggaaaaa

SEQ ID NO: 881067 - DNA, 120 bp, Artificial Sequence
  ENSG00000229086_0 (sequence is synthesized)
agcaatgtcagtgataacaagcaaaaataggacaggggagaaagccaagagtcttcagaccacaagagaaggagagattaattctggaaaatccacctggatggacagcagcagagggag

SEQ ID NO: 881068 - DNA, 120 bp, Artificial Sequence
  ENSG00000229086_1 (sequence is synthesized)
gaggaggcaggacagaccagaagagagacaatgaggttctgaacctagatgttggccaagggagcagaggagggcaggtcaggaggccctcgccctgcaatcacccttcctgggagcctt

SEQ ID NO: 881069 - DNA, 120 bp, Artificial Sequence
  ENSG00000229086_2 (sequence is synthesized)
cacttcacctgtgatctcaagacctctccctactgcctgactcgcgccgagcttatggaacatcttcccttgagggtcgcagtccattcgatgagcccttgtcacaggtcctgcttctgt

SEQ ID NO: 881070 - DNA, 120 bp, Artificial Sequence
  ENSG00000229086_3 (sequence is synthesized)
ggggagctcaagcgcggacacccttggaacactccccaagtctcttccttcccatccagcaccacttccctaagtcacagctgcaccacctctcatctggactgctcacagcaggtggag

SEQ ID NO: 881071 - DNA, 120 bp, Artificial Sequence
  ENSG00000229086_4 (sequence is synthesized)
tcaggatcaaaatagccaaagaaaaagtaagaatccgtatacaggaaacaaatatgtgatgatgaccggagcagctcagaatcagaacttgagcaagacctgggctgctttgattttctg

SEQ ID NO: 881072 - DNA, 120 bp, Artificial Sequence
  ENSG00000229086_5 (sequence is synthesized)
aaaagaaaaaaaagaaggaataccaaaagcaagttacataaagtatgagatatattacatgtttccagtgaacaagtgaacagtttggcacgtcaaagacacaacgtcagagcatttagc

SEQ ID NO: 881073 - DNA, 120 bp, Artificial Sequence
  ENSG00000229086_6 (sequence is synthesized)
ctcaattggcgataacctgaaaagcctgaaaagcaaagccttctgggaatgtgagctccagttctgggatgaaccctgaaaaggacagagtgagccacacgtggtggccggaccatgggt

SEQ ID NO: 881074 - DNA, 120 bp, Artificial Sequence
  ENSG00000229086_7 (sequence is synthesized)
aaggggtgagcactgctgggctccattctgctggaaggacggacaatctccttctgcacaataactggtgtgagggggccggacgctgtgagggtcaggaaggggagggtccacccaaag

SEQ ID NO: 881075 - DNA, 120 bp, Artificial Sequence
  ENSG00000229086_8 (sequence is synthesized)
taggctaatggagcagttggtgaccccatttccccagctttcagccagagatatcccagatgtcatgggagagccattggatgctctcagctctgaattttcatgcctctgccacggtta

SEQ ID NO: 881076 - DNA, 120 bp, Artificial Sequence
  ENSG00000229086_9 (sequence is synthesized)
gcatcagagcagtgatttccatccaacatagcaaaaaacttttcatgggagaccaaaagcttgtggcttcagaatgaatccagaaaaaaaaaaaaatccctgtcatgagggtgaaaggag

SEQ ID NO: 881077 - DNA, 120 bp, Artificial Sequence
  ENSG00000229086_10 (sequence is synthesized)
ctgccagcctcaacagggctccttggagaagacatttgagacttacattccaggcaaagtggcacttcacattctgggttctgaccttcttggaataaatgtctccacctgcgggcagaa

SEQ ID NO: 881078 - DNA, 120 bp, Artificial Sequence
  ENSG00000229081_0 (sequence is synthesized)
agcaatgcaccctcaacagacccatgggggctcacgagctcccagcaacgcaccctcagcagacccacgggggctcacgagctcccagcaatgcaccctcaacagactcactggggggtc

SEQ ID NO: 881079 - DNA, 120 bp, Artificial Sequence
  ENSG00000229081_1 (sequence is synthesized)
acgagctcccagcaatgcaccctcaacagactcactggggggtcacgagctcccagcaatgaaccctcaacagacccacgggggctcacgagctcccagcaatgcaccctcaacagactc

SEQ ID NO: 881080 - DNA, 120 bp, Artificial Sequence
  ENSG00000229081_2 (sequence is synthesized)
actggggggtcacgagctcccagcaatgaaccctcagcagacccacgggggctcacgagctcccagcaatgcaccctcaacagactcactggggggtcacgagctcccagcaatgcaccc

SEQ ID NO: 881081 - DNA, 120 bp, Artificial Sequence
  ENSG00000229081_3 (sequence is synthesized)
tcaacagactcatcgggaggtcacgagctcccagcaatgcaccctcaacagacccacgggggctcacgagctcccagcaatgaaccctcaacagacccacgggggctcacgagctcccag

SEQ ID NO: 881082 - DNA, 120 bp, Artificial Sequence
  ENSG00000229081_4 (sequence is synthesized)
ctatgcaccctcaacagacccacgggggctcacgagctcccagcaatgcaccctcaacagactcattgggggctcacgagctcccggtccgaggcctcctttggcagcagggactcagga

SEQ ID NO: 881083 - DNA, 120 bp, Artificial Sequence
  ENSG00000229081_5 (sequence is synthesized)
gggagaagagtgagcccttggccacatggttggtcaaatcaactcctagaggttgtgacccttctctgctgtggccttcaccaaaccacgcatgttgggtggaggggaagtggcctctgt

SEQ ID NO: 881084 - DNA, 120 bp, Artificial Sequence
  ENSG00000229081_6 (sequence is synthesized)
tctccagatgggctggtgagactccttggtgtccagctgcttatgaccagcacagttaggggctgtcgtcagcaccgccactggtacctgcagagccgagtccactcctggggccggctg

SEQ ID NO: 881085 - DNA, 120 bp, Artificial Sequence
  ENSG00000229081_7 (sequence is synthesized)
gatcagggtgcagccagggtgtggggcaccagggagctctccgggacccccaaagccagatgcggccctgtccactcgtgctctgtggacggagaaggcagagtcccaggacactgtgct

SEQ ID NO: 881086 - DNA, 120 bp, Artificial Sequence
  ENSG00000229081_8 (sequence is synthesized)
caggaaagcgagctccagaggaggctgaggagatttgggagtgcccaggacagcctggccctgtgcaggtccatgggaaaaccttccactctcccctttcagggaggtctgggggcttgg

SEQ ID NO: 881087 - DNA, 120 bp, Artificial Sequence
  ENSG00000229081_9 (sequence is synthesized)
ctgcctctcagcgggccagggcgacttctcatcatttccgcaatggatgcagctctggcctgggggggtggggaggagcctccagccctggcccctccgccccagccctcgctagcggca

SEQ ID NO: 881088 - DNA, 120 bp, Artificial Sequence
  ENSG00000229081_10 (sequence is synthesized)
tgactgtgggtgaacggcggcacctgaaagcctcagtttccctgtctgtgaagggatgcacagtgtcagtttgacccccggaggctgcagtgaggacggggcccaggaggtcaggagagc

SEQ ID NO: 881089 - DNA, 120 bp, Artificial Sequence
  ENSG00000229081_11 (sequence is synthesized)
agcccgtttctggccagggcaccgtggtgtttgtggaacacagccccactgacttcagctgctggggcagaaagagccgtgagaagagtcgatctcccaggggcttcatgtgtctttttg

SEQ ID NO: 881090 - DNA, 120 bp, Artificial Sequence
  ENSG00000229081_12 (sequence is synthesized)
ctgcattttactcacacacgaccctcctagtccatgtaagagaagataagtttatggaacaaacccagtatttacttaacttttaaaatataagcttcacagaccagcgttacataaaaa

SEQ ID NO: 881091 - DNA, 120 bp, Artificial Sequence
  ENSG00000265206_0 (sequence is synthesized)
ggagcacagggcgagctctcctccgccctgcagcctcaggtaaggatccggaccttcactgctgccccaactggggctcctcagctcggggcctctaggggcttgggctgctggtctggg

SEQ ID NO: 881092 - DNA, 120 bp, Artificial Sequence
  ENSG00000265206_1 (sequence is synthesized)
tggaggcgcgttgggggtgtcgaggagcttgggtgcaagccccatgcgggaagctcagggcaaagcgccttgaaaccctctctagtgaaggaaggtaaaatggctccgggaccccaggcg

SEQ ID NO: 881093 - DNA, 120 bp, Artificial Sequence
  ENSG00000265206_2 (sequence is synthesized)
gggaaagaggtgtccaaggaggagggctggagagtaaggcggggatggcagagggtacgcagaggctgagaagtgggaccagtgtctcaaggggcgccagcctcttcctccgcccaacat

SEQ ID NO: 881094 - DNA, 120 bp, Artificial Sequence
  ENSG00000265206_3 (sequence is synthesized)
ggccaccatttttgttgggatagccttgggctcctgccaggggaacagcagggcagtgagggagtcaggactttgggctggtggggaggccgagaatcaaggctctggggagtcaggact

SEQ ID NO: 881095 - DNA, 120 bp, Artificial Sequence
  ENSG00000265206_4 (sequence is synthesized)
ttggggctggtggagtggctggggactgaggccctggggggtcaggaccttgggctgctatggaggctgggactgaggctctgggggagtcaggaccttgagctggtggggaggctggga

SEQ ID NO: 881096 - DNA, 120 bp, Artificial Sequence
  ENSG00000265206_5 (sequence is synthesized)
attgaggccctggtgtgttcaagaccttgggctggtggggaggccagggcctgaggccctggggggtcaggaccctgggctgttggggaggctggggacttaggccctggggggtcagga

SEQ ID NO: 881097 - DNA, 120 bp, Artificial Sequence
  ENSG00000265206_6 (sequence is synthesized)
ggggtggactggagaccaagaccttggcaggggagctgtggctgcctcatttggacgctggagggtggctagcgtggctggaagcggccagccaggggttcacagaactgaaggtgaggc

SEQ ID NO: 881098 - DNA, 120 bp, Artificial Sequence
  ENSG00000265206_7 (sequence is synthesized)
ctccagaggccctagtctctacctgagtgtctctgaaactggggggatggggtggagcctttagggggaagggaagagggaactgaagaggaagtgggggagggaggtagaggaggcaag

SEQ ID NO: 881099 - DNA, 120 bp, Artificial Sequence
  ENSG00000265206_8 (sequence is synthesized)
tctggcgccatgctgagtcaccgcccacaaggcccagggcgggccctcggggggccctggcagggttggggggatcttaggaagccacaaggagggctggggggctcttggagcaggagt

SEQ ID NO: 881100 - DNA, 120 bp, Artificial Sequence
  ENSG00000265206_9 (sequence is synthesized)
caggaggcctgggcagcctgaagagtacacgccgacggacagacagacagtgcagtcacccataaagtagaaagcactactaacagcactggagggtgtagtgtttcctactttatggat

SEQ ID NO: 881101 - DNA, 120 bp, Artificial Sequence
  ENSG00000265206_10 (sequence is synthesized)
gagtgtactgtgggcttcggagatcacgccactgctgccgcccgctgcccgccaccatcttcctcggcgctcggggacctcgtgtgacaggtgagcaccttacggcccctccctaccctg

SEQ ID NO: 881102 - DNA, 120 bp, Artificial Sequence
  ENSG00000265206_11 (sequence is synthesized)
cccagatgcctgaaaggcctccatggctttcctgcccttcctggttccggacagctggggaaaggccacagcagctcctctgctgccctgcagtctttgggggcggggagggctggacat

SEQ ID NO: 881103 - DNA, 120 bp, Artificial Sequence
  ENSG00000265206_12 (sequence is synthesized)
gtggaaccctgatgcagccgcagcgtcaaggacgaggaaggggtgggaagggatggtacgtggaggggaatgggtggtgggaccagggacccaatgctaataaagactggactgtgcttc

SEQ ID NO: 881104 - DNA, 120 bp, Artificial Sequence
  ENSG00000265205_0 (sequence is synthesized)
cttgaatccggaaggtggaggttgcagattgcgccactgcattccagcctggcgagagagtgagactctgtcttaaaaaaaaaagccattaggccaggcgtggtagctcactcctataac

SEQ ID NO: 881105 - DNA, 120 bp, Artificial Sequence
  ENSG00000265205_1 (sequence is synthesized)
gccaaggcaggtggatcacctgaggaataatgcttattacacacctaccaagtgccagacactaacaaataccctactattttatgtccctatcaaggagaacaagtattctattaatcc

SEQ ID NO: 881106 - DNA, 120 bp, Artificial Sequence
  ENSG00000265205_2 (sequence is synthesized)
cactgtcctatgagttacagcacacttctctctcaacagaggaggaaacagactcagagagatgtagtcatttgttcaaggtgacaaaactatcatctgtaagtgctgaggtctgtctga

SEQ ID NO: 881107 - DNA, 120 bp, Artificial Sequence
  ENSG00000265205_3 (sequence is synthesized)
ctcttcatggttgacagtaccacatctatcaatagttttcagggcgtggtccaggggccagtccctctgttctctcaggagcatagagtggagttttccagaggttataggacatgtggt

SEQ ID NO: 881108 - DNA, 120 bp, Artificial Sequence
  ENSG00000265204_0 (sequence is synthesized)
atctgaggacacagtgagaagccatcatctatgaaccaggacatggtcctcactagacacccaatcttctggcacctggatctcatgcctccagaactgctacctcagctttattaaagg

SEQ ID NO: 881109 - DNA, 120 bp, Artificial Sequence
  ENSG00000265204_1 (sequence is synthesized)
aagtgaagcttgcactaagggaaagggaacaccccaggagagagcagcaggaatgccagtaggaaggagcagatgggcgagcggcttggaggcagagtgaagcaggggacacaccgggac

SEQ ID NO: 881110 - DNA, 120 bp, Artificial Sequence
  ENSG00000265204_2 (sequence is synthesized)
tatagacatgaatgctaacaattctgacctcaggtgaggagctacagaaatggatggtagaactggaaacaaacgttaagaatccatccaatcctgagtacgtggaactaaatcaataaa

SEQ ID NO: 881111 - DNA, 120 bp, Artificial Sequence
  ENSG00000265204_3 (sequence is synthesized)
acacaacagaaacctccacggtgaaaaccccactcttctagaataagaatacaatgaattcaatccgtctttaattttgtgcctaagatgggtgccaatgtctgaaggcacatgttaaag

SEQ ID NO: 881112 - DNA, 120 bp, Artificial Sequence
  ENSG00000263120_0 (sequence is synthesized)
ttttttacccccaaatgaaagcttacaaaggggagacaaagcagacaaaagcacaagtgctgaggctgaggcttctcctttgaagtttatcaactgaagagaataaattgctcttcactt

SEQ ID NO: 881113 - DNA, 120 bp, Artificial Sequence
  ENSG00000263120_1 (sequence is synthesized)
acccagagacccaagagagaagaagaaagattatgcttacagaagaaataactaatttagatgaaaaggagatctattttagcagcctactgaggacatggtgctgacttctctcggggg

SEQ ID NO: 881114 - DNA, 120 bp, Artificial Sequence
  ENSG00000263120_2 (sequence is synthesized)
aatctttgagaatcgaagtcatgtcttctgagtgggttagcaaactatgttagggacactttcaagtcttcgaagcgtttcacttggtccactgacacactgactgtgtctcagagtttc

SEQ ID NO: 881115 - DNA, 120 bp, Artificial Sequence
  ENSG00000263120_3 (sequence is synthesized)
tggatagccctgggccatgctagcaccctatcccaaagttctagacaaaaaagaggttttacaataggatatattcacgtagaacagaggcttcctccatccagcatctcattgcctttt

SEQ ID NO: 881116 - DNA, 120 bp, Artificial Sequence
  ENSG00000263120_4 (sequence is synthesized)
gaggagaggggaatgaggagagaggagagggagaggtcatcttctgctgtctccctggcataccagaagcagaggagaactgagatttctcccacaaagacccaacccctaggatttcca

SEQ ID NO: 881117 - DNA, 120 bp, Artificial Sequence
  ENSG00000263120_5 (sequence is synthesized)
gcttttctccttttgctttgatcctacctcatcctaataagtccattaggaaaaaggaacccagctttcattggagggtagatccctggctttaatttattgcatattgcattataaata

SEQ ID NO: 881118 - DNA, 120 bp, Artificial Sequence
  ENSG00000263120_6 (sequence is synthesized)
tttttcaatgttgccacatcatttttcgtagttcatgattctaagtggcagtgtagcattccatgcagtagatgtggtatggttgcctaacctgttcccctatttgggggacgtttgagt

SEQ ID NO: 881119 - DNA, 120 bp, Artificial Sequence
  ENSG00000263120_7 (sequence is synthesized)
tgcacccttacttctgttatttttaataggactgcggttaacatcttcatctggtttgtgaactttttactgcttaggaaatcttaagatacaaagggcatatgatcagggggatgtata

SEQ ID NO: 881120 - DNA, 120 bp, Artificial Sequence
  ENSG00000263120_8 (sequence is synthesized)
gccttccaattttatcagagttaggttggtccaggttcaaaacattagtgttgtaaagtctttcccttttggggccctcttgccgttgctagttaccctttagccctgactctatcttgt

SEQ ID NO: 881121 - DNA, 65 bp, Artificial Sequence
  ENSG00000263120_9 (sequence is synthesized)
ttgccctggcttttgttttgcccaaggtattccctttcatcttttttttctttttcttttttgag

SEQ ID NO: 881122 - DNA, 120 bp, Artificial Sequence
  ENSG00000263120_10 (sequence is synthesized)
cccccgagtagctgggactacaggcgcacgcaccacacccggctaatttcctgttcttagtagacgcaaggtttcaccatgttggccagggaggacttgaactcctctcgaactcctgac

SEQ ID NO: 881123 - DNA, 86 bp, Artificial Sequence
  ENSG00000263120_11 (sequence is synthesized)
ccatttcgtcttttcatatctccctttcctacccatcctgctagtgcacagagaggccatatccttttattctaggtcctctgccc

SEQ ID NO: 881124 - DNA, 120 bp, Artificial Sequence
  ENSG00000263120_12 (sequence is synthesized)
cacagagaggccatatccttttattctaggtcctctgccctttccctcgcctcagctgacagggcccttctcatagactccccacctcaattggcccctggatttgtccagaaaaagcac

SEQ ID NO: 881125 - DNA, 120 bp, Artificial Sequence
  ENSG00000263120_13 (sequence is synthesized)
tgaccatcttttcccctgaccacctcccaaagagcctcctcttgtctcaattagaaagcccacccaacctgtcctatttgcctcttagtttcttttttctctgaagccctcagagcccat

SEQ ID NO: 881126 - DNA, 120 bp, Artificial Sequence
  ENSG00000263120_14 (sequence is synthesized)
agaactgcccccaacaccgagctgtggttcagaatcctgcctttccctctcccatggatgctcacagtatcaaactctccctgccctgggactttagaaactgctgcattatatccacag

SEQ ID NO: 881127 - DNA, 120 bp, Artificial Sequence
  ENSG00000263120_15 (sequence is synthesized)
aatctgcttgatcaaactgcttctaagtctgggtcccttatcaatccacagggactctgaagagtctcccatctcctggggagagggtgatggaggaagagtcagaaggcccagtgtcta

SEQ ID NO: 881128 - DNA, 120 bp, Artificial Sequence
  ENSG00000263120_16 (sequence is synthesized)
gtcagaaggcccagtgtctagtccggttagagctccttcaggtcagcaaggcctacggcaggccaaggctccagctcagaaaatcaggaggcagctgggtgtgatggctcacacctgtaa

SEQ ID NO: 881129 - DNA, 88 bp, Artificial Sequence
  ENSG00000263120_17 (sequence is synthesized)
cctgggcaacatggtgaaacctcagggcatggtggtgtgcgcctatagttccaactacttgagggggctgaggcgggaggatcacttg

SEQ ID NO: 881130 - DNA, 120 bp, Artificial Sequence
  ENSG00000263120_18 (sequence is synthesized)
attagccgggctgggcatggtggtgtgcgcctatagttccaactacttgagggggctgaggcgggaggatcacttgaaccccagaggtagaagctgtggtgagccgagattgcaccactg

SEQ ID NO: 881131 - DNA, 120 bp, Artificial Sequence
  ENSG00000226197_0 (sequence is synthesized)
ggagtatcatgcattcagatgggtaaagaaagcaggaaactgtgactaaatgaagatcacagagccagttgatcagtggggaagctgcatctgaaatccaggacttctagatcctgggtc

SEQ ID NO: 881132 - DNA, 120 bp, Artificial Sequence
  ENSG00000226197_1 (sequence is synthesized)
aactggaggggtcatgcattctggaaaataatgcagagtggtacaggctgaagcggagcggagaggacactgtttcaagattcctgcgccagctccttcgttgttatagaagttggacta

SEQ ID NO: 881133 - DNA, 120 bp, Artificial Sequence
  ENSG00000226197_2 (sequence is synthesized)
cagagagaagagagatgtgcaccagaagctggagtaatgtgctttgaagatggaggaagggaccataaatcaaggaatgcagacagcctgtagaagctgggaaaggcaaggatgtggatt

SEQ ID NO: 881134 - DNA, 120 bp, Artificial Sequence
  ENSG00000226197_3 (sequence is synthesized)
cactcgagtctctagaagaaacgcaaccccgccaacaccttgatttgaggacgtctgaccttcagaatgagaaaatgatacatttgtgttgtaagccacccagtttgtgaaatatgtatc

SEQ ID NO: 881135 - DNA, 120 bp, Artificial Sequence
  ENSG00000226197_4 (sequence is synthesized)
aacaattgaaaactagtacatagtcaaatactcaatctctgttttttttagcttatcattttcaatctctgtctccaacccacaaaccacatgcatcataaataaattaaaataccaaaa

SEQ ID NO: 881136 - DNA, 120 bp, Artificial Sequence
  ENSG00000226197_5 (sequence is synthesized)
acatttgtgttaattctccatgaaaggggccatcaaaatggaacagtcatctcagcagatctgaaaggagtgacttcagatgctgcctgccaggaataatcaactactgctttccaattc

SEQ ID NO: 881137 - DNA, 120 bp, Artificial Sequence
  ENSG00000226197_6 (sequence is synthesized)
caacagttctatcatcctccgctttgttgttctactccccagattatcccagctactttggagatctttggtgaatgccatcaaggttgacaaatgcatactgtttgttgcaatcaaagc

SEQ ID NO: 881138 - DNA, 120 bp, Artificial Sequence
  ENSG00000226197_7 (sequence is synthesized)
tattttaacacaattggctatagtggagaaacgtccagaggaataaggttgaagtatttaaaatttctcacttagttttaagttgtaactcacctcacggaaacaccaaaagctaaagag

SEQ ID NO: 881139 - DNA, 120 bp, Artificial Sequence
  ENSG00000226197_8 (sequence is synthesized)
aaatttctttgccaaaatcaatcttatgaaataatgtattttggtacatgctgagagattaccagtaagaacgacagcaaaccccattaaacatctgcacctacttaaagccacaagttt

SEQ ID NO: 881140 - DNA, 120 bp, Artificial Sequence
  ENSG00000226197_9 (sequence is synthesized)
ttgcgctggcatgaatgtcatgcattctaaagtgattcttattgtttaaattaagggcggtggcatccattttgtttacttgtagcagtgtgattgccattaaaagaatacatttgattg

SEQ ID NO: 881141 - DNA, 120 bp, Artificial Sequence
  ENSG00000226197_10 (sequence is synthesized)
attctggaaaataatgcagagtggtacaggctgaagcggagcggagaggacactgtttcaagattcctgcgccagctccttcgttgttatagaagttggactaaataaaaggcaatgtgt

SEQ ID NO: 881142 - DNA, 120 bp, Artificial Sequence
  ENSG00000226197_11 (sequence is synthesized)
ccgagcaaaacttgaaaagtgcttatatgactgggcttacctgtacatgttcctgcttttacatgagaggcacatgcctccaatataaccactggtccaagaaagataggaaatacatgg

SEQ ID NO: 881143 - DNA, 120 bp, Artificial Sequence
  ENSG00000226197_12 (sequence is synthesized)
agaaaacctggtttctatctgaagtttggagccaccccaacaaaaaaaagcctgaagaaggggcactccaagccactcaaaaacacatgagcaagaaataaatgcctattgctgatgcca

SEQ ID NO: 881144 - DNA, 120 bp, Artificial Sequence
  ENSG00000226197_13 (sequence is synthesized)
gctctctttgcctgccaccatccatgtaagacatgactttctcctccttgcctttcaccttctgccatgatcgtgaagtctccccagccatgtggaactgtaaagaaagcaggaaactgt

SEQ ID NO: 881145 - DNA, 120 bp, Artificial Sequence
  ENSG00000226197_14 (sequence is synthesized)
atttaatctttaaaaaaatccaagatctgtgtgtaagtggtgcttttgcctacttggttttgtctcatcaactagacactatttggagccagggagtcactgaattgcccattgcaatgt

SEQ ID NO: 881146 - DNA, 120 bp, Artificial Sequence
  ENSG00000226197_15 (sequence is synthesized)
agtctcagcataggactggaagggctccacagaaacaaagttaaattcctgatgctgcttctccaaacagcagtacccttcaagatgtatgcccattcgtaagatttttttttttttttt

SEQ ID NO: 881147 - DNA, 120 bp, Artificial Sequence
  ENSG00000226197_16 (sequence is synthesized)
cctattccacgttcaatttggcccttgtacagcctggaatttagaggaagagaaactcactaacttctaagcgcagttaaagttacaagaacctggaaagggggaaaatgtatcgcaaac

SEQ ID NO: 881148 - DNA, 120 bp, Artificial Sequence
  ENSG00000226197_17 (sequence is synthesized)
taagatgctttaagaacttaccaggattccttcgtggccattcttttgttttcttatcccctatgacttcagccagaaaacattaaaatgagttccttatactgtgcatggtttgcaggt

SEQ ID NO: 881149 - DNA, 120 bp, Artificial Sequence
  ENSG00000251654_0 (sequence is synthesized)
caggattccaactacataacattctggaaaagacaaaactgtgaagacagcagaagagaattggttgccaacagatgacatagaggatttcactcttcttcatacagagtgagaaagctg

SEQ ID NO: 881150 - DNA, 120 bp, Artificial Sequence
  ENSG00000251654_1 (sequence is synthesized)
agatatccagaagtcaagaagtcagaggagatttcattaatcttcactggaatgagaaaacgcaattttggtatttgtgactaccaagaacttggtcttaaaagggaaatctgtaatggc

SEQ ID NO: 881151 - DNA, 120 bp, Artificial Sequence
  ENSG00000251654_2 (sequence is synthesized)
agcagcagtctctgagtgaaatggaagtatgaacatatgaactaagcagccaagatgaccaagcttaatgtcgtcccatgacaagtcccatgtatcaacgctggcctagctactgtgcct

SEQ ID NO: 881152 - DNA, 120 bp, Artificial Sequence
  ENSG00000251654_3 (sequence is synthesized)
gtgagaattcaacctgtcatgacagattgatgttgagctctgggtttgggactacatgtgcagttttgttatataggtaagctctgtcatgggggtctgctgtacagattatttcatcaa

SEQ ID NO: 881153 - DNA, 120 bp, Artificial Sequence
  ENSG00000266573_0 (sequence is synthesized)
gggagcacttcagagaaaagatctgagagaaaagcctgggactctgccacccagctccctggcccctgggagaagccatggcagatatttgggatgaggcagcatgctggtccctcagca

SEQ ID NO: 881154 - DNA, 120 bp, Artificial Sequence
  ENSG00000266573_1 (sequence is synthesized)
gcatccttatcacgtcagctgtgagagaaataaaactgtgagactgtgaagtgtataaaggattctaccgctctcccggggcttggagacccacagattggagaaagggacctctgaggg

SEQ ID NO: 881155 - DNA, 120 bp, Artificial Sequence
  ENSG00000266573_2 (sequence is synthesized)
tctatttgagggcatgaatatggaaaattcagctccagctcctccaccccactccctgaacagcactgcagaactgtgctaagctcctgtggcttggaaagaacagatgcaagagacata

SEQ ID NO: 881156 - DNA, 120 bp, Artificial Sequence
  ENSG00000266573_3 (sequence is synthesized)
ataaatgcctccaaataacttagtcctcaacctgaagccaaagtgatttcggtgtaccaggattgaaatacttctgtattcacaactgaatggataaacgggcactccttgtggctcctc

SEQ ID NO: 881157 - DNA, 120 bp, Artificial Sequence
  ENSG00000266573_4 (sequence is synthesized)
attgtatgtcccctagagggtcagcaaggccaagaattggtttgtggaacaaatatccattactccaatcggggatgaaaaagagtacacgccatggattttgctctcgggagtgattga

SEQ ID NO: 881158 - DNA, 120 bp, Artificial Sequence
  ENSG00000266573_5 (sequence is synthesized)
ttcagcgagtgaaataagaccaacatgcatggaagggttgatgatgctagaatctcccacactttgccagccacagggaagtcaaatcagtattgactttgttattcaaatcagcaccag

SEQ ID NO: 881159 - DNA, 120 bp, Artificial Sequence
  ENSG00000266573_6 (sequence is synthesized)
accggtcacttttagaagtgataccatgggaggcaattaaacccaggaaaatgctgagcactagagtgaccatgcaagaaggggccttagagatagatcctgtacgtcttcacctgttgg

SEQ ID NO: 881160 - DNA, 120 bp, Artificial Sequence
  ENSG00000266573_7 (sequence is synthesized)
tgccagggccagaacagaggcctgcaagggtaagagcaagctcagcaccacagaacttgtaggtaacagagccgggctcaagtgcacgcttcctgactgcaatttcaacactcccattca

SEQ ID NO: 881161 - DNA, 120 bp, Artificial Sequence
  ENSG00000266573_8 (sequence is synthesized)
agggaatgaagaaatagatggtgtcacctcctttaatttcctagaaagagaaaacaaggcactgatgcagcccgcgatgagcaggaatgggaacctgcaatctcctggaatctgcaacac

SEQ ID NO: 881162 - DNA, 120 bp, Artificial Sequence
  ENSG00000266573_9 (sequence is synthesized)
attgctgctctatcagaagaagaaatgcaaggaagaagtcagataagatgctctaacaatccttgggtcactggattcctcctagaacctcccttccttctggaaagccatcaaaagtaa

SEQ ID NO: 881163 - DNA, 120 bp, Artificial Sequence
  ENSG00000266573_10 (sequence is synthesized)
aggcactggccctataggaccacagggtcacttaaggaacattacagagcaatgattcttgaccttctcagcttcaaactcccttctagaaattgcacccccttccccacctcacactat

SEQ ID NO: 881164 - DNA, 120 bp, Artificial Sequence
  ENSG00000266573_11 (sequence is synthesized)
ttgttccaaaggcttttatctaccaaagttgatgggggggctctaagaacagcttgagatttactggtcataccccagagtccctgtgctgacatcgacatctttcccatccacacaaat

SEQ ID NO: 881165 - DNA, 120 bp, Artificial Sequence
  ENSG00000266573_12 (sequence is synthesized)
tatccgtcgttaacacatggacgtgctatatttctaaccaaatcaaagaacttgtaccgatcttttctgcagccttattctgagtaaatatgtgatttccattaggctttttgaaatatg

SEQ ID NO: 881166 - DNA, 120 bp, Artificial Sequence
  ENSG00000266573_13 (sequence is synthesized)
taaaatatatagactcccattaccaccttcaggacctctaggtgtttggggacctttactaggaattcactcctatgcccaaaatgagtttgaagatgaaaattatagctaggcggggaa

SEQ ID NO: 881167 - DNA, 120 bp, Artificial Sequence
  ENSG00000266573_14 (sequence is synthesized)
gtcagggcctagcattggagaaagggatgttttcaaaatgagagtaactgctaaagcaaaatgtgtaaaactgagacattgggcaaagaagggaaaagaagggaagggtgttggcttata

SEQ ID NO: 881168 - DNA, 120 bp, Artificial Sequence
  ENSG00000266573_15 (sequence is synthesized)
agagaagacaattctgctgtgttaaactgtttcccctgaaacaacatttccactcagctgggaaattttctgggctcctgaaacttcattaggtttctggcaattaccccaaggagaccc

SEQ ID NO: 881169 - DNA, 120 bp, Artificial Sequence
  ENSG00000266573_16 (sequence is synthesized)
cctaaaaggtaggcaatagttacacaactgacatgcattgtgtgacagaaataaaggaagctgcacatgcttttattcattaacgtattttttccacagtgccataaggaaggaaattgt

SEQ ID NO: 881170 - DNA, 120 bp, Artificial Sequence
  ENSG00000266573_17 (sequence is synthesized)
aaatttgtaatcaggcagatctctaagttttccaagaatggctgttctcttcccaactagggttaaaagacaatttgttgcactctgggcaaatcccgacttggttcctgtcttacttaa

SEQ ID NO: 881171 - DNA, 120 bp, Artificial Sequence
  ENSG00000266573_18 (sequence is synthesized)
ggtttcagaaatagtcataaatcttttaaaatatttattattaattcattttggggcagcttttatgattctaaaacttcaggatctgtttgaatgtttcctgagtctcaagtttcatgg

SEQ ID NO: 881172 - DNA, 120 bp, Artificial Sequence
  ENSG00000266573_19 (sequence is synthesized)
agaaaggctgacagggaaccaaattccaccagtggtttggtggtgtgtgagcaggccatcagccagaacattctaacatgtctacaaagggcgtgatttggggtcgtctctgccgagaaa

SEQ ID NO: 881173 - DNA, 120 bp, Artificial Sequence
  ENSG00000266573_20 (sequence is synthesized)
ttctatggactagggggaaacactttcttctttcccccagtactatttggactagtttctaaaaatggacagaaacaccctgtcagccttgtgagaaatccaatcatcttgttaataaac

SEQ ID NO: 881174 - DNA, 120 bp, Artificial Sequence
  ENSG00000266573_21 (sequence is synthesized)
agaaaagggtactatcaacatgacttattttccactaactagttaatgcaagtaagacaagctaataggcaaaattcagatttcatttcatctattgcttcaccccacaccaaatgtaaa

SEQ ID NO: 881175 - DNA, 120 bp, Artificial Sequence
  ENSG00000266573_22 (sequence is synthesized)
tgtaaaagtctcctgaattgggtgtgttataatctcggtccactgacagattatctagaagcagactcacatttcccccaaaaaagaaccctgtaaaaatagccattgctctgtgtagat

SEQ ID NO: 881176 - DNA, 120 bp, Artificial Sequence
  ENSG00000266573_23 (sequence is synthesized)
atcaaatctgtgcctcctgcagggagtgcagtggatgcagaaacccaaatccaccttcaggagaggcagcctggaggagtagcatgaagcaaggaaagaagagttggtggatgggttctc

SEQ ID NO: 881177 - DNA, 120 bp, Artificial Sequence
  ENSG00000266573_24 (sequence is synthesized)
aaaaaatcttccttacagccaagtctgtgaggtcaggggatagtctcccaagggaagtggtgggagccccacagttagaggcatttagaaggggccttgatggaaaaatggaaatgtaac

SEQ ID NO: 881178 - DNA, 120 bp, Artificial Sequence
  ENSG00000266573_25 (sequence is synthesized)
cctaggttaaaaactgtgccctgaaaagggataagggagacaagcttaaagagattctttcagctctaatttctaagaatcccattagactacagagaaaaaaaataaaagaaaaaatga

SEQ ID NO: 881179 - DNA, 120 bp, Artificial Sequence
  ENSG00000266573_26 (sequence is synthesized)
aacaggaaaaaaaggaaacaaaagccagaagagaaaataatgttaaggcacactgttaagaaacacaccggaagaccctcatgatctcccagctactgttccatctgaatgctgtgtaag

SEQ ID NO: 881180 - DNA, 120 bp, Artificial Sequence
  ENSG00000266573_27 (sequence is synthesized)
ggtttgcaagctgaaaatcaagtgagcagaggggagatccctctcaactgactgtgaacaaaccctgcgaactccagagccatttgtctaaaccaagtgctgaaagaaaggaagcccgag

SEQ ID NO: 881181 - DNA, 120 bp, Artificial Sequence
  ENSG00000266573_28 (sequence is synthesized)
atggggtagccacgaagattcatttccttgtggagtttggctattcctcctcacttttaatcaatgcaatcctgtctaaatagcctactttccttagcaaagaagtctggatttaagctc

SEQ ID NO: 881182 - DNA, 120 bp, Artificial Sequence
  ENSG00000266573_29 (sequence is synthesized)
gattggagaaagtaatctccatctcaatcttctttgccacgtcatgcatgcccttgaagcattagaattccttaaagcttcatgggagaatgccatgggatgatgaagacagagattgga

SEQ ID NO: 881183 - DNA, 120 bp, Artificial Sequence
  ENSG00000266573_30 (sequence is synthesized)
gtcatgcatctgcaagccaagaaatgtacaagattgctggcaaaccaccagaagctaggagcagacaaggaaggatcctcccctaaaggtttcagagggagccatggccttgctgacatc

SEQ ID NO: 881184 - DNA, 120 bp, Artificial Sequence
  ENSG00000266573_31 (sequence is synthesized)
ttgatttcagacttctatcctccagaatggggccatccatggagggctggatggtgtcctcactctcccatcacacagctcttctgatgatgtttttgcttgtctttctggaagttcgct

SEQ ID NO: 881185 - DNA, 120 bp, Artificial Sequence
  ENSG00000266573_32 (sequence is synthesized)
ctgatccaaaattacatctgcaaggggcagctgaagtccatcagttctgtgaagtcttctgggagttgcctcagcctagagatctcttcctccatttctccaaatatttcagttagctct

SEQ ID NO: 881186 - DNA, 120 bp, Artificial Sequence
  ENSG00000266573_33 (sequence is synthesized)
aaatgaacaattagcatctcctaattgtgcaactatttaattttggtttcctcaaccaaggagttaatccctttctgagggcaggtactgtcaacttcttttgatttttctacactgcat

SEQ ID NO: 881187 - DNA, 120 bp, Artificial Sequence
  ENSG00000266573_34 (sequence is synthesized)
gtggccatcccagataactcactaacaataaattcttgatgacatgactctacatggtaagacggcactactcacttgccaagagccaaacagatattttggaatcatttcccagatagt

SEQ ID NO: 881188 - DNA, 120 bp, Artificial Sequence
  ENSG00000266573_35 (sequence is synthesized)
tctacattcagcaggagtagaatagaatttccatttgcacacaaaactgactcactgagagcaatttagtgatctcagtagatgggcctgctgcatggaaaggcagccaacagatgggga

SEQ ID NO: 881189 - DNA, 120 bp, Artificial Sequence
  ENSG00000266573_36 (sequence is synthesized)
gtgtccctatcttagccagaggaggggaaagtatgggattcaatctgtttctttaaaagctgaaggataaactgaagatgatgttcataaaaactgtatttccattgttaaggagaaaaa

SEQ ID NO: 881190 - DNA, 120 bp, Artificial Sequence
  ENSG00000266573_37 (sequence is synthesized)
tagataggtaagctcagccctcttttgataaaagttgaacagagaggtgaaaaagggaatccatttgtttatgcacttatcctaaagagaacattgaaagtcaagggggtatgtccagtg

SEQ ID NO: 881191 - DNA, 120 bp, Artificial Sequence
  ENSG00000266573_38 (sequence is synthesized)
gtttgcaaagtggtgtctccaggggacatttacagtcaatgtcatctacagaaagttgctgtctttgctatagtgaagggcaaatcatctcccaattgcgctgcttttcaagattccatg

SEQ ID NO: 881192 - DNA, 120 bp, Artificial Sequence
  ENSG00000266573_39 (sequence is synthesized)
aggagctctactcttgaaaatttctgaatcaaaatagaatcttaaggagtctaattctaaatacaaacttcatgtgtaagattctcgccatggctgtatggcaggtttttaaagaaagta

SEQ ID NO: 881193 - DNA, 120 bp, Artificial Sequence
  ENSG00000266573_40 (sequence is synthesized)
tgagaatggtgtattttatccaagtgcttgttgctgttttgctcactggtgtcctaagcacctagaaaagtccttggcagtttttaggtgcacaataagtatttaattttattattccta

SEQ ID NO: 881194 - DNA, 120 bp, Artificial Sequence
  ENSG00000266573_41 (sequence is synthesized)
aattattggttcgatgattgggtgtatacaagtgcatatgtggatatgtgcatttgaatggagagaaagaaaaagtacatgcttactctctgtgctataatgtctcaaatattaaatcat

SEQ ID NO: 881195 - DNA, 120 bp, Artificial Sequence
  ENSG00000266573_42 (sequence is synthesized)
attggtctcagcatgcaggagaaattaacttttattggattaatccttcgagatttgagatggctgttgatggacggctgtcccctgcacaccgacagaaacatcttcgtgctaggtttg

SEQ ID NO: 881196 - DNA, 120 bp, Artificial Sequence
  ENSG00000266573_43 (sequence is synthesized)
cccagctgaacacatgccacagctgatccgtctgttgagcaggccgcacaccactgctgatcaatcttcacatgccaattatgtgatgtggagtgggctgggaggagcatgcacaggtga

SEQ ID NO: 881197 - DNA, 120 bp, Artificial Sequence
  ENSG00000266573_44 (sequence is synthesized)
tatcctccagaatggccctattcatccactccagaaattacctggactgccgtgttctgacatagcctggttctccaccagtggtctcacctagtgccctttggctctgttgcacaaagc

SEQ ID NO: 881198 - DNA, 120 bp, Artificial Sequence
  ENSG00000266573_45 (sequence is synthesized)
ttgctgggataaatagcataaagagactggaagaagatggggatacctttcaaatgccaattccctgaatcccttggagggcacagagaatctgcattggtctcaagaactcaaaagaag

SEQ ID NO: 881199 - DNA, 120 bp, Artificial Sequence
  ENSG00000266573_46 (sequence is synthesized)
aaccatggggattaaaaaggaggcacgaatcataaaacattcaggtgattaacaagagttagctctgcctccttccagagagaaggtttgggggcactgaagagtggcagggaccaaaga

SEQ ID NO: 881200 - DNA, 120 bp, Artificial Sequence
  ENSG00000266573_47 (sequence is synthesized)
aaggtgtgactgtccaccctctctgaaggggtccttctcagtattgggaactgtcccaagaaaaccatggacactatttgcacatgggggagcactgcacagaagataaccccaaaccaa

SEQ ID NO: 881201 - DNA, 120 bp, Artificial Sequence
  ENSG00000266573_48 (sequence is synthesized)
gccagaggaagaccactcccagaagtcagccaattatatgagataatatctgctatctcttccatccttcttcctgacttcagcacatgggatgggctagagatctagatggaagaggaa

SEQ ID NO: 881202 - DNA, 120 bp, Artificial Sequence
  ENSG00000266573_49 (sequence is synthesized)
gtgaggtgtccccagaacagactagatcctccactccaaccctaaggttggggaggaagagaattgagaagacgatgtaactgtcctcttgagctgatgccttgctacctcttagtaagt

SEQ ID NO: 881203 - DNA, 120 bp, Artificial Sequence
  ENSG00000266573_50 (sequence is synthesized)
ggaaaaattaaatatcaatttggagaagagatcacaatgttggactatactgggatgaatatttaatagctgaaaatgcctggaaagctgtgagttttgctgggatatttgaggttggaa

SEQ ID NO: 881204 - DNA, 120 bp, Artificial Sequence
  ENSG00000266573_51 (sequence is synthesized)
atggagatttgacatcaaggtgaaggcagcaatttgagaacaataaaaccattgtatctaaatgcagttcagaccattcagtcataaattgtatttgattgctgttgaaaagccacaatg

SEQ ID NO: 881205 - DNA, 120 bp, Artificial Sequence
  ENSG00000266573_52 (sequence is synthesized)
aatgttattgtttggcaagaataattccgtcggtcattccaagtcactggttagattttaaggtacaattggattaaaatagataattaggaagcacatttctcattattcaggatggat

SEQ ID NO: 881206 - DNA, 120 bp, Artificial Sequence
  ENSG00000266573_53 (sequence is synthesized)
ttagctgattcacaacttcagttgcaagagattagactgcaaaattagagattagattgaaatatattagactgaaaatttcattttttattttagtttgccttctcccagacagtgtgt

SEQ ID NO: 881207 - DNA, 120 bp, Artificial Sequence
  ENSG00000266573_54 (sequence is synthesized)
tgacgtggaagctgtcagggctcagaagatctggggtctaatggctccatccataaccacctatatcaaagcagtcacatcttaggaacttatggtatcttgatttctttccattgttac

SEQ ID NO: 881208 - DNA, 120 bp, Artificial Sequence
  ENSG00000266573_55 (sequence is synthesized)
cctaattcagtaagcattcgcaaagtatcttatgaggatagcggctttagaattagaccatgtaggttagaatccaggggctataatttactggctgtgtgatcttggtcaagctactta

SEQ ID NO: 881209 - DNA, 120 bp, Artificial Sequence
  ENSG00000266573_56 (sequence is synthesized)
tcctttctgaggcactgttttctcatctttaaatgtggatgtggcaattgaactgggccacaaagaatcagtagaatctcctctgtaaattggagtatttgaactatgtgatgtttaaaa

SEQ ID NO: 881210 - DNA, 120 bp, Artificial Sequence
  ENSG00000266573_57 (sequence is synthesized)
cctcttcaattctaaaagcctattctatataaccccacagggaagagaatggatttcaacagaatcgtgtggcttcagatgataaagaagtaagaatttccaggttagatatcagatata

SEQ ID NO: 881211 - DNA, 120 bp, Artificial Sequence
  ENSG00000266573_58 (sequence is synthesized)
cggacacaaggtctacccctaaggagcagaactggggcctggaggagaaacattactaatcccagggaagggcttggacacttttgcccagcagacttttcgtcttgctgtgaatgagag

SEQ ID NO: 881212 - DNA, 120 bp, Artificial Sequence
  ENSG00000266573_59 (sequence is synthesized)
ttttcagttctttggtctttaaatcaacccaaacttgatgtggtttaagaaatcatgggctttgagcccgatgccgtgattagatgaggcttttgaggatcctgagatggggtttctcct

SEQ ID NO: 881213 - DNA, 120 bp, Artificial Sequence
  ENSG00000266573_60 (sequence is synthesized)
actaatggcacctttgagtttggatttgaccttgcaatttgctttggtcatgtgggagaccagaatatgccatccccaaatatgaaggatggttggactgaagatgattagtaagaagca

SEQ ID NO: 881214 - DNA, 120 bp, Artificial Sequence
  ENSG00000266573_61 (sequence is synthesized)
gatacaggaatgctgtctgccatccctctatttgcctttacttgtctaaaagcaagacttagatttaccaagacatgaggatatcctgcccctccacccttcccttctaccaaagagagg

SEQ ID NO: 881215 - DNA, 120 bp, Artificial Sequence
  ENSG00000266573_62 (sequence is synthesized)
aaagataaaccactgaagacaacctgagatccttattggctttgacacagtactagagaaattcacatttgctaactttgctaactagcctttatctgccatttacttgccttcctccca

SEQ ID NO: 881216 - DNA, 120 bp, Artificial Sequence
  ENSG00000266573_63 (sequence is synthesized)
gttacttatcctagagtctcaaagtctttttatgtcttgtcatttctctaaaaatttaactttctttgttgaagatgctatataagcagaaattcaaagccactactttgagaactactc

SEQ ID NO: 881217 - DNA, 120 bp, Artificial Sequence
  ENSG00000266578_0 (sequence is synthesized)
ggagagacctgcaaatccgggctggccgtgcaaatccgggctcattgtcaggctggcagcattggccaggcctgagtaaatcaagtgaaacagaagacagatggatgtgaccaagttatt

SEQ ID NO: 881218 - DNA, 120 bp, Artificial Sequence
  ENSG00000266578_1 (sequence is synthesized)
gccaagaggaaacagacaaggatcttgctctgttacccaggctggaagacagtggtgtggacacagctcactatggcctggaccgtcctgggatgaagcgatcctcccacctcagcctcc

SEQ ID NO: 881219 - DNA, 120 bp, Artificial Sequence
  ENSG00000266578_2 (sequence is synthesized)
caagtagctagatctatagacacatgccactatgccaggctaattattttatttttttgtagagatggggtctcacttttttgctcaggttggtcccaaactcctggtctcaagtgatcc

SEQ ID NO: 881220 - DNA, 120 bp, Artificial Sequence
  ENSG00000266578_3 (sequence is synthesized)
gcctcagcctccccaagtgctgggattacccctgtgcctaaagtctattttttttttttctttaaggatctcttaccatctttgagaagagtatcttgtatgaattgtagagacgcatga

SEQ ID NO: 881221 - DNA, 120 bp, Artificial Sequence
  ENSG00000266578_4 (sequence is synthesized)
ggatggagagattagggaactttcgaaagcaaatggaggaaagggtaaagtcagggtgtggtagctagtttctaaagattgttcccagtgaaccacacccagtagtgttgtctcacattg

SEQ ID NO: 881222 - DNA, 120 bp, Artificial Sequence
  ENSG00000266578_5 (sequence is synthesized)
attctggactgggccattcaaactgagggaatgaggcaagatggtactacgttgacttctcatgacttccaaggctaggttggaggaaggtttgcctgggcctcttggaatgagaaccca

SEQ ID NO: 881223 - DNA, 120 bp, Artificial Sequence
  ENSG00000266578_6 (sequence is synthesized)
gctctcacgccgtgagaagcccaaaccacccagctgagctcctagctaccagccagcatcacccaccagccacaggagtgagccatcttgggcagctagtccagctgagccatgagatga

SEQ ID NO: 881224 - DNA, 120 bp, Artificial Sequence
  ENSG00000266578_7 (sequence is synthesized)
cggcagccccagacaacatctgtccttaatgacctaagataacccaacaagaactacctgcctgagccaatggacctccagaatcaggaaggacaatcagacgccgcctccccaccagct

SEQ ID NO: 881225 - DNA, 120 bp, Artificial Sequence
  ENSG00000266578_8 (sequence is synthesized)
catctataaaacctcctgcatttcaccgcggatccggcaacccatttttctgagacccctctctgcagcagagaactcttctctttcttttgcatattaaacttccgctctcaacctcaa

SEQ ID NO: 881226 - DNA, 120 bp, Artificial Sequence
  ENSG00000266579_0 (sequence is synthesized)
atgtgtaatgaaacatgaagacgtcaagtataaaggatggcaattgctcagacttgtcctttgcttgtctggttatccatcaaacactatcagtgtgattgtgccagaaagtttcatgat

SEQ ID NO: 881227 - DNA, 120 bp, Artificial Sequence
  ENSG00000266579_1 (sequence is synthesized)
ctgtttaatattctttggaaattaaactacttgggcatgtttagagctcaaatggaatctatgcattttgcttgacaaggtcgttggttgctttttagagcttacatattgaaaatcatg

SEQ ID NO: 881228 - DNA, 120 bp, Artificial Sequence
  ENSG00000243415_0 (sequence is synthesized)
gggaaagctgtctgagacaatatgaaaatcaatgatgccactctagcattagctgaagatccccttgatttcatccagcagccaagacactaagtgacccaaaggaagaaaagggtgatc

SEQ ID NO: 881229 - DNA, 72 bp, Artificial Sequence
  ENSG00000243415_1 (sequence is synthesized)
gcgcgaagacaacaaggatgaaatctttctttataattttttaaataacgttttctctagcttattgtaaca

SEQ ID NO: 881230 - DNA, 120 bp, Artificial Sequence
  ENSG00000243415_2 (sequence is synthesized)
gatataaaaccaacttccagttaacacacaaatacctactatatgccagactatatgctaaaactgaaaaggtggaataagacccagtccttgccctcaaggagcccacggccttattga

SEQ ID NO: 881231 - DNA, 120 bp, Artificial Sequence
  ENSG00000243415_3 (sequence is synthesized)
atccacttccacttaatgaatactgcccagaatacgaatgcaacgactgaaactcaagtagcaattttggacaaggaagtaagattaaaactgggagctatggaccaatggtggagcaac

SEQ ID NO: 881232 - DNA, 120 bp, Artificial Sequence
  ENSG00000243415_4 (sequence is synthesized)
aaaagagctatccctcttgacagcataaagcctccctaacagccttgtgctccctacttcttaattactttcaatgtgacagaaggaaaaaacttaaataaaacatatttcttatttaga

SEQ ID NO: 881233 - DNA, 120 bp, Artificial Sequence
  ENSG00000223811_0 (sequence is synthesized)
aatgagaaaatattttatgaatgcaaaattgggacatagagtctgaccaaggtttcctatgggagtttcagacatggtaattagaaaccaggaagactgagaaggaatcaaatttgcagc

SEQ ID NO: 881234 - DNA, 120 bp, Artificial Sequence
  ENSG00000223811_1 (sequence is synthesized)
agctcagtaagtggtagactgggaacaagaagccagttctctgggctcttgaagcaaggccctgccacgttgtctttccccaggagaggaggtcataagacattcattccagagagagtc

SEQ ID NO: 881235 - DNA, 120 bp, Artificial Sequence
  ENSG00000223811_2 (sequence is synthesized)
gtacactcaagagagatcaagaagaatctaaacaaacaggcccttctgcgttttcccacaagagaaaatgatctaattaacattcgatcataactttttgtccaattatatttctacact

SEQ ID NO: 881236 - DNA, 120 bp, Artificial Sequence
  ENSG00000223811_3 (sequence is synthesized)
gctgttcatactttatttaacctaggcataaaaattgacaatttttattgtatttttggctcttcattctgaaggcttccatgtatacatgttaaataaatttgtacaccttttctccaa

SEQ ID NO: 881237 - DNA, 120 bp, Artificial Sequence
  ENSG00000223813_0 (sequence is synthesized)
gagacccggaggctgaggctgtaggtgggctccgctgggtaaaagttgccgcagcagctgtcccttggccccatcgcgatttatttttcccccttgctttccgggtcccgggatcccaag

SEQ ID NO: 881238 - DNA, 120 bp, Artificial Sequence
  ENSG00000223813_1 (sequence is synthesized)
tttgtaactaacgggagcgaatccacacccgagcaaaatgtttgcgagtttcaggcgcccttagttgaaaggctgtaattaacaagtccgctgtttgccagccaggcgccgttgcaggcg

SEQ ID NO: 881239 - DNA, 120 bp, Artificial Sequence
  ENSG00000223813_2 (sequence is synthesized)
ctttctgtggattgtcatttatttctcacagcaaccctaggaggctgttatccttgacatctgcagcagcccttccaagctgtggagaccaggtcatctggaatgcccatttatgtcaat

SEQ ID NO: 881240 - DNA, 120 bp, Artificial Sequence
  ENSG00000223813_3 (sequence is synthesized)
ggaagaaagaaaaaggggtctcctcccatcctcaccactgcattctcccaccaaccctgctcctgtcccacttcccacaactcagttgttgacaatttaacagtgggtttctggaaacag

SEQ ID NO: 881241 - DNA, 120 bp, Artificial Sequence
  ENSG00000223813_4 (sequence is synthesized)
tgctgcctccttgatggtctaactaactaccagagttattctaacagcaggaatttcaagccaggtaaggggagctatgtcaggctgccagatggtggggaagacaggtgtgggtgagct

SEQ ID NO: 881242 - DNA, 120 bp, Artificial Sequence
  ENSG00000223813_5 (sequence is synthesized)
gtcaagtgaacttcattacccattatagaggcctgttatatcctttagtgctatttggacttggattgaacctgtgacaaatccttttcttatgcttcttccatccctgcttccatgtta

SEQ ID NO: 881243 - DNA, 120 bp, Artificial Sequence
  ENSG00000223813_6 (sequence is synthesized)
tatcctttccccttctaaaatggtaataatgagaaataactattactaattaccctagaacataaatttcatttaaggtgtcacaatcagattatcatcttcagtttttcagagccgcaa

SEQ ID NO: 881244 - DNA, 120 bp, Artificial Sequence
  ENSG00000223813_7 (sequence is synthesized)
acttcccatggttatatgcaggtagtactaaatggatggatctgggatcaaactcagggctttctgactttaaaagtcttgttctgctaccctccaagtggcctagggtgatttgcccta

SEQ ID NO: 881245 - DNA, 120 bp, Artificial Sequence
  ENSG00000223813_8 (sequence is synthesized)
aacggttcacctctgtatgatgatgcatccatgcagtggggcttatggaaagtgaatgtggagcctcagggccttaatcttgaagcaggctctctagaagggagcttgcagaaggagtgg

SEQ ID NO: 881246 - DNA, 120 bp, Artificial Sequence
  ENSG00000223813_9 (sequence is synthesized)
ggactcgatgagatgctgttttctcattgtgtttcagtgatgactgaaaatttgttgccagcgtctatctggaaacaatgttttgatgatccaccaccccatccctccaaaccactttct

SEQ ID NO: 881247 - DNA, 120 bp, Artificial Sequence
  ENSG00000223813_10 (sequence is synthesized)
tgcacatactccagaataatagacagaagaatttaatacatgtgatgctttgccttccatttacactatcataaattacaaagtattgttcacttcacaaaataaaaccatttccagata

SEQ ID NO: 881248 - DNA, 120 bp, Artificial Sequence
  ENSG00000223813_11 (sequence is synthesized)
tggattgtcatttatttctcacagcaaccctaggagatgaaattgaatcatggaagaatgcctttatctgaggagtcatcaccactagggagctatggaggctgttatccttgacatctg

SEQ ID NO: 881249 - DNA, 120 bp, Artificial Sequence
  ENSG00000223814_0 (sequence is synthesized)
gtggctctggactggcttgctcttggatcaccgaagcctcctgggtctgggtttggcttctccgactgtggggccctcagcaggaggggcaggcaggcaggcttagcctttgtgaagctg

SEQ ID NO: 881250 - DNA, 120 bp, Artificial Sequence
  ENSG00000223814_1 (sequence is synthesized)
gatgcacccgcggcctgggaagataatttaggaaagagaatgctgctattgtgaaacccctgagtgtctatctggccctccagagctcttgggagcatcggctatcctcaccctttctcc

SEQ ID NO: 881251 - DNA, 120 bp, Artificial Sequence
  ENSG00000223814_2 (sequence is synthesized)
aagtgggagctgggctcttcctttccggagatactctggatactccttcactttgctggatgaccttgggcaagttcctgtccctctctgagccttcacttcctcatctgtcaaatgaag

SEQ ID NO: 881252 - DNA, 120 bp, Artificial Sequence
  ENSG00000223815_0 (sequence is synthesized)
aaggacatgtatgtctatctggaattatgaggttctaggcttggctgtgtgaagatcaaagcagaggaagccacacaatgcagagaatcaacagtggagctatgcctagtgagaagcaaa

SEQ ID NO: 881253 - DNA, 120 bp, Artificial Sequence
  ENSG00000223815_1 (sequence is synthesized)
gagacactggatggcctgagagggaaagagactgagaaaagctgtcagcttttagttcctggttccagtcctttgtgacggccagcttgattagagagaaaaggtcatttggaaaatata

SEQ ID NO: 881254 - DNA, 120 bp, Artificial Sequence
  ENSG00000223815_2 (sequence is synthesized)
cctatgaaaaagataatggtgtccgatgacaggcctctgctaacagtgtaaggctatctgtgaactcctcagtctacacatatcttcctcagcctctgggattccatttccacccaagaa

SEQ ID NO: 881255 - DNA, 120 bp, Artificial Sequence
  ENSG00000223815_3 (sequence is synthesized)
ttaaattgatagaaagaaaaacagcaaaatatacacatatttttccactattaaatccaataatgatgacttaatttcagcaaaacatcatcaatcgcattaaattaatgttgctgttaa

SEQ ID NO: 881256 - DNA, 120 bp, Artificial Sequence
  ENSG00000223817_0 (sequence is synthesized)
cataagactgccatcagccacccaggagaggggccgcaagcagtgggaaccctggtgccatcgggagctggcagccagcttattaacgaaccgtttgtggctgaactctcagcagggagt

SEQ ID NO: 881257 - DNA, 120 bp, Artificial Sequence
  ENSG00000223817_1 (sequence is synthesized)
cagcaggccacagatcatcacaaggccctggcgcatctgggagctctgatccagcacagatatctcaacactcaatatgtaaactcaagattcaggacttcatggacatgacctatcaga

SEQ ID NO: 881258 - DNA, 120 bp, Artificial Sequence
  ENSG00000223817_2 (sequence is synthesized)
tcctaacaagaagcccaagatctggaaaaggaagacattggacattcactgggctcttatgatatgccagacacaaggtccattcatgtggattctctcattaaatcctcccagcaagtc

SEQ ID NO: 881259 - DNA, 120 bp, Artificial Sequence
  ENSG00000257718_0 (sequence is synthesized)
cagtaagggctcttctgggtccctcgtttccaaaggcatgaaagttctgacctgaaaatgggggccggggagggtgatgtcacaaccatataacgcagctccttcagccgactcccaccc

SEQ ID NO: 881260 - DNA, 120 bp, Artificial Sequence
  ENSG00000257718_1 (sequence is synthesized)
gcaagaactgagacctgacggataaaagcagagaggagtcagagtgagcgctgcgtttgggaaactgcattccagggcagcaagactggtgccaagacggagtcgtggcaaaagcatccg

SEQ ID NO: 881261 - DNA, 120 bp, Artificial Sequence
  ENSG00000257718_2 (sequence is synthesized)
agagagagacttggaaaaatacagaccgagaacaaggccatgtggagatagaggcagagactgaagttgtaccaccaaaggcaaagaatatcaagtattatcagtaaccacaggaagctg

SEQ ID NO: 881262 - DNA, 120 bp, Artificial Sequence
  ENSG00000257718_3 (sequence is synthesized)
gaagaggccaggaaaggtttttcttagagaccttggaaggagcctgaccctggaacaccttgattttagacttctgaccctcaaaattgtgaaagaataaatttctgttgttttaagcaa

SEQ ID NO: 881263 - DNA, 120 bp, Artificial Sequence
  ENSG00000257711_0 (sequence is synthesized)
ggaactcactctgtgggtgggggaggagcatggttccggtggcttcagaaatgagcaacaagctatcggagccactgattcctcaaagaccaagagctggagaaaaataatttattttca

SEQ ID NO: 881264 - DNA, 120 bp, Artificial Sequence
  ENSG00000257711_1 (sequence is synthesized)
tttattccatatcgttctatccatccactcttctgtttgaccaacattttgaattgcctactatgtgtttaccagcaaacaaggaagaacctggcttttgtaatctataatcgtaccaag

SEQ ID NO: 881265 - DNA, 120 bp, Artificial Sequence
  ENSG00000257711_2 (sequence is synthesized)
gctgaaaccttacttttaaacaaataccagaattttaaaattataactgaggcacagacttctgccaggcctgcagacagagctcaggataaagagccaagggtgtggcctgtctcgagg

SEQ ID NO: 881266 - DNA, 120 bp, Artificial Sequence
  ENSG00000257711_3 (sequence is synthesized)
ccgtccggtgcttactttgactgtcctcgggtcccgagtcttctggtggttaactgaggaaactgctgccttatgatctagcagaggatgataattgctgttgcccaggacaaccacacc

SEQ ID NO: 881267 - DNA, 120 bp, Artificial Sequence
  ENSG00000257711_4 (sequence is synthesized)
agttcacaagaaatccgtgaagagagagcatctctcaaggtgaaaacataaccatgaggcccctttccttggggtttacggagatgatgtttgtggagaggcatgacaggtcaggggtta

SEQ ID NO: 881268 - DNA, 120 bp, Artificial Sequence
  ENSG00000257711_5 (sequence is synthesized)
cgtgcaagaactctggaactcgactacctgaattgaatgcaagctcaggcattggttaggctggatgcccttgggcaagttatttagtatccacatgactcagtttccccatttgtaaaa

SEQ ID NO: 881269 - DNA, 120 bp, Artificial Sequence
  ENSG00000257711_6 (sequence is synthesized)
taggaatgataataacctctagagttattgtgaaattttaaaaagtgaatgtatgtaaatagctggcagtagtgcctggcagttagtaagtacttaataaatgttacccattattaccac

SEQ ID NO: 881270 - DNA, 120 bp, Artificial Sequence
  ENSG00000257711_7 (sequence is synthesized)
ttttttttttttttttttttcagaatagtcatcttggaaaattattaggaatttattccaagaggtcctttgttcaacagtcttctggaaattcctttagagactggttcaaaagcttct

SEQ ID NO: 881271 - DNA, 120 bp, Artificial Sequence
  ENSG00000257711_8 (sequence is synthesized)
aagcttctgagctacaccaaaaaaattagtctcattattttcagaataccaaaaaagggtttttcccagttcgatcatccattttctttccctaccttggctccaaaatcaaacccaccc

SEQ ID NO: 881272 - DNA, 120 bp, Artificial Sequence
  ENSG00000257711_9 (sequence is synthesized)
ttggaggatgggaatgtgctgcccagggatgagaggagctggtgagggacaggggtttggcccagggtgagagcactggacatgcttttgacacatccttcaagacaagtcttaaaagtc

SEQ ID NO: 881273 - DNA, 120 bp, Artificial Sequence
  ENSG00000257711_10 (sequence is synthesized)
ctatatggttgcctttctaaaaagttacagtgttttataggtcactatgtgctgacctgctcaacgtggtcaaaatgcttagaaatgctgcataataaggcaccctctagtggagtcacc

SEQ ID NO: 881274 - DNA, 120 bp, Artificial Sequence
  ENSG00000257711_11 (sequence is synthesized)
ttgtacattagcataataagggttctgagaagtcttgcagtaaaggaaactgtttaaacttagtgttaaccaaacttatagggcctgctgctcttcttcatggaacacctattatcgtcc

SEQ ID NO: 881275 - DNA, 120 bp, Artificial Sequence
  ENSG00000257711_12 (sequence is synthesized)
aacaatttttgaaacatccttagaggcaagtcctataaatgcagattttaatgaaggtcgagcagtacaggaagagattcccttcccactgactcacacctagcagacaagtgtctgcac

SEQ ID NO: 881276 - DNA, 120 bp, Artificial Sequence
  ENSG00000257711_13 (sequence is synthesized)
agccttctgcactcccctagtctttacttaaatgtaacctcctctgaaagaccttccctggccattcctcttttgttgctctctgctacaactttgtcacaatctgattctctgttttgt

SEQ ID NO: 881277 - DNA, 120 bp, Artificial Sequence
  ENSG00000257711_14 (sequence is synthesized)
ctgtttcccaccggaatctatgctccatgagggcagcaactgatttgctcctgtgttcccagtacctagcaccacatatgtgacacacagaaagtataaagcatgagttggttggttgct

SEQ ID NO: 881278 - DNA, 120 bp, Artificial Sequence
  ENSG00000257711_15 (sequence is synthesized)
tgatgaaactgatgaatgggaagccgtgaaccctcatggaccatggtgcagctggacctttctgccccatctcccatgcagggaatagtacagttttgcttctctggtctactgcatact

SEQ ID NO: 881279 - DNA, 120 bp, Artificial Sequence
  ENSG00000257711_16 (sequence is synthesized)
atcagagcagagtttgctcagcaaaacagtccagataacctggtgatcctccaagaggccacaaggcaatcctttcaatgatgcccaagactattttacaaaatatgcctaaaagcaggg

SEQ ID NO: 881280 - DNA, 120 bp, Artificial Sequence
  ENSG00000257711_17 (sequence is synthesized)
tggtacaaaatcagattccttaaagcagcagagccaactcgtcttgggcttttggacaacctctctttcaggagtcctgagagaggggccctggccgtcataaagctcttccatattccc

SEQ ID NO: 881281 - DNA, 120 bp, Artificial Sequence
  ENSG00000257711_18 (sequence is synthesized)
gatttcttgttggtagggcataaaccttgagtgctttctctagggatggggatgaatctctattcatctattcacccctcttttatccacaccactactctcactgattgatttactcat

SEQ ID NO: 881282 - DNA, 120 bp, Artificial Sequence
  ENSG00000257711_19 (sequence is synthesized)
tcactcaacaaatatggactgtgaccttgttagctgtttgaactgggacatactgtttaacctctctgtgcctgaatttcctcctgtggcatttgaggactaaggggttgtgtagtcttc

SEQ ID NO: 881283 - DNA, 120 bp, Artificial Sequence
  ENSG00000257711_20 (sequence is synthesized)
ccctaattggagggctaggtgttggtgatctcaactaaaatggtatcaatgggatggacagaagtgcacaaattagtgagaaattgagaaccttgaagactgaccatttctctacactgg

SEQ ID NO: 881284 - DNA, 120 bp, Artificial Sequence
  ENSG00000257711_21 (sequence is synthesized)
ggagctgaccacctccagtgtggagaatggatgccgcagcatttcagcatcagagaatcgttgacaaaaagatgcacctcacaagaatgtttagagaatctaatacgatagcatcatgaa

SEQ ID NO: 881285 - DNA, 120 bp, Artificial Sequence
  ENSG00000257711_22 (sequence is synthesized)
accacttttggaagtaaaaaaggcttttaaaataccatctcatggtgataatactgaacaaaatgatgcaacaattctctgaattctttaagggtaccactttgtaggcaataaatccca

SEQ ID NO: 881286 - DNA, 120 bp, Artificial Sequence
  ENSG00000257711_23 (sequence is synthesized)
tctctttaaccctgactcttgtaaactgaagatccaagcttttcactttatgtccttctcaaattgtggtgacctgagtaaaaggcagtgattcaagatggggtcagtaacagtgctctt

SEQ ID NO: 881287 - DNA, 120 bp, Artificial Sequence
  ENSG00000257711_24 (sequence is synthesized)
taaacactttgtctagcagtgcagcctaagactgcatccaggtttagtggcctcatcaccttggatttatattaacctgtggccaagcccttcagactttcagcatatgaatggcttcag

SEQ ID NO: 881288 - DNA, 120 bp, Artificial Sequence
  ENSG00000257711_25 (sequence is synthesized)
agccaggatttgaagcagctgttcacaaaggcacactactgaacagacatagacatgctaatagcgatagaaagaaaacaagggaagcataaaaattgagccaggggatttttcacattg

SEQ ID NO: 881289 - DNA, 120 bp, Artificial Sequence
  ENSG00000257711_26 (sequence is synthesized)
gttaaaagtgggttctaagtttcctaaccacccaagcaaagaagataatacaatagagttccaagagtcccagtatcaatataagtgcatactagttgcttagaaaaagcagaaattttc

SEQ ID NO: 881290 - DNA, 120 bp, Artificial Sequence
  ENSG00000257711_27 (sequence is synthesized)
ctatgtttaggtctggaaaatttctccgatacaaatggacacaacagtaaagtattgtggtttttggtttttttttttgtttttttctgagacagagcccccactctgttgcccaggctg

SEQ ID NO: 881291 - DNA, 120 bp, Artificial Sequence
  ENSG00000257711_28 (sequence is synthesized)
cttggccagtaaggcaccatgtttaaccctctgttattcacagacattttggaaaggttaatattcagtgctgtcaaggctgtagtaaaactggaatactcagatggctgatgatatcat

SEQ ID NO: 881292 - DNA, 120 bp, Artificial Sequence
  ENSG00000257711_29 (sequence is synthesized)
ttattagcacaacccttccccagagcgtttttaaaatacataggaagccataaagtacttatatttttgatctattaattccaaggaaataatctgaaataaggaaaagctaaatgtaag

SEQ ID NO: 881293 - DNA, 120 bp, Artificial Sequence
  ENSG00000257711_30 (sequence is synthesized)
tctactaatgagagtgaaaaatttgaaacagcataaatgtctaatgataggaaactgtctaaaaacatgatagtatatatacacacggtagaaattatgaaatagccattaaaaatgatg

SEQ ID NO: 881294 - DNA, 120 bp, Artificial Sequence
  ENSG00000257711_31 (sequence is synthesized)
gtaacaaaaactatgtcacaacacagaaaatgcttataatgttaaatgaaatagcagatctcaatctgtgtttatgttatagttttataacagagaattgtttgtaaaaatataggaata

SEQ ID NO: 881295 - DNA, 120 bp, Artificial Sequence
  ENSG00000257711_32 (sequence is synthesized)
aacaggtaatgtggtaaaatgaaaatggatattcgttagggcattgggattgtgggtagaacaaaaagggtttgtatatttatgtactaaataaactttttgttttttgcaaatagaaaa

SEQ ID NO: 881296 - DNA, 120 bp, Artificial Sequence
  ENSG00000257715_0 (sequence is synthesized)
ctaatgggatgtcagtattctaatgaacacagcctgagaaatgttgctgtaatcctgacacttcaatcttgcagcaaaccttgtgctgaaattttctgcatcagaaatcattctggaatc

SEQ ID NO: 881297 - DNA, 120 bp, Artificial Sequence
  ENSG00000257715_1 (sequence is synthesized)
ctttttacctggcactgactaaagagatatgggtgttccttcccagaagtctgttcaggagtgagccactggagagcagaagattttggagaggtctcaaaagaaatttctataacaatt

SEQ ID NO: 881298 - DNA, 120 bp, Artificial Sequence
  ENSG00000257715_2 (sequence is synthesized)
gaaaatttaaactcataatacatacactgaataatataaataacatagtatgcattctcatcactgattggcagtaagctctaggtatgccacatcctcagtgggtaagtctcctctcag

SEQ ID NO: 881299 - DNA, 120 bp, Artificial Sequence
  ENSG00000257715_3 (sequence is synthesized)
ttttcctacctaattgccagcctgtgggtccttttacctctcccatgctaactgctagcgaaggcttaatggcaactaacagtggttgactaccccgttgtgtgtcacgtactttgcatc

SEQ ID NO: 881300 - DNA, 120 bp, Artificial Sequence
  ENSG00000257715_4 (sequence is synthesized)
tgtgatatcatttaatattttattagagtgaaaaagtaaaagaaatcatttttggggcttcaactaccacagcagcaggtgccacagcatgacacagagcagtgctagtctgcaaactgt

SEQ ID NO: 881301 - DNA, 120 bp, Artificial Sequence
  ENSG00000255621_0 (sequence is synthesized)
cagggcagcagtgcagcagtgcagcagtgcggttatgagaatgatggaacaggaagcaggagagaacagctaccaccattctttccttatagatgatgagaaggaggagaagaggaagag

SEQ ID NO: 881302 - DNA, 120 bp, Artificial Sequence
  ENSG00000255621_1 (sequence is synthesized)
aatgtggaggaagtgaatatggctgcatcaagggattcttcttttaaacctacataatttttaaaaatcgacctgtgcatcccagctcccattggtgcaaacaagtgattttgattttgt

SEQ ID NO: 881303 - DNA, 120 bp, Artificial Sequence
  ENSG00000255621_2 (sequence is synthesized)
acttcagtgcatgcccttaaccttggtgaaatgtctttgccacttctttctgagatgtacaatcctgagtgattgctccctctctgaatttttttgaatccctgcttaatcttctctacc

SEQ ID NO: 881304 - DNA, 120 bp, Artificial Sequence
  ENSG00000255621_3 (sequence is synthesized)
tttggcattcttttgcatactttgaggttcaaggttttaactgttaagtattatgtttgtatttgcgtttctccttctccttgctatttttggataattttctaagaggcaatagagaaa

SEQ ID NO: 881305 - DNA, 120 bp, Artificial Sequence
  ENSG00000255621_4 (sequence is synthesized)
ttctgcttttataccaccgtatttaattgaaaagatggaatctgcattttgaaggtttcagtgtgatagatgacctcaagttctttgatgttctttccattgagaggtggggtctacctc

SEQ ID NO: 881306 - DNA, 120 bp, Artificial Sequence
  ENSG00000255621_5 (sequence is synthesized)
cacttccccttgaatctggacttgcttcagccactcacttatataactaatagaaggtggcagaaatgacggagcatgacttttgagttaagtcagagaggccgtgcagctactgcattg

SEQ ID NO: 881307 - DNA, 120 bp, Artificial Sequence
  ENSG00000255621_6 (sequence is synthesized)
tttgccggtacacttgcccttggagccctgggccatcatgtaagaaggctgccatgctgtgagaacacctaagccacatggagaggccacatgaaaaagcttggttgataatcccagtta

SEQ ID NO: 881308 - DNA, 120 bp, Artificial Sequence
  ENSG00000255621_7 (sequence is synthesized)
agcccaacattcgaatcatcctagcccaggtaccagacatgtcagtgaagaagacttcatccgcagacatttgagacatccccaactgcttaaacctttccagtggcatcgcccagacat

SEQ ID NO: 881309 - DNA, 120 bp, Artificial Sequence
  ENSG00000255621_8 (sequence is synthesized)
tgtgaagcagagacttgctatcctcactgcgctttgtcggaattcttgacccatagaatccttagggccagaaaagcaaattaaactggaatgttatggagaccactatccctgcctcct

SEQ ID NO: 881310 - DNA, 120 bp, Artificial Sequence
  ENSG00000255621_9 (sequence is synthesized)
ttccttttttaaaggtggcactaatttctgtaattctttccaagatgtggctttccttctgatataccatcatggctggaagagaagatatgggtgatgagtgctcagcgaatgggggct

SEQ ID NO: 881311 - DNA, 120 bp, Artificial Sequence
  ENSG00000255621_10 (sequence is synthesized)
accatctacactgctactacaggtccttcggttgacatgaacatgccagaatgagggatgggaggaccaagagctcatttggcctgggtgtgtctgtccttaattacactgttctcaaac

SEQ ID NO: 881312 - DNA, 120 bp, Artificial Sequence
  ENSG00000255621_11 (sequence is synthesized)
atatgttccagccagaggcttgttaagaagaagcctttgtttaaatttcagggcccacagagcattttatagtctagactctagaaagttttataggctaaaagtctgtatgatctgagt

SEQ ID NO: 881313 - DNA, 120 bp, Artificial Sequence
  ENSG00000255621_12 (sequence is synthesized)
gagatgagcccttgtgttttatcaaaggacattctgggaacataaacctgtttgtcttcatgacaagccatgcaactcctgggcagagttcagttctctgtgaagagaagtgaatatgcc

SEQ ID NO: 881314 - DNA, 120 bp, Artificial Sequence
  ENSG00000255621_13 (sequence is synthesized)
actggtacacatgcgtttcaaacttcctgatcctcacgcaagactgatttcacaggctccttgacatctgcatttaactcctaaatgtcctctgctgtgcacctctttcgcttttctcaa

SEQ ID NO: 881315 - DNA, 120 bp, Artificial Sequence
  ENSG00000255621_14 (sequence is synthesized)
tctcactgccctcactgctatttgctatgacattttctttttgcttttcgaatctcatactaattactgcttcctgaccctttttggcaccagtgtagcagagggtactaccctcagctt

SEQ ID NO: 881316 - DNA, 120 bp, Artificial Sequence
  ENSG00000255621_15 (sequence is synthesized)
cagataagtcagtggagttcagatttgtccatcctctgctgatagatgtaggaatggcttccagaaatctctctgcagagggagtgaggggagcctcctgggagagcttcagcttagacc

SEQ ID NO: 881317 - DNA, 120 bp, Artificial Sequence
  ENSG00000255621_16 (sequence is synthesized)
cataagtcattacaagaaactcagctcaggaacaaagccttagtccctacaggagaaaggcaatcctaaggagagcggcgcctgaaccctttcctaccatcaagaactcaagaactcagg

SEQ ID NO: 881318 - DNA, 120 bp, Artificial Sequence
  ENSG00000255621_17 (sequence is synthesized)
tctgtaatttacaaaggcatggggtgaccagtgtcgcagacactggctagatgctccccaaacttgtctccttttcttcctgggctcataccttcctggcacacatactctctgtctgaa

SEQ ID NO: 881319 - DNA, 120 bp, Artificial Sequence
  ENSG00000255621_18 (sequence is synthesized)
ttctagcctaataaatgtgggcagaattcacatacaccagctccaggcctggcccataacacttcctgcatgatctgggatgcaaacgatccagtggaggcctccgaggccctaaggatg

SEQ ID NO: 881320 - DNA, 120 bp, Artificial Sequence
  ENSG00000255621_19 (sequence is synthesized)
aagcagctggagacagaagggcctgggtccctgaatggctgggaggaatagagccccagtgcagtctacttgcacccccaccttgactctgacataggcagaaataaatttttacactct

SEQ ID NO: 881321 - DNA, 120 bp, Artificial Sequence
  ENSG00000255628_0 (sequence is synthesized)
aagatcactttttcaaagtttcatcctctggactccttgctttcttccataaaacccatccaaaggccctgctgggctactgacagctcactatccctgcatgtcaactctttacctgtg

SEQ ID NO: 881322 - DNA, 120 bp, Artificial Sequence
  ENSG00000255628_1 (sequence is synthesized)
aacaattatgcaagcacagccctcctcagttccctgaagacctgaatgaagccagggtctcaggtgtgaggtcatagatcggagtaagaaccaactttttcttattagttttgtgacact

SEQ ID NO: 881323 - DNA, 120 bp, Artificial Sequence
  ENSG00000255628_2 (sequence is synthesized)
cagcatctccttttttagggtatctccttcctcatcagtgacagcaatcagagcacgattatgaagtagactggacataagcaccacattttgggtgtcactgtctcccatcacccccta

SEQ ID NO: 881324 - DNA, 120 bp, Artificial Sequence
  ENSG00000255628_3 (sequence is synthesized)
atggaactgtctagttgcaggaaaacaagctcagcgctcccactgattctacattatggttggatgttaacctgatgtggtgctcttggagaagcttgcctgagttaggcactttctcag

SEQ ID NO: 881325 - DNA, 120 bp, Artificial Sequence
  ENSG00000255629_0 (sequence is synthesized)
tcaaactggaagcagacaaaggcagccagaactatcttatttattataaagatacaccgtgaagaacaaacctgactgtatactgaagcctgtaatggtacatgccaaaaatgtacagta

SEQ ID NO: 881326 - DNA, 120 bp, Artificial Sequence
  ENSG00000255629_1 (sequence is synthesized)
tgaaatggtgagaggcagtacagagcacgggcgaatgcgatgctgtcagcagcacatgagcgggggactgatgcggtgggatgggaggacacaggggctctttaactttggatttccaag

SEQ ID NO: 881327 - DNA, 120 bp, Artificial Sequence
  ENSG00000255629_2 (sequence is synthesized)
gctgatcagatgaaagtttcttcagtttgtagactccagaggctatgtcattcctaaatgttaaggacacaactaccaacccacgcctcttttccttttctttaaattataaaccccccc

SEQ ID NO: 881328 - DNA, 120 bp, Artificial Sequence
  ENSG00000250295_0 (sequence is synthesized)
ttgctgctctcttctggagcagtgggatattgggcagttcacttaacctctctgagctccttcctcaagcctttttttcctgactacagcgagcaacagctgtttgagatggtggagcac

SEQ ID NO: 881329 - DNA, 120 bp, Artificial Sequence
  ENSG00000250295_1 (sequence is synthesized)
agcagattttgctgtggaccaagatccagttttcctcataacactcacaggtattaaatgactaatccagatccccagcaccacatcaaggtaggtgacagaagattaacaagttcctaa

SEQ ID NO: 881330 - DNA, 120 bp, Artificial Sequence
  ENSG00000250295_2 (sequence is synthesized)
ctgttctttaagtgtaatttgttgcaacgttctgaaactgattaatatcccctccccttcttgccctgaaatgaatctggtggtattaaattaaataaaatagttccagtttgtccataa

SEQ ID NO: 881331 - DNA, 120 bp, Artificial Sequence
  ENSG00000250295_3 (sequence is synthesized)
gcaggtattaaatgactaatccagatccccagcaccacatcaagaaggaaaacagcacatgccaacgtcaacacatctttgaaaagttgccaccaacgcttcgcataagaggactactgg

SEQ ID NO: 881332 - DNA, 120 bp, Artificial Sequence
  ENSG00000250295_4 (sequence is synthesized)
aagcgtcctgcaacaggaagatgccctggacccaatggatggtcaggagatgcgaagtaactgccagggtggcctgggcactcccaacagaccacaaatgttgatttcagaatctttggc

SEQ ID NO: 881333 - DNA, 120 bp, Artificial Sequence
  ENSG00000250295_5 (sequence is synthesized)
actttccaaaatgtggctgagcagtaatttggaagcctaaatcctgactttagaaattcataagaacaaccaatgttttataaactcaacagaaagtaaaataaacaaacccagggtttt

SEQ ID NO: 881334 - DNA, 120 bp, Artificial Sequence
  ENSG00000250295_6 (sequence is synthesized)
ttttcctcataacactcacagctttggacccctgcacctgctgctatgctacactggaggaaacagagctccgcaagaccctcagcaactgcttcccaagtacataagaggaaaacaaaa

SEQ ID NO: 881335 - DNA, 120 bp, Artificial Sequence
  ENSG00000250295_7 (sequence is synthesized)
caaaacaaaccaccaacacacacacatgttcacacagacacacacatgtgtgggataagaggcagagctagagtccattttccaggtcagacttgggactccaagcctgactttggagtg

SEQ ID NO: 881336 - DNA, 120 bp, Artificial Sequence
  ENSG00000250295_8 (sequence is synthesized)
attcaaatcaccttccacctattttgctgcttgttcagttcagtacacgttaagaatggcccccaaccaacagggaactggtttggttatcttcctttgcctttcaaactcacccaagca

SEQ ID NO: 881337 - DNA, 120 bp, Artificial Sequence
  ENSG00000250295_9 (sequence is synthesized)
aagataaaagtattaaatgactaatccagatccccagcaccacatcaagctcctcagggttcctcttcaaagcactgggcactttgaaagataactgtaaaggtcacatttgtaatataa

SEQ ID NO: 881338 - DNA, 120 bp, Artificial Sequence
  ENSG00000250295_10 (sequence is synthesized)
gcaagaacttcttaaacagacatgtaagtaactgcacatagacgtgacatgtcatagctcgagaaatcttttaaagtaaagtttacgccaaattaacttccaacagctccgactctccag

SEQ ID NO: 881339 - DNA, 120 bp, Artificial Sequence
  ENSG00000250295_11 (sequence is synthesized)
accattcttggtactcttaatgacagactgtgcagcccaaagcctgcagctgcagtgtcaggacaaattagcctaaagtggaacaaaagtcaatgtgaagaaatgtggtatccggcaagg

SEQ ID NO: 881340 - DNA, 120 bp, Artificial Sequence
  ENSG00000250295_12 (sequence is synthesized)
tctgacttttgaaattctgagattgatgacattttaaaggtgtaggtacaacagaatgtgttttccatatttgtaagcaattctaggttcctgagcactgagagaaaagcaaagttaatt

SEQ ID NO: 881341 - DNA, 120 bp, Artificial Sequence
  ENSG00000250295_13 (sequence is synthesized)
tctcaccgtaggagaaggccttattatttttgtgcacatacacgactgtcctgtgatcaagaaaaggcatcttttaaaagaatcgttttgaaatgtttatctcttatttgaaatccaaga

SEQ ID NO: 881342 - DNA, 120 bp, Artificial Sequence
  ENSG00000250295_14 (sequence is synthesized)
aagagtagacattcatttccaaacaggaccataaatcatataacgctgggagaaaggtcaacaccaccagcacagcacagttttctcacatatgcttaaggattttcagaatctccaaat

SEQ ID NO: 881343 - DNA, 120 bp, Artificial Sequence
  ENSG00000250295_15 (sequence is synthesized)
aatagcatgatgtaaactttgaataaaaaagaacaccatcaagactccactgaacaaagaacgtctgactggaaatgcttacggcacccttcacatggttgggcaactttcctctactgt

SEQ ID NO: 881344 - DNA, 120 bp, Artificial Sequence
  ENSG00000250295_16 (sequence is synthesized)
gctgccagagttaacttatctttatcagaatcacaaaggaacactctcctgcttatttacaaggctaaaatgacatctggtggcgctcttctctgagaactcagtcactgttcctggaaa

SEQ ID NO: 881345 - DNA, 120 bp, Artificial Sequence
  ENSG00000250295_17 (sequence is synthesized)
atgatgcaaaagcacaaacttttgcagggcaactgtaggagtattcttgtgcgtgtgtgttaagtactaactgctgatgttgctcaaatgttccgctagtccctgtagcctcacaatgtt

SEQ ID NO: 881346 - DNA, 120 bp, Artificial Sequence
  ENSG00000250295_18 (sequence is synthesized)
ttattcattgtcctgtgatcaattcaaaaaagccatcttttataagaatggttttgaagtgtttatcttttatttgaacatccaagaaagagtagacattgacttccacaggggaccata

SEQ ID NO: 881347 - DNA, 120 bp, Artificial Sequence
  ENSG00000250295_19 (sequence is synthesized)
cctcctataatgcctgaaggtgcttaaaatatagtgaactgtgttaaagttaataggatacatcattagtgtgttaaaaaatgtaaaatggtgacatactatcagctcacctgggtaagg

SEQ ID NO: 881348 - DNA, 120 bp, Artificial Sequence
  ENSG00000250295_20 (sequence is synthesized)
aaaatatggctaaagtacctctaaaggtatctacttattaagtatactgaccaaactttagacattttacttcgaccacagaaagtattatttgaaaaaaaaatcttcattacaaaatta

SEQ ID NO: 881349 - DNA, 120 bp, Artificial Sequence
  ENSG00000250295_21 (sequence is synthesized)
catatttaattaggaagtaaaacctaaatctgtatttactagcaatgccaactttaaatattctagttgcagctgacaacagaaattctaacatgcatatgttgttgcataatagcctct

SEQ ID NO: 881350 - DNA, 120 bp, Artificial Sequence
  ENSG00000250295_22 (sequence is synthesized)
ttttcctagttgggtatgtttgtagagacagaaaggtcccctgaccaattgtgcaatagagccccaagatacttaagcctggaactactctctcagacttaacaaaatgttcatcttaat

SEQ ID NO: 881351 - DNA, 120 bp, Artificial Sequence
  ENSG00000250295_23 (sequence is synthesized)
ttctatcagattgggacaaaacattcactctttagataatagaggagagactaaagaacatgtcataatagtcaaatttgtgccaatgttaaatctatccctttaaaaacatgtattatt

SEQ ID NO: 881352 - DNA, 120 bp, Artificial Sequence
  ENSG00000250295_24 (sequence is synthesized)
gtgaggccgcagggattagtgcaacatttgaacagaatcagcagttagtacttaacacacatgcacaagaatactcctacagttgccctgcaaccaagaagctaataaaagagccaggct

SEQ ID NO: 881353 - DNA, 120 bp, Artificial Sequence
  ENSG00000250295_25 (sequence is synthesized)
tttcaaatgaacacctcgatgatgacaccattagttattcagcaaaaataaatgcttcattaacttgtcttcccactgttaaaggataggatgaatttacctcaaggcagcaactcagat

SEQ ID NO: 881354 - DNA, 120 bp, Artificial Sequence
  ENSG00000250295_26 (sequence is synthesized)
attaacgttcccttacattttagagctcactatgcagaaataccagaaataaggtgacttaaaactcaatttgtctgtaaaatacactggcctttggaatccagaaacccacttggtcct

SEQ ID NO: 881355 - DNA, 120 bp, Artificial Sequence
  ENSG00000250295_27 (sequence is synthesized)
gactgccaattacttgaccttccttttgttacttgacctctctggatcttgactaaactcatttgtgagacaagaggagatgtccaaagttttttcatctcaaatatgttacgatttaga

SEQ ID NO: 881356 - DNA, 120 bp, Artificial Sequence
  ENSG00000250295_28 (sequence is synthesized)
ttcaacaattatttttccaattcctaccacacaccccgaatactgaggtcacgctgaggtattatttgcctaagactctcgtaaatgactcaataagggatcaactccattagtgcagtg

SEQ ID NO: 881357 - DNA, 120 bp, Artificial Sequence
  ENSG00000250295_29 (sequence is synthesized)
gccagcattgagtgatcagcaaaaatatctcattgagtatttctatgatgtcacggctgtgccttttaacataatgtaacttgaatgtatgcctcttatctattaaaaaaattacaaatt

SEQ ID NO: 881358 - DNA, 72 bp, Artificial Sequence
  ENSG00000206142_0 (sequence is synthesized)
tggggaacctgtgtggctgcattcaagaagatggtccaggagaagctcattccatgcctgttaaccaggcac

SEQ ID NO: 881359 - DNA, 120 bp, Artificial Sequence
  ENSG00000206142_1 (sequence is synthesized)
ttcaatgagaatacaagaagatatgctgtgcacaccaaccagtgtaggagacctcatggctcccgggtaaagaagaagaggtacccacaagaagatgacttccatcatacagtcttcagc

SEQ ID NO: 881360 - DNA, 74 bp, Artificial Sequence
  ENSG00000206142_2 (sequence is synthesized)
aaatattttgtatgtgtgaatgcatactgaatgtaaagtggataaaaaatattttttatatttccccacttcac

SEQ ID NO: 881361 - DNA, 120 bp, Artificial Sequence
  ENSG00000206142_3 (sequence is synthesized)
aaggcttttcatgaatttgtcaatttttattttttatatttccccacttcaccagataatgcatacctgaacctggaaactgattcccactgcagaaagtgttctgagccacatccctta

SEQ ID NO: 881362 - DNA, 120 bp, Artificial Sequence
  ENSG00000206142_4 (sequence is synthesized)
agcatcagcttgacccatgctgtgatcagccacctccatacatcacaccaagcaagcccctgggtgattcacagtctccaccaccagggcactgaccttaactctgtgtttttctagctc

SEQ ID NO: 881363 - DNA, 120 bp, Artificial Sequence; identical to SEQ ID NO: 867125
  ENSG00000206142_5 (sequence is synthesized)

SEQ ID NO: 881364 - DNA, 61 bp, Artificial Sequence
  ENSG00000206142_6 (sequence is synthesized)
catcgccaagcgccgcccagggcatcgccaaagaggacgccgcccatggcatcgccaacga

SEQ ID NO: 881365 - DNA, 65 bp, Artificial Sequence
  ENSG00000206142_7 (sequence is synthesized)
gacgccgcccagggcatcgccaacgagggcgccgcccagggcatcgccaaagaggacgccgccca

SEQ ID NO: 881366 - DNA, 120 bp, Artificial Sequence
  ENSG00000206142_8 (sequence is synthesized)
acggcatcgccaacgagctgtatacgacatcgctaacgaggacaccctacaagccgtcgctaacaagtacactgtacacaacatcgctaatgagggcactgtacaagacatcaccaatga

SEQ ID NO: 881367 - DNA, 120 bp, Artificial Sequence
  ENSG00000206142_9 (sequence is synthesized)
gggcgctttatacgacattgctaatggcaccgacaaggcacgctaacgtggacgctgtacacgacattgctaatgaggacagcgtataagacatcgctagtaactatcgcaagaacaaaa

SEQ ID NO: 881368 - DNA, 120 bp, Artificial Sequence
  ENSG00000206142_10 (sequence is synthesized)
atatataaaaaaagacatcgctagtgagcacgctgtatacgacatcgctaatgaggacaccatacaaggcatcgctaacgatgacgctgtacacaacatcactaatgatgacaccgtata

SEQ ID NO: 881369 - DNA, 120 bp, Artificial Sequence
  ENSG00000206142_11 (sequence is synthesized)
gacaccgtacaaggcacgctaacgaggatgctgtacacgacatcactaatgaggacagtgtacaagccatcactaatgaggacactgtatatggcatcgctaacgaggacactgtacaag

SEQ ID NO: 881370 - DNA, 120 bp, Artificial Sequence
  ENSG00000206142_12 (sequence is synthesized)
gtatatgacatcgctaatggcacccacaaggcatgctaacgaggacgctgtagacgacattgcttataaggacaccgtacaagacatcgctaacgaggacgctgtatacgacatcgctaa

SEQ ID NO: 881371 - DNA, 120 bp, Artificial Sequence
  ENSG00000206142_13 (sequence is synthesized)
tgaggacgttgtatatgacatcgctaatgaggatgctttacaagacatagcgaatgaggttgctgtatatgacatcgctaatgaggacattgtatatgacatcgctaatgaggacgctct

SEQ ID NO: 881372 - DNA, 120 bp, Artificial Sequence
  ENSG00000206142_14 (sequence is synthesized)
atacgacatcactaatgaggacgctgtatacaacatcgctaatgaggacgctgtatatggcatcgctaatgaggatgctgtatacgaattcgctaataaggacgctgtatatgacattgc

SEQ ID NO: 881373 - DNA, 120 bp, Artificial Sequence
  ENSG00000206142_15 (sequence is synthesized)
taatgaggacactgtacaagacatctgtaaaaaagaagatgctgccaatgagccattgacactggagaatgatacgtaccctgaaataactcacttcctgaggaaaaagcgccatctcta

SEQ ID NO: 881374 - DNA, 120 bp, Artificial Sequence
  ENSG00000206142_16 (sequence is synthesized)
gggtacagaaacctgattctgggctccttttgggaaggaggatttggggtctggtgagagcaaatgattttgcaagtataaaaccatgtccagagaggctgtagggatatctgtgagccc

SEQ ID NO: 881375 - DNA, 120 bp, Artificial Sequence
  ENSG00000206142_17 (sequence is synthesized)
agaggaaacaccaggggatcctgtgcgaagcaccatggcttcagctagggtgggaggagtgggtgggcctctctctaatgacttatcctggtgtttgtgtttctaaagatttgattgtgg

SEQ ID NO: 881376 - DNA, 120 bp, Artificial Sequence
  ENSG00000206142_18 (sequence is synthesized)
agagcatatctgatgatggggatttgtaggtaggtaactgctttccacgtaagatccaattggagagagttcccaggggccttcggggtatccatgctgcttgggaggttaagggagggg

SEQ ID NO: 881377 - DNA, 120 bp, Artificial Sequence
  ENSG00000206142_19 (sequence is synthesized)
gcatgaaatcaaaacgaaacaggaaatatgtgtcatattggatttggtcttttccgggtttattggcataatagttggaactgtctctctgggctatgagggtgctgtgttatttaaagg

SEQ ID NO: 881378 - DNA, 120 bp, Artificial Sequence
  ENSG00000206142_20 (sequence is synthesized)
gtcacctgtggtgaacagaatctgagggacacaactctctcacaggcacttcctccaacctggagacagagttctcctggtgtgtgcccaggggtggaggagaaattgacagtctgcctc

SEQ ID NO: 881379 - DNA, 120 bp, Artificial Sequence
  ENSG00000206142_21 (sequence is synthesized)
tgaactttcaggactttaaaaagcactcatgtttccatcctcactgttgactcctggcttaaagggatctcccggggtgagtgaggaggcgggatcggaccctggcagtctgacggcagc

SEQ ID NO: 881380 - DNA, 120 bp, Artificial Sequence
  ENSG00000206142_22 (sequence is synthesized)
acctgtgttcctctgcactgggccgtggatgacattacacaccttgccactcccacggtcctgtgtgttccggatattttaaaataatggctataaggttgagcacttcaggatacgctg

SEQ ID NO: 881381 - DNA, 120 bp, Artificial Sequence
  ENSG00000206142_23 (sequence is synthesized)
ttttgctgtgtgcagatggaggcagtggctggagtgaatgaacggcaacacttgctggcaaccggcagaagctgagagacagggaacaggctctcctccagagcctccaggagccaggcc

SEQ ID NO: 881382 - DNA, 120 bp, Artificial Sequence
  ENSG00000206142_24 (sequence is synthesized)
tttggccaccttgaatgtgggcttctgggagaccatgcgtttctgttataagcagcccagtctctggcagtttttacggctgccccggaacactcatctatacctgtctgacaaggtcaa

SEQ ID NO: 881383 - DNA, 120 bp, Artificial Sequence
  ENSG00000206142_25 (sequence is synthesized)
gctccaaggaagggactctctacatatctacattgtttgcagattttacaataatcatttattcttgcatggctgatcattgttaaccaatacaaataaaataataaagaaatgacccac

SEQ ID NO: 881384 - DNA, 65 bp, Artificial Sequence
  ENSG00000206142_26 (sequence is synthesized)
ggtgactcgaagaagccttccaaaaagcatgtgaaaaggaagccctactctactaccaaggtgac

SEQ ID NO: 881385 - DNA, 120 bp, Artificial Sequence
  ENSG00000206142_27 (sequence is synthesized)
tgaggatgtagggtatagtaaaagaaactggttttcctggtgacatactctttttatctatgtatagtttctgggaacatgttcacattaggttgtgtgtgggtatgtgtgtattagggc

SEQ ID NO: 881386 - DNA, 120 bp, Artificial Sequence
  ENSG00000206142_28 (sequence is synthesized)
caccctctatgcctggaattacccacacctgcagagatcccaaatgccatccctcacataagacagcctcatgatctcataatccagagaatacaagaagatatgctgtgcacaccaacc

SEQ ID NO: 881387 - DNA, 78 bp, Artificial Sequence
  ENSG00000206142_29 (sequence is synthesized)
aggagatggagagaggccagtcaacgcgagggtggtgcaggtggcccctctgaggcttgaatctatgactcctcactg

SEQ ID NO: 881388 - DNA, 120 bp, Artificial Sequence
  ENSG00000206142_30 (sequence is synthesized)
ttatccccactgctcaggtggagaacgtgaagggccaagggagtggccccagctcccgagttcctgaatgaaacagtgaaaacacgaacccaggagtgtggaccagtgctgacgctgaca

SEQ ID NO: 881389 - DNA, 120 bp, Artificial Sequence
  ENSG00000206142_31 (sequence is synthesized)
agtgctgacgctgacatgcacttagtcatggggtgttcaccaccacacacggagtccagcattcatgtataagccctaaagcaacgagcccaagaggccccagacactgcccatcatcat

SEQ ID NO: 881390 - DNA, 120 bp, Artificial Sequence
  ENSG00000206142_32 (sequence is synthesized)
cccaagaggccccagacactgcccatcatcataaagtggcctccgtggtcacacaacccagggcagttataggctcatctccccacggaccggcatagtcatcagtgtgtcaaaagcaca

SEQ ID NO: 881391 - DNA, 120 bp, Artificial Sequence
  ENSG00000206142_33 (sequence is synthesized)
gcaggatgtgcaggtttgctacatatataaatgtgtgttatgagagtttgttgtacagattattgcatcacccatatattgagcctaatatcagttatttttcctgatccaccccctcct

SEQ ID NO: 881392 - DNA, 74 bp, Artificial Sequence
  ENSG00000206142_34 (sequence is synthesized)
taaaacacgtgtaaatctcatacatacaacaggcaaatgcagaagcagtgtggtctcgcaagttgtaaagagga

SEQ ID NO: 881393 - DNA, 120 bp, Artificial Sequence
  ENSG00000206142_35 (sequence is synthesized)
ttcaacctgggtagaagacatgagggaactctgtcactaaatcacggcagagttcaaggccacttgtagactatttcatgttacagaaggtggcctttagctactaagcaaaggcctctg

SEQ ID NO: 881394 - DNA, 120 bp, Artificial Sequence
  ENSG00000206142_36 (sequence is synthesized)
tttctcatttctttcctgttcatcttcttggtcatccttcttccgcaagggaaacgagcccaagcaaaaggcagtttcaatattaatttgaccgaggttttgtgcagtttattatcatcc

SEQ ID NO: 881395 - DNA, 120 bp, Artificial Sequence
  ENSG00000206142_37 (sequence is synthesized)
cgaggttttgtgcagtttattatcatccgggtaatcaggtgcaacccagtctgcctagcagcccccctatctctgctctgtgttttcatttaataaacattttggtctacttactatgtg

SEQ ID NO: 881396 - DNA, 77 bp, Artificial Sequence
  ENSG00000206142_38 (sequence is synthesized)
gagaccaagtaaatgagatagaatctttatgctggcagctaagttagatttcattttgtatgtgtgaatgcatactg

SEQ ID NO: 881397 - DNA, 120 bp, Artificial Sequence
  ENSG00000206142_39 (sequence is synthesized)
tgtctggagagcctccatgatccaagacatctgagaatacaagaagatatgctgtgcacaccaaccagtgtaggagacctcatggctcccgggtaaagaagaagaggtacccacaagaag

SEQ ID NO: 881398 - DNA, 120 bp, Artificial Sequence
  ENSG00000282882_0 (sequence is synthesized)
agacttgacatctcagcaagtcaaggccatgtgcaagccatagctgtttggacagaaaccctgagtaaatcaagaatgacagcctgcaaagggaagagaaaaatgaagcagatatgtaca

SEQ ID NO: 881399 - DNA, 120 bp, Artificial Sequence
  ENSG00000282882_1 (sequence is synthesized)
gaatcagacaacggaccctgtagaagagccaagaagcctgctgcaggtggagagaagggacctgctgcacaggacagttggccagggtttggacacaaatgaatcaaagaagaggaggaa

SEQ ID NO: 881400 - DNA, 120 bp, Artificial Sequence
  ENSG00000282882_2 (sequence is synthesized)
tagcggggacttcgaaggaggatcgcctggaaagaatgttagatgaggaaactgagacacagaagttaagcaacttgtccacgactaccatttagaaagtgggacatcctggatgcggct

SEQ ID NO: 881401 - DNA, 120 bp, Artificial Sequence
  ENSG00000282882_3 (sequence is synthesized)
gcaaaccctgtgagtccagatactgctggctgacttgcgagactttgctgcctcctgatgctgtggactcggttaaccaaggacacatgtcaaggttctggtttgggcctggtcttgctt

SEQ ID NO: 881402 - DNA, 120 bp, Artificial Sequence
  ENSG00000282882_4 (sequence is synthesized)
cgtgttttcattaagtaggtgattattttggtttaaatgagggcagaaactcattgcatctctccacacccccactgaaacgagagtaaagggatgtgtactagtgtgaacacacaagga

SEQ ID NO: 881403 - DNA, 120 bp, Artificial Sequence
  ENSG00000282882_5 (sequence is synthesized)
caaggagaattggagaggagacatgagagtacggaaacggctgggagagggatgactaatttatggagtgagggatgcgacacagaaagtgtctgcaatgagggccacccacaagacaag

SEQ ID NO: 881404 - DNA, 120 bp, Artificial Sequence
  ENSG00000282882_6 (sequence is synthesized)
gtgcagaaccttgaggcacaaatacggcacaaaaaatgcagccctttccccagtctcctccttaccacaaacactccatcccacctccctttcccccagaaaagcaaagttttattctct

SEQ ID NO: 881405 - DNA, 120 bp, Artificial Sequence
  ENSG00000282882_7 (sequence is synthesized)
ggagaaggtgaacggaaggaaaggctccggattcagagacagcaggcccattggaaggcagggaagggggctggtctgaaaatgggattgtatggaaatctgcacaggagtgggaagctg

SEQ ID NO: 881406 - DNA, 120 bp, Artificial Sequence
  ENSG00000282882_8 (sequence is synthesized)
tccagccctttcctatgcctaacctcagaaattatcagccaggcatgtgagcttactccacttcctgcggatattggatgattcccttctgaagacactgacaggttgtggaaagaacct

SEQ ID NO: 881407 - DNA, 120 bp, Artificial Sequence
  ENSG00000282882_9 (sequence is synthesized)
ctacaaaccgatatttgtgtgtgtttttgtggagtggaattccaagataaaatagatggtgccatacccaatcacatgccaaaacaacaacaaaagagcctaccagtagataaataccaa

SEQ ID NO: 881408 - DNA, 120 bp, Artificial Sequence
  ENSG00000282882_10 (sequence is synthesized)
ccctgctccagagcttccaattatccttgacaatcaaagatgccaacgtttgggggaaaggtccaacaacaaagcagggaggggaaagaattctaaaggaaagagataacacaaggaaca

SEQ ID NO: 881409 - DNA, 120 bp, Artificial Sequence
  ENSG00000282882_11 (sequence is synthesized)
aaagaaaacagcaacaaaaaccaaacccttcgattaatatcctcagaggaatatgagaaaagaagatgctgtatcaataaagcaagatcaggatattatgaaaaaggaacagctggaaaa

SEQ ID NO: 881410 - DNA, 120 bp, Artificial Sequence
  ENSG00000282882_12 (sequence is synthesized)
caaggaagagcttggaaaattaaaataagtccaaaataagaattcaacagaaaggctggaagacaagtagagaaaaattttcagaaaatataataaaaagagaaacaaaatataaagaaa

SEQ ID NO: 881411 - DNA, 120 bp, Artificial Sequence
  ENSG00000282887_0 (sequence is synthesized)
ctgatgtagactattttgccaattgtcctaatcatgccctttacagcaaaaggaacattgttttggattctctcttgacacacaggcaagggtgggctagagccatggccagcagccagg

SEQ ID NO: 881412 - DNA, 120 bp, Artificial Sequence
  ENSG00000282887_1 (sequence is synthesized)
aggctgggtagcctcggtcttcctccccgtggtggagtccagtggaggctctacaccgcaccctgggcgagagagaaaagcctgcctggtcccgccggcggctgcccaggaggaaagtag

SEQ ID NO: 881413 - DNA, 120 bp, Artificial Sequence
  ENSG00000282887_2 (sequence is synthesized)
ccttcatcccctgctttccactcggcaccttctctgcttccagacatctgcccccatctccacggtgcctgctgggcactacccctagacataggaggcatgtagggccacattgggaag

SEQ ID NO: 881414 - DNA, 120 bp, Artificial Sequence
  ENSG00000282887_3 (sequence is synthesized)
gggtgacacagggtaggtattctgagtaagcttagaattgtatagtttgagtaatttcagcggactctgggctggaggagtggaattagctagtcctgtgagggcagtctctcaaggatc

SEQ ID NO: 881415 - DNA, 120 bp, Artificial Sequence
  ENSG00000282887_4 (sequence is synthesized)
aaggccccagatgccagagcatcaagaatatggaaaatcagagaacatgatcaatataccagctcatccctggatgaagctccctgcctttcctcatacagacaaaaaagtgcaatcctc

SEQ ID NO: 881416 - DNA, 120 bp, Artificial Sequence
  ENSG00000282887_5 (sequence is synthesized)
aattttccggcctaccttgtagctgggagctataaaatgaagttcatcaggcatgagcggtctgctggtactgcttcttcccgcttccccttcttcttgctttgggatgggatgcgatgt

SEQ ID NO: 881417 - DNA, 120 bp, Artificial Sequence
  ENSG00000282887_6 (sequence is synthesized)
ttgctgctgtaacagccatttgcagccataaggaaaaggccaaatgaattgcagtggtgtccattgaaccaattctgtatttttctggacttcttgttttgtgagaaaaataaactgcta

SEQ ID NO: 881418 - DNA, 73 bp, Artificial Sequence
  ENSG00000282885_0 (sequence is synthesized)
ccccccgctccccaatgacgtaactgccctgcagcttctagtagcttttcgcagcgtctccgaccgccgggcg

SEQ ID NO: 881419 - DNA, 120 bp, Artificial Sequence
  ENSG00000282885_1 (sequence is synthesized)
aggatcgcttgagcccaggagttctgggctgtagtgcgctatgccgatcgggtgtccgcactaagttcggcatcaatatggtgacctcccgggagcgggggaccaccaggttgcctaagg

SEQ ID NO: 881420 - DNA, 120 bp, Artificial Sequence
  ENSG00000282885_2 (sequence is synthesized)
gggggaccaccaggttgcctaaggaggggtgaaccggcccaggtcggaaacggagcaggtcaaaactcccgtgctgatcagtagtgggatcgcgcctgtgaatagccactgcactccagc

SEQ ID NO: 881421 - DNA, 120 bp, Artificial Sequence
  ENSG00000282885_3 (sequence is synthesized)
ctcttttgcccccctccctcattaagggtacctttcgcgaaagctcaccagttgacgggatgcttggggatttgcaaccgcctcatcgctgccccctaccggcgcatattcaaaacgtct

SEQ ID NO: 881422 - DNA, 120 bp, Artificial Sequence
  ENSG00000282885_4 (sequence is synthesized)
ctgcgaaaagctgttattaccttcggagccaacaggggctgctcgtttacccacagacagtcggaaaaaaatggccgccggatcacagagagcaaaaagcagggctaatcttccgaagag

SEQ ID NO: 881423 - DNA, 120 bp, Artificial Sequence
  ENSG00000282885_5 (sequence is synthesized)
ccaccctgtctcctcgcttgcttctctctccgtcggattgccaaaaagggaacggcacctagacgccgaaaagtaactgaagcaaagggagtttaaagaacgcgcccagccgcctgggtc

SEQ ID NO: 881424 - DNA, 120 bp, Artificial Sequence
  ENSG00000282885_6 (sequence is synthesized)
ttgaacccagtgttaatgagagcaaaaacctctgcatcctccactgagctgtccttgagcatgtctcataatcatgcttcattttaaaaacagaaataagtgagtaagctatgaaagaag

SEQ ID NO: 881425 - DNA, 120 bp, Artificial Sequence
  ENSG00000282885_7 (sequence is synthesized)
acaacctttaaatttttcaaaagttcttggtggtctgtgattagaaatttcatctatatgaaataactgttttggagggcttactgttaaattcaggcattttagggccagtggaaactg

SEQ ID NO: 881426 - DNA, 120 bp, Artificial Sequence
  ENSG00000282885_8 (sequence is synthesized)
gttaagcattcacatcagtcttaacattaatctgataatctactgggagtttaaagactctaagcactaaacacagattttcctcactgtctataaaatgaaagaggaaagaagcattgt

SEQ ID NO: 881427 - DNA, 120 bp, Artificial Sequence
  ENSG00000282885_9 (sequence is synthesized)
actaaattttttataaagctaattgtattcccttttttttttttgaggtagttcattgcattttgaacaaggataactgtcagaaaagatcctctttgaataaaacaggtatctccccca

SEQ ID NO: 881428 - DNA, 120 bp, Artificial Sequence
  ENSG00000282885_10 (sequence is synthesized)
tttactttttttttttttttttttttagaagaaaggcagcttggaatctgtataaatgaaagagagagatagaatgggtaaaaatgattgatggaagaattttgacctactgggtttgag

SEQ ID NO: 881429 - DNA, 120 bp, Artificial Sequence
  ENSG00000282885_11 (sequence is synthesized)
cagttaccaacattattcccctgcactgagctgacctgagcttccctgcctacctcctgtcacggatgtcaccttctttcacccctgtcctgtcaaggtttttgctttagaatgctatag

SEQ ID NO: 881430 - DNA, 120 bp, Artificial Sequence
  ENSG00000282885_12 (sequence is synthesized)
accaaagacgggctaatcaacagtcttacacacaaatcctttcgttctacttggctacaggcagggctaatcttccgaagaggaatcccactactgcctccttataagggaaaaactcct

SEQ ID NO: 881431 - DNA, 120 bp, Artificial Sequence
  ENSG00000282885_13 (sequence is synthesized)
atttgctgggtgggcagaagagagagcctgggaggaaatatcaggggctgtgaacaagaaccagggagaagaaacgttcagggaggaaacagcagtcacaagtgacagagattggtgaag

SEQ ID NO: 881432 - DNA, 120 bp, Artificial Sequence
  ENSG00000282885_14 (sequence is synthesized)
cagagaacatttaggagggaactgtaaggaacaaaaacatttgctgggtgggcagaagagagagcctgggaggaaatatcaggggctgtgaacaagaaccagggagaagaaacgttcagg

SEQ ID NO: 881433 - DNA, 120 bp, Artificial Sequence
  ENSG00000282885_15 (sequence is synthesized)
gaggaaacagcagtcacaagtgacagagattggtggtaaattacatcacctatgtcagaaagggtcccttagacctgccaattaggaggcttgggtatcgtagccttagctagaatagtt

SEQ ID NO: 881434 - DNA, 120 bp, Artificial Sequence
  ENSG00000282885_16 (sequence is synthesized)
tcagtggattggtgggctatggactgaagacagaaggttaagaagcaaatgtagcaattgtagaacatggtttcaagaagtgcagccatgaaaacaacagacagatttcatttagaaagg

SEQ ID NO: 881435 - DNA, 120 bp, Artificial Sequence
  ENSG00000218537_0 (sequence is synthesized)
gccaagtcactggggcggtggggacgatacttctcatttgtagcctttcaatttggtgctctgtctggctgttttgagagctaaactccccattgctcttctggaaggagagctcgctgt

SEQ ID NO: 881436 - DNA, 120 bp, Artificial Sequence
  ENSG00000218537_1 (sequence is synthesized)
ccagtactgcgcgggatgaccgagtgaacaggggactggagacgagatgtggctggagactgagagaagcagaggagtcacactccactcacctccacctcccaaagtgccgggatcaca

SEQ ID NO: 881437 - DNA, 120 bp, Artificial Sequence
  ENSG00000218537_2 (sequence is synthesized)
ggcttgtgccactgcgcccaaacataactgaaggttttacagacatgtctgtggcaccacagaacacgaacggtcccaatggaaaccccacgcccaatttcctcagggaactgctgtggc

SEQ ID NO: 881438 - DNA, 120 bp, Artificial Sequence
  ENSG00000218537_3 (sequence is synthesized)
ggaggcttgcaccccacgtggtggccctaggtacaacggattccggcgggcagagcgccttagatcccgagtctgcagcccagggcagagtgccaacttctcctcatcccttcgtacgcc

SEQ ID NO: 881439 - DNA, 120 bp, Artificial Sequence
  ENSG00000218537_4 (sequence is synthesized)
atagaatggaaagacactggggctcctctgttaggagcgtaggagggacaggctggacaaaagggctcccgaacagcaggttcggaggagagcaacccggccctgacccccgcccccaac

SEQ ID NO: 881440 - DNA, 120 bp, Artificial Sequence
  ENSG00000218537_5 (sequence is synthesized)
accgttcccgacctcgctccccaatatcccggctctgcaccaattcctcccgcaagccaaggaaccccgaggcactcctagtctctaaaccgtttatttctccccaccagaaggttgggg

SEQ ID NO: 881441 - DNA, 120 bp, Artificial Sequence
  ENSG00000218537_6 (sequence is synthesized)
gggtggagccagcgcagacagcgtgggtccctgcggctcttaggcgaaggtggagttgttccagcccacattggccgcgttcatgtcgtaatagttgatgtagaccctgcggggggagga

SEQ ID NO: 881442 - DNA, 120 bp, Artificial Sequence
  ENSG00000218537_7 (sequence is synthesized)
tcagtcccgggcctggccgcgcgccgccgcccctcccccgcccctccgcgactccgcgtacctgtccgggctgatgcgcaggcgctcggccagcaggccgcacagcagcttgctgtagga

SEQ ID NO: 881443 - DNA, 120 bp, Artificial Sequence
  ENSG00000218537_8 (sequence is synthesized)
cacagcagcttgctgtaggagcggttctgcgcgccgccgatcttgccgatgctgtgcaggctgcagagcgcgcacggctcgctggagccgccgaaggccatgagctggtccgggaccacg

SEQ ID NO: 881444 - DNA, 120 bp, Artificial Sequence
  ENSG00000218537_9 (sequence is synthesized)
tgcaccgcgatgtactgcgaggaaagggcgcggtcagcccgccccagcgacctcgtcgggccccgaacgtccacttcgggcccgagccaccgtcctccccccgccccgccccccagctcc

SEQ ID NO: 881445 - DNA, 120 bp, Artificial Sequence
  ENSG00000218537_10 (sequence is synthesized)
gttcaggagtcgcctccccagctcccagcgcggaacccctcgtccggtgggcacccccctcttcctgtcccctcccggcaaacctgggggggcttgccggtggcctgcgccagctgctgg

SEQ ID NO: 881446 - DNA, 120 bp, Artificial Sequence
  ENSG00000218537_11 (sequence is synthesized)
gtgagctcggagaggaacccgtccggcacggaggcgcggggcacgttggtgtttacgatgaacatcggcatgatggcagaaggaccaggagacccgcgcagaggcacagacgcacgcgcc

SEQ ID NO: 881447 - DNA, 120 bp, Artificial Sequence
  ENSG00000256443_0 (sequence is synthesized)
acgtggtggggcagattcgaaaccgaggcttggacatgaaatccttcctgccctggggattgttcccatcgcccaggtcttccctgggagcacttttcacggagcaggagaccagcacac

SEQ ID NO: 881448 - DNA, 120 bp, Artificial Sequence
  ENSG00000256443_1 (sequence is synthesized)
taagcctgggcgaggagaaagggaggaggaaagggaagcattggcaagatatagggattctgaaggcaagcaagttcctcggagcatcctgtctctcctctgagacctcagccagggctt

SEQ ID NO: 881449 - DNA, 120 bp, Artificial Sequence
  ENSG00000256443_2 (sequence is synthesized)
cccgggcagatgggagcactgccctgggagagacaccccacccgaagaggccctgccatgccagcttcccatacccgtgcgagtggcccatggccagcaagacatgctgcctgtgactct

SEQ ID NO: 881450 - DNA, 120 bp, Artificial Sequence
  ENSG00000256443_3 (sequence is synthesized)
ttggcaaatcaggacaccatattctctggggctctaccccactcaaggacctgcaggaatctaactggacgcctgcacaagatgagatgcccagaagagcctccggtcttccaggtggcg

SEQ ID NO: 881451 - DNA, 120 bp, Artificial Sequence
  ENSG00000256443_4 (sequence is synthesized)
gtttgttttgggacagaggctgtgatccaggcgtggatcttggagagtcgagggaattgggtctgcgtggcttgaacaggactgagagcctgctgggcccctgcacgtccttgctcctcc

SEQ ID NO: 881452 - DNA, 120 bp, Artificial Sequence
  ENSG00000256443_5 (sequence is synthesized)
ccacctcagactgtcttatcacagctgtcaccctacttcctgttccagcagccattaaactgggccaggggcctgccaggaacccgggtaccatctcttccctgcctgctgccttctcaa

SEQ ID NO: 881453 - DNA, 120 bp, Artificial Sequence
  ENSG00000256443_6 (sequence is synthesized)
ctaactgggattcgtccagcatcatgcatgcaacagcatcctctgtccctgctctgtgccccaggacaagtctcatgtccccctagttgctggcaacctccagagctcacctcaagggtc

SEQ ID NO: 881454 - DNA, 120 bp, Artificial Sequence
  ENSG00000256443_7 (sequence is synthesized)
aatttaggctttgcaagaggcatgtgatcatcacatattctttttttctttaaaacaaccctctaaaaatgtaaaaaccactcttagctcgtgggccgtaatttgccccttgctttacaa

SEQ ID NO: 881455 - DNA, 120 bp, Artificial Sequence
  ENSG00000256443_8 (sequence is synthesized)
tttagctgccctgtttctgaggctctttacttgcccaaacgctggtggctccagtagagaggcaggtggcgagggttgtcccgacgccccatgatcccacccaccccttgcagggagggc

SEQ ID NO: 881456 - DNA, 120 bp, Artificial Sequence
  ENSG00000256443_9 (sequence is synthesized)
agcagccctctgcttgatggtcgtgactcccctaacattgccagcctctccctccactctccagcccgtgcccctcatcctaaccctcgcgtcctgcagagctggagagagtgacgaatc

SEQ ID NO: 881457 - DNA, 120 bp, Artificial Sequence
  ENSG00000256443_10 (sequence is synthesized)
gggaatttatgcagaggagctgttctggttttaagaagagaaaaaggaatatctgaaaaatgcattaactggggaaaaaacatgttgttttcactgagtttgccttcccccagcacaact

SEQ ID NO: 881458 - DNA, 120 bp, Artificial Sequence
  ENSG00000256443_11 (sequence is synthesized)
agctcccgagcagccaaatggaattttaccaactctgaaacagtaccggtgggcagaaaacaaagaaaaggaggattcgtcctgagggagggtatagagttgtttcccgaaagttagatc

SEQ ID NO: 881459 - DNA, 120 bp, Artificial Sequence
  ENSG00000256443_12 (sequence is synthesized)
ccagcacaagggtcagcctggagtaactgtgcccaggaccaaagacgcaaagacagggaggggcacagcagccacttagctccctccgttcactgagaccccagaggtaatgtcccattt

SEQ ID NO: 881460 - DNA, 120 bp, Artificial Sequence
  ENSG00000256443_13 (sequence is synthesized)
tccaagaccctcgtgccctcgcccctcacctcagaggctatttctcgcctgtttgttccctgtttgacaactgctctgagaagttagagcaagctcttcctctgtaaacctcgcctccct

SEQ ID NO: 881461 - DNA, 120 bp, Artificial Sequence
  ENSG00000256443_14 (sequence is synthesized)
tcacagtggttgaagtggtagacttcctgacccagcatcctctcccttccagaatattccgtcagccctactgtcttccctttggcccttcttgagacgagctttcctgcctggcctgtc

SEQ ID NO: 881462 - DNA, 120 bp, Artificial Sequence
  ENSG00000256442_0 (sequence is synthesized)
gcgggaggcgcgaggcgcggctgcgcccagcactggccccacctcccacgcgcccgcgggagatttgcttggggctggatcccccgcctaccgtttccccgcagccgccggcgcttctgg

SEQ ID NO: 881463 - DNA, 120 bp, Artificial Sequence
  ENSG00000256442_1 (sequence is synthesized)
ctggcgcttgtgacccgagcaggaagcccagagagaaaccagaaagacaggaaggggattcctggacttcctttccacatccggcaggaacgcgaccctcctccagctaggagcgcttgt

SEQ ID NO: 881464 - DNA, 120 bp, Artificial Sequence
  ENSG00000256442_2 (sequence is synthesized)
gcgcaccaagatgcctgcagcttcaagaagatgtatgggaacagacacagaaactttccctaccagataagcaggacaaagaaacacagactaagagttggcctgtgtggtcacggagtg

SEQ ID NO: 881465 - DNA, 120 bp, Artificial Sequence
  ENSG00000256442_3 (sequence is synthesized)
ggttaagagatgataaaaaaatctgctctgtacagatggcacacctggtcccaactaaaccctggggccctagaaagataagacatcccctcctcacaagcccctcctcaagagccccct

SEQ ID NO: 881466 - DNA, 120 bp, Artificial Sequence
  ENSG00000256442_4 (sequence is synthesized)
cctcaagagcccatttataaaaactctgacattcttaactacaacttggcaatcttctcaggatccctctctaacagagacctgttctttccttttgcctattaaactcctgctccaaac

SEQ ID NO: 881467 - DNA, 120 bp, Artificial Sequence
  ENSG00000256440_0 (sequence is synthesized)
agtggactcaaggacaatctcactttcacatccatctctttgtgataaaatgacaggcatttcaagagacaagaggcaggctgctgcccactcaaaagtacaattccacccatcaggcag

SEQ ID NO: 881468 - DNA, 120 bp, Artificial Sequence
  ENSG00000256440_1 (sequence is synthesized)
aggatcatagcaattacacacaacaacagcatggaaaagaagccagtgctgcagaggtgatctggatccaggaagaaagggaagatgccttcaatcaaaaatacattatatataatataa

SEQ ID NO: 881469 - DNA, 120 bp, Artificial Sequence
  ENSG00000256440_2 (sequence is synthesized)
attatacatattttatatctgtatatattatatatacatataaaaatatggggactgggcacagtggctcatgtctataatcccagcaccttgggaggctggggcaggaggatcacttga

SEQ ID NO: 881470 - DNA, 120 bp, Artificial Sequence
  ENSG00000256448_0 (sequence is synthesized)
cctctgcccagtcttcaacccccgcctttggagtccgtggaggaaaagagcagaaacaggagcccagagaccattccagactcaccaggtaaaaaggtaaggatgaagaagacagtggtc

SEQ ID NO: 881471 - DNA, 120 bp, Artificial Sequence
  ENSG00000256448_1 (sequence is synthesized)
cacaatccactggcccactgacttgtaggggaagtaaacaggagcccctgagatcatcttaattcagaaatcttcaaatgtttctactaaatgagattaaaaaaaataaaacaagaggct

SEQ ID NO: 881472 - DNA, 120 bp, Artificial Sequence
  ENSG00000256448_2 (sequence is synthesized)
cctctgcccagtcttcaacccccgcctttggagtccgtggaggaaaagagcagaaacaggagcccagagaccattccagactcaccagactgggatccccagggacaggacacttaggga

SEQ ID NO: 881473 - DNA, 120 bp, Artificial Sequence
  ENSG00000284830_0 (sequence is synthesized)
gtgcttccgttttccgttccgctggcctgtctcgcttcgcggccacctcttccccaacgctacccgctccgtaccctgactcgctgctcctctgtgctggcagagagcgcgcagaacgta

SEQ ID NO: 881474 - DNA, 120 bp, Artificial Sequence
  ENSG00000284830_1 (sequence is synthesized)
gctggacccaagggtttatttaccacattggctggtgtgtccatctgctgtgcaaccacatttatctccggtgagataaaccccatttatctcctagcaagtccctggcgcacagtgagc

SEQ ID NO: 881475 - DNA, 120 bp, Artificial Sequence
  ENSG00000284830_2 (sequence is synthesized)
tctgataaaagtacgttgaattggaacctggaactggactaacagctcccaagttcgtatctccgcctcagatctccttttaaactctagacgtgtgcatccatctgcctccatgcatcc

SEQ ID NO: 881476 - DNA, 120 bp, Artificial Sequence
  ENSG00000284830_3 (sequence is synthesized)
gcctccatgcatccgcctccgcatccgcctccatgcatccgcctccgcagcacctcccttgggatgcctaatagactctcaaatgttacatgccttctgtattgctccttcccccatcat

SEQ ID NO: 881477 - DNA, 120 bp, Artificial Sequence
  ENSG00000284830_4 (sequence is synthesized)
ttcatgcgtaggcagctagcagtctctgccacttttccttgctgtggtcttctgctcaaatatcagcttttcaaagaggtcttgaacaccctaagacagctctgtcatcctctctgctcc

SEQ ID NO: 881478 - DNA, 120 bp, Artificial Sequence
  ENSG00000284830_5 (sequence is synthesized)
ctggcctttcccagcactctcttgttttgctttattttttctttatgatacttatacctacctgaaattatatgtcttctgcctgtctcccacactctatgaggacaagaacctattctg

SEQ ID NO: 881479 - DNA, 120 bp, Artificial Sequence
  ENSG00000284830_6 (sequence is synthesized)
tcttgttctcctctgcatccctagtgggaaaaacaatctgacacataggaaatgttcaatatttatcaaatgattgagctcctataacaaactcttagtcatcatgccaaatttaaatat

SEQ ID NO: 881480 - DNA, 120 bp, Artificial Sequence
  ENSG00000284830_7 (sequence is synthesized)
cgggaggattgcttgaggccaggagttgccagcctgggcaacatgcagaaaccctgtctcaaattcttaaaaagtaaacaaatttttaaaaatacaaagaataccaaacttaaatatatt

SEQ ID NO: 881481 - DNA, 120 bp, Artificial Sequence
  ENSG00000284830_8 (sequence is synthesized)
tattctgcaaccaagcccaactttgtccatagattataatgctggtcattgtccctacccccttgacacacacacagtgatggtctagattccatatgatataggaggggctttgacatg

SEQ ID NO: 881482 - DNA, 120 bp, Artificial Sequence
  ENSG00000284830_9 (sequence is synthesized)
gtaatcccattggaaggtggtcctgaaggtttattttgcctggaaatgtacaaaacattgagaaaatgtcaactatccgtttgaaggaatggagactgatggtggagatggcactaaagg

SEQ ID NO: 881483 - DNA, 120 bp, Artificial Sequence
  ENSG00000284830_10 (sequence is synthesized)
tcccagccttcctcttagtgccctcacctcttttatctgcctaatccccagaccacaaacctgggaattattcttgactcctttgccactttctaacaatttaccaagcacaagtaattt

SEQ ID NO: 881484 - DNA, 120 bp, Artificial Sequence
  ENSG00000284830_11 (sequence is synthesized)
tgcctccaaatatttcacccattcttcttcagtctccgtagaatctgccctatattttagatccctttatcatcctaactcgcaaaaacctcctgaatggtttctctggccagagtttct

SEQ ID NO: 881485 - DNA, 120 bp, Artificial Sequence
  ENSG00000284830_12 (sequence is synthesized)
tctctatcccagccatgtaccccacaggtgctggagtgatctttcttaagtggatatcttaagctgtttgggtccagctccagatcctgctccttttgatcctgctccttttgataccct

SEQ ID NO: 881486 - DNA, 120 bp, Artificial Sequence
  ENSG00000284830_13 (sequence is synthesized)
tttttattccccaccccagggtcccacatcacactataaataattccagtctggctcttatgttgtatttgcttggttacttgtatgtgcctcacattaaataaactgtgagcttctcaa

SEQ ID NO: 881487 - DNA, 120 bp, Artificial Sequence
  ENSG00000284830_14 (sequence is synthesized)
tccaaccagacccaactagcccagatgcttaattctccatgacttgtaacacctcaatacctttgtatttgctgttccatctacctggagagcctttccagggagctagaggagggagag

SEQ ID NO: 881488 - DNA, 120 bp, Artificial Sequence
  ENSG00000284830_15 (sequence is synthesized)
attcctatgaactgaaaagggaggatactgggatgaggatgcttgtaatgtggtgcacactgattaccagagcacagctgagatactgttgggtcctgtctcctcccaaagcacacatca

SEQ ID NO: 881489 - DNA, 120 bp, Artificial Sequence
  ENSG00000284830_16 (sequence is synthesized)
catcccagggtgcacaccagtaaatgatcagattctggacatggggagccaaggacaggggaaggcagagagaggagcagaattgcaaccactgtcgtcatgaaggaagctaggtgagag

SEQ ID NO: 881490 - DNA, 120 bp, Artificial Sequence
  ENSG00000284830_17 (sequence is synthesized)
agctggcacaaggtggcaacatttgcatgaagaggacaaacaactggaaataccaccagggggcgtgtgtagctgtaacacaccagtcatgctctttccctacagttaccaggcggggtt

SEQ ID NO: 881491 - DNA, 120 bp, Artificial Sequence
  ENSG00000284830_18 (sequence is synthesized)
tggtcactatgcataacctgagaaagatagacaaacagcagacagatagataggttgggggtgcttagatagacaaatatcaccagcctcctaagctcatcctggtgttgtgattggcca

SEQ ID NO: 881492 - DNA, 120 bp, Artificial Sequence
  ENSG00000284830_19 (sequence is synthesized)
caccaaaacgtaacatctccagtctatctgatatcattgaacaggtctcctctaaggcaaggagttggattcccctagaacacctgccaaagtgcagtggaagggaaggaggtcttgcct

SEQ ID NO: 881493 - DNA, 120 bp, Artificial Sequence
  ENSG00000284830_20 (sequence is synthesized)
gggggcagtggtcactgggcctgggtttctgtgctgattctgcccttagcaacctgggtgacctagggcaggtcacttaacatttctgcgctacacttttctgacttgtaaaatcacatg

SEQ ID NO: 881494 - DNA, 120 bp, Artificial Sequence
  ENSG00000284830_21 (sequence is synthesized)
cttgggtggcagatgcagactgttagtaatttttaaactttagagatcacggaggagaaaactgagatccaaagaagttaaattacttgtccaaagccacttgatgtgggagtggaatga

SEQ ID NO: 881495 - DNA, 120 bp, Artificial Sequence
  ENSG00000284830_22 (sequence is synthesized)
ccgagaggatgtggattctggaaccagagccagttccacatgatggttccagcacacccctcacactgccctctggtgatctactgtctcctcatctcttcctcctctgcagaatggagg

SEQ ID NO: 881496 - DNA, 120 bp, Artificial Sequence
  ENSG00000284830_23 (sequence is synthesized)
tttggaagaataaatgagtacctgacacaaggaaagcctccaatatatgttagactaggcctatttttagtgatgaaccagaggctcatacccacaaatcttttcttccagtctttctgt

SEQ ID NO: 881497 - DNA, 120 bp, Artificial Sequence
  ENSG00000284830_24 (sequence is synthesized)
gaggccacatgccctgatgaaggtccttttcagctcccaaattctatgattctaagtcagaaagattaagatgcaagttatttccaaaaccctccaggcagaaacacaaaagactatttg

SEQ ID NO: 881498 - DNA, 120 bp, Artificial Sequence
  ENSG00000284830_25 (sequence is synthesized)
agagattcattattcactctctattgcctcagtcactttctatggatgatgattcatggagaataatcaacagcagagaagatctgttcaatgctaggagagaaggcagtaaagccgaaa

SEQ ID NO: 881499 - DNA, 120 bp, Artificial Sequence
  ENSG00000284830_26 (sequence is synthesized)
ctccttcgcgtgttcagttcctattctccagtatgcatcttcacttgttaagcggcggcagcatttcttggcctcgctgcctttcttctctgggaatttgaggtcttctcttggtataga

SEQ ID NO: 881500 - DNA, 120 bp, Artificial Sequence
  ENSG00000284830_27 (sequence is synthesized)
ctgttgctagtgcagtcactgcccacccggcaccactcctcaaaatgccagggagaaggtcctgcctctctggccaagcaaaagcccgcacagaagcagctgtcaccagtggcactggct

SEQ ID NO: 881501 - DNA, 120 bp, Artificial Sequence
  ENSG00000284830_28 (sequence is synthesized)
cttctcagggtgtccaggctgaaatgtttagcatgcccaaggttgatgtctaatcacagctacgagaattctctggctcctgaaaaacaacagaagagacttaagagccagtctggtgga

SEQ ID NO: 881502 - DNA, 120 bp, Artificial Sequence
  ENSG00000284830_29 (sequence is synthesized)
agcaaacatgcagacagccaaacctgagatgtgacctctttttctcctcaccccatggtctcaggaggagaagcaggtggcttttctttccctcttgctaatatgtctctccctggcaag

SEQ ID NO: 881503 - DNA, 120 bp, Artificial Sequence
  ENSG00000284830_30 (sequence is synthesized)
ctgccaaccactggtccttgcttacagctagctagtggagatggccaagtggtatgtgataaaatgagcctttgctctgagttccaggccatggtaaggttacagggcagccagcactgg

SEQ ID NO: 881504 - DNA, 120 bp, Artificial Sequence
  ENSG00000284830_31 (sequence is synthesized)
gcctctggagtatcagatgttacagaatgtcccaggagagtcctgggtatgagccattttctttcctggtacagtttgcatccaccatcattagtttgcacaaataccatatttccctta

SEQ ID NO: 881505 - DNA, 120 bp, Artificial Sequence
  ENSG00000284830_32 (sequence is synthesized)
agtttgcacaaataccatatttcccttaggtgtgccctggcattcttcacgtgttcttcgtagttcaaaaatatttgcttttcctggcccaacacggtggctcacgcctgtaatcccagc

SEQ ID NO: 881506 - DNA, 86 bp, Artificial Sequence
  ENSG00000284830_33 (sequence is synthesized)
accaacctgggcaacatggcaaaaccctgtctccacaaaaaaaaccatatatatatatagctttggcggcttaggtgggaggatca

SEQ ID NO: 881507 - DNA, 90 bp, Artificial Sequence
  ENSG00000284830_34 (sequence is synthesized)
catggtggcatgtgcctgtagtcccagctgctttggcggcttaggtgggaggatcacctgagccaagggagctcaagggtgccctggttg

SEQ ID NO: 881508 - DNA, 120 bp, Artificial Sequence
  ENSG00000246763_0 (sequence is synthesized)
agccaatcacatctgcggaaccgcgttccgagtcgtttgagggtgtctggtaaagcaagctcggggcggtgttggaaatctgaatgtcacccgcggtccggagcagataggatgggctgg

SEQ ID NO: 881509 - DNA, 120 bp, Artificial Sequence
  ENSG00000246763_1 (sequence is synthesized)
gaaggtacccgcgaactgccgccggaattcgctggcagctgtgcgaggctcagattatttaaattttccacaaatttctacggattaattcaatggcagctcactttctccttttatgat

SEQ ID NO: 881510 - DNA, 120 bp, Artificial Sequence
  ENSG00000246763_2 (sequence is synthesized)
cggatgggtccgaaagtgaggaaaaagacaattgtctacaaagaaagaggctgccaagtggagacagaaaagcagttatgagactgatgatagattccaatttgttatcgaaaggaagga

SEQ ID NO: 881511 - DNA, 120 bp, Artificial Sequence
  ENSG00000246763_3 (sequence is synthesized)
ggagacctgaacagtacatccggagaatccagcaaagcatactacggcatgaacgtgcaagtggacagaattaaaacacatgccagaaacactaatggattctaaacaagatgcagtttc

SEQ ID NO: 881512 - DNA, 120 bp, Artificial Sequence
  ENSG00000246763_4 (sequence is synthesized)
atttcctgagcctatacgtgatgtttttaactgttctccagttaatatgtctccatttccagaaatctaacaggagaatctctgactgcttaacagatcacctaagcttgcgatttgtgc

SEQ ID NO: 881513 - DNA, 120 bp, Artificial Sequence
  ENSG00000246763_5 (sequence is synthesized)
aatcctttctagagtaagggctccccggctgctccccggccactgtgtacccaaagcagcggctgaaatagcccggagtccaacagctcagcgtcaagcagctcgtggtttgtacttaca

SEQ ID NO: 881514 - DNA, 120 bp, Artificial Sequence
  ENSG00000246763_6 (sequence is synthesized)
tcattttttttttcagagcaagagtgaaagtttattaaaaagcgttagaacagtaaggaaaggaaaggagagaaaataaggaaagtacaacttggaagagggccaagcgggcgacttgag

SEQ ID NO: 881515 - DNA, 120 bp, Artificial Sequence
  ENSG00000246763_7 (sequence is synthesized)
ccaaagcttggcgtgagcaatgcactcgcggagggagagagcccggggcttgcggggggctcatcacccgctcgtagacaacgggcccccgcaatccctgcgggctccgccgctgctctc

SEQ ID NO: 881516 - DNA, 120 bp, Artificial Sequence
  ENSG00000246763_8 (sequence is synthesized)
accgctcaaaacggcaggtgcaaaaagcatttgggagccgcttgccagcgcgcggaggtaatgcgcttcctgtccatttatctcaggaaaccagtgcagccttcccttcgaaacaaaatt

SEQ ID NO: 881517 - DNA, 120 bp, Artificial Sequence
  ENSG00000246763_9 (sequence is synthesized)
aacctctcattagccagccactcgctcccaagaaggccttaaaagctttaccagctcgctaatgtatttaggcttttcttccaggcaaacgcagccgccggtcttgactgccatcgccca

SEQ ID NO: 881518 - DNA, 120 bp, Artificial Sequence
  ENSG00000246763_10 (sequence is synthesized)
aggggttcctctgggctctcccgcgagccaacagccgacctctctccagcctagtctgggaaactccagccaacccaggatcccattttgtagtcccgggcagacccgaaacccctgaaa

SEQ ID NO: 881519 - DNA, 120 bp, Artificial Sequence
  ENSG00000246763_11 (sequence is synthesized)
gaactccactccagaagacgccagaacaagttcccacgaatttcatgggcgcccttcacatgaaaacctcagctcccctatcctcaaggaacggggaagggcgccggggagggacttcgg

SEQ ID NO: 881520 - DNA, 120 bp, Artificial Sequence
  ENSG00000246763_12 (sequence is synthesized)
tggccagctgtccctgggtcgtgggcgctgtttgctctgcggagcgccagccctgcacacagcgggtgcgggaagcgttgatgggaggctggagggcggggtgagcgtaaactaggatct

SEQ ID NO: 881521 - DNA, 120 bp, Artificial Sequence
  ENSG00000246763_13 (sequence is synthesized)
agccggttccaggcgtggagaatcaaatgtggtcctagatctgtaagttgcgaaaaggggcttttgggagcgtcagagctttctcactccggtcccccgccgccttgaggctggcagatt

SEQ ID NO: 881522 - DNA, 120 bp, Artificial Sequence
  ENSG00000246763_14 (sequence is synthesized)
tataccccacaggtggatggagacctaaacaaaacagtcccggccgctgcctgccgctcgccccccacgtcccccgggcccaccgcaaacttcaacaaaataaacaactcaccacaggca

SEQ ID NO: 881523 - DNA, 120 bp, Artificial Sequence
  ENSG00000246763_15 (sequence is synthesized)
aggtgttctagtttgacatttcccttcctgaaagcggcaaggagaggtctaagagtgggcaaacttcaacgttcggttacagtgtaattaatgagagtggtgggtttttatgcagtgtaa

SEQ ID NO: 881524 - DNA, 120 bp, Artificial Sequence
  ENSG00000246763_16 (sequence is synthesized)
cttcatctctataagaaaggaaggaggagacctgaacagtacatccggagaatccagcaaagcatactacggcatgaacgtgcaagtggacagaattaaaacacatgccagaaacactaa

SEQ ID NO: 881525 - DNA, 120 bp, Artificial Sequence
  ENSG00000246763_17 (sequence is synthesized)
aattcgagttccctgtccatcgactccaagtcctctctcctgcgccgcatgctgcctcgcgctccctttccttccccctctacccccttccgcgatttactgtttcctcgcgcccaacag

SEQ ID NO: 881526 - DNA, 120 bp, Artificial Sequence
  ENSG00000284837_0 (sequence is synthesized)
tttccacactgtggaaggtttgttcttttgctctttgcaataactcttgctgctgctcactgtttgggtccacattgcttttatgagctgtaacactcgccgcgaaggtctacagcttca

SEQ ID NO: 881527 - DNA, 88 bp, Artificial Sequence
  ENSG00000284837_1 (sequence is synthesized)
ttatgagctgtaacactcgccgcgaaggtctacagcttcagtcctgaagccggcgagaccaccaacccaccaggaggaacaaacaact

SEQ ID NO: 881528 - DNA, 79 bp, Artificial Sequence
  ENSG00000284837_2 (sequence is synthesized)
cctgaagccagcgagaccacgaacccatccaacactcaccgcgaaggtccgtagcttcactcctgagccagcgagacca

SEQ ID NO: 881529 - DNA, 78 bp, Artificial Sequence
  ENSG00000284837_3 (sequence is synthesized)
ggtccacggcttcattctttaagtcagtgagactgagaacccgccaattccggacacacagctacagccaagcctctt

SEQ ID NO: 881530 - DNA, 120 bp, Artificial Sequence
  ENSG00000284837_4 (sequence is synthesized)
acccgccaattccggacacacagctacagccaagcctctttgcttctctgggccagcctctctggagctgaatcgtggctggctggatttgaggagcctgcatgggcgcactctctcttt

SEQ ID NO: 881531 - DNA, 120 bp, Artificial Sequence
  ENSG00000284837_5 (sequence is synthesized)
ctgaatcccagctagggctctcctggctgtaattactaagactcagctgctgggaatttccacgcctcctacctctctacagggcagtccctccatattaggaaacccactggcacgctc

SEQ ID NO: 881532 - DNA, 120 bp, Artificial Sequence
  ENSG00000284837_6 (sequence is synthesized)
cgccgttatcttcgcaagacttccgttgttgcctcaagttgcagattgccttttaacagagaagaaagtgacaggaatgtgctggcactgatgacacagtaatgaccaaggtcttcagtg

SEQ ID NO: 881533 - DNA, 120 bp, Artificial Sequence
  ENSG00000284837_7 (sequence is synthesized)
atcaccctgaagcaacacccacaagcagacaagctctgcccagctacattgagatcccagaaccagagccactagcaatctcaccctaagaggaagagaaggagagccaggcatggctgt

SEQ ID NO: 881534 - DNA, 120 bp, Artificial Sequence
  ENSG00000284837_8 (sequence is synthesized)
ctgcagtgtgcctctcacggatacttcttttacctggcggacagcccagcgcctagttgtctgacccgtgatcaagatgtccttcacacggaaaacttgtttattctgacaaatgccttg

SEQ ID NO: 881535 - DNA, 120 bp, Artificial Sequence
  ENSG00000284837_9 (sequence is synthesized)
gtggttgctgtgtccagtgaatgcctgcctgaccatcgctcggagctgggagcttgtgttatccactgcgtcccggggaaaacctgctggggcagcccccggttcttcctttcttctctg

SEQ ID NO: 881536 - DNA, 120 bp, Artificial Sequence
  ENSG00000284837_10 (sequence is synthesized)
caactggggttctctgtgttcagggattacccaaaccacggctttctttggagaccagtgatggcaaagcgttctcttctgctcctgccaagtcgccctcactcagctcaaggcctctgg

SEQ ID NO: 881537 - DNA, 120 bp, Artificial Sequence
  ENSG00000284837_11 (sequence is synthesized)
cattccttggagacttctgctcactgctgttggaggaagatgctgattcaggccagattccatcttggggtgcgtgcccttggtcttcctctgccccacacgctccttccgcagctctgt

SEQ ID NO: 881538 - DNA, 120 bp, Artificial Sequence
  ENSG00000284837_12 (sequence is synthesized)
gcatggttgctcctgcctgtcattcaggctttggctcagacagcacttactcaagagaacttttttggtagacgcatagcttttaaattttttttaaattttttaattttttaaacgtag

SEQ ID NO: 881539 - DNA, 120 bp, Artificial Sequence
  ENSG00000284837_13 (sequence is synthesized)
tattttgattcaggggatacatgtgcatgttcgtcacagggtatattgtgtgatgctgaggttttggcttctattgatcctgtcacccaaagagtgaacatagtccccagcaggaaattt

SEQ ID NO: 881540 - DNA, 120 bp, Artificial Sequence
  ENSG00000284837_14 (sequence is synthesized)
tttaacccttgcccccatccctccctctccccttttggagtctcctgtatctgttattcccatctttatgtcatgtgtactcaatgtttagctcccaattataagtgagaatttgtggga

SEQ ID NO: 881541 - DNA, 120 bp, Artificial Sequence
  ENSG00000284839_0 (sequence is synthesized)
cgccaacttcggcagctcttctcgatgtctcgccgcgggctgtgcctcacaggctacgggaggggagagtgtctccccacgccggggtcccggcctctgggttttagggagcgcgaatgg

SEQ ID NO: 881542 - DNA, 120 bp, Artificial Sequence
  ENSG00000284839_1 (sequence is synthesized)
gtctccgacagcaacgggagcagccggtggcgcctcaggctgcggtggcaacgagcccgactgcactacggctttgcgggaccgcgccagcgcggaggagaccgagcccatctcagcggg

SEQ ID NO: 881543 - DNA, 120 bp, Artificial Sequence
  ENSG00000284839_2 (sequence is synthesized)
ctgcactgaggagcattggaaagatctgacctacctgccaacatcctaccagaacctgaaagtcaccaattgggatttatgtcttcggatcctgaagttttaaccactgacaatgttgaa

SEQ ID NO: 881544 - DNA, 120 bp, Artificial Sequence
  ENSG00000284839_3 (sequence is synthesized)
ttttacctaagccctgtgcttctggaaaacagggaaggtcaagacatcccctactgttttaatcaattcaggctgctatagcaaaaataccagagactgggtggcttaaacaacaaacat

SEQ ID NO: 881545 - DNA, 120 bp, Artificial Sequence
  ENSG00000284839_4 (sequence is synthesized)
ttatttctcacagttctggaggctggaggtctgagatcagggtgccagcatggctgggttctggtgagggacctcttcctgattacatcttcacacggcctttccctggcgtgtgcacat

SEQ ID NO: 881546 - DNA, 120 bp, Artificial Sequence
  ENSG00000262619_0 (sequence is synthesized)
aagcaattctcctgtctcagcctcctaaatagttggaattacaggcaagcaccaccacgctcagctacaggaatttagccaattcagaggaaatcttccccataattatggaactttctt

SEQ ID NO: 881547 - DNA, 120 bp, Artificial Sequence
  ENSG00000262619_1 (sequence is synthesized)
actttcttacagattttaccaagtctggtcaacccaataagaaaaagactgaaataacaacaacaacttcaacaaataaaaaaaaacagttaagctaaataaacagatgattgcagaatt

SEQ ID NO: 881548 - DNA, 120 bp, Artificial Sequence
  ENSG00000262619_2 (sequence is synthesized)
tatgtgattactgggtactctaatggtaaggagaaattaagaccagctagttgttaatcttaacttttagtcattaaggagaatttccaagacaaaactgcaatccagctgcttacctag

SEQ ID NO: 881549 - DNA, 120 bp, Artificial Sequence
  ENSG00000262619_3 (sequence is synthesized)
gaatacggcttaggctgaaaacttctatcgtcttagaaatgggaataaacctcacactcaccgtccctgttggaagcaagctgaaactccaaaaaaaaagttgcctgttgtccatcatca

SEQ ID NO: 881550 - DNA, 120 bp, Artificial Sequence
  ENSG00000262619_4 (sequence is synthesized)
tggtgaagcggcgtcgttgtctgggttctgaaggctgggaagtccaagattaaggcgtcaacaggtcttgtgtctgctgagggctgtctccctgatttgcagatgtctgctttcttgctg

SEQ ID NO: 881551 - DNA, 120 bp, Artificial Sequence
  ENSG00000262619_5 (sequence is synthesized)
ttttataaggacactaaccccattcatgagggtcccaccctcatgacctcgcctaaacctataacctccaaggactccatttccaaataccagcaaccacatgtgtgagcttagaagagg

SEQ ID NO: 881552 - DNA, 120 bp, Artificial Sequence
  ENSG00000262619_6 (sequence is synthesized)
gtgagcttagaagaggatccttccccaggtgagccttgagatgaccctggcctgtgacttgatggcagcttttgagagactgagccagaggcctccagtctccctctccctctctttcca

SEQ ID NO: 881553 - DNA, 61 bp, Artificial Sequence
  ENSG00000262619_7 (sequence is synthesized)
gcgccggcacagtcgccagatccagttccaagtgccgaaccgaacgcggagccaggagatg

SEQ ID NO: 881554 - DNA, 70 bp, Artificial Sequence
  ENSG00000262619_8 (sequence is synthesized)
ggaggagaccctctgcccggcagccgccccctctgagaagtaaggagcccctccgtccggcagccacccc

SEQ ID NO: 881555 - DNA, 120 bp, Artificial Sequence
  ENSG00000262619_9 (sequence is synthesized)
agtactaaatcaggatcaggacaaccatttgaactgagtaaactaacatatctacatccacatctgtgggtctcctttgcttctgggctactcactggcaaaagtcctgagcggctctca

SEQ ID NO: 881556 - DNA, 120 bp, Artificial Sequence
  ENSG00000262619_10 (sequence is synthesized)
caatatctgcttttccatcttccggcaatagcaccttcactgccaaatggcaatttaaaacttgatcatctttgtcattactatttgcaaactctggtgagcattttgaacaatctaggc

SEQ ID NO: 881557 - DNA, 120 bp, Artificial Sequence
  ENSG00000262619_11 (sequence is synthesized)
ccagaagttcttgctgttgttttaaaattccatccatcaatctggaattatttcttttgaaaataccttggtggtcgtagacgctaatgtaggagatgcccacggccatacaccacacca

SEQ ID NO: 881558 - DNA, 120 bp, Artificial Sequence
  ENSG00000262619_12 (sequence is synthesized)
cgaggctctcgatgtccgagaagctgggttcctgctccacctcggtgatcaccaggcccatgtgcacaggcagcttctccagggaagggccgtccgcgcgccagcgcacctggtggtggg

SEQ ID NO: 881559 - DNA, 120 bp, Artificial Sequence
  ENSG00000262619_13 (sequence is synthesized)
tggtgaagcggcgtcgttgtctgggaacccaattggagacgttggatattttatcaagtctttgactggaatgacattttttcagaaataaccagactgctttgaggaattaaaattgac

SEQ ID NO: 881560 - DNA, 120 bp, Artificial Sequence
  ENSG00000262619_14 (sequence is synthesized)
atcttgtggatattgatatccccagttttattgtggaatagataactgccacacagctcctgacaactggcatcttgacacatgttctgtgctccaggtcccagtaactgtgcccatcca

SEQ ID NO: 881561 - DNA, 120 bp, Artificial Sequence
  ENSG00000262619_15 (sequence is synthesized)
ttgttaccacaggtcacagtggccctggccctggggcattatactctctcttggtgtattagtccattcttaggctgctaataaagatatatctgagactgggtaatgtataaagaaaaa

SEQ ID NO: 881562 - DNA, 64 bp, Artificial Sequence
  ENSG00000262619_16 (sequence is synthesized)
cttaaatagttggaattacaggcaagcaccaccacgctcaggtaatttttgtatttttagtaga

SEQ ID NO: 881563 - DNA, 120 bp, Artificial Sequence
  ENSG00000262619_17 (sequence is synthesized)
gggttttgccatgttggccagggtggtcttgaattcctggccttaagtgatccgccagccttggcctccaaaagggctgggattacaggcacgagccaccttgcctggctccaatttctt

SEQ ID NO: 881564 - DNA, 120 bp, Artificial Sequence
  ENSG00000262619_18 (sequence is synthesized)
caccttgcctggctccaatttcttgataatttgtttcattaccctaggcaattgtcaggtagatagccctaaatttgtataccgaaggaacaactctcaggtgaaaatcagcaaaattta

SEQ ID NO: 881565 - DNA, 120 bp, Artificial Sequence
  ENSG00000262619_19 (sequence is synthesized)
cttctcaaaggaaagagagagagagaatctgttgtgttaacagggtgattaaaaaatggataccaagtcaaacataaaattacagaaatctaccacaggattgtataaagagaccaatca

SEQ ID NO: 881566 - DNA, 120 bp, Artificial Sequence
  ENSG00000262619_20 (sequence is synthesized)
cacttagatagttttaaacgtagtctctgttttaactggatctctgagctctgagcacagcccacattcaatcctgggtctccaaaaaggagagagaaatcatgggactaggccacataa

SEQ ID NO: 881567 - DNA, 120 bp, Artificial Sequence
  ENSG00000262619_21 (sequence is synthesized)
tgcttttatggtgttactttgttacaaagatgttgcttgagtgtctaagcaccctttcttattctaaactcccaagagtagcccctgtaataataactatttcagttaaaaaaaatcaga

SEQ ID NO: 881568 - DNA, 120 bp, Artificial Sequence
  ENSG00000262619_22 (sequence is synthesized)
aaacaaaatatagaagcaaggagtttaagatctgagaggaacttgtttatactcttagggttccataaggaaaaacagaggttttgcccccagaaggagtctggcatcttctctgttttc

SEQ ID NO: 881569 - DNA, 120 bp, Artificial Sequence
  ENSG00000262619_23 (sequence is synthesized)
tttaaggaatcccagctccaatttcttgataatttgtctcattaccattgttaaaattatttccagtgcctcatgcagcagagggtgggaagagaaaggagagacaggcagaagtaaata

SEQ ID NO: 881570 - DNA, 120 bp, Artificial Sequence
  ENSG00000262619_24 (sequence is synthesized)
agtaaatagaaaaagcagaattcagttgactgagaagaaaaaaacttttttacaaaaacacgttcctagaagacaaaaaaacataaagtccttttacatacacacacacacacacacaca

SEQ ID NO: 881571 - DNA, 120 bp, Artificial Sequence
  ENSG00000262619_25 (sequence is synthesized)
cacacggattgcggatactatcttttaattaagctgccttttaactgttgaggtcttaaaaaatccttttaaatattattaccatattttagctgggaaaagctgctgatatttcaaagg

SEQ ID NO: 881572 - DNA, 120 bp, Artificial Sequence
  ENSG00000262619_26 (sequence is synthesized)
taaaataaatctcaaaccagaaaggacttgattcataaccaaccaacccaggctgtcatgctaaaaaaaagggcagaatctttgctgctgaactactgcatagggtgactaccattgctc

SEQ ID NO: 881573 - DNA, 120 bp, Artificial Sequence
  ENSG00000262619_27 (sequence is synthesized)
ctttagtttagtttggctagcagaaggtggtcttgccatgtaaataaagcctctcaggtaatcaaaatgtttctttttttacttttgctggtgtttttttcttttcttttttttttcagc

SEQ ID NO: 881574 - DNA, 120 bp, Artificial Sequence
  ENSG00000262619_28 (sequence is synthesized)
tatggctggggagacctcacaatcatggaggaaggtgaaggaggatcaaaggcacatcttacatggtggcaagacagagagcatgtgcaggggaattgccctttataaaaccatcagatc

SEQ ID NO: 881575 - DNA, 87 bp, Artificial Sequence
  ENSG00000262619_29 (sequence is synthesized)
cactgaagcaattcaagatgagattttgggggaagggcatagccaaaccatatcattcttccctgggcccctcccaaatgtcatgtc

SEQ ID NO: 881576 - DNA, 120 bp, Artificial Sequence
  ENSG00000262619_30 (sequence is synthesized)
ccatatcattcttccctgggcccctcccaaatgtcatgtcctcacatttcaaaatacaatcatgccttcccaacagtcctccaatgtcttaactcatttcaacattaacccaaaagtcca

SEQ ID NO: 881577 - DNA, 90 bp, Artificial Sequence
  ENSG00000262619_31 (sequence is synthesized)
ctatgagtctatatacaatgggggtacaggcattgaataaatattcccattccaaataagagaaattggccaaaacaaaggggctccagg

SEQ ID NO: 881578 - DNA, 120 bp, Artificial Sequence
  ENSG00000262619_32 (sequence is synthesized)
atatacaatgggggtacaggcattgaataaatattcccattccaaataagagaaattggccaaaacaaaggggctccaggccccatgcaagtctaaaatccagcagggcagtcaaatctt

SEQ ID NO: 881579 - DNA, 120 bp, Artificial Sequence
  ENSG00000262619_33 (sequence is synthesized)
caagaggtgggttcccatggtcttgggtagctccatccttgtgactttgcagggcacagctcccctcccagctgctttcgcgggctggcattgagtggctgtggcttttccaggttcatg

SEQ ID NO: 881580 - DNA, 76 bp, Artificial Sequence
  ENSG00000262619_34 (sequence is synthesized)
ctcccagctgctttcgcgggctggcattgagtggctgtggcttttccaggttcatggtgcaaactgtcagtggatc

SEQ ID NO: 881581 - DNA, 71 bp, Artificial Sequence
  ENSG00000262619_35 (sequence is synthesized)
aatggagactctgtataggggcttggctctgcccctgcagcacacctctgtctggacatccaggcatttcc

SEQ ID NO: 881582 - DNA, 120 bp, Artificial Sequence
  ENSG00000262619_36 (sequence is synthesized)
aggtttccaaacttcaattcttgactgctatgcacctacaggctcaacacaccatgtggaagctgccaaagcttagggcttgcaccctctgaatccacggcctgggctgtaccttggccc

SEQ ID NO: 881583 - DNA, 120 bp, Artificial Sequence
  ENSG00000262619_37 (sequence is synthesized)
agcagctgggatgcagggcaccaagtctaaaggctgcacacagcaggcgggccctggacccagcccaggaaaccattttccctcccaggcctctgggcctgtgatggtaggggctgttgc

SEQ ID NO: 881584 - DNA, 120 bp, Artificial Sequence
  ENSG00000262619_38 (sequence is synthesized)
cctcccaggcctctgggcctgtgatggtaggggctgttgcaaaggtctctgacttgccctggaaatattttccccattgtcttggtgattagcatttggctccttgttacttatgcaaat

SEQ ID NO: 881585 - DNA, 120 bp, Artificial Sequence
  ENSG00000262619_39 (sequence is synthesized)
ctcagaaaatgggttttgcttttgtgctgcattgtcaggctgcaaatttttcaaacttttaagctctgcttcatcttgaacactttgccactttgaaatttcttctaccagatactttaa

SEQ ID NO: 881586 - DNA, 66 bp, Artificial Sequence
  ENSG00000262619_40 (sequence is synthesized)
tgagaccacctcagcctggactttattgtgcatatcactatcaacattttggtcaaagccattcaa

SEQ ID NO: 881587 - DNA, 120 bp, Artificial Sequence
  ENSG00000262619_41 (sequence is synthesized)
tccaaactattccaccctctgcctgttacctagttccaaattcacttccacattttgggtatctttacagcggcaccacactctactggtaccagtttactatattagttcattctcaca

SEQ ID NO: 881588 - DNA, 120 bp, Artificial Sequence
  ENSG00000262619_42 (sequence is synthesized)
ttataaagaaaaagaggtttaatggaatcacagttccacatggcgggggaagcctcataatcatggaggaaggtgaaggaggaacaaaggtatgtcttacacggcggcaggcaagagacc

SEQ ID NO: 881589 - DNA, 120 bp, Artificial Sequence
  ENSG00000262619_43 (sequence is synthesized)
ggtatgtcttacacggcggcaggcaagagaccatgtgtaggggaactgccctttataaaaccatccaatctagtgagacattcactatcatgagaacgacatgggaaaaacctgccccca

SEQ ID NO: 881590 - DNA, 120 bp, Artificial Sequence
  ENSG00000262619_44 (sequence is synthesized)
tgattcagatacctcccactgggtccctcccatgacacacagggattatgagagctacaatgcaagataagatttgggtgaggacacagccgaaccatatcacttgggaattccctgcat

SEQ ID NO: 881591 - DNA, 120 bp, Artificial Sequence
  ENSG00000262619_45 (sequence is synthesized)
cctacccagacctttgtaagctggtctcagcctgcccaatttgaatgtgctggttcttccagatccctgatgcataccattgtcttggccaggcccatcacataatgattttgaatcttt

SEQ ID NO: 881592 - DNA, 120 bp, Artificial Sequence
  ENSG00000262619_46 (sequence is synthesized)
tgacagtattcaccatataatatggctacttgaagtaaatgttttctaacctgtcatttaaagtgatttatgtatcatctatatatctacattgtaagttaaaaaaaatcaactggatta

SEQ ID NO: 881593 - DNA, 120 bp, Artificial Sequence
  ENSG00000262619_47 (sequence is synthesized)
ataggaaagtaaatgtcaaaataagtgcaaaggcaggttaggtccaaggttttttaagtccagcagttcagtaaggctaaggccctctttcttctctgccaaactcaatgtgtgggcttg

SEQ ID NO: 881594 - DNA, 120 bp, Artificial Sequence
  ENSG00000262619_48 (sequence is synthesized)
atcttctagatcactctctaaaggtggcatggtccttgcagttgatttagatatattttcatatcctccaggctaggaagcattgataggcaaaaaataaaataatgtaccttcttaaga

SEQ ID NO: 881595 - DNA, 120 bp, Artificial Sequence
  ENSG00000283828_0 (sequence is synthesized)
ctgccctccgcgcagcatggagtccctgcgtcccggctccacggtgcgggagtcctccgtggtggctgaattcgcctttcaggccctatgttcaggatttgtgatctgggttttaaaaac

SEQ ID NO: 881596 - DNA, 120 bp, Artificial Sequence
  ENSG00000283828_1 (sequence is synthesized)
attttttagaagtcattggtaattaaaaacaataagttttttattgtggtaaaatagacatacagtttaccgcaggaatctttttttaagcgtacagttggctgaccctgagtgaattcg

SEQ ID NO: 881597 - DNA, 120 bp, Artificial Sequence
  ENSG00000283828_2 (sequence is synthesized)
ctgttgataatctgcttctccctgagctgctgtcgcccacactcgccgctggccgtgcttgtttttctcctggaactggggccggtgtccctgttgaccttgtcccgggtagctgagccc

SEQ ID NO: 881598 - DNA, 120 bp, Artificial Sequence
  ENSG00000283828_3 (sequence is synthesized)
aggggactctccttcctagggttaccgctcagtatcagcacagccacaacgtccagccagggagggcatccgaggccctcagcacccaccccgggggtccggcccgcgtcaggctgcgag

SEQ ID NO: 881599 - DNA, 120 bp, Artificial Sequence
  ENSG00000283828_4 (sequence is synthesized)
ttcccgagtccctggacccagctgtgcctgctggggtcagcgcagtctgtgagcctcgacccccagctcccagcaaggcctcccagcaaggcctgtcggaacccagcggagaccggcggc

SEQ ID NO: 881600 - DNA, 120 bp, Artificial Sequence
  ENSG00000283828_5 (sequence is synthesized)
tggggcttgtcctcgagcgggggcgcaggacacggggcgcggggctcctgcccttgcagcgtcctgtcaggatggacgacccaagccagacggcgctccctcccgccacacctggccgta

SEQ ID NO: 881601 - DNA, 120 bp, Artificial Sequence
  ENSG00000283828_6 (sequence is synthesized)
ctggcctccagccatgccggtgctgccgaggcccccgtgtgggacaggcccccgctcccgcccgtcctcctggctgcatctgcacccgcccgtacccgcaccgggcctcactggcccctt

SEQ ID NO: 881602 - DNA, 120 bp, Artificial Sequence
  ENSG00000283828_7 (sequence is synthesized)
ctcagaccggcacagccagaaacgggaatccaagtccagggtttacctctggggccctggggaccacgtggctgcctaggaaacgcagcccaacagcaggctagctccgaggcagaagcc

SEQ ID NO: 881603 - DNA, 120 bp, Artificial Sequence
  ENSG00000283828_8 (sequence is synthesized)
ttttctccaggaagggccggcgaggagcccgacagccagctccacggagaaggcctcagagcgggcaggccaggaatgccctcccgcccaccctgggagaccggcccctcctcagaccgt

SEQ ID NO: 881604 - DNA, 120 bp, Artificial Sequence
  ENSG00000283828_9 (sequence is synthesized)
catgacttttttggggagtttttgtactagaactgttgaactttgcttagggacattacacaagacgcaaactgcaggagacgtttgggagacacacggcaggccttgtccggaatcttt

SEQ ID NO: 881605 - DNA, 120 bp, Artificial Sequence
  ENSG00000283828_10 (sequence is synthesized)
tctgtttaccgaaagttcatttgattttcatggccagttaacttgaggcctagggacagtgccggattgcagcagggcaaggactaaacatctggaccctaggagaggaggagccccccg

SEQ ID NO: 881606 - DNA, 120 bp, Artificial Sequence
  ENSG00000283828_11 (sequence is synthesized)
aagccccgcctgccacgccaccaccactcagcacctgaggagctccagaagcttccagaagctcctggccagcttcactccagagactgatttcagtggccaggctgtggcctggatgca

SEQ ID NO: 881607 - DNA, 120 bp, Artificial Sequence
  ENSG00000283828_12 (sequence is synthesized)
ggcatgctaaagcccacagggggttctaagggtggccacggtgggggccaactgtgccaggtcaggtcgctgcctggtgagcaggtcacctgcccgggggatgcctgtggcccccaccac

SEQ ID NO: 881608 - DNA, 120 bp, Artificial Sequence
  ENSG00000283828_13 (sequence is synthesized)
acaagcctgagctggggtggggcctggcaccgtgcagttgaagagcacctggttgtttaagttaatgtaaaatgtccgccccaatgagaagctttctggacgtttccctcccagggagtc

SEQ ID NO: 881609 - DNA, 120 bp, Artificial Sequence
  ENSG00000283828_14 (sequence is synthesized)
tgcgggtcataggcagtcaccggggaggtgtccaattcccaagaggaacaagagagaccaggccaagtggggggtcttggggaggctgcgccaacgtgtgggcccctcccgacgccacgg

SEQ ID NO: 881610 - DNA, 120 bp, Artificial Sequence
  ENSG00000283828_15 (sequence is synthesized)
ggcctgcacaggctcccatctgcctctgggcgtgacccagatgcaggaaggtatctggggaaaggaatgcccatggcagtcatggcacagtatcatccctggagcctccatcctgccccc

SEQ ID NO: 881611 - DNA, 120 bp, Artificial Sequence
  ENSG00000283828_16 (sequence is synthesized)
acagactagaatattccctggaggaatccccagcctagctgggaagggcggaagctggtgttccagacagacacttcaccttcccacctcaacagggcgggagaagccagggcaaggcgg

SEQ ID NO: 881612 - DNA, 120 bp, Artificial Sequence
  ENSG00000283828_17 (sequence is synthesized)
caatcgagagacaaaccaggccttgagtgggatctcactttaatggagaggacgttatgacctccggggcatggctcttggccttgggcaagcccctggttttcatggacctgtcgatcc

SEQ ID NO: 881613 - DNA, 63 bp, Artificial Sequence
  ENSG00000254971_0 (sequence is synthesized)
cacctgaggttggaaaaattagccagtcgtggtggcacatgcctgtaatctcagctgcttggg

SEQ ID NO: 881614 - DNA, 120 bp, Artificial Sequence
  ENSG00000254971_1 (sequence is synthesized)
tgaggcaggagaatcacttgaagccgaaaaacagaggttgcagtgagcccagattgccccactgcactctaacccgggcgacaagagtgaaactctgtctcaattaaaaaaaaaaaaaaa

SEQ ID NO: 881615 - DNA, 120 bp, Artificial Sequence
  ENSG00000254971_2 (sequence is synthesized)
aaaaaaaagaaataaaagaaagaaagcaagaaagcattaattcccatgcactggtcctggagaatctataattcagtcttttatcacaggttcacattcccttataaaaagaaatacaga

SEQ ID NO: 881616 - DNA, 120 bp, Artificial Sequence
  ENSG00000254971_3 (sequence is synthesized)
aagaaatacagaatcacatatactgcaatacttccagaaataaatcatccactgagtcttaaaagtaaagaactctgtgttcttgctctggtgtctacataaccgggatcttataagtaa

SEQ ID NO: 881617 - DNA, 84 bp, Artificial Sequence
  ENSG00000254973_0 (sequence is synthesized)
gcgccgcctcctcctgctcgcgcagccgccgcgcggcctcctgctcccggcgcaccggagccagagatgaaacactccagtgat

SEQ ID NO: 881618 - DNA, 120 bp, Artificial Sequence
  ENSG00000254973_1 (sequence is synthesized)
gctgggattacaggcgtgagccaccgtgcaagccctacaattttaaatacttaaatgtggttaatgaactcaaatctgcatgtctggtgaaaatgccaaggttagtgctacccccaaaag

SEQ ID NO: 881619 - DNA, 120 bp, Artificial Sequence
  ENSG00000254973_2 (sequence is synthesized)
caaggttagtgctacccccaaaagatgtgaacgatgcagggctggtgatccccagcacagcccccacctgactccctagctgggcgaggcgcaaggcgggcatccttggagaacgcctgt

SEQ ID NO: 881620 - DNA, 120 bp, Artificial Sequence
  ENSG00000254973_3 (sequence is synthesized)
ggattttcacaaagctcagcaggtggctattccaactgcacctgctgctactgatgtgacatattttccagagcaaattgacatgacccctggcacctggagtgagccattggcctggaa

SEQ ID NO: 881621 - DNA, 120 bp, Artificial Sequence
  ENSG00000254973_4 (sequence is synthesized)
aatgcttttctccctataatcattcacaaggatggggctgctgggcatgtggggcccttgcccagatatcctcatccatgtcctcagcagcaccttcaggcaggaagagcgggagtcaga

SEQ ID NO: 881622 - DNA, 120 bp, Artificial Sequence
  ENSG00000254973_5 (sequence is synthesized)
cataggactctcctccaggttcaagaccacgaccagcccagcccgtgcaaagtgcaggttaacctgggcagtagcagtcacccgtggaatcagtgccagaactctgtgcaagggaagctc

SEQ ID NO: 881623 - DNA, 120 bp, Artificial Sequence
  ENSG00000254973_6 (sequence is synthesized)
ctcatcgtggatgaaccaggctatgtttgcgagaggagggatttgctggtgcagggctgtaacgtccacagccctagtgtgaagcagtgctgctgtgacggctgctggccatgtctcttg

SEQ ID NO: 881624 - DNA, 120 bp, Artificial Sequence
  ENSG00000254973_7 (sequence is synthesized)
tcatggcagtcgaagatcagtattgagtcatgtccggccaaatgcaggacctcatcccagggcctcatcccaccgattgggaccccattgcgaagaattgctatggagaaagcccacccg

SEQ ID NO: 881625 - DNA, 120 bp, Artificial Sequence
  ENSG00000254973_8 (sequence is synthesized)
agctcttcccggcatggcgggtgcagcggatgctctccagcttgggcgaggagctcatctcctggggcccagctgcagcactcaggccaggccatgggaagaagacaaaggcagcgcagg

SEQ ID NO: 881626 - DNA, 120 bp, Artificial Sequence
  ENSG00000254973_9 (sequence is synthesized)
gaaaccttggctttgaccacctctcgtgttgtcatctttggcctctgtgaagcagcttggaaattccagctggtcccatcggggaaggaagaaaccacagcgaggctccggcagtgctgg

SEQ ID NO: 881627 - DNA, 120 bp, Artificial Sequence
  ENSG00000254973_10 (sequence is synthesized)
ttcttggaggactggacgctgggacctgcacagggacctgtgactcaggcttgtcaggggccaggtgtcactgccagttttgatccaggccccttcactgtaaaattatttattggattc

SEQ ID NO: 881628 - DNA, 120 bp, Artificial Sequence
  ENSG00000254973_11 (sequence is synthesized)
ctttggagtagtgggaaaattataatgttttatgtaggagaatgccgtgtcattctagctgaaaatgttcaaggaaagtatttttgttgttctcgtgttctcaagtttcatgagttaaat

SEQ ID NO: 881629 - DNA, 72 bp, Artificial Sequence
  ENSG00000254973_12 (sequence is synthesized)
tttttgttgttctcgtgttctcaagtttcatgagttaaatcatcccttcacccagataaaatgtttcatctt

SEQ ID NO: 881630 - DNA, 120 bp, Artificial Sequence
  ENSG00000254972_0 (sequence is synthesized)
ctcagcagatgtcagtgtcatgctccctgtacagcctacaaaactgtgaggattcaggagataattctgcgaacagaaattcctgagaactgagatgggggaaatcgctggtattagaag

SEQ ID NO: 881631 - DNA, 120 bp, Artificial Sequence
  ENSG00000254972_1 (sequence is synthesized)
caggatgaatggataaatacatggataggcactttgaactacagaagagtttaaatactttgtgtttttcttagtcaaacatgtgcaattaagcatgtgataaattatatgatgaccaca

SEQ ID NO: 881632 - DNA, 120 bp, Artificial Sequence
  ENSG00000254975_0 (sequence is synthesized)
gccgggtgctggcatagaggaggagaggtggccataaatttcagagaatcttcccagcctcctctaatcccatgccaagaaatatgacagattctaggcccagagaggccaagaagatga

SEQ ID NO: 881633 - DNA, 120 bp, Artificial Sequence
  ENSG00000254975_1 (sequence is synthesized)
cgggttctgagacaggaaccctgccacatcatgtaaacaatcccggactagcctgctggaggaagatagactgtggaacagaattgagttccacaaggctccagagacatgagagaaccc

SEQ ID NO: 881634 - DNA, 120 bp, Artificial Sequence
  ENSG00000254975_2 (sequence is synthesized)
aactgagatcagcagagcagctacctcacccatggctgaccacagatgtatgagtgtgtccagaagaactttctggtggccccataggtttgtgaacaataataaatgcttatcatttta

SEQ ID NO: 881635 - DNA, 120 bp, Artificial Sequence
  ENSG00000256193_0 (sequence is synthesized)
acacaataactgggatgacttgtctagatcttaggcaacaattctcttagcacatcagctcctggaaacaaatgcacttaaccagaaaaacagggacatcaaccagcaaagatgcatcct

SEQ ID NO: 881636 - DNA, 120 bp, Artificial Sequence
  ENSG00000256193_1 (sequence is synthesized)
catttaatagagcttgaaattactataatctgtaaagtacagcgagaagaagaagtttcacctgcctgcacatctgtcgttgactctccatctgacttggagggactctgagggaccaac

SEQ ID NO: 881637 - DNA, 120 bp, Artificial Sequence
  ENSG00000256193_2 (sequence is synthesized)
ctgagcctgagaagaggcaagattccccttcaaggacacactgggaacttacggacctctttctccatggtgcagagcgcagaggctacctgagaatatccagagactacagaggtcatc

SEQ ID NO: 881638 - DNA, 120 bp, Artificial Sequence
  ENSG00000256193_3 (sequence is synthesized)
aagttgacgcatcaatgtttacatgtgaacaaacagacgcataatagctcttgagcttgccattgggaagtgaaaatcaactgcttgaataaatgtagacatcaccttgtgactcaacag

SEQ ID NO: 881639 - DNA, 120 bp, Artificial Sequence
  ENSG00000256193_4 (sequence is synthesized)
cagccaataagatggaaataaaggccatgaagttatcggatggcatctacaaggaatacttagatgaggaggtgactctggtagcaattgttcttttgtctttctcaccttccttcttgt

SEQ ID NO: 881640 - DNA, 120 bp, Artificial Sequence
  ENSG00000256193_5 (sequence is synthesized)
cctgtctgggatgctgaagtgatggctggtatacagatgccctgttgtgatgttgagataaacatgagaataaaagtcggcgattacagatggcagagaagagagagaaagataggatgt

SEQ ID NO: 881641 - DNA, 120 bp, Artificial Sequence
  ENSG00000256193_6 (sequence is synthesized)
aggtggatattgacggaactaagtttctattgcacaagttctaccaccaacctctggacttcatgatatgtgagggagaaataaactcctattttagaagagatctatgttacctgcaac

SEQ ID NO: 881642 - DNA, 120 bp, Artificial Sequence
  ENSG00000256193_7 (sequence is synthesized)
tgaacggaatgcttaattggcacatcctatgtgctccaaaccttccttaatttctgtgtgtaaggcatacttagtctttacccattattctgttcacattcattcacttgatcagcctcc

SEQ ID NO: 881643 - DNA, 120 bp, Artificial Sequence
  ENSG00000256193_8 (sequence is synthesized)
aaagagtttactacagtttactctattagtaagggagattctggagcaagccccacaaatcatagattgaatacccattcattaagagagagatttaaagatacttctatccaaacacat

SEQ ID NO: 881644 - DNA, 120 bp, Artificial Sequence
  ENSG00000256193_9 (sequence is synthesized)
tttaaatttccagcacctttgaggtggtggaggttcatggtggttgatagggtttaaatgacttgtgattcaagctccatattacaatgtaacagtgcaaaagttcatttttttaaattt

SEQ ID NO: 881645 - DNA, 68 bp, Artificial Sequence
  ENSG00000256193_10 (sequence is synthesized)
ccgtcacctaggttttaagaaccacatgcattaggtatttgacctaatgctctccctcatgttgcccc

SEQ ID NO: 881646 - DNA, 120 bp, Artificial Sequence
  ENSG00000256193_11 (sequence is synthesized)
ctatcaaaccgtcacctaggttttaagaaccacatgcattaggtatttgacctaatgctctccctcatgttgccccccaactccctgacagggcccagtgtgtgatgttcccctccctgt

SEQ ID NO: 881647 - DNA, 120 bp, Artificial Sequence
  ENSG00000256193_12 (sequence is synthesized)
attccatgagtctggatttggttacagatagagctggacaagccttagctatatctaatggcttttgacatgttatatcaatttcttactgcttttgtaaatgaatatattaagaagaaa

SEQ ID NO: 881648 - DNA, 120 bp, Artificial Sequence
  ENSG00000256193_13 (sequence is synthesized)
aaattacaaatgaccctttcttcacaaacttttagggtaatcaagttcagttattaaaaaatggatgtttgcaacattcatagtaattattttcagaaaattaaaaatgattaaaaatta

SEQ ID NO: 881649 - DNA, 120 bp, Artificial Sequence
  ENSG00000256193_14 (sequence is synthesized)
ccctctaaaataaataaattagctccgattatttcttctttttaaatttttccttatagttgtaaaaataaagtgaacgttttggctcatttcctcattaaagtttgaattttccagtca

SEQ ID NO: 881650 - DNA, 120 bp, Artificial Sequence
  ENSG00000256193_15 (sequence is synthesized)
agaacaccagacatgggtgctccaatccacgtagtgttgaggcagtgaagtttgtgttccaggaacttcagaactcctgaatgtattggtgttgataaaaggtagacatcaccttgtgac

SEQ ID NO: 881651 - DNA, 65 bp, Artificial Sequence
  ENSG00000256193_16 (sequence is synthesized)
gcataatagctcttgagcttgccattgggaagtgaaaatcaactgcttgaataaatgtaaggact

SEQ ID NO: 881652 - DNA, 120 bp, Artificial Sequence
  ENSG00000256193_17 (sequence is synthesized)
aggcataagccaccccgcccggtgggaccatcttttgctacttcagacatggacctatgtctcagcctagaagtgtggaagaatgaacctggatcgttgagtagaaggcacatcacgcaa

SEQ ID NO: 881653 - DNA, 120 bp, Artificial Sequence
  ENSG00000256193_18 (sequence is synthesized)
aacactgaaactgcctttgcaaaaatcagggtagtgagagaaggtcttgcatgactgactccatcttgcctcaagcctcacaagccagctatcttcactcattcctgagcacaggccaag

SEQ ID NO: 881654 - DNA, 120 bp, Artificial Sequence
  ENSG00000256193_19 (sequence is synthesized)
tgacaatagtcccttcctaaaactaattcctccttgctcagggaccaaaaactaatgaaaggcctcaagatgaggatcatgggaggagtctgaattctgctaaaatgtaggcagtttcta

SEQ ID NO: 881655 - DNA, 120 bp, Artificial Sequence
  ENSG00000256193_20 (sequence is synthesized)
tcatccttactactcaggagtcatgtggccagaggtcacaagatttgagccttccccagttgctcctatggataacatcactactgtagaacctaagattggtctcttgagatgtttttc

SEQ ID NO: 881656 - DNA, 120 bp, Artificial Sequence
  ENSG00000256193_21 (sequence is synthesized)
agacctctgcattctggcaatcaactgacctcacctggaatcacgagtcatgactgaaccggtcctgtggccccacctggggataaactcagcacacaaggatcattttccacacctcta

SEQ ID NO: 881657 - DNA, 120 bp, Artificial Sequence
  ENSG00000256193_22 (sequence is synthesized)
tgatttcataggcaaccaatcaacggcacccattttttagcctcctgctcgccaaagcatctttgaaaaatcctaacctccaagccttcggggagactgatttgagtaataactctgttc

SEQ ID NO: 881658 - DNA, 120 bp, Artificial Sequence
  ENSG00000256193_23 (sequence is synthesized)
cctgcatggctggtctagtgtcaattaaactctttctttactgccataccatagtctcagcgaattggttttgtctgtgcaatgggcaggaagaacgtgtctggtgagcatctccacaca

SEQ ID NO: 881659 - DNA, 120 bp, Artificial Sequence
  ENSG00000256193_24 (sequence is synthesized)
ttcagaaattgtccatctaagacaatggagttattttcaccctcaacaaatgcctcaactctgtgacattttaagcaaatcttaactttgacttatgaattcaagaaggaaaaaaaaaaa

SEQ ID NO: 881660 - DNA, 120 bp, Artificial Sequence
  ENSG00000256193_25 (sequence is synthesized)
cgtccttcccctggggacaggctcccttgctgttgtgtggtcactgttcccattaacctaacgaaatctacacttgcaaatgaagtcctggggtccacactaaatgttcacagtctggcc

SEQ ID NO: 881661 - DNA, 120 bp, Artificial Sequence
  ENSG00000256193_26 (sequence is synthesized)
acatgctaatattccatgtgctagcccatatctttaaatagactcatggaaatgtgttaaatgatataacagaataaaaatcaagcttaacttaaagatgagtctttttttttctatatg

SEQ ID NO: 881662 - DNA, 120 bp, Artificial Sequence
  ENSG00000256193_27 (sequence is synthesized)
aggaaataaagcaactgaacatttctttgcactttatgttaaattaaatgctaacatgtacagaaaaaagaaaaaatgcactctgatgatgaagggactgagtcaaattcacaaccaggg

SEQ ID NO: 881663 - DNA, 69 bp, Artificial Sequence
  ENSG00000256193_28 (sequence is synthesized)
ctcctgcctcagcctcccgagtaggtggggctataggcacgtgcctgtagtacatgcagtatagtactg

SEQ ID NO: 881664 - DNA, 120 bp, Artificial Sequence
  ENSG00000256193_29 (sequence is synthesized)
tctcgatctccagccagggtcgttttagtgaatgagaactgtgaatcggaacccacaaaaaacatttttagcaatcagttggctttattttatttgaagataatctcagccatttgcttt

SEQ ID NO: 881665 - DNA, 120 bp, Artificial Sequence
  ENSG00000256193_30 (sequence is synthesized)
ttcattttgttttgatctgttttgctaacaaatcaggcattcagttttgcgcaccacaggggcaggcagcatacgtgttttctaaaccagtgtctacccattgctttgcagaacaccaga

SEQ ID NO: 881666 - DNA, 120 bp, Artificial Sequence
  ENSG00000256193_31 (sequence is synthesized)
cgggagtggagaaggaacatgaggccaccttatgtgaccatctctcacattagccttctgcactcacagttccctccatgcacagctgaaaatgttcttcagtttaaaaactgggtggcc

SEQ ID NO: 881667 - DNA, 120 bp, Artificial Sequence
  ENSG00000256193_32 (sequence is synthesized)
tgcacttacctaaataagcaggatcatttccctatcataaggttctgaaccttaatcacatctgcagagttccttttgacaggtaagacaatatattcattttctgaagagttagatcca

SEQ ID NO: 881668 - DNA, 120 bp, Artificial Sequence
  ENSG00000256193_33 (sequence is synthesized)
ggcaagtttgagggactattattctgcctaccacaccctctctatagattgtcctatccctcatggtgtctgacttcctccaagaactccaaaggaaagggattacattttttatttctt

SEQ ID NO: 881669 - DNA, 120 bp, Artificial Sequence
  ENSG00000256193_34 (sequence is synthesized)
cactcctggatgctccttggtcctcatgcaaatctgcccactgtgtctccaaaagaattccaactatgtatttcaggggaaccaaatatgagagctgcaaggaacttttcttaaaagcct

SEQ ID NO: 881670 - DNA, 120 bp, Artificial Sequence
  ENSG00000256193_35 (sequence is synthesized)
ttgacatctcccctttctgtcttctttcttctttctcctctagctaacctgaaacaggtgtgatggttacttccagccactgttgtggaccaagggaaggcagagctctgcctagtgtta

SEQ ID NO: 881671 - DNA, 120 bp, Artificial Sequence
  ENSG00000256193_36 (sequence is synthesized)
gggagggagaatgtctgaagcagcctgatccctgatgtcctttaggctgtcataccggacctgtgcagcatccatccagacttctaccatattagaaccaaatacacttttatcttattt

SEQ ID NO: 881672 - DNA, 120 bp, Artificial Sequence
  ENSG00000256193_37 (sequence is synthesized)
aaaccactctttgttttaaatctgtctattaataggaagccaaactaatcctacctgatgcaagaaagagaatagaattctaagaaacccatcttcattggccaataattttcacttagc

SEQ ID NO: 881673 - DNA, 120 bp, Artificial Sequence
  ENSG00000256193_38 (sequence is synthesized)
ataaagcataaatttaggaataaaactactgtgattgaggattcaaattagtaatggagtgacactttgtgtcaatttttgtcaaatatatgtcctaagaaattgtttcattagctagct

SEQ ID NO: 881674 - DNA, 120 bp, Artificial Sequence
  ENSG00000256193_39 (sequence is synthesized)
atttaaacgagtgataatatctgtacttatatctgatttatcgtggtcctatgggcagctgttacttctggagaatctgcttagaagacaaacaaaaaataaaaactaaagtctgttcac

SEQ ID NO: 881675 - DNA, 120 bp, Artificial Sequence
  ENSG00000256193_40 (sequence is synthesized)
ctgtgaaaggtgttcagcgaatgatagttatgatgataaggcagatattttatatgtaacctagaaaattacatacggctttcagatcttcagaccctctgttcttccttcttaattttc

SEQ ID NO: 881676 - DNA, 120 bp, Artificial Sequence
  ENSG00000256193_41 (sequence is synthesized)
gaggaggaaaaggccaaccttcagcactgcattccatttctggccatattcccagaaattataattataacccaaaacaacaatccactcattaacatctgcaaaaagcatgcaattcag

SEQ ID NO: 881677 - DNA, 120 bp, Artificial Sequence
  ENSG00000256193_42 (sequence is synthesized)
gatgaagtttctaaattgccttcagccagaggaccctccaaaccacttcattgtcatgatcaacatggaaaatcaactttcagagcagtcagaagaatgtacatattcttttctaaatat

SEQ ID NO: 881678 - DNA, 120 bp, Artificial Sequence
  ENSG00000256193_43 (sequence is synthesized)
tgcgaatatttaaatattttattgaatatcctaatagcatattttgaatgtttttttttctggaatacatttgagtatacagagtttcatgatttagtcataaacactaaaagaaaacaa

SEQ ID NO: 881679 - DNA, 120 bp, Artificial Sequence
  ENSG00000256193_44 (sequence is synthesized)
ttacggacctctttctccatggtgcagagcgcagagaagacagcaggaatctcatctctccttctgcattccatttgagacaagatgtttgaattgaagcaaataagaaacatacaaaaa

SEQ ID NO: 881680 - DNA, 120 bp, Artificial Sequence
  ENSG00000256193_45 (sequence is synthesized)
aatgacataagtaaagaagctatggcctcaccccgatatgttgctggcaggagagacaacagcaaacacaggaaactcaaggaaaatcagtgtggctagagacagatgctgaactggagc

SEQ ID NO: 881681 - DNA, 120 bp, Artificial Sequence
  ENSG00000256193_46 (sequence is synthesized)
attctccaagagcaaagggaagaacatggtcccatgacagcacactctgggaaaatgagacttctgaattggggaccttgaaacaggagggcccacattaccagccgtgtaggaagcatc

SEQ ID NO: 881682 - DNA, 120 bp, Artificial Sequence
  ENSG00000256193_47 (sequence is synthesized)
tgttcagcagcagaatgcgaagaggatggtggggggcactgcctccctgtgtaaccataatgggtcccttacccaaaatatgcagcaaatcaacacctggaggcacggggttgcagcaga

SEQ ID NO: 881683 - DNA, 120 bp, Artificial Sequence
  ENSG00000256193_48 (sequence is synthesized)
gaaagagctttaatcgtaaggccaccgaaggaggacatgggaggaaacctcaaatccatctccgccaggaattcggggctaaggtgaacaaacagacgcataatagctcttgagcttgcc

SEQ ID NO: 881684 - DNA, 120 bp, Artificial Sequence
  ENSG00000256193_49 (sequence is synthesized)
gaagcatcaaaataattgaatactgtaatggctcagcacctggcttaaagttataataccaggatttacattattcttagccacaggcatattttccaccagcttttaacaacccaccac

SEQ ID NO: 881685 - DNA, 120 bp, Artificial Sequence
  ENSG00000256193_50 (sequence is synthesized)
atcttcataagagggaacaatccaatctgcctatcagtattgtgagtgtatgatggctcccctgaagtcctgcaatttcttgactgcgggttcccaggaaatggcagatgtgactggtga

SEQ ID NO: 881686 - DNA, 120 bp, Artificial Sequence
  ENSG00000256195_0 (sequence is synthesized)
atactactgccttcctggggagcctctcttctacagaaacgtaattagaaatgccttacttaaaaagctccactggctccctaatggatccaatttttcaggtgcctcacctgggtcata

SEQ ID NO: 881687 - DNA, 120 bp, Artificial Sequence
  ENSG00000256195_1 (sequence is synthesized)
gccagtggaaaaaggaaagcttatgatatctcttggtctggtattaagaggccaggctggaaaaggaaggcaccatttccatcatattcttctggagagaacttagtctcatcttcttca

SEQ ID NO: 881688 - DNA, 120 bp, Artificial Sequence
  ENSG00000256195_2 (sequence is synthesized)
cagaagatggggaaaggtggcccagctggtcagccctgtgcctggctgcatttctgttactatggaaggagggaaaaaggaaagccagcagtgcatgtcacgcttacataagctccctcc

SEQ ID NO: 881689 - DNA, 120 bp, Artificial Sequence
  ENSG00000256195_3 (sequence is synthesized)
ttctccccctccaatcaaccagtgtcctggggccttcttacctctgggacagcaggtaagaaaagaaacaacttgctgagactctgacgctgacatcaagaaaaacctggctagaatcgg

SEQ ID NO: 881690 - DNA, 120 bp, Artificial Sequence
  ENSG00000256195_4 (sequence is synthesized)
tggaaactaagatggctgactggagtttgcacagaacaagcttgctggcgtcccagcccgaatttccacatgtttcatactaactccccccaaattcacacatgtgacccatgagatagc

SEQ ID NO: 881691 - DNA, 120 bp, Artificial Sequence
  ENSG00000256195_5 (sequence is synthesized)
aggaagaaacaactggacatgcgcagggccttcccagacctcctgtttcctttcaccagttacctatatagtctcagaatctaacccctgaaccttttctaataaaaatactgcttggaa

SEQ ID NO: 881692 - DNA, 120 bp, Artificial Sequence
  ENSG00000256195_6 (sequence is synthesized)
acaatgatcttccttttggttgagagtcctaattgaggagccttaagatctgaccatttgtctaaaagtcctctagataacttctcccaagtttacattggtccttatgcaaatacacct

SEQ ID NO: 881693 - DNA, 120 bp, Artificial Sequence
  ENSG00000256195_7 (sequence is synthesized)
ccaaatggcccatcccagaatgtcagaatttcttaactgtaccctggaaacagagtctcagggcaaaccaagaatgtgtcctggagtggactacccgaagcacagtacttatacattctc

SEQ ID NO: 881694 - DNA, 120 bp, Artificial Sequence
  ENSG00000256195_8 (sequence is synthesized)
tttcacagaaaatgagaaggtggccgagaaggaaaggtgacattcttacaactctaaatggtgctcagtgttgttataaataagataaagcaaatatgtggttcaggtatatagagtaaa

SEQ ID NO: 881695 - DNA, 120 bp, Artificial Sequence
  ENSG00000256195_9 (sequence is synthesized)
agattaacatgtatgtaggcatctcggggtctggggagggatgattgattttatcttgcctttattcttcatctataggcaaggttgtcatcaacacaggtcagtggaatatttgacata

SEQ ID NO: 881696 - DNA, 120 bp, Artificial Sequence
  ENSG00000256195_10 (sequence is synthesized)
ttctaggcttgcaggctgagatttcagcttttgttcataggcctagtttatattaattgttcacagttattaactgtatatcctgcctgcagccaccttgggatgccatttttaaaaact

SEQ ID NO: 881697 - DNA, 120 bp, Artificial Sequence
  ENSG00000256195_11 (sequence is synthesized)
tttttcttcagctttttctttcctccaggagttgtggtacaccaccctccctgcatgtattcagcaacctagaagctgtctgaaccctgtcctttagggttttataatgacttcactaca

SEQ ID NO: 881698 - DNA, 120 bp, Artificial Sequence
  ENSG00000256195_12 (sequence is synthesized)
gagacacgattgattaaattattggccattggtgattaactcaatcttcagcccctccatcctggagactgggggtggtgctgaaagttccaacccctaatcacgtgattggttcctctg

SEQ ID NO: 881699 - DNA, 120 bp, Artificial Sequence
  ENSG00000256195_13 (sequence is synthesized)
gcaatcagtccccatctcttcaggagtccccacccatcagtcattttattagcatatcttgaaaaaacttcactttggagattccaagtgttttcagagaggtgtgccaggaaaccaggg

SEQ ID NO: 881700 - DNA, 120 bp, Artificial Sequence
  ENSG00000256195_14 (sequence is synthesized)
cagaggccatatatatgtatttttataatctcacaagatattaacagaatatagtttaaactctataaaacgttttaaagagggtttgttctgagccaatatgagtgactgcagctcagg

SEQ ID NO: 881701 - DNA, 120 bp, Artificial Sequence
  ENSG00000256195_15 (sequence is synthesized)
gatacacagtctcaagaggtcctgaaaaagtgagcccaaggcaatcgggttatagtttggctttatatatttcagggagacagaaattgcaggtaaaatcataaatcaatggaatgtata

SEQ ID NO: 881702 - DNA, 120 bp, Artificial Sequence
  ENSG00000256195_16 (sequence is synthesized)
tattggtttggcctgaaaaggtgggacatctcaaagtaggggcttaaagtcataggtgggttttaggtgttctttagttagcaattggtttgaagcagtgaagctttatctaaatacttg

SEQ ID NO: 881703 - DNA, 120 bp, Artificial Sequence
  ENSG00000256195_17 (sequence is synthesized)
acacacacacacacacacacagagacacattaacgggattttatggtgtgtgacttaaccctggccttgcatagacttaggtttttttgtaatttggtattctattaccacaaaaagcct

SEQ ID NO: 881704 - DNA, 120 bp, Artificial Sequence
  ENSG00000256195_18 (sequence is synthesized)
aaaagcctgttttgtcagtcttatgacttctattttaacattaatgttggtcacttgtgcctacgctccatgatgaggcgtgactgacttcgcttctcatcataacaaagaactcagatt

SEQ ID NO: 881705 - DNA, 120 bp, Artificial Sequence
  ENSG00000256195_19 (sequence is synthesized)
tgtgggtttcactggagtccccttggctaagagggggtctgttcagttagggagcttaggatttttttagcttataatattactctgttttctactaaaagtgtaatcattttagctctt

SEQ ID NO: 881706 - DNA, 120 bp, Artificial Sequence
  ENSG00000256195_20 (sequence is synthesized)
atattagggtatataacttacctcaaattaatttttttgtaggtagggtataagatggggccaagctttatctttacatatatatatatttatatacacacacatatatgttcacatact

SEQ ID NO: 881707 - DNA, 120 bp, Artificial Sequence
  ENSG00000256195_21 (sequence is synthesized)
caaatatatatttgtatgtgtgtgttcaattgttccagcatcatttgttgaacaaacttcccttttttcattgaatttattgggcatctttgtttaaaatcaattgaccaatacagaaaa

SEQ ID NO: 881708 - DNA, 120 bp, Artificial Sequence
  ENSG00000256195_22 (sequence is synthesized)
agactccatctaaaaaaaaaaaaaaaatcaattgacctatacttatacaggtgtgaggtataccttatagatacaggtattatcactggggttgcattggctccataaatcaacagggga

SEQ ID NO: 881709 - DNA, 120 bp, Artificial Sequence
  ENSG00000256195_23 (sequence is synthesized)
ataaatcaacaggggaagaactgacatcttagcaatattgagccttctgttccatgaaaatggtatatctctgcatttatttaggtcttttaaatgtttactcagtaatgttttttcttt

SEQ ID NO: 881710 - DNA, 65 bp, Artificial Sequence
  ENSG00000256195_24 (sequence is synthesized)
ttaggtcttttaaatgtttactcagtaatgttttttcttttttttttttttgtcagggtctcacc

SEQ ID NO: 881711 - DNA, 84 bp, Artificial Sequence
  ENSG00000256195_25 (sequence is synthesized)
ccacaggtgcacaccaccatgcctggctgattttttttttgtatgtttgcaacaactcctgagttcaaacgatcctcctgcctc

SEQ ID NO: 881712 - DNA, 120 bp, Artificial Sequence
  ENSG00000256195_26 (sequence is synthesized)
aggtgtgagccaccacacccagcccatgttttgtagttttcaacatattttgcatgtcttttgtcaaatttattcctgagcattttatttttgacactattacaaatggataaaaatgtt

SEQ ID NO: 881713 - DNA, 120 bp, Artificial Sequence
  ENSG00000256195_27 (sequence is synthesized)
ttttgacactattacaaatggataaaaatgtttccgattgcttgctgttagtatatagaaatactgtacaattgatttttgcatgttgacctcatatcctgagatcttgctaaacttatg

SEQ ID NO: 881714 - DNA, 120 bp, Artificial Sequence
  ENSG00000256195_28 (sequence is synthesized)
ttttagttctattaatttttgtttcaatttcttagaactttctacataaaaaataatatggtcttcaaataatgttttacttcttcttttccaatctttatgtcctttctttcttcttgc

SEQ ID NO: 881715 - DNA, 120 bp, Artificial Sequence
  ENSG00000256195_29 (sequence is synthesized)
cttcttgcactggttaggacttttggcataatgttaagtagaaatgatgagaacagacatctttccctattcccaatcttagtgggagaatgttcagagtttagctaatttaatgttaac

SEQ ID NO: 881716 - DNA, 120 bp, Artificial Sequence
  ENSG00000256195_30 (sequence is synthesized)
tatagattttttaatagatgcctttcatcagattgaggaagtttccttctatttccagtttgctgattttttttatcataagtggatattgaattttgctaattgcttttccttcaacta

SEQ ID NO: 881717 - DNA, 120 bp, Artificial Sequence
  ENSG00000256195_31 (sequence is synthesized)
ctgagatgttcatattgcactgcttctttattctgttaatataatgaattacactttttgatttcaaatgctaaactattattgtattcctagaatacactccattttgtcattctttat

SEQ ID NO: 881718 - DNA, 120 bp, Artificial Sequence
  ENSG00000256197_0 (sequence is synthesized)
gtctgaagctctgggaacgggggcagaaagctgtatttcgaaaagcttcccacatgattttgatgcaaagcgtccccagcctccagccagcttcgctagccagggacacaattggattgc

SEQ ID NO: 881719 - DNA, 120 bp, Artificial Sequence
  ENSG00000256197_1 (sequence is synthesized)
aatttctagcacttcctggagatcaggtccctgaagagctataaaaatccagcggtgtttctggccacctttccatgtggtttgtagtgcactgtcagtcacacacgcctgcagagcatg

SEQ ID NO: 881720 - DNA, 120 bp, Artificial Sequence
  ENSG00000256197_2 (sequence is synthesized)
tcatattgcattacctatgttgctagtttctggctgccagtttgcatttcttaggcggattttctgattccaggctcgggagggctcccctgcactgtatgtaattgggcacgaagcccg

SEQ ID NO: 881721 - DNA, 120 bp, Artificial Sequence
  ENSG00000256197_3 (sequence is synthesized)
tggtggggtggatttgggtaatggcagggctgcattcctcccattcttttctcacaggaaaaagtgcctggatataaccctgtggtggggattgcttacaggaggggccggctgcctgcc

SEQ ID NO: 881722 - DNA, 120 bp, Artificial Sequence
  ENSG00000256196_0 (sequence is synthesized)
actgtccctctgtcttctgtggcatcctttgccttgcagccacagcccagctagcccaggccaagggagtccgacccccaccccgaagcacagggaagttgctgccctttcccgcagtga

SEQ ID NO: 881723 - DNA, 120 bp, Artificial Sequence
  ENSG00000256196_1 (sequence is synthesized)
caggaatcctctcaaaggttctggaaggcaaggatgcggccatccctggagacgccaaggaccatcatgtgaggtggcttttatcctcctcgcccctactggtacagacgagaagaaact

SEQ ID NO: 881724 - DNA, 120 bp, Artificial Sequence
  ENSG00000256196_2 (sequence is synthesized)
gtgactcagaagttaagcattttcccatggtcactgggctacacagaaaggccaggatttgaacccaagcttctgcttccacccatcttcattaggagtcaagttatactgtgggtctca

SEQ ID NO: 881725 - DNA, 120 bp, Artificial Sequence
  ENSG00000256196_3 (sequence is synthesized)
accatggctgctcactggaatcacctggaagcttcccaagtactgatgtctgtgtccccagcccagaggttctgatatcattgtctgggtgtggcctagccttggatctgcaaaagctcc

SEQ ID NO: 881726 - DNA, 120 bp, Artificial Sequence
  ENSG00000256196_4 (sequence is synthesized)
ctaggcagttccactgcatgaagttgagaaccactgatacagagtgacctcacctccccacccccaatggaggtgctatggtttgaagagcaaaactcatgttgaaatttaactgttctt

SEQ ID NO: 881727 - DNA, 120 bp, Artificial Sequence
  ENSG00000256196_5 (sequence is synthesized)
gcacctcctgcagagcctgggagctcccagtccagccaaggatgttggatctcatggtcctaagtacttctttgacaccccattcccctcagtaaaatagtttgaccccttctccaccaa

SEQ ID NO: 881728 - DNA, 120 bp, Artificial Sequence
  ENSG00000256196_6 (sequence is synthesized)
aaaaaaaaaaaaaagaaagaaatttaattgccatgatgatggtattaaaaggtgggacctttaagaggtgattaggttatgagggttcagccctcatgaatggattaatgccgttatctt

SEQ ID NO: 881729 - DNA, 120 bp, Artificial Sequence
  ENSG00000256196_7 (sequence is synthesized)
gggagtggattagttatcccaggaatgcagctcctgataaaaaggatgactttggcctgatttcctgtctctgtctcatgtgctgggttctgccttctgccataggatgacccttgccag

SEQ ID NO: 881730 - DNA, 120 bp, Artificial Sequence
  ENSG00000256196_8 (sequence is synthesized)
atgccagcgccatgcccttagacttcccagcctctggaactgtgaccctaatgaatttctgttcattataaactacgcaggcagtggcattctgttataggaagcagaaaatggacgagg

SEQ ID NO: 881731 - DNA, 120 bp, Artificial Sequence
  ENSG00000256196_9 (sequence is synthesized)
acagtgagcaagggtataatgaacaacctttaaagaaatactattaataaaaagctaacattcagctaggtcttgccatgcaccaccgcgctcatttaactgtcacaacagcccatcggg

SEQ ID NO: 881732 - DNA, 120 bp, Artificial Sequence
  ENSG00000256196_10 (sequence is synthesized)
attaactggggaaatcagcatttgaatgtaggtacttctgacattggacccctcatacacaacaactctgctgtattgtctccaactaagtctcagaagtgatttagaaagtcatacagg

SEQ ID NO: 881733 - DNA, 80 bp, Artificial Sequence
  ENSG00000256196_11 (sequence is synthesized)
gagcagcctgggcaacataggagaccctgtctctacaaaataaatataaataaataaattagtcaggtgtggtggtgcgt

SEQ ID NO: 881734 - DNA, 120 bp, Artificial Sequence
  ENSG00000256196_12 (sequence is synthesized)
taaatataaataaataaattagtcaggtgtggtggtgcgtgcctgtactcccagctatttgggaggctgaggggggaggatcacttgagcccaggaggtcacggctgcagtgagctatga

SEQ ID NO: 881735 - DNA, 120 bp, Artificial Sequence
  ENSG00000256196_13 (sequence is synthesized)
tcatgccactgtatcccatcctgggcaagagagcaagacgcttaaaaaaaaaagtcacacaacagattattcatgagttaaaataaacttggcatctaccaatcatctcagtgaattact

SEQ ID NO: 881736 - DNA, 120 bp, Artificial Sequence
  ENSG00000256196_14 (sequence is synthesized)
ggtgaaaattacctaacaactttgtgctttgtgctctggtcttgtaacacaatgccacagacaagttaagacccaacaagtgccaactcattgaagcaggtaaggatcagccaagaaaaa

SEQ ID NO: 881737 - DNA, 120 bp, Artificial Sequence
  ENSG00000256196_15 (sequence is synthesized)
gtacacaagttcaacttctacttgccactgtgcttgagaaatgtcagacagcgccagcaaattccctgttcccctccaggttcagaaatgaacctgtagctccaggagttttcatgattc

SEQ ID NO: 881738 - DNA, 120 bp, Artificial Sequence
  ENSG00000256196_16 (sequence is synthesized)
agacctgatgatcagaggctaagccatgcccctgaggtaggagcagtcaggtttttgaactttttgcagttacacaggcactcagggagttgacaataaatccagagccatgagggatgg

SEQ ID NO: 881739 - DNA, 120 bp, Artificial Sequence
  ENSG00000256196_17 (sequence is synthesized)
agaaggaagagaatgatgtcctagtcttgcttagggggaaggaggagagtctaggaaagggttctaaaaatactacatttagggtactttttggtccagaaacagctgctctaagccctt

SEQ ID NO: 881740 - DNA, 120 bp, Artificial Sequence
  ENSG00000256196_18 (sequence is synthesized)
ccagaagcctggagggtcaagcaaggctgaaaaacatgcaattcatgtagaaggccctcaggctgggaaagccttctactgtctttggcacaaatcaagaaccagatggttcctgcctgc

SEQ ID NO: 881741 - DNA, 120 bp, Artificial Sequence
  ENSG00000256196_19 (sequence is synthesized)
cagtggtcgcagatgaggaaagcacaggtgaatctcaggcagtatggactcactgctattaggcctcctcactttggcctaatcaaatagttttactaaaggcatggaaacagtctcagc

SEQ ID NO: 881742 - DNA, 120 bp, Artificial Sequence
  ENSG00000256196_20 (sequence is synthesized)
ctctgagaggaggaagcatgtcttaaaacttcttcaccttctgcaatgcctggcctcagacaaataataggcactcaattaacaactcataataatacaaatgttatacatatctataca

SEQ ID NO: 881743 - DNA, 120 bp, Artificial Sequence
  ENSG00000256199_0 (sequence is synthesized)
gagctgtccggtaatagaaagaagctgcagaaccctgttgtcttcatcttttgtttaactcatgcaacatttgaaagcacgtttgcctacaagaaataaaacttaagttgtgaaatggct

SEQ ID NO: 881744 - DNA, 120 bp, Artificial Sequence
  ENSG00000256199_1 (sequence is synthesized)
tattaatgaactcagatgacaagaaaccaaaacagcgggcctggctgaaggattcatccctagccctgaaagccagcggggtctttctgtaacatcaaaggcacaaacaattgaaccgac

SEQ ID NO: 881745 - DNA, 120 bp, Artificial Sequence
  ENSG00000256199_2 (sequence is synthesized)
atgaagaagaagtaggactcaagaagtaaatgatccaactcaagaaagagatgaccaagtggaataccttttaaaggcttcaagacttttctttcccactcctccctgcccatgcgaggg

SEQ ID NO: 881746 - DNA, 120 bp, Artificial Sequence
  ENSG00000256199_3 (sequence is synthesized)
aggctccattttaaaatgtaacacacacacacaaaaaaacggatttgaaataaggcattagcctgaggtaacttacccccaccttggctccagagcagcttggatttccgattctttgag

SEQ ID NO: 881747 - DNA, 120 bp, Artificial Sequence
  ENSG00000256199_4 (sequence is synthesized)
caggtcagtgatttggggaaccagtaaaagagccgggctattcttctgaaggtctcatgaaagtcacttcttatggccatagcgagaaccaggagtgttccagaatgactcgctacagag

SEQ ID NO: 881748 - DNA, 120 bp, Artificial Sequence
  ENSG00000226944_0 (sequence is synthesized)
aggaccttggctgcggggtcttcaagggtcatcgccgcctcatttcctcggcggccaattgggggcgccagagagcagcggacgcccctccaccgactttccagcgcttgggaggcggag

SEQ ID NO: 881749 - DNA, 120 bp, Artificial Sequence
  ENSG00000226944_1 (sequence is synthesized)
cagccctgcctttcgctggttgtgagctcttggccatgttactgacctctcagagcctcagcgctgggttaaaatagaactggtgtcctgataatgggtcgacgtgatcagtgagctttc

SEQ ID NO: 881750 - DNA, 120 bp, Artificial Sequence
  ENSG00000226944_2 (sequence is synthesized)
tccgcccgtgttctcctgagtgtcctgagagcagcccgtttctgcccctcttgcgattacaaagtcaagcccagagcctgacccacagtagtgctcaataaaggcttagaaaaagctcgg

SEQ ID NO: 881751 - DNA, 120 bp, Artificial Sequence
  ENSG00000237505_0 (sequence is synthesized)
ggggcgacgggccggcctctccggggaccaggcgagagcaggctcccgctgcagcagggctgcagagatggggtcccctctgataattctgtaatcatcctctgttgaaaataaaggtct

SEQ ID NO: 881752 - DNA, 120 bp, Artificial Sequence
  ENSG00000237505_1 (sequence is synthesized)
acaaagtgtccgttaccctggagctgtacaagtcacacacagctccattggagagaaaactggatggaaccatttgactgaaaatccatgtcaaaaggccaacaagaaagagctgagaca

SEQ ID NO: 881753 - DNA, 120 bp, Artificial Sequence
  ENSG00000237505_2 (sequence is synthesized)
ctgcagaaagagcaggaataaataagaggtgaagacagacagagaccagacaaggaggactcaattacagactgacagaagactcaaggaagaaaatgaagctggacctgtgaagaactg

SEQ ID NO: 881754 - DNA, 120 bp, Artificial Sequence
  ENSG00000237505_3 (sequence is synthesized)
tcgaaacagctgtagaggaattgtggtggaggcagtaatggctcctttagtagcagagaatagaaagatctcgaaaataaagcctattgtcaggagacttgcacccatcctggcctactt

SEQ ID NO: 881755 - DNA, 120 bp, Artificial Sequence
  ENSG00000237505_4 (sequence is synthesized)
ccaagtagaaacaaaaacagaaacgaagatatccatgatacctaatgttacaaggagaagaaagcacttgtaatcacaagggtactgagaaaagatgaagtatcccatcatttgattctg

SEQ ID NO: 881756 - DNA, 120 bp, Artificial Sequence
  ENSG00000237505_5 (sequence is synthesized)
gattgagaactctttgagagcagagacgatggcttcacctgagtatccccagagcctgacgttagacaaagacacaaacaatggttttcatgaaatggagcagtaaaagcattcttcatc

SEQ ID NO: 881757 - DNA, 120 bp, Artificial Sequence
  ENSG00000237505_6 (sequence is synthesized)
agaccagctctccaaagtaagaatgctccctgccaaagcttggagatgagaaatgagttgtataatgaaaagttgtttgttttctggagtttacaagtcaatttgggatacttcatcagc

SEQ ID NO: 881758 - DNA, 120 bp, Artificial Sequence
  ENSG00000237505_7 (sequence is synthesized)
caagtttttatctctgtactggcaaccattacatgttttcaatttgaaaaaatgtccatttttgctttccatggcatctgtgctatattcaaaccactctgcaatttcatgcagacaaag

SEQ ID NO: 881759 - DNA, 120 bp, Artificial Sequence
  ENSG00000237505_8 (sequence is synthesized)
actttccaagtcacatggtctatttgagtaataggagtccattaagaatgaacagagacaacctgtattatagtgatttctccctttgtgggttttgcaatttccctaccaagctttggt

SEQ ID NO: 881760 - DNA, 120 bp, Artificial Sequence
  ENSG00000237505_9 (sequence is synthesized)
gtttgaagatgacattttgaaaattggatttaactacctgaaaacttaggacacagaattgccggcaaccaattagtagcctggaaggacctcactgagtcatgactgtctgtttatcac

SEQ ID NO: 881761 - DNA, 120 bp, Artificial Sequence
  ENSG00000237505_10 (sequence is synthesized)
tattcaaatctggagctaagggaaaagtcagatatgaatccttggagtcgttaagtggcacaatctgaatgtaaatttcatggcaccagccaggccttcagatctcaatggtaactgttg

SEQ ID NO: 881762 - DNA, 120 bp, Artificial Sequence
  ENSG00000237505_11 (sequence is synthesized)
ctaacccaaatattgtcactgaaaaaatgacacccattaataattactattccaaacacatgaaagcacctgagaaatgttcactccagacatggtacttttgactacaaagggtgatgg

SEQ ID NO: 881763 - DNA, 120 bp, Artificial Sequence
  ENSG00000237505_12 (sequence is synthesized)
tatacatatttatgtgtaattgtttcctacatatgttacatttgaaaactcactacaatttatgtttcccaatctttctagaaactagaagaaataacccaacaattaaaaggcaatcta

SEQ ID NO: 881764 - DNA, 120 bp, Artificial Sequence
  ENSG00000237505_13 (sequence is synthesized)
gtttaactgacttgccaaagggctgacttttgatagttattattcaccagaaaacaaaacactggctattatgtgggctttggtaacagcatggcatgtagtaggctttactattcataa

SEQ ID NO: 881765 - DNA, 120 bp, Artificial Sequence
  ENSG00000237505_14 (sequence is synthesized)
catagaataaaatggatggatgaaagtatctgtaattatacttgaacataagaatcaaattttgaatagattatgtgtgttttcttttctctaaatatgtataaaattgatatcaatgct

SEQ ID NO: 881766 - DNA, 120 bp, Artificial Sequence
  ENSG00000237505_15 (sequence is synthesized)
tgcttgtaattactactaaaagcttttgtgatgaaatgattgccccatctactcaggctacttttaatattgtctttgtccatgcgactatggcaacatctttggtatctatacctcatg

SEQ ID NO: 881767 - DNA, 120 bp, Artificial Sequence
  ENSG00000237505_16 (sequence is synthesized)
ccttgattttaccttccacaatgggtcttcaaactgcatcattcacaacagaaaccatctgagggcacagacagtcttttgctacctccttctgttatggactgagtttattttaaaatt

SEQ ID NO: 881768 - DNA, 120 bp, Artificial Sequence
  ENSG00000237505_17 (sequence is synthesized)
tctttgttgaaatcctaaccctcagtatctcagaatgtgactatatggagataggaagaggtaactgagttaaagtgaggtcattagggttggctctaatccagtatgactggtgtcctt

SEQ ID NO: 881769 - DNA, 120 bp, Artificial Sequence
  ENSG00000237505_18 (sequence is synthesized)
tgaagaagaggaaatttagacacagacatgtacagagggaagaccatgtgaagactcagggagaaggcagccatctgcaagccaagaagagccccagaagaaaccaactctactgacacc

SEQ ID NO: 881770 - DNA, 120 bp, Artificial Sequence
  ENSG00000237505_19 (sequence is synthesized)
ttgatctcagatttttagcttccagaattataagaaaataaatttctgttgtttaaaccacccagtctgtggcactgtgttatggcaactctagcaaacttatataccatttttgttttt

SEQ ID NO: 881771 - DNA, 120 bp, Artificial Sequence
  ENSG00000237505_20 (sequence is synthesized)
ctaaatttgtacacttctttcccaaatatcactagcccttgaaagtttgaaatatatcctaagcttcatgttatatgcaaaacctaaattttgtttgctttctctgcacctcctagacca

SEQ ID NO: 881772 - DNA, 120 bp, Artificial Sequence
  ENSG00000237505_21 (sequence is synthesized)
acttcactgactttgtcctttacattgacaagctagataagatgatatcgttttaaataatcatttgcgtttaggtatttctctggcagttttgtattacagtttaaaaatagactagcc

SEQ ID NO: 881773 - DNA, 120 bp, Artificial Sequence
  ENSG00000237505_22 (sequence is synthesized)
tatgtctatggctcatgttggctatggtattttgaacttgatttctgaggctgctgacagcttttgaaagatttaacaactggcagcaagaaaaacttccatagaatctcttctctgaaa

SEQ ID NO: 881774 - DNA, 120 bp, Artificial Sequence
  ENSG00000237505_23 (sequence is synthesized)
ttttttctgctggaaaaaagggcatcacttagcaggcgtaaatgtctcagtcactgactataagtacaaagggcccagaagctggaatctgaagacaaacatggctccactacattttac

SEQ ID NO: 881775 - DNA, 120 bp, Artificial Sequence
  ENSG00000237505_24 (sequence is synthesized)
tctcattgccttgggaaacattacttaaaccagaagaatctattgccctctttacttcacagtgctacagagaggattacatgagccaatatttattcaagagaaatgacaaaaagactg

SEQ ID NO: 881776 - DNA, 120 bp, Artificial Sequence
  ENSG00000237505_25 (sequence is synthesized)
agaatctctgaggtccttgggtttccagaggtattcctgcaaggaacagtcaagcagcatcaaaccttcagaccttctgaaacagcctggttcctcccagcactgggtctggttctgccg

SEQ ID NO: 881777 - DNA, 120 bp, Artificial Sequence
  ENSG00000237505_26 (sequence is synthesized)
aattcagtagttggttaagcaagccatatacagtgttagttgactgaaatcaaagctctatagctaataccagaggaaagcaaagttctgattttcataaggttttgaatgctgtgctat

SEQ ID NO: 881778 - DNA, 120 bp, Artificial Sequence
  ENSG00000237505_27 (sequence is synthesized)
ggattttggactttattttgaaggcaataaagattgtaataaagatagtagcatgagtgaactggttaagagatttgccaaaatgtctagccattcaacttcgtaagtatatgaaattct

SEQ ID NO: 881779 - DNA, 120 bp, Artificial Sequence
  ENSG00000237505_28 (sequence is synthesized)
ccatagaagtataatgttaaataagtggccttcagtaaggcaaaaacaaacaaacaaaaaaatagatagctgctctttctatttctgttactattaaagaaaatgtagctttccaaatga

SEQ ID NO: 881780 - DNA, 120 bp, Artificial Sequence
  ENSG00000237505_29 (sequence is synthesized)
atgacttaattttactcatgaatgaatgaatattgagttaataacactctccatactttcccttttttatatatatataacttgagataataattgctacttaaagtaggatgtttataa

SEQ ID NO: 881781 - DNA, 120 bp, Artificial Sequence
  ENSG00000237505_30 (sequence is synthesized)
atggcagtactgtgtatgctttcttctttgtggtttttatatgcttttatacgttctgtgtatgaatgttgaggagaacttcttttagaattagttagaataaacttgttcattctgaaa

SEQ ID NO: 881782 - DNA, 120 bp, Artificial Sequence
  ENSG00000237505_31 (sequence is synthesized)
attcgtctggagaactctaatacaacaaggccctcttgactcttcaagtctgtgttaggagctcttcctacactttctcgtagcattgtgtgcagttcctagcatagagatcatcgtagt

SEQ ID NO: 881783 - DNA, 120 bp, Artificial Sequence
  ENSG00000237505_32 (sequence is synthesized)
gatctacgtaaatgtatatggccctacatttgtcatctaccacaaaagctatggttttcctgaacttaatcctctggatcttcagagcagagaaagtattcaagagaaatgacaaaaaga

SEQ ID NO: 881784 - DNA, 120 bp, Artificial Sequence
  ENSG00000237505_33 (sequence is synthesized)
agggtggacatacaaataaaaatcaaccttcttcttggtgaggatttgaccctggttccatattaacccaagagctgataagcacaaacctggagtccagtttttatgcaaatataacaa

SEQ ID NO: 881785 - DNA, 120 bp, Artificial Sequence
  ENSG00000237505_34 (sequence is synthesized)
ctctgcttataccttgaattacttgtatgaagcggggaaaattttttactctctctgaacccataattaaaaaaaatctgtatgacttggataataaacccacttcctagaatttttatg

SEQ ID NO: 881786 - DNA, 120 bp, Artificial Sequence
  ENSG00000237505_35 (sequence is synthesized)
aatatgaaatattgtgtgaactacctagtatgttatggagcacatggtttgtgtttaatatgtggaagctagtattgctattattgttgttgttataaacaatagcacttctatctacat

SEQ ID NO: 881787 - DNA, 120 bp, Artificial Sequence
  ENSG00000237505_36 (sequence is synthesized)
aattctcaaactttccccctgaagctcaagatactttagtacatgaattattattaacttcaatgcacagattgagaaactgggaaaaaatatgcaagccgcagagtggagaaagaaaat

SEQ ID NO: 881788 - DNA, 120 bp, Artificial Sequence
  ENSG00000237505_37 (sequence is synthesized)
tccaggtgtccatattccttgtcatgtaattgccactgtaattagatctacgtgatgatgacctttaggggactgcctcagagtgctgaattgttcaattcactagagtggcaccatcaa

SEQ ID NO: 881789 - DNA, 120 bp, Artificial Sequence
  ENSG00000237505_38 (sequence is synthesized)
aatgacctgataatgttagcacaattgtccttgtaccaagcagaagagtcctttcattccttttcttcctgtagttccagggctacacaagcccagcaaaaagcagaagcagtgaatgaa

SEQ ID NO: 881790 - DNA, 120 bp, Artificial Sequence
  ENSG00000237505_39 (sequence is synthesized)
caaattatttgggatgatgctagtggctgatgtctcagaggaggcaagcaccctttctcagacaacccagtttcttgactctcagccttctttggtttaactttggattgttaacccttt

SEQ ID NO: 881791 - DNA, 120 bp, Artificial Sequence
  ENSG00000237505_40 (sequence is synthesized)
actgcctgaaactttgtctaactccctgtgcctttggagtatgaagttcccagtatatcatctgcattgattttggttcctgtttcacaagctgtgcatcacagacctttatcttgcaat

SEQ ID NO: 881792 - DNA, 120 bp, Artificial Sequence
  ENSG00000237505_41 (sequence is synthesized)
tatccatggtccggatgaccaacttcagccttaaaaccaggagcagacttttccaatcaacttttgcaaattcaaggggaaagaaagaaaagaaccatgtaggctcttggatgttacttc

SEQ ID NO: 881793 - DNA, 120 bp, Artificial Sequence
  ENSG00000237505_42 (sequence is synthesized)
tagggaaaaaggaaggatatagcttgatatttttactgcagtctccccaaactttccactcatcatgctgccaacatcattattaatctgtaccttctctggaattttatgggcatgttg

SEQ ID NO: 881794 - DNA, 120 bp, Artificial Sequence
  ENSG00000237505_43 (sequence is synthesized)
aattcattgtcatctccagaaaagagcaaagcatggtgtggacaatttaaaaccacattcagttgctttattttggccaaaagtttaaacatttttgttctttattttttttttagcttg

SEQ ID NO: 881795 - DNA, 120 bp, Artificial Sequence
  ENSG00000237505_44 (sequence is synthesized)
ttaagccgtttgcagaactactgctatagattaaacctgacaggtctaagcacatagtataactgtataactgtgtgatgcacacatgtgtgtattcccttccctacacacacacacaca

SEQ ID NO: 881796 - DNA, 120 bp, Artificial Sequence
  ENSG00000237505_45 (sequence is synthesized)
cacacacacacacacacacacacattccatcagcatgtcagatttatggaatttgaaatgtttctttctctagagaatggtataacatttacataaaatatcagcttacattttgtgaaa

SEQ ID NO: 881797 - DNA, 120 bp, Artificial Sequence
  ENSG00000237505_46 (sequence is synthesized)
ttgtgaaatttgacaaattactcataaatctctctttctcccttaatctgttcttgacatgtccccaaaagttttgagatggccttagtgatacatcttatactcatgtcaagtattttg

SEQ ID NO: 881798 - DNA, 120 bp, Artificial Sequence
  ENSG00000237505_47 (sequence is synthesized)
ttgacatcaataggagttttactcatgtaagaagccctggattgggttaccagacacatgaagcagacaagaagcattcaaaagttgccagcgaataagaagtgtcaaataagtgtccac

SEQ ID NO: 881799 - DNA, 120 bp, Artificial Sequence
  ENSG00000237505_48 (sequence is synthesized)
cacaagagcaaatatccctgggtatccattaacttcaataaacagaacatatttggcagtgtgctgtttgacatggatttacaaaggagtttgccaaatcatttttttctttctctctgt

SEQ ID NO: 881800 - DNA, 120 bp, Artificial Sequence
  ENSG00000237505_49 (sequence is synthesized)
gaaatgtcagtgaaagaaaaaataggggaatggtggtcccattactggataatttctataatattgtataagaaagataagttatttgatattcaagatatgtatagtgcacagaggcac

SEQ ID NO: 881801 - DNA, 120 bp, Artificial Sequence
  ENSG00000237505_50 (sequence is synthesized)
caatttggtggggaattgatgactctttcaccaatcttctaagcactggcttttacaaagccagtcctatgacttacggccccattctgagtaaaacacatagttcaatatctcttgact

SEQ ID NO: 881802 - DNA, 120 bp, Artificial Sequence
  ENSG00000237505_51 (sequence is synthesized)
ggtatcttaaaaaattgtttaaaacaaatgttcttctatttctgttttagcatttatttttgtttgcacatgactaaggctgtttctttttggtaaatttaatttgctatagtctggacc

SEQ ID NO: 881803 - DNA, 120 bp, Artificial Sequence
  ENSG00000237505_52 (sequence is synthesized)
ccaacactgaaagaatgcatcctctgagatagggctgccaactatggcaagtagcattgcaaagtatataaatttgctctatatacttttcaaacttctcggatgcagtcactgacattt

SEQ ID NO: 881804 - DNA, 120 bp, Artificial Sequence
  ENSG00000237505_53 (sequence is synthesized)
ggcctgatctaggaaaccctggggattggaaaaacacaaagcatactactgtactgacatgcaaaatgtcttataatctgtctttatctttcatggctgcagtggtctggataaattaga

SEQ ID NO: 881805 - DNA, 120 bp, Artificial Sequence
  ENSG00000237505_54 (sequence is synthesized)
ccaaattgggctaaacactgtccttggctacactcacgtagctgttttcaacggctaataggagctgtgtgtgcacatccaaggacaggatttggccccctttgtctttgcacaagcagt

SEQ ID NO: 881806 - DNA, 120 bp, Artificial Sequence
  ENSG00000237505_55 (sequence is synthesized)
tgctttagttgatatgattattcctgaatgactgttttataagcagtatttttgcccagttttaatcttttttcactttattcttcatagtcaagacatttatgaatatggaaacgtgta

SEQ ID NO: 881807 - DNA, 120 bp, Artificial Sequence
  ENSG00000237505_56 (sequence is synthesized)
cagtgtctggcttagctcatcagcaggatatttcctctgctttacacagtcactcagagacccacgctgacagaaactgtccccagaggaacttctggtggtctcgttgctgcagccagg

SEQ ID NO: 881808 - DNA, 120 bp, Artificial Sequence
  ENSG00000237505_57 (sequence is synthesized)
aaagactgattctagagaatttcactgggcttttcctgaacagaatgtattccttctgctcaattcactggccaggatttgtcacatggtcccgtccaactatgaagtgctgggatgtgc

SEQ ID NO: 881809 - DNA, 120 bp, Artificial Sequence
  ENSG00000237505_58 (sequence is synthesized)
agttttccatgtgcccagaaaaaaagcggggctggattctagttcctccctagaagagaaggacacttccatccgctctgatggtaggcttccctgggccaagtgaaggaaataacacat

SEQ ID NO: 881810 - DNA, 120 bp, Artificial Sequence
  ENSG00000237505_59 (sequence is synthesized)
gctactcccaagcagagggtttggccaaatagtactctgcatgcggtactagatgttccacacatgcttctggactgatctgtcatgagacctggcattcatgggttacaactttgagat

SEQ ID NO: 881811 - DNA, 120 bp, Artificial Sequence
  ENSG00000237505_60 (sequence is synthesized)
tttgaaatgcagtgtttgcattgcaagtgacatctggctgacaggaacttggagaaatgggatacgaagtgaatgctgcagttaccacaagcatcatatttatcaaaaggtttaagatgc

SEQ ID NO: 881812 - DNA, 120 bp, Artificial Sequence
  ENSG00000237505_61 (sequence is synthesized)
gatgatcaattgtttgcacttctttgaactcccattaatttatctttatcagcacctaattcattgctgtcacatattatactctcaaaaaatttgtgtgaaatgaatgatgggctgtaa

SEQ ID NO: 881813 - DNA, 120 bp, Artificial Sequence
  ENSG00000237505_62 (sequence is synthesized)
catctatcagcagcagccaaagataactagctcactgtcataagcgtggaatatcctgagagggacccagctgatgtggctctgattgcaacgtcgaggatagtcttctccttcagaagc

SEQ ID NO: 881814 - DNA, 120 bp, Artificial Sequence
  ENSG00000237505_63 (sequence is synthesized)
agaaacaaaaacagaaacgaagatatccatgatacctaatgttacaaggagaagaaagcacttgtaatcacaagggtactgagaaaagaagttaaatgaaaaatggattgtggattatag

SEQ ID NO: 881815 - DNA, 120 bp, Artificial Sequence
  ENSG00000237505_64 (sequence is synthesized)
cctgagcagatttgagcctaaatgtaatataacagcttgtggcaaatggaggtagcaggagagtagagccaactagccaaaaatcccctggaaaggtgaaactgaaatcactcattcatt

SEQ ID NO: 881816 - DNA, 120 bp, Artificial Sequence
  ENSG00000237505_65 (sequence is synthesized)
caaaaagtgtttactgagtagcttcaaagagcaaatattaggttagatgcagtgggtgatgtaaggatgattcagacaactatttctcatggactttgcttactgagccatcaacacacg

SEQ ID NO: 881817 - DNA, 120 bp, Artificial Sequence
  ENSG00000237505_66 (sequence is synthesized)
gccacctttttctagatgaagtatcccatcatttgattctggattgagaactctttgagagcagagacgatggcttcacctgagtatccccagagcctgacgttagacaactatggtttt

SEQ ID NO: 881818 - DNA, 120 bp, Artificial Sequence
  ENSG00000237505_67 (sequence is synthesized)
cctgaacttaatcctctggatcttcagagcagagaaagtgcaccattcaaaagtggacagcaacagcagtgcagcccctttctggacatccttgaaagacggcagtgaaggaaatttctc

SEQ ID NO: 881819 - DNA, 120 bp, Artificial Sequence
  ENSG00000237505_68 (sequence is synthesized)
ccagtgggcagaacttcaaacacagcacctggagacacactggcaaaggaaataaccagaggcaagttcagctgtattgtggaaaaaaggatttaagcaaagattgaacctggtgaaatg

SEQ ID NO: 881820 - DNA, 120 bp, Artificial Sequence
  ENSG00000237505_69 (sequence is synthesized)
cggatagctggtccacttgaggacattccatttcttcgcttctccaatggagcaggtttctgcacgcagctcacatgcttatatgtatggtggcattgcctactctctacccagttgtcc

SEQ ID NO: 881821 - DNA, 120 bp, Artificial Sequence
  ENSG00000237505_70 (sequence is synthesized)
catcaactccctacactctacaccactgaaatctgtgcaaacaagatcaagctactgatcatcttctgaacaatgaattcttttctgacagggaaggattgttctgcaactcatgcggag

SEQ ID NO: 881822 - DNA, 120 bp, Artificial Sequence
  ENSG00000237505_71 (sequence is synthesized)
caccaagggtgctggagactcaggtccatagaacccagctttaccatacggatgtgcatcataacactgtatcatgataatgcaagactaaacacctgacttgatgcccagggcaatgat

SEQ ID NO: 881823 - DNA, 120 bp, Artificial Sequence
  ENSG00000237505_72 (sequence is synthesized)
gctgtgtttatcaaacaataaaactattatcttaaaaatctgtttaacttgaaaccatcctagatgattcaatacctcaaggctttcaagagaacaaacattgtgaacaacggcttgact

SEQ ID NO: 881824 - DNA, 120 bp, Artificial Sequence
  ENSG00000237505_73 (sequence is synthesized)
ttcttacgaagagaattaattaaattgtaaaccaatttttacgcaccctgatgattttttatgttgtttcctgagccgagtatccttgagaaattcaacagtgataagtaaaattgcatt

SEQ ID NO: 881825 - DNA, 120 bp, Artificial Sequence
  ENSG00000237505_74 (sequence is synthesized)
gtaactgctcaggatttgttcaacattcagtgtttattgaccagaagcagttaaagtgtttgggtaaggaatatagactcagagcagactgccccagctccaacccagcttctccactta

SEQ ID NO: 881826 - DNA, 120 bp, Artificial Sequence
  ENSG00000237505_75 (sequence is synthesized)
atagctatgaagttgagcaatttagtgaacctctcagtgcttcagttttctctataaaatggggataatttgaatctatctgcagatgccacgtgggttaaataagagcatatgggctta

SEQ ID NO: 881827 - DNA, 120 bp, Artificial Sequence
  ENSG00000237505_76 (sequence is synthesized)
tccattaatgtaaggcctccatagaacagacatttgactcaatatagcaatatattaaatatattcatataaattaaacatggtgactaacttcaactaatttccatcacagtggggaca

SEQ ID NO: 881828 - DNA, 120 bp, Artificial Sequence
  ENSG00000237505_77 (sequence is synthesized)
acaaaacatgtatttaaaacccacacattatttaaggaccagattaaatgcatcaaaatcttcattaattccatgttgttcaatgtaatctttcccacagcaacttaaatgtacttctct

SEQ ID NO: 881829 - DNA, 120 bp, Artificial Sequence
  ENSG00000237505_78 (sequence is synthesized)
ttaacatgttctaccaagttttataattaattatgtacatgtctattctttcctaccagattctgatatgcttgagacagattcacttcatcctctttctgcatgcctggttgaatgact

SEQ ID NO: 881830 - DNA, 120 bp, Artificial Sequence
  ENSG00000237505_79 (sequence is synthesized)
ggcacatagtaaatgctcaataaatgtttgataaatgaatgaataacaatatataaggcattatatggtgacgaaagcatcacacaaaagcatcacaactgaagcacaattaagtaccat

SEQ ID NO: 881831 - DNA, 120 bp, Artificial Sequence
  ENSG00000237505_80 (sequence is synthesized)
aaacattagccttcatctactgccatgacagctgaagagatccagagagatccactcctgatgtgcattcgtagggcgagttttacaaaaaacatggcacaggaggaggttcttaaatgt

SEQ ID NO: 881832 - DNA, 120 bp, Artificial Sequence
  ENSG00000237505_81 (sequence is synthesized)
ttaaacacagcactcagtcttatagaggctctgcttctttaatcggccctttctaatcttctctcctcattgtgaaattcgggaaatatgtttctttacatgcctcctcaaatttacaga

SEQ ID NO: 881833 - DNA, 120 bp, Artificial Sequence
  ENSG00000237505_82 (sequence is synthesized)
actggcccaagcattgattttctagacataattcactcccattgcagatgtcctaggaaatggagagctctatgacagaagtacacatcatgtgtccaaagtaacttcataatggtttct

SEQ ID NO: 881834 - DNA, 120 bp, Artificial Sequence
  ENSG00000237505_83 (sequence is synthesized)
gggttgttaaaacaggaagaaaccattgccttttagaggaaagctacagtaaatgtcaccatatgaataaacattgcagtgacatgcttaagcctggttttacttgttatgattatgttg

SEQ ID NO: 881835 - DNA, 120 bp, Artificial Sequence
  ENSG00000237505_84 (sequence is synthesized)
tctgactcttaccaccagaagtgtttccctcatattttccttcacattaacatttacgatggaggggcagcattcccctttgctcacattggccaaaattagtccctttacacccagcaa

SEQ ID NO: 881836 - DNA, 120 bp, Artificial Sequence
  ENSG00000237505_85 (sequence is synthesized)
tatttcaacagtcacagaccagtgagagaccagcataaacccagcttgctatgggcctcagcatgttccaccagctttactccagccaacaaaactgccatttggaatccatctgctgca

SEQ ID NO: 881837 - DNA, 120 bp, Artificial Sequence
  ENSG00000237505_86 (sequence is synthesized)
tttcacggacctaaattctgacctagtaggtagtcactgaactcgaactgagcagaaagggccagaggttctaaagggaaacattcttcagcgccactacatgtgccctaagacatgaaa

SEQ ID NO: 881838 - DNA, 120 bp, Artificial Sequence
  ENSG00000237505_87 (sequence is synthesized)
cacctaagacagcaccttgaggcatatttttcagtgcagaagtagcagaaaacagaacatgactccccaccccttctttatattccaatgagatttgctagtttaaccagagctgcagta

SEQ ID NO: 881839 - DNA, 120 bp, Artificial Sequence
  ENSG00000237505_88 (sequence is synthesized)
caaaagcacttgtggttcatgttatattaatagtgtggcctgattatcaaaaaccattactcttggttatcttgcagcggctgtacagagctgctataagtcagagtgactgcccacaca

SEQ ID NO: 881840 - DNA, 120 bp, Artificial Sequence
  ENSG00000237505_89 (sequence is synthesized)
ggcaaacccagaatgctatttgtacaaacaagtatggctcctctcctgcggaagtttccagtgcagatgccaatgtctttgccatccatttgcccttaaggaaaagggcttgctgaactc

SEQ ID NO: 881841 - DNA, 120 bp, Artificial Sequence
  ENSG00000237505_90 (sequence is synthesized)
aggcaaagtagggaattgagcctgttgactgccttggatgcttagtgtcccatattccctgtggctagcctgggcagagtctgtgagggattagagcatgaaggctatagtgcataatga

SEQ ID NO: 881842 - DNA, 120 bp, Artificial Sequence
  ENSG00000237505_91 (sequence is synthesized)
cctaaaatcttcggtttctggaaaaataaaaatctccctaataaaacctgtgaaaattgcaaatgaactgggaaagaggtaaagcaagtcatataaacgttggcaaaaacacaagtaaca

SEQ ID NO: 881843 - DNA, 120 bp, Artificial Sequence
  ENSG00000237505_92 (sequence is synthesized)
ctgagaaaacgtgttaacactcattaatggttaacaatctgattaaaatttttacagcacattgatccttggcctttcaaaagggaatctgtcattaaataatattttcaaggaaaatac

SEQ ID NO: 881844 - DNA, 120 bp, Artificial Sequence
  ENSG00000237505_93 (sequence is synthesized)
taatgacaacatacagagcttgagaaaaagcttcttttcctaaagcagcaacttaataaaaggcatgttataggctttatcagtaagccaaaatttcagccttgcctcttcttcccatca

SEQ ID NO: 881845 - DNA, 120 bp, Artificial Sequence
  ENSG00000237505_94 (sequence is synthesized)
ccattaagaggcttgcagaggtccacactctttaaagggcagacagcatggaagaactatcatgtacaatttgaagtagcagctaaaattggaatggtcacgagaaagcctgtttctttg

SEQ ID NO: 881846 - DNA, 120 bp, Artificial Sequence
  ENSG00000237505_95 (sequence is synthesized)
caattaaattgacaagctgtctatgattaccctagggaacttggcagctgagtgataaaaagactgcagtgtgttgaaaggtctaacgcaacttactaggtggacaaagaccacatctgc

SEQ ID NO: 881847 - DNA, 120 bp, Artificial Sequence
  ENSG00000237505_96 (sequence is synthesized)
ttaacatactgattgggagagttgtggaatgtacttggctacattagctgaggagagatactaaggatactttttcctctctaagaccctgtgcttagaacctgttgtagaaactaccca

SEQ ID NO: 881848 - DNA, 120 bp, Artificial Sequence
  ENSG00000237505_97 (sequence is synthesized)
caaatatttggaagcatgtatgaaaaacagtttagcacaatatctgatgttattcagcatgaacctaccattacaaatcaccagaattgagcagaagtttagaaagaaataataattaaa

SEQ ID NO: 881849 - DNA, 120 bp, Artificial Sequence
  ENSG00000237505_98 (sequence is synthesized)
aagacacgggtcgctcagcaaactaagagaaactgtgggtgaagagaagaaattgatgggacctgcatactttccattacttctaccttcctgtgaccacctggtcaaaagtttatgttg

SEQ ID NO: 881850 - DNA, 120 bp, Artificial Sequence
  ENSG00000237505_99 (sequence is synthesized)
ccttcctatctggattgatttctcagttcctcagtttacgcagcaccctccctcccaccctacattgcctatgggccctttaacagacgactacagacatcgtgaaagagagacagaatc

SEQ ID NO: 881851 - DNA, 120 bp, Artificial Sequence
  ENSG00000237505_100 (sequence is synthesized)
agcagaggatgagatactccaacactgtggagctgtgttagacttcctgggaaataaagaaatagacacacctctgttgccttggctatcgtacagaggcatggacgtgaggagaacagg

SEQ ID NO: 881852 - DNA, 120 bp, Artificial Sequence
  ENSG00000237505_101 (sequence is synthesized)
tacccactctgacaattgaacagtcagctcatggagacctgaaaccttatgcacaacaccttcccggcaggccagtagcaactccagcactatcccatttttgtgtggcagttttcattt

SEQ ID NO: 881853 - DNA, 120 bp, Artificial Sequence
  ENSG00000237505_102 (sequence is synthesized)
gtccttgcttctgcctctatttttcactttgcttttcttcccactgcatttactgatgccttttctctctgctctagttctctgctatatcatgacttctctttaatagtagcttctact

SEQ ID NO: 881854 - DNA, 120 bp, Artificial Sequence
  ENSG00000237505_103 (sequence is synthesized)
acctatggcttctactacttcacagctttggtttactgcctatgtgtctttcaaagtgtgtggcccactactctctatagacctctctacgtgtcacatcaaattccccaaggtgaagat

SEQ ID NO: 881855 - DNA, 120 bp, Artificial Sequence
  ENSG00000237505_104 (sequence is synthesized)
ctgattgactagttcagtgtttggtgtataataaccctgttgaataggattcttcctcagagtcactgcatgagcttctctgatagccatttcacaagtggctgactttgggataggtgc

SEQ ID NO: 881856 - DNA, 120 bp, Artificial Sequence
  ENSG00000237505_105 (sequence is synthesized)
tagttctaggtacaaaatttagaataaatatttcagaaataaagatcacaaaatgcagagtaattcaggtataactaattgtgtgtggactctattcagaagactaggagtctaataggt

SEQ ID NO: 881857 - DNA, 120 bp, Artificial Sequence
  ENSG00000237505_106 (sequence is synthesized)
tcactgtgtaggcaattaccaatttttgtttaatttttaaaatattattatttatttatagattgtgtttatacaggccaaggtaaattgaagagtttagctatgctatgaagtttctct

SEQ ID NO: 881858 - DNA, 120 bp, Artificial Sequence
  ENSG00000237505_107 (sequence is synthesized)
ctatagtgataatatctgataatgtataggatatcaaagaattatatgccgagaagggtcagaaatcaccttgtccagcaggtctcaactccttggtctcaatcagtttacaatcctaaa

SEQ ID NO: 881859 - DNA, 120 bp, Artificial Sequence
  ENSG00000237505_108 (sequence is synthesized)
aagaataattttaaatattcattcctttaaaaataatagtaataaataccttataaataaaataacatattttatgaaaaatacgtttgtattagtgagaagactggtgtcgtcttgcct

SEQ ID NO: 881860 - DNA, 120 bp, Artificial Sequence
  ENSG00000237505_109 (sequence is synthesized)
gtcgtcttgcctttttttgtcgatctttttaatggctagttgaatgaaagatagctggattcccatatttgcttctgcatttaagctattataatatcatatgtcatgtagccactagaa

SEQ ID NO: 881861 - DNA, 120 bp, Artificial Sequence
  ENSG00000237505_110 (sequence is synthesized)
aactccatggtgtacttgtgagcaaacaagagtgaaaaaggcaaatgacaccttagtgttattatgaaagagttttgatttcagagacatcctgaaaagatttcagagaccccagggtcc

SEQ ID NO: 881862 - DNA, 120 bp, Artificial Sequence
  ENSG00000237505_111 (sequence is synthesized)
ctggaccacattttgaaaatcttgaacatggtggcagaagtggggttagaactcagtatcctgtttattcattatgtcaggattcaagcaccaacaaaccaactgcccacattctggtcc

SEQ ID NO: 881863 - DNA, 120 bp, Artificial Sequence
  ENSG00000237505_112 (sequence is synthesized)
aaagagtagacaaaatgccaggtgtccacctgtctcttgctgtgaaaacctggcctcagaggagtgaaccaggctctgggaggtgaagagattggtgacatttcacagccatcaaaaggg

SEQ ID NO: 881864 - DNA, 120 bp, Artificial Sequence
  ENSG00000237505_113 (sequence is synthesized)
acacaaagataagaacacaggatccaagagatctcatccttgtcctttcgttggtctgtgtatgctgcagtttcactctaaacctgatgtactgaaggtttgttatagagaaataaacca

SEQ ID NO: 881865 - DNA, 120 bp, Artificial Sequence
  ENSG00000237505_114 (sequence is synthesized)
ataaatcggaagaaagaggacatgatttgttcacaccagtccctttcagcatttcccaggttagatcagaggggcaattctaggagcagcagtctgtattattgcctttaatttccccat

SEQ ID NO: 881866 - DNA, 120 bp, Artificial Sequence
  ENSG00000237505_115 (sequence is synthesized)
ggcccagactaacattgtcttttccctttgttacgcttttggcagaaggtctttccctcatggttagacttaattggaatccaagccaaagggggatgggacaggctgccatgttgtagc

SEQ ID NO: 881867 - DNA, 120 bp, Artificial Sequence
  ENSG00000237505_116 (sequence is synthesized)
actttcctgagccaattcttcagggaatatctgtgttccgttgatataatgtgtaatacaaggcttattgcacagtacatgggattaaaagaggattttaattttaaatttctttaaggg

SEQ ID NO: 881868 - DNA, 120 bp, Artificial Sequence
  ENSG00000237505_117 (sequence is synthesized)
aggggtaattctaatgaaacaaaaagtatatttttattcaaatttttagttgaatatatatatgtatacatgcaatagtatagtatatatagtgtgctggtatatgtctgtgcatatatt

SEQ ID NO: 881869 - DNA, 120 bp, Artificial Sequence
  ENSG00000237505_118 (sequence is synthesized)
actctccccaaagcaagggatctgcacgtgagctaagcctggacaatcaggaaatagccctggatttttgaaattgaggctggggcgagcttttctggtggtgaaagtgagaaagtgcac

SEQ ID NO: 881870 - DNA, 120 bp, Artificial Sequence
  ENSG00000237505_119 (sequence is synthesized)
actcagaagctgctggcaggtggggccctggtttctcagagaatcctgatttgcagtaggagaagacatgatagaggcagagctatggttttcctgaacttaatcctctggatcttcaga

SEQ ID NO: 881871 - DNA, 120 bp, Artificial Sequence
  ENSG00000237505_120 (sequence is synthesized)
gcagagaaagtctagtcctcaatctggtctggtgcccaagccctgcctctggagtcgagtctcaccttctacctcaattccatacgatgctggtctgttgaggagcagtagtaacatgcc

SEQ ID NO: 881872 - DNA, 120 bp, Artificial Sequence
  ENSG00000237505_121 (sequence is synthesized)
tttaccttggaggaatggaccaccaataatccctgtacaggtcttcaaacaaaaaatttataagattgaaataatccatcctttgaatattctacagaacttgcctgaaaccattggtcc

SEQ ID NO: 881873 - DNA, 120 bp, Artificial Sequence
  ENSG00000237505_122 (sequence is synthesized)
ctagttttttcaagggctattttactagtcagctcacacttggaatagttatatattcctggtgaattgaaattattataattatacacttgaagacctttgccaaataccaaaccgaga

SEQ ID NO: 881874 - DNA, 120 bp, Artificial Sequence
  ENSG00000237505_123 (sequence is synthesized)
cccctgccatcattcaacacaattgcacagacgctaatctcttcatgggaaggcatgcatgccccactgcatccctgcaagtgcagaaccagtcttcagcagcgacgcttagcggctgaa

SEQ ID NO: 881875 - DNA, 120 bp, Artificial Sequence
  ENSG00000237505_124 (sequence is synthesized)
gtgtgatacagttctgccgtcctttgaacagtgcaattcctcagagttcctggacaattcagaatcggtgaacctcaaaagtgaaatactacaattcctaaaaatacatgtaaatgggat

SEQ ID NO: 881876 - DNA, 120 bp, Artificial Sequence
  ENSG00000237505_125 (sequence is synthesized)
ctcaattgatctattgaaaaattaaaattcatttattattgtaccctaagctgggaaaacagactgtttcctgtacagtgtacacatgattgcactcttgctggattttcataatggctt

SEQ ID NO: 881877 - DNA, 90 bp, Artificial Sequence
  ENSG00000237505_126 (sequence is synthesized)
ttctgcctcagcctcccaagtagctggacttcaggcgcacgccatcacacccggctaatttttgtggtagatggagtctcactctgtcac

SEQ ID NO: 881878 - DNA, 74 bp, Artificial Sequence
  ENSG00000237505_127 (sequence is synthesized)
cctgacctcatgatcctaactgcttcttaatgactttctttgttccctttcattctctctcttttccaatattt

SEQ ID NO: 881879 - DNA, 120 bp, Artificial Sequence
  ENSG00000237505_128 (sequence is synthesized)
tttctttgttccctttcattctctctcttttccaatattttctccatatttgtatataaagttaatcttcctaaaatatcaactttgcccaaaaagtttgcaacagcttattattgccaa

SEQ ID NO: 881880 - DNA, 120 bp, Artificial Sequence
  ENSG00000237505_129 (sequence is synthesized)
caaaacagaatcagcttcctcatcctgtgattagatactctccataatctgactcctaaatcctgaagggaggtaagaaagaataaatatttatattttttctcttttaatgtcctcttc

SEQ ID NO: 881881 - DNA, 120 bp, Artificial Sequence
  ENSG00000237505_130 (sequence is synthesized)
aattgttttttctgatacctccatttaaattgaggtgtgaattacatacaattaaggggacaaatcttaagtgtaaagattagtaaatgttttacatatgcagtcacccaagaaaccatt

SEQ ID NO: 881882 - DNA, 120 bp, Artificial Sequence
  ENSG00000237505_131 (sequence is synthesized)
actgaatccaagttacgcaacattaccaatcccccagaaagctctcattcccctttcagactatactcccaaaggtgaccactattctaaccataatcaacatggattggtttttcctgt

SEQ ID NO: 881883 - DNA, 120 bp, Artificial Sequence
  ENSG00000237505_132 (sequence is synthesized)
tttcaatttcatatgaatgcagttatgcaacatgtacccttatgcctggcttccgttattcactgggcataataagataccattatgtagagctgttctttttcaatactcacagtgctc

SEQ ID NO: 881884 - DNA, 120 bp, Artificial Sequence
  ENSG00000277128_0 (sequence is synthesized)
agtaacactctgggagggctcaaaccacataaccaaatgtgccaagataatcctgagctcactcattgtcaggtgcctcactagctacttgggaggctgagtcaggagaattgcttgagt

SEQ ID NO: 881885 - DNA, 120 bp, Artificial Sequence
  ENSG00000277128_1 (sequence is synthesized)
ctgggaaaccgaggttgcagtgagtcaagagatcacagcactgcactccagcctggacaaaagaggtttcatggacaattcgaaccatgagtatatgcaaatgataaggtcaggattcat

SEQ ID NO: 881886 - DNA, 120 bp, Artificial Sequence
  ENSG00000277128_2 (sequence is synthesized)
attttacctcaactacatattataatcactatgctatctttgttaaggattttctatttattgtcacaaaaggcattcctttatggtataacaacctaaatgtcagggttttctttattt

SEQ ID NO: 881887 - DNA, 120 bp, Artificial Sequence
  ENSG00000277128_3 (sequence is synthesized)
attgtataaatatctatctgcattagttctaaaaaatgtattagcactttaagggcagaacccaaatactgtaatacatttacacagcactgagtacatcatgtatagtctaagtgtgta

SEQ ID NO: 881888 - DNA, 120 bp, Artificial Sequence
  ENSG00000277128_4 (sequence is synthesized)
taaaataccagcaattgtacatgtaaagaaaacttaccagacagttgtttccacttgactgtcattgagctgccaattatccaactggggaaacagtggaaaaagcacttgaatctgtcc

SEQ ID NO: 881889 - DNA, 120 bp, Artificial Sequence
  ENSG00000277128_5 (sequence is synthesized)
aattgaatgaattgcactatgaattgaatgtgttactatccctttcacatcctatgtctaaaaacaaaaatgtttattaaacttctatagaatgattttcatcactatttccttggtcca

SEQ ID NO: 881890 - DNA, 120 bp, Artificial Sequence
  ENSG00000277128_6 (sequence is synthesized)
aatacgtttataagggaattaaataacatagttggaaattttttaagccttcaattataatttttatacacatgtaagacaaaaaagtgagtacctttgctaatcacttttaaatttcaa

SEQ ID NO: 881891 - DNA, 120 bp, Artificial Sequence
  ENSG00000277128_7 (sequence is synthesized)
atcttaggtcaacctaagatttttttttacactaaaaatatgaagttaaaatcaaatgttattttaaaatcagaaatactattgatggatttaaagacaagtaattttaatgttacagaa

SEQ ID NO: 881892 - DNA, 120 bp, Artificial Sequence
  ENSG00000277128_8 (sequence is synthesized)
agtaatacaatcttaaagcaaagtatgtttttatatctaacaactaactgattcagttaattgatttaatttgaaaggctgtataatatataagataataggtatgacagatttcctact

SEQ ID NO: 881893 - DNA, 120 bp, Artificial Sequence
  ENSG00000277128_9 (sequence is synthesized)
tactaaggagacaaggccagggtagagcatattgctacagaaaagatagacattctttaaagtttcacttaaaagatctgcaaaagccaaaaagaaacaaaaagtcacagatttatagat

SEQ ID NO: 881894 - DNA, 120 bp, Artificial Sequence
  ENSG00000277128_10 (sequence is synthesized)
gagcaatgtttgatatataaaataaaaatattgttaaattctgacaagaacatgaaaacaaagccatgattcacccaccggaagcattagagcatgttgggaatgcacaaaaattgatgc

SEQ ID NO: 881895 - DNA, 120 bp, Artificial Sequence
  ENSG00000277128_11 (sequence is synthesized)
atcctcttttggtgatgattccaggcagagttgagtatcagtggccttagcaattatatgtaaaggcaatgctacttgcaagtttcccatcatataaaacctgtttatgatgttctgcca

SEQ ID NO: 881896 - DNA, 120 bp, Artificial Sequence
  ENSG00000277128_12 (sequence is synthesized)
acatttgcaataagaaagtacttgtgtacctttcatgtgtcagggactattcagtggtgttacttacttcgttatagtcacttcaattcaatgagagttaagttttattatgccaataaa

SEQ ID NO: 881897 - DNA, 120 bp, Artificial Sequence
  ENSG00000277128_13 (sequence is synthesized)
gatgctcagatcttcattttctaatttaaagtttttgattactggcaaaatcatttcattagaaaaaaatatcaaacctgattttatatataataggattgtacttgactacatcatagc

SEQ ID NO: 881898 - DNA, 120 bp, Artificial Sequence
  ENSG00000277128_14 (sequence is synthesized)
ataagtttaatttttcttgttaatactttaaaaagtatttatgtaaataaacagtgcctgacacatgaattacttacaaaaaagactatcatttgaggctataaaaagttaatatgcaaa

SEQ ID NO: 881899 - DNA, 120 bp, Artificial Sequence
  ENSG00000277128_15 (sequence is synthesized)
aatattcatatctttactaaaaataaaatcaacctatgaaataccaatgctactcaacaataatatcacaatatacatactaaactcagaagataagtttgttaaaacatgttattactt

SEQ ID NO: 881900 - DNA, 120 bp, Artificial Sequence
  ENSG00000277128_16 (sequence is synthesized)
tttatgaaagacaactaaacatatgccatctataacaagaaaggtattgttagacgtggttaaaattgctctgcagatatgagtctaataatgataaatgatatttaacctttgcaatca

SEQ ID NO: 881901 - DNA, 120 bp, Artificial Sequence
  ENSG00000277128_17 (sequence is synthesized)
tcacatatcaatattactattactttcaacttacaactatgaaagcttaatgttaagaaattaagatttagaagggaaggggccagcatgtaattctaagtcttttgatttatagtccat

SEQ ID NO: 881902 - DNA, 120 bp, Artificial Sequence
  ENSG00000277128_18 (sequence is synthesized)
attcaatgtatcactagtgaaatcatcttaaaatcctgactctgccactaatctttttcagcttaggaagtcttttagctgatgtggctccaattttctcactcaatgttataatagggt

SEQ ID NO: 881903 - DNA, 120 bp, Artificial Sequence
  ENSG00000277128_19 (sequence is synthesized)
taaatcaaatgtcccaaactcaagttctcacaggaggcacacagatatgcatgtaagcgaatttggccagatggggacttcctcaaactagagaatgtttgtcctttctaaaagtggccc

SEQ ID NO: 881904 - DNA, 120 bp, Artificial Sequence
  ENSG00000277128_20 (sequence is synthesized)
ctactcctcagttcaagtcagttgttcaatgttgctagttcttccatatttttcaagagaaacatgaaatccgaatttttatctaaaagcactatattttacaatttaattaaaacattt

SEQ ID NO: 881905 - DNA, 120 bp, Artificial Sequence
  ENSG00000277128_21 (sequence is synthesized)
taacactgtgaagaccaatcatgtcagtttttacttctggactagtgtgtagagactaatacaaaactggatgcaaactattaattattaggcatgtgccaagacaagagcaacatgaat

SEQ ID NO: 881906 - DNA, 120 bp, Artificial Sequence
  ENSG00000277128_22 (sequence is synthesized)
aattaaaaatttgtgtatgctgtagtctgaagtatttcattgataatactttttttttgaatgaggagggtagtgttatcactagaatgcttaagaactcagcatatctgcattcaaaaa

SEQ ID NO: 881907 - DNA, 120 bp, Artificial Sequence
  ENSG00000277128_23 (sequence is synthesized)
aacaatgactgaattaaaacacacaagatatgttgttaaacactaaatcagctttccgtgtctgcattttacaaatgctgaaacatttgtacatcccattgtctagaacaaaactcctgc

SEQ ID NO: 881908 - DNA, 120 bp, Artificial Sequence
  ENSG00000277128_24 (sequence is synthesized)
tttcattttgttcatcttgcttacactggaattaacaagttttaatatattatcttaaaggatttaaaatacctttgtggaaatgtaagatgtttaataaaacctattcttatttggaaa

SEQ ID NO: 881909 - DNA, 120 bp, Artificial Sequence
  ENSG00000277128_25 (sequence is synthesized)
agtaacactctgggagggctcaaaccacataaccaaatgtgccaagataatcctgagctcactcattgtcagagaaggaatcataggcacagagttataagtatgttgaagaatgttaca

SEQ ID NO: 881910 - DNA, 120 bp, Artificial Sequence
  ENSG00000277128_26 (sequence is synthesized)
aaaccggtaagagacctaggatccaagcacaagacgtctgtcttcgtgcaagttcatataaacattacaatctcatttaagaatatttttttaggagggaggtgagacaagacggcagaa

SEQ ID NO: 881911 - DNA, 120 bp, Artificial Sequence
  ENSG00000277128_27 (sequence is synthesized)
actcacagtacctggttttaacctcgtatcactgaaagagacactgaaaagacagaaaaacagttccgagtctccggtgccacccctccctgaccccagcagcatggcttggtgccaaga

SEQ ID NO: 881912 - DNA, 120 bp, Artificial Sequence
  ENSG00000277128_28 (sequence is synthesized)
gcatctctgggtgctggtgaagggagaacagagcaattgtgaggcactgaactcagtgccattttgttgcagcaaaaaggaaaacctgaccaaactaagctgaagtccacccaaaagaag

SEQ ID NO: 881913 - DNA, 120 bp, Artificial Sequence
  ENSG00000277128_29 (sequence is synthesized)
aagcacaaatgtgaattgggtaaagaaagctgatttaacagcaacacatttgacttcaatattatggtaaatgagtccaaagtcatactgcccctcccgtttggtattttaagtacagta

SEQ ID NO: 881914 - DNA, 120 bp, Artificial Sequence
  ENSG00000277128_30 (sequence is synthesized)
atagacaaatacacacagaataaaataacacaataatactctgttactctctgttgatcgaatcccataagaactattatattcagttataagcatcattcttaaaaaagaacactgtca

SEQ ID NO: 881915 - DNA, 120 bp, Artificial Sequence
  ENSG00000277128_31 (sequence is synthesized)
aactggatatccttttggtctaaagaatgataagatttaggaataaaataataatcatatacaacacctcacaaattcaaagtaattaattcctttgttcattcaataaataatttatta

SEQ ID NO: 881916 - DNA, 120 bp, Artificial Sequence
  ENSG00000277128_32 (sequence is synthesized)
aggtctagaagttactgttctgggaactagaatatatgaacatccaagataaagaccatgcactaacagtgctaaattctaggaacaaagatttatatgtatgtatgcatacactacttt

SEQ ID NO: 881917 - DNA, 120 bp, Artificial Sequence
  ENSG00000277128_33 (sequence is synthesized)
attccaaaaaaacactgaaggtggctacaagttatgtaaagcatgaaggaaggcataaaatatgagtagatgagaaaagaggaagcaaaggaaaacaagattaggaacagacagggagta

SEQ ID NO: 881918 - DNA, 120 bp, Artificial Sequence
  ENSG00000277128_34 (sequence is synthesized)
gaattaggatcaagaagtagaattaatttcctatcactgaaaggtattcgcaaatacagacaggtcaccacagaatatgatataaataagataaatagtaacaataccaccacctaacct

SEQ ID NO: 881919 - DNA, 120 bp, Artificial Sequence
  ENSG00000277128_35 (sequence is synthesized)
cagccagagggcaatcactgataccagcagtccaaacctgactgcccgcaaacctcagtaccaaaggccacagtgctcttgttgtctaagtaaattggaaaggtaatctaggccataagg

SEQ ID NO: 881920 - DNA, 120 bp, Artificial Sequence
  ENSG00000277128_36 (sequence is synthesized)
actgcacctcataggtgagtcctagtgctgaactaggcccaaagacaatggactgaagtggcatgggacatactgagataccagctggggcagctacgggaatgttggcatcacctctcc

SEQ ID NO: 881921 - DNA, 120 bp, Artificial Sequence
  ENSG00000277128_37 (sequence is synthesized)
cctaacctgagactgcacagcttgtggatccaaaagaaaccccttccttccacttgagaagaggagagggaagagttgggaggagtttgtcttgcatcttgcttatcagctctgccacag

SEQ ID NO: 881922 - DNA, 120 bp, Artificial Sequence
  ENSG00000277128_38 (sequence is synthesized)
aaggacagggcaccttgaggtcatgaggcccttgtgccaggttctagctctggggtgacatttctagatacaccctgggccagaaggaaacccactgccttgaaggaaaggacccagtcc

SEQ ID NO: 881923 - DNA, 120 bp, Artificial Sequence
  ENSG00000277128_39 (sequence is synthesized)
tggcagcattcatcatctgctaactgaagagcccttgggtcctgaataaccagcagtgatacccgggtactacgttgaggaccttggtgagcttctgagacttgttggcttcaggtgaga

SEQ ID NO: 881924 - DNA, 120 bp, Artificial Sequence
  ENSG00000277128_40 (sequence is synthesized)
ctatgcacattaccagctgtggtggctatggggcaaaactccttccacttgataaaaacagaaggaagagtaaaggggactttgttttgcatcttaggtaccaacaccaccactgtgggg

SEQ ID NO: 881925 - DNA, 120 bp, Artificial Sequence
  ENSG00000277128_41 (sequence is synthesized)
ctaggacttgactcttggacagcatttctagacctgcccttggccaaaggggagcccactgccctgacgggtgagtcccaggccaggcagtattcaccacaagctgatataagagccctt

SEQ ID NO: 881926 - DNA, 120 bp, Artificial Sequence
  ENSG00000277128_42 (sequence is synthesized)
ggtccttaagggaacatcggtggtactttggcagtactcctcatggccaggtgtggcggtggctacggggtaaggctcctcagcttttggaaaggggaaaaagtggaaagagtgggaagg

SEQ ID NO: 881927 - DNA, 120 bp, Artificial Sequence
  ENSG00000277128_43 (sequence is synthesized)
attgtgtcttgtggtttgagtgccagctcagccacagtacaacagaatgccaagtagatttctaagttttttgactctagtccctgactcctctatggcatctgtggacccactggtggc

SEQ ID NO: 881928 - DNA, 120 bp, Artificial Sequence
  ENSG00000277128_44 (sequence is synthesized)
cagggggactttgccaccctgaagagaaggacacaggcccagccgacttttctacctgccaattgcagagccccagggccttgagtgaatataggctatagccaaggagtgattaagaca

SEQ ID NO: 881929 - DNA, 120 bp, Artificial Sequence
  ENSG00000277128_45 (sequence is synthesized)
ggccttgggcaagacccagcactgtgcttgcttcaggtgtgacccagtacctgaagtggtggtggtggtcataggggtgcttgtatcatacatcataccagccccagctttaggtgcctc

SEQ ID NO: 881930 - DNA, 120 bp, Artificial Sequence
  ENSG00000277128_46 (sequence is synthesized)
agaacagagagagagagagactctgtgttcttgggagaaagtaagggaagagaaaaagagactctgcctggtaatccagagaatcaccccagatcttatccaaggccatcaaggcagtac

SEQ ID NO: 881931 - DNA, 120 bp, Artificial Sequence
  ENSG00000277128_47 (sequence is synthesized)
ctctacaagtctgaaagaaccagtgtcactggaaagccttcccaagaaggatggctacaaataagctcaggcaatgaagagtacaataaatacctaactcttcaatgctcgggccccgag

SEQ ID NO: 881932 - DNA, 120 bp, Artificial Sequence
  ENSG00000277128_48 (sequence is synthesized)
gaacatctactagcattaacaccatccagaaaaacatgacctcaacaaacgaactaaataaggcaccaagaatcaatcctcgagaaacaaagatatgtgacctttcacatggagaattca

SEQ ID NO: 881933 - DNA, 77 bp, Artificial Sequence
  ENSG00000277128_49 (sequence is synthesized)
cacagagaagggattttaaaaaatcgagcagaaattctggagctcaaaaatgcaattggcatacttaagaattcatc

SEQ ID NO: 881934 - DNA, 120 bp, Artificial Sequence
  ENSG00000277128_50 (sequence is synthesized)
tggagctcaaaaatgcaattggcatacttaagaattcatcaagtccttcaagagcaaattggatcaagcagaggaaagaattaatgagcttctgaagaaaggctatttgaaaacacacag

SEQ ID NO: 881935 - DNA, 120 bp, Artificial Sequence
  ENSG00000277128_51 (sequence is synthesized)
aggagaaaaaagaataaaaaccaatgacacatgcttacatgatctagagaatagcctcaaaagggcaaatctaagaggtattggccttgaaaaagaggtagagaacagggtgagaaagtt

SEQ ID NO: 881936 - DNA, 120 bp, Artificial Sequence
  ENSG00000277128_52 (sequence is synthesized)
ggtagagaacagggtgagaaagtttattttgagtaaaccttcaaataacagagaactacccaaatctagagaaaatatccaaatacaagaaagttatagaataccaagcagatttaaccc

SEQ ID NO: 881937 - DNA, 120 bp, Artificial Sequence
  ENSG00000277128_53 (sequence is synthesized)
aataatcaaacgcccaaaggtcaagaataaaataagaatcctaaaagctgcaagagaaaagaaacaataacatacaaaggagccccaatacatctggcagcagacttttcagtgaaaacc

SEQ ID NO: 881938 - DNA, 120 bp, Artificial Sequence
  ENSG00000277128_54 (sequence is synthesized)
ttatatgccaggagacagtggcatgacatatttacattgctgagggaaaaaaacttttaccctagaataacatatccagtgaaaatatcatttgaccatgaagaggaaataaagactttc

SEQ ID NO: 881939 - DNA, 120 bp, Artificial Sequence
  ENSG00000277128_55 (sequence is synthesized)
ccaaacaaataaaagctaagggatttcaacaacagcagacctgtcctacaaggaatgctaaagggggcactccaatcagaaagaaaagggcattaatgagcaataaatgatcacctgaaa

SEQ ID NO: 881940 - DNA, 120 bp, Artificial Sequence
  ENSG00000277128_56 (sequence is synthesized)
atacaaaacttactggtaatataagtacacagaaaaatacagaatattataaacactgttactgtggtttgcaaactactcttatcctaggtagaaagactaaatgatgaattaaacaac

SEQ ID NO: 881941 - DNA, 120 bp, Artificial Sequence
  ENSG00000277128_57 (sequence is synthesized)
aataataactacaacaacttttcaagacataggcagtagaagatataaacagaaacgacaaaaagttaaaaagcaaggaaatgaagttaaggcaagtttctactagttttctttttgctt

SEQ ID NO: 881942 - DNA, 120 bp, Artificial Sequence
  ENSG00000277128_58 (sequence is synthesized)
gtttgtttgcttatgcaaatagtgtcatgttatcaggttaaaataatgagtgataagatagcatttgcaaggctcatggtaacctcaaaccaaaaaacatacaatggacacacaaaaaaa

SEQ ID NO: 881943 - DNA, 120 bp, Artificial Sequence
  ENSG00000285878_0 (sequence is synthesized)
aatgcatcagtgtctcaataacagaatttatcaagcagaagaataaattagtgagtttgaaaacatgaaaatatagaggagaaaaagaaagaagaataaaaaggatgaagtatgcctaca

SEQ ID NO: 881944 - DNA, 120 bp, Artificial Sequence
  ENSG00000285878_1 (sequence is synthesized)
agatctaaaaaataacttcaaaaggacaaatctataacttattggccttgaagaagatgtaaagaaagagatcaggatataaagtttgttcaaagaaataataacagagaacttgcctag

SEQ ID NO: 881945 - DNA, 120 bp, Artificial Sequence
  ENSG00000285878_2 (sequence is synthesized)
catagagaaagataagaatatccaggtacaagacagccaaaatcactaacagattctatctaaataagacttcttcatggcatataataatcactcttaaaggccaaggacaaagaaaag

SEQ ID NO: 881946 - DNA, 120 bp, Artificial Sequence
  ENSG00000285878_3 (sequence is synthesized)
ggcagcacatttctcagtggaaccctcacatgccatgagggagggggatgacatatccagagtgctaaaggcaaaaaaaagcttccaacttagaatattatatccagcaacatcattctt

SEQ ID NO: 881947 - DNA, 120 bp, Artificial Sequence
  ENSG00000285878_4 (sequence is synthesized)
caaacataaaaaagaaataaaaactttcccaggcaaacaaaagctaaaaaatgtcaccaacaccagaactataaagggaattcttcaatttaaaagaaaaggattctcaagcaacaagaa

SEQ ID NO: 881948 - DNA, 120 bp, Artificial Sequence
  ENSG00000285878_5 (sequence is synthesized)
atcatctgaaggtataaaagtcactggtaaaacattattcacaacagccaagacatggaaacaacctgaatgtccatcaacagatcggataaagaaaatgtgggtcaggcacggctgctt

SEQ ID NO: 881949 - DNA, 120 bp, Artificial Sequence
  ENSG00000285879_0 (sequence is synthesized)
ttttttttttctttttcttttttaaagaaagagagagggtctcagtatgttgcccagggtggcttgtaactcctgggctcaagggatcctctgacctcagcctccaaagcagctgggact

SEQ ID NO: 881950 - DNA, 120 bp, Artificial Sequence
  ENSG00000285879_1 (sequence is synthesized)
acagatgtgggccactgtacccagctcttttttttttttttaaagaaaaaaaaagttttatttggataaagaaaataaaggcggacaacagaattaacagtgacttaatttttatttttg

SEQ ID NO: 881951 - DNA, 120 bp, Artificial Sequence
  ENSG00000285879_2 (sequence is synthesized)
cctattttcccctctatataagaaactataaatgttttctcactttattaattaattggactaatcatttaatgcaatcccctcccaaccaataacattattttaaagcaataatgggtc

SEQ ID NO: 881952 - DNA, 120 bp, Artificial Sequence
  ENSG00000285879_3 (sequence is synthesized)
ttacagttgaaggcatcctagaatcaagaatatatgcaaaacagtacaccttaatgaaattcaggtatggctgggtatacaggttggaaaataaaagttcccaaggacatcagaggtatc

SEQ ID NO: 881953 - DNA, 120 bp, Artificial Sequence
  ENSG00000285879_4 (sequence is synthesized)
ttcaagatacaatttagaagggtcaagttgcgcagaggaggataagagtgtacactaagaaaataaactctttttattccttctccacacatttatcttaagaattcatccttaaaagtt

SEQ ID NO: 881954 - DNA, 120 bp, Artificial Sequence
  ENSG00000285879_5 (sequence is synthesized)
gtaaaagtaatgctagagttaacagaagtgggaaaatagatggtagaaaagaggcaaaaagcaatacagagctaagaatttctgtatcttatacatatggagtcaatacaaaatgtctaa

SEQ ID NO: 881955 - DNA, 120 bp, Artificial Sequence
  ENSG00000285879_6 (sequence is synthesized)
acttgatagaacaagaaatagaaatttaagcatgttattcaagttacaaatgtaactgacagaggctagtctgaaggtagtgagttacctcagttgactgttcagttagttgcagatcaa

SEQ ID NO: 881956 - DNA, 120 bp, Artificial Sequence
  ENSG00000285879_7 (sequence is synthesized)
actccttgttctactctttcccctctttccactactgcatatgtgactagtctaaaaaatgcttttaatcgaaataaattttttttaggccaggcacagtcgcggagcactacagcctca

SEQ ID NO: 881957 - DNA, 120 bp, Artificial Sequence
  ENSG00000285879_8 (sequence is synthesized)
aactcccaacctcaagtgatcctcctgccgcagcctcttaagtagcttgaactacaggtgtgcaccaccacacccaaatctccgaaatccttatattaaaggcaatattctagtcagaga

SEQ ID NO: 881958 - DNA, 120 bp, Artificial Sequence
  ENSG00000285879_9 (sequence is synthesized)
atattataaaacaattagaaaatactaacatagtaaattcagacttgctttttttccaaggagaaatgttatttgtatcatcccatcaaacatttttggtatttaacactcagaaaagtg

SEQ ID NO: 881959 - DNA, 120 bp, Artificial Sequence
  ENSG00000285879_10 (sequence is synthesized)
agttaaaacaaaaacatgtcaccacaataacaattcgaagtattattagttactataaaggattgcagagaatactgttgctctccatgagctcacactacaatatctaaaacaaaaagt

SEQ ID NO: 881960 - DNA, 120 bp, Artificial Sequence
  ENSG00000285872_0 (sequence is synthesized)
gaagagccgagttgccccagccccgcacccccagccccagccccgcgtgcagctcgcaccccttcccacgcctgttcgggggagagccccgggcctggagtgggaagcctggctccagct

SEQ ID NO: 881961 - DNA, 120 bp, Artificial Sequence
  ENSG00000285872_1 (sequence is synthesized)
ctggttacctgcagtgactccccaggccgtttaggcgagtccattgggccgcctctgcctcggtttccccacctaaccacggaaggtgctcctcccttccaggcatctgtggtcttcgag

SEQ ID NO: 881962 - DNA, 120 bp, Artificial Sequence
  ENSG00000285872_2 (sequence is synthesized)
ctccacgcgggagaggcgccggtctggcacctcctgcccagggtcggcgcctcctggctctcggggaggggggcatcctccatcccctgcacctgcctcgagaggaaccagggacagagc

SEQ ID NO: 881963 - DNA, 120 bp, Artificial Sequence
  ENSG00000285872_3 (sequence is synthesized)
acccccacccccaccaggagctccggaaaaacggcttcagaagagcaaatatacacacacacccacctcccgccccaaacatccccgaagaaaggtaaccacagaaacagccagaaatgt

SEQ ID NO: 881964 - DNA, 120 bp, Artificial Sequence
  ENSG00000285872_4 (sequence is synthesized)
ggagctgggcgatcgtatgaggctgagacaaaactgtctttctagcgtctctaggggagagcttgaatccctccttccactcctcctccacggaaaacagagtgaactcctgctacagag

SEQ ID NO: 881965 - DNA, 120 bp, Artificial Sequence
  ENSG00000285872_5 (sequence is synthesized)
gccgccagagcaacatgcaagaccagctttgaggggagcgggcacagggccttgcagggaaggtgggccgagcccagacccctcattcttacttggctctgaaggcggaaaggcaaagct

SEQ ID NO: 881966 - DNA, 120 bp, Artificial Sequence
  ENSG00000285872_6 (sequence is synthesized)
agacctcgaggaagttcccctccctgtgggccctacagtgaagattacatgaaggcatgtgggcggtggaccagagtgcaccgactgatgaaggcggcccggtacccgcgggtgccatgc

SEQ ID NO: 881967 - DNA, 120 bp, Artificial Sequence
  ENSG00000285872_7 (sequence is synthesized)
tgtatctctctcagatgagatacaagttggtcccttcccttgcgtccctcctgttccttcaagaggaggactgtctacccaccccgaagcttcatggagagagagcacaccgtcgttatt

SEQ ID NO: 881968 - DNA, 120 bp, Artificial Sequence
  ENSG00000285872_8 (sequence is synthesized)
caatatgtagttttgaatttaactagagcaaagaagaaagcaaattcagtcacatcatggcccagaatggctgcaaaacctctagcatttacttccttattccaggtggaaggaagaaga

SEQ ID NO: 881969 - DNA, 120 bp, Artificial Sequence
  ENSG00000285872_9 (sequence is synthesized)
tctagcatttacttccttattccaggtggaaggaagaagaaaagggaaaagggctgtccccatccttctaaggagatggtgcagtggctcacctttgggaggccgaggcaggcagatcac

SEQ ID NO: 881970 - DNA, 84 bp, Artificial Sequence
  ENSG00000285872_10 (sequence is synthesized)
gtttgagaccagcctgggtaacatagtgaaaccccatctctacagaaattaaaaaattagccagacatggccggcagaagtatg

SEQ ID NO: 881971 - DNA, 120 bp, Artificial Sequence
  ENSG00000285872_11 (sequence is synthesized)
atgctactgcactccagcctgggcaacgaagcaagactgtctcaggaaaaaaaaaaaaaatgatcatttttctctgtccacttggtgggtcaactgaatggtattcctgtgtcttctact

SEQ ID NO: 881972 - DNA, 120 bp, Artificial Sequence
  ENSG00000285872_12 (sequence is synthesized)
gtgtcttctactctcctcccacttggaaacccactgagatgctcttccgaaggccagtgcatgctgggccacacgagacagagctcaggctggaggagcctcatacccgcccctctagat

SEQ ID NO: 881973 - DNA, 120 bp, Artificial Sequence
  ENSG00000285872_13 (sequence is synthesized)
gcttataaaaatacttcccacctttgaatcaagtggaaaatgaggctctccagtcaaaagccgcgactgtatagaaagccctgagttgcccaatctgttcacatggcatcaccaacctct

SEQ ID NO: 881974 - DNA, 120 bp, Artificial Sequence
  ENSG00000285872_14 (sequence is synthesized)
gtgtcatcatcaagctgtccaggggactcgatggccacctggccaggaactgcgggctgattggaagctgttgttcccattgtataatcacacacatcataaaataatcagtcttgtctc

SEQ ID NO: 881975 - DNA, 120 bp, Artificial Sequence
  ENSG00000285870_0 (sequence is synthesized)
ctgcttacagctgcttccaaattaagcatatctggatggtgtgacactttttgttagtccgagaactgtatgggcatcgcaactgggcctgttccaagatagacttgttgggaccttcaa

SEQ ID NO: 881976 - DNA, 120 bp, Artificial Sequence
  ENSG00000285870_1 (sequence is synthesized)
atcatgtaccttacaggaggacagggttcctccgtgtgtgggagtcatcgttcattcattcattcgctttcactgaacatttgttaaacatatatttttgaaccagagtactaggatttt

SEQ ID NO: 881977 - DNA, 120 bp, Artificial Sequence
  ENSG00000285870_2 (sequence is synthesized)
taggtaccacattataacaagatgaattccatgcaagttaatgtgaaggaattcacaacctgatagatgagacaaatataaacaaaaaaaatttacagtgtagaaatgataggggagtgc

SEQ ID NO: 881978 - DNA, 120 bp, Artificial Sequence
  ENSG00000285870_3 (sequence is synthesized)
gaagagcgtggtccctttaaatgatagggatgggcgaagtgaagtgctgggtagaggagtgtgtggtcccttgctagggctccacgcccaccgacctaggtgaggactgacactcctgcc

SEQ ID NO: 881979 - DNA, 120 bp, Artificial Sequence
  ENSG00000285870_4 (sequence is synthesized)
ttcccaagaccaccctggcctgccactcccccatactgtgcctatgaaaaccccagaccctagcaggcaggtacacaggcagccagacgtccagaggagcataagggtggaagaagagga

SEQ ID NO: 881980 - DNA, 120 bp, Artificial Sequence
  ENSG00000285870_5 (sequence is synthesized)
agaggagcataagggtggaagaagaggagctcgctggcacatccgcaggccattcacgggcagaacgatgcggaggttggcctgggcagtcggaaaagagcccgggccgccaagcggcct

SEQ ID NO: 881981 - DNA, 87 bp, Artificial Sequence
  ENSG00000285870_6 (sequence is synthesized)
cctgggcagtcggaaaagagcccgggccgccaagcggcctaactccagaggaaaaccatttcccttctgggtccctcatctgctgag

SEQ ID NO: 881982 - DNA, 78 bp, Artificial Sequence
  ENSG00000285870_7 (sequence is synthesized)
gctcgctgtctgtgcctaaaggcaaactgaaagagcatcctgtaacacacacccactggggcttcaggagctgtaaac

SEQ ID NO: 881983 - DNA, 120 bp, Artificial Sequence
  ENSG00000285870_8 (sequence is synthesized)
gggcttcaggagctgtaaacattcacccccagactctgtcaaggggtcggagccccacagcctgccggtctgtatgcttctctagaggtctgagcagcggggcactgaagaagcgagcca

SEQ ID NO: 881984 - DNA, 120 bp, Artificial Sequence
  ENSG00000285870_9 (sequence is synthesized)
tgcacgccctgtgagggggacaagggaacctctcccatttcagaaagacaaaggtcacagaaactgaaaactacatccctgagagttttatgaaaaattttcagaccttctcaaaaatgt

SEQ ID NO: 881985 - DNA, 120 bp, Artificial Sequence
  ENSG00000285870_10 (sequence is synthesized)
agtgaaagaatacattcctaaccctttgattactcaatcgcccaagtcttcgacgcttctcaggactctgtcctcagccatcttctctttctcatccacccatttttcagtaatttcatc

SEQ ID NO: 881986 - DNA, 120 bp, Artificial Sequence
  ENSG00000285870_11 (sequence is synthesized)
cacttacataactttaaccatcaactaaacaaagatagcttacaaaactagttgtaagatctcttcccttaaactaaatatatccaaatgcctatacatttctaccaatatctatccctc

SEQ ID NO: 881987 - DNA, 120 bp, Artificial Sequence
  ENSG00000285870_12 (sequence is synthesized)
aaatcacttaaggcacatgtctaaaactgaactcagcactgaagatgatagattggagaagggagagacttaaggtagttattccaataacataaaaggagagatcaaaaacggtgacac

SEQ ID NO: 881988 - DNA, 120 bp, Artificial Sequence
  ENSG00000285870_13 (sequence is synthesized)
caccaaacgctggtgaggatgtacagaaactggatcacttatatgttggtggtaacatgtacagtgatacagcctttctgaaaacaattgggcagtttctttaaaaaactgaatatgcaa

SEQ ID NO: 881989 - DNA, 120 bp, Artificial Sequence
  ENSG00000285870_14 (sequence is synthesized)
ctaccatatgacacagcaattgcactccagagcattggtcctagacaaatgaagacttgtgctcataaaaaaaaccttgtgagtgtatatgcagctttattcatcataacccaaatctgg

SEQ ID NO: 881990 - DNA, 120 bp, Artificial Sequence
  ENSG00000285870_15 (sequence is synthesized)
aaacaatccagatatccttcagtgggtgaatggttaaataaacatggtacatctataccatgggatactactgagcaacaaaaaaaaagatacatgtagcaaccttgatgaatcttctga

SEQ ID NO: 881991 - DNA, 120 bp, Artificial Sequence
  ENSG00000285870_16 (sequence is synthesized)
gaattacgctgagggaaagaagccaatcccaaaggttgcatcttgtcaaatgccatttatataacattcttaaaatttaaaaaatatagaaggatccatggttgctaagggttaaagtgg

SEQ ID NO: 881992 - DNA, 120 bp, Artificial Sequence
  ENSG00000285870_17 (sequence is synthesized)
aggtggtggcaagggggaagtgggtgtgactgtagaagggcaatatgaggaattctgatgatggaaatgttcgtttcttgactgtatcaatgtccatatcccagttgtgatgttgtacta

SEQ ID NO: 881993 - DNA, 120 bp, Artificial Sequence
  ENSG00000285870_18 (sequence is synthesized)
tagttttacaagatgttactgttgaaggaaactggaaaaatcgtacataggatctatctgtatcatttcttacaacttcatgtgaatctacaattatatcaaaataaaaattttacccaa

SEQ ID NO: 881994 - DNA, 120 bp, Artificial Sequence
  ENSG00000285871_0 (sequence is synthesized)
ttataggcgtgagccaccgcgcccggccccagatctttttttatgtagtggcgcgcacatacacacacacacaccccaaaccaaaatgtcaagtctatgaggaagagcaatggaaagagc

SEQ ID NO: 881995 - DNA, 120 bp, Artificial Sequence
  ENSG00000285871_1 (sequence is synthesized)
aatgtcaagtctatgaggaagagcaatggaaagagcctgaagggaaaagattgggaaccatggcattttgagaacctatctacagctactaaggctttttgggtgttgggaaaacaggct

SEQ ID NO: 881996 - DNA, 120 bp, Artificial Sequence
  ENSG00000285871_2 (sequence is synthesized)
attgcttaacaagggtggggaagagcgacatgaatgtcatgaaacaagaatgggggcatcaaagacaaattcatcattactttgctggtgtcttacaggactttcttccctttgaaacct

SEQ ID NO: 881997 - DNA, 120 bp, Artificial Sequence
  ENSG00000285871_3 (sequence is synthesized)
tagtaacattttttcccctttggaaaaaatgtcagagagtgctcaggagctcaacttttacttcagctgttattaaccttcaaccacaagacaataacatctgttccttttatcccaatt

SEQ ID NO: 881998 - DNA, 120 bp, Artificial Sequence
  ENSG00000285871_4 (sequence is synthesized)
ttacgtgcggcattcttagccatatctacactgtgtttttatgcacatcatcataccctgttgtagggctataaagaccctactatggtagaattgggagtggactgagggattaggaca

SEQ ID NO: 881999 - DNA, 120 bp, Artificial Sequence
  ENSG00000285871_5 (sequence is synthesized)
gtttctaagtattgaatccataaagttacatgcaaacatacagcccttgccttcaggccaagccgtagttatgcagaaggcttgaagcaatcacagatttaacatttgtggttccagcta

SEQ ID NO: 882000 - DNA, 120 bp, Artificial Sequence
  ENSG00000285871_6 (sequence is synthesized)
ttcaggaccaattcccaaactccacgacatgtaacaatttgtaattttgctaggacacagtttgatgcttaggttttaaggctggtgtgctagacgttatcaagtggtttgtgagagtag

SEQ ID NO: 882001 - DNA, 120 bp, Artificial Sequence
  ENSG00000285871_7 (sequence is synthesized)
ccctgtgtctccattgggtagagtagctgggtcgcaaggatcatgaagagatgaagaaatggctgtgaaaagccaactagcctcggtgatagtaagcaaaggtatagaaacactaaggaa

SEQ ID NO: 882002 - DNA, 120 bp, Artificial Sequence
  ENSG00000285871_8 (sequence is synthesized)
gttaccctttgtattgtcaaaggtttcagttttgtgtaaggtggtgattcacgggcagttaatctccatcactaaaattaaatccttttttattcattgcaaatagataatctgtggaag

SEQ ID NO: 882003 - DNA, 120 bp, Artificial Sequence
  ENSG00000285871_9 (sequence is synthesized)
acattttggcttttctcgctagcagaaaatgtgaggcttcttcaggtttttcctgttcattgtttcacgggagcatcttccccaaaacactgcaaaactcaaagttctcaggctgatgtg

SEQ ID NO: 882004 - DNA, 120 bp, Artificial Sequence
  ENSG00000285871_10 (sequence is synthesized)
gcagaaagagcattgatctcggcttcaggagctaaattctctagtcctgactgtgccactaacagactgtgggacttcagacaagtacattcctttctcgggtttcttatgtcaaatgga

SEQ ID NO: 882005 - DNA, 120 bp, Artificial Sequence
  ENSG00000285871_11 (sequence is synthesized)
cagcgtgagaaggatcacaatgaaccagggatcagcttcacgattaaaacctaagacttaagagacggacatctgtccgttcctggctacacctccggcccatctggcccaccccaaact

SEQ ID NO: 882006 - DNA, 120 bp, Artificial Sequence
  ENSG00000285876_0 (sequence is synthesized)
acagtgctcctgcctgactcgggaagactgctctcctggcctcctggaagtcatatgggaaacagggcaacatcaaacagaaggaaacagaagacagaagacccagagcaacagataccc

SEQ ID NO: 882007 - DNA, 120 bp, Artificial Sequence
  ENSG00000285876_1 (sequence is synthesized)
agtttttcagctccattaactgaaagactcttttcctgaatgttgtccttgcatcattgcacaaaatcagcttaccataaagggttgtaggatttttcttctcagtcactttgcaagcca

SEQ ID NO: 882008 - DNA, 120 bp, Artificial Sequence
  ENSG00000285876_2 (sequence is synthesized)
gggaccctcgatcgatgacgccccgcccgggccttgctctgccacgctgcatgccccagctcgcctgtgtgatagcttgtacccacgttcagtggttcctgagcttttgcaccctgccca

SEQ ID NO: 882009 - DNA, 120 bp, Artificial Sequence
  ENSG00000285876_3 (sequence is synthesized)
agaagaatgaggatatgctggacattgaaggttccatccattgaagtctgagttccgtgagaaacagaatcagaactcttgccaattggactgcaagatgtcttcatctacgtatgctgt

SEQ ID NO: 882010 - DNA, 120 bp, Artificial Sequence
  ENSG00000285876_4 (sequence is synthesized)
cataaaaaacactatggactatggggcaagaaaaatgtaatatttttctctcacggttttggagactggaaagttcaagtgtccagcagggctcattttgtgttgggggctctctttctg

SEQ ID NO: 882011 - DNA, 120 bp, Artificial Sequence
  ENSG00000285876_5 (sequence is synthesized)
gcatgcagatgcttccttctcgctgtgtcctcgcatggtggcaagagagcaacctcaggtgtctctttctctttcaaaggacaccagttctctcagatcagggcttcaccgttatgatct

SEQ ID NO: 882012 - DNA, 120 bp, Artificial Sequence
  ENSG00000285876_6 (sequence is synthesized)
ctcttaatcttaatctgtccttcaaggtcatatttccaacatagtcacacggaggcttagggcttttaacatacacgtatgaattttgggggacaccattcagtccatagcaaaaggcca

SEQ ID NO: 882013 - DNA, 120 bp, Artificial Sequence
  ENSG00000285876_7 (sequence is synthesized)
gcttctgatattcccacatcagtcagtgattggatatagaccaatgggaatgtgtgataatccttggatcatctgaggcaatctccaaaaaggctgaaaaccgagggctgcctaccgctg

SEQ ID NO: 882014 - DNA, 120 bp, Artificial Sequence
  ENSG00000285876_8 (sequence is synthesized)
gcactctgagcagcatacaccacatgctccatcagtgttactgccctcagctggggagaacccccctcacacaagttgtgataccttcctagaggcagcctgcattcaatgacagcttga

SEQ ID NO: 882015 - DNA, 120 bp, Artificial Sequence
  ENSG00000285876_9 (sequence is synthesized)
gtttcctgaacctttgttgtcaccgtttcccaaactacttttctttttgtcaatcctgaccctttccctctcctactacagatgttggtcactcgaatactcgcagcacacttctatgaa

SEQ ID NO: 882016 - DNA, 120 bp, Artificial Sequence
  ENSG00000285876_10 (sequence is synthesized)
tgaatctttgtctcagagattgctccccaaggaacccagtcagtgccatcggaaatcaaaacatttatttatttattttaaaaatatgtaaataaaatgattattttcaccattttaatg

SEQ ID NO: 882017 - DNA, 120 bp, Artificial Sequence
  ENSG00000285876_11 (sequence is synthesized)
tacaagttagtgatcattacacatttaatacttgcatgaaaacatcacatttaccgcataaatatggacaactattatgcatctattataattaaaaataaaacatttataaatgagaac

SEQ ID NO: 882018 - DNA, 120 bp, Artificial Sequence
  ENSG00000285876_12 (sequence is synthesized)
atactggaaatgtgtagtcatgatggtggcaccatcttatgtttttaaattaagaattttggagcaggaaatgttttctgtctgtacctaggtctttacatatcagaaaatttcataaaa

SEQ ID NO: 882019 - DNA, 120 bp, Artificial Sequence
  ENSG00000285876_13 (sequence is synthesized)
gaccagaataaaagtagccatacaaaatacaaccacaaaatatgtattaaatagcctaccaaaatgccacaatgtatcattataatcactattaaatatttattatgcaacagtatcatt

SEQ ID NO: 882020 - DNA, 120 bp, Artificial Sequence
  ENSG00000285876_14 (sequence is synthesized)
tatgcaataggattttttataaaccagcaatttgcactttgaaattcaatttcagtgaatcacaagcttaaaaattgaaattcaaattaagcatttcctttattcaaagtcatatatcat

SEQ ID NO: 882021 - DNA, 120 bp, Artificial Sequence
  ENSG00000285876_15 (sequence is synthesized)
attgaaaataatctgtatttttattgcaaaagaacactttaagaaaaccctagagaattgtttgacctaataattgtaattgtgcatgtatttcttaatattattgattaaatttatatt

SEQ ID NO: 882022 - DNA, 120 bp, Artificial Sequence
  ENSG00000285876_16 (sequence is synthesized)
tagccatttctctcagctatatatagttacagcaaagctattttgcatcaacatatatgtctccctaactatgataaagaatatggtaatgatgttgtaaattgattggaaaagatgatc

SEQ ID NO: 882023 - DNA, 120 bp, Artificial Sequence
  ENSG00000285876_17 (sequence is synthesized)
tatcaattcttttgcagcttccgaattccaaaaggtcattgcatgctatgtgtatatttttattctttcaaatccttccgattacacagaaataataaaatattacccacagcaaccaaa

SEQ ID NO: 882024 - DNA, 120 bp, Artificial Sequence
  ENSG00000285877_0 (sequence is synthesized)
aagttgtgagggagaaggaatgacaatttttgaactgcaaacaaaacctgaggatcccgatccaagaacaatcagaggaccctggcttccagccctgtctgaagatttctcagcaaaggc

SEQ ID NO: 882025 - DNA, 120 bp, Artificial Sequence
  ENSG00000285877_1 (sequence is synthesized)
gagggtgcagaaggctccaataatttaggggagaggaatcgaagttccctagtgtgttatatttcacaataagaaaaggctaaaagaaaacagactggcacggtggctcacacctgtaat

SEQ ID NO: 882026 - DNA, 120 bp, Artificial Sequence
  ENSG00000285877_2 (sequence is synthesized)
caggagttgaagaccagcctggccaaggctctcccacggagcaccctctgctgactctgcagccccgcaggccttcctcgaacagtccatgacaggaagccaggcttcctggggtcctga

SEQ ID NO: 882027 - DNA, 120 bp, Artificial Sequence
  ENSG00000285877_3 (sequence is synthesized)
aacagtccatgacaggaagccaggcttcctggggtcctgagtcagcagagcaggaaggaaacaaaggcctcagaaccgcagaagagaaagaaggcagcctgaagacagaaggcgaccctc

SEQ ID NO: 882028 - DNA, 120 bp, Artificial Sequence
  ENSG00000285877_4 (sequence is synthesized)
tgaagacaggtctagagacttaacgtatgatgttcctggagtcctgttgcctgtacctcttcagtagaaaaattcaataaggtttctgacactttctacctatgggccagttacatacag

SEQ ID NO: 882029 - DNA, 120 bp, Artificial Sequence
  ENSG00000285877_5 (sequence is synthesized)
aagagaaaactgaaactgaaaactggtttgtcatttttacagaaagtcactgcaaagaaggagaattccaagtgcaaatgacttgaggtgttgaattgagaaccaggcagatccaccacc

SEQ ID NO: 882030 - DNA, 120 bp, Artificial Sequence
  ENSG00000285877_6 (sequence is synthesized)
tacagtaaagatgaccctaaagtgaattggttgaagaaattagatcccaaagattcttggtgaattttcaagtcttcatcagtatatccatattaaaaggagatgacagaagccaaaata

SEQ ID NO: 882031 - DNA, 120 bp, Artificial Sequence
  ENSG00000285877_7 (sequence is synthesized)
aaagaattatgggctgacgggacaactggattaaaataagcatcagtttcgttaaaaagggctaacttgaagataaatcttttgactccagctctttagaggatctaaagtgaccctgat

SEQ ID NO: 882032 - DNA, 120 bp, Artificial Sequence
  ENSG00000285877_8 (sequence is synthesized)
ggacagtggaaaaaatcacaacatggaatcccttggataaaaatctattgactttgaataattttgcctaatgttacataatacacaattaaaaaaaaaaaaaaccttggccaggcatgg

SEQ ID NO: 882033 - DNA, 120 bp, Artificial Sequence
  ENSG00000285877_9 (sequence is synthesized)
tccagcctgggcgaaaagagtgagactccgtctaaaaaaaaaagattatagataggccaaagccaaaaccaggggtgcaaaagggaaataaatcaggagccaagtaccaagtgtcaggat

SEQ ID NO: 882034 - DNA, 120 bp, Artificial Sequence
  ENSG00000285877_10 (sequence is synthesized)
caggatccagaaaggcaggatacagcagagacactaaaaccaggaccatggtaaaagtgagacactggagaaagaaaccaaagagaacactgtaaccgggagcctagctaatcttgcagt

SEQ ID NO: 882035 - DNA, 120 bp, Artificial Sequence
  ENSG00000285877_11 (sequence is synthesized)
tggattgagaggcaaactgggtgatttttccactggctgaccttttagaagttccagacatgttctcccaaaggcactaagttctgggtcccagagaagtgggctcatggcacggctgat

SEQ ID NO: 882036 - DNA, 120 bp, Artificial Sequence
  ENSG00000285877_12 (sequence is synthesized)
ctcagagttggtgcttgtgcagctcctgacacaaggtgcccctctaaatgaagagccaaggagcacacgtttatcgaaggtctactttgcgccccttgtggcaacactcatacttggagg

SEQ ID NO: 882037 - DNA, 120 bp, Artificial Sequence
  ENSG00000285877_13 (sequence is synthesized)
cagaggctaccatcagaatataaattttatcctcaggaagatgagaagacaactggcttagaaactagcttagaacatttccaagtttgacacagggccaggggctgtcaagcctcaacc

SEQ ID NO: 882038 - DNA, 120 bp, Artificial Sequence
  ENSG00000285877_14 (sequence is synthesized)
acaatgcaatcaaccaccagctctattccacaggcgcatgtccaggtcggctaataaatggaaaagccaggattaagattcaagtttcgtccggtcacggtggctcactcctgtaatccc

SEQ ID NO: 882039 - DNA, 120 bp, Artificial Sequence
  ENSG00000285877_15 (sequence is synthesized)
tctcaaaaaaaaaaaaaaaaaagattcaagtttcttagcctgggcaacaacgacgacaaaaaattcggagcttatggtggtgcaggcctgtagtcctagctactcagcaggctgtggcag

SEQ ID NO: 882040 - DNA, 120 bp, Artificial Sequence
  ENSG00000285875_0 (sequence is synthesized)
agtaggtgatcgtggccttccttgggatccctgtttcccccttttattcccttttcacccagtaaaaccctgctttgctcactctttaaagcatctgtgagcgtaaatttttgtggccat

SEQ ID NO: 882041 - DNA, 120 bp, Artificial Sequence
  ENSG00000285875_1 (sequence is synthesized)
gggatggacaagaaccacatgtttacctgaagtcctgtgacattttggtgtgcagcatgggagctccaaaagtggataaagaatgttgccattgagagggctctaatggtggaattacct

SEQ ID NO: 882042 - DNA, 120 bp, Artificial Sequence
  ENSG00000285875_2 (sequence is synthesized)
tcaactaacatttactgagaggaggagaggcaactgagacaagaagtcaagaggggataggaaatacgacctgtctcactttgatccatattgaaggcttcggatttccttcattctcca

SEQ ID NO: 882043 - DNA, 120 bp, Artificial Sequence
  ENSG00000285875_3 (sequence is synthesized)
agtgatgcaaaaccaaggctgtacaagcatggtgatggcatctgtccagcatctggggagcctgcagggagcttttactcaggacagaaggtgaagcaggagcagtaccatcactctgga

SEQ ID NO: 882044 - DNA, 120 bp, Artificial Sequence
  ENSG00000285875_4 (sequence is synthesized)
ggaaacacaggaaagactgccgacgttcatttccttgagggagtagaattgaggctggtcatgccctatggcttcattttaccttatggaatgggaagaatggcatctgctaatatagag

SEQ ID NO: 882045 - DNA, 120 bp, Artificial Sequence
  ENSG00000285875_5 (sequence is synthesized)
ttatttgtaacatcttcaggaatgaacaattgtgttggagaatcaacatggcacacatattgtgatcagtgccgaaacaaataattctctagacagcctattttaaagtctgttgatttt

SEQ ID NO: 882046 - DNA, 120 bp, Artificial Sequence
  ENSG00000285875_6 (sequence is synthesized)
acagataaacagactgagatgcttcttcacatgcttgtctttcagttcctcatcattacaatcatagcaggaggggccgcctgagagtcaaaagattccagttcttcccactgtttctct

SEQ ID NO: 882047 - DNA, 120 bp, Artificial Sequence
  ENSG00000285875_7 (sequence is synthesized)
gggcctcagccttttcctccacataatgcacataccgggctaaggtcacccttgtttccacaacatgtaattgtcttattttctaatttgtttattgtctaaacagaaaaattggagtgt

SEQ ID NO: 882048 - DNA, 120 bp, Artificial Sequence
  ENSG00000285875_8 (sequence is synthesized)
agaaaaggaagacataattgtaaactgaaataatcagaacatcttcaggaagatacatgatttaagctgaattttaaagaattagtaaaatatttataataaaatccattacaatttata

SEQ ID NO: 882049 - DNA, 120 bp, Artificial Sequence
  ENSG00000250908_0 (sequence is synthesized)
ttttccttgatgaatttcagtcagtagttggtctggctctcctagcgcctttcctggaggctgctctcaggtccttcccacatgcaatgcatgcctcttttgcactgagtctttctaatg

SEQ ID NO: 882050 - DNA, 120 bp, Artificial Sequence
  ENSG00000250908_1 (sequence is synthesized)
ggtggctgcctgtggatatctcatctcatgctgtgactccagccatgccttgcccctcaccagctctgacaccagcagaaggaggagatatggcataagcctggacaacagatgcttctc

SEQ ID NO: 882051 - DNA, 120 bp, Artificial Sequence
  ENSG00000250908_2 (sequence is synthesized)
taagatgtggactcttgaatgagaaacacaaggatagaaggaatggttgaaacatactttaaatggatgagtggtatgctcttgaattatatctcaataaagctgttttttttaaaaaaa

SEQ ID NO: 882052 - DNA, 120 bp, Artificial Sequence
  ENSG00000250909_0 (sequence is synthesized)
gatctcggtccaaagaggctccacttatctgacaagtttctgtccttatccccacttccagagtccatggtgctaggatttgggccaggcctgccacgccactgcttaacccaagctgca

SEQ ID NO: 882053 - DNA, 120 bp, Artificial Sequence
  ENSG00000250909_1 (sequence is synthesized)
caccaaacaatgatcacgtttgaattttctcaaacgctcaacagatccattcatgtgttactgatgctgccggtcccaagaccacaccttgaggaccactgctcccaaggttcaagtaat

SEQ ID NO: 882054 - DNA, 120 bp, Artificial Sequence
  ENSG00000250909_2 (sequence is synthesized)
atctacttagctcctcattttcaacctgcaagagctggcagcctccaccttctgcaatcgaaacacctgataccttgctcaggcctagcagggaggagagaacaagacttattctttatt

SEQ ID NO: 882055 - DNA, 120 bp, Artificial Sequence
  ENSG00000250909_3 (sequence is synthesized)
ctgtgcttgtctggaagaactgagaagaaagtaagatggttgaaaaggggggacagataaaaagtaatgaaaaatgttgtatccttactacaaaacagaatttatacctttaagctgtga

SEQ ID NO: 882056 - DNA, 120 bp, Artificial Sequence
  ENSG00000205653_0 (sequence is synthesized)
gcctaccctccacccagtgcttgaacatcccttccccctcatcactccggggaaggatcctgctcaacacccaactactcattcaaacctggaacccgaaactttaatgaagcgagatca

SEQ ID NO: 882057 - DNA, 120 bp, Artificial Sequence
  ENSG00000205653_1 (sequence is synthesized)
actggcaagacaaagctcagacgtcacctccagaaggttttcatggcttgtgataatctggcttcacctgtattctacttcatgagacaactgactatctcgtggcctcttccctgtggc

SEQ ID NO: 882058 - DNA, 120 bp, Artificial Sequence
  ENSG00000205653_2 (sequence is synthesized)
tggactggatgtttgcttgtgggaagtggaagcagggaccagatggatgggcagaaggattgtcctattcaaatatgcactggtggtcctgtcttgtgtttgggcaccagttgaatccaa

SEQ ID NO: 882059 - DNA, 120 bp, Artificial Sequence
  ENSG00000205653_3 (sequence is synthesized)
gagctctcaacctgtggagtgtcggatgaaatctatggaatccctcctcagaaaagcaaatgaacccacacaatgatggcgcagtttcattgtcatcagcctcctgaggcgtatccacaa

SEQ ID NO: 882060 - DNA, 120 bp, Artificial Sequence
  ENSG00000205653_4 (sequence is synthesized)
tcaccaggtcagaaaaccctgctccttccttgcattcaattgggcacatcactatcaaattaatttttctgaaacacgacaaaatctcatcagaaatataccacactttgttgtcccaaa

SEQ ID NO: 882061 - DNA, 120 bp, Artificial Sequence
  ENSG00000205653_5 (sequence is synthesized)
aaaacatagaatgtgcctaccctccacccagtgcttgaacatcccttccccctcatcactccggggaaggatcctgctcaacacccaactactcattcaaacctggaacccgaaacttta

SEQ ID NO: 882062 - DNA, 120 bp, Artificial Sequence
  ENSG00000205653_6 (sequence is synthesized)
atgaaggttgctctactgagatttttctccccaccgaacatgtctgtgacccacaaagaagcccatgaaagaaagtgcccagagaaaccagagctgtggaaggctggctcgacggtgccc

SEQ ID NO: 882063 - DNA, 120 bp, Artificial Sequence
  ENSG00000205653_7 (sequence is synthesized)
ctcactgcccctgagaaaacagacccatttcctctctgcccacctctttccctgacatgtccccagcagcagtcctgtattcccagttcctctcaagatgttctgaatagtctctgggta

SEQ ID NO: 882064 - DNA, 120 bp, Artificial Sequence
  ENSG00000205653_8 (sequence is synthesized)
tcctctcattgccttcaactcaagatatctaaaaccaaaactcattgtcttcccactcaaaacgtcctcccctttctgctgccaaccccagtcagtattgtctgcaggcttccaggcttg

SEQ ID NO: 882065 - DNA, 120 bp, Artificial Sequence
  ENSG00000205653_9 (sequence is synthesized)
gatccttgactcacggccacccaagcttccttcccccgtgtgcgattagtcagtaagtcttagtagtgatgagggcttcctgcaccgtgactgtccggcatgctttttcctctcccattt

SEQ ID NO: 882066 - DNA, 120 bp, Artificial Sequence
  ENSG00000205653_10 (sequence is synthesized)
attcttcttgttgtaaggaatatgcctggtaatggaactcaaatatcagcttggatcgccctggcctttgaaatttgaggtaaaattaggcttaagccgtatccagcgcacaacagaaac

SEQ ID NO: 882067 - DNA, 120 bp, Artificial Sequence
  ENSG00000205653_11 (sequence is synthesized)
ctcagtgtctcccacccagggactgtctcggaggctgtgtgttcagatgtcacttctgcctcccggcatctgctcctgagttttcactcttcagcctcccctcccaaggcctccttccta

SEQ ID NO: 882068 - DNA, 120 bp, Artificial Sequence
  ENSG00000205653_12 (sequence is synthesized)
ccctggcactgggcttcttgccccgtccccctagaatccgtggcacaggggctttatctgtgtggagtctctacagacggttagaaacacagagtcagctagaaattaagcagtaggcag

SEQ ID NO: 882069 - DNA, 120 bp, Artificial Sequence
  ENSG00000205653_13 (sequence is synthesized)
ctgtgatgttttttgacagcctcatttctaaaaccccttcagcaaccccagtcaaggagcttctccctctagactccagcctcctgctgagtcacctgcaccgtctctgccttcctcccc

SEQ ID NO: 882070 - DNA, 120 bp, Artificial Sequence
  ENSG00000205653_14 (sequence is synthesized)
ttcctcacatcctccctggccccatcttccaattcctctgaacttctgcagagcagccagctcttcctccagcttcaacttccccaccccaagcaggtggggcatcctgaccctgagcaa

SEQ ID NO: 882071 - DNA, 120 bp, Artificial Sequence
  ENSG00000205653_15 (sequence is synthesized)
aagcagttctctccctaagaaacaccggtgacttttgttcatggcactccatggatgcaaagctctgagttctgttgaacagggactcacctacgagtggtggtgctatcagctgagacg

SEQ ID NO: 882072 - DNA, 120 bp, Artificial Sequence
  ENSG00000205653_16 (sequence is synthesized)
ggaagcagcactcagtagaagaagaaaaggcctggactggtgtgggcatgcactggctcgtgagaagcagggaaggtcgctcttatgggtcccgtttctaagtgacgttcacggcctggc

SEQ ID NO: 882073 - DNA, 120 bp, Artificial Sequence
  ENSG00000250900_0 (sequence is synthesized)
ctccacctcccagtgatgccggcccgaggagaagccgcaggacgccaggacgcgggtgttggtgtcgaagcggcaggggtggttgggcaggtcctgggcccgctcgccgaggcgcacgcc

SEQ ID NO: 882074 - DNA, 120 bp, Artificial Sequence
  ENSG00000250900_1 (sequence is synthesized)
cttaagatccagagagaggatgaggcgcgggttggccgtgtcgggatccaagcgaaatagaatagaaaacatcaaagtgcatacgtgtagcaaagacctccaaccccaggaaaatcaggg

SEQ ID NO: 882075 - DNA, 120 bp, Artificial Sequence
  ENSG00000250900_2 (sequence is synthesized)
cagctccagatcatgtgattctcctagaccccccaggactgacactgttctctagctgctggtcctgatgccttaggataaatgactcgagcccctggctgagccagacttacctggaga

SEQ ID NO: 882076 - DNA, 120 bp, Artificial Sequence
  ENSG00000250900_3 (sequence is synthesized)
aagtcaaggtcaggcttttgagctgtctcctggatctggctgctgagcttggacagctgggtgatctcaaccccgagctgggccaggttctcattctgcttctgtgccacctcccgggac

SEQ ID NO: 882077 - DNA, 78 bp, Artificial Sequence
  ENSG00000250900_4 (sequence is synthesized)
agctctccccgaaggtcctctgaggaggagaaacaaagcaaggcgtgcatgagcgacacgggagattatatggcaagg

SEQ ID NO: 882078 - DNA, 120 bp, Artificial Sequence
  ENSG00000250900_5 (sequence is synthesized)
tcatgtttgcttatcttaaccaaaatgagccctcgtttcactttcctgttctaccctaaggaagataaaatatcattccaacttggggtagaggcaggtgccagtacccaagaccctggg

SEQ ID NO: 882079 - DNA, 120 bp, Artificial Sequence
  ENSG00000250900_6 (sequence is synthesized)
ctgtgcagcaggggctactgtaaacccaagaccctaaacttcctccctctgccagagccagggagcagctctgacgccctctagccccttctccgttagcctcgatttcaaataaaaaca

SEQ ID NO: 882080 - DNA, 120 bp, Artificial Sequence
  ENSG00000250900_7 (sequence is synthesized)
cttagttacagaatcatcactggagctatcccatgggacccagtgctgcgtgtgtcctggaaaccacctgagggaggtcacagcccttatgcacctactgctcactcagccccataatga

SEQ ID NO: 882081 - DNA, 120 bp, Artificial Sequence
  ENSG00000250900_8 (sequence is synthesized)
ctgttcttaacccatctatggattgtgaagtttatctagttgtttataactttttttttagcgaaatagaatagaaaacatcaaagtgcatacgtgtagcaaaggtggagtctcgctctg

SEQ ID NO: 882082 - DNA, 71 bp, Artificial Sequence
  ENSG00000250900_9 (sequence is synthesized)
ctctccccgaaggtcctctgaggaggagaaacaaagcaaggcgtgcatgagcgacacgggagattatatgg

SEQ ID NO: 882083 - DNA, 66 bp, Artificial Sequence
  ENSG00000250900_10 (sequence is synthesized)
tttttttttagcgaaatagaatagaaaacatcaaagtgcatacgtgtagcaaagatcgcaacctct

SEQ ID NO: 882084 - DNA, 120 bp, Artificial Sequence
  ENSG00000250900_11 (sequence is synthesized)
cttccaggcaggctgcagtagcctggagcgccttatggatattaactccctcaaccctgacggcagcccagtggggagggtgcacttcccttcaagtcttacaggtggagtctcgctctg

SEQ ID NO: 882085 - DNA, 120 bp, Artificial Sequence
  ENSG00000250902_0 (sequence is synthesized)
gaggatcatgtctgcatcttaaaagatccctttctgtagacaatggactgaagggggtgaccagtcaggaggcagttgctgcattgcaagatgaaatgctggaagtggtagggattgatg

SEQ ID NO: 882086 - DNA, 120 bp, Artificial Sequence
  ENSG00000250902_1 (sequence is synthesized)
cagacctccttctgcttggaaccaaaaggaaactcacagcattccagtggttttagttcatggtggctctgaagatcgggccagcgccacacacggcagtaaatgacatgaggcagtccc

SEQ ID NO: 882087 - DNA, 120 bp, Artificial Sequence
  ENSG00000250902_2 (sequence is synthesized)
tccggtgggagacttgcagcctgccatccagagagcggggaatggtgacacagttactcggttgccctgggcagctcaaggccttttccagttcctccatggcacctttctttttcttca

SEQ ID NO: 882088 - DNA, 120 bp, Artificial Sequence
  ENSG00000250902_3 (sequence is synthesized)
gttttttcaccaaagcatcaacagctttctctgcccatttttcttcttcatcgccctgtttccacccaagaagtctcttcacagctggacttgtaaaggaaaataaacttgtcacattca

SEQ ID NO: 882089 - DNA, 120 bp, Artificial Sequence
  ENSG00000250903_0 (sequence is synthesized)
cgggaggggcggggcctgccgccgccaccgcctcagggaagaggaaggaggccgcggcttcgcgtcccgcctctcgcctggctggccgtggggggcctggacgcagtggcctcccgaatc

SEQ ID NO: 882090 - DNA, 120 bp, Artificial Sequence
  ENSG00000250903_1 (sequence is synthesized)
ctggacgcagtggcctcccgaatctcccaggaccctaatatcgcccgaggatgctgggaggaacgctgagccgacctctccgttaggctgaagattgcacaaaccatgctaatggccagc

SEQ ID NO: 882091 - DNA, 120 bp, Artificial Sequence
  ENSG00000250903_2 (sequence is synthesized)
atggatggagggagcgtgtgagatgtgtggggcagcgtgctgcatctcagccaactccaggaggaagcatgctcatggcaatacccggagtctccactgcaagaccagagtgacggaggc

SEQ ID NO: 882092 - DNA, 120 bp, Artificial Sequence
  ENSG00000250903_3 (sequence is synthesized)
agcagagctcctcagcaggccaggagtctccagaggcactgccgaatgtctaagaagcaacctcattgtattcccaagacctgggaatccaggtctcgcagatacgatgatacaatctat

SEQ ID NO: 882093 - DNA, 120 bp, Artificial Sequence
  ENSG00000250903_4 (sequence is synthesized)
agccaggacatctcttcatgtgtaggataagcaactatcccagtcttcccaggattgaggggcttctccagatgctgcacttctggtgctaaaaatgagaaactgaaatgaattagtcac

SEQ ID NO: 882094 - DNA, 120 bp, Artificial Sequence
  ENSG00000250903_5 (sequence is synthesized)
ccaaggaatgctgaccctgtgctatatgatcacatttactctttaaagcaatgctttgaggccaagctataaataaagggtggactgaccttgtcaactgttaaattggagccgtggtgc

SEQ ID NO: 882095 - DNA, 120 bp, Artificial Sequence
  ENSG00000250903_6 (sequence is synthesized)
gttgcctagaacattgcggatgaccccgagcagcacagcagatcaacggctgagaaagagctcattcagctcatctaactaggatgctgtcctgccagagccctgggggttctcgtctcc

SEQ ID NO: 882096 - DNA, 120 bp, Artificial Sequence
  ENSG00000250903_7 (sequence is synthesized)
tggggcaaaagcagcatgcaacccttatgaacccatcttggaaggcattcggggagcccaagacaagaccattgggagcctcagggtcacttgtgggggtctctgtgctggacggctgta

SEQ ID NO: 882097 - DNA, 120 bp, Artificial Sequence
  ENSG00000250903_8 (sequence is synthesized)
cctctcatgaaatggacaactgaccataagaaggaggtaagttacgcatggacgggaaaataagaagctcctacttagggctgtgatatgtgcggtaaccatttaacgttaatagcatcc

SEQ ID NO: 882098 - DNA, 120 bp, Artificial Sequence
  ENSG00000250903_9 (sequence is synthesized)
atgtgagacaggtgctagtactgccccatttcatattggcggacattgaggcacacagactgtatgacttgcccaaggctgcccacctggttaggggagctccaggattccaatccagtc

SEQ ID NO: 882099 - DNA, 120 bp, Artificial Sequence
  ENSG00000250903_10 (sequence is synthesized)
cgaactcaacacgaggggtggcacctacaggctggggtcaatctggaagactgcctgttgtatggcctggcaactaaaaattgttttttacatttttaaatggttgacaaaattaaaata

SEQ ID NO: 882100 - DNA, 120 bp, Artificial Sequence
  ENSG00000250903_11 (sequence is synthesized)
agagaatatttcatgacatcatcaaattacacgaaatgcaaatttcagcatctacaaatacagtttgattgggacacagccaccctcatccgtttgcaggctatccctggctgcttacag

SEQ ID NO: 882101 - DNA, 120 bp, Artificial Sequence
  ENSG00000250903_12 (sequence is synthesized)
ggtccacatagtccataaagcctgagatatttactatctggccttttacagaaaaagtccccaaacactaatctgaaatgtttgcatcagaaccccttgtggggcttgttagaatgcagc

SEQ ID NO: 882102 - DNA, 120 bp, Artificial Sequence
  ENSG00000250903_13 (sequence is synthesized)
tccctggtcccacacccagtctctgattcagtaagtctggagcagggcctgggaatttacatttcaaaataatttcccaggtgatgctcatactggtccacagaccactttgagagccac

SEQ ID NO: 882103 - DNA, 120 bp, Artificial Sequence
  ENSG00000250903_14 (sequence is synthesized)
taccctaaaccccagtgctctactgcttgttgtcaggatggctgggtcaggtgagaaagaagcctagacatccctagagccacctgctgtgcagccaccttttgagaaagtgtccccagt

SEQ ID NO: 882104 - DNA, 120 bp, Artificial Sequence
  ENSG00000250903_15 (sequence is synthesized)
gatgtggacacatcctactgaatgagccagacaacgtaactggatctgtccagaacaccacgatgggtgacattgccatctgcagcagtgctgtacttcctcccgccaatttgtaaagtg

SEQ ID NO: 882105 - DNA, 120 bp, Artificial Sequence
  ENSG00000250903_16 (sequence is synthesized)
cagacaggatgctggatcaactggctgctgctgaggccagtgacctctagggcgtattcccacgttcctttgcagtagctgctcacctttgtaagcatgtgagttattcgtgctgtctgt

SEQ ID NO: 882106 - DNA, 120 bp, Artificial Sequence
  ENSG00000250903_17 (sequence is synthesized)
tgtgatcctaaggaatccaatggtcaggaccagaacttctgaagtacagcccagcattgccgtctggcatccccagaaagcagattttgagattggcatgatggccgttaagcagggcgt

SEQ ID NO: 882107 - DNA, 120 bp, Artificial Sequence
  ENSG00000250903_18 (sequence is synthesized)
tctctctggagcaatgtctagccggggtcggagtggggagagagagaggggggctgctgagaatatcacagagagatggcagcctttctgcagcataggcctaagtgcacactcacctgg

SEQ ID NO: 882108 - DNA, 120 bp, Artificial Sequence
  ENSG00000250903_19 (sequence is synthesized)
ctatcactgagaggactctctgttcaacagggccactcagggcttcccctgcatggagatctgagtgtccagggaggggacgtggtgagcatttctctggtcaaagtgtgcaaagcaaaa

SEQ ID NO: 882109 - DNA, 120 bp, Artificial Sequence
  ENSG00000250903_20 (sequence is synthesized)
tctgccccattcctgccaaagtggttgacatggaggaaaggggagtgccagttctgtaggctgaggtggtggctgttagaactgctcctaggctagttggtgttctggaaggttcccctc

SEQ ID NO: 882110 - DNA, 120 bp, Artificial Sequence
  ENSG00000250903_21 (sequence is synthesized)
tatgtgagatgaaagagcatatctttaagagctgcaactttgaagctctaatatagaatgcttttggtggcaagcattacttcggaaagggcttgaagacccctgaagatccttggtggc

SEQ ID NO: 882111 - DNA, 120 bp, Artificial Sequence
  ENSG00000250903_22 (sequence is synthesized)
ctaggcagttcctttattgccagggctgtgcaggactaagcttcaacagcgccaccatgtgacaagaagcaattgcagtggtgcattgagggttttcttttgcactgagaactcaagtcc

SEQ ID NO: 882112 - DNA, 120 bp, Artificial Sequence
  ENSG00000250903_23 (sequence is synthesized)
cactttcacccttggacctggtaaatctttggggttcatggacaattctgaggaggagatacttaagagagtgatgttagaatttgatgttttggtttattgtatcagaaaataaaagaa

SEQ ID NO: 882113 - DNA, 120 bp, Artificial Sequence
  ENSG00000250903_24 (sequence is synthesized)
attggatttatagctcagtttgtggttcatatcaatttaaatagctttgaaatgctgataggaccatcacggttttttggttgctgaaatcccataactaaagcaatgcctcaataagct

SEQ ID NO: 882114 - DNA, 120 bp, Artificial Sequence
  ENSG00000250903_25 (sequence is synthesized)
tttaatccacagcccccatgcccaggtctataacaaagtttttatatgcctatggggaaaaacaattatgaggcaaacatttataaagttaaatttattacgtttctactcctatttttt

SEQ ID NO: 882115 - DNA, 120 bp, Artificial Sequence
  ENSG00000250903_26 (sequence is synthesized)
tattttttattctgctggtgtattgttatatattttcctacatatttaaacattttcttcctcttataaaatgttagtgattttaaatgatggtgtgtccggaattggttccttctggtg

SEQ ID NO: 882116 - DNA, 86 bp, Artificial Sequence
  ENSG00000250903_27 (sequence is synthesized)
gtccggaattggttccttctggtgggttcagtcttgctgacttcaagaatgaagccacagatgctcacaaagtttgttccctcaga

SEQ ID NO: 882117 - DNA, 80 bp, Artificial Sequence
  ENSG00000250903_28 (sequence is synthesized)
tccagagttgtttcttcctcccagtgggattatggtctcgtgcagaccttgcattgagtgttacagctcttaaagggggc

SEQ ID NO: 882118 - DNA, 120 bp, Artificial Sequence
  ENSG00000250903_29 (sequence is synthesized)
tgcagaccttgcattgagtgttacagctcttaaagggggcacggacctgaccatcctggctaaaatacagtgaaaccccatctccactaaaattacaaatattagcccggagtggtggca

SEQ ID NO: 882119 - DNA, 84 bp, Artificial Sequence
  ENSG00000250903_30 (sequence is synthesized)
ggagtggtggcaggtgcccaagtgtgaacccgggacgcggagcttgtagtgaacagagattgcgtcactgcactccagcctggg

SEQ ID NO: 882120 - DNA, 120 bp, Artificial Sequence
  ENSG00000250903_31 (sequence is synthesized)
tccaggagccagttgatgtgatggactaccttaattgatttttgaatgttgagccagccttatgcatgtgggataaacccctgttgatcatggctggctggagtgcagtggtgcaatcat

SEQ ID NO: 882121 - DNA, 88 bp, Artificial Sequence
  ENSG00000250903_32 (sequence is synthesized)
cctgctggaatcttgctgttgcccattcaagtctggtggttcctgtgtgttggggtggccttgcttctcctgctcttagctctggagg

SEQ ID NO: 882122 - DNA, 120 bp, Artificial Sequence
  ENSG00000250903_33 (sequence is synthesized)
gttggggtggccttgcttctcctgctcttagctctggaggagccctcggctggtgctgcagtgaatctgtcagagtcgtcctaaccagagtgcccccatcctgaatagaggctggataaa

SEQ ID NO: 882123 - DNA, 120 bp, Artificial Sequence
  ENSG00000250903_34 (sequence is synthesized)
gccaaacctgctgggttatagtcccaggggattgggcagtcctggtcacaagatatttaaggttgagggaataagttaatgatgctaagtaaataaagaccctgaattctttcccgtgag

SEQ ID NO: 882124 - DNA, 120 bp, Artificial Sequence
  ENSG00000250903_35 (sequence is synthesized)
agattcaagaactcactcttggcatctgggataagaccctttttccggtaacaaacccctgccctggccctttcttccttctggaaaacttaaaaaaaaaataggcctcaaaaagactgc

SEQ ID NO: 882125 - DNA, 120 bp, Artificial Sequence
  ENSG00000250903_36 (sequence is synthesized)
attaatctgagaaactgctgaatatggctactaagagaagctgggattttctgatttttaatgtcggtttcaaagagagcaggtatactttgcaggagggaaccatgctagctgcagaat

SEQ ID NO: 882126 - DNA, 120 bp, Artificial Sequence
  ENSG00000250903_37 (sequence is synthesized)
catggacgagctggaccacaagtttttacacagtgtgcatgcttttgttctcctgtcaacttctgttgttttcctgtcaacttctgttgttttcatcaaaagccatcaacccgcctcagc

SEQ ID NO: 882127 - DNA, 120 bp, Artificial Sequence
  ENSG00000250903_38 (sequence is synthesized)
gtgttccaagaaactttcagctgagaccctaagaccctggacatgcaatgccagagtgaagtgtgaggaccacagctgtgcaggacatgcagaaaggaggggcagagagccaatgagatg

SEQ ID NO: 882128 - DNA, 120 bp, Artificial Sequence
  ENSG00000250903_39 (sequence is synthesized)
atgtcccacgactcacctgtgtcagtggagaccgaaggagacttggagggtgcttttggagagaactgctgatgttttgtgagcctcactctctctgtgtgtggaaatgctggaggatga

SEQ ID NO: 882129 - DNA, 120 bp, Artificial Sequence
  ENSG00000250903_40 (sequence is synthesized)
aaccgtctaaactctcctgaagtcccgggaatggagttttaatggtaatgtgtgatgggatgtgtgttctcttatggtatgggagacacagaggactcacagaggactggcctctgcctc

SEQ ID NO: 882130 - DNA, 120 bp, Artificial Sequence
  ENSG00000250903_41 (sequence is synthesized)
ttgaccagggatcaggagagatgggaactgagctggtcagctgctcttcagagctggtcgaggagagatttctgctgtgctgggagggcctaaaaacatgcatggatggagcccaaggac

SEQ ID NO: 882131 - DNA, 120 bp, Artificial Sequence
  ENSG00000250903_42 (sequence is synthesized)
caggtgcagatcttatgcaagaatgaaccagggggtgacttaggtccaccaaaagactgcccagagggacaaaaggctatcagtgaaaagaatccacagatgaactgccagttcctcagg

SEQ ID NO: 882132 - DNA, 120 bp, Artificial Sequence
  ENSG00000250903_43 (sequence is synthesized)
gctgaggcaagatcttaattttgagtaggagcagagtgtattacctacaacaaggataccacagatgagaaaaccctagttttaaacctgctacatccaaagagagcaatgcaactctgg

SEQ ID NO: 882133 - DNA, 120 bp, Artificial Sequence
  ENSG00000250903_44 (sequence is synthesized)
cagtagcaaaaatgttgtgcctctcctttcctcactcctaatttcccatcccagagaagggtcagaaaccatcttctgcaagatgggaggaagggtagcagccagactgcaaaaagggag

SEQ ID NO: 882134 - DNA, 120 bp, Artificial Sequence
  ENSG00000250903_45 (sequence is synthesized)
aagaaaccagctacctcttgctgttctcagtggcagactccccacctgcaacaggtcaggtctgttactggagagaaaagacaggacatttttaaattctaggtatagagcaataaaaga

SEQ ID NO: 882135 - DNA, 120 bp, Artificial Sequence
  ENSG00000250903_46 (sequence is synthesized)
agaattcaagcaaagggatcaggaagaggattgctactaagaggcagagaaaccaatgaagccttttgccatctcacactggaaagacaaaaagtcatagaggcttgatttttataagga

SEQ ID NO: 882136 - DNA, 120 bp, Artificial Sequence
  ENSG00000250903_47 (sequence is synthesized)
aagagaagtgagaaactgacctcgatactttgttggacttgcctaaagacatttgctgaattctcgggctgtgctgggatggagattagaggccaaataaaaacctctggtaagtagtgc

SEQ ID NO: 882137 - DNA, 120 bp, Artificial Sequence
  ENSG00000250903_48 (sequence is synthesized)
ttacttggacctgattttgaaagtaacaagtcactttatttgggctggaggaaaaagcactaaaccagatgttgaggtgaccgggattcctggaagacattcttctctccaacgagacac

SEQ ID NO: 882138 - DNA, 120 bp, Artificial Sequence
  ENSG00000250903_49 (sequence is synthesized)
atgatgcatgaagtaggagcccctggcaaggagcccaggctgccatggcctcgctcgctcctgcttcccggcatggccccgaggctagctgcctctgtactgcctgagcatcgtcccctg

SEQ ID NO: 882139 - DNA, 120 bp, Artificial Sequence
  ENSG00000250903_50 (sequence is synthesized)
gcgtgtcaccagactacccactacctgtgcttgcacctgcaggtgggcagttcagtcgttgcaggctgaagctccctgtcacaggagtccatcagcactggagtttaccaaatggcccag

SEQ ID NO: 882140 - DNA, 120 bp, Artificial Sequence
  ENSG00000250903_51 (sequence is synthesized)
ttttaaataatttataaataagagataaagtgtgattcccaaggccattatccagtaagtgatagagactgggtttaggttatattgtctgatttaaagccagtatatttgttatctgca

SEQ ID NO: 882141 - DNA, 120 bp, Artificial Sequence
  ENSG00000250903_52 (sequence is synthesized)
taataaattactccaaatcttgggcttaaaccaacaatacgagtttattaatccatagtttctgtggatcagaagttgaggagcagtttagctggatggttctggctcaggatctctcat

SEQ ID NO: 882142 - DNA, 120 bp, Artificial Sequence
  ENSG00000250903_53 (sequence is synthesized)
gataggatctctcctcatagtattgggggctgtggtcatctgaaggcctgactggggctggaggacctgacttcaggatggtgcactcacatggctgctggcagggaactacacaagaga

SEQ ID NO: 882143 - DNA, 120 bp, Artificial Sequence
  ENSG00000250903_54 (sequence is synthesized)
caggctaccatagtgactgtgtatctgatgcttccacagctaccccttaggactctaagtcctagaattgggactagaagtggggattaaagggattccataggatgagattgactaaaa

SEQ ID NO: 882144 - DNA, 120 bp, Artificial Sequence
  ENSG00000250903_55 (sequence is synthesized)
atatatatacatgaataggcatacacaggaatattcattatatgtgtaaataccatcatttgtattcaggcacaccttgttttattgtggctttattgcacttcacagatattgtatttt

SEQ ID NO: 882145 - DNA, 120 bp, Artificial Sequence
  ENSG00000250903_56 (sequence is synthesized)
tttattgtggctttattgcacttcacagatattgtattttttttagaaattgaaggtttgtgacaaccctgtgttgagcaagtctatcagcactgtttttccaacagcatgtgctcactt

SEQ ID NO: 882146 - DNA, 86 bp, Artificial Sequence
  ENSG00000250903_57 (sequence is synthesized)
tgtgtctctgtgtcacattttggtaactcttacaatattttgaacgtttttatgactattatatctgttgtggtaatctagcttca

SEQ ID NO: 882147 - DNA, 120 bp, Artificial Sequence
  ENSG00000250903_58 (sequence is synthesized)
aggatgggttaggattgctgagatgggctggagccggggcagggggcctccagctaagagaggcctcctgagcttacctcatttggtctcagggctattctcattttccagatgagcagt

SEQ ID NO: 882148 - DNA, 120 bp, Artificial Sequence
  ENSG00000250903_59 (sequence is synthesized)
gatgtgaacaatattggaaagcatcaaagaaatggatgtaaagtgtctggcacagagtgagtgctcagtgactgtgggtgccctctcgtccagctcctctctgctctgaacatgcctttc

SEQ ID NO: 882149 - DNA, 120 bp, Artificial Sequence
  ENSG00000250903_60 (sequence is synthesized)
tcacggcacttatgagaatgtgccatcgctgtttactccctgtttgtccccctctacatgctaaattctttaggcccagggactgtgttacactcatctccatagccccaggcctagcaa

SEQ ID NO: 882150 - DNA, 120 bp, Artificial Sequence
  ENSG00000250903_61 (sequence is synthesized)
agtgcctcctgcctagtaggtcctcagtatttgctgaatgaatggatgatgatttcatggaagaatcactccctaaagtttccagcaacaggctgaggaaactcaggatgaaaacatcat

SEQ ID NO: 882151 - DNA, 120 bp, Artificial Sequence
  ENSG00000250903_62 (sequence is synthesized)
gtctcttgcccagtcttcaccatgctttttagtggtggtcactgcactgcatgttttctttaagaagggtgagctcatgccaaggacgagggcatggggtctgtgccgggcacttcccag

SEQ ID NO: 882152 - DNA, 120 bp, Artificial Sequence
  ENSG00000250903_63 (sequence is synthesized)
ttccacgttctgggtgtagggaagagggaggatgcccacagagagggagggaaccaaatgcaggaaaggagggcaggaggggcagtgttggctcctggcgggcctggcatatggctgtgc

SEQ ID NO: 882153 - DNA, 120 bp, Artificial Sequence
  ENSG00000250903_64 (sequence is synthesized)
tccgagttacttctggtcctgtgtgtggggctgaagcttcagctgccaccagacatccctgccatgtccctcttgagagtcctaacctcactctcaagactcaccccgatgctctccatg

SEQ ID NO: 882154 - DNA, 120 bp, Artificial Sequence
  ENSG00000250903_65 (sequence is synthesized)
aaaataaaacgcaccttccatgaagtgtccccagaaagctccacgggggaggaagtgccacttagaaatgagaaccaatcccaggtgaaagtcatgagctgaaaggcccatatcaggctg

SEQ ID NO: 882155 - DNA, 120 bp, Artificial Sequence
  ENSG00000250903_66 (sequence is synthesized)
tcgtggatgaccttggatgcccctgaggtgtccttaaaggaggcagcattcgctttctcccagtgtgtgtgtggcagaccacatgcaagcttttgggctgacccagttgtgactatcact

SEQ ID NO: 882156 - DNA, 120 bp, Artificial Sequence
  ENSG00000250903_67 (sequence is synthesized)
gtgtcctcgggtttcatcttggggaagggagttgtaccagttcttactcctggaggctgatttcctaaagtgcaaaattgggccagtctgttgaggcccaagtgttctggaaaagatctc

SEQ ID NO: 882157 - DNA, 120 bp, Artificial Sequence
  ENSG00000250903_68 (sequence is synthesized)
tgacagatacatggaaactgaatttagttgctggttaagagctttcatgggagcaaagctcttggctgtgggtttcttgattgtcaggtatacattagggcagtggtccctaaacttttt

SEQ ID NO: 882158 - DNA, 120 bp, Artificial Sequence
  ENSG00000250903_69 (sequence is synthesized)
caggtatacattagggcagtggtccctaaactttttgaccgtggagactggttttgtggaagacagtttttcatagattggtttcaggattaaactgttccacctcagatcatcaggcat

SEQ ID NO: 882159 - DNA, 120 bp, Artificial Sequence
  ENSG00000250903_70 (sequence is synthesized)
ccatgcacagttcacaatagggttccagctccgatgagaatctaatgccaccgctgatctgacaggagttcaggtggtaatgtttgtccactgctcacctcctgctctgtggcctggttc

SEQ ID NO: 882160 - DNA, 120 bp, Artificial Sequence
  ENSG00000250903_71 (sequence is synthesized)
ctaacaggcaatggactggtaccggtcttcggcccaggggttggggacccctgcatcaggggacagaacaacattttgcagaagggaaaaactggtcttcctccttctccttttttctgt

SEQ ID NO: 882161 - DNA, 120 bp, Artificial Sequence
  ENSG00000250903_72 (sequence is synthesized)
actcggccttctctcacttgtggacacttcgtggacatagaagaggggtgcaacactgcatctggttcctccaagtgtggtctaagacccgcaacctctgcatctcctgggagcttgtca

SEQ ID NO: 882162 - DNA, 120 bp, Artificial Sequence
  ENSG00000250903_73 (sequence is synthesized)
gaaaggctgaggctcaggcctcagcccagacccacaggatcagaatctgtatcttgacaagactcccctggtgacctgaatgcacgttcaagtttgagaacattgatctaatcatggaga

SEQ ID NO: 882163 - DNA, 120 bp, Artificial Sequence
  ENSG00000250903_74 (sequence is synthesized)
taggtgttttgtgacccaacagccctcatttggattctagacccaaatccgtaacacactaactgtgtaactggggcaggttactctgaggctgttcgagtctccgaatcctcatttgta

SEQ ID NO: 882164 - DNA, 120 bp, Artificial Sequence
  ENSG00000250903_75 (sequence is synthesized)
gaatggcacagaagtgcccactctattatagagttgttaatgggattaaattagtgaatgtaaagctcttggcacccagtgctgggaagggcagctatggagatgataatcattcccctt

SEQ ID NO: 882165 - DNA, 120 bp, Artificial Sequence
  ENSG00000250903_76 (sequence is synthesized)
tgccccccttcccaatcctggcacccaggaccaaggccagtgctctcagcaggagggaagcaagagcactggcttgacccattggtgctcaggacgggtagcactaaacagtccttccaa

SEQ ID NO: 882166 - DNA, 120 bp, Artificial Sequence
  ENSG00000250903_77 (sequence is synthesized)
tcaacttcacgtttcaagtgcctcaccgaggatgttgatagcaatgggtacagttgagtaacagtttactcgtattatttcattagatatttttattagtgccgttatttccatgctttt

SEQ ID NO: 882167 - DNA, 120 bp, Artificial Sequence
  ENSG00000250903_78 (sequence is synthesized)
gaaggaattcatgagttttcaacttgtaaatgcaacacagtttaaaatagcagtctttaaaagttatggttgtaagttttaggccctctgaattaatgtcctgccctatgtgtctgggca

SEQ ID NO: 882168 - DNA, 120 bp, Artificial Sequence
  ENSG00000250903_79 (sequence is synthesized)
tgaggccacagatgccacacagactgtacctagtgctgagtggagcctatgtggaagggctgcagggttcagctagaagtatccactggggcaaagctagtgttggaaagatcctggtct

SEQ ID NO: 882169 - DNA, 120 bp, Artificial Sequence
  ENSG00000250903_80 (sequence is synthesized)
ggcagcagaatgggcatcaacgttgtaagactgcatgtagcagggggtggctggatcacctggagcccagggacaagccttggcacatctatcccttctgattgattttacatattgaag

SEQ ID NO: 882170 - DNA, 120 bp, Artificial Sequence
  ENSG00000250903_81 (sequence is synthesized)
tctgctctcatgggtctccttgccttgaagataattttctctcttttctgctaaggtcctgaacgtttctggcacattacttggacctgatggtaaacccattgctttgtcacaaggcac

SEQ ID NO: 882171 - DNA, 120 bp, Artificial Sequence
  ENSG00000250903_82 (sequence is synthesized)
tgggaggttatcagcactgagatgctttccaatgtgcagtctcaacccagtgccctcggcacacccacttcacttagacagtgggacctcaataaaaatgtgtctgaaaggacactgtgc

SEQ ID NO: 882172 - DNA, 120 bp, Artificial Sequence
  ENSG00000250903_83 (sequence is synthesized)
catcattatcggtttaacggccagggccaatggggagaagggagcaatagttgagaagtgtaaatgtgagggatatctcacaaagcacgtaggaagccaagaaatgtaggtgaaatggac

SEQ ID NO: 882173 - DNA, 120 bp, Artificial Sequence
  ENSG00000250903_84 (sequence is synthesized)
aggaaagatttcttttttccataagcctcttcatgtttatcttggaagtgaagaattctgagactactccatgaattgtcattgtggtagctactcagttattcttagataaaaccagcg

SEQ ID NO: 882174 - DNA, 120 bp, Artificial Sequence
  ENSG00000250903_85 (sequence is synthesized)
gtcccaaatctcagataactgtcaggaataatgttagaaaagtcaagatgaaatctttctgtgcttttgagcatcacacttggttttgatgcaggtggccaaaccacactgtcctgcagg

SEQ ID NO: 882175 - DNA, 120 bp, Artificial Sequence
  ENSG00000250903_86 (sequence is synthesized)
atggccactctgtcagttggtgacttcttgctccagggagccctgggagctgataactcttggttggggaatgttcctctagctttttaccaattcagtctttcactgactggttattct

SEQ ID NO: 882176 - DNA, 120 bp, Artificial Sequence
  ENSG00000250903_87 (sequence is synthesized)
tgcttttgtgggcggccatacaaatcatgtgctgtggggaagtcatgtcaatcatttcactgtctacaggattccctggaagcttgaagcaatttttcagataattaagtccacagaata

SEQ ID NO: 882177 - DNA, 120 bp, Artificial Sequence
  ENSG00000250903_88 (sequence is synthesized)
cttttttttcctcaatgattgggatatctcaagtgagtcaaaactttattgcgattgcctcaattctccattttcctggtcatatatcaaaaaagactttctgcttcctatatgtggggc

SEQ ID NO: 882178 - DNA, 120 bp, Artificial Sequence
  ENSG00000250903_89 (sequence is synthesized)
ttagcatccacattgtaattcaccagagactctctggagagcttggcttggtcccatgtatcctagtacaagcttgccactggtctaagttagaaaatatacagatttggggcccacaga

SEQ ID NO: 882179 - DNA, 120 bp, Artificial Sequence
  ENSG00000250903_90 (sequence is synthesized)
aatgtccaattttatactttttttttttaaatggagaggagtctctgagtgagagaggatttggaaaaatggccagcagataacaataacaatagtgactaacatttattgagtacatac

SEQ ID NO: 882180 - DNA, 120 bp, Artificial Sequence
  ENSG00000250903_91 (sequence is synthesized)
catgtgttaactgtgtgaaataattttcatgtaaaccttttggcaacctaaggttggcagcatggaagctttgagagtgtaagtttcttgtccagaattttataactagaaagtgacaga

SEQ ID NO: 882181 - DNA, 120 bp, Artificial Sequence
  ENSG00000250903_92 (sequence is synthesized)
gagcgatggttcacactcattggaaacatgagtgccattggaacatactagtcaatatgatgccgaaaacagtaacagaaagagtgcaggtgttgaatacgtgttccttttcacactgga

SEQ ID NO: 882182 - DNA, 120 bp, Artificial Sequence
  ENSG00000250903_93 (sequence is synthesized)
aagaaagatggtgagaagttggcatgtcttccacgcaattccatcccatcagctggtctccaaattcccactcctcttggttcccacttctctttgtctctttccagaaggaaacaaact

SEQ ID NO: 882183 - DNA, 120 bp, Artificial Sequence
  ENSG00000250903_94 (sequence is synthesized)
ccctgatgaccctcactgaaaattcacaaactttacaaatttcaatagattagctgtggcttctttttaaaatactcataggtagctgggtcctggagagctctaaagccctctaatttt

SEQ ID NO: 882184 - DNA, 120 bp, Artificial Sequence
  ENSG00000250903_95 (sequence is synthesized)
gcttgcagacggaagaagggaaactcgagtcactggagacaaaggggcaaaggcatgggtttggcggcagagggaaagaaatggtctgtgaccagggcttaagctgcctgtgttggctct

SEQ ID NO: 882185 - DNA, 120 bp, Artificial Sequence
  ENSG00000250903_96 (sequence is synthesized)
gagtgacagtatgctcttgctccaaggaccttaattggctgatagagtgattgctttggccaaaggtccaattaatactcaagatttgaggactggttttccaaccccagttggatgact

SEQ ID NO: 882186 - DNA, 120 bp, Artificial Sequence
  ENSG00000250903_97 (sequence is synthesized)
ttcctggcaagcaaaggttaccgctgtaaattcaacttgcttccttaactgggcacccactctataatgtgaggctatcattctgtctggttaattccagacaagactttgtgagcagat

SEQ ID NO: 882187 - DNA, 120 bp, Artificial Sequence
  ENSG00000250903_98 (sequence is synthesized)
ggggaatttggattttcaaattcgaaaaaaaaaaaaaaaagcataagtgagtgtgagttttatgtagttacctcgatgctccaccttgtggaaaatgtgctaaatcccaatgtaggagga

SEQ ID NO: 882188 - DNA, 120 bp, Artificial Sequence
  ENSG00000250903_99 (sequence is synthesized)
ggcaggattgcaaatgtgaagcagagtggttggcccaggggtttatgctcactgagaatgttctcatcaatagcttgctgtgattggctatggacctattgaaatcaccattaaactaga

SEQ ID NO: 882189 - DNA, 120 bp, Artificial Sequence
  ENSG00000250903_100 (sequence is synthesized)
aaacaaagttactcagccctcgtgtggaaagtgtctaagacagtaatgcagaggccgtagtctgaaggtggcacctcgcactacagaacaatggtaggagctccaggttcggatcatggt

SEQ ID NO: 882190 - DNA, 120 bp, Artificial Sequence
  ENSG00000250903_101 (sequence is synthesized)
tctgaatttactagttgtgtgcacttaagttgcttagtctaattaataaagcagggatgataattcctctttacagctttgttgcaaggattgcattaaagaaaacatgtaaaagcataa

SEQ ID NO: 882191 - DNA, 120 bp, Artificial Sequence
  ENSG00000250903_102 (sequence is synthesized)
gggcattcaattaatgttacaagagcccttccctcaaccccaagggcggctgcagctgttcagcctgacactttatgtgtgttggtcacagtgctgtcttggagaatcacatacgggata

SEQ ID NO: 882192 - DNA, 120 bp, Artificial Sequence
  ENSG00000250903_103 (sequence is synthesized)
gtgcttacctccccatagcagccacgtcatagcaaatagctcattagcatgcagtttcttccctccctgttcagcagcccagcagacaagctgtctcagagcctggatttcagcatgttg

SEQ ID NO: 882193 - DNA, 120 bp, Artificial Sequence
  ENSG00000250903_104 (sequence is synthesized)
cactcaccgcaaatatcctgcaggctgcccactccattctgctgcccttcgcaaggcttcactttgccctccaaccctttttttctcttgtttaccagatggaacgaagtctgtttgtgg

SEQ ID NO: 882194 - DNA, 120 bp, Artificial Sequence
  ENSG00000250903_105 (sequence is synthesized)
acatcccctgacatcctttaagagccatgaccactcctgcccttgctttgtgacaggcactcctggatgctgaagtgctgttgctgtgcaccactatgcatcctgtgtgaggatgagcac

SEQ ID NO: 882195 - DNA, 120 bp, Artificial Sequence
  ENSG00000250903_106 (sequence is synthesized)
tccagtccttgctccctcttcccgtggctggctcattagccagagcaaactgtggccttgaaggagcagaaggagcatttgactcttcccagctctcagtctttggaaaattgagcaaag

SEQ ID NO: 882196 - DNA, 120 bp, Artificial Sequence
  ENSG00000250903_107 (sequence is synthesized)
tggaatgaaagccatttattcatttaactggcagttatttattgagcatctattatgtggcaggcaccgtggtgacactgaaaagagaagggtgaacaaggacagtcctgagctcaagca

SEQ ID NO: 882197 - DNA, 120 bp, Artificial Sequence
  ENSG00000250903_108 (sequence is synthesized)
ggctgctggcaggtggtagtgggggcagacaagcaaaggggcacccatgccatggcctgcaatgcaccacctccaggacaaggtttgggacccatccctgggtcttgggggacattctaa

SEQ ID NO: 882198 - DNA, 120 bp, Artificial Sequence
  ENSG00000250903_109 (sequence is synthesized)
aaggaagcagtggctcagcatagacctgaaggacaagaaggcaccagtcatgtgtggagtgggttggtggagatgcgcagagtgcaaggaggtctggaggtgagacctccaggcagaatg

SEQ ID NO: 882199 - DNA, 120 bp, Artificial Sequence
  ENSG00000250903_110 (sequence is synthesized)
gagggaggtgtgtcccatagcatgtggactctaaggggctgggagatcttaggggtccctggaggctgactgaaggctggccagggagcctgcctggtaagggcctccaaggtcaggttt

SEQ ID NO: 882200 - DNA, 120 bp, Artificial Sequence
  ENSG00000250903_111 (sequence is synthesized)
gggtgtaagagtagccatttctagcactggttgaggtgcacttccctgtcagtgccccaaaatccttcagcagtgtctgatacgatgttctagactggcattgtttccagtgcaggccct

SEQ ID NO: 882201 - DNA, 120 bp, Artificial Sequence
  ENSG00000250903_112 (sequence is synthesized)
catttactctttaaagcaatgctttgagaacaattgagctgcatagtccctgcaatcttataaaggcatttggcctggaagatgctctgcagccatgtgccaagaataacggctataggg

SEQ ID NO: 882202 - DNA, 120 bp, Artificial Sequence
  ENSG00000250903_113 (sequence is synthesized)
acaatgtttcattaaccccaaagcagcaacctgaacctcttactgtacaatatctgctccgttcagaattagctcgacttgagtcacaggatgaagcttaccaaaaggaatttccacgtc

SEQ ID NO: 882203 - DNA, 120 bp, Artificial Sequence
  ENSG00000250903_114 (sequence is synthesized)
caaggaaggaaccaagatcactgagaggttatagtatgaaaagtgaagagaaaaaacctattctaaacattttattaattgtcaataattattttaaaatatttaatatagtctcctacc

SEQ ID NO: 882204 - DNA, 120 bp, Artificial Sequence
  ENSG00000250903_115 (sequence is synthesized)
tggtccactggcatcaagctgccaaatttacacggtcactttgggaagccagctggcaggcaaacatggaaagtgctggctcctagcgtagtgagaagaccacagatagatggtaatttt

SEQ ID NO: 882205 - DNA, 120 bp, Artificial Sequence
  ENSG00000250903_116 (sequence is synthesized)
cttctttgttttatttttctttttcttctctccctctttttcttccctcttgcctttccctcccattgcccactttctttttttggctgccgaagatttattgcctttcagtacttatag

SEQ ID NO: 882206 - DNA, 120 bp, Artificial Sequence
  ENSG00000250903_117 (sequence is synthesized)
atgatgttttcataagttctaatgaggtcccagcagtttttaacaataacaggacattactgttcctaagatatattatgtgttttccctcatctttctcccttgaatgaaatgcttaga

SEQ ID NO: 882207 - DNA, 120 bp, Artificial Sequence
  ENSG00000250903_118 (sequence is synthesized)
agtaggctaacccccaattcccttccctttactatgataaatggctccattacttaatagggctaaatactctgctgtgacttttatactgctgatttgaataaaatcttacgaaaagct

SEQ ID NO: 882208 - DNA, 120 bp, Artificial Sequence
  ENSG00000250903_119 (sequence is synthesized)
gcatccgcaggacagcacaggccaatcacagctgacacagatggtgggaggtgctcgtgcctctcacggtgatcagaaacatcaccgttgcaggtgacgccacttcacttaacactgggt

SEQ ID NO: 882209 - DNA, 120 bp, Artificial Sequence
  ENSG00000250903_120 (sequence is synthesized)
gtgggcggattcatccgctctgaaaattacgtctttggtggacatcagcgtggacttgggttgtcttttcactttcttgctaatgtccttggatgatccacaacttttccaaagcagaac

SEQ ID NO: 882210 - DNA, 120 bp, Artificial Sequence
  ENSG00000250903_121 (sequence is synthesized)
ctcagcctgcagcggatgtggcactattgtcacagtggatgcgacggttgggcacttgctcccctagggtgacttgacttaaacttctggctggttcagagggaaaacaagactggtggt

SEQ ID NO: 882211 - DNA, 120 bp, Artificial Sequence
  ENSG00000250903_122 (sequence is synthesized)
cttgatggacccagtttttgtgggcatctgtttacgcggcccttgcatgcatagcctgccctgcagagctggtgggcatcccagcaaagtcccagagcagaatggagggatcccagtggg

SEQ ID NO: 882212 - DNA, 120 bp, Artificial Sequence
  ENSG00000250903_123 (sequence is synthesized)
tgctgcggggaggctggcagtggccttgctgtactcacctttgcccacagctggaaattagtgcttcatgtgtgaggagcatgtgttttcacttcccctgcaccaggagtctccacacac

SEQ ID NO: 882213 - DNA, 120 bp, Artificial Sequence
  ENSG00000250903_124 (sequence is synthesized)
ctgggcgtgcatttatgctgtgggacgtgggagcagtggggaccatgtggacagagccacacctgtacctgggcaggaagcagagcggggaatgtgcttgggagtctgtgcatccatgca

SEQ ID NO: 882214 - DNA, 120 bp, Artificial Sequence
  ENSG00000250903_125 (sequence is synthesized)
tgtgtgcgtgcatgtgcgtgcatgtgtgcatgtctgtgcatgcctgtggacgtgtgtgtgtgcatgtctgtgcctgcatgtggacgtgtgtgtacgtgtgcatgtgtgtgtgcaaaatgg

SEQ ID NO: 882215 - DNA, 120 bp, Artificial Sequence
  ENSG00000250903_126 (sequence is synthesized)
ggctgtggtgatctactctgctagattctaggggttataattgacttcaggatggatcatgagtagctggttgcatctctgacaagctgaccatcctgcactgatccatgcaggctattt

SEQ ID NO: 882216 - DNA, 120 bp, Artificial Sequence
  ENSG00000250903_127 (sequence is synthesized)
ctatgacaaattggatttgctcccaaacagcccattcttggggaaatgcactgcatttcttcttttttgggtaaatgatacggcctcagatgtggactggctcctcacctggctgagccg

SEQ ID NO: 882217 - DNA, 120 bp, Artificial Sequence
  ENSG00000250903_128 (sequence is synthesized)
gatgggaagcccaggtgaaggaggcacatcgggaaagttttggtcattttatctctttccagagtaaagctccaatattgtagattcaaggaagaattttgtttcatttcagttgtgggt

SEQ ID NO: 882218 - DNA, 120 bp, Artificial Sequence
  ENSG00000250903_129 (sequence is synthesized)
ttttctacccaatataggtcagctggatctcacaagctattgtggcttctaaggcatagcctgtcgattctaaggaaatttgtattgttctcctccatcagagaaaggggagagtttctt

SEQ ID NO: 882219 - DNA, 120 bp, Artificial Sequence
  ENSG00000250903_130 (sequence is synthesized)
gggggagaggaagcaagaattgctaagactggttaaggaaatgtctactccagagtttagctctcccatgcctttgggggacagagaattctataaagatcatgaggcttcccagagctt

SEQ ID NO: 882220 - DNA, 120 bp, Artificial Sequence
  ENSG00000250903_131 (sequence is synthesized)
tccatctttttaaatgaggaatttgttaaaaatcatccataatttagtaatatgttgctttaagatggcaatattttaaaataaataactccatagtaatcaataagccttctattcttt

SEQ ID NO: 882221 - DNA, 120 bp, Artificial Sequence
  ENSG00000250903_132 (sequence is synthesized)
taattgttatttgctagaagcttttgctggacttgctccatggatcacaatttattatttgtttggtgtatgaaaatagtccattagaaattgtgttagagttcactttatagctcagta

SEQ ID NO: 882222 - DNA, 120 bp, Artificial Sequence
  ENSG00000250903_133 (sequence is synthesized)
tccaggaacagcaagaaatctattcacctccctgtcttcaatgcttgattagttccagcatttcaggctgatagcacttatttggttcttgcttgtctccaacttgcagtaatataatct

SEQ ID NO: 882223 - DNA, 120 bp, Artificial Sequence
  ENSG00000250903_134 (sequence is synthesized)
taaaacatgtataaagatataaaacatatctttcaaagtttatcatttatagcctatagattgagccatcataaaacaaatgatttatttatgttcattagtcttaattttagatgtgtt

SEQ ID NO: 882224 - DNA, 120 bp, Artificial Sequence
  ENSG00000250903_135 (sequence is synthesized)
tgtttctgccactccgaagcttattcaaccaattaccataaatgagtctgttcattcattttccatgaaatgcacaggcccagcacatgtaactgctttaactacttagctattaattac

SEQ ID NO: 882225 - DNA, 120 bp, Artificial Sequence
  ENSG00000250903_136 (sequence is synthesized)
atactaactacataaatatggaaaattatcatacatgttttatgtatcacccctgagatgtgcatgtcggtttgaaattgagtggagttatatcaaaattacatttcacttctatgaatt

SEQ ID NO: 882226 - DNA, 120 bp, Artificial Sequence
  ENSG00000250903_137 (sequence is synthesized)
aagtagctaggactacaggtatgtgccaccactcccaactaatttttttattttttgtagagacgagatctaactttgttgcccaggctggtattgaactcttgggttcaagtaatcctc

SEQ ID NO: 882227 - DNA, 120 bp, Artificial Sequence
  ENSG00000250903_138 (sequence is synthesized)
taatcctcctgcctcagtctcctaaagtgctagggttatagatgtgagccactgtacccagccaggttgtatattgaaataataatttcttaatatattgaattaaaatatatttaaggc

SEQ ID NO: 882228 - DNA, 120 bp, Artificial Sequence
  ENSG00000250903_139 (sequence is synthesized)
tgctggatttttaaaatatgaaatctcttttataatttcatcaggatattggaataaaaaagatgtagatgcatatattcagtcattccttttgaaccagttatatttctaaaagcttaa

SEQ ID NO: 882229 - DNA, 120 bp, Artificial Sequence
  ENSG00000250903_140 (sequence is synthesized)
caaaagtctggagaaatctcttttatgttctgaggagttaaaaattatattacaaggaagcaacaagagaaaagacttatccccaattgttcctggtgcctattattgcttagtaaacca

SEQ ID NO: 882230 - DNA, 120 bp, Artificial Sequence
  ENSG00000250903_141 (sequence is synthesized)
ccccaaaacttggtgatttaaacaacaatggtcatttatgttgcctgttaattgcaatctgggcagggctctgcagggaaggctcatctctgcctcacagggacattcagtggctggaag

SEQ ID NO: 882231 - DNA, 120 bp, Artificial Sequence
  ENSG00000250903_142 (sequence is synthesized)
gtccacctccaggctagctaacacacagttggcaagtcggtactcactgcctctgtgtgggagctcagccacagctcagagctaggcattctcacagcacaatggctggttcccaaggcc

SEQ ID NO: 882232 - DNA, 120 bp, Artificial Sequence
  ENSG00000250903_143 (sequence is synthesized)
aagtatcctgagagagagctaggtagatgttgtattgccttcagctgtactttgttagtcaaggcagttgcaaagtcatgtgcaggctgaaggggagggaacagagactccatgtgagga

SEQ ID NO: 882233 - DNA, 120 bp, Artificial Sequence
  ENSG00000250903_144 (sequence is synthesized)
cacaagaagaaggcagccatctgcaagccagaaagtaaggcctcaccagaaaccaaattttccaacaccttaatcttggacctcttgccttcagaactgtgagaaaataaatcctgttgt

SEQ ID NO: 882234 - DNA, 120 bp, Artificial Sequence
  ENSG00000250903_145 (sequence is synthesized)
tcaagccatgcagcctgtggtacatagtcatagcagccagaacacattaagacaaaccccgttaggccttgaatgctaatgtcaggcaaagacctagcatattaaggccgtttttagaca

SEQ ID NO: 882235 - DNA, 120 bp, Artificial Sequence
  ENSG00000250903_146 (sequence is synthesized)
gagagcttttttgactaccacagtggtaaatggagcatgccagtcatgtaaagaggcccatagggtagaaatccctgccattctagtattcttacgacaagctgactatatgcaggcaga

SEQ ID NO: 882236 - DNA, 120 bp, Artificial Sequence
  ENSG00000250903_147 (sequence is synthesized)
acaaagggacagatgccccactagtgattaaggaaacaatgtgccttggggagacgggaaggctctagaatggtatgagcaccttcagatggataggcttggattctagaaatccttatg

SEQ ID NO: 882237 - DNA, 120 bp, Artificial Sequence
  ENSG00000250903_148 (sequence is synthesized)
cctgtatgaacatgtgtagagcctaggtaggaccatcctatgaatgaatgttcaggagtcacccatccccatgaatggaaactaggactgatggaactaggtatttcctgaacactcaaa

SEQ ID NO: 882238 - DNA, 120 bp, Artificial Sequence
  ENSG00000250903_149 (sequence is synthesized)
gtggatcaacctaatagtgaacaaaaccacatctgacaaggagaaggcatagggactacctagtgttaggaaacagtccccgatttctgactcatcctgctataagccaacttctttccc

SEQ ID NO: 882239 - DNA, 120 bp, Artificial Sequence
  ENSG00000250903_150 (sequence is synthesized)
acaagacagtacaggacacagcctacaggaggaaatagaagtcctgatctttctctttcagtatcctgtgctgtcagaggtcactttagctaggcttaaaaaccagaaggaaaagaattt

SEQ ID NO: 882240 - DNA, 120 bp, Artificial Sequence
  ENSG00000250903_151 (sequence is synthesized)
caggatggcaaagggatgggcatggtagtggtaagacgatgaggtgtgaggggcagaggaataagaaatttaatggtttttattcagactttattatttgggcatgagccattggtgatt

SEQ ID NO: 882241 - DNA, 120 bp, Artificial Sequence
  ENSG00000250903_152 (sequence is synthesized)
aactcaatctccagcccctttgccctccctgaaggttggggaggcaggaagtccatccctctgatcatgccttggtctccattccccaaaccccatcctgaagctatctagggcccccaa

SEQ ID NO: 882242 - DNA, 120 bp, Artificial Sequence
  ENSG00000250903_153 (sequence is synthesized)
taccgagtcatttcattagagaaggacattcatcactccagaaattccaagggtcttagaagctcttgtgttagaaactggggactaagaccaaatattataacaaaaagatgttcccag

SEQ ID NO: 882243 - DNA, 120 bp, Artificial Sequence
  ENSG00000250903_154 (sequence is synthesized)
cattcctatcatccaggcagttacaaaggtttttggaactctgtgtcaggaatcaggagcagagaccaggtatctatttcttgtcatgtcccacaagaggatgcagaaaatctgggattg

SEQ ID NO: 882244 - DNA, 120 bp, Artificial Sequence
  ENSG00000250903_155 (sequence is synthesized)
taactgttgatggttatgtaatctcaggaaacttctttgtcctccattgcttcacaattaaatggggcagatatgcctcccctctctcactctatttcctgagcacacattccagaatct

SEQ ID NO: 882245 - DNA, 120 bp, Artificial Sequence
  ENSG00000250903_156 (sequence is synthesized)
cagcaaactctagagacaaagacacagccctggcccccagggagcaaggtcttagggtgctggagaaaattatcgtttttgttcccttccaatagtgaaatctatgatcattaaaaaaat

SEQ ID NO: 882246 - DNA, 120 bp, Artificial Sequence
  ENSG00000250903_157 (sequence is synthesized)
acagtatacctcctaattaagccaagtttcccttctcattttagttatcaggaatttaaatcaatcaaggcataaattggaccaaacattattaccactgttcattgatatccttaacta

SEQ ID NO: 882247 - DNA, 120 bp, Artificial Sequence
  ENSG00000250903_158 (sequence is synthesized)
agaacgttactgaaactttcccttaatacttattatatatcttccaagtcaatcctgagaaaatccataaagctcatctcagggcgaaagcttgtacatttaagtaacaggattccaaat

SEQ ID NO: 882248 - DNA, 120 bp, Artificial Sequence
  ENSG00000250903_159 (sequence is synthesized)
aaacaatattgctgagttaactaaaaatacattaactaaaaataaatctcatctaaaatattaaaaatggatatttttaaaatgctttttattttttaagtgttcctggttaaatgtggc

SEQ ID NO: 882249 - DNA, 120 bp, Artificial Sequence
  ENSG00000250903_160 (sequence is synthesized)
ttaaagcaatgctttgagacatgaaagccagatagggaagaatttgcagcctcatactgattggccagttgaggagtcaactcatctctcttatagaaaaaagaagattacatttacgga

SEQ ID NO: 882250 - DNA, 120 bp, Artificial Sequence
  ENSG00000250903_161 (sequence is synthesized)
atacagaatatactgtgctctctacttaccaagagatttctttctctactgacaactttctgttgacgtggttactgtgcaggttctgacagtcgattctttccacctagttcactgctg

SEQ ID NO: 882251 - DNA, 120 bp, Artificial Sequence
  ENSG00000250903_162 (sequence is synthesized)
gtcttgagatgcaccttgtttgcccacgggggaaacgtgctttggaaagtgctggacaccatggctgtgcaggcccaagaaggtgatgtatttagtgtgcttcaagaaaactaacatttt

SEQ ID NO: 882252 - DNA, 120 bp, Artificial Sequence
  ENSG00000250903_163 (sequence is synthesized)
cagagggagcaagttacttattattggttacccttaatatataccatctagattaagcatatttatttccaaattgttcgctaaggtacaggtccttgccttagtcagtctgagctgctg

SEQ ID NO: 882253 - DNA, 120 bp, Artificial Sequence
  ENSG00000250903_164 (sequence is synthesized)
taacaaattaccatagactgagttgttcattaacaacaaagtatttctcatggttctggaggctggaagtctgaggtcagggtgccagcatggttgggcttcggtgagggctctcgtctt

SEQ ID NO: 882254 - DNA, 120 bp, Artificial Sequence
  ENSG00000250903_165 (sequence is synthesized)
ggtttacagacagctagacagctgtctgtatcctcacatggcagagagagacaaaggttgcaagcactctgctgtctcttcttataagggcactaattccatcgcaagggctccaccctc

SEQ ID NO: 882255 - DNA, 120 bp, Artificial Sequence
  ENSG00000250903_166 (sequence is synthesized)
atgactaatcatttcccaaaggcgctgcctcctaaaatcacattgggtgttaggatttcaacatatgaatttgagggggactcaaaccttcagaccataacagttcatggctaagattat

SEQ ID NO: 882256 - DNA, 120 bp, Artificial Sequence
  ENSG00000250903_167 (sequence is synthesized)
aaatgaccaaagcccagtgtcaccaataatccagctctagaaagtgtagtaatggaaacgacttcatccccatgagatggaaacagttagaaggatgaatgactcaagccttgacaagga

SEQ ID NO: 882257 - DNA, 120 bp, Artificial Sequence
  ENSG00000250903_168 (sequence is synthesized)
tatggagagacagggtgttgctaatgggagtgcaactggtacagttattctggaaaaccatccgtttctttgtgaactcaagtgtgcatctgtcttctgacccaacagtcccactcttga

SEQ ID NO: 882258 - DNA, 120 bp, Artificial Sequence
  ENSG00000250903_169 (sequence is synthesized)
agttgcgcaatgtgtagcttttacaactataagcggtggccctgattcaagaccacagaatgagccactggaacatctgggatgaggacctcctgcttgccaggtagttgaaagacctat

SEQ ID NO: 882259 - DNA, 120 bp, Artificial Sequence
  ENSG00000250903_170 (sequence is synthesized)
gttcgtcatagcaacagggcctggaaaagagaagaaatacagcctttgtatttctgggattgagaaggaaagcagtcatgccactgagaatctctgggtctggaaagggggttggtcatt

SEQ ID NO: 882260 - DNA, 120 bp, Artificial Sequence
  ENSG00000250903_171 (sequence is synthesized)
gtggattccatgaaggctctgccggaagaatctggaaggactgagtcttcagagcctcagccctgggaggcggagtgacagggacctataccgattgaggacagagaggaaaaggtccct

SEQ ID NO: 882261 - DNA, 120 bp, Artificial Sequence
  ENSG00000250903_172 (sequence is synthesized)
gctgagcatttctcttttgaaagaccctctggctgcagcctggatgagcaatgctgacaggtgattcgcagtactggctggcagtgtaaaccaagttagcaaaatagaagcagcagcctg

SEQ ID NO: 882262 - DNA, 120 bp, Artificial Sequence
  ENSG00000250903_173 (sequence is synthesized)
ggagaaaacagggcttggaagaagactgtggtggagacttccaggactcctagatgatccaggaggacaagaaagtgcaagtttgggatcctggaattcctgccaatctgcaggtggagg

SEQ ID NO: 882263 - DNA, 120 bp, Artificial Sequence
  ENSG00000250903_174 (sequence is synthesized)
cttaagccagtactgatttaatctgaaacctaacgtgaatgaaacagcttgcacagcgcagcaagcggcaggagcagtgtctccatgccaagctcaccaacatgtccatttccttactgg

SEQ ID NO: 882264 - DNA, 120 bp, Artificial Sequence
  ENSG00000250903_175 (sequence is synthesized)
acaactgaccataagaaggagtgccctctgctgacagagctgagcattgtgtcaggagaatatcaacagggaccagctccagcattgcaagacaggcaaagaagagtgtgtttggagcca

SEQ ID NO: 882265 - DNA, 120 bp, Artificial Sequence
  ENSG00000250903_176 (sequence is synthesized)
aagtgacacctgccacaagctgggcactgctgtctataggacctcatactccactgtaaggacttttacaagagcaagagggcttcgagcagaagaatgacacaaccttattcatacttt

SEQ ID NO: 882266 - DNA, 120 bp, Artificial Sequence
  ENSG00000250903_177 (sequence is synthesized)
cagcaggatgattctggttcccgagctgagaatggaccagaggaaggcaaggtggaagctggtgaggaggctgttgtgttaatattgcaataagaatttagcaggctgtttagcatttat

SEQ ID NO: 882267 - DNA, 120 bp, Artificial Sequence
  ENSG00000250903_178 (sequence is synthesized)
gtaataaagatattcctatgggactgttacgatatcttacctaaccatcactgctaactctaagtctaaataagaaataagtattttttaaagaacattaaaaaaatcaatcaccacaaa

SEQ ID NO: 882268 - DNA, 120 bp, Artificial Sequence
  ENSG00000250903_179 (sequence is synthesized)
aaagtgatttcttaacatctctattttgaaaattattgaatctttttgattagtaatacattcacatcgttttcaaaataaaacaaagatatgcaaaagtattcagtaaaaagtctttct

SEQ ID NO: 882269 - DNA, 120 bp, Artificial Sequence
  ENSG00000250903_180 (sequence is synthesized)
attcagtaaaaagtctttcttctgcctttatccactatgtgtcctgttcccataaaacttttgtttgccagtggtttggataaagaaaatgtggtacaggccgggtgtggtggctcatgc

SEQ ID NO: 882270 - DNA, 120 bp, Artificial Sequence
  ENSG00000250903_181 (sequence is synthesized)
atcccagctactaggaaggctgaggcacaagaatcaattgaacctgggatgcagagattgcggtgagccaagattgagccactacactccagtctgggcgatagagcaagactcaatctc

SEQ ID NO: 882271 - DNA, 76 bp, Artificial Sequence
  ENSG00000250903_182 (sequence is synthesized)
actacactccagtctgggcgatagagcaagactcaatctcaagaaaaaaaaaaaagaaagaaaatatggtacatgc

SEQ ID NO: 882272 - DNA, 120 bp, Artificial Sequence
  ENSG00000250903_183 (sequence is synthesized)
aattaatgcagaaacagaaaaccaaatatagcatatcctcacttatatgtgggagctaaacgtggggttaataaatactggcaattccaaaagaggggatgaaaggaggggaagggttgg

SEQ ID NO: 882273 - DNA, 120 bp, Artificial Sequence
  ENSG00000250903_184 (sequence is synthesized)
ttggaaaactacctattgagtactatgttcactacttgggtgactgaatcatgagtccaaatctcagaatcaaacaatatgcccttgtaacaaacctgcacatgtaccccctgaatctaa

SEQ ID NO: 882274 - DNA, 120 bp, Artificial Sequence
  ENSG00000250903_185 (sequence is synthesized)
atttaaaaataaaaacttttaattttttttgtatctctttccagagtttttaagcataagtgttagcaaacacaaatatatattattatctcccctttcggttttacgcaaaaggaacat

SEQ ID NO: 882275 - DNA, 120 bp, Artificial Sequence
  ENSG00000250903_186 (sequence is synthesized)
actatgcacatacttttcttcaccttgcttcttcacaaaattttgtatctggatatatttccatatcataggtatagagagcctcttcattaaaaaaaactgtatgtaccatactgtatt

SEQ ID NO: 882276 - DNA, 71 bp, Artificial Sequence
  ENSG00000250903_187 (sequence is synthesized)
gggagttacagtgttgactgcagaggagctcccaggcctctacagtttgctgggtcccattactttctgag

SEQ ID NO: 882277 - DNA, 120 bp, Artificial Sequence
  ENSG00000250903_188 (sequence is synthesized)
ccaggcctctacagtttgctgggtcccattactttctgagacaggtgagatggaaacaagtctcttgggaaggctcccaaaaagcccattgtcatagaaagcacctggcttctaatatct

SEQ ID NO: 882278 - DNA, 120 bp, Artificial Sequence
  ENSG00000250903_189 (sequence is synthesized)
ccagggaagagacatcaacaccagcccatcgctgataccctttgtcctggcctccggagcgctccctgcacagtcccaagtctgcaagaagggggatcttttcttgaaaacctacagtgc

SEQ ID NO: 882279 - DNA, 120 bp, Artificial Sequence
  ENSG00000250903_190 (sequence is synthesized)
gggatcttttcttgaaaacctacagtgctaataattgtcaaaaatatataaattctaaatttaaaatttaaggtattggtgcctatgaaatgtccccaacacaaagaaatgataaatgtt

SEQ ID NO: 882280 - DNA, 120 bp, Artificial Sequence
  ENSG00000250903_191 (sequence is synthesized)
atctgatcactcactttatatgtattgaaacatcattatgaactccatgaatatgtataattgttattagtcagttaaaacaaataaaactaaaaatgtttaacgataagaagaaaaaaa

SEQ ID NO: 882281 - DNA, 120 bp, Artificial Sequence
  ENSG00000250903_192 (sequence is synthesized)
caacgagccctcatgctgcccctcccttacagttttgacacaggactgaccagcattccttccagatgagagaccgctggccacagagtggctttggccagtctacggacactgcacaca

SEQ ID NO: 882282 - DNA, 120 bp, Artificial Sequence
  ENSG00000250903_193 (sequence is synthesized)
gagggcctccatgtcctctgctttaccttttgatgtttagagcctacttgtaatacatttaaatgttaagttgcctctccaaagtgagcagggaagcacgttgcatgcctgttagctact

SEQ ID NO: 882283 - DNA, 120 bp, Artificial Sequence
  ENSG00000250903_194 (sequence is synthesized)
acacatgcccttgcctcccttttgtgagtttccatcgctcctcctatgacctgctgaacatgtatacttagccaacctgctcagcgtacattccagttcccttgaccccctctcctgaag

SEQ ID NO: 882284 - DNA, 120 bp, Artificial Sequence
  ENSG00000250903_195 (sequence is synthesized)
tacttgttatggaggttacacttcccagcctgcaagatggccagcctgcaggctgcgatgctttatgagaaataaagctcttttaccaaatttatgaacctcattattcttcagctgcag

SEQ ID NO: 882285 - DNA, 120 bp, Artificial Sequence
  ENSG00000250903_196 (sequence is synthesized)
atttcagtttttcatgttttcatttcagtttttcatgtacagtgactaaacatattcattgaattgatgacctgcattagctagtttggttaatgatttcctataacaaacttttgtgaa

SEQ ID NO: 882286 - DNA, 120 bp, Artificial Sequence
  ENSG00000250903_197 (sequence is synthesized)
gtttatggtattttcattgatgtaactaatttgtctcaaatccacaagacatttaaatcttacccttaatacgttcatgagattcttgcatcttcattgattagattttccaataataca

SEQ ID NO: 882287 - DNA, 120 bp, Artificial Sequence
  ENSG00000250903_198 (sequence is synthesized)
atggcctgttcatgattttgactcagaatgtatttgttctttttgatggattactttttgaattatctggacactttttggttaaaattggtcatctatatcagaataatttctattaat

SEQ ID NO: 882288 - DNA, 120 bp, Artificial Sequence
  ENSG00000250903_199 (sequence is synthesized)
aaacaaaaaaaaggcagcgcagacccagagtaagcaacagcaagatttattgccaagagccaaacaacaaacctcccacagcgtggaagcagacccaagtgggttgacactgctggctca

SEQ ID NO: 882289 - DNA, 76 bp, Artificial Sequence
  ENSG00000250903_200 (sequence is synthesized)
gcgtggaagcagacccaagtgggttgacactgctggctcaggtggtctgcttttagtcccttatttggcctcacca

SEQ ID NO: 882290 - DNA, 72 bp, Artificial Sequence
  ENSG00000250903_201 (sequence is synthesized)
accctacccgattagctagacacagagccctgattggtgcgtttacaaacctttagttagacacagagtgct

SEQ ID NO: 882291 - DNA, 120 bp, Artificial Sequence
  ENSG00000250903_202 (sequence is synthesized)
acacagagtgctgattggtgcgtttacgatcctttagctagacagaaaagttttccaagtccccaccagacccagaagcccagccagcttcacctctcaatgggattttaaaaaatgttt

SEQ ID NO: 882292 - DNA, 120 bp, Artificial Sequence
  ENSG00000250903_203 (sequence is synthesized)
cctctcaatgggattttaaaaaatgtttttacttggcaaataaagacttagcaacctaatacctacctctcaaaatatttgtaaatcatactgatctataaaatctattaagtatgagat

SEQ ID NO: 882293 - DNA, 120 bp, Artificial Sequence
  ENSG00000250903_204 (sequence is synthesized)
ttgttgatataatgactcataaaagcaatgtaatccaaattaaaatttgtaaagcactgcataatttacatagtatttctgtctcgagtatctttaaaccattaagttaagagtgtgact

SEQ ID NO: 882294 - DNA, 71 bp, Artificial Sequence
  ENSG00000250903_205 (sequence is synthesized)
gtctcgagtatctttaaaccattaagttaagagtgtgactttggacgggtgtggtggctcacgccgagagt

SEQ ID NO: 882295 - DNA, 120 bp, Artificial Sequence
  ENSG00000250903_206 (sequence is synthesized)
ttggcgacagagtgagactccatctccaacaaaaaaatgaaagaaagaaaatctcctgtagtcacttctagtcaccacaacagtttgattttaataattagaagacctacttctatgcag

SEQ ID NO: 882296 - DNA, 120 bp, Artificial Sequence
  ENSG00000250903_207 (sequence is synthesized)
acctacttctatgcagaaatatgaactccaaacctctggatatggggacagaaattgccgtggcactctaaaaactttgtccaaagaaatgctgtcttccattttctttgccgttaacca

SEQ ID NO: 882297 - DNA, 120 bp, Artificial Sequence
  ENSG00000250903_208 (sequence is synthesized)
ttttatatccttgagatggtgttgagttgatctgcaaagccggccttggccacctgccctgatagtcttgcccaaatgctccagcaccttgccctggaacgtggccaaattggccacctg

SEQ ID NO: 882298 - DNA, 120 bp, Artificial Sequence
  ENSG00000250903_209 (sequence is synthesized)
ctgttttgttcgtccctctgatttctgtctcggttgctctcttttggagttctgcagttgtgtgcgtgctttttcttgttctgggtcagtttttttctcatctgtcaaaccaggacacat

SEQ ID NO: 882299 - DNA, 120 bp, Artificial Sequence
  ENSG00000250903_210 (sequence is synthesized)
aattttacaaggtcacacagtgaggaaagccttgctgaatcttactgctacgattcacggcattgcagaggccttgcttttagagctgcaacagatctcagaagttttaggctaattcct

SEQ ID NO: 882300 - DNA, 120 bp, Artificial Sequence
  ENSG00000250903_211 (sequence is synthesized)
tcgttttacagacgactaaaatgaaatccagggagtttaagtggcatgacgagagctagaggatcccttctcaagtaactatggaacaaagccttcgaaacgcatacgttggtacagagt

SEQ ID NO: 882301 - DNA, 120 bp, Artificial Sequence
  ENSG00000250903_212 (sequence is synthesized)
taggctgagaggggcctgagcttacacaatgtgggtgtcctctttcagaaagaagaaatacaaaattaagtacacaattgttatcatttagaaagataaaagaaattaccgtgaattaca

SEQ ID NO: 882302 - DNA, 120 bp, Artificial Sequence
  ENSG00000250903_213 (sequence is synthesized)
cactttcaaaacctgtgaaataccacaaacagcataaaatccaagaaaataatatctttattacttaattgtccaaccaatctctgtaattcctgttttcttatattttctgctgtataa

SEQ ID NO: 882303 - DNA, 72 bp, Artificial Sequence
  ENSG00000250903_214 (sequence is synthesized)
gcagcaaaatttttgctgcctcttcccatgacgttacgttctgttggcctagaggtcttagttccagaggga

SEQ ID NO: 882304 - DNA, 120 bp, Artificial Sequence
  ENSG00000250903_215 (sequence is synthesized)
gaatgaaggtttgggtcactccaccagggaaaaaaccacagcctgctgaggtgcttgttgaaggcaaagggaatacagaatgagtagtagaagaaggtggtcatcaataccagctacgac

SEQ ID NO: 882305 - DNA, 87 bp, Artificial Sequence
  ENSG00000250903_216 (sequence is synthesized)
gctacgaccacgtgaccagctgcagaaaccaggactgtaattgtcatgagtatttactccttcttttgttaaaaacatgtttttatt

SEQ ID NO: 882306 - DNA, 87 bp, Artificial Sequence
  ENSG00000250903_217 (sequence is synthesized)
ttttattttgtttcctttctcctttatcatgtgatgtaagatttattgacttgacatcaacatttaagtattgttaactttatgtaa

SEQ ID NO: 882307 - DNA, 74 bp, Artificial Sequence
  ENSG00000250903_218 (sequence is synthesized)
tagtatttgggttggggattggtgtgtttccagttgtatgaaggataattatgtatgatctcaggagatgtgta

SEQ ID NO: 882308 - DNA, 68 bp, Artificial Sequence
  ENSG00000250903_219 (sequence is synthesized)
tcgtgggctgggcaaggcagacccacccttaatcgggttgggtaccatctaatcagctgccagcatgg

SEQ ID NO: 882309 - DNA, 90 bp, Artificial Sequence
  ENSG00000250903_220 (sequence is synthesized)
gcagacccacccttaatcgggttgggtacctaataagcagatagaaaatgtgaaaaaaggtactggcctagcctcccagcctacatcttt

SEQ ID NO: 882310 - DNA, 68 bp, Artificial Sequence
  ENSG00000250903_221 (sequence is synthesized)
ctctggaacttggactggctcttcttcctcctcagtctgtagatggcctattgtgggaccttgtgatc

SEQ ID NO: 882311 - DNA, 120 bp, Artificial Sequence
  ENSG00000250903_222 (sequence is synthesized)
tgagatgtgtggggcagcgtgctgcatctcagccaactccaggagggcctgtcttgagatgcaccttgtttgcccacgggggaaacgtgctttggaaagtgctggacaccatggctgtgc

SEQ ID NO: 882312 - DNA, 120 bp, Artificial Sequence
  ENSG00000250903_223 (sequence is synthesized)
gggataaacccctgttgatcatggagctcccaggcctctacagtttgctgggtcccattactttctgagacaggaagcatgctcatggcaatacccggagtctccactgcaagaccagag

SEQ ID NO: 882313 - DNA, 120 bp, Artificial Sequence
  ENSG00000250903_224 (sequence is synthesized)
ctgtccaaaatgccccctgccccctgcttttccacagaggaaccccagccatctcagtgtgtgtctccctcacccagctgacctggccgaaggctgttctaggtgccaagaggacccttc

SEQ ID NO: 882314 - DNA, 120 bp, Artificial Sequence
  ENSG00000250903_225 (sequence is synthesized)
tctcatcgtggggagcactcggggatggttgcgtttcctgcctcatcccattactgaggcttgctactcatctccctccggggcactctcttacccgagttgagatacctctgcaactga

SEQ ID NO: 882315 - DNA, 120 bp, Artificial Sequence
  ENSG00000250903_226 (sequence is synthesized)
ggggttgactccatgtcatttaaaatggactttccagctacatttgtaaaatgtcatgatgctcataagaaataataaatctatgcaatttagttgagaaaaatttcaactcaactcaga

SEQ ID NO: 882316 - DNA, 120 bp, Artificial Sequence
  ENSG00000250903_227 (sequence is synthesized)
cagcgtgctgcatctcagccaactccaggagggcctgtcttgagatgcaccttgtttgcccacgggggaaacgtgctttggaaagtgctggacaccatggctgtgcaggcccaagaagga

SEQ ID NO: 882317 - DNA, 120 bp, Artificial Sequence
  ENSG00000255367_0 (sequence is synthesized)
agttccaaaggacatgaagacaaagtcacacacctttatttaacctgctccaggctggccaccacagtcctgtcttttctgccagaagcaagtcaagtgttgctacaagaacaagtgtga

SEQ ID NO: 882318 - DNA, 120 bp, Artificial Sequence
  ENSG00000255367_1 (sequence is synthesized)
aaaacatttgcctgattacgatttctagcaccatgaaagttatccttcttagaaattcctaaggctcaatgctgtgtggaagattctgagaaaaaaaatagtttccgatctttgggattc

SEQ ID NO: 882319 - DNA, 75 bp, Artificial Sequence
  ENSG00000255367_2 (sequence is synthesized)
tctgggttacaagccattattgctcatgaccctgtgagttgcatggggacttcctggctggtttaacctgggctc

SEQ ID NO: 882320 - DNA, 74 bp, Artificial Sequence
  ENSG00000255367_3 (sequence is synthesized)
actttaaaccaccacaagccattattgctcatgaccctgtgagttgcatggggacttcctggctggtttaacgg

SEQ ID NO: 882321 - DNA, 65 bp, Artificial Sequence
  ENSG00000255367_4 (sequence is synthesized)
ctccgccgagaggccgctcgcgccgggtccttcctcttccccaggtgcaggcagaacccccggag

SEQ ID NO: 882322 - DNA, 120 bp, Artificial Sequence
  ENSG00000255367_5 (sequence is synthesized)
gagggaggaggacgacgtccctcccgaggagaagaggctgcggctgttgctggaggggggaagcgcacagcccgaggacggggaggacgcgccgcggccgggcaggaaggagaccggcac

SEQ ID NO: 882323 - DNA, 120 bp, Artificial Sequence
  ENSG00000255367_6 (sequence is synthesized)
cccccaacctggaccgtctggccggggagggcgtcaaggccaagtacctcatgccgccccttgtcacaatgacctccccatcccacttcactgccatcccagccactcccagagcccctg

SEQ ID NO: 882324 - DNA, 120 bp, Artificial Sequence
  ENSG00000255367_7 (sequence is synthesized)
ttcccagatcttcttggcttagcagctgcagaccgacacttcccgatcgaacgcctcggaagcctacaggaccatcacagacgctctaggttactctcactgtggagcacagctttaaag

SEQ ID NO: 882325 - DNA, 120 bp, Artificial Sequence
  ENSG00000255367_8 (sequence is synthesized)
ggttactctcactgtggagcacagctttaaagactgcccccaccctagtcttggttccctgaccgggaagcgaggtaattgacggaaagtcgaggcagcccgttaggtggcttaggcctg

SEQ ID NO: 882326 - DNA, 90 bp, Artificial Sequence
  ENSG00000255367_9 (sequence is synthesized)
gccagcttgagcgacgcggatcctgagagctctcccgggtaagaaattgccccggaggaatgcctcgtcagagcagtgtgtggtaggccc

SEQ ID NO: 882327 - DNA, 120 bp, Artificial Sequence
  ENSG00000255366_0 (sequence is synthesized)
tgttactgttaactttcaatcatgttatgcatcataacgttttttgtttaatgaacagatatgagcaaaggacgttaatcccggtatcttctctagttgtagttgtgtgtggttctcgag

SEQ ID NO: 882328 - DNA, 120 bp, Artificial Sequence
  ENSG00000255366_1 (sequence is synthesized)
tggctgcgcatgtgaacacgtgtgatttctcagtgtactgtactgtgatttgtttttattgcttgttttgtttcccctcagtgtctgtaacccttagcaggctctgacctagtcaggcta

SEQ ID NO: 882329 - DNA, 120 bp, Artificial Sequence
  ENSG00000255366_2 (sequence is synthesized)
gaagaagcataaggatcttttattgctttgtgctgggtgagggctggccctaaacatctgcctaatcctttcaacgggcccaggaaaagccagactggcatcatgtccacagcatcgctt

SEQ ID NO: 882330 - DNA, 120 bp, Artificial Sequence
  ENSG00000255366_3 (sequence is synthesized)
aatatcgttggttgtcatccagacacctcaacttgtgctgcagaggaaataagttccttctcacggatcatcatgatggatattgaaacctcagggtgcagaactaacacctgttcatca

SEQ ID NO: 882331 - DNA, 120 bp, Artificial Sequence
  ENSG00000255366_4 (sequence is synthesized)
tcgtggatgttaaagaattgggtaacatgccaagcggtaagccttggatgggccatgagaatatcctctaaaaagcacgcagtattgtgcccctctcacaaccaacacacacatgacctg

SEQ ID NO: 882332 - DNA, 120 bp, Artificial Sequence
  ENSG00000255366_5 (sequence is synthesized)
tcccctggcacccccaaatttaagagtggattgcaaatcttttggagaccatggccctgctacatgtagaaaaacctgttctgctattcctgggcccacaataaacccagaaattatgtt

SEQ ID NO: 882333 - DNA, 120 bp, Artificial Sequence
  ENSG00000255366_6 (sequence is synthesized)
ttgagttactgtgatttaaactccctctcttcttaaatggaacagctcattggggctttctggatctgtttccatttttctttaaaaataaattgtgagcatgcattgtggtgatgcaga

SEQ ID NO: 882334 - DNA, 120 bp, Artificial Sequence
  ENSG00000255366_7 (sequence is synthesized)
ggcaggcattctgtgagatacaagctccagaaggattctcctcaatgtgtcagtgttgggatgcacacttcctaaataaatcatcattgtctccgtcttctccattaatagcgctctttc

SEQ ID NO: 882335 - DNA, 120 bp, Artificial Sequence
  ENSG00000255366_8 (sequence is synthesized)
agtgtgacatggaaaagcaggatggcatacaccccactgaaggatgtaggcggaggcagatctctcaaccaggcatattgcttctgtactgctcttcttttgctctaaggtatgggttcc

SEQ ID NO: 882336 - DNA, 120 bp, Artificial Sequence
  ENSG00000255366_9 (sequence is synthesized)
ctcaacctcttagctagagaccagcaaatgtcagggaagcacccggtgtctggctccccttccaaatcaacaccagtgtcttgttacagacaagaagtcagaggaaagggcggggtccca

SEQ ID NO: 882337 - DNA, 120 bp, Artificial Sequence
  ENSG00000255366_10 (sequence is synthesized)
gcaatgggccccaggaatacctgcagcgtagtgacctcagatcctgatactcaccatgaaactctaagatactgattggaagcgacttgtggctgctggctgtgtgtgtgactctgccgg

SEQ ID NO: 882338 - DNA, 120 bp, Artificial Sequence
  ENSG00000255366_11 (sequence is synthesized)
ggaccctggcagcccccctgtagctgtcttgatgcctctctgtcacccacatcatctgcctacttaacgcccagctctgctcagaaaacgttatgtcctgtgtcgaggagagacgacgca

SEQ ID NO: 882339 - DNA, 120 bp, Artificial Sequence
  ENSG00000255366_12 (sequence is synthesized)
aaattctgaagtccatttccctctggctcctggcataccctcgctccttttctgagcccagctcgtggtgtgccagagcctgtgtggtcccctgacttctgcacagtgtagaactttctc

SEQ ID NO: 882340 - DNA, 120 bp, Artificial Sequence
  ENSG00000255366_13 (sequence is synthesized)
caatagtcacaatggcaaagggagaactggggggctggcaggtaattagaatttctctccctctctcttttaatactttcattttgaatgtcttatttgttcatgtgtatgttttaactt

SEQ ID NO: 882341 - DNA, 120 bp, Artificial Sequence
  ENSG00000255366_14 (sequence is synthesized)
aaaaaattctttctgatatttttaattttgtgtcataagaatgttttcctctacagtatttgtcataccagtttataaccacagaaatgcagagattttatttctattggaaacattact

SEQ ID NO: 882342 - DNA, 120 bp, Artificial Sequence
  ENSG00000255366_15 (sequence is synthesized)
acagctatgttttacttttgaacagaatttttacttgtatagggtgcttactaatgttaaatagtttggagtatataacatttacattaaggactcatggtaggttaaaaccctaaaggg

SEQ ID NO: 882343 - DNA, 120 bp, Artificial Sequence
  ENSG00000255366_16 (sequence is synthesized)
taaggggtttaaaggaaataaatattcaaactgagtcttattgccaattttggtgtaaatgagtttgtgtcatttcaattacaaagataaaagtatgccatataatttatgtaaaatttg

SEQ ID NO: 882344 - DNA, 120 bp, Artificial Sequence
  ENSG00000255366_17 (sequence is synthesized)
tttttgtggtgtacataatagttatcaagtctgttgacagaagtatattttaaaagaatatacatgtgatgaatccataatatctgaaactttgctgagatatgagtggggcacacttca

SEQ ID NO: 882345 - DNA, 120 bp, Artificial Sequence
  ENSG00000255366_18 (sequence is synthesized)
ttgtaaattacagcaaggaaagaaattaaggaaagaagttaagagagtgagagtgagtggatattcacacaattgtgaaatgtttattagttaccttttgtgatgtagtgtggttctcat

SEQ ID NO: 882346 - DNA, 120 bp, Artificial Sequence
  ENSG00000255366_19 (sequence is synthesized)
tttaaaccttggaaggtgaaaatgtacaaactataaatatgaatgttcaaacactgacagaaattctaatatgaattaaaaaataacgaaaaaacaacaatatattttatcttactaatt

SEQ ID NO: 882347 - DNA, 120 bp, Artificial Sequence
  ENSG00000255364_0 (sequence is synthesized)
gctgcaaacattgggatcagccgtgactatcccataacataatatttctgatttcattcttttcctttctcctaccaatttaatctgcaatcacttcaagagaagtctgtttaaaggata

SEQ ID NO: 882348 - DNA, 120 bp, Artificial Sequence
  ENSG00000255364_1 (sequence is synthesized)
ttcacattctgttcacagagtttgagagaaactgtattcaagttgctgaaaccaagaagctacactcacgagtctcacctaaactcgaatctgatttagatgacatcatcctggactttg

SEQ ID NO: 882349 - DNA, 120 bp, Artificial Sequence
  ENSG00000255364_2 (sequence is synthesized)
ccagagcatggctgtgagatgaaaactcccattttagggaaccaagactgaattccataatttacatggatgtttggaaggtgtctgcaacttaatctgtgttcgtttctgagatgttgg

SEQ ID NO: 882350 - DNA, 120 bp, Artificial Sequence
  ENSG00000255364_3 (sequence is synthesized)
gcaactccttcttggaagatgtggtaatggtctcttcgaaaagaaaataatcatctgagttttggccaaaatagttgatcggattacctatgaaaatgactctcacccaactacaagaat

SEQ ID NO: 882351 - DNA, 120 bp, Artificial Sequence
  ENSG00000255363_0 (sequence is synthesized)
gtgtcaggggcagctgctggaaggaggcgcaagcaccacggagagtctgggatgcccagccaaggagccctggaagggttgccctggggactgacactgtgggctctgtgttttagccaa

SEQ ID NO: 882352 - DNA, 120 bp, Artificial Sequence
  ENSG00000255363_1 (sequence is synthesized)
gtcacccaggcagctgaacagaagatggactggagggagaagcctggatgtaggatcgctcagcaacaaaggagccagaaaaggcaaggtgtacacaccgtgtgcagcatgggcgagctg

SEQ ID NO: 882353 - DNA, 120 bp, Artificial Sequence
  ENSG00000255363_2 (sequence is synthesized)
tggtggtgatatatacatgtggatgcttatggatctgtgccaaccattattaagcacatatgtatacccgtgtgtgtatatgcatgcatgtgtttgtgtgagttgcaatgtgtatacaac

SEQ ID NO: 882354 - DNA, 120 bp, Artificial Sequence
  ENSG00000255363_3 (sequence is synthesized)
tttacacaataagtgaattgagtacatgtacctgtttatccacggaagtgtatgatgactggacatatgtaaatatgtgtatttgcatgtgtttatactttgtgcatagatgcatgtttg

SEQ ID NO: 882355 - DNA, 120 bp, Artificial Sequence
  ENSG00000255363_4 (sequence is synthesized)
cagcaacaaaggagccagaaaaggcaaggtgtacacaccgtgtgcagcatgggcgagctgcaggcatgcagaacttctgagtcctaaccatggctggtggctcttccaggaacatggttt

SEQ ID NO: 882356 - DNA, 120 bp, Artificial Sequence
  ENSG00000255363_5 (sequence is synthesized)
cctggacccaaaagatgaggaaactgaggcttggagaggctctctgcctttgtcaacctggagatgctgggaaggaagtgaggcccatcccacctcagatgcctgtcctctgtcgtcagg

SEQ ID NO: 882357 - DNA, 120 bp, Artificial Sequence
  ENSG00000255363_6 (sequence is synthesized)
agcattctcttgttcttccgggcttggccaagcggtggtaaaccccacatgtggttctgtggttgcccacacagtcctaaaaatagccaacaggaacccaggggctcccccttggtgagt

SEQ ID NO: 882358 - DNA, 120 bp, Artificial Sequence
  ENSG00000255363_7 (sequence is synthesized)
catgcatgatgagccagaggctgtgccaagcttatagcaaatattattttatttcattatgttttcttacatctgtgatgtggaggccatagctccactggactcatgaggagactgagg

SEQ ID NO: 882359 - DNA, 120 bp, Artificial Sequence
  ENSG00000255363_8 (sequence is synthesized)
ctcagagcaatgaagtgacctgctcaaagttaaggagcttcagtttggacccaatttgttctgatcctaaggtcactatccttaatccctctccctgtggggtcttccctatcttgagcc

SEQ ID NO: 882360 - DNA, 120 bp, Artificial Sequence
  ENSG00000255363_9 (sequence is synthesized)
tgtggacagctgtgcagtggcaagaaaaaggccttcagagctacgcagacctggcttcaaatcccagcctccctgatgagccctggtggtcttggagctgtaacgctcactgcgaagatc

SEQ ID NO: 882361 - DNA, 70 bp, Artificial Sequence
  ENSG00000255363_10 (sequence is synthesized)
tgacacagtccctgcccacatggagctgacattctcatggagagaaagggacaaataaacaaatgtacaa

SEQ ID NO: 882362 - DNA, 120 bp, Artificial Sequence
  ENSG00000255362_0 (sequence is synthesized)
gttggtggctgcatcccaatggggagaaatgaggcccggatgatgaaactaaggatcccagaggctgagtgacttccccggagtccctcggtgggatcgttgattccttttccacaactg

SEQ ID NO: 882363 - DNA, 120 bp, Artificial Sequence
  ENSG00000255362_1 (sequence is synthesized)
cgaaggaccaggactaggacacgaaggcaggtttcgggacctcagacgtctacagtaaccacgctgcgcgaccaacacctaaggatgccccggctccagactgagacccaagtctgactt

SEQ ID NO: 882364 - DNA, 120 bp, Artificial Sequence
  ENSG00000255362_2 (sequence is synthesized)
ccccctgccagttgaggctccttgcctggttgctgcgacgattcgagatgggccttacccgggccccacgcgtgtcgcaggcacgcagcacgcacgcttagtaaacaccagctgtagtga

SEQ ID NO: 882365 - DNA, 120 bp, Artificial Sequence
  ENSG00000276651_0 (sequence is synthesized)
gcgttgtggaaagtgcgtctgcctaggaaggcaggccggcatgctttcaaatcttagctctgctgcctacttgacggccaggcttagcaagcgtctctagccgttccaagccttttctag

SEQ ID NO: 882366 - DNA, 120 bp, Artificial Sequence
  ENSG00000276651_1 (sequence is synthesized)
atctgtaaaactggaagaagaatacttgtctcgcaaggaacatgtgagaattcatgaaaattgccaccacatactaggtggccaataaattataactttgtatttgtttttactgacact

SEQ ID NO: 882367 - DNA, 120 bp, Artificial Sequence
  ENSG00000276651_2 (sequence is synthesized)
agatgagagctgcttccctgggaagcgggaggaggagaaacaataatatctgcccttggctcaagttcttccacccatctctccatgtcaacctatttgtctttaaggccttgctccacc

SEQ ID NO: 882368 - DNA, 120 bp, Artificial Sequence
  ENSG00000276651_3 (sequence is synthesized)
aaccttctgtttcctccggacacccacccccacttagcatccataaccccttgttcggccctggagcatgacctcactcaggccatgcttcatactggtatgtaatatttcttcaccctc

SEQ ID NO: 882369 - DNA, 120 bp, Artificial Sequence
  ENSG00000276651_4 (sequence is synthesized)
tcagagactccgtttcctaatcccctagacttcagtttaaacatcacttcctgagggagtctttcccgaccctttcccacccgcagggtacctcccagtgtgtgatgtccttgtctgccc

SEQ ID NO: 882370 - DNA, 90 bp, Artificial Sequence
  ENSG00000276651_5 (sequence is synthesized)
caaaaaacaaaacaaaaaaaaaaacagtgtctcctatattgcccaggctggtctcgaaatcctgggctcaagaaggattacgggcatgag

SEQ ID NO: 882371 - DNA, 120 bp, Artificial Sequence
  ENSG00000276651_6 (sequence is synthesized)
cccaaagtgctaggattacgggcatgagtcaccgcgcccggcctaaaaacactcttcatgcgtgtaattatttgtttaatgtctctcttcctcttgtttgtccataaggtagcaaacaag

SEQ ID NO: 882372 - DNA, 120 bp, Artificial Sequence
  ENSG00000276651_7 (sequence is synthesized)
tctgtctggttttctgctttatttctaacatgcaatgtagaacatggaggatgtctgataagtaagtgaatacatgacatgaacgggtgagtgtgcggtatgttagccatgtctaccatg

SEQ ID NO: 882373 - DNA, 120 bp, Artificial Sequence
  ENSG00000276651_8 (sequence is synthesized)
ggcaagagcctagcaggtggcccaatatttgccaatatttgacccctagagatgatctctaaatttcctttcagttctagctttatgattttaacggaatcaggaatgtgaaagtgcttt

SEQ ID NO: 882374 - DNA, 120 bp, Artificial Sequence
  ENSG00000276651_9 (sequence is synthesized)
aaaacccttgggagcaggggccctaatttagtcccgattgtgatagtccccagagggcaagctctatcaggcagtccagagaagttgggcaaaatcagagaggccctcctggggcgtttg

SEQ ID NO: 882375 - DNA, 120 bp, Artificial Sequence
  ENSG00000276651_10 (sequence is synthesized)
ctagatttccctaaaatagtgaactttcctgtgtctttgaaagtttccataataagaaaagagtggagaaaaagaaacccgcagtgagtaaatgagtcaaatgggggaagaccatgaggc

SEQ ID NO: 882376 - DNA, 120 bp, Artificial Sequence
  ENSG00000276651_11 (sequence is synthesized)
acactgggaaatctgccttttcagtccctcgtttcttcagctgcatttaatacaacattcgcgtttttattcttggcccgcatccctctggcactgaggagctctgacttacatcccagg

SEQ ID NO: 882377 - DNA, 120 bp, Artificial Sequence
  ENSG00000276651_12 (sequence is synthesized)
gagccctgatggtgacgagccagcctccagcctccagctcccgtgctcttgagtgcgctgctcccgggattccccacccagccctctggacatccgggggcggggagggagggtggtttc

SEQ ID NO: 882378 - DNA, 120 bp, Artificial Sequence
  ENSG00000276651_13 (sequence is synthesized)
cgcggcaaaacctgcccgaagcggcgggcctgttctaaaagtttgcatttttcaaaggggaggaatgcaaaattgcaaccgtactatcaaatgtttctctcctaaaggataattgtgtat

SEQ ID NO: 882379 - DNA, 120 bp, Artificial Sequence
  ENSG00000276651_14 (sequence is synthesized)
atacatggaagtggggtcggtagtgaggggagggcaaggtcatatattgcaggggaaccacttcaggaaaggtctcaaggttgccgcgattttcctaaaaccttaaacttaggacttttg

SEQ ID NO: 882380 - DNA, 120 bp, Artificial Sequence
  ENSG00000276651_15 (sequence is synthesized)
gcagaattgatggtccttaaccaacaattacaaggcagaccaggccctggggaaaactagctctgactatcctcacccagggaaggctcattggaaacactccgagagatggcttaatta

SEQ ID NO: 882381 - DNA, 120 bp, Artificial Sequence
  ENSG00000276651_16 (sequence is synthesized)
ttaatatttaccatagagattgttctaggagcaacgcctccttgggaaaccaaagttatatcaagaggaggcttggtaagtgttgggggcagggaatgggccgctgccgctcagagactc

SEQ ID NO: 882382 - DNA, 120 bp, Artificial Sequence
  ENSG00000276651_17 (sequence is synthesized)
ttctgttgcctggtttaattttcctagtggcacctatctaatatttccttgcatgtttacttgcttatctattgtcagtctccatgagaacaaagatcttgccagtgctgttggttgcct

SEQ ID NO: 882383 - DNA, 120 bp, Artificial Sequence
  ENSG00000276651_18 (sequence is synthesized)
gatttccagcccctggaatacagcctggtaggtggcaggccctcagtaactatttgttgaatgactaaataaatggagaggggtgggtgtgggctccaaccacccagctctcacttcccc

SEQ ID NO: 882384 - DNA, 120 bp, Artificial Sequence
  ENSG00000286998_0 (sequence is synthesized)
agaggacagagaatggagagggagaaaaggagtctgcctagtcattttcaagagtgtgcgtgaagaaggggtacagtagtgggagaaagagaaagacacctaaggagggaatgagagagc

SEQ ID NO: 882385 - DNA, 120 bp, Artificial Sequence
  ENSG00000286998_1 (sequence is synthesized)
aagcacatcaccaggaagcatgcagagtggaagccgcgggatggagggatggagctgagagagtccacagggtgccagaagatgacagtggctccatggggacaacagaggcagaacaag

SEQ ID NO: 882386 - DNA, 120 bp, Artificial Sequence
  ENSG00000286998_2 (sequence is synthesized)
gtagcggtgacgacacgggctactgagagagactgcctggagtgaatcctccctctaccagctaagtgaccttggacagactgcctaagctccctgggccttggtcctctcatctgtaag

SEQ ID NO: 882387 - DNA, 120 bp, Artificial Sequence
  ENSG00000286998_3 (sequence is synthesized)
aaggggtagcaaatgacactgatttcctaggatattccatgaccaaaactcttctattctacactggttgcttgcttttggggagaaatgggagagaacattgggatttaacctattatg

SEQ ID NO: 882388 - DNA, 120 bp, Artificial Sequence
  ENSG00000286998_4 (sequence is synthesized)
cttattactgcagcctctctgctgcggcttcatcccattttgcagaagcagctcagagctgaagttgtccatgaactttccttagggaagggactatgtctgttttatttacctctatat

SEQ ID NO: 882389 - DNA, 120 bp, Artificial Sequence
  ENSG00000286998_5 (sequence is synthesized)
atctagcacctagtacctgagacctagtaggtgctcaataagtacttgagtgaatgactgagtggttacatttatttattcccccaggacacttgtgaggataaatattcatattgctat

SEQ ID NO: 882390 - DNA, 120 bp, Artificial Sequence
  ENSG00000286998_6 (sequence is synthesized)
tgtttctgctcacagatgagggactggagctccagcaaggttaagtgacttgtgcataaacacacagcctgaagcagaacaggcggactcaaacgccaaatcccatgctctttcttcctc

SEQ ID NO: 882391 - DNA, 120 bp, Artificial Sequence
  ENSG00000286998_7 (sequence is synthesized)
ggtgccatccctgattgtagagtcatctccgaattctatgactcatatctgaatcacagaactgtttaatagttgaaggggacttctgatgtcatctggacctcccatccattgtggaaa

SEQ ID NO: 882392 - DNA, 120 bp, Artificial Sequence
  ENSG00000286998_8 (sequence is synthesized)
tttcctctccattgtctatctatctagtacttgaatgcctcctgtgacggaacacgcatttcttcctctggaattattgagttctatgactggaccacttttagagtcagagagttctgc

SEQ ID NO: 882393 - DNA, 120 bp, Artificial Sequence
  ENSG00000286998_9 (sequence is synthesized)
gtctatgggccaaaggcctgtttttaatttcaatgccttgggcttacgtcatcctaagatacacagaatagatctgctgccccttccgcaagacagccattcagatattcaggaagttct

SEQ ID NO: 882394 - DNA, 120 bp, Artificial Sequence
  ENSG00000286998_10 (sequence is synthesized)
cacatcttttcagagaattctcttctagacagacggtcccatcttagaccgtctcaacaggctgtcccaagtgttttgagcaatggcaccccctactggttaaggtatgaactgcatcaa

SEQ ID NO: 882395 - DNA, 120 bp, Artificial Sequence
  ENSG00000286998_11 (sequence is synthesized)
agggcttcctcaggagctggggcactgagtgtggtgtgaataaaataccacttattttgaagagtcatcgctttagactcatacctggttgtttccaatgtctatcttaaagagtatcac

SEQ ID NO: 882396 - DNA, 120 bp, Artificial Sequence
  ENSG00000286998_12 (sequence is synthesized)
gtgaagactccattctaaggttccttgccaatcatgaggtctctgaaaagctacaggtttggaatttcaacgttagagttcaaaagacttgtctttgttttgttttgttttgttttgttt

SEQ ID NO: 882397 - DNA, 120 bp, Artificial Sequence
  ENSG00000286999_0 (sequence is synthesized)
cctgggctgaactgggccaaacaggaaccaggaggcagatgtccatggcaagagtgtacccagccctagaggaggccgtctgctcatccttcaccaaaactcccctcagatctgctcaag

SEQ ID NO: 882398 - DNA, 120 bp, Artificial Sequence
  ENSG00000286999_1 (sequence is synthesized)
gaaggggaaatgagcaggagcaggggttcttctgagatgaaatggggggttgcagcctcctgggggacgtttcactgagggcagagcccagcctgttgagcagcacaggacaggtacaag

SEQ ID NO: 882399 - DNA, 120 bp, Artificial Sequence
  ENSG00000286999_2 (sequence is synthesized)
aattcagcctaaacccatagcctcctcccacccacgtgccaatcccagaaaagtcactccagaagcaaatccccaggtggcaggagccagaaacactggttacaaagaatacccagccag

SEQ ID NO: 882400 - DNA, 120 bp, Artificial Sequence
  ENSG00000286999_3 (sequence is synthesized)
tgagcaggtgtttattagggtcctttttcattaccccagagacagacccagggctggctacgtgcacaggaagtaacgcttgccacatgcataaatacgtgaaggtgcacattacatcag

SEQ ID NO: 882401 - DNA, 120 bp, Artificial Sequence
  ENSG00000286999_4 (sequence is synthesized)
cacagattcacaaaacacctcgccttggcaagaaaactgtagctaggcagctcccgtcctcagggactcctgccacagacgtcatggagacagcatgagcctccccagaacagtccccac

SEQ ID NO: 882402 - DNA, 120 bp, Artificial Sequence
  ENSG00000286999_5 (sequence is synthesized)
ggcctagactccccagagcaggaggagcagcccaggctctgttgcgagacagccatcacttcctgttctttgcaggtgcctaaggtaggttacctggccaaggttttggtggaaaaaatg

SEQ ID NO: 882403 - DNA, 120 bp, Artificial Sequence
  ENSG00000286999_6 (sequence is synthesized)
agttttttcaatgttgcaggtcttttaatagttcatctgtaggaagtgcatttgcaaagtcaccaacctgcagcttccatctgtagaccaggaagggtgattctctgggtgaccacagcg

SEQ ID NO: 882404 - DNA, 120 bp, Artificial Sequence
  ENSG00000286999_7 (sequence is synthesized)
gggcatcccctgaggtacagacgccccccccccaacccccgcagtgtcctcacagccaccacagcctttgcagtttggctcaagcaagccctgccaggccccacccctcatgctggctct

SEQ ID NO: 882405 - DNA, 120 bp, Artificial Sequence
  ENSG00000286999_8 (sequence is synthesized)
gctgtgaagccatcctcccgttgggcagcaagctcaggccctacacagagccatcttgaggcttgtaaatgaagcaggcgtccccagagcaggactctgctgtggccaccagcttctcct

SEQ ID NO: 882406 - DNA, 120 bp, Artificial Sequence
  ENSG00000286999_9 (sequence is synthesized)
tccacacagcttcccccgcaacacagcacggccactgacctctggcttcaagcaaaggagaggctgtgaggggagccttgggaggatgtggggacccccagagaatcttctcccacccaa

SEQ ID NO: 882407 - DNA, 120 bp, Artificial Sequence
  ENSG00000286999_10 (sequence is synthesized)
acagagcagtcaagaccaggaaaacgaggcctccactttgtgaacagagctgcccatgtggtcacgcggcgccttcgtcctgagacacctgccccacactgagaagcagggctgggttga

SEQ ID NO: 882408 - DNA, 120 bp, Artificial Sequence
  ENSG00000286999_11 (sequence is synthesized)
cggtccacagcatgatagttcattgcaccgctggagggaatgggccagggcctctcgctggtctcctgaagggaaatgggggttgggcccagagtcaagctgcagtcagggatgaggcct

SEQ ID NO: 882409 - DNA, 120 bp, Artificial Sequence
  ENSG00000286999_12 (sequence is synthesized)
gcaccgtgcagcacacagaaaaccttcagaggtgcggctggcccagggccagctcggggtctgcagccagggactgccagcccccacctggacactttctcctggggtggccccggctgc

SEQ ID NO: 882410 - DNA, 120 bp, Artificial Sequence
  ENSG00000286999_13 (sequence is synthesized)
acaggtggagtcggaacaggcaagtcctccaggtggcagctccaagctcagggcaagtcccaccccaaagaaaagctgcctgctgcacttcccgggcagtgccaagcctgtccagctgcc

SEQ ID NO: 882411 - DNA, 120 bp, Artificial Sequence
  ENSG00000286999_14 (sequence is synthesized)
ctgaggagacgtcacagggctgaaggcagctggagccctgccatgcaaacagcacacagcacatggggggcacaggatgacacagctgctgctcctcctccgggtgcctgcccacccagg

SEQ ID NO: 882412 - DNA, 120 bp, Artificial Sequence
  ENSG00000286999_15 (sequence is synthesized)
ggggcacgggctccagtcacggccgtccaccagcatgtcagctgcttccaggtaggtccttgtgtcccctcggccctgcaccaggagggcagctttagtctgtctggggccatggaggtg

SEQ ID NO: 882413 - DNA, 120 bp, Artificial Sequence
  ENSG00000286999_16 (sequence is synthesized)
gccctaatgctttgacctgtcccatgatgtcactaggtcctcctctgggaccgagcatccctggcccacagggaaaagcccatcccaggctctggatgctcagggcccagggtgtgtccg

SEQ ID NO: 882414 - DNA, 120 bp, Artificial Sequence
  ENSG00000286999_17 (sequence is synthesized)
cctagagagcagtgacctgtgtgagctctgtgttgggcgtagatgggctctgcgggctgacaggcaccatgggcaggtccacgcctagtcatgcgggccgcggtaccgtctcagaggtct

SEQ ID NO: 882415 - DNA, 120 bp, Artificial Sequence
  ENSG00000286999_18 (sequence is synthesized)
tgcaggccagggccacgtccttggcaatgctgcgcacgcggtcagacacctgcacgtcccggcgcagggcagatgcacagcagaacttgcggaagcaggccttgaagttctcatccagga

SEQ ID NO: 882416 - DNA, 120 bp, Artificial Sequence
  ENSG00000286999_19 (sequence is synthesized)
aggcgtagaggatggggttgaggcagctgttgacgtagcccagggccgtgcagaagcgcagaatggccacggcagtctcgctgctcggctgaacccccagcccttgggccagcacgaaga

SEQ ID NO: 882417 - DNA, 120 bp, Artificial Sequence
  ENSG00000286999_20 (sequence is synthesized)
cctggacaggcgtccagcagcccacgaacacagccactaccaccagcaccagccgagtgatgcgccgcaggttccggtccttctctcgggagcccgagagcaggcggactccacggagcc

SEQ ID NO: 882418 - DNA, 120 bp, Artificial Sequence
  ENSG00000286999_21 (sequence is synthesized)
gccggatcatgaggctgtagcagacagagatgacgagcacggggacgatgaaggagaagaggaagatgcagatggcaaacaccgggccccagtaatcctgaggggtagggatctccacca

SEQ ID NO: 882419 - DNA, 120 bp, Artificial Sequence
  ENSG00000286999_22 (sequence is synthesized)
ggcactcgatctctgcagggagagaaacggggtcagagtgggcccaggagacgtggagggcacgtgggcccagaggagccacccgggagccagggagcctggtgaggggaggaggggaca

SEQ ID NO: 882420 - DNA, 120 bp, Artificial Sequence
  ENSG00000286999_23 (sequence is synthesized)
ccccactgaccttcatcctcgacctgtgccgagcccatgatggcaacgggaacaccgacaacagaggccagggcccagatggccacattgacagcctgggctttgctggacgtgcggacg

SEQ ID NO: 882421 - DNA, 120 bp, Artificial Sequence
  ENSG00000286999_24 (sequence is synthesized)
tcgagggcacggatggggtggcagatggctacatagcgatccacactcatggcagttagggtgaaggtgctggtgaacatgttgtagtagtcaatggcaatgactgtcttgcacagcgca

SEQ ID NO: 882422 - DNA, 120 bp, Artificial Sequence
  ENSG00000286999_25 (sequence is synthesized)
ttcccaaacggccagaagcccaggaggatgtccgtgccctggaagggcagcgtcagcaggaccagagtgtcggccagggccaggttaaagatgtaaatattggtggctgtcttcattttg

SEQ ID NO: 882423 - DNA, 120 bp, Artificial Sequence
  ENSG00000286999_26 (sequence is synthesized)
gtgtgcctgcggagtagagggagaagaaaggcttcacttggccatgctggctggaccaggcagcaaagggcaaggggctcctcttggccaccacaagctacagtggccctgagtccctta

SEQ ID NO: 882424 - DNA, 120 bp, Artificial Sequence
  ENSG00000286999_27 (sequence is synthesized)
acatcagagttcccatgggggcttggtaagtgatagctcctggacccaacctgagactcatgagtcagtctcagggggtagggcctggggtcaaacgtcttaaccagctcctcaagtgac

SEQ ID NO: 882425 - DNA, 120 bp, Artificial Sequence
  ENSG00000286999_28 (sequence is synthesized)
tctgacacacacagaaggattccaagccttaaacacaggtctactttagaggagtcagggcatgtaggctaccagaacacaccccggattctgcacaggagcaaaggtttagagccctaa

SEQ ID NO: 882426 - DNA, 120 bp, Artificial Sequence
  ENSG00000286999_29 (sequence is synthesized)
gggaaagagtctgctccccttgcttttgagtcccctccatgacccctcacagactcaaatgctgaccctacagttgccagaggtttctgagggctccagaatctgtaagaacatatcaaa

SEQ ID NO: 882427 - DNA, 120 bp, Artificial Sequence
  ENSG00000286999_30 (sequence is synthesized)
aggcttccaagtccacactgctgcctagcaatggagaccgaaaatggtgacggggggacaggagggatgctaataaggtatgagtgtatccaagcacctgaaatggtgctggaaagggct

SEQ ID NO: 882428 - DNA, 120 bp, Artificial Sequence
  ENSG00000286994_0 (sequence is synthesized)
gggacgcgcgcagccggtggccaactttgccccgcgcctccacccgggcaggaaaagtggctttggtgagctattggcactgtggttgccacctctgaccttcagggacgtcagaggtga

SEQ ID NO: 882429 - DNA, 120 bp, Artificial Sequence
  ENSG00000286994_1 (sequence is synthesized)
gcgtttcaggactgccggcaccagagtgtcaggggagatgacattctcatcctcccgcttcttcctcccagcggttaggtttagaacttcgtagcaccagcccatcgtcccgctgggcgt

SEQ ID NO: 882430 - DNA, 120 bp, Artificial Sequence
  ENSG00000286994_2 (sequence is synthesized)
ttggtgggcgggtgcacagatagtcctttacccgagctcttgtcaaaggcccagctgcaatcggggcagggaaactggtagccctccgccgcttctgccagccctgctctgaggagcatt

SEQ ID NO: 882431 - DNA, 120 bp, Artificial Sequence
  ENSG00000286994_3 (sequence is synthesized)
gttccgtggattctaggtatttgctttcttgttgactttgtcagttgcttaaaaaatgaagagtttggcagagatttctcaaactgtgctgtttttcaagggaaaattaagccatgaccc

SEQ ID NO: 882432 - DNA, 120 bp, Artificial Sequence
  ENSG00000286994_4 (sequence is synthesized)
tttaatttaataggatgtctttagagatgctggatgtgtgggaaaagtccacactacataccattcaccatcctgcagtagtttatttctttaaaaacaggtttacttgtcttcctaagt

SEQ ID NO: 882433 - DNA, 120 bp, Artificial Sequence
  ENSG00000286994_5 (sequence is synthesized)
agcttttacttcatcacagagatgcatgtatgttacagttagcttcgggaagccaaagaggagaaacacaggttttcactttgccatgcacagcaaacccaacttgagcaagacctgtag

SEQ ID NO: 882434 - DNA, 120 bp, Artificial Sequence
  ENSG00000286994_6 (sequence is synthesized)
aaagtttctatcctattttagaatctaatttaatgtaattttcacaaacataatttactttaaatgtaaattcagaatttgaatttgaatttacttttaacgtaaattcaaagtcagcac

SEQ ID NO: 882435 - DNA, 120 bp, Artificial Sequence
  ENSG00000286994_7 (sequence is synthesized)
gtcagcaccatgtcctcttgttaaggacgtatcctatacatattttttttgcaagcttttacttgtggttagttttcaatacttatgcagctttctccccaaccaaaaaataataataaa

SEQ ID NO: 882436 - DNA, 120 bp, Artificial Sequence
  ENSG00000286995_0 (sequence is synthesized)
agtgtggatgtcattttggttgggaacacacatttccttaggaaaagcaggaggctgtgatggaagaaactaaggatcttgaaattggatagacctattaccaccttccctaacttcaag

SEQ ID NO: 882437 - DNA, 120 bp, Artificial Sequence
  ENSG00000286995_1 (sequence is synthesized)
acttcaaggagaaggaagaaggagatttgagacccagagaaacagaggaagaggccatgagaacatggaggcagagactggagggcaatcatgaactaaaaaccaccaaggattgcagaa

SEQ ID NO: 882438 - DNA, 120 bp, Artificial Sequence
  ENSG00000286995_2 (sequence is synthesized)
gtcaccagaggctgggaaagaggcacagcatggattcttccacagagcctccacatggaaccagtactgccaaaaccttgatttcaaatatctggccttaaaaactgtgaataaataatt

SEQ ID NO: 882439 - DNA, 120 bp, Artificial Sequence
  ENSG00000286995_3 (sequence is synthesized)
tcctattaagtcactcggtttgtggctattagtcatggcagccctagaacactaatatgctgtctaacagaaaatgtgtggctccctgtcctagaccaatatgtcggatacataatttgt

SEQ ID NO: 882440 - DNA, 120 bp, Artificial Sequence
  ENSG00000286995_4 (sequence is synthesized)
gtgatatttgagctcaagagaagaccaccaccttgggaagtagcagagagccattcccccttcctatatttctgtcccattctcccttcctatatttctgtctctggtcatacaattggg

SEQ ID NO: 882441 - DNA, 120 bp, Artificial Sequence
  ENSG00000286995_5 (sequence is synthesized)
ctttctggcacactgctgtctgtgctagagggtgtgaggcagaacattcctgttcatgtgactgttcaggtggctcttttgcaagtccaattattcctataggtggctttattgagtgtt

SEQ ID NO: 882442 - DNA, 120 bp, Artificial Sequence
  ENSG00000286995_6 (sequence is synthesized)
gaagtatccaataaagacactgcttttttcttatgagattgtatttaaatttttaaaaatttaattataagatagccatcaaatataataaggtctttattcctgaggaagtctaaatgg

SEQ ID NO: 882443 - DNA, 120 bp, Artificial Sequence
  ENSG00000286995_7 (sequence is synthesized)
gagaatgtagaatatggttactgtagagaaaaatgggctagccgactgacatcccaagctaagcagatgtgcacacacagttccagggtcagtaagacttcctcctcctcaggtacagca

SEQ ID NO: 882444 - DNA, 120 bp, Artificial Sequence
  ENSG00000286995_8 (sequence is synthesized)
aatggagaaacagaaagctgctccctataagcacttcctggagcaaaatggggagttgaaaccagcatgcccactttaatctctctaaaaatgccaattagaataagctatacctcctcc

SEQ ID NO: 882445 - DNA, 120 bp, Artificial Sequence
  ENSG00000286995_9 (sequence is synthesized)
cctggagcagagcaagagaaagggtggtagatgccagatgggtctcaccaatgaagttgcctcaccaaggaaggaagaagaatatcctgttataaagtcacaagcctacatttgagaggg

SEQ ID NO: 882446 - DNA, 120 bp, Artificial Sequence
  ENSG00000286995_10 (sequence is synthesized)
aaaacccacagaagagcttggtgacctttcccaagacagctttagcagtaattatgacaattaaagtatgctaaagtgctgtgtgaatgaattatccaattaaaagtcagtcattctttc

SEQ ID NO: 882447 - DNA, 120 bp, Artificial Sequence
  ENSG00000286995_11 (sequence is synthesized)
ctcagcgtcctaataactttttgtctatattttatcatagaattttgcaaacggtactggatatattggtttacgtgtctgatttctccactagactatgagaacaagaacacttacgta

SEQ ID NO: 882448 - DNA, 120 bp, Artificial Sequence
  ENSG00000286995_12 (sequence is synthesized)
ctacacaacttgctgcacatcgcctgaaacaaccagagcagtaatcaataagggctgattgacatcttgtttcctgcttgcttcttcacttttacatagggtttctgcttagattctggt

SEQ ID NO: 882449 - DNA, 120 bp, Artificial Sequence
  ENSG00000286995_13 (sequence is synthesized)
tcacattttccttgtattttgcagctcactgatatgaaagtggaagcagactcttggaaattaaagacccatgtgagcataaatgcttgaaacctttaatttaaatcataaactgcactt

SEQ ID NO: 882450 - DNA, 120 bp, Artificial Sequence
  ENSG00000286995_14 (sequence is synthesized)
gaaacctttaatttaaattataaaatatgtgcataagagaatataaacacaaaatgtggcttatgagagaaataatcaaatgatacatcaggaaaatatatacactgcactcgtgattgg

SEQ ID NO: 882451 - DNA, 120 bp, Artificial Sequence
  ENSG00000286995_15 (sequence is synthesized)
ttataattagaaaaaggactaaagactaccttggaaaaagttgaaaatcttaaaactgcccaaacaggggcatcttaattcgttaaaaaccactggcccccagggtatttgaaaacagta

SEQ ID NO: 882452 - DNA, 120 bp, Artificial Sequence
  ENSG00000286995_16 (sequence is synthesized)
tgagtaggagaaaggtcaagttgatatttggaagtgccagccactcttatgtggtgatttctatatcctagtttgactgatttgaacttttcatttattcactcattcactcacttactt

SEQ ID NO: 882453 - DNA, 120 bp, Artificial Sequence
  ENSG00000286995_17 (sequence is synthesized)
attcaagaaataattttcttatgtgtcagaaattggaattatctgcatatgggaggcgacttggaatgcaagtttatagattttgtgccttgggcaattgttaaaaatgtgttttctcac

SEQ ID NO: 882454 - DNA, 120 bp, Artificial Sequence
  ENSG00000286995_18 (sequence is synthesized)
tagtttgcctcttctacggtatggtttctcttcagttatgaagagcaaatgatttagatccaccttaatccctacaattcccgttggctcactggaaaggttggttattctcagtgagtt

SEQ ID NO: 882455 - DNA, 120 bp, Artificial Sequence
  ENSG00000286995_19 (sequence is synthesized)
ttggttattctcagtgagttgaaaaaatattttcttctgattcttctattaaaatatttattttattaagaaatagaataactttgcttttatgaaaggtgttcataatttgtataaagc

SEQ ID NO: 882456 - DNA, 120 bp, Artificial Sequence
  ENSG00000286995_20 (sequence is synthesized)
gttattttaaaaaaaactaatatgaaattcctaaatttgggccaggtgcggtgtaatcacagaattttgggaggccgggtggggcgaatcactagaggccaggagttcaagaccagcctg

SEQ ID NO: 882457 - DNA, 120 bp, Artificial Sequence
  ENSG00000286995_21 (sequence is synthesized)
aaaccccatctctactgaaaatacaaatgttagctaggcctggtggcacacgcctgtaatcccacctacttaagaggctgagacacgagaatcgcttgagcctggaaggtggacgttgca

SEQ ID NO: 882458 - DNA, 120 bp, Artificial Sequence
  ENSG00000286995_22 (sequence is synthesized)
gctgaaatcatgccactgcactccagacttggtgacagagcaagactctgtcttaaataaataaattaattaaattcctaaatttgtattgtattaaatttgtgatgtgaaatacagcct

SEQ ID NO: 882459 - DNA, 120 bp, Artificial Sequence
  ENSG00000286995_23 (sequence is synthesized)
tacagcctgagtgatagtatcatcactatatgacgcttaacataatgtgacaacatatttcaaagtagtagtctttatgaaatatattttatatttttaactaaaaaacttcagatatat

SEQ ID NO: 882460 - DNA, 120 bp, Artificial Sequence
  ENSG00000286996_0 (sequence is synthesized)
ggctagctaggttcacattggtgcaaagagcactcgacattgccagaagtgtgcatcatcatgtccccatgccatcttccagtgaggaagcctgagcagctggggagaggcccatatgga

SEQ ID NO: 882461 - DNA, 120 bp, Artificial Sequence
  ENSG00000286996_1 (sequence is synthesized)
gaagaaccaaagtccccagtccccagccccagaccagctgaattcccagctaacatccagcactaacttgccagccaagagaatgacctgtattgaaagtggattgtccagccccagttg

SEQ ID NO: 882462 - DNA, 120 bp, Artificial Sequence
  ENSG00000286996_2 (sequence is synthesized)
gagccatctcagcagttgccatgtggagcagatgcaagtcattcctgtcaaactctgtgcttatttgtgagcaaaagaaataattgtttttgttttaatcaacttagctttcagggagtt

SEQ ID NO: 882463 - DNA, 120 bp, Artificial Sequence
  ENSG00000286996_3 (sequence is synthesized)
tgttactgagcaatagataactgatacaatggaaaaattctagaggcattttcactaaagtcagaaacaagacatggataacccactatcaccactcctctatatcatagcagtgaactt

SEQ ID NO: 882464 - DNA, 120 bp, Artificial Sequence
  ENSG00000286996_4 (sequence is synthesized)
cttctctttagaattaacaataagcatttctctaaatgctcttagaatttacaataagcttttatatcgattgtatacattagctacacagtaagctattaagtggctgcaaaatagttt

SEQ ID NO: 882465 - DNA, 120 bp, Artificial Sequence
  ENSG00000286996_5 (sequence is synthesized)
atatatctattttcctagttttaatattttataaaatttcaactattataaacatggctgtcattaacatccttgtggttaactgaatcacatggcagggaacattttaagatgttaaaa

SEQ ID NO: 882466 - DNA, 120 bp, Artificial Sequence
  ENSG00000286996_6 (sequence is synthesized)
taaaaacattaaatttccctaaattgaatttttagtagcaacaaaagagactgcagatttgaatttattatcactcataataattatcattctttgacaatctgattagtgaaaaattgc

SEQ ID NO: 882467 - DNA, 120 bp, Artificial Sequence
  ENSG00000286996_7 (sequence is synthesized)
aatgcagtgttgtttatgtgcatttcagttaggtaaagagcaattgctaacctgctttgatttgaatattcaggaagaagcttcaaggtttaacttgccagaaagcttttttccatgaac

SEQ ID NO: 882468 - DNA, 120 bp, Artificial Sequence
  ENSG00000286996_8 (sequence is synthesized)
tggaaagttattctagaagttgttaaggtcccttctgccagcaatagtctatgcatgcaataatcaaataaaaaagctactgcctgacatgtttaccacaaaaacaaaaatacagtaaac

SEQ ID NO: 882469 - DNA, 120 bp, Artificial Sequence
  ENSG00000286997_0 (sequence is synthesized)
gaggcacacaggagccagatcctaaaggctttgtatgccacattaggaaagaatttggaatacagcttctgtttggaaaacattttctgtaaccagcccgacacagagacggggttttgc

SEQ ID NO: 882470 - DNA, 67 bp, Artificial Sequence
  ENSG00000286997_1 (sequence is synthesized)
cattttctgtaaccagcccgacacagagacggggttttgcatgttggccaggcttgtctcgaactcc

SEQ ID NO: 882471 - DNA, 120 bp, Artificial Sequence
  ENSG00000286997_2 (sequence is synthesized)
ctgacttcaggagctagaacagaactggttggagcccagctaaactaaaaagcacagccaagggcagcaaagccttctatgtttacagagccaaaaggatgccgaaggccctggaagttg

SEQ ID NO: 882472 - DNA, 120 bp, Artificial Sequence
  ENSG00000286997_3 (sequence is synthesized)
aaaatcaagactggctgctgtaaagcagaccatctcagacgtattctcattcctgacaaatacccacccaccagcaggactgggagacacatggcaaccagagcaagttgtcaaaactta

SEQ ID NO: 882473 - DNA, 120 bp, Artificial Sequence
  ENSG00000286997_4 (sequence is synthesized)
tcattataaaacgtccatcttacaaaagtacaacctttgctcagtgcagtgttttccttagaagacagctcttctgagagctataaaaaggctgagagaggctgatgaatgttacacttc

SEQ ID NO: 882474 - DNA, 120 bp, Artificial Sequence
  ENSG00000286997_5 (sequence is synthesized)
tctaattcacaaaatttatctgaatacaaggacatattaggaaagcattttcgtgttcaaatcctacaaaaacatatgggagcaagataatgtttgttctgacctgccaaaatcctgtgg

SEQ ID NO: 882475 - DNA, 120 bp, Artificial Sequence
  ENSG00000286997_6 (sequence is synthesized)
agatcatctcgaatccacatcacattcctgagtactaatgctcacacggggcttttgcattagcagatgtgtgaaaatgcatgtactcagagaattccctcatggcttcctatctaaaga

SEQ ID NO: 882476 - DNA, 120 bp, Artificial Sequence
  ENSG00000286997_7 (sequence is synthesized)
agctcctctacaacagctcttccagccaaatgctgaaatgacatctccaagttcagtataccttcatttaagccagtgtctggatggaaaaaattcaactgaaaggtttgttatctggct

SEQ ID NO: 882477 - DNA, 120 bp, Artificial Sequence
  ENSG00000286997_8 (sequence is synthesized)
caaaaccaagggcagcctgagtgaatgtgagacagattttcagaaggcctcctatattctacttctaatcctcaagtcatatcagagactctagtaaatttttacttattcacatcacaa

SEQ ID NO: 882478 - DNA, 120 bp, Artificial Sequence
  ENSG00000286997_9 (sequence is synthesized)
tttctagcaatcagatttcaccatttcaaatgcgtcactggaagatgcatgtgtatgattttagttgtgattaaaactgggggaagggagactgttcaatactcttcctatttcagctgt

SEQ ID NO: 882479 - DNA, 120 bp, Artificial Sequence
  ENSG00000286997_10 (sequence is synthesized)
tcagctgtggcaagactatgctgaaaatattaagaaaatcaatctatctttgcatactttctcttaaattttcttttgtaaaaatcatatgtttttggccgggcacagtggctcacgcct

SEQ ID NO: 882480 - DNA, 71 bp, Artificial Sequence
  ENSG00000286997_11 (sequence is synthesized)
ctgcttgaacccgggaggcggaggcaagactccgtctcacacacacacacatataaaatagatgtttttga

SEQ ID NO: 882481 - DNA, 120 bp, Artificial Sequence
  ENSG00000286997_12 (sequence is synthesized)
ccgtctcacacacacacacatataaaatagatgtttttgagccttataataacacaggctcaccaaagaaaactttggaaaaactttaaagaagaaaattaaaactgttcataatcctat

SEQ ID NO: 882482 - DNA, 120 bp, Artificial Sequence
  ENSG00000286997_13 (sequence is synthesized)
cacttggaggttaaacactatttacaatttgatctgtttccttcgtgtcatccatgaatgaataccataaagttgtataaatccacaactgcataatttttcataatactttttgcacag

SEQ ID NO: 882483 - DNA, 120 bp, Artificial Sequence
  ENSG00000286997_14 (sequence is synthesized)
ttttgtactcttctaagttcattaaaatgcaaagcagtggttacaatcttaaatagacaaaagcattaaagaagggggaaaagaggacacctagaaatgttaacaggtatattttattct

SEQ ID NO: 882484 - DNA, 120 bp, Artificial Sequence
  ENSG00000286997_15 (sequence is synthesized)
ctatatatcaaataatacaatgttgacatcatatagcaaaactatagaatataaggaaaaatacagaaaaatattattagcatgagattttaacttcatgatttttaactccataacagc

SEQ ID NO: 882485 - DNA, 120 bp, Artificial Sequence
  ENSG00000286997_16 (sequence is synthesized)
taacagctgatatatctatatatctacatctctagctctctctctcagaaagcatgtaacgtaaccaatgaggtaaatctaactgttgaaattgcaactctgtatgctgaaaagagaaaa

SEQ ID NO: 882486 - DNA, 120 bp, Artificial Sequence
  ENSG00000286997_17 (sequence is synthesized)
taaacccctttttttcaagtgcccatgaaacctttacaaaaatcatgaaatatttttgctaaaatataaaatttgatcaaaccaatctcccagatctaataaacaatttataggaaattt

SEQ ID NO: 882487 - DNA, 120 bp, Artificial Sequence
  ENSG00000286997_18 (sequence is synthesized)
taggaacaaaaggacaccaagagatcaacagaattcagtctgtgggaaatgctataagataaatgtcccggtttccttaataaataaactataaagtagtaaaaacaaggagatggagga

SEQ ID NO: 882488 - DNA, 120 bp, Artificial Sequence
  ENSG00000286997_19 (sequence is synthesized)
taaacttacatattaaaagagtcttatgaaatatatcaaccaattgcaatgtataagtcttatgtgaaacatgattttaaaaatgagatagagaaatttaacatgaactggagatttgat

SEQ ID NO: 882489 - DNA, 120 bp, Artificial Sequence
  ENSG00000286997_20 (sequence is synthesized)
atcacattattattgttaatcttctcaggcatgataatactttgttttttaaaaaaaagtccttatttttagagatatgtactaaaatatttacaaatgaagtatcatgacatctggatt

SEQ ID NO: 882490 - DNA, 120 bp, Artificial Sequence
  ENSG00000286997_21 (sequence is synthesized)
tgcttcaaaataatatggtagagtagcggggtagcatataaaactagtttggtgatgggttgctaagtgtcaaaactacctgattttcagggatacatcaggctattcactctatatctg

SEQ ID NO: 882491 - DNA, 120 bp, Artificial Sequence
  ENSG00000286997_22 (sequence is synthesized)
catatatttgaaatgtttcataataaggagttaaagggaaaagcgagcatgaatgtgtatatgcacacacacattaaaaactgctcatagcaaatatagttattcttttgaggaggtgtt

SEQ ID NO: 882492 - DNA, 120 bp, Artificial Sequence
  ENSG00000286997_23 (sequence is synthesized)
ttaagggaaaggaaagatatgggtttgtagctgatatcgcatttacaacagaacaccatttattcatttttatttaaatttctcctttgtgtagacagatgtcacataatgttagcaatt

SEQ ID NO: 882493 - DNA, 120 bp, Artificial Sequence
  ENSG00000286997_24 (sequence is synthesized)
gttgaatccagtgaaaatgtttatataatcactgtactatatttaaaattttctgtaagtttgaaatttttcacaataaaatgttgtgaaattcctacttattgtcaagttaaaaagtta

SEQ ID NO: 882494 - DNA, 120 bp, Artificial Sequence
  ENSG00000286997_25 (sequence is synthesized)
tcttagcaattcttgcctgtatactttcagatacactaaagaataattttatcaatattgtaaatccactggcattttgactgggattgcataaaagttctgaattaatttcaaaatacc

SEQ ID NO: 882495 - DNA, 120 bp, Artificial Sequence
  ENSG00000286997_26 (sequence is synthesized)
ttcaattgttaaaataatcagtctccttattcagaacatgatatattgttaattcatgtaaataattttttaatcactctgtagaatttcatagttttctttacataggttctatatctt

SEQ ID NO: 882496 - DNA, 120 bp, Artificial Sequence
  ENSG00000286997_27 (sequence is synthesized)
tcttcttagggttattcctaagtattttatattttctggtactatcaggagtgaaatattctaaagaattcaaccgtctaattagctttcacttgtttatagaaatagtatgaatgtttt

SEQ ID NO: 882497 - DNA, 120 bp, Artificial Sequence
  ENSG00000286997_28 (sequence is synthesized)
acatatttaccaagtgtctgatctgttgataagttcaaagataatgctcttgaattttctaagtgaaaaaattatattgtctgtaaatggtgattttgtagttacagctcttcttttttt

SEQ ID NO: 882498 - DNA, 120 bp, Artificial Sequence
  ENSG00000286997_29 (sequence is synthesized)
atatatatatattactgccttgtctggaatatctacatctagagtaattgtataatggttttagtatgattgcctctttcatgattttaggaggaatgccaagagtatttcatattaaat

SEQ ID NO: 882499 - DNA, 120 bp, Artificial Sequence
  ENSG00000286997_30 (sequence is synthesized)
atgatgtcggtttttggtttaagatagctattatttattatttaaagaagacatctttctatttctagttatctcagaataaatctcataaataaatgctgaattttatcaaatgccctt

SEQ ID NO: 882500 - DNA, 120 bp, Artificial Sequence
  ENSG00000286997_31 (sequence is synthesized)
tcagcatctaatgacactatcatgttttcttcgtggaccaacaaatactatacattacaataatatattttataatatgggataaatcacatttggtcatggtaggtgattcttttactg

SEQ ID NO: 882501 - DNA, 120 bp, Artificial Sequence
  ENSG00000286997_32 (sequence is synthesized)
taacattcaatttggtttgttggtattttatttgctatttctgaatctaaattcatatgtaagattgctacatagctctcttttatgtatgttatgtttgttaggttttagtcattcatt

SEQ ID NO: 882502 - DNA, 120 bp, Artificial Sequence
  ENSG00000286997_33 (sequence is synthesized)
tttaaaagcctctctgagaggggattagaaaaaccctgtcctcaataggtgttaaaaagttcctcaatgctaatgctatttattatgaagtaggaaaaggcaagaggccacagcctgcaa

SEQ ID NO: 882503 - DNA, 120 bp, Artificial Sequence
  ENSG00000286990_0 (sequence is synthesized)
agaaatggggcttcggggtggccttttggggatgcaggcacagaggggcaagggcaaccaggttttacatatgaggctccagatctcaaaagggtgattttccctccaattaacgaatat

SEQ ID NO: 882504 - DNA, 120 bp, Artificial Sequence
  ENSG00000286990_1 (sequence is synthesized)
tactaagtgctctaagaatgacacaagagcagaaacagaaaagaaacctaattctggcattgccgtcgtcctcacgggcgtggcgagaacagggcctaaagtccacaagagactccctgc

SEQ ID NO: 882505 - DNA, 120 bp, Artificial Sequence
  ENSG00000286990_2 (sequence is synthesized)
agtggggaacgtccccttcaagcagcagcccccacgtggtgggcagaacccgagaagtcttgaatttacgcagcataatggtctgggaaaggggaagtgatgagctgatgagcccacctt

SEQ ID NO: 882506 - DNA, 120 bp, Artificial Sequence
  ENSG00000286990_3 (sequence is synthesized)
caaagggttatgagtgtcagtggtggggcactgtgtgattcacaaggcatcctgatttcctttttctatttatttcatttccccctggaacttgctggaattctaaatccaaaaagctag

SEQ ID NO: 882507 - DNA, 120 bp, Artificial Sequence
  ENSG00000286990_4 (sequence is synthesized)
gctagtagctgcagtccgggaacccagaggagaaagcagctcactacctcttctcactcgagcaagggcgggtaaagaaagcaggagatgcgggctgggcgcggtggctcaggcctgtaa

SEQ ID NO: 882508 - DNA, 120 bp, Artificial Sequence
  ENSG00000286990_5 (sequence is synthesized)
caacaacaacaaaaaacccaaaaaacaaagaaagcaggagatgcgatggtgtgttaccggcatcttgaactgggagggaagtgtggatacaatcctaaagaaacgcgttctgacggcccc

SEQ ID NO: 882509 - DNA, 120 bp, Artificial Sequence
  ENSG00000286991_0 (sequence is synthesized)
aaacatcattggcctgtaaactgaacaccaagtctcatacaataattacattcagtcatctttgatattttgctaaacttcagttatatagaaaccatattattacacagaaaaattgta

SEQ ID NO: 882510 - DNA, 120 bp, Artificial Sequence
  ENSG00000286991_1 (sequence is synthesized)
ttttgttgttttcagatgtttatgtacacattggagctcaggacatattttattcaacagtttgttagtttgcattataacatttaaattttagacagttagtgtgtggactgccctgta

SEQ ID NO: 882511 - DNA, 120 bp, Artificial Sequence
  ENSG00000286991_2 (sequence is synthesized)
ttctcttgcctggagtctcaccaatgtcaaagatggacctgcccagtagctcttctttcaccttgaaggtaacacagggcaccggttgaaagcaaagccacaagaatcactaagttaagt

SEQ ID NO: 882512 - DNA, 120 bp, Artificial Sequence
  ENSG00000286991_3 (sequence is synthesized)
ccagttctgtcctgcacagctgtgtgtcctggggcaaggcactctctgctcagagcctcactttccccacctgtaaaatggagctgatagaagatactttgtcgggatacagggacattg

SEQ ID NO: 882513 - DNA, 120 bp, Artificial Sequence
  ENSG00000286991_4 (sequence is synthesized)
gtggacgctaatggagtcctgcttctctttagaggttgaagagccatctctgcccagaacatttccagcttgggtttttcaacaacccacggagctctcctgccttgaacttgaatcatg

SEQ ID NO: 882514 - DNA, 120 bp, Artificial Sequence
  ENSG00000286991_5 (sequence is synthesized)
ctggagtttcgagagagcagttacatgtccatttccttcaattatcagtgaaagataaagtgccctggctctcggccccagatgccacctggcctggcccatctagggtttccattatga

SEQ ID NO: 882515 - DNA, 120 bp, Artificial Sequence
  ENSG00000286991_6 (sequence is synthesized)
caggtttattctctgtccctggccctctaactaataggacttcagccactctcttgagcataaagctttctctccgggcaaagccaaccaatttgaatggcactcacggctcatgtctgt

SEQ ID NO: 882516 - DNA, 120 bp, Artificial Sequence
  ENSG00000286991_7 (sequence is synthesized)
atgtcatgagctcctgagtactccaaggggccagagcaataaatctattaggtctcctttgtcccatcttgtcgtgaacttctaagaaaaaggcactaagaggatcagtacccagaaaac

SEQ ID NO: 882517 - DNA, 120 bp, Artificial Sequence
  ENSG00000286991_8 (sequence is synthesized)
cttcataattgtggcttctacacggcgaatgaggacaattaccaaggcaaccggccaatcattctggttaagggcagagagagtttagtcaagaagaggctcttgcgaactgtattgcgc

SEQ ID NO: 882518 - DNA, 120 bp, Artificial Sequence
  ENSG00000286991_9 (sequence is synthesized)
tgtaatcagagtaaccaacattttaaaaggcccttgtgcaaaaacaggagggatggcagggaagggaaaaagaagaggggggtaaattaatttcctctcatttcctgcctggtccattga

SEQ ID NO: 882519 - DNA, 120 bp, Artificial Sequence
  ENSG00000286991_10 (sequence is synthesized)
ttgcggtccaaaggcaagatgatctgctgtactcttgcacctggggccacgggagctggcagaggagccgacaatgttgtctatcttatgcctgcatctatttatttatcttcccctcta

SEQ ID NO: 882520 - DNA, 120 bp, Artificial Sequence
  ENSG00000286991_11 (sequence is synthesized)
ggctcagcatctgtagcagagatctcatgaagagtgaaaaagtaaacatctttaaggacagtatagaacctcttaaattatcttatagtcccttgagaaataacaacacatctgtcttta

SEQ ID NO: 882521 - DNA, 120 bp, Artificial Sequence
  ENSG00000286992_0 (sequence is synthesized)
agagggacagcaaccacagagcactgcagacgccaagacatgagatcctgtgtttcctttaaaggcccggttctaaagtcatctctcgtgtgatgcctcccctgagtcgccagggacggc

SEQ ID NO: 882522 - DNA, 120 bp, Artificial Sequence
  ENSG00000286992_1 (sequence is synthesized)
cgctctgttcccggtcactttgtgcatgtatagcatcatcacacagtgctgtagcatatgcatctgtgtgagtacacatctgtcttctccgagattgcgagtgccttgggaagaagcacc

SEQ ID NO: 882523 - DNA, 120 bp, Artificial Sequence
  ENSG00000286992_2 (sequence is synthesized)
gagtgttcttcatctcagtctcccctgtcccttgtacggtgtctggctgaagctagaaagtcagaaagtgctggtcaaatgaataattcattgagaatggatgaatgggcgtccaggacc

SEQ ID NO: 882524 - DNA, 120 bp, Artificial Sequence
  ENSG00000286992_3 (sequence is synthesized)
cttcctcactttgaaatctctgtggcagtgggttacataggtttaagaacattgatcagagtcttggcctagttaaattgatctgatggtctcaccatccaaacggcacttaccttccaa

SEQ ID NO: 882525 - DNA, 120 bp, Artificial Sequence
  ENSG00000286992_4 (sequence is synthesized)
ctttctctgagaagctgtctccattccatcactatggaggatcgtgcatgatgaaaaagagatactaacaggaaaacagcatcaatcagttgtggagcctgaaccgaagacctgagtgag

SEQ ID NO: 882526 - DNA, 120 bp, Artificial Sequence
  ENSG00000286992_5 (sequence is synthesized)
atggataaagtgaggaaggagataaggaccccccacctgacctgtcaggccaaccctggaggtcagtggagtgaaagataagacggccagattactcacatctgagggcaaactcattta

SEQ ID NO: 882527 - DNA, 120 bp, Artificial Sequence
  ENSG00000286992_6 (sequence is synthesized)
aaactacagtgggcaaagtttaggttagagcaattaattcccacaggagggtcccagaactggtagcatggaagtcagatcataggatttccttttctgcagttcttagagaggctacca

SEQ ID NO: 882528 - DNA, 120 bp, Artificial Sequence
  ENSG00000286992_7 (sequence is synthesized)
cttctctcctcctcccccccaacccccacacccttcatccatgtcaagtatgtcaagtggctgtggggctatccttcctggaggcaaagggagagaggctgggacctccagcagccaggg

SEQ ID NO: 882529 - DNA, 120 bp, Artificial Sequence
  ENSG00000286992_8 (sequence is synthesized)
cttctggggctctcccagcatcctgctgccaagatactgggcagaccaccagggactgccttctccaagtccccagtccaggcacagcggtgtcagtcattaaagctcatttcttcctgt

SEQ ID NO: 882530 - DNA, 120 bp, Artificial Sequence
  ENSG00000286993_0 (sequence is synthesized)
ggcagaagcacagttgatggatgaggaatggatgcatgtaccctcttgcctaccactccacagtggcattcaggaagctggagcacagtgctggtatgtgacgctgtttttaaacaagga

SEQ ID NO: 882531 - DNA, 120 bp, Artificial Sequence
  ENSG00000286993_1 (sequence is synthesized)
agtctggaattgagtacgtaagcagagctgaatccacggctgtgaagaggggagctggccaccctgtgcagtctggattctccaggcagatggtggacatgagaaagtggcctgcaccct

SEQ ID NO: 882532 - DNA, 120 bp, Artificial Sequence
  ENSG00000286993_2 (sequence is synthesized)
gagttgccctttggtggcctcaagggagtccaagttcccaacctctgtccaacaagctgacactcacagccttctagagatagtgggtgatgtcacaatttgctcccacaggggactgtg

SEQ ID NO: 882533 - DNA, 120 bp, Artificial Sequence
  ENSG00000286993_3 (sequence is synthesized)
atggggtcagggggagaagaagaagaaataacatctatcaaatcagccctgcctcaaagttcagctcacccaccaggaataaaacattttctactgaaaatgaagataggtaagaggaat

SEQ ID NO: 882534 - DNA, 120 bp, Artificial Sequence
  ENSG00000286993_4 (sequence is synthesized)
tatgaattctatatcatatgtctcactccaaggaacaatttatcagtgctatagggctatcagctgctgacatgataaggaataacaccaaatgaataatgtttcctccaacaccaactc

SEQ ID NO: 882535 - DNA, 120 bp, Artificial Sequence
  ENSG00000286993_5 (sequence is synthesized)
ctttaattacaagcctcttctttccagaagagagacagaagatgcagaaaccccaatttcatgcacttgtgcctgaataatgtctccgtgctgctttttccagatggcgaccttctcact

SEQ ID NO: 882536 - DNA, 120 bp, Artificial Sequence
  ENSG00000286993_6 (sequence is synthesized)
acaaaatgttccttgggatacattagaaaatatcaattacattgctcactgaggtgtaatcagctgtaataatcaaaattaatttttaaaaataattaaacagaccccagggcaaatagt

SEQ ID NO: 882537 - DNA, 120 bp, Artificial Sequence
  ENSG00000286993_7 (sequence is synthesized)
tgatgctcttatcctatgacatcacagtgtacatatgtacctgagaagttgtgccttctgttagcgacaaaggcatctcacagagttgagtgatggatgcagtgtctgaaagctggcaag

SEQ ID NO: 882538 - DNA, 120 bp, Artificial Sequence
  ENSG00000286993_8 (sequence is synthesized)
tttcatctcagcaaaaggagggggagcatctatccccttgctctaagcacttccatctgcattctttaagggcctaccgtgtagcaggcactgtgcccatccaagacttagttaccagta

SEQ ID NO: 882539 - DNA, 120 bp, Artificial Sequence
  ENSG00000286993_9 (sequence is synthesized)
caagatgttgctaagcaaagatgcagttaattttaaaaattaaaacatagtccttgtttccaaaataatgtgtcttttaaaatctacaagataatttaaagtgtagaaagaaaaaatcaa

SEQ ID NO: 882540 - DNA, 120 bp, Artificial Sequence
  ENSG00000286993_10 (sequence is synthesized)
attgaagggaaagtggggtcagtggagaagaatgaagccagggagagggtatgtatgtatgcatttgtatgcgtaggtggctcaaaaatttatcccactagttgtgtgcaattacaaaag

SEQ ID NO: 882541 - DNA, 120 bp, Artificial Sequence
  ENSG00000286993_11 (sequence is synthesized)
cttaaccatgcttatctctctcagtttctgagtgtccagatcaaagacagaaacataatctgttgcaaaatttctgctcttcttgagttgctgaaagtagttcttcctggtgctaaaagg

SEQ ID NO: 882542 - DNA, 120 bp, Artificial Sequence
  ENSG00000244055_0 (sequence is synthesized)
ggttttctgcagctacttttttcagctttatacttcgcagtattttccaaattttctctaacaagcagtattttccaaattttttacaataagcacacacacacacacacgtttgtttgc

SEQ ID NO: 882543 - DNA, 120 bp, Artificial Sequence
  ENSG00000244055_1 (sequence is synthesized)
ataagtgcccaactggtggtgaacaaccgctggcttttagtctatacatatctagaatattttataaatagtagttcttaaacccttgaaagggagtgaatgaccagctgagaaaataaa

SEQ ID NO: 882544 - DNA, 120 bp, Artificial Sequence
  ENSG00000244055_2 (sequence is synthesized)
gtcagtgatttcattattttcctatattcacatcatgattctaggaaagaacttgggagtgacttccttcagcttcagccactcctgggccaggcgcatgcttagctctgtggtaaaggt

SEQ ID NO: 882545 - DNA, 120 bp, Artificial Sequence
  ENSG00000244055_3 (sequence is synthesized)
caccagcttcttctgcagggtgcctgtatcatctgaattggaggtttggcgagggtaagagactgatgtaggttcaagtttttctttcctgtcctccacttgaaatctgtcttcccttcc

SEQ ID NO: 882546 - DNA, 120 bp, Artificial Sequence
  ENSG00000244055_4 (sequence is synthesized)
agactgcctgcgctgctgacttaaggccccaacaccaaacacagaagcaacagccttacacagagtgttcagcaagctccaacaattgtgtaagaactgtataatgatgactgcacaaga

SEQ ID NO: 882547 - DNA, 120 bp, Artificial Sequence
  ENSG00000244055_5 (sequence is synthesized)
taccaaatcagaagaggttccatttccaagttctgattcataagagcttccaaagtagagccggtacatattgaattttgattcatctggaaggatctcggacatctctaaagaaacaag

SEQ ID NO: 882548 - DNA, 120 bp, Artificial Sequence
  ENSG00000244055_6 (sequence is synthesized)
ggactgatctaagccacattctccatctccagctgaatcgtcagagccactgctatggttaagaaagaccattgaagacagacttaggtcactatcagagctggaacttccatcctaaaa

SEQ ID NO: 882549 - DNA, 120 bp, Artificial Sequence
  ENSG00000244055_7 (sequence is synthesized)
tacacaaaaggacaaccagtttaaagatgtaaacaattttagtctcagaaataaataataacatagatagcattctattagagcaatacaagaaacttagaagcatttttcaaagagctc

SEQ ID NO: 882550 - DNA, 120 bp, Artificial Sequence
  ENSG00000244055_8 (sequence is synthesized)
attaattctctaacggttttgaggcacatggtaaaaatttaactattaaaattataaagacaagatagaatgtgtagataatttaccaaccatcccccaagaaagtctgtaatgaagcta

SEQ ID NO: 882551 - DNA, 120 bp, Artificial Sequence
  ENSG00000244055_9 (sequence is synthesized)
agactcagacctctgggctttatttttatgtctctgactttccattcatacttttctactccaaaatgatgaatcaaccatgttatagagtgctttctcattatagagagctctacaaat

SEQ ID NO: 882552 - DNA, 120 bp, Artificial Sequence
  ENSG00000244055_10 (sequence is synthesized)
acacacctttctggtagtaaagggagagggaagaacttcaatggcttgccaaaatagcaaaaacctagggagtttctgatttagaaactgtaggttctgtagacattccaaacaaatgtg

SEQ ID NO: 882553 - DNA, 120 bp, Artificial Sequence
  ENSG00000244055_11 (sequence is synthesized)
gtaaagaagagtaatagaataatccttcctagaaaatatatggtaaagtctataatgtaacagttcaaatatctactgtaaatattaaaatcataatactgtctttagagaaaaggctga

SEQ ID NO: 882554 - DNA, 120 bp, Artificial Sequence
  ENSG00000244055_12 (sequence is synthesized)
tgctagggctgggatacagaaagtacaagataaaccaagaatatttttcttttttgggggcagggtctcattctgtcatccatgctggagtgcagtggcacaagcatggctcactgcatc

SEQ ID NO: 882555 - DNA, 89 bp, Artificial Sequence
  ENSG00000244055_13 (sequence is synthesized)
catgctggagtgcagtggcacaagcatggctcactgcatcctggatttactcaagcgatcctcctgccacagcctctcccaagaagcta

SEQ ID NO: 882556 - DNA, 120 bp, Artificial Sequence
  ENSG00000244055_14 (sequence is synthesized)
aatttttcacagagacaagatcccactctgttgtccatagtgggtacagtttgtgcaaccatgatttggtctcaaactaggcccaaatgatcctcctgccttggcctgccaaagtgctgg

SEQ ID NO: 882557 - DNA, 120 bp, Artificial Sequence
  ENSG00000244055_15 (sequence is synthesized)
gaataacttactgtatctggaagtgaggaagtgattcaagaatgatgaggacatgtcataaagatacaggagccatacaaaaggggctcctattggccagattggaacaatgtgagcttc

SEQ ID NO: 882558 - DNA, 120 bp, Artificial Sequence
  ENSG00000244055_16 (sequence is synthesized)
aaaacaacaactttaactgattattttttaaaagttaaagtacaaacaaacaaaaaactctaattatttttgtttgtagtatttaattcatggtatcccaatttaaataatatccttgca

SEQ ID NO: 882559 - DNA, 120 bp, Artificial Sequence
  ENSG00000244055_17 (sequence is synthesized)
aacaccaacatgtttttgccaatattaaggtaatgttaaagaaacagacatcaaacttcataattataaattctctgcaaaacccatattccaactatggaacattcaactaaaggtaaa

SEQ ID NO: 882560 - DNA, 120 bp, Artificial Sequence
  ENSG00000244055_18 (sequence is synthesized)
tttatgtttctatacagttttaccaaagttgtttaaaaaatagcattttttaaggtggaaattttgacattgtacttcttttatcactcataaaatgtcataacaacttcctcatataac

SEQ ID NO: 882561 - DNA, 120 bp, Artificial Sequence
  ENSG00000244055_19 (sequence is synthesized)
ttgcctggagtccactcgagagcagcattccatgtaaggcctccaattgggcattgtaaagtaaagctttcagatcagctccagtaaaggagtcagttactgatgctacatgctgaaggt

SEQ ID NO: 882562 - DNA, 120 bp, Artificial Sequence
  ENSG00000244055_20 (sequence is synthesized)
cagaggtagagagtcactgaggacatttaaaatttcaagacgtgacacctgaaaggagaaaaatttatttaacaaataaaaaataaaattaaaaatattatcttaaattgtgtatcttat

SEQ ID NO: 882563 - DNA, 120 bp, Artificial Sequence
  ENSG00000244055_21 (sequence is synthesized)
gattttcttcataaattaaccttatatatctaaaaagctttataagtaagttgagaaatgtaccaacagcctactatttatcttccttggaattttttccccaacagaaataatatatat

SEQ ID NO: 882564 - DNA, 69 bp, Artificial Sequence
  ENSG00000244055_22 (sequence is synthesized)
tcttccttggaattttttccccaacagaaataatatatataggaaaatgaatgaaaatcaaacactctt

SEQ ID NO: 882565 - DNA, 90 bp, Artificial Sequence
  ENSG00000244055_23 (sequence is synthesized)
cacttgagccctggagttcaagaatatacaaaaattaataataaaattatctgggcatggtagcgtgtgcctgtggtcccagctactcgg

SEQ ID NO: 882566 - DNA, 90 bp, Artificial Sequence
  ENSG00000244055_24 (sequence is synthesized)
ttgtctgaaaaacaaaaacccaaaaacctacaaaatattcagtgtaaataatttcttattcacacagtgcttattttctagatttaggca

SEQ ID NO: 882567 - DNA, 120 bp, Artificial Sequence
  ENSG00000244055_25 (sequence is synthesized)
atttcttattcacacagtgcttattttctagatttaggcaagtgtgccaagaaggtatttcaaaaggaaaatctaaataatttaaataatagctacatgtaacatatatacagatacttt

SEQ ID NO: 882568 - DNA, 120 bp, Artificial Sequence
  ENSG00000244055_26 (sequence is synthesized)
atacctttgactattcatttgtctatctgttctttcattcatttatttgtttgcttctaaattggagaataagagttggaacaacacaggacaaggaagagttgaaaaattatctctatg

SEQ ID NO: 882569 - DNA, 120 bp, Artificial Sequence
  ENSG00000244055_27 (sequence is synthesized)
aaacctgcttacatgcttacgattcacatgcttgattctgtatcagagttttttttttgacaggataatggaagtatgtaatctttgaacagaagataatgtgaaaatataatacattag

SEQ ID NO: 882570 - DNA, 120 bp, Artificial Sequence
  ENSG00000244055_28 (sequence is synthesized)
gtttcttgcatttttttttccccaatcagccaacacagaaggattacaaagttttcagacttgcactgggccaaaaaaaggctttgcatctaattcagaatctttttatgctttgagcaa

SEQ ID NO: 882571 - DNA, 120 bp, Artificial Sequence
  ENSG00000244055_29 (sequence is synthesized)
acagtggctaaagcttttccctaagaaagctggtcttctaaggacaattgccattacctggcagaagtaaagctcacaaggaaagagtgtagcatttgttgggttttggactctaaatat

SEQ ID NO: 882572 - DNA, 120 bp, Artificial Sequence
  ENSG00000244055_30 (sequence is synthesized)
gaaattgtcacctgatcaggaggaggacagtatacacatttatctagtcgaccaggcctaagcagggcagggtcaatcaagtcagggcgactagtagcagccaatacataaacacctaga

SEQ ID NO: 882573 - DNA, 120 bp, Artificial Sequence
  ENSG00000244055_31 (sequence is synthesized)
ggaaaaaagaacatttttttaccaaaatctgatgacatgatgacattttgttataacattctatttctgtatttataattattaccctgtaagccttctactccatccaactgagtcagc

SEQ ID NO: 882574 - DNA, 120 bp, Artificial Sequence
  ENSG00000244055_32 (sequence is synthesized)
aactggttaactactcggtctgtaactcctgtattatcatgaccccgccgaggagcaatggattcaaattcatcaaagaaaagaatgcagggctttgcagcctgtgctctgggaaaaaca

SEQ ID NO: 882575 - DNA, 120 bp, Artificial Sequence
  ENSG00000244055_33 (sequence is synthesized)
ctgggaaaaacaaacaacatttcatatttgaatcaggcttcatagttggcaaagtgatttcatatacatatatgaatgtatttattttatgtatttatatatatttatatacttctttta

SEQ ID NO: 882576 - DNA, 120 bp, Artificial Sequence
  ENSG00000244055_34 (sequence is synthesized)
aacccttaaagaaggcaagttgtatgtaattacatataaatacatataaatgtatttatatatatttatgtatttattttaatctttacaacaaacccttaaagaaggcaaggcatatga

SEQ ID NO: 882577 - DNA, 120 bp, Artificial Sequence
  ENSG00000244055_35 (sequence is synthesized)
aattacccttgtattcagtaaactgttgaggtcaaggtgtttattaagacccatgccttctggatagactaacagggatcaaaacaaaaactgactcttagtcaataagtcaaacacttt

SEQ ID NO: 882578 - DNA, 120 bp, Artificial Sequence
  ENSG00000244055_36 (sequence is synthesized)
tgattcctattacaagtaaccatttttatattaatatatacttattggccacccttccttcttttgtgaaatgcctattcatttattttgcccattcaaaatttggaaagctcattatgt

SEQ ID NO: 882579 - DNA, 120 bp, Artificial Sequence
  ENSG00000244055_37 (sequence is synthesized)
atttggaaagctcattatgttggtactgttttgtaagggctctctataaaatatattttatttcttttacttttttaataatttgaactttgactttgttttattaatttattaacaaat

SEQ ID NO: 882580 - DNA, 120 bp, Artificial Sequence
  ENSG00000244055_38 (sequence is synthesized)
tattaattccatatctggcaacaggtggactagatgtctggcgaataacacctaatataaaacacctgtcacggtgattgaaaaaaatcaacagctatctcattaaatgcatggcaagta

SEQ ID NO: 882581 - DNA, 120 bp, Artificial Sequence
  ENSG00000244055_39 (sequence is synthesized)
aaatatatcttctggggccaaaaatagaccagaattatctgctacttgaatgtttggcaaaactctcctagaaaactgagtctgatgtttgatttgtgtaaagacttctttaacttttct

SEQ ID NO: 882582 - DNA, 120 bp, Artificial Sequence
  ENSG00000244055_40 (sequence is synthesized)
aactcaatttttactaagttacaggactactcagattttgtttcttttttgctcaattttggtcaattttgtttttgtctatgtcacctaagttttcaaatgtattggcatgaatatttt

SEQ ID NO: 882583 - DNA, 120 bp, Artificial Sequence
  ENSG00000244055_41 (sequence is synthesized)
caacaattgtgtaagcagcccaagctgacagagatagaaacaacacaaggacccatcagcagacgaatggatgatcaaaacgtggtgaggtcgtgcagtgggatattattcagccgtaga

SEQ ID NO: 882584 - DNA, 120 bp, Artificial Sequence
  ENSG00000244055_42 (sequence is synthesized)
aggaatgaaattctgatacatgctataatgatgaaccttgaaaacatgttaatggaaataagccaaacttaaaaggacaaatattgtataattccacttatatgagttagttacctagaa

SEQ ID NO: 882585 - DNA, 120 bp, Artificial Sequence
  ENSG00000244055_43 (sequence is synthesized)
taggcaaattatgtcatagatacagaacattagaggttaccagggttgtgggaagaggggtattgtgggtacaaattttcggtttggagtgattttgaaaaaattctggaaatgggtagt

SEQ ID NO: 882586 - DNA, 120 bp, Artificial Sequence
  ENSG00000244055_44 (sequence is synthesized)
gacagtagtcaacatgatgaatgtacttaatgacactaaattgtacacttaaaaatggttaatactgggctggcgcagtggctcatggctgtaaatcccagaactttgggaggccaagac

SEQ ID NO: 882587 - DNA, 120 bp, Artificial Sequence
  ENSG00000245904_0 (sequence is synthesized)
caggctctgcgccagtgcatccttctccaagagtgcgctgcctgggcccgcttgccctggagttaacttcagcagtcaacggagagaagagtggaaaccttactggatgcggacaggaga

SEQ ID NO: 882588 - DNA, 120 bp, Artificial Sequence
  ENSG00000245904_1 (sequence is synthesized)
gccagttactgaaagcagatataacgcggatcctgtaaagagtgaattgtatatttccacatatgctggacaataggcagaaagtggagacccaaagaacttgtgatatgacggacataa

SEQ ID NO: 882589 - DNA, 120 bp, Artificial Sequence
  ENSG00000245904_2 (sequence is synthesized)
gaagcttcagttggcctcaaatgtcaaataatatccttcctgaataatcaagaatgtcaagcttttactttctacatcttggactgtactttgtaccaatctcaagtcccatatgatgca

SEQ ID NO: 882590 - DNA, 120 bp, Artificial Sequence
  ENSG00000245904_3 (sequence is synthesized)
ctttctaggtgaaaagtttttttttacagaccttaaatttttctttatttactttttagagtgatggtatatattagtttcaccacgttagtaattcatgctatataaatgataagccaa

SEQ ID NO: 882591 - DNA, 120 bp, Artificial Sequence
  ENSG00000245904_4 (sequence is synthesized)
agtaagaaaaatagtgaaatgaattgcaaatctaactacattttttagtttccataatcaccacagaaattgctgttagtgcacttgatccaagaagagtcattcacaatctctcccttg

SEQ ID NO: 882592 - DNA, 120 bp, Artificial Sequence
  ENSG00000245904_5 (sequence is synthesized)
catgtttcccacctggatacagattcgtttagaggtcagcctctgacacaagatcagtcaatccaatgcctgccattatagttttggaaaggtgcctaaaaagacattaattttcctcca

SEQ ID NO: 882593 - DNA, 120 bp, Artificial Sequence
  ENSG00000245904_6 (sequence is synthesized)
aatgacagaaactaaaggcaggtgaatgcggcagctattggtgtacttggatgctgaggatcaggcagagtggcttggtaatgagagagatgaatgagacagacacccagagagaaagga

SEQ ID NO: 882594 - DNA, 120 bp, Artificial Sequence
  ENSG00000245904_7 (sequence is synthesized)
aattaaggagcagtaaaagcattttacacccctccctccactctgccaaccctcagggctcatacacttttgctaactatatcacttatgtgctgttgtataccaaattacctcaaaact

SEQ ID NO: 882595 - DNA, 120 bp, Artificial Sequence
  ENSG00000245904_8 (sequence is synthesized)
aagtggcttaacacaacagcatgtattatcccacaatttctgtgggctgagaatctagacagggagtagttggatcccctgtgtcagagtcttccacgagtttgcagtcaaagtcctgac

SEQ ID NO: 882596 - DNA, 120 bp, Artificial Sequence
  ENSG00000245904_9 (sequence is synthesized)
tgaggttgtggtttcatctgaaatttcaaatggggaaggatcctttcccaagttcactcatatggctgcagtaggattcagtttcctgcagactgttacactaatagcctcagtttctca

SEQ ID NO: 882597 - DNA, 120 bp, Artificial Sequence
  ENSG00000245904_10 (sequence is synthesized)
ccacctgttggccagaggctgcactcagtttcttgtcacataagcttctcagctcacagcatggcatctgcctttgtcagagtgaaaagagaaaaagccaccaagaaggaagtcatggtc

SEQ ID NO: 882598 - DNA, 120 bp, Artificial Sequence
  ENSG00000245904_11 (sequence is synthesized)
taatcttggaggagaatcttatgacttttgctgctctcttcttgttagaagccactacatccagcctctactcatgggaaggaaatgacacaaggtgtgggtatcaggaggcagaaatct

SEQ ID NO: 882599 - DNA, 120 bp, Artificial Sequence
  ENSG00000245904_12 (sequence is synthesized)
ttgagagctgttttaaaagcaacctaacacactgacatatttcagtccttaggcactgtaaaatagcccaaatatccctgcagtacatctgaatgcttgcctaaattctccaaaattctt

SEQ ID NO: 882600 - DNA, 120 bp, Artificial Sequence
  ENSG00000245904_13 (sequence is synthesized)
attatttacaatcaaaacttcttacatatatcgaatagtttaattaaatccaaatttagaatcaagaggcaattgtattatgagaaaatatattactacatttctaagttcctttgtcac

SEQ ID NO: 882601 - DNA, 120 bp, Artificial Sequence
  ENSG00000245904_14 (sequence is synthesized)
tcacacatacacaaacacaactaacagagtatttaatagtgataaaggctgagatatgagaaaacaaaatactaggaattcttactactaggaaaataaatcctatgaagatgaaaattg

SEQ ID NO: 882602 - DNA, 120 bp, Artificial Sequence
  ENSG00000245904_15 (sequence is synthesized)
ctgaaattttcaagtagatagtgaaaatacatggtggttgtggcatttcttcctctcctccccttcttcctcctcctcctcctcctcatcctcctcctccttcttcttttaaaaccctaa

SEQ ID NO: 882603 - DNA, 120 bp, Artificial Sequence
  ENSG00000245904_16 (sequence is synthesized)
atactttcatggaggtcatttatttttccatgcttttcattttctaaacatcttagttttctctcatcatcttatacagtggaaaaagtaagcaaaaaaaataggataacactatgataa

SEQ ID NO: 882604 - DNA, 120 bp, Artificial Sequence
  ENSG00000245904_17 (sequence is synthesized)
atttgaatgtttctctgcttcagattacaaggtacgtttttgtggtaattataaaaattgaaaaaaaaatggtgaaaaccccttatcttgggttactgtgtcaagtaggaagttgagcag

SEQ ID NO: 882605 - DNA, 120 bp, Artificial Sequence
  ENSG00000245904_18 (sequence is synthesized)
catttcaaaaaacacctttagcaaaagtcccctccctggtttttcctgcaaacattaacctcaagcgtttagttccttccatattatttatacatttaacctcaaaattttatttaagaa

SEQ ID NO: 882606 - DNA, 120 bp, Artificial Sequence
  ENSG00000245904_19 (sequence is synthesized)
gtcacaagaagatctaagaaaaggcccaaatgtcagccatctgtggaccagacctgaaaatcttcctggaggagatgaaaacctctcatttcatagaactgaaaaagggccattgtatag

SEQ ID NO: 882607 - DNA, 120 bp, Artificial Sequence
  ENSG00000245904_20 (sequence is synthesized)
accagcagctgcggtgcagctcctccaggtctcaccactgaatcaggaatcctataaatatgcacctcaaccacataaacagtttctcttcagtttctggattggagtttatctttgctg

SEQ ID NO: 882608 - DNA, 120 bp, Artificial Sequence
  ENSG00000245904_21 (sequence is synthesized)
tgcagaatcaatttagctttggacagaaaaatttgcaagaaatcaaaaaagcgggtttaaaaagcaaacaaagagacaggatgggcacgatttcctaaacataccagaacagagccatgt

SEQ ID NO: 882609 - DNA, 120 bp, Artificial Sequence
  ENSG00000245904_22 (sequence is synthesized)
gttggatgctatataagaaagcaaagaaattcccaaaagattacctcaagttggtttctcattttggtaaagatttcttgtgtctcttggttctatcaatttaaatagagcctgaaagat

SEQ ID NO: 882610 - DNA, 120 bp, Artificial Sequence
  ENSG00000245904_23 (sequence is synthesized)
ctcccaaaaggagggtgaggggcaggagaatatggtgaatatatatcacttttcgcaggcgcctcttctggattttgaccgttataaagcagaacaaatagataaagaaagaagactcac

SEQ ID NO: 882611 - DNA, 120 bp, Artificial Sequence
  ENSG00000245904_24 (sequence is synthesized)
aaatggcttttttcattaagatgatatacctttcatttctactttttctcagttgataagccccaaaataacacagagacactgaaaaaagccttcttacaaccttcttacaattttcta

SEQ ID NO: 882612 - DNA, 120 bp, Artificial Sequence
  ENSG00000245904_25 (sequence is synthesized)
tactgccagtttcaccagccttttaggtgttggttgggaccctactggcctctaacgctggttttttcagtagtgtatccaccaactggttctgattggcacttttcatcttcaaatatg

SEQ ID NO: 882613 - DNA, 120 bp, Artificial Sequence
  ENSG00000245904_26 (sequence is synthesized)
cgatgttctgcctcactgacaatggcagatgggccagtaaatctcaatcttgacctcacattaggatcacctgggaaagtgttagaaaaacaaaatcccagtgtccaggcttctccctgg

SEQ ID NO: 882614 - DNA, 120 bp, Artificial Sequence
  ENSG00000245904_27 (sequence is synthesized)
accaatcaaatctgaatctctaatggtaggattcatgcactgatattttttgaagcttcccaatgactgccatgtgtggccaaagctgaaaacccctgttagattctattttggtatatt

SEQ ID NO: 882615 - DNA, 120 bp, Artificial Sequence
  ENSG00000245904_28 (sequence is synthesized)
aactatgatcttaactaatgaaagttgctgaactgctggggaacttgactaagcaatggaatatcccttagaaacacaatgaacacccactaattttaggcagtaacacaaaattattgg

SEQ ID NO: 882616 - DNA, 120 bp, Artificial Sequence
  ENSG00000245904_29 (sequence is synthesized)
ggccttaatattctctttagagaaatacattccacagaattccacaagttgtagatgacatgttctcgcttatgaaagaatatgccaccaggttcataggagaaaaaatatggtgctgct

SEQ ID NO: 882617 - DNA, 120 bp, Artificial Sequence
  ENSG00000245904_30 (sequence is synthesized)
tttactaagccaccaaagagaacaacataagaaaatcatcaattcctaactatggtgaaagtgcctataatatatcacaaacatgagaagcaaccttttcaccattaagtggactctgac

SEQ ID NO: 882618 - DNA, 120 bp, Artificial Sequence
  ENSG00000245904_31 (sequence is synthesized)
aaagcagttaatagaatcttgaagtctagaaggaatcctttaagatgtgtaataatactattctacacctgaggaacttagggtcagagataagtggctagtctgataatttactgctca

SEQ ID NO: 882619 - DNA, 120 bp, Artificial Sequence
  ENSG00000245904_32 (sequence is synthesized)
tgaggggtgttataaaaactgcccttgtcctcattcctagtccaggggttgcatttttaatgtacacagaagcatttaatttcatgtatggccaatagtaaacgctcaataaattgtagc

SEQ ID NO: 882620 - DNA, 120 bp, Artificial Sequence
  ENSG00000245904_33 (sequence is synthesized)
tgttgggagaagtaatgatgatagtattaatgatcacattggtaataataatgtctacggggttttccagtgttataaacactgccttaaaatccttagcaaataaaaaactatttcttg

SEQ ID NO: 882621 - DNA, 86 bp, Artificial Sequence
  ENSG00000245904_34 (sequence is synthesized)
gaggctgaggtgggaggattgattgaggccaggagttcaaggccaccaaccaaccaaacaaaaacctatttcttttgttgatgaca

SEQ ID NO: 882622 - DNA, 120 bp, Artificial Sequence
  ENSG00000245904_35 (sequence is synthesized)
caaccaaccaaacaaaaacctatttcttttgttgatgacaccttatttatttgaaacacaagaaatttaaaaagcaaaataataaacaggggaaataaaaagcctttcatttagagctgc

SEQ ID NO: 882623 - DNA, 120 bp, Artificial Sequence
  ENSG00000245904_36 (sequence is synthesized)
aatgaaaatttagcatagtctttcactattgaatgactcatcagttgaacactttatgtaattaattataaaatatatgtaatttgatctgattttgtctagaagattctagagtatcat

SEQ ID NO: 882624 - DNA, 120 bp, Artificial Sequence
  ENSG00000245904_37 (sequence is synthesized)
tttccttatgcaaatactatacatatgtttatatctaaagagttaaaggtactttcacaggttatttaattcaattctcacatacaattagaaaacggagatattatccctccttcttta

SEQ ID NO: 882625 - DNA, 120 bp, Artificial Sequence
  ENSG00000245904_38 (sequence is synthesized)
aaattaaaaaaacataagctcagagaatgaaaggggacgtggctaaagtggctccactaataagtggcatggccagtagttcatcacaggttttccacctttgagactgtccttaggtta

SEQ ID NO: 882626 - DNA, 120 bp, Artificial Sequence
  ENSG00000245904_39 (sequence is synthesized)
cttctttggactatgtcactctggccttttgaataattaactttacagagcaagagtgtaatgctatgtccctggctttcatcaggcaaaatgtgaaacacatccatttgaaaacttgct

SEQ ID NO: 882627 - DNA, 120 bp, Artificial Sequence
  ENSG00000245904_40 (sequence is synthesized)
ttttgaaaacacaggacctcattatgttgttcagtgtctctcctttaaattctcaacgacaaattattctccgagttcagagtcaggaaagtatctatatcatccaccaaaaccgggagc

SEQ ID NO: 882628 - DNA, 120 bp, Artificial Sequence
  ENSG00000245904_41 (sequence is synthesized)
tttcttttgttagatctagagagttatatgatccattgaatgtccctccttgccttggcttctagggtgctcagagcaaagttttatacttagtcactccggttctggttcttctcaatc

SEQ ID NO: 882629 - DNA, 120 bp, Artificial Sequence
  ENSG00000245904_42 (sequence is synthesized)
caagtttctattgcatcctctctctcttccccttcacctcccaaaccactaccacctttaatatattactttcgctttttgtatttatcagtgattcaattttattttactgtgattttg

SEQ ID NO: 882630 - DNA, 120 bp, Artificial Sequence
  ENSG00000245904_43 (sequence is synthesized)
gtaaacatccgtagtgttcaactacttggcagatttgtccccctttttgtgataatagaactctaacacttcttggttacatcacatgttttactatctgatgattatgttggtcatcaa

SEQ ID NO: 882631 - DNA, 120 bp, Artificial Sequence
  ENSG00000245904_44 (sequence is synthesized)
tccttcttctgcaaggaacacaatataacaacattacaatgcatctttgttttgtttttgctgatttgggtagaacatagcaaaaataaaaatgcgttcattttctgtcattttggtaat

SEQ ID NO: 882632 - DNA, 120 bp, Artificial Sequence
  ENSG00000245904_45 (sequence is synthesized)
aaatctgaagccatgcttaacagaatagttttaagtttaaaatgaaataattttataaatattttacccttttaaaacaaggacgtctcagttcttatggcatcaagatgctcaaattaa

SEQ ID NO: 882633 - DNA, 120 bp, Artificial Sequence
  ENSG00000245904_46 (sequence is synthesized)
attcacaaggctcttcaggaccaattatatcggtgtttaaccctcccagtgtcttttttgcatcttaatatcattgatttctttaccaataatgccaaatacagaaactacccctgctta

SEQ ID NO: 882634 - DNA, 120 bp, Artificial Sequence
  ENSG00000245904_47 (sequence is synthesized)
gctctgcgccagtgcatccttctccaagagtgcgctgcctgggcccgcttgccctggagtgtaagtgctggtaacttcagcagtcaacggagagaagagtggaaaccttactggatgcgg

SEQ ID NO: 882635 - DNA, 120 bp, Artificial Sequence
  ENSG00000245904_48 (sequence is synthesized)
tggatgatagcagcaagcttctttggcgttaaacaacttagatattctgataaagcatctactgttgccttaattaaggagagatggataatattttcttggatgaaagtgatagaggtg

SEQ ID NO: 882636 - DNA, 120 bp, Artificial Sequence
  ENSG00000245904_49 (sequence is synthesized)
aggatgaagagaagtggtcagattctacatacaattatcagagaaacaggagttcctgagaatatggatatgatgagaagtgactcaggggaaggatgatgtcaagctgttgtcaagcca

SEQ ID NO: 882637 - DNA, 120 bp, Artificial Sequence
  ENSG00000245904_50 (sequence is synthesized)
ggaaagagaagaattaacgtgttctcccttcaaaatgatggattccatggctccacattcatcatctggctcatgattaccaactctttgcagtccattgcagggtgacctcgttagcac

SEQ ID NO: 882638 - DNA, 120 bp, Artificial Sequence
  ENSG00000245904_51 (sequence is synthesized)
tatctgtgcactttctgtgatagcgggctgcctggaggccctgcatgtgtggttcgggttaatgagggtctgagtcatcaagttagaaactcacctttccagccatcagatccagaaatg

SEQ ID NO: 882639 - DNA, 120 bp, Artificial Sequence
  ENSG00000245904_52 (sequence is synthesized)
ctagaaaaaggcacagggctcataatcagacatgccatgttgacgaaagagtaatgtctcatcctggtgagatcgtccacaggacctgtgctgaataattgtcaggcagccatgagacca

SEQ ID NO: 882640 - DNA, 120 bp, Artificial Sequence
  ENSG00000245904_53 (sequence is synthesized)
cagtaagctcccatactatctagaggtcaatttatcatccaagatggcctgctttgcagattgctgcatgcataccctctgcagcaccaggtagcaggcagcaggagaggtagccccaca

SEQ ID NO: 882641 - DNA, 120 bp, Artificial Sequence
  ENSG00000245904_54 (sequence is synthesized)
ataacacagcatgtgtccctagagcatcttcttattgaaatgggagatttaaaaccttttaaagaaaactaatggtcctgtttgctgtctaaggataaagacgagtacattttaatggtg

SEQ ID NO: 882642 - DNA, 120 bp, Artificial Sequence
  ENSG00000245904_55 (sequence is synthesized)
tctgagtccctctctcaaacctgcccccatctcacagtttcccactcccctgctgctcaggatacttcagtgggaaagtttaaacaaaacacactaagacagtgttttccaaacagtggg

SEQ ID NO: 882643 - DNA, 120 bp, Artificial Sequence
  ENSG00000245904_56 (sequence is synthesized)
tcatgacccattagtggactgtgaaaataaatttagtagatcacaaccaacattaaaaaataaaaaaaagaaataggagctgggtgcagtggtgtgtgcctgtagtctcaggtacttggg

SEQ ID NO: 882644 - DNA, 120 bp, Artificial Sequence
  ENSG00000245904_57 (sequence is synthesized)
aggctgagtggggaggattgcttgagtctagaagttcgaggctgcaatgatctatgatggtgcttgtgaatagccacggagtctagcctgggcaacatagcaagaccctgtatctaaaaa

SEQ ID NO: 882645 - DNA, 120 bp, Artificial Sequence
  ENSG00000245904_58 (sequence is synthesized)
aaaaataaaaataagaaaagaaataaaatagaacatctggattgcaatgaaatgcattctttattggatatagtgataaaaactctttcaaagctgttgccctaagtgataaattttggt

SEQ ID NO: 882646 - DNA, 120 bp, Artificial Sequence
  ENSG00000245904_59 (sequence is synthesized)
aacttcttcctatataaaataattatttaaaaaatcctgaaaatgaataaaacaaatgttttatgatgattgatactagccatatctggtgattaacaggagtaataaggaataacatgc

SEQ ID NO: 882647 - DNA, 120 bp, Artificial Sequence
  ENSG00000245904_60 (sequence is synthesized)
tcactccaacgctcataagccttatcacctagatattttttcttgaagcaatctccacattctccatagtggagactataactgattcagggtatggtggagcatgtgtgtgtgtgtgtg

SEQ ID NO: 882648 - DNA, 120 bp, Artificial Sequence
  ENSG00000245904_61 (sequence is synthesized)
tgtgtgtgtgtgtgtgtgtatgtttgcatgtgagtatgtaatctggctcctgtggaaagaaaacacattgctggaagatgaaatcactggacataattctttatttcaagccttttcagt

SEQ ID NO: 882649 - DNA, 120 bp, Artificial Sequence
  ENSG00000245904_62 (sequence is synthesized)
tacacagcttcttttaaaagtttgacatgcaaaattgttaaatatcaaaatgcaaatcatgtaatttctcttccagatgtcctgcttagctgcatattttttcagcctgtgtatgtaacc

SEQ ID NO: 882650 - DNA, 120 bp, Artificial Sequence
  ENSG00000245904_63 (sequence is synthesized)
ccaatgctcagtaacatagctttctgttcaaatcatctgtttctatgacctttgcctttattgattcgttttcttttttcctatttttaatgttgcctttgagattaaagtcatttttct

SEQ ID NO: 882651 - DNA, 120 bp, Artificial Sequence
  ENSG00000245904_64 (sequence is synthesized)
ttagtgcgggggaaagtggagggaacggtcctgcggggcgttctgtccaagaaaaaggactgcagcctcggggagccagggtcccctcgcagacgagctgccaacgccgcggagccattt

SEQ ID NO: 882652 - DNA, 120 bp, Artificial Sequence
  ENSG00000245904_65 (sequence is synthesized)
ggagagaagagtggaaaccttactggatgcggacaggagagccagttactgaaagcagatataacgcggatcctgtaaagagtggtgtgtatccaaaaaaaaaaaatctgtacaatgtat

SEQ ID NO: 882653 - DNA, 120 bp, Artificial Sequence
  ENSG00000245904_66 (sequence is synthesized)
tttaaaacttgtgtgcacaaaactgaagattttcttttttacctagtccaaatgccgtcctagcctgagtcctgctctttataaaaataaaataaaaagaatttgaagcttgtgaaagta

SEQ ID NO: 882654 - DNA, 120 bp, Artificial Sequence
  ENSG00000245904_67 (sequence is synthesized)
ctcggcggcgcggccccgacggcggagcagccaccccgggcttcctcaccgggcggaaggctgagaggaagagagggcgtgaggggcggacgactacttttgtctttctttctttagact

SEQ ID NO: 882655 - DNA, 120 bp, Artificial Sequence
  ENSG00000245904_68 (sequence is synthesized)
aaaaaagttattttcgagacaggaggcggcaggagagaggaagagacgagcgatggcggcctggtcacatcgctcggacctccccagctgcctccgcctccagctccgcagcattcgaag

SEQ ID NO: 882656 - DNA, 120 bp, Artificial Sequence
  ENSG00000245904_69 (sequence is synthesized)
atctcaatagctgcatttccagctccgagaggcgaagagatgcaagcgccgtgcagcaccctttatagtgccacgaaaaggaagtggcgtagctggagcgtgatggccgactccagccaa

SEQ ID NO: 882657 - DNA, 120 bp, Artificial Sequence
  ENSG00000245904_70 (sequence is synthesized)
tccgaatatcgcaccattgtgacgcaagccggttcggagccgaaaggggcgggaaaagagttcaggaggcgggtccagagatagggaagagagggaggagctgacgtaatccgcttgtaa

SEQ ID NO: 882658 - DNA, 120 bp, Artificial Sequence
  ENSG00000245904_71 (sequence is synthesized)
acaaataaacccggagtggcggctggagacccagttgcttgtgtcgagggagggagggagggaacagagggtgcgcgtgtgaaagctccgcccccagccctagctcctccttcccgcttc

SEQ ID NO: 882659 - DNA, 120 bp, Artificial Sequence
  ENSG00000245904_72 (sequence is synthesized)
agcaggtccaggctctgcgccagtgcatccttctccaagagtgcgctgcctgggcccgcttgccctggagtgtaagtgctgggtaaataagaaccgcctggcgcaggctgtgtctactct

SEQ ID NO: 882660 - DNA, 120 bp, Artificial Sequence
  ENSG00000245904_73 (sequence is synthesized)
tcacgccgccttctcagatcgggctgcatgtccccactccgtgtttacatctcgttcccgctccgggtctcggtgactggctcctcaagccggagacgcgtgtggtgcggcgcgatgcgg

SEQ ID NO: 882661 - DNA, 120 bp, Artificial Sequence
  ENSG00000245904_74 (sequence is synthesized)
ctgtaaagagtgaaaggagaagaccacttttagttgcctccctgctagcaccctgacttgctctgcttgaataagaatccaaggacacaagctaagacatttgcactgggtttagatcta

SEQ ID NO: 882662 - DNA, 120 bp, Artificial Sequence
  ENSG00000245904_75 (sequence is synthesized)
ctgcgattcacaaaacacaaaagaactttcagtcagagggtgacacataatgattttagacaaaactcagtttcttctggtggaagctattcagattgtttggagagtgggaggaaaaag

SEQ ID NO: 882663 - DNA, 120 bp, Artificial Sequence
  ENSG00000245904_76 (sequence is synthesized)
gagtgaagcatcgcttaacaacaaaagtaataatgcaggcagaatattaaatggagaagccagactttcaacacatagaaaagaaagctagttcagaatgttgagagacttgggagctga

SEQ ID NO: 882664 - DNA, 120 bp, Artificial Sequence
  ENSG00000245904_77 (sequence is synthesized)
ttgattgaaggtggcacttagaaggttgccctttttaaagataaaggctgatactgtgactctgtcccaggggacctgagtaaagaactcctcagagatgtgggaccactattcagaaca

SEQ ID NO: 882665 - DNA, 120 bp, Artificial Sequence
  ENSG00000245904_78 (sequence is synthesized)
agatttggagagctggggcagagaagattttaccttggggatttcttcagctgcgagtagtaaattggttatgccttaatgaatgaagtttgtcaaattttaagataggatgttattacg

SEQ ID NO: 882666 - DNA, 120 bp, Artificial Sequence
  ENSG00000245904_79 (sequence is synthesized)
ccttttaaaagaatgaggtagagtataacatctgatttggagttctttccagcattttaaggtctttaaagaaaacaaattggagaaaaataaataaatatagatcatgctgtacatata

SEQ ID NO: 882667 - DNA, 120 bp, Artificial Sequence
  ENSG00000287119_0 (sequence is synthesized)
atgtgtctcagagataggaagctaaatcagaacgcagcaagaagacagcacacattcgagagaggaaaaaatgtgaaatctgcttctggccatcagaggagctgatgcaatcccggctga

SEQ ID NO: 882668 - DNA, 120 bp, Artificial Sequence
  ENSG00000287119_1 (sequence is synthesized)
ctcgggggacagccacggtgccagctacagaggccacatggcttctaatgaggccaggcccagttgtagctccgaagagtgggtgagccagccaaatttcacccaaggacagaagcagcc

SEQ ID NO: 882669 - DNA, 120 bp, Artificial Sequence
  ENSG00000287119_2 (sequence is synthesized)
ttaacagctgttgacaagcactggctaccatctatgtgtcaacaattgtgtcatgagtttgagatgggccgacagcacgtggaactcaaaggtgactaagggagaaaggaaagtaaatca

SEQ ID NO: 882670 - DNA, 120 bp, Artificial Sequence
  ENSG00000287119_3 (sequence is synthesized)
atgatcagagtccagagagctacatgcagtgcaacccatggttttatgggagaaccgacaggggcacctcactctggaaggaacaacgccaggagaggctttgaggtgccgataatgtcc

SEQ ID NO: 882671 - DNA, 120 bp, Artificial Sequence
  ENSG00000287119_4 (sequence is synthesized)
aggtgatgtgcaaatgtgtaggagctagcaagacagaaaagcagctattaatggggaagtggtgtgggtgacatttcaaatagagggaataggaggcaaaagaagattaaaaatatatgc

SEQ ID NO: 882672 - DNA, 120 bp, Artificial Sequence
  ENSG00000287119_5 (sequence is synthesized)
ttaaggaaatgctggaacgactatttcacatggccatggtgccagagataagtttagaagacatgcacaggatcagaccagggagggtgagccagtggctctgcatttcaccctggcaac

SEQ ID NO: 882673 - DNA, 120 bp, Artificial Sequence
  ENSG00000287119_6 (sequence is synthesized)
tctgaagtcctgctggagaattttaagcaggggcggaacagccacctgacagatacagataaacatcctggaaagatcactcctgctgcagagagaaaggagcaatgctggaggctgcgg

SEQ ID NO: 882674 - DNA, 120 bp, Artificial Sequence
  ENSG00000287119_7 (sequence is synthesized)
ctgcccaggccaaggaggccttctgaaaaagtccatctggatgaaggcgaattcaagagcagcttagctggcagaactgaaggaccgtggtgctcctacagatcatgtggatgatgggaa

SEQ ID NO: 882675 - DNA, 120 bp, Artificial Sequence
  ENSG00000287119_8 (sequence is synthesized)
gggtctccaggaaatgcacagagggtgtgaaaagttccaggttgaaatcctaggtgcagggtaggcaatggccattttagcatttatgaatggaaaatccagggtgcacaatgctttgag

SEQ ID NO: 882676 - DNA, 120 bp, Artificial Sequence
  ENSG00000287119_9 (sequence is synthesized)
gagagagtcactttggatttgcctccggagtctacaggtgcggtgtccttgggcgcccagccatgcaagtctggggtctgggctggtagccggatctcagcctctttcacctcccttttt

SEQ ID NO: 882677 - DNA, 120 bp, Artificial Sequence
  ENSG00000287119_10 (sequence is synthesized)
cctctttttatttatttatttttcattctttcccctctccacatctcagttctaacctctttgcctcaatatgctctttcttgtctgttctttaaacaggaacttgtttggaattgagcc

SEQ ID NO: 882678 - DNA, 120 bp, Artificial Sequence
  ENSG00000287119_11 (sequence is synthesized)
ttgattctgaaaagaaagtatcagagggcagcatttgaactggcatttaaggtgtcaaccagggggaatttggtgccgaccagtaaaaggggagaatcaaaaacagaagctccatcacca

SEQ ID NO: 882679 - DNA, 120 bp, Artificial Sequence
  ENSG00000287119_12 (sequence is synthesized)
gggacagggccagactcctgactagaaactcagtggatgtgctgaatcattcggatactttccagaaaattattttacctactcagaaggctgggcatcagccaaaactgtctggaaaac

SEQ ID NO: 882680 - DNA, 120 bp, Artificial Sequence
  ENSG00000287119_13 (sequence is synthesized)
tttctttaaagagtatgcaggtggttccttttaagctcacctgtctggtttttcaaacagatcaaggggtgatggcagggaaacgtctcccctggaaatctcacccctccatttgctaaa

SEQ ID NO: 882681 - DNA, 120 bp, Artificial Sequence
  ENSG00000287119_14 (sequence is synthesized)
gagaaggagcttcaatcccttgacaggatgatgaaacaataataaactgatgtgaccaagtctcatgccagcagtcctacctgtggcccacccttctcgtggccaacaatggcttttctt

SEQ ID NO: 882682 - DNA, 120 bp, Artificial Sequence
  ENSG00000287119_15 (sequence is synthesized)
aaataaataaaaatcaagatttgtaccactcctgctgtaagctcttcagtggctcatggatgaatgaacaggatcaccattggcacacaagtccccccacagatcacctactcatctttc

SEQ ID NO: 882683 - DNA, 120 bp, Artificial Sequence
  ENSG00000287119_16 (sequence is synthesized)
caccccagcttttgccattctctccccatcccacaaatccattgccatccaaagataagaaagataccagatagggcttcccagttgcagcagagtggactgtctttacactggagggct

SEQ ID NO: 882684 - DNA, 120 bp, Artificial Sequence
  ENSG00000287119_17 (sequence is synthesized)
attcttccacaaagaagtcttctcccccgtgggaagggattggagtacttctcctaggcactatgtgagcagatggttgagaaatgagctagcccttgagcttctgcagcaagggagggt

SEQ ID NO: 882685 - DNA, 120 bp, Artificial Sequence
  ENSG00000287119_18 (sequence is synthesized)
cccatcatgagagcagatggtatgggaaatgcaccagtttggaattgggaggaacaagtttcaggcctgactcagatacagatacttgccatcatcagtatgcccttgaatgaactataa

SEQ ID NO: 882686 - DNA, 120 bp, Artificial Sequence
  ENSG00000287119_19 (sequence is synthesized)
agtgtctctgaacctctgttgtctcctttgcagtgttgagccaaggttatataccacacagggattgaggaagaggaattaaggcagcgtacatggaagtggctggctcagtcatcactg

SEQ ID NO: 882687 - DNA, 120 bp, Artificial Sequence
  ENSG00000287119_20 (sequence is synthesized)
gctaaacgctacttgaattccattctaaaactccacatagaaaggcaatttgacaaaatttgatcatcccttcaccccaattatcaccccgtgaacttttcttccatttatcacccttgg

SEQ ID NO: 882688 - DNA, 120 bp, Artificial Sequence
  ENSG00000287119_21 (sequence is synthesized)
atttcgtagctcggcacacacagtctttctccctctctcacttctttctttctctccttttttcttcttctgttaaacctaagaaattctaatgctgaagagggttttcttaaggtgatt

SEQ ID NO: 882689 - DNA, 120 bp, Artificial Sequence
  ENSG00000287119_22 (sequence is synthesized)
ctcctggaaaagatgactctttaagcaaaaattcagactttctctagagtgaccgagacatgtaggtggcggtagcaatacaggctgaccttccagcatggtcctgggaaccacaggtca

SEQ ID NO: 882690 - DNA, 120 bp, Artificial Sequence
  ENSG00000287119_23 (sequence is synthesized)
gctctgctgcagatgcccagacagcgtgtctcttcctgaaacaaatcgacttccacatggctcttctgaagactaagatggccacgtctatctaatgaacccatcctgccacctccattt

SEQ ID NO: 882691 - DNA, 120 bp, Artificial Sequence
  ENSG00000287119_24 (sequence is synthesized)
gggtcctggaaatggaccgagctcttttgtggttccctgtacatttcagcgtgcatctttagctatgagaggtcatttgctgccagttctgttggctttaatgagtctcctgccttggac

SEQ ID NO: 882692 - DNA, 120 bp, Artificial Sequence
  ENSG00000287119_25 (sequence is synthesized)
ctggagagagaagtgggaaaatgtgattctcatgcccaggcctggcctccctgaactcacttttcccattaagctttgacactggaccatgcctttgttggcagaggaggtttttatgga

SEQ ID NO: 882693 - DNA, 120 bp, Artificial Sequence
  ENSG00000287118_0 (sequence is synthesized)
agacatctctttatccagttctctgctctcattatatgcatccccaaaccttcttctctcaggagatttccatggacagatctggctttcaagctctgaaacagaatgttcctataatga

SEQ ID NO: 882694 - DNA, 120 bp, Artificial Sequence
  ENSG00000287118_1 (sequence is synthesized)
agcagattgacctgcaaaatgacaggagaacaactgggagaactcaagcaaccaccaaaactgtttctgtctggactactaccgctgaggaaggaattgctgcatttggagggagccttt

SEQ ID NO: 882695 - DNA, 120 bp, Artificial Sequence
  ENSG00000287118_2 (sequence is synthesized)
gtgtgctgcagaaatgtaccatgaaagactaagccctggatagacactgtcccttcagtttgagccccagaaaaaaacatgcatggagcatatctgaacctaatcccagcctggagccaa

SEQ ID NO: 882696 - DNA, 120 bp, Artificial Sequence
  ENSG00000287118_3 (sequence is synthesized)
tcctagctgacctgcagtccaaaggagagccaacatgctgagcccagcggagacaagccaaatttcagtcaacctgcaggcctgtaaacatgggcgtaaatatttggtatgataagccac

SEQ ID NO: 882697 - DNA, 120 bp, Artificial Sequence
  ENSG00000287118_4 (sequence is synthesized)
tgaatttcagtggtttgttatgctgtgtcattagacaataacgaatacactcagttttaggaaataaaagactcaaaacctttttctgattggtaataaccttctgaagctgtgacccaa

SEQ ID NO: 882698 - DNA, 83 bp, Artificial Sequence
  ENSG00000287118_5 (sequence is synthesized)
tttttctgattggtaataaccttctgaagctgtgacccaaatgcaagaaaacgaccatgcaacttttactctatagtaaagaa

SEQ ID NO: 882699 - DNA, 120 bp, Artificial Sequence
  ENSG00000287118_6 (sequence is synthesized)
atcacgaggtcaggatttccagattagcctgaccaacatggtgaaactcaatctctactaaaaatacagaagaattagccaggcgaggtgctgtgcgcctgtaatcccagttactcagga

SEQ ID NO: 882700 - DNA, 120 bp, Artificial Sequence
  ENSG00000287118_7 (sequence is synthesized)
acagcaactgataatatagaagaaaacttaagtgtttagcttcccttagcctccagtagaggctacttaccttcaagcccctggtagtgttctctagaaactagaccatggaagtattct

SEQ ID NO: 882701 - DNA, 120 bp, Artificial Sequence
  ENSG00000287118_8 (sequence is synthesized)
tagtggttagaattatttttgtttcctttacatcaggataatgctgtttgtactcagcctcactcaagaatggatatgccgtatcaagtagaacaaaagtcaccagcaagctttccatgc

SEQ ID NO: 882702 - DNA, 120 bp, Artificial Sequence
  ENSG00000287118_9 (sequence is synthesized)
ttgaaatgaagccgagagagcttttgaagagcatatattttgtaggaaacttaatttcctaggaaggctaaaaacttgttttctttataggagctaaatggcatggacatactttgagta

SEQ ID NO: 882703 - DNA, 120 bp, Artificial Sequence
  ENSG00000287118_10 (sequence is synthesized)
ctgcataaaggactttgcaaagacactcttggtaatcaacataaaaagagaaaggccaaatctttaaaacttaagcaaaatgagcaacagcatcaagatgataagaaatacatggtttgc

SEQ ID NO: 882704 - DNA, 120 bp, Artificial Sequence
  ENSG00000287118_11 (sequence is synthesized)
acatcatggtgcaaaaagtgtttcttggtagtggtcaagatagtgtggacattaggaatgggaaaactactcattgcttgtttgagcaaaaaccttatctcccaatatagatatgtattt

SEQ ID NO: 882705 - DNA, 120 bp, Artificial Sequence
  ENSG00000287118_12 (sequence is synthesized)
atttgcctgaatctaaaacatttagatcatagaatttctgaaaatagctgtatagaaacagcttcattcatttaaaaccacatacaagcaatcctaacaatctgcagaatgttcctaagc

SEQ ID NO: 882706 - DNA, 120 bp, Artificial Sequence
  ENSG00000287118_13 (sequence is synthesized)
tatcactgaaagcaaagaactctaccccacaactggatttattgccatttatttcaaaatccaaggaaaaaaagtcaattcactactttagaaaattaagttggcctccctggcttatgt

SEQ ID NO: 882707 - DNA, 120 bp, Artificial Sequence
  ENSG00000287118_14 (sequence is synthesized)
aaattttctcttcatttccttatttcatttattggacaaattattgctctttgctttctactccaaagaattacactatagggacaacaagatgaactgcctcaacaatattcctatatg

SEQ ID NO: 882708 - DNA, 120 bp, Artificial Sequence
  ENSG00000287118_15 (sequence is synthesized)
gataactgtgccattctaaatgtccacttgctgcatatactgaaaccacttcttgggaagtctctgaagcacctgagtcattcatctttccttggggctgatggtgggggtggggaggag

SEQ ID NO: 882709 - DNA, 120 bp, Artificial Sequence
  ENSG00000287118_16 (sequence is synthesized)
ggagatttattatcggaaacagaagccaaaagttagcagcctctattcaaggtcacacccaaaataacaacacctgattccatggctgcaaatgctctttccttagccacctgtaaaaat

SEQ ID NO: 882710 - DNA, 120 bp, Artificial Sequence
  ENSG00000287113_0 (sequence is synthesized)
acctgagcaaagaagcgtgcggtggcccggcgtcggggcttcgatagcccagcgtctgtttgacccaaatcctgcagctccgaatccccaggcggtcggagattcccacaaagagcccca

SEQ ID NO: 882711 - DNA, 120 bp, Artificial Sequence
  ENSG00000287113_1 (sequence is synthesized)
ccggcagaaaacacgcttcccagcaacaggatagagcgccctaaccgagagcctctccctaacgggatcacgctctgcccgagagaaacgtgccaggcccacctcctgagacacagacct

SEQ ID NO: 882712 - DNA, 120 bp, Artificial Sequence
  ENSG00000287113_2 (sequence is synthesized)
ccgggtgttctcacaactccaggtcgggcgatggacacccccagaaacagatatattcagagccacacagaccatgccacaaataatactcatgctgcagaggatgccagatttgcgtta

SEQ ID NO: 882713 - DNA, 120 bp, Artificial Sequence
  ENSG00000287113_3 (sequence is synthesized)
ggcgctggggtacaagcatcatgtgtacaagcaggaaggcagcaaacatttatgaactgtgtgatactccaaacattgggttaggcactggggagaaagcaataaaacaccgtctcttac

SEQ ID NO: 882714 - DNA, 120 bp, Artificial Sequence
  ENSG00000287112_0 (sequence is synthesized)
agcatcagactagcccctgagagccaaaaactgtttgcctttcagtgggaggatccggggtcaggtgtcaccactcagtacacttggacctgactccgccaagggttcaagaactccctc

SEQ ID NO: 882715 - DNA, 120 bp, Artificial Sequence
  ENSG00000287112_1 (sequence is synthesized)
ttcccagcagagacctaggctgcgtgctgctccagtacatcgatgaccccctgctgggacaccccacggcattcgggtgtgccaagggaacagataccctgctctggcacctggaggact

SEQ ID NO: 882716 - DNA, 80 bp, Artificial Sequence
  ENSG00000287112_2 (sequence is synthesized)
acagcaagtatgttacctgggatttactatctgacagggagagtgcagcctgggatcagaaagaaagcaagtcatttgca

SEQ ID NO: 882717 - DNA, 120 bp, Artificial Sequence
  ENSG00000287112_3 (sequence is synthesized)
gagtgcagcctgggatcagaaagaaagcaagtcatttgcaacctgctggagcctaagaccagaaggcaggtgaaagaattcttaggagctgtagggttctgcaggttgtggatcccaaac

SEQ ID NO: 882718 - DNA, 120 bp, Artificial Sequence
  ENSG00000287112_4 (sequence is synthesized)
tttgcagtattggctaagggcctatacggagtcacaaagcggggagacaaggaacctttcaaatgggggtcctgacagcagtgagcttttcatgagttaaaagaaaatctcatgttggtc

SEQ ID NO: 882719 - DNA, 120 bp, Artificial Sequence
  ENSG00000287112_5 (sequence is synthesized)
ccagccctgcggctacctgacctgacgaaaccttttacactgtatgtgtcaaagagagaaaaaatggtgtttggagttttgacccagactgtggggccctggtcgaggccagtggcctac

SEQ ID NO: 882720 - DNA, 120 bp, Artificial Sequence
  ENSG00000287112_6 (sequence is synthesized)
caagaagcggataagctaactcttgggcaaaacctaactataaaggccccccatgctgtggtgactttaatgaataccaaaggacatcaatggctaacgaatgctagaccaactagatac

SEQ ID NO: 882721 - DNA, 120 bp, Artificial Sequence
  ENSG00000287112_7 (sequence is synthesized)
aatggctaacgaatgctagaccaactagataccaaagcttgctctgtgagaatccccacataaccattgaagtttgcaacaccctgaaccctgccaccttgctcccggtatcagagagcc

SEQ ID NO: 882722 - DNA, 120 bp, Artificial Sequence
  ENSG00000287112_8 (sequence is synthesized)
ttagtttattctagcaggcctgacatccgagaccatccttggacataagtagactgggagctgtacatggacaggagcagcttcgtcaacccataaggagagaggtgtgtggcatatgca

SEQ ID NO: 882723 - DNA, 120 bp, Artificial Sequence
  ENSG00000287112_9 (sequence is synthesized)
gcggtaaccctagacactgtcactgaagccaaatcgttaccccagggcacttcagcccagaaggccgaactcattgctttaattcaggccttagagctaagtgaaggtttggactgccct

SEQ ID NO: 882724 - DNA, 120 bp, Artificial Sequence
  ENSG00000287112_10 (sequence is synthesized)
taccaattggctcagacaacgggccggcatttgtggctgacttggtacagaagacagcaatggtataggggatcacatggaaactacataccacctatcgaccacaaagttctggaaagg

SEQ ID NO: 882725 - DNA, 120 bp, Artificial Sequence
  ENSG00000287112_11 (sequence is synthesized)
tggaccggatgaatcggactatcaaaaatagtttagggaaagtgtgtcaagaaacaggattaaagtgggtacaagctctccctgtggtattgtttaagattagatgtaccctttctaaaa

SEQ ID NO: 882726 - DNA, 82 bp, Artificial Sequence
  ENSG00000287112_12 (sequence is synthesized)
cccctcccacactacagggactcccaggcactccgcaagagctaggtgaaattgagttacagtgatagctacaggctttagg

SEQ ID NO: 882727 - DNA, 120 bp, Artificial Sequence
  ENSG00000287110_0 (sequence is synthesized)
cccttactattaaagctgaggctgagattggactgattattttacaagccaaagaccaccaaaccatcaaaaggtaggagaaaggctttcctgcagatgctgctgcaaagacctgcccct

SEQ ID NO: 882728 - DNA, 120 bp, Artificial Sequence
  ENSG00000287110_1 (sequence is synthesized)
tccaccttacaccaccatccccaagggcctagaggcctctgcctagagctgggggaagaggagactgcgaagaacgatcccatcttttaaaaaccggacagaaatcacggattccttcca

SEQ ID NO: 882729 - DNA, 120 bp, Artificial Sequence
  ENSG00000287110_2 (sequence is synthesized)
cttacattcccttgggaagaacttaatttgggggcaggggctaggaaagggagtgcctgggcagaaacggttttgacaagcgttcgtatcaggacaatttgggaaaacccaggtgagtga

SEQ ID NO: 882730 - DNA, 120 bp, Artificial Sequence
  ENSG00000287110_3 (sequence is synthesized)
ttactgagtgaccctcgactccggtgttttgacaccaaaatgtgcaaggcttcctctctgattcttaaacatctcaggccatgccgctcccatgtcaccctctagtggcctgtgggcttc

SEQ ID NO: 882731 - DNA, 120 bp, Artificial Sequence
  ENSG00000287110_4 (sequence is synthesized)
cttgccagctgagccctagccctacccccgcctttgaggttccgcagaaatctagctgcagggtgacttccacaggtctcacaacccagccaatagtaacagctaggttattaaacacac

SEQ ID NO: 882732 - DNA, 120 bp, Artificial Sequence
  ENSG00000287110_5 (sequence is synthesized)
catcctcttagaggtgaaaggcttagccttgggttcaattcattcagctttaaaatggagctagtgatttgtctcacttgaagatgttgtagagcccagtgagatatgtagtgcatggag

SEQ ID NO: 882733 - DNA, 120 bp, Artificial Sequence
  ENSG00000287110_6 (sequence is synthesized)
attggaaggtactgtgcagcagaggacatggacagtgcaggctcaagaagatcttgtgaccttgagcaagtcacttttcctccctgttcctcagtgtgctcatctacaaaataggagtaa

SEQ ID NO: 882734 - DNA, 120 bp, Artificial Sequence
  ENSG00000287110_7 (sequence is synthesized)
acacagtagcgtttcccccttcctaggggtgccttgttttcagcttggctgaatgttggctgatcctgtatcacagaagttattccctggcttctctttggaacattcctctgaggttgt

SEQ ID NO: 882735 - DNA, 120 bp, Artificial Sequence
  ENSG00000287110_8 (sequence is synthesized)
caggctgatccctttatagcaagcaactttacagatgcagaagctaagactcagactaaaagcagcttgccctgctaggaaatgcagagctatgtctttaacatatgggaaaccctttta

SEQ ID NO: 882736 - DNA, 120 bp, Artificial Sequence
  ENSG00000287110_9 (sequence is synthesized)
cccaggacctggggcagtgtggtgctctatcctgggatctcctgcctcccagcagcatggcgaagaaagaacacaaatctttcagatctgtttccatctttaaacctctggcaccacctg

SEQ ID NO: 882737 - DNA, 120 bp, Artificial Sequence
  ENSG00000287110_10 (sequence is synthesized)
tcctgccctgccctttctctcagctgtcagctttgcttcccattccactgggaaaatccatgcagtcagatgagaacttcacaggcacagttaccccctccccctgcatatgtgcccaca

SEQ ID NO: 882738 - DNA, 120 bp, Artificial Sequence
  ENSG00000287110_11 (sequence is synthesized)
tgaagggtaatttcctttctctgcatcattaactgttctctctaatggatcttgagcccttaccattcaggcgtttgtccctaatggccatggaagtcagtagtgacctctctgttgtca

SEQ ID NO: 882739 - DNA, 120 bp, Artificial Sequence
  ENSG00000287110_12 (sequence is synthesized)
aatcatgtgatctgttctcagacctcatcctacttggcccatctttggcatctgacaccgttcatccttccaccctgttgacacactttgttctctggtttctgaatcacaattctcact

SEQ ID NO: 882740 - DNA, 120 bp, Artificial Sequence
  ENSG00000287110_13 (sequence is synthesized)
atactctgaatgttctaaatacttcactggctgatacttctgtgtccattgctggttccttcttggctcctcaactgctaaacactggccatgtttttcactagcacagttggagttgtc

SEQ ID NO: 882741 - DNA, 120 bp, Artificial Sequence
  ENSG00000287110_14 (sequence is synthesized)
tatggctcagaatgtggacatttcttttcctctacaaccatcccgtggatgacctaatttagtgtcctgactttaactaccatcaatatcctgatggctcacatttctcttgcagcgcag

SEQ ID NO: 882742 - DNA, 120 bp, Artificial Sequence
  ENSG00000287110_15 (sequence is synthesized)
attttcccctcaactctagtttttatatctgtctttgtactcaaaagctccatatagagatctaataggcatctaaaagtggcatatgcaaatctgagttccccatcccacccagtcctg

SEQ ID NO: 882743 - DNA, 120 bp, Artificial Sequence
  ENSG00000287110_16 (sequence is synthesized)
ttttcccacaagtgttctttatctagttaatggcgactcttattccacttgttcagaccgaacatatgcggtcacttgtgtcccctcttattctcctagtcaacatccaattgagcagca

SEQ ID NO: 882744 - DNA, 120 bp, Artificial Sequence
  ENSG00000287110_17 (sequence is synthesized)
agtccagtgctctctgccttcaagttagttatattgagaatgaccacttttaggcccctcctctgatactacattgggtcaagccagtgtcatctctcagcattactgggacttgggtta

SEQ ID NO: 882745 - DNA, 120 bp, Artificial Sequence
  ENSG00000287110_18 (sequence is synthesized)
attaggtaagatgaaacatgaaggattagaaataaaggctgaatacagacttaaaaccaggaatccagactaaacactcaaacatggagtccatcgtggccccagggcctttgcgcttgg

SEQ ID NO: 882746 - DNA, 120 bp, Artificial Sequence
  ENSG00000287110_19 (sequence is synthesized)
cattctctccatctggaacactctgcccattgcgttagttgttctctaaatgccttcaggcattctcagaaacgtcctgactttgtcttccttcatggtacatgtcatcacctgcctgtg

SEQ ID NO: 882747 - DNA, 120 bp, Artificial Sequence
  ENSG00000287110_20 (sequence is synthesized)
tattgtttccttatttttttctctttctttcctactaggctgtcagcccatcagaatggagacttctgcctgcttctccccttggtgtgccttggtttctggaacaggcccagcatgcag

SEQ ID NO: 882748 - DNA, 120 bp, Artificial Sequence
  ENSG00000287110_21 (sequence is synthesized)
tggggtctcagtgaatgtgcactgaaggagtagatactggagagcacaaacacgtatcaggtggcagcacaggaaaggtgcttgctcagagtacccctccctctgcctcctgacggaccc

SEQ ID NO: 882749 - DNA, 120 bp, Artificial Sequence
  ENSG00000268316_0 (sequence is synthesized)
gcttggttttcaactctatactttattctccaatctctttgcaattattcattttaaaagttctcaagtagtttttattagttttttttcaaaagttttaactctaaccagtgggagtga

SEQ ID NO: 882750 - DNA, 120 bp, Artificial Sequence
  ENSG00000268316_1 (sequence is synthesized)
taaactagggggcttacttaatcatggctggcaccatacattacatgtatttatttttaagggataaaacatccttgtattcctgggaacctgatcttgaagttcattcttttcatataa

SEQ ID NO: 882751 - DNA, 120 bp, Artificial Sequence
  ENSG00000268316_2 (sequence is synthesized)
gatctttctgaagtacaactaatattctcttggaatgggttgtggttgtcagtgtctgctccacaaccagtttggcccagttcttacccctcaaggtctctctccacaatcccacaccca

SEQ ID NO: 882752 - DNA, 120 bp, Artificial Sequence
  ENSG00000268316_3 (sequence is synthesized)
aatgtacccagcgctgttggggtccttgaccggatgcgaccagcatggggtacttgtggaggtttgcggtgtaagaaggcttcagggaatggtcagtggaatctgaagctgggggttagc

SEQ ID NO: 882753 - DNA, 120 bp, Artificial Sequence
  ENSG00000287116_0 (sequence is synthesized)
ggcagagggatgattgtcactaacacccaggaccagcagagggcagaagagagtagcaggaacctccagtggagcaaaatgagggactctcctctcagttaagcagctccaggactctac

SEQ ID NO: 882754 - DNA, 120 bp, Artificial Sequence
  ENSG00000287116_1 (sequence is synthesized)
ctctcatcaaggctgaccagaagcaagatgatggaagccaagagagctcctctgcatgctccactgtctaagctctgctctgcatctgccgtgattcttcttccaaacagaaaacaccgt

SEQ ID NO: 882755 - DNA, 120 bp, Artificial Sequence
  ENSG00000287116_2 (sequence is synthesized)
ctttttgactacatctgtcctcagagatggtgctgatggatccatttataatttatgtgaatttaaacctttgcaatttttacatggaataaaaggacctattttctggaaagaaaatgc

SEQ ID NO: 882756 - DNA, 120 bp, Artificial Sequence
  ENSG00000287116_3 (sequence is synthesized)
tgaacaagagctgagaacctggggcaatctaaggcaggggttcctccctaacacccctgctgtcagaagccagctggttggccatagatcacttcacctaacacccagtgcccagtcaca

SEQ ID NO: 882757 - DNA, 120 bp, Artificial Sequence
  ENSG00000287116_4 (sequence is synthesized)
tttgcccccaaattgtacaactcaagcttaactttcacatattttaagatagtgtcagccccttttgcaatatgtagatgatactttttgtttgtcatttaccatttcaaaaaaattaaa

SEQ ID NO: 882758 - DNA, 120 bp, Artificial Sequence
  ENSG00000287115_0 (sequence is synthesized)
ctcgggcctgcgtcgcatccaacttactccaagttttctggtgactcctacagggcccctttccgtccccccccccgctccccgccccccaagccttagtgagattgacagtcgcgtgga

SEQ ID NO: 882759 - DNA, 120 bp, Artificial Sequence
  ENSG00000287115_1 (sequence is synthesized)
ggaggcttttccaggcacagcctttctcatggtaatcagcccccggcatcacctcccggccgcggctgcgcccgctcggagcgcggctcgcggaccccggggaccggaaacagggcggcg

SEQ ID NO: 882760 - DNA, 120 bp, Artificial Sequence
  ENSG00000287115_2 (sequence is synthesized)
tgagaaaaccgtttggcttggcttggacccctgccgccccccacctcctccacacacacccagtccaggggtcccctttatcaccctttgcttgcaactccaaaagaagttgcccacctc

SEQ ID NO: 882761 - DNA, 120 bp, Artificial Sequence
  ENSG00000287115_3 (sequence is synthesized)
ctgagtcacaacacaaggtcgaataattcctctagatgaaagatcagtttcatttcaaaacgagaataggttcctttttttattttctccacatggtacaaaataaacagaatttgcttt

SEQ ID NO: 882762 - DNA, 120 bp, Artificial Sequence
  ENSG00000287114_0 (sequence is synthesized)
accctgtgtggactgaggccaccatgtgcacggttttcagctatgcctcattcgcttgctgtgtgaatctgggctgcagggcctgctgctgtgtgccacaggccagtgccctgcagtgca

SEQ ID NO: 882763 - DNA, 120 bp, Artificial Sequence
  ENSG00000287114_1 (sequence is synthesized)
attgtacctgaggacccaaggtggccagggaagccccaggtgcgacttggcaggggaagcaggggctgtggacggatggagagctgtcatgtggaaaggcagtgtgtccccaggccgtgg

SEQ ID NO: 882764 - DNA, 120 bp, Artificial Sequence
  ENSG00000287114_2 (sequence is synthesized)
ccaggcctctccagaccaggcccaccacatactgcctgtgcaacctcggaaacctcctgggaacatccaccatatgccaggcatagtgtcagacaggaggggacagagaaaaacaagatc

SEQ ID NO: 882765 - DNA, 120 bp, Artificial Sequence
  ENSG00000287114_3 (sequence is synthesized)
aacaaccgccctgcccttgtggagctggcgttctagtaccggagacaaaacaaggtgcttccaaggaggaagccgtgctcatcagacacacacagtagatgagggagtatggttgaaaca

SEQ ID NO: 882766 - DNA, 120 bp, Artificial Sequence
  ENSG00000287114_4 (sequence is synthesized)
agacttgtcctgagttgatatggaagctgggtaatggatacatccaccttcattatatgattttctctatattagtaagaaaacaaaagcttttattaaaaattttaaacatgatataaa

SEQ ID NO: 882767 - DNA, 89 bp, Artificial Sequence
  ENSG00000254101_0 (sequence is synthesized)
ggttccggcccgcgcctctccctccacacctccccacaagctgagggagccggctgcggccttctggcgggctgaagggctgctcaagc

SEQ ID NO: 882768 - DNA, 75 bp, Artificial Sequence
  ENSG00000254101_1 (sequence is synthesized)
catatagattgccaatctatttgtgaaccaggtttgctggagtttggatttactactgagtcatatttggagcat

SEQ ID NO: 882769 - DNA, 120 bp, Artificial Sequence
  ENSG00000254101_2 (sequence is synthesized)
gctggagtttggatttactactgagtcatatttggagcatgctggaatcttacaactgagattaccgagtcagaaacttgcaaacatgagtaacatggccctgctctggagactactggg

SEQ ID NO: 882770 - DNA, 120 bp, Artificial Sequence
  ENSG00000254101_3 (sequence is synthesized)
aacacaaacacagccatttaagacatctacctgcttctcctttgccttccatcatgactgaaagttgtctgaggtctcccagccacgtgtcctgtacagcctgtggaactactttaaaga

SEQ ID NO: 882771 - DNA, 120 bp, Artificial Sequence
  ENSG00000254101_4 (sequence is synthesized)
agaatcagaaaatggagactgggattggaagcagagatccgatggccaaattacagtctgccactgaagctaacacacctatggataacccaacctgtaaactcaatgtggaacacagtt

SEQ ID NO: 882772 - DNA, 120 bp, Artificial Sequence
  ENSG00000254101_5 (sequence is synthesized)
tgagaaaagaagtgagaagattcaattttgaagttggatcactctcctacaggcaatgaagaccacatcactgatggctctcctgcaattctattacctgtttgaatgtgaagatgggat

SEQ ID NO: 882773 - DNA, 120 bp, Artificial Sequence
  ENSG00000254101_6 (sequence is synthesized)
gaagtagcaagaaggacctcacaaaatacctcccccaccaccccatcatcttgcactttccagtctgcagaactccttgttccctggcaacaaatcccagagtaggggatggtggaagaa

SEQ ID NO: 882774 - DNA, 120 bp, Artificial Sequence
  ENSG00000254101_7 (sequence is synthesized)
gtttttcctttcccaaaataacaccagaagcaactattctgaagatccttttaacaggcaatgaatatgcttcatgaaggcactttgatccccagagagtcctgtctgagttgaatttct

SEQ ID NO: 882775 - DNA, 120 bp, Artificial Sequence
  ENSG00000254101_8 (sequence is synthesized)
tggaacacaaaggcacggattctgccctcaagtcggtcaggatgcatgaagaaagcacggatgacatggcactgtggtgactgtgacagacacaaaataccaagaaactgagtgtggaga

SEQ ID NO: 882776 - DNA, 120 bp, Artificial Sequence
  ENSG00000254101_9 (sequence is synthesized)
caccacccagagagaggacaaactctgtcctggtggggcagaaccaggttctcaggagcattgacatctgagtttgtactttgtttgaagatggagagaagttagttgtctgattggagg

SEQ ID NO: 882777 - DNA, 120 bp, Artificial Sequence
  ENSG00000254101_10 (sequence is synthesized)
gtgtggaaaaagggtttgcctggatgagggtgacatatgtggaaaggtgagcagtgatgagctcttgcagattcttaggggcaagtgaagaaaagtctagttcgaatgggagcagagtca

SEQ ID NO: 882778 - DNA, 120 bp, Artificial Sequence
  ENSG00000254101_11 (sequence is synthesized)
gtgctggtgaggggctttttaatgtttttattatatggttgttttctatacatcttttatttccatttatttgagattttagctacttaaaaagcctcttcctaatttcaatagattttc

SEQ ID NO: 882779 - DNA, 120 bp, Artificial Sequence
  ENSG00000254101_12 (sequence is synthesized)
taatctttctggtgatgtagctttggtatttgatagcccagacataatcagaaatgtatttggttctgagcactgttgattttaaactccaatttgcatttttatttaattatatttgat

SEQ ID NO: 882780 - DNA, 120 bp, Artificial Sequence
  ENSG00000254101_13 (sequence is synthesized)
ggctatgccttcctttttatattgctgcattgctatccaagccaatactcacccctttcctgaataccttggaatccaagtgtaacctctaacagaaataaagaactttggacaaagcaa

SEQ ID NO: 882781 - DNA, 120 bp, Artificial Sequence
  ENSG00000254101_14 (sequence is synthesized)
ctaatacatcatgaacttgcagaattttggatatttgacaaatctgaggaattgaagagacgggcacctcaccttttctgagcagaagagttcatttgatgaaacctgaagtagagagca

SEQ ID NO: 882782 - DNA, 120 bp, Artificial Sequence
  ENSG00000254101_15 (sequence is synthesized)
ggggcttctccagcatatggcctttggacttcatctataccatccgcacttctgggtctccagcctgctggcccacactacagattttggacttcccagcttccataatcatgtaagatg

SEQ ID NO: 882783 - DNA, 120 bp, Artificial Sequence
  ENSG00000254101_16 (sequence is synthesized)
gtgaggcctccccagtcatgtggaacttgactcagagatgatttcctcttcagaaaacagaagaattttctgacacatttatccagattggatgatatggagatgaacaccaggactatt

SEQ ID NO: 882784 - DNA, 120 bp, Artificial Sequence
  ENSG00000254101_17 (sequence is synthesized)
tggatgatatggagatgaacaccaggactattttagaaactgcatgttgaagaccactgagatataaaacttagaaaaaaaaaggttctgaatcaatgccttgtgaagacagttgcacag

SEQ ID NO: 882785 - DNA, 120 bp, Artificial Sequence
  ENSG00000254101_18 (sequence is synthesized)
ggtaccaccaggctgaaatccaggtgttcaccaggacttttcttcacctggaggcccagctggagaagaatctgcttccaagctccatcagactgttagaaaattaacttcctgtggcta

SEQ ID NO: 882786 - DNA, 120 bp, Artificial Sequence
  ENSG00000254101_19 (sequence is synthesized)
taggattcatggcacgttgcttcttcaaagccagcaatggaaagagtcttctgctccaagaatgacatgtagtcactcagaaagggatcatatgactagctttcagtactgttaccatat

SEQ ID NO: 882787 - DNA, 120 bp, Artificial Sequence
  ENSG00000254101_20 (sequence is synthesized)
gcgagtgttcatgggaacagccatgcctggataaaccagataaactgaggaatcaaaaggcatattcagaccaagactaaagagaaccttcttcacctcctccatacttcttcaataaga

SEQ ID NO: 882788 - DNA, 120 bp, Artificial Sequence
  ENSG00000254101_21 (sequence is synthesized)
ccactcaggacaccttaactgccttgctgcctttctggaagagaacaatccaataatgagaacatccttgaggatcacagagtccagagtccctagagagagggagagcaatcatgtctt

SEQ ID NO: 882789 - DNA, 120 bp, Artificial Sequence
  ENSG00000254101_22 (sequence is synthesized)
ctagacggcaagttacttacacatatgtctagagaagaacaatccaataatgagagcatccttgaggatcacagagtccagagtcccagagagagacaacaatcatgtcttgtagatagc

SEQ ID NO: 882790 - DNA, 120 bp, Artificial Sequence
  ENSG00000254101_23 (sequence is synthesized)
gagttaagagacatcagtcgcaactacttcaggctgacttgtgatcagagaccacccaaaatgacagcacgtagaaagtcctgtgtggccctgattgcacctataggaccaggtgttaga

SEQ ID NO: 882791 - DNA, 120 bp, Artificial Sequence
  ENSG00000254101_24 (sequence is synthesized)
gaaatagctggcttctatccaagttaagttcaagtctgtaggacaaggcattagaaaaatcattggtctgtatttgagttaaactcaagtctgcaggagggcttccttttgatgctcttt

SEQ ID NO: 882792 - DNA, 120 bp, Artificial Sequence
  ENSG00000254101_25 (sequence is synthesized)
gccctcaaggataagaaatggaaggtatgaactgtgggccttatatgggactatacttagaaggcactcgggaaacagtcagtgaaggcagaaaagaagggggacttgtgaaaccaaatc

SEQ ID NO: 882793 - DNA, 120 bp, Artificial Sequence
  ENSG00000254101_26 (sequence is synthesized)
aaagataatttctccatgttttggcttggctgatttggtattacttaggtgacaagagtagagaagggaaatcaaagagtagaaagggtaatcaaaagtgatattcagatccttgagata

SEQ ID NO: 882794 - DNA, 120 bp, Artificial Sequence
  ENSG00000254101_27 (sequence is synthesized)
tccattaggcatctacatagagatgacttacgggcagttgtgcacataaatctggacttctagagagaggtcagagctggaagctctgggttaggaaaataagcatgccaatgtcattta

SEQ ID NO: 882795 - DNA, 120 bp, Artificial Sequence
  ENSG00000254101_28 (sequence is synthesized)
aagcccaagggctcgcaaggttagctaaggagagtattctgagagagaggaaagggggctagatcaatcttggtcctatgctggtattcttacagttagggctttaatggagaaagaacc

SEQ ID NO: 882796 - DNA, 120 bp, Artificial Sequence
  ENSG00000254101_29 (sequence is synthesized)
agagaagatgctgagaaaaagtcaccaagaatctggtgtgtaaaaaggatagggtggtgtactggaagtcaacaacaacaacaaaagtgttttgaggcagagggggtatttattacattt

SEQ ID NO: 882797 - DNA, 120 bp, Artificial Sequence
  ENSG00000254101_30 (sequence is synthesized)
aatgtggctgtaatgccattaaataaaagagcagaaaagcaaccattgaatttggcaaaatggagggaattatgtccttggtaagaacatatttagtagagaggtagagggaaaaaccta

SEQ ID NO: 882798 - DNA, 120 bp, Artificial Sequence
  ENSG00000254101_31 (sequence is synthesized)
atggaagttaattgaaagtagaatgtgagatcagcaagtggaaaaagggactatggtcaactgttttaataatgttttcaatgaatgggactcaaattttgaatgaccatgaactttgct

SEQ ID NO: 882799 - DNA, 120 bp, Artificial Sequence
  ENSG00000254101_32 (sequence is synthesized)
gttagtagcatcttactgacatcttagagatttgctgccagaggggaacagaaccaaaacgtagtaaattttctcagttccagttaaaaaaaaaaaaaagttgggataccatcttgggtc

SEQ ID NO: 882800 - DNA, 120 bp, Artificial Sequence
  ENSG00000254101_33 (sequence is synthesized)
attaatcataatcaagcactccaaaagaatctggaagcttccagataaatctaaggctgggatggaagaaagagcatttctcagatgcggactgacatgaggggaagggatgtttttggg

SEQ ID NO: 882801 - DNA, 120 bp, Artificial Sequence
  ENSG00000254101_34 (sequence is synthesized)
tagaggaggagtggtgctggataaataaagcagaatataaggaccagataattggttcactaaatgtacgtgacaactatgtgaggcagataggggagtatttcacagtttatgcaggaa

SEQ ID NO: 882802 - DNA, 120 bp, Artificial Sequence
  ENSG00000254101_35 (sequence is synthesized)
gagacaggctcctgcagctccccagtgcagagtataaattcatacccagatgtaaagggcttccaagagcttatactcatttcaaatagttatataatgtcatgcattgaaagtcaatgc

SEQ ID NO: 882803 - DNA, 120 bp, Artificial Sequence
  ENSG00000254101_36 (sequence is synthesized)
tatatttaaacagccgtagaaacagaagaagtggatctttaggagttaagcagttgttttctggaaactctcctgtgccctatcaatgatgccacatgggtgctatttactttgcccacc

SEQ ID NO: 882804 - DNA, 120 bp, Artificial Sequence
  ENSG00000254101_37 (sequence is synthesized)
catgaagaccacctgagggtcaggaataggtgacattcttttctagggatctcagcagagttctcttcatgtatgctctgctaaaattgttaaaccatgaaaagtacttttttgcataaa

SEQ ID NO: 882805 - DNA, 120 bp, Artificial Sequence
  ENSG00000254101_38 (sequence is synthesized)
taagcttttaaaatcctattttgctgtgtttctcttctattaatttaagcaagcagctcaagatctcatgaactcaagatagtacatcttctttacttggtcatgtctagactcatttat

SEQ ID NO: 882806 - DNA, 120 bp, Artificial Sequence
  ENSG00000254101_39 (sequence is synthesized)
atgctttgagaggaaaaagtgaaaagcaaataatcactcttggttctgattcattattaagtgtctgtgaatgtgtgtgtgtgtctttttctcaggcaacaatatgataatgccatattt

SEQ ID NO: 882807 - DNA, 120 bp, Artificial Sequence
  ENSG00000254101_40 (sequence is synthesized)
tatataagagaataagcctatggtcatagaagtattatttaaagaaaaacacacagtaacaaaagtgatttggggttatctggagctacattttattttgtatgtgatataattatatgt

SEQ ID NO: 882808 - DNA, 120 bp, Artificial Sequence
  ENSG00000254101_41 (sequence is synthesized)
ggacttgattttgataatctagactctcctgtctataaaactgctgaaatgtcaggccctattttgtatttgccttgtcctggtagtttaagatagtgctgatttctaagggtagcttgt

SEQ ID NO: 882809 - DNA, 120 bp, Artificial Sequence
  ENSG00000254101_42 (sequence is synthesized)
ggaagtgaagaaattatgagagtatcagatttgttgcttagtgtatgctcagcctcttagattacacattgagctaatcattataatttgttgtgagaaaataaatatttttcaactcca

SEQ ID NO: 882810 - DNA, 120 bp, Artificial Sequence
  ENSG00000254101_43 (sequence is synthesized)
gtctgattcttgaataataggattgggcagatcaaggctgggcctttacagtgacctgctgtacatgtgtgtggttaatctacagtcagcatcacatgaaggcagtctagtgtagcaaaa

SEQ ID NO: 882811 - DNA, 120 bp, Artificial Sequence
  ENSG00000254101_44 (sequence is synthesized)
ggaaatggagtttggattccaacagtttggagtcaattgagttacttctgcatcttactacttctttgatttgtggtatattatggcttctttgggtcaagttttctgattcttaaagct

SEQ ID NO: 882812 - DNA, 120 bp, Artificial Sequence
  ENSG00000254101_45 (sequence is synthesized)
gcaatgataatatgtaggtttaaggattttcatgaactttcagaaaattatggtaaatagcagtgccagttcagcatatgggagacccctggaaggatgtttctttcttactatgctggc

SEQ ID NO: 882813 - DNA, 120 bp, Artificial Sequence
  ENSG00000254101_46 (sequence is synthesized)
ttttttattttctgtctgcttatgtcaaatggtgatcatagaagcatgaacaccagtggaattatggtcatcctcgtaaacagagctttaagaaatcagtaaagattgacattacgagta

SEQ ID NO: 882814 - DNA, 80 bp, Artificial Sequence
  ENSG00000254101_47 (sequence is synthesized)
cagagctttaagaaatcagtaaagattgacattacgagtacacagctcttcttgttcaactttccaaaggataaaaaatt

SEQ ID NO: 882815 - DNA, 85 bp, Artificial Sequence
  ENSG00000254101_48 (sequence is synthesized)
gtcacgaaaaaaaaactgtcaaaattgtactaaaacaaacaaaaatatatgatctgtattttaccgtgtatcatgtcataatagc

SEQ ID NO: 882816 - DNA, 120 bp, Artificial Sequence
  ENSG00000254101_49 (sequence is synthesized)
tatatgatctgtattttaccgtgtatcatgtcataatagcagcacaatataaacatcagtatttttttaattatgaataattaatggctgccctgaccaaaaagagtatggtctcttcat

SEQ ID NO: 882817 - DNA, 120 bp, Artificial Sequence
  ENSG00000254101_50 (sequence is synthesized)
acattgtcttcatgctgtatctaagggatagtgagtattccctgttatgctctatatttggctatactgatatcatgagatttcacaatttctgccctgaatgtgaatggcttataaaat

SEQ ID NO: 882818 - DNA, 120 bp, Artificial Sequence
  ENSG00000254101_51 (sequence is synthesized)
ataatctccctgagcaatttgaatccagctttttatcacttcacagcagagcagcatttgcctgagattttctttttaatgatttattaatgcagttgtcatctgacagtttgagtattt

SEQ ID NO: 882819 - DNA, 120 bp, Artificial Sequence
  ENSG00000254101_52 (sequence is synthesized)
taattttgcttgatcttaaagctacttttgacactgttgattataacatcctcctggatcactttgaatattatgtcagcttagctgaatcaactttaagtgggtttcactcgtgtttgc

SEQ ID NO: 882820 - DNA, 120 bp, Artificial Sequence
  ENSG00000254101_53 (sequence is synthesized)
tcaagagcaatcacccttcctgatgagaaggtgatttccttctttccttctcctgcgctgacataccatgtggaccctcgtttgagagacctgcattcatgcatgtctccacgcagtttc

SEQ ID NO: 882821 - DNA, 120 bp, Artificial Sequence
  ENSG00000254101_54 (sequence is synthesized)
tccagacaaggctgtagtcctctgaagtagaagaaaagtggaagggttaagcaattgactatcaatcaataatcttttatgaaagaagagatggtgcagcacacgcatgcccaatattaa

SEQ ID NO: 882822 - DNA, 120 bp, Artificial Sequence
  ENSG00000254101_55 (sequence is synthesized)
gagagagaagacatttattgaggcaagcagctggagtggacctgcccccatcaccaggccagcttcccacctgcacgtgcagctctttcttcttttgcaggaggctggctctgctcatta

SEQ ID NO: 882823 - DNA, 120 bp, Artificial Sequence
  ENSG00000254101_56 (sequence is synthesized)
gacatgcaacaaagagctggcctgtggagcacacatccatattcataactcaagtcagctggaaagttgtacatttttctttctgggaagtcatggcgacaaagactgaagacccaggca

SEQ ID NO: 882824 - DNA, 120 bp, Artificial Sequence
  ENSG00000254101_57 (sequence is synthesized)
agaaatgcagagaaaaatatggaatagaaatatgagggaagatattagcaaactggctacatcttttatgacaaactcaactgattacatcttttccaagaacatcttcagaggtttgct

SEQ ID NO: 882825 - DNA, 120 bp, Artificial Sequence
  ENSG00000254101_58 (sequence is synthesized)
gaaggctggactggcatggacatcatttgatgagttcgtctcctcttaacaatcaaagcctgttttccagtgcgaataaactgttgccttatatattgttttcccatttttatagttgtt

SEQ ID NO: 882826 - DNA, 120 bp, Artificial Sequence
  ENSG00000254101_59 (sequence is synthesized)
tactgcaaaaaagagtctggtacaagttactttgctaaaaccttgataaagttttattctacgattcttcaatcaatgtttctgttttgtttattctgttatctctgttgtgtcatacca

SEQ ID NO: 882827 - DNA, 120 bp, Artificial Sequence
  ENSG00000254101_60 (sequence is synthesized)
taattctctcattaatagctcatattctttttcatagctattcaattctttagcagtttctacttttatgtttgggagaaaattgaaagcttgatttcttattttgacaagttttctaaa

SEQ ID NO: 882828 - DNA, 120 bp, Artificial Sequence
  ENSG00000254101_61 (sequence is synthesized)
ggtttcagcatgcaatattttttttcatagccttacagtttgtaatagttcatctgattgtaaagctcttacaatctttcctgattttaagtcattttaacaacgactttctctcttttt

SEQ ID NO: 882829 - DNA, 120 bp, Artificial Sequence
  ENSG00000254101_62 (sequence is synthesized)
tatttttaagaaacaatgtcctccttttcatttgttgagaactctactcagcttttaaaaaacttcctgtgtatgtaccttaattcttttgacaataaaacattactctgaatattcaaa

SEQ ID NO: 882830 - DNA, 120 bp, Artificial Sequence
  ENSG00000254101_63 (sequence is synthesized)
gacaatggtcatggaactgaacagatgagcctctgattcctgttctgccactgataaaccctatggtctttgtcatttactccccttcctgggcctccctagggagtaatgaggctagaa

SEQ ID NO: 882831 - DNA, 120 bp, Artificial Sequence
  ENSG00000254101_64 (sequence is synthesized)
gaaatgatacctgggaaggtggtacagttgaagaaagagctcaactctggcaaagggagaccaagagtaacctctggtgtggaagttggctgagcactcagtgcctgactgtgctatact

SEQ ID NO: 882832 - DNA, 120 bp, Artificial Sequence
  ENSG00000254101_65 (sequence is synthesized)
ttgtggaagcacagacaaaatcaatatcagtatgccacctacaaaagaccaaacagcccttctcttggccaaaatgagtgatgtctacttctttactaatgaagttttatttttgttcta

SEQ ID NO: 882833 - DNA, 120 bp, Artificial Sequence
  ENSG00000254101_66 (sequence is synthesized)
gtcagctctccatccagatgagattttttgagatacccaatcttataattgcctccagctttctgacagcatctaattttggcaaactctcccctccttctgtcctctcccaaatgacct

SEQ ID NO: 882834 - DNA, 120 bp, Artificial Sequence
  ENSG00000254101_67 (sequence is synthesized)
aacctaaaccccaaatctacagaaagttatttctattaccatcttactgagacaccccatgattcctcatgatatgtgttatttgtctgtgcaacaggtaataaattgaacttgttcact

SEQ ID NO: 882835 - DNA, 120 bp, Artificial Sequence
  ENSG00000254101_68 (sequence is synthesized)
ttggatatagctgctactctttcgtcttggaccccagaatgaacgtgtggatctccagcctccccactaacctgtgggcctgagaacaagagctccctgttgcactgctgactgatacac

SEQ ID NO: 882836 - DNA, 120 bp, Artificial Sequence
  ENSG00000254101_69 (sequence is synthesized)
atagtgcaagcacagctggccctccatacagcttgggaagatggatcaatatggcctgtagagtaagaagacctatatccagatctgcattttactgttttctctggggggattggagat

SEQ ID NO: 882837 - DNA, 120 bp, Artificial Sequence
  ENSG00000254101_70 (sequence is synthesized)
aatgctgcagaaaagccaagtacactcccaaggataggatttggcaggagcagctgcgacagtgagctggtggatccctggccaggagggagcacaatgataaaagattcaggactgtca

SEQ ID NO: 882838 - DNA, 120 bp, Artificial Sequence
  ENSG00000254101_71 (sequence is synthesized)
gaaatgctggatgctgtagaaaaggattggatgatgccttctcactggccccagggctcttggaatttgttctagagaagcacaaaaagaagggagcaggtgctgggagccacatctcaa

SEQ ID NO: 882839 - DNA, 120 bp, Artificial Sequence
  ENSG00000254101_72 (sequence is synthesized)
aattatttactgagaacttgtgaatgccaagagctgatcatgtgtggctggaatggtaagaggttgtgtgaggaatatgatctaaattagacctggtaccatcctttaagagaccttatg

SEQ ID NO: 882840 - DNA, 120 bp, Artificial Sequence
  ENSG00000254101_73 (sequence is synthesized)
gtaataaccagagtgagcaaaaatgcagcactgggaatcaatgcttaggataggatatgttgtagaacactccaaactctgggttacaaattagaatactaaaatccctattacacagat

SEQ ID NO: 882841 - DNA, 120 bp, Artificial Sequence
  ENSG00000254101_74 (sequence is synthesized)
agtttgtatggctatttaaagatatcatgccacacctctgctcagcatcagtgtcctgctctattcatacctgcatgaaaataagttcactttatttgccactgaataggtttccataat

SEQ ID NO: 882842 - DNA, 120 bp, Artificial Sequence
  ENSG00000254101_75 (sequence is synthesized)
tagaagggaatttttactcctccctgcaggaggggaagatataaactgaacaatccatgactgaagcagaaataacttcactaatggctgaatttggggagagataaagagcatgtccaa

SEQ ID NO: 882843 - DNA, 120 bp, Artificial Sequence
  ENSG00000254101_76 (sequence is synthesized)
atgtccaactctgtctcttctctctcctctttcaaaactgcttgtccatagagagggtgaatttttccattcacccattgatatagtcagtatatttgtccccacccaaatctcatgttg

SEQ ID NO: 882844 - DNA, 120 bp, Artificial Sequence
  ENSG00000254101_77 (sequence is synthesized)
atttgcatctagttatctggtcttccaagctagctttttcaagtatttttacctttacacataaagttctattggagatgtacttcacccttttctgcactaaagagtttaatttttcaa

SEQ ID NO: 882845 - DNA, 120 bp, Artificial Sequence
  ENSG00000254101_78 (sequence is synthesized)
aggggaacacaagtcaggacacatcatcaactctaagatagatcttgatttcaaaaatatgctggtgctgtgttcgtaggtttgctttgtctccagcaccccactggtcaataggaacaa

SEQ ID NO: 882846 - DNA, 120 bp, Artificial Sequence
  ENSG00000254101_79 (sequence is synthesized)
gggagcaattttcagagttattagctgtgtttgagctgtgctgtctgccaaaagaagaagtggcttttggacgcagattttacctcggatgtaatgtggagagacacgttgacacctccc

SEQ ID NO: 882847 - DNA, 120 bp, Artificial Sequence
  ENSG00000254101_80 (sequence is synthesized)
tgactagcaaaactctcatacctttcccaagagaatcaagctggatatttcacatcccaatgcatcctgttcaaaatctaatatggagcatctccaagaggtgctcagcttttccatcag

SEQ ID NO: 882848 - DNA, 120 bp, Artificial Sequence
  ENSG00000254101_81 (sequence is synthesized)
atctggataggtcttcctatcattcaataatttattttaaagaaaaagaaattgtctatcctccaatcttcctcaattttgaagaaattctaaatcagaaagtgaatgaatgagaaacca

SEQ ID NO: 882849 - DNA, 120 bp, Artificial Sequence
  ENSG00000254101_82 (sequence is synthesized)
cagaagaaactggtctgcagcaatttggatgtcccactgaacaggctttatgaaggtcatccaccctgagaaagcaggtgcatttcctaattaaatcctgtttctgctctttggaagaaa

SEQ ID NO: 882850 - DNA, 120 bp, Artificial Sequence
  ENSG00000254101_83 (sequence is synthesized)
tttcagtggagagagaagcgtctgtggaaccaagagaggaaatgtgagattctgagccatttgtttatgtgtttagttgcgccatatgtttgtccctggctctatcctcaaggtttgctg

SEQ ID NO: 882851 - DNA, 120 bp, Artificial Sequence
  ENSG00000254101_84 (sequence is synthesized)
gagtttggatttactactgagtcatatttggagcatgctggaatcttacaactgagattaccgagtcagaaactgaaagactacatgaggacataacaagaagatggtcatctacacgcc

SEQ ID NO: 882852 - DNA, 120 bp, Artificial Sequence
  ENSG00000254101_85 (sequence is synthesized)
agggagagaattcttaccagaaaccagctgtgatgaactttagtctgagactttccagcctccaacactctcagaaaatgcatttctggtccttaaaacccctagtcagtgatatttgtt

SEQ ID NO: 882853 - DNA, 120 bp, Artificial Sequence
  ENSG00000254101_86 (sequence is synthesized)
gtggtagtctgagcagactaagaaatccactcttttgccctttgctaacttctacagtttaatgtaaatgccagtttaattgtatcaaccaaaaatttccatggctattttttttaaaca

SEQ ID NO: 882854 - DNA, 120 bp, Artificial Sequence
  ENSG00000254101_87 (sequence is synthesized)
tgtgttttccagtcttaatacattaatacaattcagattctattatgtgctaattaaatttagatgatttatatgatggtcttctgaactacttctcaaataaaagtagtacatcctcct

SEQ ID NO: 882855 - DNA, 120 bp, Artificial Sequence
  ENSG00000254101_88 (sequence is synthesized)
atgtctttttaatgccaaataaaatatatatttattcaattactgctgtagaaaaattgtcaagctttcttctagtaatacaaaattagatactaaaagtcccttatttaagacccatga

SEQ ID NO: 882856 - DNA, 120 bp, Artificial Sequence
  ENSG00000254101_89 (sequence is synthesized)
gttacagataacaacccatctagtgatagaggcccattgctttcagaaatttaattaaaaataagtggacatcattggttccaactcctaccttcatatttttttaatacaagtcaatta

SEQ ID NO: 882857 - DNA, 120 bp, Artificial Sequence
  ENSG00000254101_90 (sequence is synthesized)
aatcactaggtcatattgggaattatatcatttttaaaacaacattagacttgtcatctataagcttctgcctggactcagctaactaactcttcaaatgtccaaagctttgcatgattt

SEQ ID NO: 882858 - DNA, 120 bp, Artificial Sequence
  ENSG00000254101_91 (sequence is synthesized)
cctagtaaattagcctgaaacaatctgtaagagacaataagagtatgatgtgattcttcttgtgaaatctgatttgaagctacacttaggagagaaagtagagaatgagaaaattataca

SEQ ID NO: 882859 - DNA, 120 bp, Artificial Sequence
  ENSG00000254101_92 (sequence is synthesized)
gatgtttcaaaatcgtgttgcaaatttctgtatggattagttgaaagaacaatggccttaagattgacgaatacattaacttttctgattctgccactaaataaaaaagcctttgccctt

SEQ ID NO: 882860 - DNA, 120 bp, Artificial Sequence
  ENSG00000254101_93 (sequence is synthesized)
gagcatgctggaatcttacaactgagattaccgagtcagaaactgttaacaaatagaattgttgaagacatcataaaggtcagatgaatggaggatgcaggtctcccactctccagttgt

SEQ ID NO: 882861 - DNA, 120 bp, Artificial Sequence
  ENSG00000254101_94 (sequence is synthesized)
tgcagaagaggtgtgcttgggccatggtgctctgctggacgtgctgtgggaccccaactccccacaccacaccaatgctcccttcttccaagcaaatgccaaagctgacttatcagtgac

SEQ ID NO: 882862 - DNA, 120 bp, Artificial Sequence
  ENSG00000254101_95 (sequence is synthesized)
ggcacatccacacttctggggagctgggtcgtctgactgtaggagttgcctgtgaatgcctgctgcccagaacctgacggtcttgagaccagtgggattttacacaggggggaagacacc

SEQ ID NO: 882863 - DNA, 120 bp, Artificial Sequence
  ENSG00000254101_96 (sequence is synthesized)
atccatgtgggaggatactgatccccagcacagtgccactggctgagtgagtatatgtgtgtggggtgattcaagctatccagagtgagcataaggatcattgctggaaagacctactta

SEQ ID NO: 882864 - DNA, 120 bp, Artificial Sequence
  ENSG00000254101_97 (sequence is synthesized)
aactgtaggacatttgagttgtgaaaagagtgacacaaatgaaaaaaattaactggagtttattcattcaatagtatcttcatgacaatgttgagtagttgcatttcctatgaaagaccc

SEQ ID NO: 882865 - DNA, 120 bp, Artificial Sequence
  ENSG00000254101_98 (sequence is synthesized)
ctgctttgatttggtgttctccaatattattaaggaagaatatatactctctgtgtgtgtgtgtgcgtgcatgcgtgtgtgtgtgtgtgtgtgttcatttcttgatatacctagcaagtc

SEQ ID NO: 882866 - DNA, 120 bp, Artificial Sequence
  ENSG00000254101_99 (sequence is synthesized)
agcaagtctgttcctggtgtttcccaccaaataatcgtaatttacatggtgtagttttatcactgtaaatgataacttattccaggactaagttataaattgaaagtaaggacagagcct

SEQ ID NO: 882867 - DNA, 120 bp, Artificial Sequence
  ENSG00000254101_100 (sequence is synthesized)
atatggactggatgttagtgttcctccaaagtgtgtatggtgattacatttggagatagggcctctaaggaaagaattaaggttaaatgagggcatagcagtgggatcctgatctcatgg

SEQ ID NO: 882868 - DNA, 120 bp, Artificial Sequence
  ENSG00000254101_101 (sequence is synthesized)
gaacagtgtcctaacaagaagcaatcccagagagctcgctctctctctctatcttgctcttgctctcactttctccttctctctctctctctgtctttatgcacacccattgaggaaaga

SEQ ID NO: 882869 - DNA, 120 bp, Artificial Sequence
  ENSG00000254101_102 (sequence is synthesized)
catgctggaatcttacaactgagattaccgagtcagaaactgcacttcctgattgcaaagacaaatatgcctctttgggtccatcatgaggaggcatcaaggacttcttgccctgtcctt

SEQ ID NO: 882870 - DNA, 120 bp, Artificial Sequence
  ENSG00000254101_103 (sequence is synthesized)
ggggcttctccagcatatggcctttggacttcatctataccatccgcacttctgggtctccagcctgctggcccacactacagattttggacttcccagcttccataatcatgtgcttcc

SEQ ID NO: 882871 - DNA, 120 bp, Artificial Sequence
  ENSG00000254101_104 (sequence is synthesized)
catttctacagccggtttactgcggtctcctcatgaacatgttgtcatcacgcccagtgtaactgctccctccctgcaggagtttactctgctacatggataagctaacaaaggctcatc

SEQ ID NO: 882872 - DNA, 120 bp, Artificial Sequence
  ENSG00000254101_105 (sequence is synthesized)
acatggagtccgggctccactttcaacacccgaaccaaggaacatgtctacacaaacaatggattcactgacgctcaccatgaccacagcctgtttttcccaacctcaagcttttctgac

SEQ ID NO: 882873 - DNA, 120 bp, Artificial Sequence
  ENSG00000254101_106 (sequence is synthesized)
ttttcaaacagaagtcacttaagatggcagaggagtccctttgttatctgctcatcccatttctccagcttcatttcctgccattccttatttcttcctattttcaggatgatgtttctt

SEQ ID NO: 882874 - DNA, 120 bp, Artificial Sequence
  ENSG00000254101_107 (sequence is synthesized)
ctcattcagatctttacagaaatctattctctgtctgtagtcactgaatttatttttcctacgcagctagaatgatctttcaaaaatataaataatatgtccctactttagagacatcct

SEQ ID NO: 882875 - DNA, 120 bp, Artificial Sequence
  ENSG00000254101_108 (sequence is synthesized)
gagattctgtttcaccttcagcataaagggcaaacatcttagtatgggagaagagcctgtttatttcctaatgcctatgagtctgcagcctcatctcctgaaagcccctatgcaaaacat

SEQ ID NO: 882876 - DNA, 120 bp, Artificial Sequence
  ENSG00000254101_109 (sequence is synthesized)
atgttccagcaattttgagctacctacttttccccaaatatgctatgttgcacttctcccattccccgcttcacaaaatacatttacaatgttccagcctgttccaaaagcaaaccctga

SEQ ID NO: 882877 - DNA, 120 bp, Artificial Sequence
  ENSG00000254101_110 (sequence is synthesized)
gggccatattacatttctactttcattccttaacccccttcacacagaaaagattcccaacccctctggatttcatgagagtgttatctttagaattctgttttctccccatgttttctg

SEQ ID NO: 882878 - DNA, 120 bp, Artificial Sequence
  ENSG00000254101_111 (sequence is synthesized)
ctctcctttagtgtgtgaccttattatttatttttcagaattgttgaaacgagcaaaatcagattctgtttccataattggcagtgacactaaagaaaccgcattgcatgccgttgttga

SEQ ID NO: 882879 - DNA, 120 bp, Artificial Sequence
  ENSG00000254101_112 (sequence is synthesized)
gtcagtctttgttacctttgcttaagcacatcctgctcctacagtgacctcttgggtgagtctaggtagcactgatgcatgcctgggcacttgggtgaactggcagggctggcctacatg

SEQ ID NO: 882880 - DNA, 120 bp, Artificial Sequence
  ENSG00000254101_113 (sequence is synthesized)
cagcctctttgcatgagccttgaggaacctcccgaaagggaattcctgctgaagaaaaggacacagtgaacttgatatggtaagaggccttagcgttcaaaagaaaggctgattctgagt

SEQ ID NO: 882881 - DNA, 120 bp, Artificial Sequence
  ENSG00000254101_114 (sequence is synthesized)
ccaggaaggtgaccgttcttaaacagaccagatacatttctgctctgccctacatctctcacctcaaccacatacatcctctgcatccacaccagacatcctgcctgtctttctgttcct

SEQ ID NO: 882882 - DNA, 120 bp, Artificial Sequence
  ENSG00000254101_115 (sequence is synthesized)
caatgttaagttgtgctgctgtatcaccagcgtcacgtgaaagcgtcactctctgcacgacctcctctcccagtttttttaacccacttttgccactgaaccttcatagcttcactatga

SEQ ID NO: 882883 - DNA, 120 bp, Artificial Sequence
  ENSG00000254101_116 (sequence is synthesized)
ctttatatgagaattaatttttcccccttttctgggacaggatggatgaaaggcacgaggaaggaagaacatacattgattgtgtgttatgtatcaagtacattatctattatctgtatc

SEQ ID NO: 882884 - DNA, 120 bp, Artificial Sequence
  ENSG00000254101_117 (sequence is synthesized)
attgtattatcgaaaaacataccatatgtttttttataccatattttttttatcaaaaaatgtaccataatggttaaaaaaacaacctaccatacacttgtaattattttccctgtttta

SEQ ID NO: 882885 - DNA, 120 bp, Artificial Sequence
  ENSG00000254101_118 (sequence is synthesized)
aagatgatcaagctgagaatgagatgctgagttgttactctagttgttacagctagcaggtggaagaacagcaatagaatccagatcttttcaagaccaaagctgatgccctaatgtcct

SEQ ID NO: 882886 - DNA, 120 bp, Artificial Sequence
  ENSG00000254101_119 (sequence is synthesized)
aatccagccatgggctgaccatgagtctcctctgggcttctctgggctcattgatgtagtgacactaatggcaggtacctcagcacctgtatcacacatcctgctgcttctgtctttcca

SEQ ID NO: 882887 - DNA, 120 bp, Artificial Sequence
  ENSG00000254101_120 (sequence is synthesized)
ttgttctaaaccattcagtgcattatattcccttatgataggaatgacttaattagaccaggagaactgaatgataggtccaacagtctatgtctggggagatgcctctgtgctgtcatc

SEQ ID NO: 882888 - DNA, 120 bp, Artificial Sequence
  ENSG00000254101_121 (sequence is synthesized)
ttgaatatgaacatagaagcacattctctgcttttggtagccctcttgtgactgcaaggaatgccagactcagaatcaggaaaaagctggagcttaaaatagcgaaagagagagagagag

SEQ ID NO: 882889 - DNA, 120 bp, Artificial Sequence
  ENSG00000254101_122 (sequence is synthesized)
agaaacttttgtattattcaccctttcattaattttttcataatttccaatgtggcctgtaaaagcgttatgactgatatggatgtattggtcattatgactgacatggatgtattggta

SEQ ID NO: 882890 - DNA, 120 bp, Artificial Sequence
  ENSG00000254101_123 (sequence is synthesized)
tagagggacaggactaataggatagatgtatacatgaaagggagtttattacagataattgactcacacagccaccaggtgatgtcccataataggccatctgcaagctgaggaacaagg

SEQ ID NO: 882891 - DNA, 120 bp, Artificial Sequence
  ENSG00000254101_124 (sequence is synthesized)
ataataggccatctgcaagctgaggaacaaggaagccagccctagtctcaaaacctcaaaagtagggaaactgacagtgcagccttcagtctgtggctgaaagcccaacagcccctagca

SEQ ID NO: 882892 - DNA, 87 bp, Artificial Sequence
  ENSG00000254101_125 (sequence is synthesized)
tgcaagggagaaagatgaaggccagaagacttgtccagtttagtccttccaaattattctgcctgcttttattctagccactgtggc

SEQ ID NO: 882893 - DNA, 120 bp, Artificial Sequence
  ENSG00000254101_126 (sequence is synthesized)
agaagacttgtccagtttagtccttccaaattattctgcctgcttttattctagccactgtggcaactgattagactgtgccaacccagactgaaggtgggtctgcctctcccagtccac

SEQ ID NO: 882894 - DNA, 120 bp, Artificial Sequence
  ENSG00000254101_127 (sequence is synthesized)
gcagcaccctcacggacacacccaggaacaatactttgtatacctcaatccaatcaagttgacgctcaatattagccatcacaatggcttatcacgggtcttgttagtctctttctctcc

SEQ ID NO: 882895 - DNA, 120 bp, Artificial Sequence
  ENSG00000254101_128 (sequence is synthesized)
ctccctacacacagtcaccagcactgtggcagatgatggaggtttctcctaaatagacagcccatcttattacctggtttcctccaactcaccttcatgtcctttcctaaacatcccttc

SEQ ID NO: 882896 - DNA, 120 bp, Artificial Sequence
  ENSG00000254101_129 (sequence is synthesized)
ctcagggagaaatccactgacctccaggcctctaattgtacattcttttcacactttgtacattttcttcttagtattttttatcaaaatctaaactgattatttgtgtgaatgcttatg

SEQ ID NO: 882897 - DNA, 120 bp, Artificial Sequence
  ENSG00000254101_130 (sequence is synthesized)
tgagatcattcactagatgaggagcttcctcagggtggggcaatgttggctaagctcgaccctgtttctatagtctcaagcataatctgggcacagaaaacatttgtacaacaagtgctg

SEQ ID NO: 882898 - DNA, 120 bp, Artificial Sequence
  ENSG00000254101_131 (sequence is synthesized)
aatgcataaataaatgaagagccaggttttaataaatgtgtgttgagtgggaattgagattcaacatatttgtatgtaatgtggattcaggagtgacactgccaattaatatgcactgag

SEQ ID NO: 882899 - DNA, 120 bp, Artificial Sequence
  ENSG00000254101_132 (sequence is synthesized)
cgccttggattctactatgaacttgatgcattggtttgactctgctgtctttgaaggtggtgactggagttcattcgaaatgttgtatttgccaattccactttatttcctcagcctgga

SEQ ID NO: 882900 - DNA, 120 bp, Artificial Sequence
  ENSG00000254101_133 (sequence is synthesized)
tttcagaggcaagcagcatgcctttcatttatccaacttatctagagccaattcaatagaataatcaacttccagcatgtttcacacttgttgcttgtcaaagcctcttacagtcaagaa

SEQ ID NO: 882901 - DNA, 120 bp, Artificial Sequence
  ENSG00000254101_134 (sequence is synthesized)
atgtaagtaatcagtgcagtgtacctgacaacaagtaggatgagaggttcaggattttaattttgttctttcttcaagaacaagtgtctctctctggcagctggagtgacctttctgttc

SEQ ID NO: 882902 - DNA, 120 bp, Artificial Sequence
  ENSG00000254101_135 (sequence is synthesized)
tcatctacacaatgtgaaagcatgtgattggcctttcagcaaggcctctttatgtactttctgcgtgttctttcatcttctttgacttctcaccatagtgttttgtaatatatttttact

SEQ ID NO: 882903 - DNA, 120 bp, Artificial Sequence
  ENSG00000254101_136 (sequence is synthesized)
tgcctgtctttcccaaatctatcatgactcacttaatgatgaaagttttgagtcagtcacctgggtccccagttattgtttcatataaacatgtttcctgaaggttaccacaggcactac

SEQ ID NO: 882904 - DNA, 120 bp, Artificial Sequence
  ENSG00000254101_137 (sequence is synthesized)
atgctatgacaggcatgacaaaaacacaaacaagacatgtacgttgcaacatgttgcttgcccaatataggtctaggaggcttctggatgaaaacgatgcctgagggaatgagtgagagt

SEQ ID NO: 882905 - DNA, 120 bp, Artificial Sequence
  ENSG00000254101_138 (sequence is synthesized)
tctgtacgagacaattttgggtgttcaggaaatacatgtggcatgagtcaacaaatgaattggatgaatgaaggacaaaggactgatggatattaaattatcttgaacaaaaaaagccat

SEQ ID NO: 882906 - DNA, 120 bp, Artificial Sequence
  ENSG00000254101_139 (sequence is synthesized)
ctgttatgtctcagcatatgttgtatttgaaagaaacactagtctgacatctgcaagagaaataaaaagtaattggaaatttactagtttatttatataataaaaatggaagattttgca

SEQ ID NO: 882907 - DNA, 120 bp, Artificial Sequence
  ENSG00000254101_140 (sequence is synthesized)
taattttaaatacgattgatctttcaaaatcctgtgtacaatgtgcttatgccccgcactcaaatcttcctacttgcaaccccaccaaatttctgtcatatctctgttgttcccaagccc

SEQ ID NO: 882908 - DNA, 120 bp, Artificial Sequence
  ENSG00000254101_141 (sequence is synthesized)
tctttggactttatttcgctgctgtcttgtatactccctgcttcccatatactctagatcaatttggtcttcctgaaggtggcttgatcatcttctcactgaataaacttgacctattct

SEQ ID NO: 882909 - DNA, 120 bp, Artificial Sequence
  ENSG00000254101_142 (sequence is synthesized)
aatgagaacatccttgaggatcacagagtccagagtccctagagagagggagagcaatcatgtcttctagacggcaagttacttacacatatgtctagtctcttctgaggtgtaagaaca

SEQ ID NO: 882910 - DNA, 120 bp, Artificial Sequence
  ENSG00000254101_143 (sequence is synthesized)
cagcactcttcccctctgaaggatgtagcaacgacatgccatcttggacacagacccagctctcacccaacaccaaatctgcttgtgccttgatcttggacttacaacctccagaacttc

SEQ ID NO: 882911 - DNA, 75 bp, Artificial Sequence
  ENSG00000254101_144 (sequence is synthesized)
gcttgtgccttgatcttggacttacaacctccagaacttctctctctgttgcccagattgggttcaagagattct

SEQ ID NO: 882912 - DNA, 120 bp, Artificial Sequence
  ENSG00000254101_145 (sequence is synthesized)
ccgagtcagaaactaatccttcccacacataccgtacttatggtgaagggatttcagatataggatgctattctcagacgactacatgaggacataacaagaagatggtcatctacacgc

SEQ ID NO: 882913 - DNA, 88 bp, Artificial Sequence
  ENSG00000254101_146 (sequence is synthesized)
gtttgctggagtttggatttactactgagtcatatttggagcatgctggaatcttacaactgagattaccgagtcagaaactaagtat

SEQ ID NO: 882914 - DNA, 120 bp, Artificial Sequence
  ENSG00000254101_147 (sequence is synthesized)
tgggaggaacccagtgggaggtgactgagttacgggggcacgtctttcctgctctgctctcatcatagtgaatgagtctcacgagatatgatagtttaaaaaaaaaaagaaaaaaaaaaa

SEQ ID NO: 882915 - DNA, 120 bp, Artificial Sequence
  ENSG00000254101_148 (sequence is synthesized)
tggaactacagggttacatctctagtgtcattgtatgacacagaagagaacaatccaataatgagaacatccttgaggatcacagagtccagagtccctagagagagggagagcaatcat

SEQ ID NO: 882916 - DNA, 120 bp, Artificial Sequence
  ENSG00000254101_149 (sequence is synthesized)
gtcttctagacggcaagttacttacacatatgtctagatttacttttctctgtgaaatgacttcatattgctgagtcattactcaggtgatcaggaaatgtggtttttggcagatacttg

SEQ ID NO: 882917 - DNA, 120 bp, Artificial Sequence
  ENSG00000254101_150 (sequence is synthesized)
gggtcctgctgcttgatattctagaggagtagaaccctttcctcttccagaggacatctcagtacattttctgggacagtctaatgatgcaccaaagagaagctacaaagccattgaatg

SEQ ID NO: 882918 - DNA, 120 bp, Artificial Sequence
  ENSG00000254101_151 (sequence is synthesized)
attcctattatgtgcacctagcctgcataaagctccttttctcgagaagtcggagtgagtggagtcatataacttaactttgatctatctcaaaggcatcgccagctccctgacagccag

SEQ ID NO: 882919 - DNA, 120 bp, Artificial Sequence
  ENSG00000254101_152 (sequence is synthesized)
gctcagcagagcacgcaggcatggccaggcatctagtggttctgacagtcacagaagctctgttgtgctaatgggcttctcttaatgctgagagatcagctctgcaatttgctcaacagc

SEQ ID NO: 882920 - DNA, 120 bp, Artificial Sequence
  ENSG00000254101_153 (sequence is synthesized)
cctgggccagctttgcagaggccttattgctcccattcaggccatgtggtctgtgagttggagcaagagtatattgtgagtacttctgtgtgaataaccctgctggagctccctgcactc

SEQ ID NO: 882921 - DNA, 120 bp, Artificial Sequence
  ENSG00000254101_154 (sequence is synthesized)
cagttattgactgaggcaagtcccccagcctggataattgcctataggaagcatcaactctgatcactggaactggccaagaggcaaatgtgacctccgagagtgaccatgttggcctgg

SEQ ID NO: 882922 - DNA, 120 bp, Artificial Sequence
  ENSG00000254101_155 (sequence is synthesized)
gtgcctatctgaaaaaaattcaatgatgtcttcatttgcaccgcaccgttttcctgtctcagcgtgtggaactgctttcatggctcctgttttctcatctatgaccccatcaataagcat

SEQ ID NO: 882923 - DNA, 120 bp, Artificial Sequence
  ENSG00000254101_156 (sequence is synthesized)
cactctgagagcagtactaattttctcacatacattctctgaagaacgttctttattctcacctccgcatttcctggaagaatgtgttgtcatgacagcagggaggcaagagtgtaggct

SEQ ID NO: 882924 - DNA, 120 bp, Artificial Sequence
  ENSG00000254101_157 (sequence is synthesized)
ttggagtcagatagaaatgggtgtggagcccagttctaccatttgaaagttttgtgatgtagagagagtcacttaatctaactgtgcctcagttttcccatctgtataatggggtcaata

SEQ ID NO: 882925 - DNA, 120 bp, Artificial Sequence
  ENSG00000254101_158 (sequence is synthesized)
tagtcctcctaaataatggggtgtcgttaggattagctgagtgaatgcaacaatgcctagcacaaacaagccctctgcaaatatgaggtaggacctcctccagagctggcctttacatgc

SEQ ID NO: 882926 - DNA, 120 bp, Artificial Sequence
  ENSG00000254101_159 (sequence is synthesized)
tagatgatgtcattgtaaagatagtttattatattcacagttcccaagagaagatggcacactacaccacacagggtcacatagggtcacgcaaggtgtgggtcagaaggcagaagggca

SEQ ID NO: 882927 - DNA, 120 bp, Artificial Sequence
  ENSG00000254101_160 (sequence is synthesized)
agaaaaatggggaagagccttgattggtgtttctgtgggaaggaaaaagtgaggcagatatatagatttaggattggctagtttgaataacttccacagcctctggggtatagggcctgt

SEQ ID NO: 882928 - DNA, 120 bp, Artificial Sequence
  ENSG00000254101_161 (sequence is synthesized)
ctctagttatctggtacctggttcttggtgattacagtagaggaatagtggcccagagtgtaagagcctgtagaggaggtggttggggtttgggttcggggtgggttcatttgcatatga

SEQ ID NO: 882929 - DNA, 120 bp, Artificial Sequence
  ENSG00000254101_162 (sequence is synthesized)
aagaggtgctctcaagtgagtcatttatgtcaccaagaattaactaggtctgaaaagagcagtgtctccagggacagcaagaccccagatgccagagcataaaaaatacagaaaataaaa

SEQ ID NO: 882930 - DNA, 120 bp, Artificial Sequence
  ENSG00000254101_163 (sequence is synthesized)
atgcatgattaatacaggtcttttcttagtgtatccagacagaaaagggaaaaccaaggaaaccgttattgagcacctacccgacagcacctaagaacgttaacacatgtacttcacctc

SEQ ID NO: 882931 - DNA, 120 bp, Artificial Sequence
  ENSG00000254101_164 (sequence is synthesized)
tggcagcctgaagttctgcattcctcagtttgggatagcaccttgagctccaggctttccacctctcatatctgtgaagcgttatcccaagtccatgctttgattctcattataatgata

SEQ ID NO: 882932 - DNA, 120 bp, Artificial Sequence
  ENSG00000254101_165 (sequence is synthesized)
atagagctagtatttcacaattaagtcgtgagtagactactcctttcaaatgtctcttcatgacaggaaactattcttctgtttctggtctcctaccttgtcttcttaaatttatttttg

SEQ ID NO: 882933 - DNA, 120 bp, Artificial Sequence
  ENSG00000254101_166 (sequence is synthesized)
cccctctcctatctgtttttgcactacatcgagaatgaacttttaaaaatgcaaacttaatcatgtatttccctacttaaaataattttccattgctctaagaaaaaggtcaccatcctt

SEQ ID NO: 882934 - DNA, 120 bp, Artificial Sequence
  ENSG00000254101_167 (sequence is synthesized)
agcctggtctacaaagaaggcaggaccgtcccctgctttcttcaccaccaccagctgatgtcactcttcttgtcattttctgccctgtaaccatattggtttcctttttctttccaagca

SEQ ID NO: 882935 - DNA, 120 bp, Artificial Sequence
  ENSG00000254101_168 (sequence is synthesized)
tcgtgttcctttccacctaaggaatgttgcatgtatttccatcacttggagatatattttcagcagccagccctgaatattcacttgaaaaattttcatacatctttcaaaactcagaaa

SEQ ID NO: 882936 - DNA, 120 bp, Artificial Sequence
  ENSG00000254101_169 (sequence is synthesized)
tttcttgaagaaaacatttgtgatcgccccagtacaggtcaggaccctaaaatctattgtgatgcacccaatatttctgttttattatagttaaaattaaaaagttaaattcaaacacta

SEQ ID NO: 882937 - DNA, 120 bp, Artificial Sequence
  ENSG00000254101_170 (sequence is synthesized)
aattgagagttttaaaaatatcattctgttgacttctaacatatataaaattagggtctatacctctcttgtttaattcacaatctctagtacataattgctgacataatttggaaaata

SEQ ID NO: 882938 - DNA, 120 bp, Artificial Sequence
  ENSG00000254101_171 (sequence is synthesized)
tcttggacattaatcccaaattctatttaaaatttgtatagacgctattgttaacattaatttcctcttcttttcttatcccataacaatgtttttgtacacatcctggggacctgaaga

SEQ ID NO: 882939 - DNA, 120 bp, Artificial Sequence
  ENSG00000254101_172 (sequence is synthesized)
ttatttatttgtataatagtatattaaaaatttgtactacttcggattgtaagagtttaacaaaatcatgcatgtgaaaacatgatgtaaatgataatgtgttatacaaatgtaatgggt

SEQ ID NO: 882940 - DNA, 120 bp, Artificial Sequence
  ENSG00000254101_173 (sequence is synthesized)
caatgaagaccacatcactgatggtagggtgaatgttctcgtacctcacaaagtggcagtccacttcttaaaacatccactatgcatggagaaaaccatggtgataaggataatggactg

SEQ ID NO: 882941 - DNA, 120 bp, Artificial Sequence
  ENSG00000254101_174 (sequence is synthesized)
ggtagcctgtgattggtgatacagatgctctagagaaagctgatgctgagtagcaggtcaatgaaaaccaggtgtgaaagtagcagcatcttggttgcatttaaaacagttttatccttg

SEQ ID NO: 882942 - DNA, 85 bp, Artificial Sequence
  ENSG00000254101_175 (sequence is synthesized)
ggactttaacttcatatgaaacttaaaatagttgttttctaattctgtgaagaatgtcaatggcggtttcatgggagtaacattg

SEQ ID NO: 882943 - DNA, 120 bp, Artificial Sequence
  ENSG00000254101_176 (sequence is synthesized)
tgtgaagaatgtcaatggcggtttcatgggagtaacattgaatctataaattactttaggcaatatgtccattttcatgatattgatgcttcctatccataaagatgaaatgtttttcca

SEQ ID NO: 882944 - DNA, 120 bp, Artificial Sequence
  ENSG00000254101_177 (sequence is synthesized)
gagttccctggttgaaaaggatatttttatctgtggcctcatctgattcttgaggaatttaattctccatttttcaaagtttggatgggagtactctaggattcacttggggggcatttt

SEQ ID NO: 882945 - DNA, 120 bp, Artificial Sequence
  ENSG00000254101_178 (sequence is synthesized)
ataacccagattgcttcccaatacccttctttatttctcatctcagactccatggatttagccttctactctttctgtctctagtcaacatgccccgatctgccttttggactttcatta

SEQ ID NO: 882946 - DNA, 120 bp, Artificial Sequence
  ENSG00000254101_179 (sequence is synthesized)
gtctcaaattggccttcaaagcaggatgagatatttctaactgtcttctaccagtcctacaccacaaagcaataatttatttgatcagtcactcactttggttctacactgttaattcat

SEQ ID NO: 882947 - DNA, 120 bp, Artificial Sequence
  ENSG00000254101_180 (sequence is synthesized)
acatgtattaataagttaaataaataagcttttaacaatgtatattcaatttaaaacaatttttcttgttccctagggttgccatgtaaataaaacagagtaggcttgtgagtaaaataa

SEQ ID NO: 882948 - DNA, 120 bp, Artificial Sequence
  ENSG00000254101_181 (sequence is synthesized)
tcctgggagattatgggtgcctaatattaactgaataaataaagaatggattgaaaaattcaaagaatgcaagctccatgaaaacaggaatttggctgacttgttcaatatttttaccct

SEQ ID NO: 882949 - DNA, 120 bp, Artificial Sequence
  ENSG00000254101_182 (sequence is synthesized)
tggtgtcaaatgcctggcagaattgtgggtgcttaataaatgaatattttataaatacatgaatgaacatatgcacacttcagaatgtcaaaaatgtgagagtaaatgatgagaaagaca

SEQ ID NO: 882950 - DNA, 120 bp, Artificial Sequence
  ENSG00000254101_183 (sequence is synthesized)
ttgacaaaacaagagtaataacgatgagatagaacaggaaggaaagagtgctatactctgttaaagagctacatatgtttaactatatatatggatgtgactggaatcatgcaatgatgc

SEQ ID NO: 882951 - DNA, 120 bp, Artificial Sequence
  ENSG00000254101_184 (sequence is synthesized)
gttactctgtttctgtgtgtgtgtttgtataaaagaatcattgtaagttagactgtgtttgtacaaaggcattaccacatgtcagaccacccctgagtgtttattatatgcatgagtcta

SEQ ID NO: 882952 - DNA, 120 bp, Artificial Sequence
  ENSG00000254101_185 (sequence is synthesized)
aatgttaatgcaatatattttatgctaccaagataagggaaaagaaaggcagtaaggaaatattgtgccttatttaatgttaaatatgtgcaagtaaaaataatagaggacaagcaaaaa

SEQ ID NO: 882953 - DNA, 120 bp, Artificial Sequence
  ENSG00000254101_186 (sequence is synthesized)
gaaggacttctatggagcagaatgtgggcccttaccaacactgagtcttccattgccttgacctttaacttcccggccttcacaacagtgagaaataaatttctgtagtttataagccaa

SEQ ID NO: 882954 - DNA, 120 bp, Artificial Sequence
  ENSG00000254101_187 (sequence is synthesized)
agacaaggtaataatatcagatctctgtctatatatatgtggagttgattgaaggactcaaagttttatacagaccaagtaaaggcactggacccctggaagacacactctgatgccagc

SEQ ID NO: 882955 - DNA, 120 bp, Artificial Sequence
  ENSG00000254101_188 (sequence is synthesized)
agaacaggcttgcactcatatccagagtttgaagaccacttccatggaccactgctggcagaaatgcccccagagtggtcgaccaactgtgcacccatgctcctagccagagtaatagct

SEQ ID NO: 882956 - DNA, 120 bp, Artificial Sequence
  ENSG00000254101_189 (sequence is synthesized)
tcatagccccacccccagccagccagaccccaagttggctgatccaccatgtgcatgcatgtgcctctgaactgaaaaacagcctgtgcaaacatgagtaacatggccctgctctggaga

SEQ ID NO: 882957 - DNA, 120 bp, Artificial Sequence
  ENSG00000254101_190 (sequence is synthesized)
cattaacttctaaaagcatgagaaaccatcatcttcttctgcaatgagagaatcaatgtgcctcatgaagttacataccatgatgaaataaaccataatccatccaaagtttaccagcct

SEQ ID NO: 882958 - DNA, 120 bp, Artificial Sequence
  ENSG00000254101_191 (sequence is synthesized)
cttatccctgcagcgccacatttaacttgactctgaagttacagttaaattaaaagggtttgcatattttattctctctagtgattttattgctcactagagatttgctgtattaaaaag

SEQ ID NO: 882959 - DNA, 120 bp, Artificial Sequence
  ENSG00000254101_192 (sequence is synthesized)
gtgaggcctccccagtcatgtggaactcattatgcctaccaggagaactggaacccaaggtgaacccttcttggacgatgatgtggctactaagagaaccatttatatctgccatatcaa

SEQ ID NO: 882960 - DNA, 120 bp, Artificial Sequence
  ENSG00000254101_193 (sequence is synthesized)
actaagagaaccatttatatctgccatatcaacatgaatgatcttattcaagaaatctactcgcagttccagaaatttcactctgtgctctcataaacacttttcctttataaattacac

SEQ ID NO: 882961 - DNA, 120 bp, Artificial Sequence
  ENSG00000254101_194 (sequence is synthesized)
ttatcactgagtacaggctacaggacaggtacatctgtataaagataggaaatataaattgctacctaactgaaaaccttctgccacctgtttggagacaaaaaagcagaaagcaatgta

SEQ ID NO: 882962 - DNA, 120 bp, Artificial Sequence
  ENSG00000254101_195 (sequence is synthesized)
agaaaagaaagagatcaggctctgaacacctactctgtgctacccactaagatactttgcactcatctatttttattctccaaactacttcatgaggtgaggttcaaatgctcaatatgc

SEQ ID NO: 882963 - DNA, 120 bp, Artificial Sequence
  ENSG00000254101_196 (sequence is synthesized)
tgtgaaaagtgggtaaagtggtctctgccctttgtgtctgctaagtaaattatgctttcttcattgggaaacactcataataccctttgagaaacccaccttccctatgtccataggatc

SEQ ID NO: 882964 - DNA, 120 bp, Artificial Sequence
  ENSG00000254101_197 (sequence is synthesized)
tttatggagttaatctccactctttacttgcagggttgggaatttgccccaaatctggtcaatcagagtggttagtttgatgtggcacatcaaacccaagtttgtctaattagcatgagt

SEQ ID NO: 882965 - DNA, 120 bp, Artificial Sequence
  ENSG00000254101_198 (sequence is synthesized)
ccaagaaatgtttttggaacatttctaggcaatagggacaatgcaagtatagagataccagagaccatcatctgagaagtcctgctggagataaacaaagaaaacagaaaaacaaaagaa

SEQ ID NO: 882966 - DNA, 120 bp, Artificial Sequence
  ENSG00000254101_199 (sequence is synthesized)
gggaaggagctacttactgaattgcaggagtgctgtattcaggcaactgacaagaagttaatggcatatttcagtttcattatagctagggaggtatgtctggatttttcatatactccc

SEQ ID NO: 882967 - DNA, 120 bp, Artificial Sequence
  ENSG00000254101_200 (sequence is synthesized)
tgtctcctttcccatttggactatttttgaacctcaaatccagcgaaaattgatgatgagtgccacctttgtgttaatgctttatttcactatgtttttacacagaatgaaagcttatga

SEQ ID NO: 882968 - DNA, 120 bp, Artificial Sequence
  ENSG00000254101_201 (sequence is synthesized)
aaggcagggaataatttcttttgtttactgccaatttctagagcctagaagagcaatgtagcaagatagatgctcaaaaaatatttatctttacttatcatatactggctatttgtcttt

SEQ ID NO: 882969 - DNA, 120 bp, Artificial Sequence
  ENSG00000254101_202 (sequence is synthesized)
ccttaaaactaatctttcttatccttccatgttcggctccagtgtcacctctccataaaatcttactctatgtccagcaacttgatttgagaattatatattttgtcctattactatatc

SEQ ID NO: 882970 - DNA, 120 bp, Artificial Sequence
  ENSG00000254101_203 (sequence is synthesized)
ctcagttatggcagtttacatgctatattaaaacaaaaaaatgtataaaatatctccatctcttgtaccattgtcagaagagatgctgctttatttatattaaattcctacctgcctaaa

SEQ ID NO: 882971 - DNA, 120 bp, Artificial Sequence
  ENSG00000254102_0 (sequence is synthesized)
aggcgccgagcgccgggtgcagggcagcagctgctgccgctgcagccgccgagctgggcagggaggcagccgagatggcctggccctggttgagggcaatgaaaacacatctgcccggtg

SEQ ID NO: 882972 - DNA, 120 bp, Artificial Sequence
  ENSG00000254102_1 (sequence is synthesized)
tctcgttacttggtttaatcgtcgccagccctaagtcacggcctcggctccctctcctcaactgtgtgggatcccgccgcctggtttcggccgggcggaggggtgacgtcagccgctcac

SEQ ID NO: 882973 - DNA, 120 bp, Artificial Sequence
  ENSG00000254102_2 (sequence is synthesized)
acagtgccccctggccgctggagctcgggaaatctgtgcgctcgaacttggctccgccaagaagctgggcaaggatccgggctcctgatggaactggcaagttggaaaagtggcaaagga

SEQ ID NO: 882974 - DNA, 120 bp, Artificial Sequence
  ENSG00000254102_3 (sequence is synthesized)
aaagccaacatgagcgctttcggcttgcgcgggcagaaagggtgggaaatcaggccacggcgaaatcttctgactcacagatgaccgcttagaatgaaaactacggaagggaagtcctct

SEQ ID NO: 882975 - DNA, 120 bp, Artificial Sequence
  ENSG00000254102_4 (sequence is synthesized)
gactctgcagtttcacagagagtcactgagttaccaaagcagttgggaaacagaggcagaggactgcccccactctgtccgcagcaggggtatgggaggcagctcgggacactccaggga

SEQ ID NO: 882976 - DNA, 120 bp, Artificial Sequence
  ENSG00000254102_5 (sequence is synthesized)
ccaagcgggcagtgggcgccgtccccgaggaacacccagcccagcgcccctggttctgggctggttggcttatcgaggccggttggccaaagcatcaggaaagggaacattctcggccgg

SEQ ID NO: 882977 - DNA, 120 bp, Artificial Sequence
  ENSG00000254102_6 (sequence is synthesized)
gtgttggataccaaattataaacgccagagcaccttgtgtaaagatgaatatcgttttgttactgcgggagggaatacacctactgctttgaaaggagtttaaaatattcagcagacagc

SEQ ID NO: 882978 - DNA, 120 bp, Artificial Sequence
  ENSG00000254102_7 (sequence is synthesized)
accgcattgaaattagtgcattgagctgcagaccaaactaatttctaggtactatttaaatttcttaatgatcatcttgatatttgcttgaaatttgagataggaacccaagtaaaatca

SEQ ID NO: 882979 - DNA, 120 bp, Artificial Sequence
  ENSG00000254102_8 (sequence is synthesized)
gaatggaacataatctactctaaagagtaaagccagaagttcgtctttgttatttttatagtactgataaatagtttattacttcactagtttgaaaagttacaagtctgaatttgggta

SEQ ID NO: 882980 - DNA, 120 bp, Artificial Sequence
  ENSG00000254102_9 (sequence is synthesized)
gctatgtgtatcttctgagaaggaaaattgtctctctgtgtttttcaatttatctctttcagaacagtctaaaaagtaaaaacaaagtttggcaaaaatgacaactttgcttgagaacag

SEQ ID NO: 882981 - DNA, 120 bp, Artificial Sequence
  ENSG00000254102_10 (sequence is synthesized)
ctctggaaaagcgaatccactgagagccgtgggaattctccgccagctgtgcttccccaaccgaggaagaatccaacccggaatatcgtttctggaccccaccgcggagaccccagctgg

SEQ ID NO: 882982 - DNA, 120 bp, Artificial Sequence
  ENSG00000254102_11 (sequence is synthesized)
accctctcctgaaaactgcccggggaggggggtgcggtctcagcgccctccactgcggggtccaaggcgcagtagcggggcgcgaccccagcgctccaagcccagcattcttggcagctc

SEQ ID NO: 882983 - DNA, 120 bp, Artificial Sequence
  ENSG00000254102_12 (sequence is synthesized)
cctggtggcgcctgggtcagcttgaaacccacgcagctgagggagctaggtgtggggttcaccatactgcgcccccgccggatttgggagcgcgggatctactcggaggcagagagatta

SEQ ID NO: 882984 - DNA, 120 bp, Artificial Sequence
  ENSG00000254102_13 (sequence is synthesized)
gccccagaggtcaagcctttcggcgtcgttttgtcatctgtattttctcgtccccttcgccgccgagtcctacaaagctcacttcagagagactgggtccacatgtgtgggctcatgagg

SEQ ID NO: 882985 - DNA, 120 bp, Artificial Sequence
  ENSG00000254102_14 (sequence is synthesized)
aggaggacagcgagggtgacgacgctgggggactagcgcgagctggcgcattcctggcagtgagccaagggccccccgtcttgctagtctttccaagttgcttggcaattccaaaaattt

SEQ ID NO: 882986 - DNA, 120 bp, Artificial Sequence
  ENSG00000254102_15 (sequence is synthesized)
cgactgtgggaaagttgaaacttgttcgtatagcgttctttcgaaaagattttccttgtctgtatctattttacagaaaacatactggtcctcactactgtttggggacgagttagccta

SEQ ID NO: 882987 - DNA, 120 bp, Artificial Sequence
  ENSG00000254102_16 (sequence is synthesized)
aatttgaacagaccttgaagacaaaccctgagccccgggaggcagccttctcagcgcgaggtgcacacacaagtccccgagcccaccgcgagggtctcacctggctcctgcgtggtcttt

SEQ ID NO: 882988 - DNA, 120 bp, Artificial Sequence
  ENSG00000254102_17 (sequence is synthesized)
ccccactttggcgactttgaaggccagggggaccgtacagtgagcgaataacttagcgcctgcattatcactgctgaaacctcagagaacaatgtaggacatgcgggtgcaggtagagca

SEQ ID NO: 882989 - DNA, 120 bp, Artificial Sequence
  ENSG00000254102_18 (sequence is synthesized)
aaactagtgaaaagagtttatgaggaattcataccgcctcgcctacttgggacaactccttcattcagttgtcctccctagggggctgttatgcttatttgtgtcagacccttctttccc

SEQ ID NO: 882990 - DNA, 120 bp, Artificial Sequence
  ENSG00000254102_19 (sequence is synthesized)
ctggaatcttatcatcacagaatattaaacatttgaaaaaattttaaagattaaacttgttcgaggaaaaaatggtaaacactgttagggattgcctggcgtgcacaaattaaggaaaga

SEQ ID NO: 882991 - DNA, 120 bp, Artificial Sequence
  ENSG00000254102_20 (sequence is synthesized)
aagaaactgaaaatttcagcgcggctttgggaatttttagctttgcgatttaaaacccacagcgccatctcctggtaatgaggagaatatagcgatggatgacaatactgaaatgctgac

SEQ ID NO: 882992 - DNA, 120 bp, Artificial Sequence
  ENSG00000254102_21 (sequence is synthesized)
tatgaaatactcaaatatgagaaacgcctcaaaaattatttcagtgataggttgattatgattacaaaatatgatctgacatggacatttattatcattaaaagttatcagacacaatcc

SEQ ID NO: 882993 - DNA, 120 bp, Artificial Sequence
  ENSG00000254102_22 (sequence is synthesized)
atcctggaagctaattatttgtaaatagaagtttgtatatttatacatacatgtattttatagattcagacgcttatgctgtgaatttacaagatatgattctataatttatcataaata

SEQ ID NO: 882994 - DNA, 120 bp, Artificial Sequence
  ENSG00000254102_23 (sequence is synthesized)
attttacaaaacagttccctgttttactttttgtgaatgattttaccatatatggtagaaaaagaataataggatgtggtgatctatggagacataaaatcttctagatcctcattgtat

SEQ ID NO: 882995 - DNA, 120 bp, Artificial Sequence
  ENSG00000254102_24 (sequence is synthesized)
gcactgtttgcagaggctggaggagacgctgttaaacagggcgcacttctccgggcaggaggcagccgggggcagtccggcgctgaacgggtagccggctgcctgctcgtaggcgccgag

SEQ ID NO: 882996 - DNA, 120 bp, Artificial Sequence
  ENSG00000254102_25 (sequence is synthesized)
cgccgggtgcagggcagcagctgctgccgctgcagccgccgagctgggcagggaggcagccgagatggcctggccctggttgagaacagtctaaaaagtaaaaacaaagtttggcaaaaa

SEQ ID NO: 882997 - DNA, 120 bp, Artificial Sequence
  ENSG00000254102_26 (sequence is synthesized)
gtctcaataacttctcactttatctatgtcttctcatcatgcaatcttacagaatgtcttactgtcttaatgttaagacatcatgacaaaaatgtgttaacattattcagacattctgat

SEQ ID NO: 882998 - DNA, 120 bp, Artificial Sequence
  ENSG00000254102_27 (sequence is synthesized)
cctgaaatatcatctgaagttaaattattttccaaaagtttaatgcacataatagaatcataaatacttaatacttttctattaaaatgtttctgaagtattctttcaagcttttctccc

SEQ ID NO: 882999 - DNA, 120 bp, Artificial Sequence
  ENSG00000254102_28 (sequence is synthesized)
ttttataaataagattgaaacacactaaaatttagagatgatatccctattaaaaacatttctcctctatgattgtatacacaggccagctgcttgaaataaaaataaaagtagatatgc

SEQ ID NO: 883000 - DNA, 120 bp, Artificial Sequence
  ENSG00000254102_29 (sequence is synthesized)
tttttgtagtgtacaaaatattatgaatatccttcaaaattgtagatcaaacagacaaatgtaaacttcagttgaaagattcattttatttgattaattaaagtgaagatctattaagcc

SEQ ID NO: 883001 - DNA, 120 bp, Artificial Sequence
  ENSG00000278768_0 (sequence is synthesized)
acgaagcaaggcagtgactagagtccagacatcagaactagttccatgttttttttttcactaccagtccctaggccccaaaccgcagatcctgctgtgtgaccattaagcccctgactg

SEQ ID NO: 883002 - DNA, 120 bp, Artificial Sequence
  ENSG00000278768_1 (sequence is synthesized)
ttctaggctcaacttccaaccctttctgcaggtcctattacctctgcctcatcctcccaacatgataaccagagtcttccttcacattgtactgcctacccccttatgttcccaggctct

SEQ ID NO: 883003 - DNA, 120 bp, Artificial Sequence
  ENSG00000278768_2 (sequence is synthesized)
cccttggttttcttacctccttgcagtccattttcagatcctgtccattgatctccacccgcacaatgatcacctcataataccactcccgccggatgggtgtataccagagactgcctg

SEQ ID NO: 883004 - DNA, 120 bp, Artificial Sequence
  ENSG00000278768_3 (sequence is synthesized)
cccgtgtcctggcacagaaggagagtgagtcccccaaggaccaagcaataagatcagtgatttcttggggtggcaaggtcttctacaggctacccttttcatcttcctgcttctaaacaa

SEQ ID NO: 883005 - DNA, 120 bp, Artificial Sequence
  ENSG00000278768_4 (sequence is synthesized)
atcatacccaaagtgatttctagtttcttaaatgtgttcaggagaaaagactttccgggatttttaattatttgtttcagaatcatacagcccttgatataaagttatttaaatctaaac

SEQ ID NO: 883006 - DNA, 120 bp, Artificial Sequence
  ENSG00000278768_5 (sequence is synthesized)
tgccacaataaatgttgaatgaatggttatttgtttatattataagttttattttctctgcttattggagaaccattcaccattgttctaattaattaataaatagacaaacttcttata

SEQ ID NO: 883007 - DNA, 120 bp, Artificial Sequence
  ENSG00000278768_6 (sequence is synthesized)
tccccctgactcaggctgggacatacctgcggaaggatggtgatgcggaaggactgtccactcacggaggaggctgccttgatggatttgactgcagcttcaaacactttcttgggcaaa

SEQ ID NO: 883008 - DNA, 78 bp, Artificial Sequence
  ENSG00000278768_7 (sequence is synthesized)
gtacagtggcgtgatctcggctcactctaacctctgcctcctggattcaaaccctgtccattgatctccacccgcaca

SEQ ID NO: 883009 - DNA, 120 bp, Artificial Sequence
  ENSG00000278768_8 (sequence is synthesized)
gttcaacattatgcttttaaggattagatagaagaggtctcctacctattccttttagcaccttggctgcaaagctccagaggaagatttgggggaaagagtgagcctatgaccaggaag

SEQ ID NO: 883010 - DNA, 120 bp, Artificial Sequence
  ENSG00000278768_9 (sequence is synthesized)
acagagcccagccctgctatagtccagttgctctcccacagggcacctggagcttagggggttaggatatttcagtgctgcctatcatatgtagaataaagggtggttcagatagagaca

SEQ ID NO: 883011 - DNA, 120 bp, Artificial Sequence
  ENSG00000278768_10 (sequence is synthesized)
atgaaattaatatggcagaaattcatgtgttaagtggaacttcttagtgggcacttcatttaagagagctaaaaaagagctctttggctagataagcccttcccatctcacttttggtca

SEQ ID NO: 883012 - DNA, 120 bp, Artificial Sequence
  ENSG00000278768_11 (sequence is synthesized)
ggctgcaaccacagaaaagaaaacattgaaaacaacacccatcttctgagatgggatgctatcttggagatgaggtctaaaactaggactggtgagtggttgtgtttctgcctttcctag

SEQ ID NO: 883013 - DNA, 120 bp, Artificial Sequence
  ENSG00000278768_12 (sequence is synthesized)
ctttgatcccactattccctgtctttgtactccctctccttctcctctttccagccgcccccatttgtataaatagtcaatctagtttttttttttaattcaagaggcaatctttgcacc

SEQ ID NO: 883014 - DNA, 120 bp, Artificial Sequence
  ENSG00000278768_13 (sequence is synthesized)
aatgttaggcttgtttatacagtccctgtctctaaagcaaatagcaaactgtgcatcctctcctactgactttggccagcagggaaacaagcttggtctcttctctgccagggtaccaca

SEQ ID NO: 883015 - DNA, 120 bp, Artificial Sequence
  ENSG00000278768_14 (sequence is synthesized)
gggacacacgccaaggtaacctgcgtgtgatgccagtacttctgaaactaagaaaagaagaatactttgggttggagaatttaaaggaatggtggacaaaggttcagggctgaagtttca

SEQ ID NO: 883016 - DNA, 120 bp, Artificial Sequence
  ENSG00000278768_15 (sequence is synthesized)
agcagcagaatttcccgacttaaatttgaggtgaccaagagtattcccgccagcagagtgcttctttcttctcttttctgtttcctacaggtacagtccctggaacccaccttgccagcc

SEQ ID NO: 883017 - DNA, 120 bp, Artificial Sequence
  ENSG00000278768_16 (sequence is synthesized)
ttttccttctccatcaaggcagaggcatttggtgggtggggagggtcctgaggtgctctggccacaggtgccatctgtgtctcctacttgtgaccaaagtgaaccacggaggtgtggtcc

SEQ ID NO: 883018 - DNA, 120 bp, Artificial Sequence
  ENSG00000278768_17 (sequence is synthesized)
aggggaatctctatcttctgcccatgggcctcctcacttcagcagggagatgtcatcagcaaagtcatcatgctgctggcgcaggcagcggaggcagcgccactgacacaccatgaggca

SEQ ID NO: 883019 - DNA, 120 bp, Artificial Sequence
  ENSG00000278768_18 (sequence is synthesized)
gagtggcagcatgaagagggcgcagatggcagccatgacataggctatggtcatgagggttgactcatctgtctgtggaatgttgtagccacagtcttccatgtccaaggtgacaaaagg

SEQ ID NO: 883020 - DNA, 120 bp, Artificial Sequence
  ENSG00000278768_19 (sequence is synthesized)
gccttccaccgctgccgtcctgaactcatcgtgcactggggagagggcaaatgtgaatggacagctctcattgtcatagaggagttaacaaaaagaacttcctgatagtgaggccttgaa

SEQ ID NO: 883021 - DNA, 120 bp, Artificial Sequence
  ENSG00000278768_20 (sequence is synthesized)
attagcccatgcagaagttatctaatctccttcccaggagatatttaggagcaggctgggaagccagcaccaggtagaggcctgtctcccttcccaagtcactgggagcagcagcccttc

SEQ ID NO: 883022 - DNA, 120 bp, Artificial Sequence
  ENSG00000278768_21 (sequence is synthesized)
cttgtatacccagctggtaggagtgataactaaaagtcagtagttctgagttgaccaaaagccacccccttgaccaaaagccaaatctagtaaacttaactttctgctgctgaaatccaa

SEQ ID NO: 883023 - DNA, 120 bp, Artificial Sequence
  ENSG00000278768_22 (sequence is synthesized)
ctgcaaaaccctgccacctttctgaagtagcattcagcctcaccatgtggcagctgacagggtcactatagactcagtctgctacccttgcatcaagagcttcccaaggtacccaggtaa

SEQ ID NO: 883024 - DNA, 120 bp, Artificial Sequence
  ENSG00000278768_23 (sequence is synthesized)
ctcttgctgctctgggtttccaacagaggttaccaatccaggcagtggtcattatggcaggcagtacaaaaaaaggacgagcattgacactagcttttgcacaactgttgacttgggttt

SEQ ID NO: 883025 - DNA, 120 bp, Artificial Sequence
  ENSG00000278768_24 (sequence is synthesized)
gaggcaactgttactaccctcccctaaactgacagggacccaggtatactaactgttgtttgacaaggaaaatatggagagactgaccccaaaccctcagccctggcactctcaccatgg

SEQ ID NO: 883026 - DNA, 120 bp, Artificial Sequence
  ENSG00000278768_25 (sequence is synthesized)
caagcgctgacagcaaagccaattcgttttcgggcccgatcaaagacaacgtagaagccctccatgataacagctcccataacagtgcccgtggatgactgtgagatggcaaacttgtaa

SEQ ID NO: 883027 - DNA, 120 bp, Artificial Sequence
  ENSG00000278768_26 (sequence is synthesized)
cagtcgtcttgggacgtggccacatcttccactggccgcaggtattgctaggggtaagcaatcacagggtgagtgtcttcctcactctccttcaccccatctctgccttgtaggcatcta

SEQ ID NO: 883028 - DNA, 120 bp, Artificial Sequence
  ENSG00000278768_27 (sequence is synthesized)
gctctaacgggttttctgagacccctttactgctggacactactcatctgttttgtcttccaagttctggcaagccatacctgctcactgtctcccagtgtgtacttttaagagagatcc

SEQ ID NO: 883029 - DNA, 120 bp, Artificial Sequence
  ENSG00000278768_28 (sequence is synthesized)
ccctgactcaggctgggacatacctgcggaaggatggtgatgcggaaggactggttggtaacctcacccattaggtagagtgagatgactgggaaaatgttccaaggggtggtgcctgct

SEQ ID NO: 883030 - DNA, 120 bp, Artificial Sequence
  ENSG00000278768_29 (sequence is synthesized)
tgccagcacaccagctgctctcctagccagaaaccatcagggaacttctccgtctgtgttggcaagaaggggataacaatgaggaaaagcctctttatcatctcgcccctcccatgttca

SEQ ID NO: 883031 - DNA, 120 bp, Artificial Sequence
  ENSG00000278768_30 (sequence is synthesized)
gatacattaactgggcccttcatttgcttttccagtgaaatatctaaagtggggaggggtaaaccaaccagaggattacaggaagagagagggagtgtgatgtcaaacttttgtaccggg

SEQ ID NO: 883032 - DNA, 120 bp, Artificial Sequence
  ENSG00000278768_31 (sequence is synthesized)
gagggagtgtgatgtcaaacttttgtaccgggggattgtgtgatgagcaaagtgacagccataaaggggaagagttttttttttttttttgaaacagtgtctcactctgttgcccaggct

SEQ ID NO: 883033 - DNA, 60 bp, Artificial Sequence
  ENSG00000278768_32 (sequence is synthesized)
ggggaagagtgttttaagagctctgagtagaagggtctaagtgcagacatcttggctgtt

SEQ ID NO: 883034 - DNA, 120 bp, Artificial Sequence
  ENSG00000278768_33 (sequence is synthesized)
ctctgagtagaagggtctaagtgcagacatcttggctgttgctgaagaatgtgactctcaccgcctccctctgacactgtaccatctcttttacccccatccttagtccactcacggagg

SEQ ID NO: 883035 - DNA, 120 bp, Artificial Sequence
  ENSG00000278768_34 (sequence is synthesized)
ggcctcccagagtgctgggattacagccacgcccggccgcttttaacttttcttagtacatttatatctattctaatttaacatacataagaatctagggaaggaagacataaatgattt

SEQ ID NO: 883036 - DNA, 120 bp, Artificial Sequence
  ENSG00000278768_35 (sequence is synthesized)
acatacataagaatctagggaaggaagacataaatgatttagttaccttttattgagtactgccaaccacagagataaacactttacacattatctctgatattctgagaaagttgtttt

SEQ ID NO: 883037 - DNA, 120 bp, Artificial Sequence
  ENSG00000278768_36 (sequence is synthesized)
tacctgttttgcagataaggaaactgagacacagaatagtaactggcctaagggtacatagctagtacaaatcagagctagattcagatctgggtcttcctgactccaaagacaagactc

SEQ ID NO: 883038 - DNA, 120 bp, Artificial Sequence
  ENSG00000278769_0 (sequence is synthesized)
ttaagcaggagtcatttgcctctgtcatgaattccaagactacaaagttttaagagatgctgggatagcaaatgaggcttgaattctgtgttgacaagcccacacacctcatttcattta

SEQ ID NO: 883039 - DNA, 120 bp, Artificial Sequence
  ENSG00000278769_1 (sequence is synthesized)
gtatccaagagataaacaaacaccacctcttctactccaggactggcatctctggacttttctgccataatcccaaatcaggccaactctccttcctctaggattcgcgtggtgggatgc

SEQ ID NO: 883040 - DNA, 120 bp, Artificial Sequence
  ENSG00000278769_2 (sequence is synthesized)
caggcagtgacacccttagagcaggaagtctgactgtagacccagctacaccccaaccagtgagggtctgcattgggcacttgggcctcctcgtgaggcgggggtccagggttctggtgc

SEQ ID NO: 883041 - DNA, 120 bp, Artificial Sequence
  ENSG00000278769_3 (sequence is synthesized)
gtggggctcggctagaaacagattagacagtgttgctaattcttcagcaaagtcctggaatacatagaaagatgagggaaaaggcagcatgtaataattctcaatggctcatcctttgtc

SEQ ID NO: 883042 - DNA, 120 bp, Artificial Sequence
  ENSG00000278769_4 (sequence is synthesized)
actaaagaccacaacctggctggctatattattttttctcaactgccctccacactgaaatggacatgaaaccttgtctgtttgttagtactctgggaggctgaagttatggcagggagc

SEQ ID NO: 883043 - DNA, 120 bp, Artificial Sequence
  ENSG00000278769_5 (sequence is synthesized)
gaactctgatggaggcacaggcttgaccagtttttgagtactactgagtgcatctacttcatcttgaaattattattcccgttaaaatccaggttattctaattttaaaaacccatataa

SEQ ID NO: 883044 - DNA, 120 bp, Artificial Sequence
  ENSG00000278766_0 (sequence is synthesized)
tttcttctagaggagatgacatttgagcaagatcttaaagaaaatcagatgccttcacctgaccactgcttggtgatcccatggcactttgtacatctctccattagctctcatctcacc

SEQ ID NO: 883045 - DNA, 120 bp, Artificial Sequence
  ENSG00000278766_1 (sequence is synthesized)
agcccatcattattgtatgtgctgccttctgaagcttgcagctggctacatcagtccaatgtgaataacaaaatgaagaatatcaggatgattcgagaccaggaatactacagatgtcca

SEQ ID NO: 883046 - DNA, 120 bp, Artificial Sequence
  ENSG00000278766_2 (sequence is synthesized)
aaagaggcccgcttttagcctccacactggttggtgacctgacatgagagaaatgacagaaatctcagaagactggcctcatgaataatcttcagtttcaatgtaacaaagcaagccttc

SEQ ID NO: 883047 - DNA, 120 bp, Artificial Sequence
  ENSG00000278766_3 (sequence is synthesized)
tagaaattacctgcctctgcagttcactctgctgcttcagatgaaaattttcagagttccaccacccctggagaatacagcaactgtttactgcaatcagcaatcaggatggagaattcg

SEQ ID NO: 883048 - DNA, 120 bp, Artificial Sequence
  ENSG00000278766_4 (sequence is synthesized)
tgctgtgggggccaatccaggggttccctgtcatgagcagtggggagtgtgtagaacccatgagagatgggctttggtcaattaaagcttgttgaaggtgtagataagggtgttagctcc

SEQ ID NO: 883049 - DNA, 120 bp, Artificial Sequence
  ENSG00000278766_5 (sequence is synthesized)
ttagctctcatctcaccagcccatcattattgtatgtgctgccttctgaagcttgcagctggctacatcaggaattctcagggattataatcctcatcaatataacaagcctccaaagtc

SEQ ID NO: 883050 - DNA, 120 bp, Artificial Sequence
  ENSG00000278766_6 (sequence is synthesized)
atattttttaactttgtgaaatgccctcccacctaactaccccatttgacacctgcaaccatcctctagagaggcagacaagatcgaccgtctcactttacagaagtgcaaagagtagct

SEQ ID NO: 883051 - DNA, 120 bp, Artificial Sequence
  ENSG00000278766_7 (sequence is synthesized)
cctacttctcctcactcctcccctctgacctccttatgtcaccactgaccaatggatcactgtgtggccgttcagcatcttcctatgctgtgtcaggcaagagaaattctggaaagagag

SEQ ID NO: 883052 - DNA, 120 bp, Artificial Sequence
  ENSG00000278766_8 (sequence is synthesized)
catctcatgtttattaaggagactgggtgtccttgtagaaagtcctgccatgcacaaccccggtcttaactgatgtgtttcaccatactgaaggcaagttgccatctaacatagttgaag

SEQ ID NO: 883053 - DNA, 120 bp, Artificial Sequence
  ENSG00000278766_9 (sequence is synthesized)
gggagccagttgtggtgatctttgttcctgctgaaatatggaaagaaaatgaggaaatgagctcattttcaaagaaaatgaacattctttcacatgaaagaaataggagcaaagtgacag

SEQ ID NO: 883054 - DNA, 120 bp, Artificial Sequence
  ENSG00000278766_10 (sequence is synthesized)
tcactctgctgcttcagatgaaaattttcaggtctgtctgccactgtagtgaagcactgctttgggtagtgtctgtggagaaactttttaaaggacatagttgaaatattgtgctacaaa

SEQ ID NO: 883055 - DNA, 120 bp, Artificial Sequence
  ENSG00000254109_0 (sequence is synthesized)
ctgaaccttcttccaccgccgcgccccgggcccgcgccccgccggccgcccgcactgggtcccgcgtcgcccccgccaccacaccgagccgcccagtacctcctcctcctgaaggcagag

SEQ ID NO: 883056 - DNA, 120 bp, Artificial Sequence
  ENSG00000254109_1 (sequence is synthesized)
cgagccgcccagtacctcctcctcctgaaggcagagctgggggtccgtacggaggaacttcagaggctggaagcacgcttgaaaaagaaagggggcctgggctttgcaccagcttcagga

SEQ ID NO: 883057 - DNA, 120 bp, Artificial Sequence
  ENSG00000254109_2 (sequence is synthesized)
ttgcgtacttgtttcctcatccgtgaaatgggagcagctgaatgtgtctcctcgagttttcgagaaaaatgagggtctcactttgttgctcaggctgagctcgagctcctggcctcaagt

SEQ ID NO: 883058 - DNA, 120 bp, Artificial Sequence
  ENSG00000254109_3 (sequence is synthesized)
gatcctcctgcttttggcctcccaaactgatgggattacaacgtggagccaccgtgttaaactcttagatttgactgctacaaaggtataaatgtggaactccatatatcagtgggttct

SEQ ID NO: 883059 - DNA, 120 bp, Artificial Sequence
  ENSG00000254109_4 (sequence is synthesized)
gtatcctggatgaaaataaaccaactcttgaaactgcaacccaagacattcagaagagataaggctacagtgaatgtggaaactttgcacgtgtttggatgtattgattgccttaactgg

SEQ ID NO: 883060 - DNA, 120 bp, Artificial Sequence
  ENSG00000254109_5 (sequence is synthesized)
cagctctttgcactgccagcttccctcaattacatgaggaaccacgagggggcaatgtcttcccgagcaataatagctgagtggtggtcttaggaccccgtggtggcccatgatgctagc

SEQ ID NO: 883061 - DNA, 120 bp, Artificial Sequence
  ENSG00000254109_6 (sequence is synthesized)
actgtgtctttggccattcttgcctgtcatggagcatactccacagaagggcatggtcttcttggatcccggcatgggcccaacaaaaatgacaatgtagtcaatagttccactcagacc

SEQ ID NO: 883062 - DNA, 120 bp, Artificial Sequence
  ENSG00000254109_7 (sequence is synthesized)
tcacttaggagcaggtgaactatgttgtgtgatatcaggatgcccggagaacctctcctatccccacccagggaagcatggcttaattccaaataaagaatctgatttctttgtctttaa

SEQ ID NO: 883063 - DNA, 120 bp, Artificial Sequence
  ENSG00000254109_8 (sequence is synthesized)
tcctcccaggaattctccatcccagcctgctgctcctgtcttgcaccggtaacagtttccaactacagtatttgcttaactgtttctccccacccccaccagacattctttatacttggt

SEQ ID NO: 883064 - DNA, 120 bp, Artificial Sequence
  ENSG00000254109_9 (sequence is synthesized)
ttaagtgctgctggggatagggcgggggtggctgtgggagttgcagataaggaccctccctttagggagtttaaagtggtatggtggctcacacttggaatctcagcacttaaggagata

SEQ ID NO: 883065 - DNA, 88 bp, Artificial Sequence
  ENSG00000254109_10 (sequence is synthesized)
gaggaatgcctgggcaacatagtgagactctgttctccacagaggggaaaaaaagaaaagacaaaaaaataaagtggtatggagccaa

SEQ ID NO: 883066 - DNA, 120 bp, Artificial Sequence
  ENSG00000278765_0 (sequence is synthesized)
cttggctcaatttgatgttaaacttgcgccatttggggtttgtctgtgtgcttggcacatctttatggactgtggcattgggaatctgcattataaagcaattatttctcatagtaaaag

SEQ ID NO: 883067 - DNA, 120 bp, Artificial Sequence
  ENSG00000278765_1 (sequence is synthesized)
ggaaaatgatagcttggattaatgtgcaagttgggtcttctgatgaagatatgttcttatttataatttaaagctgatagaactgaactaagtccaggctcagtattagcgttcaactta

SEQ ID NO: 883068 - DNA, 120 bp, Artificial Sequence
  ENSG00000278765_2 (sequence is synthesized)
acaacttgtcaatctgtggatctgcacatcaccttgttttgacgatgtccagcactgaggttttttccccaaaagttactgctttcctatctagtgtgtgaagtttaaagttacttgttt

SEQ ID NO: 883069 - DNA, 120 bp, Artificial Sequence
  ENSG00000278765_3 (sequence is synthesized)
ctcttatggatgacttaattgaccttggccttgtaagtttcctgttgactgttgaataaactactgaatgttgaaaacaaatgaaatgtgaaataaaaccatcctgctgggatgaaaagc

SEQ ID NO: 883070 - DNA, 120 bp, Artificial Sequence
  ENSG00000233993_0 (sequence is synthesized)
agacagatgcaggcagggagcgggaggagggaatgggaatgagctgagcagcagcatcacagctggagggctggacatggatgaccagctcctcacttccaggtgtttccacatcaagca

SEQ ID NO: 883071 - DNA, 120 bp, Artificial Sequence
  ENSG00000233993_1 (sequence is synthesized)
tcctgcagacagctaacaagttcattctacaaagtacagttctcaccactttatccttcctctgctcggaaacagtcaatggtttcccactgtccacaggggatgcttaacgcatgtggg

SEQ ID NO: 883072 - DNA, 120 bp, Artificial Sequence
  ENSG00000233993_2 (sequence is synthesized)
ttatgcagctagaaagacaaggcacaacctctttggtctctgcctcttttcatggcacagacaccaaaagccatctaatggatgaccagacaacatggagaaaagagctctcctagaaag

SEQ ID NO: 883073 - DNA, 120 bp, Artificial Sequence
  ENSG00000233993_3 (sequence is synthesized)
ccaaggcccagaagagtgaggagaaggcctgtgtccggcagggtctactgattctaagcctacgacatactgagaagaaaatcaactctctatcaaggaatgtgatagatgtgggattaa

SEQ ID NO: 883074 - DNA, 120 bp, Artificial Sequence
  ENSG00000233993_4 (sequence is synthesized)
gtatcatcattgatttaaagagtacaaagtttgaagaaaatgcttccccgagacatttggcaaggatacagctttcctctattatgcccaggcagccacctctgaaagctccctagaata

SEQ ID NO: 883075 - DNA, 120 bp, Artificial Sequence
  ENSG00000233993_5 (sequence is synthesized)
taactcaagaatggcacccaaaatccctgagcatcttgttcctctccagccatacaaagggatgacaacaacatggatccagcaaccggaaggtatgtttgccactgtgtgtcagccaga

SEQ ID NO: 883076 - DNA, 120 bp, Artificial Sequence
  ENSG00000233993_6 (sequence is synthesized)
cttcaaaatggtccccagtgattcttgcctcctggtattcatgacccatgtagtcaggtaggtctgacctacataaccaacaggatgctgcagaaatgacagtatgggacttccaaggct

SEQ ID NO: 883077 - DNA, 120 bp, Artificial Sequence
  ENSG00000233993_7 (sequence is synthesized)
accagtccacatgttgtgaggacattcaagcagccctgtggaaaagcccatgtggcaaaacactgaggcctcctgcccacagccagcattagcttcccagcctctgtagtgggccacttt

SEQ ID NO: 883078 - DNA, 120 bp, Artificial Sequence
  ENSG00000233993_8 (sequence is synthesized)
ggaagtaggcgctcctgcctgtccaaattacagtggaccgaggccccaaccaaaagcttggctggaatctcatgagacacccctggccagaaacacctgggctcaatggtccaaattcct

SEQ ID NO: 883079 - DNA, 120 bp, Artificial Sequence
  ENSG00000233993_9 (sequence is synthesized)
gacccacagaaactgtgtaaaaaatgtttattgttgtgttgagctgctgagtttgggagtaacctgctatgctgcactaaacaactaacagagacggcctgacttaaagaccaatgtgac

SEQ ID NO: 883080 - DNA, 120 bp, Artificial Sequence
  ENSG00000233993_10 (sequence is synthesized)
acacacagaattcacttcccaggagctgggactggggtctccaccagcacaactgcaggcaaaggctgaaaggtctctgcacaggcacccacactattctgcccagggtggtcccagggg

SEQ ID NO: 883081 - DNA, 120 bp, Artificial Sequence
  ENSG00000233993_11 (sequence is synthesized)
cagaggcaggggcagatttccatcaccatggtctagggctcccctgtgacagacgggaggccagctgatttccaaaactgcttggtgagcactaactggggcagcagaggaggggcatca

SEQ ID NO: 883082 - DNA, 120 bp, Artificial Sequence
  ENSG00000233993_12 (sequence is synthesized)
gctcccccagaggagatagcatctggccttgtccacagaggcactaggaatcaatctggagtcacgaggtcacatgtggccccaaattgggggtaaacccacagaagaaacgaccctcca

SEQ ID NO: 883083 - DNA, 120 bp, Artificial Sequence
  ENSG00000233993_13 (sequence is synthesized)
caaagtaactcttgaaactatgcatgctgccctgcaatccctttgatgtacctttaagttcatttggaccttttgatatttgttcttgaagtcatctccaagtaaaattatttaactctc

SEQ ID NO: 883084 - DNA, 77 bp, Artificial Sequence
  ENSG00000233997_0 (sequence is synthesized)
gtaagaagtgcctttcatatcctgccatgattctgaggcctccccagacatgtggaattgacctcgtgacccgcccg

SEQ ID NO: 883085 - DNA, 120 bp, Artificial Sequence
  ENSG00000233997_1 (sequence is synthesized)
gggattacaggagtgagccaccgcgcctgaccattacccatgctcttaatcatgatttgtgtttcctcttggccaaatcctgtgttggcctatctcacttataataagacggggactgct

SEQ ID NO: 883086 - DNA, 120 bp, Artificial Sequence
  ENSG00000233997_2 (sequence is synthesized)
ataataagacggggactgctgtcctccagaaaatgttaactaaaagtactgaattcttcatggcatatgctgaatacatgggctgatcatagatacaattcacataaagagtgatgcaga

SEQ ID NO: 883087 - DNA, 120 bp, Artificial Sequence
  ENSG00000233997_3 (sequence is synthesized)
gtttttactggaatattctggcaggcaaaagatctctccttttggctttctccctgcttctgaaacacatccctttccaggaatgcatgctttctgaggcagacaaaagaagagttgttc

SEQ ID NO: 883088 - DNA, 120 bp, Artificial Sequence
  ENSG00000233997_4 (sequence is synthesized)
aaggagaagaagacttagagacacagacacacagagggaagaaggccatagaaagacaaaggcaaagattggagttgtactgccacaagcccaagaatgaggaaaccaccaggagctaga

SEQ ID NO: 883089 - DNA, 120 bp, Artificial Sequence
  ENSG00000233997_5 (sequence is synthesized)
agaaacaagcaaggattcgtccctggattggtctttcaaagggagcatggccctgctgacactttaatttcagacttctaggctgcagaaccattaaagaataaatttcctttgtttcaa

SEQ ID NO: 883090 - DNA, 120 bp, Artificial Sequence
  ENSG00000233997_6 (sequence is synthesized)
tgccaccaccatgtaagaagtgcctttcatatcctgccatgattctgaggcctccccagacatgtggaactagtgatgcagagatgtgacccaacgggtctacctaccagggaggaggtg

SEQ ID NO: 883091 - DNA, 120 bp, Artificial Sequence
  ENSG00000232028_0 (sequence is synthesized)
gttccggtgactgcaggggttttcccggtgctcggtgtttcctccccgtcggcctttaaacgcgaatgtgaccctaccaccaaagtggagtgcagtccagaatcaccaaacctgggcttc

SEQ ID NO: 883092 - DNA, 120 bp, Artificial Sequence
  ENSG00000232028_1 (sequence is synthesized)
caggtgtctggaaacacaatgttaacatttgttttgctccaaaacaaagtatgaccgtgtcggacgttttagtccagccccaaattttgcctctgagcaagattcccaggacctcattgg

SEQ ID NO: 883093 - DNA, 120 bp, Artificial Sequence
  ENSG00000232028_2 (sequence is synthesized)
cactattaacttccattttctgctgtagtacttaaagtgacagaagttactcttcctagaagtaacttttccagacgattcaaactgctgttatacagagatttaagtatttgtgtgcat

SEQ ID NO: 883094 - DNA, 120 bp, Artificial Sequence
  ENSG00000232028_3 (sequence is synthesized)
gtgtgaaaacagagatatgtaatgtatatatttcattttatttccactgttctgcttctctttttaaaaataaagcggtctcctccactttgggtaaatctttcagcacatttgatcaaa

SEQ ID NO: 883095 - DNA, 120 bp, Artificial Sequence
  ENSG00000232023_0 (sequence is synthesized)
tttcccttggtttatgatattcaatttggctcctgctgtaatgtacactgaaacctcaggctgctgagctatcttgatggttttaagaagacaatctggtgcctttacctgctagagaag

SEQ ID NO: 883096 - DNA, 120 bp, Artificial Sequence
  ENSG00000232023_1 (sequence is synthesized)
tcacctagaatcctgttgtttaagcagaagattgtgtttccccaccacccccacaccaaacccagggaaaagataagctaacaggcagatcttcctgtcaccaaacacacagatctacct

SEQ ID NO: 883097 - DNA, 120 bp, Artificial Sequence
  ENSG00000232023_2 (sequence is synthesized)
ccttcatatagaactacttaacaatatacatactgatccattgtggaattattaaggaaaatacattgaaataggtggcattcttgtcaaagatatatatggacggctagatggatagat

SEQ ID NO: 883098 - DNA, 120 bp, Artificial Sequence
  ENSG00000232023_3 (sequence is synthesized)
aggtgaaaatcatgttccatggaagaagagttagctcagcctgcaactcaaacaagtacagatattcttccatggaatgaccatcatacttggattgtaataaaaatgctttaggcaaac

SEQ ID NO: 883099 - DNA, 120 bp, Artificial Sequence
  ENSG00000232023_4 (sequence is synthesized)
ttctcatttcatccttggcatattaaaaatatgtatgtatgtttaaggcttgaaacttaacactgtattttaatgtttcagtaaggtaattcttcttaaataaaattggcatttttaaaa

SEQ ID NO: 883100 - DNA, 120 bp, Artificial Sequence
  ENSG00000232023_5 (sequence is synthesized)
agaacaaccaccactcaggaccacggtgccgaatctcataacgaactggacatcaagaagtttctacattcactgtaagaatttgaaatgaagaaagaacaatacaagctgcagaccaca

SEQ ID NO: 883101 - DNA, 120 bp, Artificial Sequence
  ENSG00000232023_6 (sequence is synthesized)
atagagaaaaatggatgggaagaagttattaaagaaataatacaagagaattttcaacagctgaaagtaatctcaaatggtcaaattgaaaggaatgctgaaaaggatgaacaacaaaga

SEQ ID NO: 883102 - DNA, 120 bp, Artificial Sequence
  ENSG00000232023_7 (sequence is synthesized)
tcatgacgcacaccaaaatatgatgaattttcacagcttcatgaatgaaaattttaaaaagtttccaaagaggaaaaagtgctgtcacccacagaagaatgagttcacacttctcactag

SEQ ID NO: 883103 - DNA, 120 bp, Artificial Sequence
  ENSG00000232023_8 (sequence is synthesized)
aaagcaccaaaatgccttaaaagaatgggtaatttggaaagtatagggaaaggtaactttcaacccattattataaaaatacctaaagtttgaggtaatatgagtataattggacgagag

SEQ ID NO: 883104 - DNA, 120 bp, Artificial Sequence
  ENSG00000232023_9 (sequence is synthesized)
catgggaaatgccttttctctactttctgacacccaaaacctcaaataccactacagggagaaaaaaagaatagaaatcatgctttgactttaaactggaaataaataagaaattcagaa

SEQ ID NO: 883105 - DNA, 120 bp, Artificial Sequence
  ENSG00000232023_10 (sequence is synthesized)
gaatcaaacttcctgtggtgtcagtctcccttctttcctaacccttctggctttatttcttggctgcctctttcagtcatttgctcttgggtttattagtcgaattcagactatttacct

SEQ ID NO: 883106 - DNA, 120 bp, Artificial Sequence
  ENSG00000232023_11 (sequence is synthesized)
ttatttctaatggataacctttacgacattatttatgttcattgcttatcaattctatgaactaaaattgtggtcaagaagtatttcactcccttgccaaacccagccctgctcagcccc

SEQ ID NO: 883107 - DNA, 120 bp, Artificial Sequence
  ENSG00000226707_0 (sequence is synthesized)
aggtgagggtcctgctgtgttacccaggccggagtgcagtgactacttacaggcacgatcatagtgcactagagccttgaactcccgggctccagtattactcctgcctcagcctcctga

SEQ ID NO: 883108 - DNA, 120 bp, Artificial Sequence
  ENSG00000226707_1 (sequence is synthesized)
atcctctttttatgttgagttgaagaaagtcacaagacgtgagacgctttatgttgcagttaatggtctcttcctcccttttctctgttcctgcaaatggacaattattccttctcacaa

SEQ ID NO: 883109 - DNA, 120 bp, Artificial Sequence
  ENSG00000226707_2 (sequence is synthesized)
ggtttttggcttcccacttcagcatgcctccagcagtgttctaaaattactctacaattgccaaagtaagagcagcagatgctctaaatctatttccaggacacccgtctcatgatcaag

SEQ ID NO: 883110 - DNA, 120 bp, Artificial Sequence
  ENSG00000278492_0 (sequence is synthesized)
cagaaaagtagggcctgcagtcttgtggggttttcttaaactatcaccagataatagttcatctctaagataattatttgtaaaagaaaattcatcagattacatttttaaatattttta

SEQ ID NO: 883111 - DNA, 120 bp, Artificial Sequence
  ENSG00000278492_1 (sequence is synthesized)
tgggtcctcaaattggtcacaggatgatattaacagctgatttgtttttattgttcatatttatgtctcacagactgcatgagtatttgactcccaataaaactgaatattgaataccta

SEQ ID NO: 883112 - DNA, 120 bp, Artificial Sequence
  ENSG00000249069_0 (sequence is synthesized)
ctcattctctcttgcctgccgccatgtaagacatgtctttgctcctgcttcaccttctgccatgatcatgaggcatccccagccatgtggaactgccagtaaaggaataaaaaagatcca

SEQ ID NO: 883113 - DNA, 120 bp, Artificial Sequence
  ENSG00000249069_1 (sequence is synthesized)
ccaagacagagaattaaaggagagactccagcatataagaggtcaaccatttaggaaaacagaaagtggatacagaagtggcaactgacgtagcggaacagagaaagctgaaggctaagt

SEQ ID NO: 883114 - DNA, 120 bp, Artificial Sequence
  ENSG00000249069_2 (sequence is synthesized)
tcaagaggcgggggaagccagcaagaaacaagctgattcctgttgcagaactctcatcagctcagcaataagcaccacctggttctctgagggtctcacttcacccaggctggaatgcag

SEQ ID NO: 883115 - DNA, 120 bp, Artificial Sequence
  ENSG00000249069_3 (sequence is synthesized)
agtggacctcctccccagtggtaccttcagccatcagaacacctcgctttagatctgtgggtcccaaatttcatcaaatccaatgaccatttctatgatcactcattctgggggcagccc

SEQ ID NO: 883116 - DNA, 120 bp, Artificial Sequence
  ENSG00000249069_4 (sequence is synthesized)
tctggcatgtaatgagcagtcctatggagaggcccatgtgacagtagccatgcgagtgacactggaagtgaaacctgcagctccagtcaagcctttagaagactgcagccctggctgaca

SEQ ID NO: 883117 - DNA, 120 bp, Artificial Sequence
  ENSG00000249069_5 (sequence is synthesized)
gcttgacagcaaactcatgagagactctcagcttgaacaactcagctaaactgttcctgggttcctggtcctcaaaaactctggaattctgtgaagcacatgacctcaagtctttggata

SEQ ID NO: 883118 - DNA, 120 bp, Artificial Sequence
  ENSG00000249069_6 (sequence is synthesized)
aatggaaacgcagcttatgccggaaagatggaaggctggctgtactaatatcagaaatggaagaggagagacatcactagagatcccatggatattgaaaggataataaaggagtattat

SEQ ID NO: 883119 - DNA, 120 bp, Artificial Sequence
  ENSG00000249069_7 (sequence is synthesized)
tggtgtgatcacagctcactatagtctcgatctcctgggcctcccacatcagccttttacagaatcaagaagcctgttcaaggcgatgcagcagaggaagctgggtctgccacagtccag

SEQ ID NO: 883120 - DNA, 120 bp, Artificial Sequence
  ENSG00000249069_8 (sequence is synthesized)
caggtaatgaggacctgagacctgttgtcaatcacgtgaataagcttgggaggagattctccagccccagtcaagcctcagaagacttcagccctaggtgacagcttgatgataatctcg

SEQ ID NO: 883121 - DNA, 84 bp, Artificial Sequence
  ENSG00000249069_9 (sequence is synthesized)
gactttccttctttcgtggcaattttcccccaggagggatttccctgcagtggacctcctccccagtggtaccttcagccatca

SEQ ID NO: 883122 - DNA, 120 bp, Artificial Sequence
  ENSG00000249069_10 (sequence is synthesized)
tcagctaaactgttcctgggttcctggtcctcaaaaactgtacgagatgaaaaaaaagtttgtttttttaagctgccaagttttgggataatttgttattctaatatattttttaatacc

SEQ ID NO: 883123 - DNA, 120 bp, Artificial Sequence
  ENSG00000249069_11 (sequence is synthesized)
attgttatattttatgtctcctataagctgtaaattcctacatagcaagaattctgtcttactcatcctttaacaactactgtgtaccttataatgtttcataaaatattatgatttggt

SEQ ID NO: 883124 - DNA, 89 bp, Artificial Sequence
  ENSG00000249069_12 (sequence is synthesized)
gaaagaatagctaagcatggtgaacaaggtgggaagaccacttgagcccaggagtttgaatcagcctgggcaacatagcaagactctgt

SEQ ID NO: 883125 - DNA, 120 bp, Artificial Sequence
  ENSG00000249069_13 (sequence is synthesized)
ttttaaaaaaggatgactctgaaggggaagctaaaagcctcagagaataactcatgcgtagaaataggactaaatcctaaggcgattccaacatttgcctggctggatttcagagctgct

SEQ ID NO: 883126 - DNA, 120 bp, Artificial Sequence
  ENSG00000249069_14 (sequence is synthesized)
ttcagagctgctatggggacatagtagtgtgtccagtacctttcctttttgaatattaatgcatatagtgtttattcctgttccaccattgtgtgtttggggtgtgtgtgtgtgtgtgtg

SEQ ID NO: 883127 - DNA, 120 bp, Artificial Sequence
  ENSG00000249069_15 (sequence is synthesized)
tttgagttgatgctgtaatgagacaagaattttagaaatgttgagatggagtggacgtgttttgcatgttggagggacttgattcactggagcctagaaggcagactatggtagccagcc

SEQ ID NO: 883128 - DNA, 120 bp, Artificial Sequence
  ENSG00000249069_16 (sequence is synthesized)
ctcaagattgtctcctcctggtattcatacccttgtataattcccctcccacattgtaccagaatttatctgtgtgacagaatatggcagaagtaatgatatgtcacttctgagattagg

SEQ ID NO: 883129 - DNA, 120 bp, Artificial Sequence
  ENSG00000249069_17 (sequence is synthesized)
agaccacaggctgtggagttggacctgggtttgaagattggctttgcatgcctagcaggatgtaagcttggcccactgacttcacttctgagccttgttctccatgtctgtcaagtgcag

SEQ ID NO: 883130 - DNA, 120 bp, Artificial Sequence
  ENSG00000249069_18 (sequence is synthesized)
tgtgatcacagctcactatagtctcgatctcctgggcctcccacatcagccttgttataaaagacattgtggctaccatctctcatcactcactcaaagggaagccaaccaccatgcaat

SEQ ID NO: 883131 - DNA, 120 bp, Artificial Sequence
  ENSG00000249069_19 (sequence is synthesized)
taagaagcatagcagtgaaagtctcaggagccttgaacaaaacattagaaaaactttggactttgaccaggctgctggtggaggtttaaaagaaagtgagaaaaatcttgttgaaaacag

SEQ ID NO: 883132 - DNA, 120 bp, Artificial Sequence
  ENSG00000249069_20 (sequence is synthesized)
aacagggaatccttactatggagtggcataaatcttagcaatattgttgtctgcaataatgtgggtggtgggaatgtacctggtaaactgggtgatctaatttgctattcataaagacat

SEQ ID NO: 883133 - DNA, 120 bp, Artificial Sequence
  ENSG00000249069_21 (sequence is synthesized)
aaagattctcagcttttacagatggtgaaaaatgctaaattaagaaatggctgaaggacagaggtcaaatcctgggcaccatcatgaaaacataatccaaagatgaagctgagatgtgac

SEQ ID NO: 883134 - DNA, 120 bp, Artificial Sequence
  ENSG00000249069_22 (sequence is synthesized)
tataaatcctttgttatgacctcagaaagatcaaaagtggtgcctcagagtaccagtttggtcacacaaaggccctctaaagtttttaaggctgtgactcacagattctttcaaaaacag

SEQ ID NO: 883135 - DNA, 120 bp, Artificial Sequence
  ENSG00000249069_23 (sequence is synthesized)
ggctcctgagaagcttaagagcatagtttttcagcagaatcacaaggtgggaaagggattatctcaaaaagatttttgggcgtgacttttgtctaatggaatggacccccaaaaattcat

SEQ ID NO: 883136 - DNA, 120 bp, Artificial Sequence
  ENSG00000249069_24 (sequence is synthesized)
aggtgattcacaaattttttaaaagaattatattagtagaaacattgccaactagaactcaaagggatagagacagtatgaaatgaaaaaaggccttggtactcactttgcccctgtttc

SEQ ID NO: 883137 - DNA, 120 bp, Artificial Sequence
  ENSG00000226709_0 (sequence is synthesized)
tatgcagccccagggcaacctgagccatggtcttcatctttcctgtctctttgagaattagtgagaaaattggctcatctgggattctacccatagaaattccccacagagggagagaca

SEQ ID NO: 883138 - DNA, 120 bp, Artificial Sequence
  ENSG00000226709_1 (sequence is synthesized)
cggttttccgatacctccaggatttggggctgcagttggacgttttccatctcttctaatagcactgtaacaagttgtcttgaataaacacgagctcgttagccataagaaaactttaaa

SEQ ID NO: 883139 - DNA, 120 bp, Artificial Sequence
  ENSG00000253348_0 (sequence is synthesized)
ttggccttcatatcctgggaagagataacaggacagtgagaggagtggagaaaacacctcccttctttcattgctgcctgttccattcagggagcccctgtgactccaaaagtggccttt

SEQ ID NO: 883140 - DNA, 120 bp, Artificial Sequence
  ENSG00000253348_1 (sequence is synthesized)
ctcctctgagcatcttaacagaggtttcagtagagggtactatactaaataatgcagccctccttctttcttccatgccagagaagtttacaaaacaaggaggaagacttctacacctca

SEQ ID NO: 883141 - DNA, 120 bp, Artificial Sequence
  ENSG00000253348_2 (sequence is synthesized)
gccaggattccctgctctggctctcggctgctgcctcagggtgaatctgttgctaggtcatcgtggcatctctgcaggatgacagtgttttggaaacagtgagaaacagatactgagaga

SEQ ID NO: 883142 - DNA, 120 bp, Artificial Sequence
  ENSG00000253348_3 (sequence is synthesized)
agtccctagcctgggtacccagagagccttttaccttcctctggtaggactcaatcctggtgttggttaccctagaccaggccagtgaaacagagttgaggtctcactaagttgcccagg

SEQ ID NO: 883143 - DNA, 81 bp, Artificial Sequence
  ENSG00000253348_4 (sequence is synthesized)
ctggtctggaactcctggactcgagcaacatgagccaccgtgtccagctgacaggaggtcttaacatccttgtttttcgga

SEQ ID NO: 883144 - DNA, 120 bp, Artificial Sequence
  ENSG00000253348_5 (sequence is synthesized)
ggaacagctcaccaattttaaataggagaagtttacaaaacaaggaggaagacttctacacctcacagccaggattccctgctctggctctcggctgctgcctcagggtgaatctgttgc

SEQ ID NO: 883145 - DNA, 120 bp, Artificial Sequence
  ENSG00000253348_6 (sequence is synthesized)
agacacacgaaggccaagtggaggctgtagttcatgttgagaagctgctcacaccaaggggctgaagtaggaatcacctgggaaacagggggcaagggcctcactctgtcatccaggctg

SEQ ID NO: 883146 - DNA, 120 bp, Artificial Sequence
  ENSG00000253348_7 (sequence is synthesized)
caagggcctcactctgtcatccaggctgaagtgcagggacatgatctcggttcactgcagctcaacttcccaggctccagcgatgctcccaaccttagcctcctgagtagctgggactac

SEQ ID NO: 883147 - DNA, 120 bp, Artificial Sequence
  ENSG00000253347_0 (sequence is synthesized)
gaaggaggagccacctgcgcgccgagcccgttcgcccggccgcccgcagccaggcgcggtggccaactccgccccgggccgcgggcgcagccgacgggaacacgccccctcaactttttt

SEQ ID NO: 883148 - DNA, 120 bp, Artificial Sequence
  ENSG00000253347_1 (sequence is synthesized)
acttttttatttttaaacaatctcaaaccctcagaaaaattgcaaatttgaagcctctttcctgaaatctgcaaatttagagagagacattacacaatgaggaatggcatcctgatctta

SEQ ID NO: 883149 - DNA, 120 bp, Artificial Sequence
  ENSG00000253347_2 (sequence is synthesized)
atacttcttttcccactaacatttatcattgataaccattcccttcttctcaaaagttgttccctggctcccaaaatatccattctctcctcactctttgcttactacttgggctccttc

SEQ ID NO: 883150 - DNA, 120 bp, Artificial Sequence
  ENSG00000253347_3 (sequence is synthesized)
atggttatcttccaccaactccttaaatgtggcagtttctaatgtcacagatgcttcctttctccctaaggggagaagttaatccccagccggtctattcaataaaatccttaattatta

SEQ ID NO: 883151 - DNA, 120 bp, Artificial Sequence
  ENSG00000288162_0 (sequence is synthesized)
ccaccgagaaacaagcagtgcgcaccacagctgccgtcttcctccgcacgaatgtgcacgaaacaaaggctaataaaactcacatgtccgtgggcactagtgtactttttctacaaacaa

SEQ ID NO: 883152 - DNA, 120 bp, Artificial Sequence
  ENSG00000288162_1 (sequence is synthesized)
aagttaacagtgaagcagcctcaggcaggtcctgcaggaggtgtccagaagaaggccttgtgatcacaggaggtgacagctctgtgcattcatcacgctgaagacctgccactggaacaa

SEQ ID NO: 883153 - DNA, 120 bp, Artificial Sequence
  ENSG00000288162_2 (sequence is synthesized)
gatactcaaacaccattgcgatacagttgcctgcattattcagcacagtaacctgctatccaggagcaatagattctacccctagcctaggtgtatgttgggctacaccggctatgtaca

SEQ ID NO: 883154 - DNA, 120 bp, Artificial Sequence
  ENSG00000288162_3 (sequence is synthesized)
cgtctctccgtgatgttcgcacaatgatgaaatggcctaaggatgcatttctcggaacgtatccccgtcgttgagcaacaggactgtgcacaatacattactgttaactagagtccacac

SEQ ID NO: 883155 - DNA, 120 bp, Artificial Sequence
  ENSG00000288162_4 (sequence is synthesized)
atcatacaatagagctccagaatccattcgccgtacctgactgaaattttgtgctctttaaccagcatcttccaattcctcatcccgctggccccctggtaatttcttttccactctgct

SEQ ID NO: 883156 - DNA, 120 bp, Artificial Sequence
  ENSG00000288162_5 (sequence is synthesized)
tctacgagggcgactgtcttggattccacatgtgagatcacgaggtatttgtccttgtttctggctcatttcacgtaacaggacatccatccacattgtcgcaaatggcaggattttcct

SEQ ID NO: 883157 - DNA, 120 bp, Artificial Sequence
  ENSG00000288162_6 (sequence is synthesized)
tgttgaagctgaatcgttttccacggtgtgtacgatccacatttgctccgttcacccactgatgaacacttaggttggtcctgtacttggctgttgtgaagagggctgtggagaacaagg

SEQ ID NO: 883158 - DNA, 120 bp, Artificial Sequence
  ENSG00000288162_7 (sequence is synthesized)
tcccttgaatgttcacccagaagtgggattgctgcatcgcatggctgggtatttttaggtttttgaggaagcaccagactgtttccacaatggctgcaccaattgacatccccgccgtgt

SEQ ID NO: 883159 - DNA, 120 bp, Artificial Sequence
  ENSG00000288162_8 (sequence is synthesized)
gcagggttccctccccacaccctcaccagcactcacttttgtctttctaaagacagccagcctaacaggtgagaggcaatatctcattgcagttttgacttgcatttctctgataattat

SEQ ID NO: 883160 - DNA, 120 bp, Artificial Sequence
  ENSG00000288162_9 (sequence is synthesized)
tgatggtgaatcttttaaaatatatctgttggccatttatatgtctacttttgagaaacatctattcagattttttgctcagttttttcaggcaagttattttgtttttgctattgaatt

SEQ ID NO: 883161 - DNA, 120 bp, Artificial Sequence
  ENSG00000288162_10 (sequence is synthesized)
gtatgaattcttcatatatcttagatattaactcctgatcagataaatggttcaaaaatactttctcccattccataggttgtatcaatagatagtgattaaaaaaaaaacgataatggt

SEQ ID NO: 883162 - DNA, 120 bp, Artificial Sequence
  ENSG00000288162_11 (sequence is synthesized)
acttaggagtttaatttccttatcactgtgaacattcagaatactgggagccaaaatcatattctccagagaaggaaaaatggctagatcacatctaaaagaactggagttaaaacagcc

SEQ ID NO: 883163 - DNA, 120 bp, Artificial Sequence
  ENSG00000288162_12 (sequence is synthesized)
ctgaccctaaacccaggaagggcgggaatcagggtcagcctccccggtggcggcacgtgccgtgggtgatgccagagtgtaccacctccccccgtccccaggatctccctaaaactcata

SEQ ID NO: 883164 - DNA, 120 bp, Artificial Sequence
  ENSG00000288162_13 (sequence is synthesized)
accccggggtaaccctgaaaaaacatcagacaaatgcaaattcaaaacattctacaaaatactcagccagtacccctcaaaagtgtcaaactcatgaaaaaccaaacacaaaaacaaaag

SEQ ID NO: 883165 - DNA, 120 bp, Artificial Sequence
  ENSG00000253345_0 (sequence is synthesized)
cctggtgaagccctcacagatcctccccctggcctgtggcatctctgcttctccattacaaccagtgcttcctgctggagctggatccgtcaccccccggggaagggactggagcgaatc

SEQ ID NO: 883166 - DNA, 120 bp, Artificial Sequence
  ENSG00000253345_1 (sequence is synthesized)
acaatccaacccactcctcaagagtccagtcaccatctccagatccacatccaaaaaacagtttctcctacagctgagctaccttaacaaggagtacacaaccatgatttttatacaaaa

SEQ ID NO: 883167 - DNA, 120 bp, Artificial Sequence
  ENSG00000253344_0 (sequence is synthesized)
agggagactgaggacgggaacttcttccacccacctgaccccggagctccacttgctcagcctgacagacacagctgaactttcactagtcgaggaaagaacattctcgctaggcttaag

SEQ ID NO: 883168 - DNA, 120 bp, Artificial Sequence
  ENSG00000253344_1 (sequence is synthesized)
aggccaagcttaggagtattgcttgaggccaggaatttgagaccagtctggtcaacacagtgagaccctgtctctacaaaattaaaaaaaaaattagccaagtgtggtggtgcacctgtg

SEQ ID NO: 883169 - DNA, 120 bp, Artificial Sequence
  ENSG00000253344_2 (sequence is synthesized)
gtcccagccatttaagaggctgaggcaggaggatggcttgagcctaggagttggaggctgcagtgagctgcactccaccctggacaacagagcgagactctatctcagaaaaaaaaaaag

SEQ ID NO: 883170 - DNA, 120 bp, Artificial Sequence
  ENSG00000253344_3 (sequence is synthesized)
gacctggggaagcctggaggcagcagccatgcctgccaggacaccttcactccaaccccaagatgctcctggagttcccatgagcttgcaggtagatcaggtcctggctgattggaagaa

SEQ ID NO: 883171 - DNA, 120 bp, Artificial Sequence
  ENSG00000253344_4 (sequence is synthesized)
cctgctggagcctcaaagttcctgaccagaatcaggggcttgagaaagggtacacagagcttatggtttccataaaccatgttgtttgtccatctgactgttggggaacagacagcgttt

SEQ ID NO: 883172 - DNA, 120 bp, Artificial Sequence
  ENSG00000253344_5 (sequence is synthesized)
tttgggcacattcctgaaggctgcatttctagaacctttctggaaatacaatcactgactcagtgacactcttaatagctcttggtgaaggaattagacacagtggctcctgcttggccc

SEQ ID NO: 883173 - DNA, 120 bp, Artificial Sequence
  ENSG00000253343_0 (sequence is synthesized)
ccactactaatatccaattccaggacattttcatcacttcaaaaagtttggctcctttgaagacttgggattttcctgaagacagaattcactttggagtcaggtcaccatgatagcctt

SEQ ID NO: 883174 - DNA, 120 bp, Artificial Sequence
  ENSG00000253343_1 (sequence is synthesized)
ttgcgaactgcacagagatttcaagttgattatttgactgcccaattgtttcaagctatgaaattgtcagatacttacaagcaccatgtgctgaaaactaccatcttctgcagtgctcac

SEQ ID NO: 883175 - DNA, 120 bp, Artificial Sequence
  ENSG00000253343_2 (sequence is synthesized)
aagggtctgttttaattggtggctttactcagccatgtttctgtttttcaaaccccggagtcagttggactgcctccatatcaccacttaccacttccaagaggagatgagttcccagcc

SEQ ID NO: 883176 - DNA, 120 bp, Artificial Sequence
  ENSG00000253342_0 (sequence is synthesized)
aagagaagctgctggaagattcatcctctggggtctctgggttgatgttttacctcaatgcatctaggactcagaatagctggttgcaactatgactcttcattaacctgctgaataaca

SEQ ID NO: 883177 - DNA, 120 bp, Artificial Sequence
  ENSG00000253342_1 (sequence is synthesized)
aagcctaacccacatggtgatggtattaggaggtggggcctttgaaaggcgattaatgagaacagagacagcatgattcagattggtgctcttgtaaaagaggccccagagagctagtga

SEQ ID NO: 883178 - DNA, 120 bp, Artificial Sequence
  ENSG00000253342_2 (sequence is synthesized)
gccttttccaccgtggaggacccagcaagagggctccatctatgaaccagaaatcaggatctcaccaggtttcccagcctgaagaactggaagaaataaacttctgttgtttataagcta

SEQ ID NO: 883179 - DNA, 120 bp, Artificial Sequence
  ENSG00000257454_0 (sequence is synthesized)
gacactcgagtagccctatagagagatctatgtggtgagaaattatggcctcctgctagaagctagtgagaaactgaaacttcttgccaacagccatgtgagtgggccatcttgaaagta

SEQ ID NO: 883180 - DNA, 120 bp, Artificial Sequence
  ENSG00000257454_1 (sequence is synthesized)
gatcctctagcctcggtcaagccttcagatgatgcagccccctccaacagcttgacgaatcgctaagttaggtttccggaaatttctgacatggaaaaggaaggagcatttgaatttgtt

SEQ ID NO: 883181 - DNA, 120 bp, Artificial Sequence
  ENSG00000257454_2 (sequence is synthesized)
aaatctggaaattttggcctgatatatacagagaccagatggttaacagttctgggaaccctaaagaaccatttgctacttctgacagtcgggaagccactgatacacagcagaatctga

SEQ ID NO: 883182 - DNA, 120 bp, Artificial Sequence
  ENSG00000257454_3 (sequence is synthesized)
ggcccaataaaattatgccaatggatcaacatcattagaaaaatgtatatatcatgaagcttccccaggagagtcagcaccctgaaggaaatcccattcattcatttagatgcatgaatt

SEQ ID NO: 883183 - DNA, 71 bp, Artificial Sequence
  ENSG00000257452_0 (sequence is synthesized)
tgctgcacctggcctgacctgatggttttataagggtcttcctcctctggtcagcgctcattctctcacct

SEQ ID NO: 883184 - DNA, 120 bp, Artificial Sequence
  ENSG00000257452_1 (sequence is synthesized)
ccccagctacgcagaactgcttccagctgtctcctaatttcctggatgaactctccccggcgatttaactgatcctgaaaagtggtgagaggactgaggaagacaaccaggacaaagaac

SEQ ID NO: 883185 - DNA, 120 bp, Artificial Sequence
  ENSG00000257452_2 (sequence is synthesized)
cttgggtactaattcagtgagaagctgctacattaaggtgcactggcaagactgcaacagtattggggattatggctgaggaaattggaacacagagtagttaagtgacttgctcaaggt

SEQ ID NO: 883186 - DNA, 120 bp, Artificial Sequence
  ENSG00000234072_0 (sequence is synthesized)
ctttccggccggactgccgcgcctgtggccggaagagccagctagaccagagagtctgtacctgcaaccctggcggcgtccgagcccaaggcggagtctgggagacaaagaagtcctcgc

SEQ ID NO: 883187 - DNA, 120 bp, Artificial Sequence
  ENSG00000234072_1 (sequence is synthesized)
cgccggccgctggaggattctgccagtagtgaaagatggggtctcgttatgttgaccaggctggtcttgaacacctgacctgaagtgatcctcttgcctcagcctcccatagtgctgcga

SEQ ID NO: 883188 - DNA, 120 bp, Artificial Sequence
  ENSG00000234072_2 (sequence is synthesized)
ttctcattctgtgctataactagttagcatttaattgggtggatgtggtataactagtgccttgttgatattgatgcatatttacatggttttgctgttataaacaatggtcccttgcta

SEQ ID NO: 883189 - DNA, 120 bp, Artificial Sequence
  ENSG00000234072_3 (sequence is synthesized)
ttataaatcacactgctataagtaaccttgcatctaaattacttcaaatgtgtaactatatgggtaggataatttctagaagtggaattgtgaaccaaagttttaggtgcatttgtaatt

SEQ ID NO: 883190 - DNA, 120 bp, Artificial Sequence
  ENSG00000234072_4 (sequence is synthesized)
acaaccctcggggttaaagagcctcctcgaggaagaggctgggacacagctgaaagagattgacccacaaccactctaggggccatcacctgcccttcttcagtcctgggcgtgaaggta

SEQ ID NO: 883191 - DNA, 120 bp, Artificial Sequence
  ENSG00000234072_5 (sequence is synthesized)
gatttctcccctagcctgtgcgggagaggagccctggtttttctaacaaggactactgtaggttcgccgagttcgagggacgctacgtatgcagcgcctacgcccggacacaggcttccg

SEQ ID NO: 883192 - DNA, 120 bp, Artificial Sequence
  ENSG00000234072_6 (sequence is synthesized)
cgttaccgacaccgcgtgggggaggagggcaagacccgaggcttgcagagatggggggtgcacggtggccacagtagggaaggtgcggagcatgatggtgctctgtaggagcgcagacgc

SEQ ID NO: 883193 - DNA, 120 bp, Artificial Sequence
  ENSG00000234072_7 (sequence is synthesized)
tgaaaggcgcgctgctgtggctgggagaagagcggagccaggagtttgttcccaatatcttagtgctatggcaaaagaagggggaggagtaattgtggggccccccacacacccgctgcg

SEQ ID NO: 883194 - DNA, 120 bp, Artificial Sequence
  ENSG00000234072_8 (sequence is synthesized)
gcgatacactcaccctcgccaaagtccttccggaagtctaagttcgaagatggcgccgcctgtctggtcgcggtcttatgacgaaatcttgttagctgctcttcactgacgcccccaccc

SEQ ID NO: 883195 - DNA, 120 bp, Artificial Sequence
  ENSG00000234072_9 (sequence is synthesized)
tggtgcaatcacggctcactgcagcctcaacctgccacctcagcctcctgaatagttggggtgtgtggcaggtgtataccaccacttccaggtttttttgttgttgttgtttaatagaga

SEQ ID NO: 883196 - DNA, 89 bp, Artificial Sequence
  ENSG00000234072_10 (sequence is synthesized)
ctcctgaatagttggggtgtgtggcaggtgtataccaccacttccaggtttttttgttgttgttgtttaaaggtctcacactactgagc

SEQ ID NO: 883197 - DNA, 120 bp, Artificial Sequence
  ENSG00000234072_11 (sequence is synthesized)
ttacaggtgtgagttgccatgcctggcccggttatctttctaaagcataaagcaaccctgttgatcctctgcttaattttgatgattaagtagtatgttcaaaatatagaaatccatgta

SEQ ID NO: 883198 - DNA, 120 bp, Artificial Sequence
  ENSG00000234072_12 (sequence is synthesized)
tgaaagtagtgaccattaaactgctctacctctacctccacctctctacctctctacctctctacctctacctctacccacggtctccctctctttccatggtctccctctcatgtggag

SEQ ID NO: 883199 - DNA, 120 bp, Artificial Sequence
  ENSG00000234072_13 (sequence is synthesized)
aggaacttgatggcgttgtgcatgctcgctgacaggggacggcactgagtcaggaagctataatacaacagcaataccttatatctgcgcaactcttcacaacttacaaagccttcacat

SEQ ID NO: 883200 - DNA, 120 bp, Artificial Sequence
  ENSG00000287808_0 (sequence is synthesized)
gccgccgcccgcgcttcgcaacaaagccggctgcggagccatggtccacggcgcccgcccgcgaccccgccgccccgcatggtagccggaacgtctctcccttaccagccttcgcttcct

SEQ ID NO: 883201 - DNA, 120 bp, Artificial Sequence
  ENSG00000287808_1 (sequence is synthesized)
ggtgcccagctcttaggaccgtgtgtgactctggccttctaccgagacaacagagaaacgcacagcaactcgcatggaggaatcggcgaaatggctccgaccgcggcgctagggggcggg

SEQ ID NO: 883202 - DNA, 120 bp, Artificial Sequence
  ENSG00000287808_2 (sequence is synthesized)
gccagcgagcggtgttgaaagcagcaggggcctagaagacattaaaccgataccacagaaatacaaaggatcattagagactattatgaacaactatatgccaacaaattggaaaccaaa

SEQ ID NO: 883203 - DNA, 120 bp, Artificial Sequence
  ENSG00000287808_3 (sequence is synthesized)
tggaaatggataaattcctgaacagatacaacttaccaaaattggaccaagaagaaatagaaaacctgaaaagaccaactatgagtaatgagattaaatcagtaatatagagtctcccat

SEQ ID NO: 883204 - DNA, 120 bp, Artificial Sequence
  ENSG00000287808_4 (sequence is synthesized)
ctactgaacagttaaagaagaactcataccagttctcaaactcatcctgtgagggcagcattaccctgataccaaaactagatatggacacaagaaaaaaaatctataggccagtatccc

SEQ ID NO: 883205 - DNA, 72 bp, Artificial Sequence
  ENSG00000287808_5 (sequence is synthesized)
gatatggacacaagaaaaaaaatctataggccagtatccctgatgaacatagatgcaagaatcctcaacaag

SEQ ID NO: 883206 - DNA, 63 bp, Artificial Sequence
  ENSG00000287808_6 (sequence is synthesized)
ggcaggagaattgcttgaacctggagggaggaggggcagaagttgcagcgagctcgtaaataa

SEQ ID NO: 883207 - DNA, 120 bp, Artificial Sequence
  ENSG00000234070_0 (sequence is synthesized)
gagatcagaggaatgcttctagaaactgaaaaacataaagattaatagcaaaccaccagaagttaatgaagaggcatgaagagattctttctcacagagaaggaaccaactccgctgacc

SEQ ID NO: 883208 - DNA, 120 bp, Artificial Sequence
  ENSG00000234070_1 (sequence is synthesized)
ctctctggccaactttaactcatcgattggttctgccacccgcaacgttggctccaaaggcctgtagcgttgttctaatacttcggtgatatctcggaagggcccctgacaagacaggat

SEQ ID NO: 883209 - DNA, 120 bp, Artificial Sequence
  ENSG00000234070_2 (sequence is synthesized)
gaggaacatattttatatggaagatttttttgaggttatcactaacaagacacagctggagttactgcaagcactgagtgaagactgtggggctaataaaaagaaatgattcacgcctca

SEQ ID NO: 883210 - DNA, 120 bp, Artificial Sequence
  ENSG00000280634_0 (sequence is synthesized)
ggggtgagccaccctgcccagcctgctccagcaaatcttaaatatccatgcacactgaataaacatgcacctgaaacaggtgcacgtttcaggaagtgaatggaactctccaggagagtt

SEQ ID NO: 883211 - DNA, 120 bp, Artificial Sequence
  ENSG00000280634_1 (sequence is synthesized)
tgggtcccatcatgtgtaccttagaaacagaagtctcaaaagtctcaacaacatccacaaaaacatctgcatctgttttccagatacttgcaaccaaaaataaaacttcacaggaacact

SEQ ID NO: 883212 - DNA, 120 bp, Artificial Sequence
  ENSG00000280634_2 (sequence is synthesized)
acacaagaagtggtagacagctaaatcttctccaaactgagacctggaccataaggtcttggttgtagcaggtctggcaggggttatctataaacctgcacgcagggcactgtgagcggg

SEQ ID NO: 883213 - DNA, 120 bp, Artificial Sequence
  ENSG00000280634_3 (sequence is synthesized)
ttgccagggtacatctgtggccaggtaagggccacagagacagtcgtgatccccagcagcttcaaagctgcaaaatgctgggcttttttttttttttttaagatgaagtcttgctctgtt

SEQ ID NO: 883214 - DNA, 120 bp, Artificial Sequence
  ENSG00000280634_4 (sequence is synthesized)
catcagccactgcgcctggcctagggctttcttttttaaaaaacaagtcctaacaaaagggggtttctaccagcccctgagccacaccttctgaaactcccttgcccaggatccccacag

SEQ ID NO: 883215 - DNA, 120 bp, Artificial Sequence
  ENSG00000280634_5 (sequence is synthesized)
ctgtccacctcgcaagtcccactctctgcccacagagactgcctaaaaggaggacacaacagatttcagataaaaagcacctgtgtatcgtaaatatttcaggaaaaagaattcagatct

SEQ ID NO: 883216 - DNA, 120 bp, Artificial Sequence
  ENSG00000280634_6 (sequence is synthesized)
atacttgagaatattagctgctactgtttgttttccctctaaggtcctgaggaaatcaaaagaaaaaaaaaaaaaccctcaagggtatagcttttgtatatagccctagtgagcaaactg

SEQ ID NO: 883217 - DNA, 120 bp, Artificial Sequence
  ENSG00000280634_7 (sequence is synthesized)
caaattgggacatgcagtagattctggagcaatctccaatccttaccaggtacttcctggcatcaaatccccaggacatttcttggcccctccttgcattttccgtttcaaaatgttgag

SEQ ID NO: 883218 - DNA, 120 bp, Artificial Sequence
  ENSG00000280634_8 (sequence is synthesized)
gttaaaatacatcgaagcacagagggaagaaaatctcaggtcttctagaaatggcgatgtcttcatttaaaaataggactgatgggggcttggcaggggtctctaggatccaaaagaggt

SEQ ID NO: 883219 - DNA, 120 bp, Artificial Sequence
  ENSG00000280634_9 (sequence is synthesized)
tgagttgcatcctgcagcccaactgtccacatttagaagtgacaacattcatgaactaagtcaacatccaccaaaaataacatgaaataaagctcacagtttgggaacatgaaaataacg

SEQ ID NO: 883220 - DNA, 120 bp, Artificial Sequence
  ENSG00000280634_10 (sequence is synthesized)
cacacagacctcacccaccaatccctaagctgtgaaaacaaacgctcgcatttaaacttttctcaaatgtcaaattagcatattcttcccctccatgtaaagttttaataaacttgactc

SEQ ID NO: 883221 - DNA, 120 bp, Artificial Sequence
  ENSG00000280634_11 (sequence is synthesized)
aatctgcctttattaaaaaaccttacaaaagatgtatttaaatgcttgaaaaaattaactttatgctctatgcacagataaatttctcttactgtacaactaaatatggttatatccttt

SEQ ID NO: 883222 - DNA, 120 bp, Artificial Sequence
  ENSG00000280634_12 (sequence is synthesized)
gtttaaaaaatattttttcccccactaattacacttcgtgtgtagttccacgtcaatgatctttccgctcttctgggaatgtgtcctaagagctgccgggtgggtggaaatagccctaca

SEQ ID NO: 883223 - DNA, 120 bp, Artificial Sequence
  ENSG00000280634_13 (sequence is synthesized)
cagcgccactttcttgctcagtcgtgtttattaagattgtttggggtttggggtttttttcctccgttttcgttttctgagacagcgtgctggtaactgtggacccgcccggccggctga

SEQ ID NO: 883224 - DNA, 120 bp, Artificial Sequence
  ENSG00000234076_0 (sequence is synthesized)
atgatcgcgttgctcgagctgccgttggaagcttagaagcaggtgctaccgtgctagatacaaagcgatctatttaaaagccctctgtcacgcacgcacacttactgacgaatcctctgg

SEQ ID NO: 883225 - DNA, 120 bp, Artificial Sequence
  ENSG00000234076_1 (sequence is synthesized)
ctctctcctaccaccgcccggtggcggattccggaattggttcaaaaggccttgatcccgaacacccaggacagagacagagtacttttcctacctctttcgcctgcatccttagaaaac

SEQ ID NO: 883226 - DNA, 120 bp, Artificial Sequence
  ENSG00000234076_2 (sequence is synthesized)
tggtgcgtcggtgcaatagctgagggcacatggaacattcaccaagataaaccatatgctggaacataaaatttatggatgtcacccatgaagcagagtccttcagaccctcaatcaaaa

SEQ ID NO: 883227 - DNA, 120 bp, Artificial Sequence
  ENSG00000234076_3 (sequence is synthesized)
acaagtctcattttacattaaattggaggactatctggagtctctgaccaccgtgtgacagaaaagagagcagaattgttgcatgatgggtaacactcatcagtaatcgctgtttgccaa

SEQ ID NO: 883228 - DNA, 76 bp, Artificial Sequence
  ENSG00000234076_4 (sequence is synthesized)
gcatgatgggtaacactcatcagtaatcgctgtttgccaagccatctgggaggagaccaaagagctataaaataag

SEQ ID NO: 883229 - DNA, 120 bp, Artificial Sequence
  ENSG00000287801_0 (sequence is synthesized)
acaggcgtgagccactgcacctggctagatatgtctttaatccattttgatttgagttttgcatatcgtgagagataagggtctagtttcgttcttctacataagcagtcacaggaaact

SEQ ID NO: 883230 - DNA, 120 bp, Artificial Sequence
  ENSG00000287801_1 (sequence is synthesized)
tcgttcttctacataagcagtcacaggaaactagtgcattgaagatatacagaagctgtcgaagtggatacggtgaattgtgggaaaatatttcttgtgagagctgttgctgtgcactgt

SEQ ID NO: 883231 - DNA, 120 bp, Artificial Sequence
  ENSG00000287801_2 (sequence is synthesized)
gagtactcagcaggcaaggataaaggatgctacctctttcgctgcaagtctggtatggtgatgcccacaggatgagtacaaaccctcataggtgcctgcactctgctggaaaactcagca

SEQ ID NO: 883232 - DNA, 120 bp, Artificial Sequence
  ENSG00000287801_3 (sequence is synthesized)
tgcacagggtgagcacccaatcttgacatttcttgcaaccagcccaggcccctactaagcccatctggcagcagtgtctgggtcaggggtacaggtttggcagccaagaaaccatcctgg

SEQ ID NO: 883233 - DNA, 120 bp, Artificial Sequence
  ENSG00000287801_4 (sequence is synthesized)
gagagtcagagaagtggcaggagatccagctgcatttgagctaagtcccttaagcctcctgtaagtgctcaatttccccaaaatgcaaagttcaaacaaattgaacaaaacacaagtgca

SEQ ID NO: 883234 - DNA, 120 bp, Artificial Sequence
  ENSG00000287801_5 (sequence is synthesized)
aacatagcattattaagaattttaagacagcaaatggagagcactaagcaccaagtatgagggcactttctgagtatgggagcctgtgctattgcactggatgtaggtccatggagctgg

SEQ ID NO: 883235 - DNA, 120 bp, Artificial Sequence
  ENSG00000287801_6 (sequence is synthesized)
ctgttattcatggacagcaaaccgcaagggcaatgggaccctgaacctagaggggaaccctagtttccctggtactgtgaaagagtcacaatattccacagagaaggtacttgcatttgc

SEQ ID NO: 883236 - DNA, 120 bp, Artificial Sequence
  ENSG00000287801_7 (sequence is synthesized)
ctcagttcaggaaattgtggatgatataagctggcttctaccagcagcagacacagcagtaagggtttggatgaagctttatatggaaggtgatctcagaaaacactggcagtgtagtga

SEQ ID NO: 883237 - DNA, 120 bp, Artificial Sequence
  ENSG00000287801_8 (sequence is synthesized)
ggaagtaagtcagggcaatgaagtaatctaatgaggatatgttaatagcaggttacagctattagcaattaggcatctgtcctgctagagatcttcaggagggtgtacgtgtgcatacat

SEQ ID NO: 883238 - DNA, 120 bp, Artificial Sequence
  ENSG00000287801_9 (sequence is synthesized)
cagagatgtccctcatgggggtaaaataaaacatgggatatttagcctcctactttgtcgttgattaaaggttgctcttagaagtgttaattcctgatacttccggcatgcttctcatag

SEQ ID NO: 883239 - DNA, 120 bp, Artificial Sequence
  ENSG00000287801_10 (sequence is synthesized)
ggctgatgcttgtttaattcttctttatttcttattggattcctttctgagccactgccaaccacctgtcacgacagcaattggagaggaagctgttgaataatggacatgaaaaaacta

SEQ ID NO: 883240 - DNA, 120 bp, Artificial Sequence
  ENSG00000287801_11 (sequence is synthesized)
tttcatattaaaatacagaacatatgttacacatgagaactgttggatctaatatgtgcttttcacatcgtggaatgaggaatgagaagagatacggaagtacctattctgattatctgg

SEQ ID NO: 883241 - DNA, 120 bp, Artificial Sequence
  ENSG00000287805_0 (sequence is synthesized)
aagcaccaaggaaagactgtatgaggacacagtgagaagaagctgtctgcaagccaagaagacccctttccaaaagccaaccatgcaggcaccctgatcttggactttgcagcctctaaa

SEQ ID NO: 883242 - DNA, 120 bp, Artificial Sequence
  ENSG00000287805_1 (sequence is synthesized)
ttatttatccacctagtctgtgacattttgttatggcagcctgaacagaataagacacccacaaagaaagaaagaagcactgattttgacaagtacccatggatgagagtactttgtgga

SEQ ID NO: 883243 - DNA, 120 bp, Artificial Sequence
  ENSG00000287804_0 (sequence is synthesized)
agctgaagagtgccttaacgccgaggcccacggctccatgcgagagatgcctgttccttctctgataaatttggcagcttcacgtaccctaaggcccagaaaggacctgtttcctcaaca

SEQ ID NO: 883244 - DNA, 120 bp, Artificial Sequence
  ENSG00000287804_1 (sequence is synthesized)
ccctgaccagcacagaacattgtaataatgacaattatcagtcatttagctccaactaagccccagatattgtcataaattctttacatatattgagtcatagaataatctcaataatat

SEQ ID NO: 883245 - DNA, 120 bp, Artificial Sequence
  ENSG00000287804_2 (sequence is synthesized)
ataaggatgttcatataatccacattttacagaaaagaaaattggagttgtgaccgattaatcacataatcacagtcgtctaaatcacatagattgtagatggaggaataagaatgtcag

SEQ ID NO: 883246 - DNA, 120 bp, Artificial Sequence
  ENSG00000287804_3 (sequence is synthesized)
tgcctgtgattgaatgaaaaatgccccaaaagatatccatgctctaattcttggaatctctgaatattaccttactttgcacagacccccaaaaggggggtcttcggagaaaaagttaaa

SEQ ID NO: 883247 - DNA, 120 bp, Artificial Sequence
  ENSG00000287804_4 (sequence is synthesized)
agtggagctcaaataccatcacaagtgcctttaatagggagaggcacagggagattatacagttacagaagagaagaagacaatgtgaccacacggacacagatagaagcaatgccacca

SEQ ID NO: 883248 - DNA, 120 bp, Artificial Sequence
  ENSG00000287804_5 (sequence is synthesized)
ccagccaaggaatgcgagcagccaccagaggctgggaaaaggtaaggacatattcttccctagagcctccggagggagcatagccctgccaacaccttgatttcaaaccagtgatactga

SEQ ID NO: 883249 - DNA, 120 bp, Artificial Sequence
  ENSG00000287804_6 (sequence is synthesized)
gtttggacttttggcctccagaactgtgagaaaagaagtcacttattttaggccatcaagtttgtggtactgtaatttgttacagaagctacagaaaactaattcaacatctttaagtgc

SEQ ID NO: 883250 - DNA, 120 bp, Artificial Sequence
  ENSG00000287804_7 (sequence is synthesized)
tattcggcacactaccacaaacaactgtttttgttttgctgttgtttgccaatctgatatgttaaagacattatctcactgtatttctatagtttcattttttaaacttcttttacttct

SEQ ID NO: 883251 - DNA, 120 bp, Artificial Sequence
  ENSG00000287807_0 (sequence is synthesized)
ccaaagtcctgggattacaggtgtgagcctattttaagattatagcataatcttgcttaccagggagccattttacctctttactaagactttgaataactatactttgacccactgtgc

SEQ ID NO: 883252 - DNA, 120 bp, Artificial Sequence
  ENSG00000287807_1 (sequence is synthesized)
gacccactgtgcattgatctcaaggttaaaatctgaaagggcaactttaattccatggtttcatagggagtcctctcactgaggctccaaagtattgaaagcagcaataagagacaagat

SEQ ID NO: 883253 - DNA, 120 bp, Artificial Sequence
  ENSG00000287807_2 (sequence is synthesized)
ccctctggtagaagctgccttctttctgaaggttttgctggttggctctccaacttcagaaagagagaatgtcgccatcagatttttgcctgtctaccgaaaacaaaggataacaaacac

SEQ ID NO: 883254 - DNA, 120 bp, Artificial Sequence
  ENSG00000287807_3 (sequence is synthesized)
tgtttctgtagctaccaaagagacagactgcttggagaacgacttacatagctctgcagacgccctggtggtgccagctccaggggagtcggtgcacatggtgtgaagcaattttttttt

SEQ ID NO: 883255 - DNA, 120 bp, Artificial Sequence
  ENSG00000287807_4 (sequence is synthesized)
agcttccagaatgcttgggagtttcctgaagataaaaacttgtgaaagataaaggtagaagttatacaaggtagagcagccaagacttaaaggaggacagttgccctcagaacttttgaa

SEQ ID NO: 883256 - DNA, 120 bp, Artificial Sequence
  ENSG00000287807_5 (sequence is synthesized)
ccccgggtaactgccaagcttaaagtcaaggaaagaatgctcactgcctgcatgtgctacatgacaccttgcacagcagatcacagagaaagaatagcatggacaaactcctctccttct

SEQ ID NO: 883257 - DNA, 120 bp, Artificial Sequence
  ENSG00000287807_6 (sequence is synthesized)
gcatcttcacggtacaaggaagaggaagagggtcctgggggaacagagtttttccagcattatggagctgccacattgggaaaacataatgagaactgaagcccctgactatcaaggcca

SEQ ID NO: 883258 - DNA, 120 bp, Artificial Sequence
  ENSG00000287807_7 (sequence is synthesized)
actctttccaactcttttcagccacatggaaagaatctcagacttaaaagagctctacttgccagctcctgcattatacataaatagaaaggaagaaagatgagctaaagatcctggaaa

SEQ ID NO: 883259 - DNA, 120 bp, Artificial Sequence
  ENSG00000287807_8 (sequence is synthesized)
gtagaaaatccaattgttattctggattctaaacattacctgtgtggccttggataaacttgaatcttttcatatataaaacaaaggaagttgaattaaattatttctaacccaccctcc

SEQ ID NO: 883260 - DNA, 120 bp, Artificial Sequence
  ENSG00000287807_9 (sequence is synthesized)
agttgaatattctatgatttcatctgacaaaccctccctcttttcatccttgttgtgtgtgaaatgctccatcactcatcacagatgcttaaaataaaatagctctctctctgtatagaa

SEQ ID NO: 883261 - DNA, 120 bp, Artificial Sequence
  ENSG00000287806_0 (sequence is synthesized)
aagaggaaatagtctccaatcaataacttaaactcccacctcaagaaacaagaaaaagaagagcaaaataaatccaaagcaagcataaggatggaaataataaaggaaaaaaatcttcca

SEQ ID NO: 883262 - DNA, 120 bp, Artificial Sequence
  ENSG00000287806_1 (sequence is synthesized)
tgtccttgagccagttaccagagaagagcagaaatccagggaggacaagggattgacctgggtagtattgagctggaaggtaaaagcaatgaacaaaaagaggttcagattccttatttt

SEQ ID NO: 883263 - DNA, 120 bp, Artificial Sequence
  ENSG00000287806_2 (sequence is synthesized)
ggagcgacagtgtcaacaagaaacatctgccaaaccacaaggaccatgtagaagctggtgtcccaggaggagatcttcagcatttcacccatctcccccaattatttctcctggaaagac

SEQ ID NO: 883264 - DNA, 120 bp, Artificial Sequence
  ENSG00000287806_3 (sequence is synthesized)
tgaggcatttagcttcttggacttctctccatataaatggccactcatgggccaactaactgtgtggtgttcaagacaaacaatatacatcatgtaataaagaatcattctcccctgagg

SEQ ID NO: 883265 - DNA, 120 bp, Artificial Sequence
  ENSG00000287806_4 (sequence is synthesized)
tgctgctcaattctattataataattttattgtcctaacatccctgtgaaatcagtaaaccagtgatggaacaaacagctctgcgttggtttgaatcaggcactatgttcaggttcccaa

SEQ ID NO: 883266 - DNA, 120 bp, Artificial Sequence
  ENSG00000287806_5 (sequence is synthesized)
attagaaggagcagtggtcagattgtctgaagagatggacactggccgtggcactaactggttatctaaccattgtctaataatggtcctcatttcctcttttgtaaatcaagagattgg

SEQ ID NO: 883267 - DNA, 120 bp, Artificial Sequence
  ENSG00000287806_6 (sequence is synthesized)
agagacaatttgcagaagtttttttccacttctaagattcaatgagtcaaagtttggagacttatttcagaggcaaccagctatgtacaaaatatagcattacaaaatagaaaatatgtt

SEQ ID NO: 883268 - DNA, 120 bp, Artificial Sequence
  ENSG00000287806_7 (sequence is synthesized)
ggctttgtagcaaaaatacttgggcctgaatcttggatttaccactaactagtagtgttactttggccgagtcaccctctctaatcctcacctttcctctataaaatggaaataaaaagc

SEQ ID NO: 883269 - DNA, 120 bp, Artificial Sequence
  ENSG00000227011_0 (sequence is synthesized)
aggcctaaatgaataaaggcatgacactgagattgaaggctagttctacttcagaaccacagagacatgagcaccagcaagtttgaggttggataaggatcttcagaactcctcagcttc

SEQ ID NO: 883270 - DNA, 120 bp, Artificial Sequence
  ENSG00000227011_1 (sequence is synthesized)
agatggtcaagcactgcttcctcccttcttcaacggcatctctagcatgtatacttcccttaaatccaccttcgtagcatttgctgatggaagaggcacaacagagtccatgccttcacc

SEQ ID NO: 883271 - DNA, 120 bp, Artificial Sequence
  ENSG00000227011_2 (sequence is synthesized)
ggtagaacagaagcttctccattctttacagatgaatttgctttaagtaagatcttcccagagtacaaaagaaatttattcggaaaatttcaaactaatatcctttgcaaggtgagctac

SEQ ID NO: 883272 - DNA, 120 bp, Artificial Sequence
  ENSG00000227011_3 (sequence is synthesized)
acctctgagaggagctcctggaaattaccagatacttaatgttgccagctgttacagatggaggtgatgcaccttgatgatgcataagtactgagcctgaatcctacaaatgggaaaagg

SEQ ID NO: 883273 - DNA, 120 bp, Artificial Sequence
  ENSG00000227011_4 (sequence is synthesized)
tgctcatatcagacttatgcattagatatcaaactacaaaatacaagtgcagttgatacctgtttagatgatgtagagcaaggtaacagagtatgtattaaaagcaaaaattcccatgaa

SEQ ID NO: 883274 - DNA, 120 bp, Artificial Sequence
  ENSG00000231473_0 (sequence is synthesized)
gcccggacgtgcttctacccagaaccaccccctccaggccggggtgcacttaacggggctatacaaagagtctgacactgttattgcccatctgaactcgtcaactgagaaggaaagaga

SEQ ID NO: 883275 - DNA, 120 bp, Artificial Sequence
  ENSG00000231473_1 (sequence is synthesized)
ggaatatctggctagtgcaccctcggcgggagcgccactctccctccttgggcggcgccccccacctctcatcccgcccaatccgttttgcaaagtcggccaaaacaaaaacaaacttgg

SEQ ID NO: 883276 - DNA, 120 bp, Artificial Sequence
  ENSG00000231473_2 (sequence is synthesized)
agcgctgatagacactgttattgcccatctgaactcgtcaactgagaaggaaagagatggtttatgctgtgaataaaatacagttgtgctgtgatgtaaatcccctcatcctggagcagc

SEQ ID NO: 883277 - DNA, 120 bp, Artificial Sequence
  ENSG00000231473_3 (sequence is synthesized)
tggcagtggcaagggccagggccagtgactgaagcaacaaactgccagatgactgcagctcaagccaatgcacaaagccactgcaacaagagaggaaattcttccatttccaagtgtgtc

SEQ ID NO: 883278 - DNA, 120 bp, Artificial Sequence
  ENSG00000231473_4 (sequence is synthesized)
gatttctccccatcaaggaaaacagctaaggcaatgtgttgatattttctttgaccaagtcatcaggagtcacatagacatacagcactcaagaagtggctgtaactaaaggcacatctc

SEQ ID NO: 883279 - DNA, 120 bp, Artificial Sequence
  ENSG00000231473_5 (sequence is synthesized)
gttcatctacaacccttgtaatcccaacctttgtctgatgcacaaacccttccctagttctccccaccaccaccactgcacctccaagtggggacaacgaattgtttcatttgcatgtgg

SEQ ID NO: 883280 - DNA, 120 bp, Artificial Sequence
  ENSG00000231473_6 (sequence is synthesized)
tttttctcatgaaaaatatcattaacatgagacagccccaaaccaaggaaaccagaagtggggtttgtgcttggtcttactgagagctttccctacttgaccagaccccagcattgttct

SEQ ID NO: 883281 - DNA, 120 bp, Artificial Sequence
  ENSG00000231473_7 (sequence is synthesized)
agatttgtctcttgtgggctacaggaatgcaaacattttgtagtttcctcttttttgttttcttaatggcttgatgagccacacatgtttctctaaatgcatgattttaaattcacacaa

SEQ ID NO: 883282 - DNA, 120 bp, Artificial Sequence
  ENSG00000231473_8 (sequence is synthesized)
cactccttcccgccattgtgaatattatcatcttcatctttttatactgtactacttctgctacactgaccttctctccatgccaccaaaccacactcctaagtgcagagaatatgattg

SEQ ID NO: 883283 - DNA, 120 bp, Artificial Sequence
  ENSG00000231473_9 (sequence is synthesized)
attctcctactataccaatttccatgagcaggaccaattacataatttgcagggtccagaggaaaaaaaatgcagaactcctcattgaaaaattactaagaatttcaagatggtggcaac

SEQ ID NO: 883284 - DNA, 88 bp, Artificial Sequence
  ENSG00000231473_10 (sequence is synthesized)
aagatgagcggaaggtaagaaattacatactgtgggccaggtttggtgactcacatctgtaaccccagcactttgagagaccaaggca

SEQ ID NO: 883285 - DNA, 120 bp, Artificial Sequence
  ENSG00000231473_11 (sequence is synthesized)
aaatacaaaaattacccaggcgtgatggctcatgcctgtagtcccagccactcaggaggctaaggcaagagaatcacctgaacccaggaagtggagtttgcagtgagctgagatcacgcc

SEQ ID NO: 883286 - DNA, 120 bp, Artificial Sequence
  ENSG00000128254_0 (sequence is synthesized)
ggaacagagagagcatcaccgtagttcaagccaggctcctttaggttaggtggacttgtgttggtattatgtctccatgactgtgtgaccttggggatgcggcttgaccttcctgagcac

SEQ ID NO: 883287 - DNA, 120 bp, Artificial Sequence
  ENSG00000128254_1 (sequence is synthesized)
cagtttctgcatctattaggagtggacagtgaagaccgaactcctaaggttgtgatgagaattcaatgagaacatgcatgcccagcacagcttcaagcacacagaaacagtaaaaccgat

SEQ ID NO: 883288 - DNA, 120 bp, Artificial Sequence
  ENSG00000128254_2 (sequence is synthesized)
tgcaggcagttctctggatctcagcccaccccaggtagatggtgactcaagttgttctgcagagactggtccccctgcctctgttgccatggcactgcagcacagcctggccaatcagga

SEQ ID NO: 883289 - DNA, 120 bp, Artificial Sequence
  ENSG00000128254_3 (sequence is synthesized)
ccatggaaacctaagcagtgaggctctggataaagtggatctacaagaaataacttcccaaggaggagtcctgtaaatagcatgagtggacaaatacgactcaggctgctttttgccatg

SEQ ID NO: 883290 - DNA, 120 bp, Artificial Sequence
  ENSG00000128254_4 (sequence is synthesized)
aaattgccagacaaggagggatgtctgtttcagagtcctgggccaggggagtgaaatcacacagttacctgcatgcagagcccagagtagaagacctagctccctttaccctgcaacatg

SEQ ID NO: 883291 - DNA, 120 bp, Artificial Sequence
  ENSG00000128254_5 (sequence is synthesized)
caatcttcttaaaccagtcttcttatccttgggtgggcagtcagggagctgtgcacgcccacacctccaacaccctttattttgcaaacatgggcataaaaacaactgcaagggaaaatg

SEQ ID NO: 883292 - DNA, 120 bp, Artificial Sequence
  ENSG00000128254_6 (sequence is synthesized)
gcagttaaaatgagggcgaaaaaggcttttgtttcagttctgcagatggtctgggagtttgtgtttcttagcaagaattttctagacgttttggcttgaaccatctgaaaaactgcctca

SEQ ID NO: 883293 - DNA, 120 bp, Artificial Sequence
  ENSG00000128254_7 (sequence is synthesized)
agcttttgcatggttcccactgggtgggctgggttgggaggggctgtcgtgcatggtccgggaaagctggagaaggctgttccttcaccccgagccttggatttcttatctgtgaaatgg

SEQ ID NO: 883294 - DNA, 120 bp, Artificial Sequence
  ENSG00000128254_8 (sequence is synthesized)
gaggctgcaatgatgaatggcaaagtacctttttttttcagctctgaaagtctaggatattttgccactggaagaccagcagacaatgtcatgacaactcaagaggatacaacagggctg

SEQ ID NO: 883295 - DNA, 120 bp, Artificial Sequence
  ENSG00000128254_9 (sequence is synthesized)
catcaaaagacaagtctttggaccatgtcaagacctggagcgaagaaggtaatgaactcctacttcatagcaggctgtgggccagcagtttgctactacgctgtctcttggttaaggcaa

SEQ ID NO: 883296 - DNA, 120 bp, Artificial Sequence
  ENSG00000128254_10 (sequence is synthesized)
ggtttcagtatcaacctgacttcttttggaaggatcccttggcctcacgctggagtgggcacctgccctagcccacagagctggatttctccctttcttcaatcacacagggagcaccac

SEQ ID NO: 883297 - DNA, 120 bp, Artificial Sequence
  ENSG00000128254_11 (sequence is synthesized)
tatgcaaagacctcatcacattcacagccgtctccgcagagcctcgcactgtgcttggcatatagcaggtgctcaataaatatctgccaaatgactgaatgcatctcgctagcctcagga

SEQ ID NO: 883298 - DNA, 120 bp, Artificial Sequence
  ENSG00000128254_12 (sequence is synthesized)
tgccaccaggccctgagggagccaggaagatcagaggaaagcttttggattcctgccacaccttacattagcaacatcttctccgagtcctgacagccagcctcctgggacaccattcaa

SEQ ID NO: 883299 - DNA, 120 bp, Artificial Sequence
  ENSG00000128254_13 (sequence is synthesized)
gccagctgaattccggtcaccgcttcaccttggaaaggcatccgcagccctcaccaagcggccccgtaattgacgtcacagcggggccaggagctgccctgttaatatttaatgtggcct

SEQ ID NO: 883300 - DNA, 120 bp, Artificial Sequence
  ENSG00000128254_14 (sequence is synthesized)
tcactgcgcaaaatgcagcctctaagagctggaggggccgtgcagagtctccatggggttgtgaggagggcacagaagggaaagggctttataaaccataaagcgcccaacagatgagca

SEQ ID NO: 883301 - DNA, 120 bp, Artificial Sequence
  ENSG00000128254_15 (sequence is synthesized)
gccggggctgcacatgcctgcagtgggacaagaagactgctgaccaagcccgaacactaaatcaatgggggattaggggctcctgggtacattccattgagacagcgggagagcagagca

SEQ ID NO: 883302 - DNA, 120 bp, Artificial Sequence
  ENSG00000128254_16 (sequence is synthesized)
ctggtgccagcccaacctggactccactccaggtttgccccctgcacagctgtgtgactgggtcagcaagtgcactgctgagcctcagtcccccttatctgtgaaatgggaatgatgctt

SEQ ID NO: 883303 - DNA, 120 bp, Artificial Sequence
  ENSG00000128254_17 (sequence is synthesized)
tccttgtagcactgctgtgaagattcaatgaaacgagtgatgccgaagacctagcttcacccatcgcaggctgtcaacacaggctgagacccttctccaaaaccaggcctgggacctgag

SEQ ID NO: 883304 - DNA, 120 bp, Artificial Sequence
  ENSG00000128254_18 (sequence is synthesized)
gttggagagaggagacacggggtcccttcaggcattcactgggcagagtgatggtgggagggaagaaggagcaaggaggcacaggaaggatgacctgggagccaagcatctcaggtttgg

SEQ ID NO: 883305 - DNA, 120 bp, Artificial Sequence
  ENSG00000128254_19 (sequence is synthesized)
acttttcaccctggtgggcccacgccaggagaggtatcagagagaggatgggtggagggccccaggatggcagaagcagaagggccctcatggacaatctctctgatcatctgacccctt

SEQ ID NO: 883306 - DNA, 120 bp, Artificial Sequence
  ENSG00000128254_20 (sequence is synthesized)
tgtttggcagatgagcatctgggagggagtaaaccatgccaggggctcacatggcacagctggggtctgactggcctgcagccctctggggcttcatcagctagggtttatccaaggcca

SEQ ID NO: 883307 - DNA, 120 bp, Artificial Sequence
  ENSG00000128254_21 (sequence is synthesized)
catgcctagtccgggaggcagatgtgttggaagacatgatgcaatggccccattcctggtggtgacctccacttctttggccaggacaataggaggaacctcatcccccgccccttcctg

SEQ ID NO: 883308 - DNA, 120 bp, Artificial Sequence
  ENSG00000128254_22 (sequence is synthesized)
gtctccctccagtctattttcccacgaatcctgggagcttcccaaaacgtaaatctgaccttgtcctcgccctgcttaaaacctttccatgatcccacacttaaggtctccagagaaaat

SEQ ID NO: 883309 - DNA, 120 bp, Artificial Sequence
  ENSG00000128254_23 (sequence is synthesized)
gagaaaatacaggaggctcagttaaaactgaatttcaagctgggtatggtggcacacacccgtagtgctactcaacaggctgaggcaggaagattgcttgaggccaggagtttgaggcca

SEQ ID NO: 883310 - DNA, 120 bp, Artificial Sequence
  ENSG00000128254_24 (sequence is synthesized)
ccccaggcgtgggaagatggaaccagaacaattcgaacgagcagagcaaaacagatcggaattgcagacttcaggtcgtggcagagaaaaccagctgagacagggcgccacttactagct

SEQ ID NO: 883311 - DNA, 120 bp, Artificial Sequence
  ENSG00000128254_25 (sequence is synthesized)
acacacagattcgtctcacctagaagtcacgtttcattttaatctccaagcagacagcgcagcagcaaacctggggctgtggagtggggccccacaccctccgcccactctcccgccccc

SEQ ID NO: 883312 - DNA, 120 bp, Artificial Sequence
  ENSG00000128254_26 (sequence is synthesized)
ctgcaatctgtgagctggttctatgagctggtggagctcagagccccagtcccagcacccgcccccctccagcttgttcagaggagctcagctctgggggagagctcaaagccgacacct

SEQ ID NO: 883313 - DNA, 120 bp, Artificial Sequence
  ENSG00000179935_0 (sequence is synthesized)
acaggcaaggaattctgggaaacgtagttcccgcttagctaggttgacatggtacaaagccacattaccacgctaagtgtggctttgatttttagaaaccgcctcatgctaagtctaggg

SEQ ID NO: 883314 - DNA, 120 bp, Artificial Sequence
  ENSG00000179935_1 (sequence is synthesized)
aatacagtggttgaatggggtgagcgctgacctttagctattctggaggaacatgtcactttcacttattttctttcatgttttcccacccagtgctatggactctgatcgcccaaccag

SEQ ID NO: 883315 - DNA, 120 bp, Artificial Sequence
  ENSG00000179935_2 (sequence is synthesized)
agcaaacccagaaggacaactctccaagcctttcaatcactcccactaacccgtattgtggacacactattgtgaggcctactaaggatgtactgctgatgaccttttgaaggccagtgg

SEQ ID NO: 883316 - DNA, 120 bp, Artificial Sequence
  ENSG00000179935_3 (sequence is synthesized)
acctgctctgcagacccaggctcctctcccatggagcatcccaagtctgtccttatgggaagaagcaggagccctgtctggctgtaccccaagctgctttctctggaccaatgctgtcag

SEQ ID NO: 883317 - DNA, 120 bp, Artificial Sequence
  ENSG00000179935_4 (sequence is synthesized)
cgatagagggaacccttccaccatcatgtgaagaagcctggtctagcctgctggaggatgagagatcacatggaatgaggccacaatcgttccagccaaagccccagtaatagaattaag

SEQ ID NO: 883318 - DNA, 120 bp, Artificial Sequence
  ENSG00000179935_5 (sequence is synthesized)
atcatccaagaccatggcatcccgcctgagaagttcagatgagaagggccacctgaacaaccaacagaatcttaaaaagtaaaaaatgagtgttgccactatgcatctattagaatggca

SEQ ID NO: 883319 - DNA, 120 bp, Artificial Sequence
  ENSG00000179935_6 (sequence is synthesized)
gtgaggatgtggagcaacaggaactctcactcactgaagatggaaatgcaaaatagtgcagctactttggaaaacagctactttggctgtttcttacaacactaaatatgctattattat

SEQ ID NO: 883320 - DNA, 120 bp, Artificial Sequence
  ENSG00000179935_7 (sequence is synthesized)
gtttcttacaacactaaatatgctattattatatgatccagaagttttgctccttagcacttacccaaaaaagttgaaaacttatgtacacacaaaaacctgcacatggatattcacagc

SEQ ID NO: 883321 - DNA, 120 bp, Artificial Sequence
  ENSG00000179935_8 (sequence is synthesized)
agtttttgatatggtttggctctgtgtccccacagaaatctcatcttgtatttgtataaatttatggggtacaagagtaattttgttagcatgcatagacatgcatagactgcatagctc

SEQ ID NO: 883322 - DNA, 120 bp, Artificial Sequence
  ENSG00000179935_9 (sequence is synthesized)
aattcccacatgttgtgggagggaccaggtgggaggtgattgaatcataggggcaggtctttcctgtcttgttcttgtgatagtgagtgggtctcacaagatctgatggttttaaataac

SEQ ID NO: 883323 - DNA, 71 bp, Artificial Sequence
  ENSG00000179935_10 (sequence is synthesized)
gtgatagtgagtgggtctcacaagatctgatggttttaaataacaggaatttatctgcacaagctctttta

SEQ ID NO: 883324 - DNA, 84 bp, Artificial Sequence
  ENSG00000179935_11 (sequence is synthesized)
agtcttggatatgtctttatcagcagagtaaatgatgttgctgaaaatatcatcaaaaatgtggaagtaactttggaactgggt

SEQ ID NO: 883325 - DNA, 120 bp, Artificial Sequence
  ENSG00000179935_12 (sequence is synthesized)
aatggctttgacaaaaatgctgatggtgatatgaatgaacaataaggtgaatgaacaataaggaccaggctgaggtggtctcagagggagatgaggaacttgttgggaaatggagaaaag

SEQ ID NO: 883326 - DNA, 84 bp, Artificial Sequence
  ENSG00000179935_13 (sequence is synthesized)
tcagagggagatgaggaacttgttgggaaatggagaaaagatgactcttgttatgctttagacttgtggaactttaaacttgag

SEQ ID NO: 883327 - DNA, 120 bp, Artificial Sequence
  ENSG00000179935_14 (sequence is synthesized)
agtaatgcattcgtgaggtgacttgggtgctgttaaaggcactcagtttcaaaagggaaacagaacataaaagtttgggaaatttgcagtctggcaatgcaatagaaaataaaatcccat

SEQ ID NO: 883328 - DNA, 90 bp, Artificial Sequence
  ENSG00000179935_15 (sequence is synthesized)
aatttgcagtctggcaatgcaatagaaaataaaatcccattttctgaagagaaattcaagccagctgcagaaatttacctaataacgaag

SEQ ID NO: 883329 - DNA, 120 bp, Artificial Sequence
  ENSG00000179935_16 (sequence is synthesized)
tcttccatcaaaggcccagagacctagggggaaaaaatggtttccaaaggcccagggttcccattctgtgtgcagcctagggacttggtgccctacctctcagccgctccagccatggct

SEQ ID NO: 883330 - DNA, 120 bp, Artificial Sequence
  ENSG00000179935_17 (sequence is synthesized)
gccttggcagcttccacatggtgttgaacctgggagtgcacagaagtcaaggattgaggtttgggaacctccacctaggtttcagaggaggtatggaaatgcctggatgtccagtcagga

SEQ ID NO: 883331 - DNA, 120 bp, Artificial Sequence
  ENSG00000179935_18 (sequence is synthesized)
aaatgcctggatgtccagtcaggagtctgctgcagagtggggcacccatgggaacccctgctaggccagtgtggaagggaaatgtggggcccccacacagagtccccactggggcactgc

SEQ ID NO: 883332 - DNA, 120 bp, Artificial Sequence
  ENSG00000179935_19 (sequence is synthesized)
cccactggggcactgcctattggaactgtgagaagaaggccaccatcctccagattccagaatggtagatccaccaacaacttgcaccgtgcacctggaaaagctgcagacactcaacgc

SEQ ID NO: 883333 - DNA, 120 bp, Artificial Sequence
  ENSG00000179935_20 (sequence is synthesized)
ccacgagggaggctgtaccctgtggtacaggagcaaagctacccaaaaccatgggaacccacctcatacatcagcatggcctagatgtgagagatggagtcaaaggagatcattttggaa

SEQ ID NO: 883334 - DNA, 89 bp, Artificial Sequence
  ENSG00000179935_21 (sequence is synthesized)
aataactaacttgcttttgattttacagactcacaggtgaaagggacttgccttgtctcacagaatgaaatgagttgagactttggggg

SEQ ID NO: 883335 - DNA, 88 bp, Artificial Sequence
  ENSG00000179935_22 (sequence is synthesized)
cccttcacatgtgggagggacctggtaggaaatgactgaatcatggggatgggtctttcctatgctgttctcatgatagtgaatgggt

SEQ ID NO: 883336 - DNA, 120 bp, Artificial Sequence
  ENSG00000179935_23 (sequence is synthesized)
gggagtttctctgtacaagctcttttgttttgcctgccaccattcacgtaagatgtgacttgctcctcctgccttccaccatgattgtgaaccctctccagccatgtggaactgtaagtc

SEQ ID NO: 883337 - DNA, 120 bp, Artificial Sequence
  ENSG00000179935_24 (sequence is synthesized)
gaatctcctgactatggtggaggagtgtggatcctggaactaaactgaggtgatagggaggaaaagagagaaatcaacagtaaacgctgcacatcctctgtctggtaaatgtgcatcact

SEQ ID NO: 883338 - DNA, 120 bp, Artificial Sequence
  ENSG00000179935_25 (sequence is synthesized)
gattgtatccaatctagattcaaccagagagacggaagcattaagaatgacatagaatatggaatttgctatagggatttgagcttctacatttgcgggaaggagcgagttgaacactta

SEQ ID NO: 883339 - DNA, 120 bp, Artificial Sequence
  ENSG00000179935_26 (sequence is synthesized)
ggaacagctgttgctgccgtgtctggtggggggcctgagagtggcaggacaagcagcctgccccagaagtggaagaaactgaaagtggagtcctgagagctgaatctgccgcaggcccgc

SEQ ID NO: 883340 - DNA, 120 bp, Artificial Sequence
  ENSG00000179935_27 (sequence is synthesized)
cctggggcatgttcttctcatgatgatgactgcaacacaagagggcaagacatcctacacaagcacatttcaagattttgctcacatcatctctgctaaaattcctttatccaaagcaag

SEQ ID NO: 883341 - DNA, 120 bp, Artificial Sequence
  ENSG00000179935_28 (sequence is synthesized)
gaacacaactggttcaaataagcacaggcctccaaatatccagatctaaaaatggagtgttcacctcaagctccttatttatcactgcaagagattctggggctggcagctagtgacatg

SEQ ID NO: 883342 - DNA, 120 bp, Artificial Sequence
  ENSG00000179935_29 (sequence is synthesized)
tccctgaatctcctgactatggtggaggagtgtggatcctggaactaaactgaggtgatagggaggaaaagagagaaatcaacagtaaacgctgcacatcctctgtctgtgctatggact

SEQ ID NO: 883343 - DNA, 61 bp, Artificial Sequence
  ENSG00000220925_0 (sequence is synthesized)
tgagatggagtcttgctctgtcgaccaggctggagggtagtggggtgatctcagctcattg

SEQ ID NO: 883344 - DNA, 120 bp, Artificial Sequence
  ENSG00000220925_1 (sequence is synthesized)
ttacaggcacgagccacctcgcccacccaagatcatgacttttcaacaccactcagtctgtgggtcactaatgaattgccacattgaaccataaaagcagagggctgcaaagcaaacttt

SEQ ID NO: 883345 - DNA, 120 bp, Artificial Sequence
  ENSG00000220925_2 (sequence is synthesized)
gagtgagaatgaagggtttcactggaggcctctcctggcgagatgagttagaagttgatgcctaagaaggaaattaattatgagaggtgaatttgccattttacccaacataccatacgg

SEQ ID NO: 883346 - DNA, 120 bp, Artificial Sequence
  ENSG00000220925_3 (sequence is synthesized)
gctcttaagtcttcaggtgcttgaaaagctctggattcaaaattcactcactttctatttatcagtctctaagatatagcagcagaacactaacggtagagattccttagctctcctgag

SEQ ID NO: 883347 - DNA, 120 bp, Artificial Sequence
  ENSG00000235637_0 (sequence is synthesized)
agagactcaatctccagaatgaatgagaagcagaatcatgaattccaacactttctctcccttaggattcttgtctatttggcattaatctgggaacaataaaattcagttgacaaggca

SEQ ID NO: 883348 - DNA, 120 bp, Artificial Sequence
  ENSG00000230313_0 (sequence is synthesized)
gcaactgatagaggatcttcttacatttgctttatttcatggtgctgcccaaattcatgctgtaccctcagcagcaaggagtgggaccattactcctggcgttcccagatggaacagaca

SEQ ID NO: 883349 - DNA, 120 bp, Artificial Sequence
  ENSG00000230313_1 (sequence is synthesized)
ccaagcctggctttgccactgaacacaatacaggactgataaaggaaatagaggctgcccatctctcagtgccacatatgagaaagggaagttgtcattttatatatccactgtcaagca

SEQ ID NO: 883350 - DNA, 120 bp, Artificial Sequence
  ENSG00000230313_2 (sequence is synthesized)
aaaataaaaaaaaacaaaaaataaatgtagtcccaggtactgaggaagctgaggcaggaggaacacttgagcctgggaggtaaaggcttcagtgagccgtgataatgccactgcactcca

SEQ ID NO: 883351 - DNA, 120 bp, Artificial Sequence
  ENSG00000230313_3 (sequence is synthesized)
cactgcactccagcctagacaacagagtgagaccctgtctcaagaaaaagaaaaacaagagggaggcaatctactttatacccagagaattttacatgcaaggaatttgactatgaataa

SEQ ID NO: 883352 - DNA, 120 bp, Artificial Sequence
  ENSG00000230313_4 (sequence is synthesized)
gcctccattgcttaagagagacttcactatttgggattttaagaaagaaatacacaaacaagcaaatctcatcagcagaggactgagaaaccagtgtttataatacccagtgattaatgt

SEQ ID NO: 883353 - DNA, 120 bp, Artificial Sequence
  ENSG00000273149_0 (sequence is synthesized)
aaacttgtttcctgcaggtgatggttcatgacaatatcgacaccagtgattactgtgctttcggtaccttcgccctcggggccttcagcggaggcatttccaccaatgagcgagtcatca

SEQ ID NO: 883354 - DNA, 120 bp, Artificial Sequence
  ENSG00000273149_1 (sequence is synthesized)
atgttaccttctgtcctactgaccatctgcattaagaaaaagcagtataattgcaaaagacacaaacgcatccaaagcaccttccacgccaatagttcacggataagaagtattcttagt

SEQ ID NO: 883355 - DNA, 120 bp, Artificial Sequence
  ENSG00000273149_2 (sequence is synthesized)
gggtcattaaaaagttgtttccagttgcgggcatgtgatgcctccggttggtaagtggggacaggacaaacacgaaaggactccaggctcctaagccggaagcatcatgtcccggtagat

SEQ ID NO: 883356 - DNA, 120 bp, Artificial Sequence
  ENSG00000273149_3 (sequence is synthesized)
aatcatgatggcgactgaagggagacgacgacggcgctagcttagcacgagcctgaaactcggagcgagcgcggtgcagccggagcggcgctcggggggaggggggagcgggcggaaaag

SEQ ID NO: 883357 - DNA, 120 bp, Artificial Sequence
  ENSG00000230310_0 (sequence is synthesized)
ctccagtcctctcctcacagtgtggaaacactctttccttcaaaaccttcatttgtaccagcaggaaactctcacccggagtcaatgtaaagtcgtgacctaaataaattgtcatgttcc

SEQ ID NO: 883358 - DNA, 120 bp, Artificial Sequence
  ENSG00000230310_1 (sequence is synthesized)
caaaccttttctccaggggacaatgcaaacaagtttttcactgagtctgaccctcacagattttcttcatgtatacaaattacagcctgactcagcgaccccatgaatgctaaaaccaaa

SEQ ID NO: 883359 - DNA, 120 bp, Artificial Sequence
  ENSG00000230310_2 (sequence is synthesized)
actgcagtttattcacttgcttctcaccaacactgatccacttaggtaagaaaaaagaccttcaatcccctttgctgtttgtttgtttttaagaaactagcagagttcctgctttccttc

SEQ ID NO: 883360 - DNA, 120 bp, Artificial Sequence
  ENSG00000230310_3 (sequence is synthesized)
tgtggttatgtataagctggaagacaaaaaattctaaaatactttatatggattttaaaactggcaagtaatgattcctttgagaaaacaaagatatcagctatgctattatgatttata

SEQ ID NO: 883361 - DNA, 79 bp, Artificial Sequence
  ENSG00000230317_0 (sequence is synthesized)
gtgacttaaccaaggattcacaaggcatctccaaacatttctaggatacgtgtgcagaacgtgcaggtccatcaacccg

SEQ ID NO: 883362 - DNA, 120 bp, Artificial Sequence
  ENSG00000230317_1 (sequence is synthesized)
tcatcttcaaagataaggccttcagtatatcaagatcagtggatcaaagaaacatcctcaagaaactaagaaacaacacaagattctctctgatgaaatgcttaagtataaggaaaatga

SEQ ID NO: 883363 - DNA, 120 bp, Artificial Sequence
  ENSG00000230317_2 (sequence is synthesized)
cagatcgccacttctgaaagaaaggcttacgacaactggctctgtgtttaagcctcgcagagggagatgcaagagaagaaggctgcctacaagcagcacagataggaaatgattgaaaaa

SEQ ID NO: 883364 - DNA, 120 bp, Artificial Sequence
  ENSG00000230317_3 (sequence is synthesized)
cagagagtgctggagagacacattagtcaggagccagctagtggacaaccaggcatagagaatcatccccaaagagcagattcaggaccttatttggttcccatgaggaacagcagctgc

SEQ ID NO: 883365 - DNA, 120 bp, Artificial Sequence
  ENSG00000230317_4 (sequence is synthesized)
atcccaactgagagcacagaggagataaaggtcaatatggctttgggagggcccctttttcaggattgccctacttgctctactgcatggctggctcttcaggaccatttgtgggctgcc

SEQ ID NO: 883366 - DNA, 120 bp, Artificial Sequence
  ENSG00000230317_5 (sequence is synthesized)
ttgaggagaaaggaacaggctcagaagagttcttgcatacattgaaaagatttgctgacatatgatccatattgtataattgttcagcatagtggaaaatccacctgcagttggtgatca

SEQ ID NO: 883367 - DNA, 120 bp, Artificial Sequence
  ENSG00000230317_6 (sequence is synthesized)
caaatgtggaatggaaccagtatgcctggctgtgtgatttttatccatgtgaatgagaaagtcccaatgaagtgattaatctttcatggttacttcatgaaattcctaggagggaatttt

SEQ ID NO: 883368 - DNA, 120 bp, Artificial Sequence
  ENSG00000230317_7 (sequence is synthesized)
gcagaatggcactttgaacaaaggttgtcttatgatgcagataaagtcccaggtaatctcttggaactgctctctgaagaataaatgaaaagtatgtctaggcaaggtaatgacttttaa

SEQ ID NO: 883369 - DNA, 120 bp, Artificial Sequence
  ENSG00000230317_8 (sequence is synthesized)
gaaaaagcccctcttagagattccaggacggatcagcaatatagtgggtaggagaagttcagaaggagaccttgggttctgaggcttatttctgaggccttacaatctccactaattcga

SEQ ID NO: 883370 - DNA, 120 bp, Artificial Sequence
  ENSG00000230317_9 (sequence is synthesized)
accatttgtgggctgccagacacctcctctgcctgggtggcctctgggaacacgaccactgcctccatgcacaccacttggacaagctgaaatttgaagaggcccctgagctgtgacagc

SEQ ID NO: 883371 - DNA, 120 bp, Artificial Sequence
  ENSG00000230317_10 (sequence is synthesized)
catgctgtggctcctacataacttggaaaagtatccaatacattttacgctgcctgcccagtgctgcctcatctgtctctaatcttctgtagtgtttcccctaataaaggtttgcagtcc

SEQ ID NO: 883372 - DNA, 72 bp, Artificial Sequence
  ENSG00000230317_11 (sequence is synthesized)
ccagtgaccaaaaactgtgaagtaataaaacgtttcctgactccaatgctgggcagactgtgttgaaactca

SEQ ID NO: 883373 - DNA, 120 bp, Artificial Sequence
  ENSG00000230317_12 (sequence is synthesized)
tttcctgactccaatgctgggcagactgtgttgaaactcagtttacgcaaacttttctagggatgattgtcatcatccttaggaaagtgcattgttgtaggatcaatcacatccttaaaa

SEQ ID NO: 883374 - DNA, 120 bp, Artificial Sequence
  ENSG00000230317_13 (sequence is synthesized)
aggactgtgcctgtttataagcccagttgttcttccctgtgaaatatggtaaggatattagtacaaggagaatagagatttatgataagtgatgctcaatgaaggataaattaaggacat

SEQ ID NO: 883375 - DNA, 120 bp, Artificial Sequence
  ENSG00000230317_14 (sequence is synthesized)
actgagagtaggtaaggaaattgccaactcagaacccagcaggcattaaataatagataaggaatcaatatagcaacagttttttatagtactgtatttttataaccatgtggaatgcgt

SEQ ID NO: 883376 - DNA, 120 bp, Artificial Sequence
  ENSG00000230317_15 (sequence is synthesized)
caatttattccagaggacataaatggacatgtgtacaaacatgcaagtaaaagattattcactcatgaatcttcattggcatgaaaaaaatcttaagtgtacattaaatcttatcttaaa

SEQ ID NO: 883377 - DNA, 120 bp, Artificial Sequence
  ENSG00000230317_16 (sequence is synthesized)
gttcattaactttctctgggatgcattttctgactacatttaaataaagctattttcctttcttcccaggaaggtatgtggcccttcctgaggtgtgttctaagttggtctcctagggtc

SEQ ID NO: 883378 - DNA, 120 bp, Artificial Sequence
  ENSG00000230317_17 (sequence is synthesized)
ctgaaggggactcctggatggtctgtggaaggtgttctacctagaggtgagagggttgtggaacagggaccttgggttctagggtgtgtgggtctccctaaactctaacacaggggtccc

SEQ ID NO: 883379 - DNA, 120 bp, Artificial Sequence
  ENSG00000230317_18 (sequence is synthesized)
taatgcccggaccacagaccagtaccagtcagtggcctgtcagaaatggggctgcacagcaggaggtgagcagcgggtgagccagcattaccacctgagctttgcctcctgtcagatcag

SEQ ID NO: 883380 - DNA, 120 bp, Artificial Sequence
  ENSG00000230317_19 (sequence is synthesized)
tggtggcagtagattctcaaaggagcgtgaaccctattgtgaactgtgcatgcgaggtatctaagttgcatgctcgttatgagaatctaactaatgcctaatgatctgaggtagaacagt

SEQ ID NO: 883381 - DNA, 120 bp, Artificial Sequence
  ENSG00000230317_20 (sequence is synthesized)
ttcactggttcctggtgccagaaaggtcggtgaccactgctctaacacacacacccgtcagccagtacctcactgcaatttcactgcctcagtggctccacatcattgcctgtgcactgg

SEQ ID NO: 883382 - DNA, 120 bp, Artificial Sequence
  ENSG00000230317_21 (sequence is synthesized)
ctgtgtatgtcccccgaggaaatgtcccttctagacaaaatgtttggaaaggttttcatgggctcctctactcctgtatagcagccccatgcttgtttgcctcctccttcacaggaatcc

SEQ ID NO: 883383 - DNA, 120 bp, Artificial Sequence
  ENSG00000230317_22 (sequence is synthesized)
ctccatttagggttaaaaaccgctcctctctccattttcctgtatcttcctccctcttctttcctcatcctccctattttttcatttctggacccttcttctaagatgttataagtttct

SEQ ID NO: 883384 - DNA, 120 bp, Artificial Sequence
  ENSG00000230317_23 (sequence is synthesized)
gaaaggaactcaatgtccagcttctttatctctgccataattctggatgtaaagtaagattgaagagaaggagtggggagatgaagggttagataaagaagagatggaaaaaagggagag

SEQ ID NO: 883385 - DNA, 120 bp, Artificial Sequence
  ENSG00000230317_24 (sequence is synthesized)
agaagagagaagaagtggatgagaagaagagagaaaaggaagagaggagaaggaggaaaggagggaagaaagaggagggaaggaaaagaatatgaagaagggaaagaaaggaaaagggaa

SEQ ID NO: 883386 - DNA, 120 bp, Artificial Sequence
  ENSG00000230317_25 (sequence is synthesized)
gggaagagttgaaggacagtggagggagaaaagaaaaggagaaggcggaaagaagcatggggaaggattagaggtggagaaggagaacattgggaagcagaggagaaggagcagaaacag

SEQ ID NO: 883387 - DNA, 120 bp, Artificial Sequence
  ENSG00000230317_26 (sequence is synthesized)
caggtgatggaagaggaataagagcagaggaaggatttcatgtagagggggataaagagaaaaaaggaattcgtatgtctgaggatcccagggacagctttcccaggtgagagctgggtt

SEQ ID NO: 883388 - DNA, 120 bp, Artificial Sequence
  ENSG00000230317_27 (sequence is synthesized)
caactattctgtgtttcccccataggcagcctcttatgggggtggctcctgcccacctctgctgcttatgctgcagttactggtgttgcttggaagctgcctccaggacgtccttcacct

SEQ ID NO: 883389 - DNA, 120 bp, Artificial Sequence
  ENSG00000230317_28 (sequence is synthesized)
ttctgttctcctcaaaccactttctggagggccagccagaaggattttggaatcatcattccatccctcaactcctcccttcagcttcccttcattgtgctgtggaagaagagctcttcg

SEQ ID NO: 883390 - DNA, 120 bp, Artificial Sequence
  ENSG00000230317_29 (sequence is synthesized)
ctgaatgcagagtggatgtttccatagaacagctggctcatttgactccgcaagtcctcctactttacctgtcggtttatcatcagcttctctttggaagctcatacgtgaaaggaactc

SEQ ID NO: 883391 - DNA, 120 bp, Artificial Sequence
  ENSG00000230317_30 (sequence is synthesized)
atggcacagaccaagagagtccttccacttggtcacaagtcaagctttcaaggacatcaaacaagatgagagagaacctaaaatgatactcctcttcatgacagaaggacacccaaagac

SEQ ID NO: 883392 - DNA, 120 bp, Artificial Sequence
  ENSG00000230317_31 (sequence is synthesized)
aaaggaaaagactatttctggtagaaaagggaccaaacactatgaatattcaaaccacaaagtaccaaaaagtataccagagtcactagaacaagatgagttaaacaaatcctttcctcc

SEQ ID NO: 883393 - DNA, 120 bp, Artificial Sequence
  ENSG00000230317_32 (sequence is synthesized)
tattaatcaagactttggagaagaaaaacaaataacaatatttaccatccacttgaccagattccacagaaagacagagacctggagcctgactggtaagaaatccttacccttttgatg

SEQ ID NO: 883394 - DNA, 120 bp, Artificial Sequence
  ENSG00000230317_33 (sequence is synthesized)
gctcatcaggacctggattcacttggctgtgggtcaggagagcagagcctgctcacagcctcaaactgtaggaaccaagggaaagtgtccccttcgccctcggaaggttcgctaaaaaat

SEQ ID NO: 883395 - DNA, 120 bp, Artificial Sequence
  ENSG00000230317_34 (sequence is synthesized)
caactcacaaatgacagattaattgcagcaaaggcatagaaactttactgatgtgtacacagggaacatcacagcatgatgacccaaccacccaatgacctgaggaagcttatataccat

SEQ ID NO: 883396 - DNA, 120 bp, Artificial Sequence
  ENSG00000230317_35 (sequence is synthesized)
cctgagattacagcaaaaacgttggcttagggaatggccacaagcaggtgatagtggtaaaacaggttatagtggcaagacaggttatgggagggagggaagaggaggctggctagcaag

SEQ ID NO: 883397 - DNA, 120 bp, Artificial Sequence
  ENSG00000230317_36 (sequence is synthesized)
ggtggtcttgttaggtagaagaactctcacaggtaggtagcagccctcagagtaaatagatggtaaatgttgctttccagtcattaaggcatcagaatcttagttcctttctcctaggtc

SEQ ID NO: 883398 - DNA, 120 bp, Artificial Sequence
  ENSG00000230317_37 (sequence is synthesized)
cagacaagggaaggcttggctgagttcatgcaaattttctacacatgcaagtttcccccacaaaagacagctttgcagggctacttcttcttgctggctgtctttatataatctccaatt

SEQ ID NO: 883399 - DNA, 81 bp, Artificial Sequence
  ENSG00000230317_38 (sequence is synthesized)
atattttggggcaaaatttttttccttccttatgatattctgaattatgggaactttcctgctgaactaatgtttttcagt

SEQ ID NO: 883400 - DNA, 120 bp, Artificial Sequence
  ENSG00000230317_39 (sequence is synthesized)
gaattatgggaactttcctgctgaactaatgtttttcagtgaaggtccatggggacaagaatttgccatccatcagggggcgacagaggcagccatttggttcattgagatgcattgcaa

SEQ ID NO: 883401 - DNA, 120 bp, Artificial Sequence
  ENSG00000230317_40 (sequence is synthesized)
ttttagtgttggatgtgtacttgccctaagtcccataacaaagctttgatataataatcacacctttttactgcatttcaatatccataaatattaataagtcatctgaacaattatctg

SEQ ID NO: 883402 - DNA, 120 bp, Artificial Sequence
  ENSG00000230317_41 (sequence is synthesized)
tttcctgtactaattgttaattgtataaacaaagttgttttaaatatttatatagattgtcaggatgtggactgtgacattttatcagttaactgtattgactgatcatgtacacatcag

SEQ ID NO: 883403 - DNA, 120 bp, Artificial Sequence
  ENSG00000230316_0 (sequence is synthesized)
gcaaagaggcgctacactccaaggcggccctttggaaccgtccttggcccgggtgcacctactttggattcgcccagactgcaaatttttctttccttttgctggggccacgggacagag

SEQ ID NO: 883404 - DNA, 120 bp, Artificial Sequence
  ENSG00000230316_1 (sequence is synthesized)
cacctgggcagagcaagcggagaggcgccacatccccgagaggcgcttcgtagttgtccttggaccgggcgcagacactcagtattggtcagcgctggaaattttctttccttttgctgt

SEQ ID NO: 883405 - DNA, 120 bp, Artificial Sequence
  ENSG00000230316_2 (sequence is synthesized)
tggggggttctctgtcccacgacagatgggtcgcggttaagactttaattgctgacttttgggccggatcagattccttttcctacctgccacttcccagcagcgaaaaatccccctcct

SEQ ID NO: 883406 - DNA, 120 bp, Artificial Sequence
  ENSG00000230316_3 (sequence is synthesized)
gctgcactcctccgccaccgggctaggttgaaaggaaaaagccaagaagcgcgaagcagcccggctctggaaggctttggagagtccagctgacttgtacacaattcgcggcctctggag

SEQ ID NO: 883407 - DNA, 120 bp, Artificial Sequence
  ENSG00000230316_4 (sequence is synthesized)
ccttacctgccttcttgactgaatgccaccagttcgttttacgcttgtggctttttgttgaagtccctatcataagcaaatgcagtttctggctatggttactgcaattcgaaataaaag

SEQ ID NO: 883408 - DNA, 120 bp, Artificial Sequence
  ENSG00000230316_5 (sequence is synthesized)
ggaaaaaaagaagtttataaaacaagtaacccagtttctccaacctttactgtggagcaacagcgtcaagcaacaaaacccagcaaagttttgcttgtcacttacaagggtgttactgaa

SEQ ID NO: 883409 - DNA, 120 bp, Artificial Sequence
  ENSG00000230316_6 (sequence is synthesized)
atctggaaggcgaacaattagaagatagcccaaacatgctctattgctctacactgaaatacttgcctccaataatagaaaaaacctgttttcgtgcaattgattgattagcgttctgca

SEQ ID NO: 883410 - DNA, 120 bp, Artificial Sequence
  ENSG00000230316_7 (sequence is synthesized)
gcagtccctggacaattttaaagacattttgtgtttgtggccaaaattagaaacaagcagacacacacacaaaacaaccatattcaagacacggttcgactgtttccttgacactaccca

SEQ ID NO: 883411 - DNA, 120 bp, Artificial Sequence
  ENSG00000230316_8 (sequence is synthesized)
cgaagtttaaagcattttttatgttattttcaaactttcttaagtgatcccatgaaataaaagtcgataatagaaattaaaacaacacagagcaaagaacgagcttagtgaaatggagaa

SEQ ID NO: 883412 - DNA, 120 bp, Artificial Sequence
  ENSG00000230316_9 (sequence is synthesized)
gaaaactttgggcttggcattaggagagcctcggctgaaatccgaggttttgaacgcgattttttccgacagaagctgggcgctttctttcatgtaatgctgcagctgagcctgggacag

SEQ ID NO: 883413 - DNA, 120 bp, Artificial Sequence
  ENSG00000230316_10 (sequence is synthesized)
gtctttgaaagctactccagaagggtatttctccaccgccgggaccaccagtttattcctttcggctaaatacgtttttggctgcgggtgcaaaggggaactgaggaagtaggaggccac

SEQ ID NO: 883414 - DNA, 120 bp, Artificial Sequence
  ENSG00000230316_11 (sequence is synthesized)
cgggtggatgttcacgccggctgccgggtggcatgggccgtcacctcggttcaggtagcacaaggcgcccatggcgtggaatgaagagtggttgaccacacgcggccttaccagcttgta

SEQ ID NO: 883415 - DNA, 120 bp, Artificial Sequence
  ENSG00000230316_12 (sequence is synthesized)
ctgctgcagcggcagcgcgtcgcgggccaggtcgcccttgagactcagtgcgcagttgagcaggtcgctgcagctgaatgcgggagccgagggcaccgccgcgggcgccgccggggcctc

SEQ ID NO: 883416 - DNA, 120 bp, Artificial Sequence
  ENSG00000230316_13 (sequence is synthesized)
cagactggccttccgcggctcggagcccgtcactcctgccttggggctcgtgtcgtaggccacaggcacgaaggggatcatgcaggggatcgacgagttgagatgcagagagtgcttggg

SEQ ID NO: 883417 - DNA, 120 bp, Artificial Sequence
  ENSG00000230316_14 (sequence is synthesized)
ttcccccttggcatcaccagccgaacctgcctgcccagcccaatggactcctgccagcccatcgcagagttcttggcgcaccaatgactcggggacaatcactacttatttctatcaata

SEQ ID NO: 883418 - DNA, 120 bp, Artificial Sequence
  ENSG00000230316_15 (sequence is synthesized)
gaaagtgttgtgtcaataacgcagccaagatctcgccaatcgttaacttccaagaggagaagggctcggggttgcccgctcccggaatcccggagtctccgcggcccgaaccgagtctgg

SEQ ID NO: 883419 - DNA, 120 bp, Artificial Sequence
  ENSG00000230316_16 (sequence is synthesized)
accatttagaagacgccggcaggtaactggcctccccaaacgccccgaaaattaaaagccttaggaggcttgttctgtgtttgtggttttgtaaaggcaatgcccgcggcaataggcctg

SEQ ID NO: 883420 - DNA, 120 bp, Artificial Sequence
  ENSG00000230316_17 (sequence is synthesized)
ggaaagtcgcactttcatccacaaagttgaggagttgcaaggaataattgggtgtcacaccacaagcaaccttgactcgatcggaccccacccaggatacacacagacgcgcgcgcgcgc

SEQ ID NO: 883421 - DNA, 120 bp, Artificial Sequence
  ENSG00000230316_18 (sequence is synthesized)
acgcttccgagtttccattgagagtctggaaagagcatttctttcttaagtacctgcgctcagctagagctctcccggagcattttaaatactgaatgccgagcggagaagggaaacaga

SEQ ID NO: 883422 - DNA, 120 bp, Artificial Sequence
  ENSG00000230316_19 (sequence is synthesized)
gtgtattaatccccactccggttgccggtgtctgcaagcctcctctaagcagcgcaggcggcagcctggatgtctgtgcgcatcaaggagacttgccggcgccagagttgtgtccacagg

SEQ ID NO: 883423 - DNA, 120 bp, Artificial Sequence
  ENSG00000230316_20 (sequence is synthesized)
cccaaagagcgcgcgtagagaccatttcccctgcaacgccccccagccgaacacccgccgggtgtggcacctcggccgaaactcctggggcggcgcggtggagcgtgtggaggtttccgg

SEQ ID NO: 883424 - DNA, 120 bp, Artificial Sequence
  ENSG00000230316_21 (sequence is synthesized)
gaagacgcctacggctgcggctccgactgtgcgggctcccgccgcccaggcaagagcgtccaggagcgcgctggaagctgcggcgcgcaccttccccggcgcagtctcttgccagccggc

SEQ ID NO: 883425 - DNA, 120 bp, Artificial Sequence
  ENSG00000230316_22 (sequence is synthesized)
gatcacgcagagctgaaccccgcagctaggcgcgcaggaagggctgcacagagtttgaagacacggcagctgtaagctggcgtgaggaggccaaaggagcgcgcagagctgcaagcaaag

SEQ ID NO: 883426 - DNA, 120 bp, Artificial Sequence
  ENSG00000230316_23 (sequence is synthesized)
ggcggtggggcctggaccctgaagtgagtggccgaccgcagcagctcaaggtgccatctgcctggcaagctacccgggtccctccgccccactctaactttccgcgaaaatcagttccgc

SEQ ID NO: 883427 - DNA, 120 bp, Artificial Sequence
  ENSG00000230316_24 (sequence is synthesized)
ccaccccccttttgcttcctctgcctttctaattctcaatctgcttaaccaggctttagaggccaagcaaatctgagatcaattttctcgtttagctctaagtgacatcatctaaaatca

SEQ ID NO: 883428 - DNA, 120 bp, Artificial Sequence
  ENSG00000230316_25 (sequence is synthesized)
ttgtgcaagggctaaataaggaaacggagtctaattcaggggcaaacgccaggctatatttatcaaacgccaagctccagaaagcctcggctaggaagcctcggcagtgaaatccgaggg

SEQ ID NO: 883429 - DNA, 120 bp, Artificial Sequence
  ENSG00000230314_0 (sequence is synthesized)
ggtgtgtgccgcgcgcgggaaacgccgttctccgctccaggcgtcggcgggcggtggcgagagcagattttataggttcagaaagtgtgtctcagaggagttagagaagaccgattaata

SEQ ID NO: 883430 - DNA, 87 bp, Artificial Sequence
  ENSG00000230314_1 (sequence is synthesized)
ataggcatacgtgtgccatggtggtttgctgccccttcaacccgtcatctagattttaagccccgcatgcattagtttgggggaagt

SEQ ID NO: 883431 - DNA, 120 bp, Artificial Sequence
  ENSG00000230314_2 (sequence is synthesized)
tctagattttaagccccgcatgcattagtttgggggaagttctatgaaatctaagttgatgaacattattccccctgctgataccaaaagtcctgacttgtaaggaggacaaagctgaga

SEQ ID NO: 883432 - DNA, 120 bp, Artificial Sequence
  ENSG00000230314_3 (sequence is synthesized)
tgaaagtgtcctaagttagattcctgggaagaaaattctgagacacattctgcaggatgattattagggctcatccttggtttcaacacccatagaaggaagggggaagaagaaatcgaa

SEQ ID NO: 883433 - DNA, 120 bp, Artificial Sequence
  ENSG00000230314_4 (sequence is synthesized)
cagagagacagaagtcgagatgcatttcaggccaggactcttggctgaacccacaggagctctggagctagaatggcccttcagagttgtcctgagttggtctgagatggccagttcttt

SEQ ID NO: 883434 - DNA, 120 bp, Artificial Sequence
  ENSG00000230314_5 (sequence is synthesized)
atattcctgcatgggatagtcactggatgtccaccccaggaaggggtgtggccaagacagtccctaaaatgcccgccagcactccctacacctggagcgacaagaccaacatcacagggg

SEQ ID NO: 883435 - DNA, 120 bp, Artificial Sequence
  ENSG00000230314_6 (sequence is synthesized)
gaatgcactgggtgatggatcacagcgttcatcccagaagatgaggatacagaattggctgacaactacgttctaaatgtcagtgttctccaaaattcatatgttgaaacttaattccca

SEQ ID NO: 883436 - DNA, 120 bp, Artificial Sequence
  ENSG00000230314_7 (sequence is synthesized)
ggcctttgggggagggactataggtcatgagggtgtaaccctcatcaatgggattagtgtccagagagctgccttgcccttccaccatgtgaggacatagtgagaaggtgccatctatga

SEQ ID NO: 883437 - DNA, 120 bp, Artificial Sequence
  ENSG00000230314_8 (sequence is synthesized)
actaggaagtgggcgcttaccaccagacacccactcttctggcaacttgatcttgaatttcccagcctccagaactctgagaaatcaatttctgttaattataagctacccagtcgatag

SEQ ID NO: 883438 - DNA, 120 bp, Artificial Sequence
  ENSG00000230314_9 (sequence is synthesized)
cattttgttaaagctgctggaactaaactaagacactgacgctttctgcgacaaaaagatagagtgagtctctatagcataccatgtaacagatgtttttggaaaaataacctcatttca

SEQ ID NO: 883439 - DNA, 120 bp, Artificial Sequence
  ENSG00000230314_10 (sequence is synthesized)
tatgtttcctcaagataaaaagaatgtcataacaacaaatgagaaaatagttgctttagaaatattgcaccctatggagagagtattttggattttggttttttgttttgttttttaact

SEQ ID NO: 883440 - DNA, 87 bp, Artificial Sequence
  ENSG00000230314_11 (sequence is synthesized)
taggtaaactcatgtcacaggggtttgttgtacagataatttccgctttttctcctcctctctctcctcccaccctccaccctcaaa

SEQ ID NO: 883441 - DNA, 120 bp, Artificial Sequence
  ENSG00000230314_12 (sequence is synthesized)
ttttctcctcctctctctcctcccaccctccaccctcaaataggccccagtgtatgttgttctcttcattatgttcatgaagttgagagagtgttttgaaaaagaatgttggaaagcatt

SEQ ID NO: 883442 - DNA, 120 bp, Artificial Sequence
  ENSG00000230314_13 (sequence is synthesized)
tccactgttagatgattttaagtcaaaaagttatacaacagtgtgacctatttgcacacaagcatggacacagaattgtgtcatatgtttaaaacttttctagatccttttgtggttcat

SEQ ID NO: 883443 - DNA, 120 bp, Artificial Sequence
  ENSG00000230314_14 (sequence is synthesized)
aagcttgatgattgagttttcgcgtccacatgtgagatgtgcctcccttgagccttgtcattggcacattacctgcctgatgtgaacaataaaaataaaaaataaaaatttgctaagcag

SEQ ID NO: 883444 - DNA, 120 bp, Artificial Sequence
  ENSG00000230314_15 (sequence is synthesized)
acacacagcttactgccgaggagaaagaagcgttactaatccagagtggaggactggcctgggaaatcgggcagagagaggagttgtcggaaagaacacaccagaagcccctccgagccc

SEQ ID NO: 883445 - DNA, 120 bp, Artificial Sequence
  ENSG00000230314_16 (sequence is synthesized)
agacactgatagaaacccagccgcttcccaagccaatctgcaaacccaggaggcacccacgagtgcacagacacacccccggggtgcaggcgcggtgaagggaggagaggggcaagagct

SEQ ID NO: 883446 - DNA, 120 bp, Artificial Sequence
  ENSG00000230314_17 (sequence is synthesized)
ggccgggcggcgatttgcaggtccagccggcgccggtttcgcgcggcggctcaacgtccacggagccccaggaatacccacccgctgcccagatcggcagccgctgctgcggggagaagc

SEQ ID NO: 883447 - DNA, 120 bp, Artificial Sequence
  ENSG00000230314_18 (sequence is synthesized)
ggagccccaggaatacccacccgctgcccagatcggcagccgctgctgcggggagaagcagtatcgtgcagggcgggcacgctggtcttgcttacagttgggcttcggtgggtttgaagc

SEQ ID NO: 883448 - DNA, 120 bp, Artificial Sequence
  ENSG00000230314_19 (sequence is synthesized)
acacattagggggaaatggctctgttcctgcagattttataggttcagaaagtgtgtctcagaggagttagagaagaccgattaatagatgacagtgctaaagcctggatctcctgaatc

SEQ ID NO: 883449 - DNA, 120 bp, Artificial Sequence
  ENSG00000230314_20 (sequence is synthesized)
acacattagggggaaatggctctgttcctgcaggtttgcgcagtctgggtttcttaggtttagggggttgggtgggtttctctgggggtgcggtgggaagcggatcagttcggataacgg

SEQ ID NO: 883450 - DNA, 120 bp, Artificial Sequence
  ENSG00000273143_0 (sequence is synthesized)
cagatgctgtggctcaaaggattaattaatttgcttaagataatgcaacatgagaaaagcagatcaggacggaattccagaacaaggattttgcttgaaataacatcactactaattgtc

SEQ ID NO: 883451 - DNA, 120 bp, Artificial Sequence
  ENSG00000273143_1 (sequence is synthesized)
ggggtcttggtgaagacgtgatgcgggggccttctttctttttgtggttatctgtgccagccttccctgcaggctgctcttcctctagcacgttctgtttctgttaccggctctttccac

SEQ ID NO: 883452 - DNA, 120 bp, Artificial Sequence
  ENSG00000273143_2 (sequence is synthesized)
ccccggcatctccgcctagagccacacacatacgcggagcacccacgtgggccaggctttgttttggggctggcggcaccaacgtgagtaagacttatactcagccccagctgcccccag

SEQ ID NO: 883453 - DNA, 120 bp, Artificial Sequence
  ENSG00000273143_3 (sequence is synthesized)
cccagagggaaggggaaggcctgtagtccgtggggaagagcgcccagtaggggtgtggcagggtggggcgtgggctggagaaggcctcccgaggagaggagagctgaggccaactccgag

SEQ ID NO: 883454 - DNA, 120 bp, Artificial Sequence
  ENSG00000273143_4 (sequence is synthesized)
gcacctcctggctcatttctctactcccacaccttccctgctgaccctagtcaaggagctgtgaacatacaaatagtgcctgatacactagggcctcggcattggccatgggagtgaggg

SEQ ID NO: 883455 - DNA, 120 bp, Artificial Sequence
  ENSG00000273143_5 (sequence is synthesized)
agaaaatcatttaagaggctttgtagtcgatttcaacaaagaaggcaatgccagtgaagcatcttgcaggaatccctccctgactgcttcagtccacagcgctcttacctttctctatac

SEQ ID NO: 883456 - DNA, 120 bp, Artificial Sequence
  ENSG00000273143_6 (sequence is synthesized)
acttacaatctgtttcatttacttcctagcagaccttgcagaaaccattatttcatatgatacgtttcccccatagaatataagctccttaagggaagagatttttgcttggttttataa

SEQ ID NO: 883457 - DNA, 120 bp, Artificial Sequence
  ENSG00000273143_7 (sequence is synthesized)
tgctgaattccaagtgcctagaaagggcctggcaggtcgtaggcacaagaagtattggttggttgaatatatacttcttgcaacccacagaaactgatgttggtctgggccaggccctgc

SEQ ID NO: 883458 - DNA, 120 bp, Artificial Sequence
  ENSG00000273143_8 (sequence is synthesized)
cctggcttccagggatgcagaagtgaatcgaataacttcctgccctctgaacttatgggggagacatacatacctgcatattcacaagagatttcatcacatgtaaccaaagtaaaaagg

SEQ ID NO: 883459 - DNA, 120 bp, Artificial Sequence
  ENSG00000273143_9 (sequence is synthesized)
tggccaccagaagggggactggacctgcttgttggaagggtgcaaatggaaactagagaggtgattgttccagacattcccagtgggacaggtggctgtgagcctgtgatgaactgagag

SEQ ID NO: 883460 - DNA, 120 bp, Artificial Sequence
  ENSG00000273143_10 (sequence is synthesized)
acaccactgagtaaaagttaagaggacaggctctggagcccaactgtctgggttgaatctttctctaccaattactagttgtgtgatgtcgtaccagtgatatactgttgagataaacgc

SEQ ID NO: 883461 - DNA, 120 bp, Artificial Sequence
  ENSG00000273143_11 (sequence is synthesized)
ctcactgcagagattccaaaccagcaagtctgggctggctaggaatctgcttcgttgttccacaaacatgttattgtttattgcagagggtctacagaccatgccttgaaaagctgtggc

SEQ ID NO: 883462 - DNA, 120 bp, Artificial Sequence
  ENSG00000273143_12 (sequence is synthesized)
cttcagggaggaagggtcatgctaaccagcaaactggaatgtcacactgtgtgtcattgacatttttcagtgtgaaatcacaaactatcattcagggttagactttatactacccagtaa

SEQ ID NO: 883463 - DNA, 120 bp, Artificial Sequence
  ENSG00000273143_13 (sequence is synthesized)
gtgtcatggaggaggcttcaggacagctggggaattcaacaggcctggtctctaccaggttatcccgggacactccccagcagcagatttcaaggcattctgccttcactttaggcctag

SEQ ID NO: 883464 - DNA, 120 bp, Artificial Sequence
  ENSG00000273143_14 (sequence is synthesized)
ggtgaacctgcaggaggctctctgcaaatattcattgatcaaccgatagcttttctagccaagcaccagctggctagcctcagtcccatgcagaggttctgggaggactgcaggaacccc

SEQ ID NO: 883465 - DNA, 120 bp, Artificial Sequence
  ENSG00000273143_15 (sequence is synthesized)
agagagggctagggtgcaatgagggtgcaagaggtggtacccagctctgatgtctccatgtcttgacttgagctaggacctcatacccaggaccccagagaagccagatggaaataaggc

SEQ ID NO: 883466 - DNA, 120 bp, Artificial Sequence
  ENSG00000273143_16 (sequence is synthesized)
cataggagatgtgagggctcagagcctgcaatctctggacaaactccatctctttgagcctcagatgaaatgcaaggcctgagtgttacaggtcattctccgtttgttcattccgtaaat

SEQ ID NO: 883467 - DNA, 120 bp, Artificial Sequence
  ENSG00000273143_17 (sequence is synthesized)
atttcagcctctgtcatgtgccaggctgcgctagggagaccatggtgagacaggtctctgtactcagtgagcttatactccagagagggatcagacaataaggtaatatacattaattaa

SEQ ID NO: 883468 - DNA, 120 bp, Artificial Sequence
  ENSG00000273143_18 (sequence is synthesized)
cagagagggatcagacaataaggtaatatacattaattaatatcagaaggtaatgagaggaagaccgtagtccaggagcagctatggctcatggctgtaatcccaacactttgggaggct

SEQ ID NO: 883469 - DNA, 78 bp, Artificial Sequence
  ENSG00000273143_19 (sequence is synthesized)
cagcctgggcaatatggtgaaaccctatctcacacacacataaaattagccagcatggtggcacactattgagcccgg

SEQ ID NO: 883470 - DNA, 120 bp, Artificial Sequence
  ENSG00000273143_20 (sequence is synthesized)
tcaaggctacagtgagccatgatcacatccctgcattccagcttgggtgacagagtgagaccctatctcaagaaaaaaaaaaaagagagagatagaggaagaccataaaagggtaacgga

SEQ ID NO: 883471 - DNA, 120 bp, Artificial Sequence
  ENSG00000273143_21 (sequence is synthesized)
cggagctggtcatggtggctcatgtttacagtcccagctacttatccaacccacggcccatgggctgcatgaagcccaggacagctttgaacatggcccaacacaaattcataaactttc

SEQ ID NO: 883472 - DNA, 72 bp, Artificial Sequence
  ENSG00000273143_22 (sequence is synthesized)
agaccagcctgcatggcggtacatgcctgtaatcccagctactaggaaagctgaggcaggagaatcacttga

SEQ ID NO: 883473 - DNA, 120 bp, Artificial Sequence
  ENSG00000273143_23 (sequence is synthesized)
aggcagaggaaactgcttggggtaaagaaaacaaaaaacgcaacccccccagcatggtgcgtactggagatgagaaaatggaggtaccaaaaagtgggctctgaactgcagagcctggct

SEQ ID NO: 883474 - DNA, 120 bp, Artificial Sequence
  ENSG00000273143_24 (sequence is synthesized)
ccagagcccttgtatttgactactgggatccaccgttattctcacagccgcgtttcccacagggctgctttgtatggcctcttagaaaagtcctgcctgtctccaccatccagactatga

SEQ ID NO: 883475 - DNA, 120 bp, Artificial Sequence
  ENSG00000273143_25 (sequence is synthesized)
aggtcagaggaaagggagaatgtctcacatacagaaaatgcttgatcaacattgatggaatcataaatgggcctcagcggcacctgtcctgagtcagcatctcacagaggttttgccagc

SEQ ID NO: 883476 - DNA, 120 bp, Artificial Sequence
  ENSG00000273143_26 (sequence is synthesized)
gccagccacatctccagcatgaaggtgattgtctgagtgtgtccagtccagttcctgccttaataaaaatcactgctgcaagggagagggctgccaaggccctgcctccctccaacccca

SEQ ID NO: 883477 - DNA, 120 bp, Artificial Sequence
  ENSG00000273142_0 (sequence is synthesized)
ttttccttcgtggcggcctctccaggcccaaattggcaagcctcccctgtcctggtggctgtctcccggcctactctccaggcccagcacactctcgcggctgtacctccaggcccagcc

SEQ ID NO: 883478 - DNA, 120 bp, Artificial Sequence
  ENSG00000273142_1 (sequence is synthesized)
cctgcctgcagacagccgcttttgactcggttcgtgcccagctcctggcggcctttgtaggcccgaaacctcctccagcacagctcttcaggcccacctgtggcctcgcagcggccttcc

SEQ ID NO: 883479 - DNA, 120 bp, Artificial Sequence
  ENSG00000273142_2 (sequence is synthesized)
caggcccagctcttgcctcacggcggccttccccggctgtattcctgccagcctctcggcggcctcaaaaagcccggcgcctgcctcacactggggtctctaggcccagctcacgcctga

SEQ ID NO: 883480 - DNA, 120 bp, Artificial Sequence
  ENSG00000273142_3 (sequence is synthesized)
cggtggtctctcaaggcccagctcccgcccaccccgaccggcccaaggctttctcaagttggcccatccagggcccaattcctgccctccgctgatggcctgtgcagacccaaagtatcc

SEQ ID NO: 883481 - DNA, 120 bp, Artificial Sequence
  ENSG00000273142_4 (sequence is synthesized)
tgaagtcggcctcgccgggcctagctcctgcctgtcataggcccctagaagcacggcctctgccttctaaaagtggaaccccccagtcccagctgttgcctcagcgtggccacatcagcc

SEQ ID NO: 883482 - DNA, 120 bp, Artificial Sequence
  ENSG00000273142_5 (sequence is synthesized)
gaagctcctgccctgcctgttggcagcctccatgggccaagctcttgcctctcaccatcctctccaggcccagtactgtttccagccggcctctccaggcccaactctccctctcagctg

SEQ ID NO: 883483 - DNA, 120 bp, Artificial Sequence
  ENSG00000273142_6 (sequence is synthesized)
tgcctgccggcccagctcctacctcgcaaaagccacgttcggcccagctcctgcccagctcctggcagcctttgtaaaccccaggatcctctaagtcaggcctttcaggccctgcctttg

SEQ ID NO: 883484 - DNA, 120 bp, Artificial Sequence
  ENSG00000273142_7 (sequence is synthesized)
gctccccggtggcatggagaggcccagctcctgcctgacagcggcctctccaggcccagctcttgcctcacgttggcctccctgggccacgtttccgcctgcctcgcggcagccccgaca

SEQ ID NO: 883485 - DNA, 120 bp, Artificial Sequence
  ENSG00000273142_8 (sequence is synthesized)
atcccggctcctgcctcccgatggcatctttaggctcatctcgtgcctcaccacggcctgcaccaggccacactcctgcctttcggtggcctccgcgggcctgactcctgcgtcccaatg

SEQ ID NO: 883486 - DNA, 120 bp, Artificial Sequence
  ENSG00000273142_9 (sequence is synthesized)
gcctctttaggcccggctcgtgcctcgccgcggcctcctgaggcccacctttgcccttctggcagcctctccaggcccaggacttcctcaagtcggcctctgccagcccagtggccgcct

SEQ ID NO: 883487 - DNA, 120 bp, Artificial Sequence
  ENSG00000273142_10 (sequence is synthesized)
cccggcctcctctccgggcccagctccttgctcgtggctgcgcccgcgggcccagctcctgcctctgaacatcctcctgtgactcggctcctgcccagctcccagcggcctccgtagacc

SEQ ID NO: 883488 - DNA, 120 bp, Artificial Sequence
  ENSG00000273142_11 (sequence is synthesized)
cgaagcctcctccggtccagctctccaggcctgcctcctgcctcgtggcggccttccccggccatgctcgtgccggcttcccggcagcctccacgagcccggctcctgcctcacgcgggc

SEQ ID NO: 883489 - DNA, 120 bp, Artificial Sequence
  ENSG00000273142_12 (sequence is synthesized)
ccctccaggcccagctcgtgcctcgcggcggcctctccaggcccggctcccgcccagcccgacggcgtctcccagcccaaggctcccttcctcaacgtcggcccctctgggcccagctcc

SEQ ID NO: 883490 - DNA, 120 bp, Artificial Sequence
  ENSG00000273142_13 (sequence is synthesized)
ctcctgcctcccgctgatggcctgtgcgggcccacccgaggcggcccgaagtcggcctcgccaggcccagctcctgcctggcgtaggcccctgggggcacggcctctgccccacagtggc

SEQ ID NO: 883491 - DNA, 120 bp, Artificial Sequence
  ENSG00000273142_14 (sequence is synthesized)
gcctcccggcatcctctccaggcccagagctgtttccagttgctagaccatttttgtgcctgcctcgttgcagcatctccaagcccagcttttgcttttctgcagtttcttgaggccgaa

SEQ ID NO: 883492 - DNA, 120 bp, Artificial Sequence
  ENSG00000273142_15 (sequence is synthesized)
ctccatttttcgaatggcttatttaggcccagctcttgcgtttgcattgtcccttcaggcccagaactttctcacgtcatcgtcaccaggcctagcttctgcatctggtcagccttttaa

SEQ ID NO: 883493 - DNA, 120 bp, Artificial Sequence
  ENSG00000273142_16 (sequence is synthesized)
ggcccagcttttgcctcataaactcagctcctgtttaatggcggcctcccaggtcccaccttctgccttcctgtgtccactccaggcccagctactgccttggtgctctttttaagtcaa

SEQ ID NO: 883494 - DNA, 120 bp, Artificial Sequence
  ENSG00000273142_17 (sequence is synthesized)
taattttttccagtcgacctctccaggcccaacttgtacctctgagtgtcctctaggatctcagcttctgcctaacaatgacctctttagactcagctcattttcactgctacatcttca

SEQ ID NO: 883495 - DNA, 120 bp, Artificial Sequence
  ENSG00000273142_18 (sequence is synthesized)
agccattctcctgcctcttggcaacctctagtggcccagcttctgcctcacagcagcctctccatgcatgcctagctcctgcctctttagggaacttacaggcctaaaactttcttaatt

SEQ ID NO: 883496 - DNA, 120 bp, Artificial Sequence
  ENSG00000273142_19 (sequence is synthesized)
tgggcttctcaggcccagctcctgccttctgttggcctctacaggcctggcatcatcctttcaacagcctctttaggcccggcctctccaggaccaaaacatccttaagtcaacctcacc

SEQ ID NO: 883497 - DNA, 120 bp, Artificial Sequence
  ENSG00000273142_20 (sequence is synthesized)
aggcccggctcctgtctccttgcggcctccagaggccgagcttttgcctgccaatggcctctctagccccagcttttgcctgccaatggcctctctagccccagcttctgcctttcatcg

SEQ ID NO: 883498 - DNA, 120 bp, Artificial Sequence
  ENSG00000273142_21 (sequence is synthesized)
gtctctccaggcttagctcctttctcttcacggcctctgcaggcctaaaacttcctcaatttggcatctccaggcccagctcctgcctccaggccgcctctgcaggcctatctcaagcct

SEQ ID NO: 883499 - DNA, 120 bp, Artificial Sequence
  ENSG00000273142_22 (sequence is synthesized)
tacaacagcctctttacccccagctcctttctccgacttgtctctccaggcctagaacttcctcatgtttacctcaccaggcccacctcctgccttccagtagcgtctacaagtttggct

SEQ ID NO: 883500 - DNA, 120 bp, Artificial Sequence
  ENSG00000273142_23 (sequence is synthesized)
cctgcctcccatggatctctccaggccccaaactttctcaagtcaacctcaccaggcccggcttctccctttcatcagccttccaaaggccagcttttgcttcatgtctgccttccgagt

SEQ ID NO: 883501 - DNA, 120 bp, Artificial Sequence
  ENSG00000273142_24 (sequence is synthesized)
cccagctcctgttttatggcagcctcctgaggcccagctcctgcctcctagtggcctcttttggcccaactctttcctcaccagggccttccagaccacgttcctgccttttagcagcca

SEQ ID NO: 883502 - DNA, 120 bp, Artificial Sequence
  ENSG00000273142_25 (sequence is synthesized)
ctacaggcccagctttgcgtcctttcaagagtcctgcctcacagtggcctcccaagggcaactttctgcctcatgtcagcctcttgtgccctggtcctgcttcctggtagactctgcagg

SEQ ID NO: 883503 - DNA, 120 bp, Artificial Sequence
  ENSG00000273142_26 (sequence is synthesized)
ccctgctcctgccttacgttgccccttttataaagatccagttcctgcctcctggctgcctctatgagcccaaatcctgcctaacaacaacctgtttttgcccagctcctgcttcctggc

SEQ ID NO: 883504 - DNA, 120 bp, Artificial Sequence
  ENSG00000273142_27 (sequence is synthesized)
agcctccttaggccaaaaatttccttcagttgacctctccaggcccagctcctgcctctcagcaccctctttaggcccagctcctgccttaataaatttgaataaattattgttatgtga

SEQ ID NO: 883505 - DNA, 72 bp, Artificial Sequence
  ENSG00000230319_0 (sequence is synthesized)
atttacaacagactcatccacaaaaccgaagtggtagaaacaggtctttttgataggcaggagtatcgcttg

SEQ ID NO: 883506 - DNA, 120 bp, Artificial Sequence
  ENSG00000230319_1 (sequence is synthesized)
tggtgaaactctgtctctacaaaaaaaactttaaaaagtagctgggggtggtggtgtgtgcctgtgtggtcccagttactcgggaggctgaggtgagcggatcacttgagcccaggaagt

SEQ ID NO: 883507 - DNA, 120 bp, Artificial Sequence
  ENSG00000230319_2 (sequence is synthesized)
aggctgaggtgagcggatcacttgagcccaggaagttgagccacaatggcaccacggcactccagcctgggtgacagggcgagatcctgtctgaaaagaaaaaaaaaaagaaaagagaag

SEQ ID NO: 883508 - DNA, 120 bp, Artificial Sequence
  ENSG00000230319_3 (sequence is synthesized)
gaaaagaaaacaggtcttcctgggagcacctagacaaaggcctttgtaaagataaattaccgaggaatatttctagttgcctgttttcttcaaaatcacagtcaagtaagctgggcgtgg

SEQ ID NO: 883509 - DNA, 120 bp, Artificial Sequence
  ENSG00000230319_4 (sequence is synthesized)
cctgggcgacagagcaaaactctgtctcgggaaaaaaaaaaaaaatcgcagtcaagtaaaaagaaacgcaactaaaagagccgtcagttaaatacattcctctctcgtggcaggacgagt

SEQ ID NO: 883510 - DNA, 120 bp, Artificial Sequence
  ENSG00000230319_5 (sequence is synthesized)
ctataagatttgttttgtttttaatttagtgtaaagtttttttaatgtttaaaccttgtgacacatcaaattacatgcttgaagctgttactttctgtcaaaaaagtgagtttttaatat

SEQ ID NO: 883511 - DNA, 120 bp, Artificial Sequence
  ENSG00000230319_6 (sequence is synthesized)
tttatacatccgcatgaattgtttcctttagcactagtcaaacagactccataaccttccaaagaagtgccttcgtttatttacagggcttaggaaaggaaaaaagctctacaaaaggga

SEQ ID NO: 883512 - DNA, 120 bp, Artificial Sequence
  ENSG00000230319_7 (sequence is synthesized)
aatttcaaaatagggcttcagcaggggcccaggtggagtgagtagttttgataaggtccaggtgggactcacttccaggtggtgaggaccgctctccccgagtctctcgatcggcctgct

SEQ ID NO: 883513 - DNA, 120 bp, Artificial Sequence
  ENSG00000230319_8 (sequence is synthesized)
ctgggccccagagactgaccctgacggcttctcagctcccggtcagccccgtcaccctgggccaattcttcatcatacctggagacagaaacagccaggatcacggcaggctctctttca

SEQ ID NO: 883514 - DNA, 120 bp, Artificial Sequence
  ENSG00000230319_9 (sequence is synthesized)
aaggcaacaggcagggccaccaggctgctgtgtggcaaatatgacatcacccagagaagcggcctgagggggccccaccctcgcgactcctgctggctcccgcccacctcccacctggct

SEQ ID NO: 883515 - DNA, 120 bp, Artificial Sequence
  ENSG00000230319_10 (sequence is synthesized)
ccagcccacctgcctgccaggtggctctcgcagcccagcaaatgctccccaaggccagcctgcctatgtgtacaaccttgttgttattgtggacagtggtctcccctcggaagctgacat

SEQ ID NO: 883516 - DNA, 120 bp, Artificial Sequence
  ENSG00000230319_11 (sequence is synthesized)
tttatacaggtcaccaggtcaaatatggcaatgactccaaaggcaacatgcatgaggtgacacagaaccagcccaggcgctgaggagtgtggaaagcatctttccccagttaaagcacat

SEQ ID NO: 883517 - DNA, 120 bp, Artificial Sequence
  ENSG00000230319_12 (sequence is synthesized)
ccgtcggtgtgctgcgctggccatcctgactaggaccctcggttgtatagctcagagattgggcactttcctcagcctgatagagggaattgatgaagccgtaatgggcatctctgcgtc

SEQ ID NO: 883518 - DNA, 120 bp, Artificial Sequence
  ENSG00000230319_13 (sequence is synthesized)
tcactcatcagaggcttgactagcacccaacccctctgttggcgtgagactgtcatcagagtgaacggatgtccagctccaagcccagaacctgcagtgaaggtctgtgcagccttatca

SEQ ID NO: 883519 - DNA, 120 bp, Artificial Sequence
  ENSG00000230319_14 (sequence is synthesized)
cagacaaacacaaactgtccaccaggctgcccgttaccccttcccaggcccttagggatccgggtgccagactattaacctctgttcccagtgacaaaagtaaatccatttacatacaaa

SEQ ID NO: 883520 - DNA, 120 bp, Artificial Sequence
  ENSG00000273145_0 (sequence is synthesized)
cagggcagcccctggtgagtcagggcctgagtcagcgccctccgccttcccagaggccccgccaggacctgcagccctgggcgccccagcagcccggccctgctcagcgcagctctgggt

SEQ ID NO: 883521 - DNA, 120 bp, Artificial Sequence
  ENSG00000273145_1 (sequence is synthesized)
cagcgcagctctgggttggaacttgcactttccagtaactcggacctccccccggccgccttcccaggcgccaccgggcccagcagatcgtcaccgtccaggctggagtgcagtggcgcg

SEQ ID NO: 883522 - DNA, 61 bp, Artificial Sequence
  ENSG00000273145_2 (sequence is synthesized)
atcccttccaatatttccgaggccagctgcccagagaaggagggctgggtggagaggaccg

SEQ ID NO: 883523 - DNA, 120 bp, Artificial Sequence
  ENSG00000273145_3 (sequence is synthesized)
gccagctgcccagagaaggagggctgggtggagaggaccgtgccagcagcagtaggcctgggccaggagacaggcacgcacctccgcggtctctggcgagtctatgtccacacagcggca

SEQ ID NO: 883524 - DNA, 120 bp, Artificial Sequence
  ENSG00000273145_4 (sequence is synthesized)
cacccccagccacctgcagcagccccacatctccaccgggtcaccctgctgacatcaagagtgcctcccgcaatgtcccaacccatgagggcttcttggagctgaaccagggcaccggcc

SEQ ID NO: 883525 - DNA, 120 bp, Artificial Sequence
  ENSG00000273145_5 (sequence is synthesized)
acttctggaggggggctgctcgtgacttccgacctctgtctcgctagttggcatgagaagactggactccttctgcaggcctcagggcagaggcagatgtcagcccccagggatgtcact

SEQ ID NO: 883526 - DNA, 120 bp, Artificial Sequence
  ENSG00000273145_6 (sequence is synthesized)
gccagaaccccagatgccccaagccatctggactccccctgtgcagtatctctgctacaataaaatgtacccagatctgagtcctctcacctgggcgactgccaatgtcccctgcggccc

SEQ ID NO: 883527 - DNA, 120 bp, Artificial Sequence
  ENSG00000273145_7 (sequence is synthesized)
tataccccgcccccaggagcccagaggatctttctttttaaagatattcagacctcacagataagtctgccctgaccagcccctccccagttcccaggccctatcctgacaacggccaca

SEQ ID NO: 883528 - DNA, 120 bp, Artificial Sequence
  ENSG00000273145_8 (sequence is synthesized)
acttcagagcagctgaaacctgctgtgagtgaaaaatgagaagctgttgttttaattttactttctctgattactaatgaggttatttcttctctgcataaaaacttcattcgtgtttaa

SEQ ID NO: 883529 - DNA, 120 bp, Artificial Sequence
  ENSG00000249066_0 (sequence is synthesized)
gaattttagttttagttctcacactaatgacatcaagtttgttcacacttctctgtaccattgcctttgggtagtcctcttgtccactgacaatagacttgaccatgtcactttctttga

SEQ ID NO: 883530 - DNA, 120 bp, Artificial Sequence
  ENSG00000249066_1 (sequence is synthesized)
tcagtgagacaagcaaagaattgaaacgtgatggaccattggaacttttcttcttttgctgattttggaaacctgctggataacaaagactggcccagtttaccccttcacctcagctga

SEQ ID NO: 883531 - DNA, 120 bp, Artificial Sequence
  ENSG00000249066_2 (sequence is synthesized)
gaagccctggctagcctaatgtaggaaccacctgcagcagaaacaagccatcccaacggaggagccctaatgccaaacaagaaagttgcaaccatcctaaactcttcagccccaagcaaa

SEQ ID NO: 883532 - DNA, 120 bp, Artificial Sequence
  ENSG00000249066_3 (sequence is synthesized)
tcaccagccccagtcacatcaccagctgatggtagaaatccaacatgctaacccgaaccagaggaataacccagcagctgacccaagactggcaaactaataaaatggtggctattataa

SEQ ID NO: 883533 - DNA, 120 bp, Artificial Sequence
  ENSG00000249066_4 (sequence is synthesized)
ccctcggagctgtgacacctacttgactgcatctgcttgataaataagaagaaccagctggtacctgtaacataaaagaacagcaagaatacagaaacaaagcaaatcatgattcagaat

SEQ ID NO: 883534 - DNA, 120 bp, Artificial Sequence
  ENSG00000249066_5 (sequence is synthesized)
tagggcttctttgaccaccagacttggaatgtgccttcaggagaaataagacaggcagtgaagctgttcctgcaggcactgcgcttgcagggggaatatgttgataagtgatgcaaagcc

SEQ ID NO: 883535 - DNA, 120 bp, Artificial Sequence
  ENSG00000249066_6 (sequence is synthesized)
agatgaggtctctagactctccataaaatctctctttcttcaaccaggttatcttacttctatctgcaaggcccagcacaaccatcatctgtcaggcaagcccaaacttctacagagata

SEQ ID NO: 883536 - DNA, 120 bp, Artificial Sequence
  ENSG00000249066_7 (sequence is synthesized)
tctcagatacaatatcaagtaacatttactgaaagtttgtctatattttttattcaagatcaggaaaatgtcaatcttttctattggtaaggaacaatcctgtttttcactttatttcct

SEQ ID NO: 883537 - DNA, 120 bp, Artificial Sequence
  ENSG00000249066_8 (sequence is synthesized)
cacataagtgtgaatgtgtacagcaaaatttctagaggtagagtaatattcaagtctgcggtcagccacttgccaagtttgcaaagtatggatatattattttatatacccaagactcaa

SEQ ID NO: 883538 - DNA, 120 bp, Artificial Sequence
  ENSG00000249066_9 (sequence is synthesized)
atgttctcaactgtaaaaagtatatattagtaatttctatctaatggatttttgtgagcatcatgttattttcaaacacttaaaacacctgacatacaataaatgctcactaaaactaaa

SEQ ID NO: 883539 - DNA, 120 bp, Artificial Sequence
  ENSG00000248990_0 (sequence is synthesized)
gtttattcccccaagatgacaacttaagtctttgagtctatcagttccaggcaagggtcaagctccacaggaccagccatcagggaaataacatgacttgttatttccagactacgttca

SEQ ID NO: 883540 - DNA, 120 bp, Artificial Sequence
  ENSG00000248990_1 (sequence is synthesized)
gaacagctggtcatgctccctctctcggacaatagaacttgaatgagtctaaagaggcccagagcttcaaaacaaaaagtttacctgtaggagtgaaggagtttattcatttccagtctc

SEQ ID NO: 883541 - DNA, 120 bp, Artificial Sequence
  ENSG00000248990_2 (sequence is synthesized)
ctgaaggttggtatgtaaattcagccagagtagtcggtgtgaacttgaaacctaggaaacttccatctccttatagtttttaaccctttgaggataagttttgtaactatattttccaaa

SEQ ID NO: 883542 - DNA, 120 bp, Artificial Sequence
  ENSG00000248990_3 (sequence is synthesized)
tgtaacaccattgtctgctgacaatctgttctacattaatacgccatttttttattccacattcttctccaacacaattttactactccagaaaacttttgcccataaatttaaaaatcc

SEQ ID NO: 883543 - DNA, 120 bp, Artificial Sequence
  ENSG00000248991_0 (sequence is synthesized)
caggcctgctctaacaatgtgacgtgatgtgtccttctagacaaggccaatattaatgatgacatatctgcacaggaagcacaaagctctggttaccactggaagccgtcttgcccccat

SEQ ID NO: 883544 - DNA, 120 bp, Artificial Sequence
  ENSG00000248991_1 (sequence is synthesized)
aaaccagccttaggatgccactgatgctgtatggcagaatggagtaacagagagaatttgcagaataaagaagggacaatgcagtcaccaggtcagcattaagggaaggcttggctgcat

SEQ ID NO: 883545 - DNA, 120 bp, Artificial Sequence
  ENSG00000248991_2 (sequence is synthesized)
actctgctgctgctgactctgccagtggggacagcacatgcttccttctacgcttgcctgagcagagttagccaggccctctgtcttgcatgagattgagtgtgattctggggatgcaaa

SEQ ID NO: 883546 - DNA, 120 bp, Artificial Sequence
  ENSG00000248991_3 (sequence is synthesized)
tcaggatgtctctgggaagaattgcattgtgtaggttatttcaatttaagaagtagctgcaagaagattccaaacacattttgcctcaagtcacctcaagtttctaatcttcctgctgga

SEQ ID NO: 883547 - DNA, 120 bp, Artificial Sequence
  ENSG00000248996_0 (sequence is synthesized)
atgccagggatgctgaccagggagctggagcccggagtgcccccaacaggccatatctgaaagtcatctccatcagggaagaaactgaggttcaggctccccagacacactgggccagca

SEQ ID NO: 883548 - DNA, 120 bp, Artificial Sequence
  ENSG00000248996_1 (sequence is synthesized)
gtttcagcagggaacaagtgttttggacgagggtgtctctgaaatcccttccacctgcaccccgcccccactgcctcctcccagctcgggcctccgggtctccagttgggccctcatgtt

SEQ ID NO: 883549 - DNA, 120 bp, Artificial Sequence
  ENSG00000248996_2 (sequence is synthesized)
gctccttcctgagtctgacaagtaagcctcacagctccctccgcctgcctcttcgtgtcactcggccgtgcagagcaacatggagtcctaatgatttccatcccgtctgtctgctgcagt

SEQ ID NO: 883550 - DNA, 120 bp, Artificial Sequence
  ENSG00000248994_0 (sequence is synthesized)
gcttcagcgcctcccgggtctgcgtggcctgctcggctcagaggcctccaccacggtccgctccctgccggacgccgcgctgctgtggccgcggtggttctgtggctgtgagggccgttt

SEQ ID NO: 883551 - DNA, 120 bp, Artificial Sequence
  ENSG00000248994_1 (sequence is synthesized)
ctgtccgtccacaccgccttccctctgcagatttcctctgcagaggcccggagttaccagcaaggtctgacgcagcagagtgcagaaacggcctccctgtctgtcaaagtggcctcccga

SEQ ID NO: 883552 - DNA, 120 bp, Artificial Sequence
  ENSG00000248994_2 (sequence is synthesized)
ggacacccagcgaggccaccagatcatcacgtggagtatcggtggccttattaaaacaaaaacaacaactccacagcccggcgagcgatgtgcttgcctccccttcaccttctgccatga

SEQ ID NO: 883553 - DNA, 120 bp, Artificial Sequence
  ENSG00000248994_3 (sequence is synthesized)
ttataagttttctgaggcctcccagtcatgctttctgttaagcctgcagaactgtgaacatcaagtcttttcatctatgagaactttgattccactgttgtagtatttgatctcttgttg

SEQ ID NO: 883554 - DNA, 120 bp, Artificial Sequence
  ENSG00000248994_4 (sequence is synthesized)
gacactcctctgagcagaggggaccagagtcatgggagcagtgatggcctgtatccttgtcctgagcctgacttgaaaggcagtgcctctagtttccccactccacacaatgtttgttgg

SEQ ID NO: 883555 - DNA, 120 bp, Artificial Sequence
  ENSG00000248994_5 (sequence is synthesized)
ttaatgacagtgtggtataatgtatttaatcttcaaggtaataccattgtaataggctgtggaaattcattgaggttatctttgtggcctaataaatgctccatttttaaatgtcccata

SEQ ID NO: 883556 - DNA, 120 bp, Artificial Sequence
  ENSG00000248994_6 (sequence is synthesized)
gatgtttaaaaataatttctatgctctgttaggaaatttattttttatgtatctatttggtcaagcttttcagttgtgtattcaaattctcatttgtttcatatgttgtattattggtca

SEQ ID NO: 883557 - DNA, 120 bp, Artificial Sequence
  ENSG00000248994_7 (sequence is synthesized)
gtttctaaaattgtgttaatggttcctgtaatcattgtggatttgtccacttccccttgtatttataacagcttttgttgtatttcaacctgtcggtaagggaataaaattcatggctca

SEQ ID NO: 883558 - DNA, 120 bp, Artificial Sequence
  ENSG00000248994_8 (sequence is synthesized)
tggtgagagaaagaaccaggggaggtttggggagggttcaaccaagtcagaatggggcatggtaggcggcttccaaaacggccccagtgaccctgcgatcccacccttgggggctccctg

SEQ ID NO: 883559 - DNA, 120 bp, Artificial Sequence
  ENSG00000248994_9 (sequence is synthesized)
ccttgtgtgtgggctgggcccagtgacggcctctggtggacaagatatggcaggagacaggaggtcgctgtgtctgtgtcacttcctacagaggcttaacgcctccttgtatttagacgg

SEQ ID NO: 883560 - DNA, 120 bp, Artificial Sequence
  ENSG00000248994_10 (sequence is synthesized)
ctaatatacttggtcttaatccttttatgcctagcattccaataatggaaggttccaataacggaatgttctaataatggaacgctaggcatgtcggatttatatcctactgctcaaggt

SEQ ID NO: 883561 - DNA, 120 bp, Artificial Sequence
  ENSG00000248994_11 (sequence is synthesized)
gatcaccaatgtctgattgctaccttaggcataaatggtttaattctaccatcttattgacttattttttatgttactattttcaacattttaataagaatttaaaaatattcagcaaaa

SEQ ID NO: 883562 - DNA, 120 bp, Artificial Sequence
  ENSG00000248994_12 (sequence is synthesized)
agtcactctgggaggtggtggatggtattactgggcccgtttttcattggggaaactgaggctccaacactgaaataattcacttcacctggagttgagccaagattctctttactccaa

SEQ ID NO: 883563 - DNA, 120 bp, Artificial Sequence
  ENSG00000248994_13 (sequence is synthesized)
agccagcactccttctgagaacaggactttgatttggatggacggatgttgctgggggcctcagcacagggtctttgggctcacagctggacatgcagctgttcagcggcagctgcggtc

SEQ ID NO: 883564 - DNA, 120 bp, Artificial Sequence
  ENSG00000248994_14 (sequence is synthesized)
tgtccacccaggcggagactggatgcaacagtttcaggcggggttcctccctccccaggtgcctgcccacctctcccttacatgggatgtctctcttcttcctccttgcctggtccctaa

SEQ ID NO: 883565 - DNA, 120 bp, Artificial Sequence
  ENSG00000248994_15 (sequence is synthesized)
agcacttgagtttgtggttcattttttaaaaaatgatatattttatttaacccagtatattaaaaatgtcatttcagaatgtacgttttccttttttttttttttgcaattggccgtgta

SEQ ID NO: 883566 - DNA, 120 bp, Artificial Sequence
  ENSG00000248994_16 (sequence is synthesized)
tccttttttttttttttgcaattggccgtgtattttacacctttattttattgatttatttttttagacagagtctttctctgttgcctgtgacgtgatctcagctcactgcaacctcag

SEQ ID NO: 883567 - DNA, 64 bp, Artificial Sequence
  ENSG00000248994_17 (sequence is synthesized)
accttggcctttcacagtgctgggattacagggctgagcctctgtgcccggccagactaagcag

SEQ ID NO: 883568 - DNA, 120 bp, Artificial Sequence
  ENSG00000248994_18 (sequence is synthesized)
attacagggctgagcctctgtgcccggccagactaagcaggcttcatgtgtccaacagctatgttgggcaggtggctccgagctggagggcacaggtttggatggaagacgactgcgtgt

SEQ ID NO: 883569 - DNA, 120 bp, Artificial Sequence
  ENSG00000248994_19 (sequence is synthesized)
gaaagcaccactgtgagccttgcggggatgcagagcccatggcacaggccgctcctgagtgacttctccagaacctgcctgctataagcgctcaggtgtctctgtctctctgcaccaaac

SEQ ID NO: 883570 - DNA, 120 bp, Artificial Sequence
  ENSG00000248994_20 (sequence is synthesized)
cttactactcttaaaggttttgagacaccagtttacttagtatactaataattgtacccaattactaccattagattggataaaagaccattagattgggtttttgctgtcatttatttt

SEQ ID NO: 883571 - DNA, 120 bp, Artificial Sequence
  ENSG00000248994_21 (sequence is synthesized)
cattgatttcttaacattattttacattttaaataaaaattgtgtatatttaaagtgcacaatgtgttgttctcatgtacactgacatagtgacatgattactatggtaaagctaattaa

SEQ ID NO: 883572 - DNA, 120 bp, Artificial Sequence
  ENSG00000248994_22 (sequence is synthesized)
cacttccttctcctcacataactcctttatttatgtgttgggagcagctcggatctactcagcgactttccagagagccgtgtggctttactaatgacagacatcgtggtgcattccaga

SEQ ID NO: 883573 - DNA, 120 bp, Artificial Sequence
  ENSG00000248994_23 (sequence is synthesized)
cccctgggcttgttcatctgacgtcactgcaacctcctgattccactcaataggccaagacaagcggaagctccggttcagggagaacgttccccaggaaatcagggcagcagagttttc

SEQ ID NO: 883574 - DNA, 120 bp, Artificial Sequence
  ENSG00000248994_24 (sequence is synthesized)
gccacgtgtatggcagcttgcaggataaaagccaaagtgattgctccaaatggacatccatgccagtcatctgtgtaaggatcgctgagtgtctcacaaaagcacgtgggtatgaaggtg

SEQ ID NO: 883575 - DNA, 120 bp, Artificial Sequence
  ENSG00000248994_25 (sequence is synthesized)
gggttgacattgatgattaaaccaagcagtacagaagcatcggtgctggtcacttatccccgtccttcccatcattcgagatccccttccagcgaatggcatcttctggtgtgtgcagga

SEQ ID NO: 883576 - DNA, 120 bp, Artificial Sequence
  ENSG00000248994_26 (sequence is synthesized)
cccgatggaggagtgatgagacctcagagccatgtccaggctcttccagtcagttggtggcctccacaaatgccagccagcccgcccaatgcaagcttctgcttggccaacgtgtagcag

SEQ ID NO: 883577 - DNA, 120 bp, Artificial Sequence
  ENSG00000248994_27 (sequence is synthesized)
ttacgatgcagcaattggaagaggctgtggggatcagtaattccagtgggggagcgacggacacccctaagaacccattccacgattttagtcccaaattggattttgcttggagaaatt

SEQ ID NO: 883578 - DNA, 120 bp, Artificial Sequence
  ENSG00000248994_28 (sequence is synthesized)
ctctgccctgtagtagtggtttttaagatcacagatattggagtaagaaagacaaggctcttctatttgctggtctattgactcacaggggaataccagagaacttggcatccagaaaac

SEQ ID NO: 883579 - DNA, 120 bp, Artificial Sequence
  ENSG00000248994_29 (sequence is synthesized)
agtcaacaaatgaagacagtgcaactaagacctgggcgccatgttccttccctaaggctcatttcactaggatgctgtgtcagcacgcgcacacacacacacacacacactcacacactc

SEQ ID NO: 883580 - DNA, 120 bp, Artificial Sequence
  ENSG00000248994_30 (sequence is synthesized)
caggaagcctctaaaagaaatgcaagtgttctccagtagaaggagcatcgctgaaatttactcaacagcacggtcttcgtgtctttccctcccaggcccacactctcagctgcctcctcc

SEQ ID NO: 883581 - DNA, 120 bp, Artificial Sequence
  ENSG00000248994_31 (sequence is synthesized)
cctctcgctcctttcctcctgtgttctccagcaagggtgaggacccactgtcattcagaaaacctcctcctagtttttctatgcagggagtcattcacacatccagcaaggaaaacaggg

SEQ ID NO: 883582 - DNA, 120 bp, Artificial Sequence
  ENSG00000248994_32 (sequence is synthesized)
gcttgtgcagactctccttgggaggtaatgggagagggattctaaatgcttgtcacatttttacctgacactgttactaccatgtaactactaataactaatgccaacttctgaatcata

SEQ ID NO: 883583 - DNA, 120 bp, Artificial Sequence
  ENSG00000248994_33 (sequence is synthesized)
tttcctatcatcttatgagagagaactctgtggtgtataaacaccaaatcacaaatctccactttacattcttgtttgtctacttgtttgtctgttttccactgcagtgcaggagcccgt

SEQ ID NO: 883584 - DNA, 120 bp, Artificial Sequence
  ENSG00000248994_34 (sequence is synthesized)
ggaggagacccggtttccagcaccgaggggctcaagaatctcaggtcacctgtgagatgagctctgagcacttgcccacactcctgagcatgaacataaagccccatcacatgcagtggc

SEQ ID NO: 883585 - DNA, 120 bp, Artificial Sequence
  ENSG00000248994_35 (sequence is synthesized)
agatggttaagacaacaaccaaccatctcgtcagataaaagcttcgctccacttaaagtggatgatttttaaatttgtttgtaaaacctttgatatttgactactaagaaattataagat

SEQ ID NO: 883586 - DNA, 120 bp, Artificial Sequence
  ENSG00000248994_36 (sequence is synthesized)
gcgcagcccaaagggatgagaagatggatatggcccggagataatgcacacctctcgtggggacagtgtccccatccccctccggctgcactgaagacctggagcaatggctgccatcca

SEQ ID NO: 883587 - DNA, 120 bp, Artificial Sequence
  ENSG00000248994_37 (sequence is synthesized)
acagaaacaggtatagactatcaccttgcccagctgggcgcatcttcggagggaggcctggggccacgtgcacctaatgaaggtgcctgggagggggctggctttccactcagcaaatgc

SEQ ID NO: 883588 - DNA, 120 bp, Artificial Sequence
  ENSG00000248994_38 (sequence is synthesized)
tttcttacagaaagactgtggggagagtccgttttcttagagccgtatgaagaaatcctaaaaaccaactgcccaatctcaactcgtaacagggaacctggggagtgacatcagagattc

SEQ ID NO: 883589 - DNA, 120 bp, Artificial Sequence
  ENSG00000248994_39 (sequence is synthesized)
ccaatgttttcctcctcgttgatccctgcgatgaaggcacttgcccatgtgtattctgtagtaggagtttgcattctgaaactggtctttattaaagaacaaacacattatttacaaatt

SEQ ID NO: 883590 - DNA, 120 bp, Artificial Sequence
  ENSG00000248994_40 (sequence is synthesized)
gccgagtgtctgccaccctgcatgcccacactgaatccgtgcagggccctcccggccgcctgctcagctgtggacacggagctccggcacagccaagtcctgaatgacatgcagccaatt

SEQ ID NO: 883591 - DNA, 120 bp, Artificial Sequence
  ENSG00000248994_41 (sequence is synthesized)
ctcttgggccctttccgggtttgtctgtggtccttccttctgtgtttccaggctgagtcctaaggccctggtcctgtgcccagtgtggtgccttggaagttctgaaagtcacaggacaca

SEQ ID NO: 883592 - DNA, 120 bp, Artificial Sequence
  ENSG00000248994_42 (sequence is synthesized)
gcaagcagattccatctgtggaccaggacgcaggtcctcatcagacatccaatctgctggcaagttggtcttgaacttccagcctccggaactgcgaatcgttgttgacaagctacatag

SEQ ID NO: 883593 - DNA, 120 bp, Artificial Sequence
  ENSG00000248994_43 (sequence is synthesized)
gttcagacttgtcatggatgactctaacagggcaggtgttaccacgtcaactggtccaaaaaacaaaataccgggtgcacatcccttgaagtttcgggtgtgtttactctgaggcaccgt

SEQ ID NO: 883594 - DNA, 120 bp, Artificial Sequence
  ENSG00000248994_44 (sequence is synthesized)
gcactgcaaagctggggattcacaggcaagtttaggtgaatcctcggaacacgtgactgatgaattccgggcccgtgtcgggctctcagccagcgcctgctccgtgcgccagggacggag

SEQ ID NO: 883595 - DNA, 120 bp, Artificial Sequence
  ENSG00000248994_45 (sequence is synthesized)
tcgtcccctggcgaccacgtctacagtgactgagtgctgccgtggctggaaagccagggtctgcatctcccaggacctcaggacctgtgatgaggggatccagagtgcgaggatatccag

SEQ ID NO: 883596 - DNA, 120 bp, Artificial Sequence
  ENSG00000248994_46 (sequence is synthesized)
agagctggaatgaggattttgctgagctgagggctaagcttgaagcagaagaaaccacagtaaaaacactggtcaatgtatgctcggatctactcagcgactttccagagagccgtgtgg

SEQ ID NO: 883597 - DNA, 120 bp, Artificial Sequence
  ENSG00000248994_47 (sequence is synthesized)
acgtgtatggcagcttgcagagtcctgcaaagtggatcttgatgctgtggcccttacgggtgaggcgggagcagcccatagatgccggggcctggccggcctgggcttttctctgtgcag

SEQ ID NO: 883598 - DNA, 120 bp, Artificial Sequence
  ENSG00000248994_48 (sequence is synthesized)
cctacaggggagcctgtaagggcctgcagccggtgctccgatacagcggctgggaagtggaacacttggcaactgctgggtcacctcgctgtgttttctgaggcacatgtgttttggaac

SEQ ID NO: 883599 - DNA, 120 bp, Artificial Sequence
  ENSG00000248994_49 (sequence is synthesized)
atccctgcgggggctcagaccggctggaccgtagcgtagtttctggccccggctagctggcgaccgtgggcctcagtaccctgtctgcggggtggggcgatgcgaacctacaccctggga

SEQ ID NO: 883600 - DNA, 120 bp, Artificial Sequence
  ENSG00000248994_50 (sequence is synthesized)
tgggggtgcccgcccagggcagtgctgtctgtgatcttgccatgcccagggcacccactccatgacgctggctgtcggtgctttccaggggcacagtggagtgtgtgaggaaagacccct

SEQ ID NO: 883601 - DNA, 120 bp, Artificial Sequence
  ENSG00000248994_51 (sequence is synthesized)
gcagacggcctccggcgggcttcgggcagctctccctggttggggtcccagggtcttcagggaagccccaagtcctggtcctgttcatctttgtgtctctagtggacaacatgtaagaaa

SEQ ID NO: 883602 - DNA, 120 bp, Artificial Sequence
  ENSG00000248994_52 (sequence is synthesized)
tgctacttaagctgacctgttagcatatgtaacataatgccgggaaaagagctgtggctgaattgaatgatttcttaaattgattttatattgtgtgccctttgaaaaatgtttggggag

SEQ ID NO: 883603 - DNA, 120 bp, Artificial Sequence
  ENSG00000248994_53 (sequence is synthesized)
aattggagttaaagttttcaacacagtgtggtccttgcagacttcctgtgggagggaatgactttctgttcctctgcgttagcatccaagtacactcttatggccttttcgatccaataa

SEQ ID NO: 883604 - DNA, 120 bp, Artificial Sequence
  ENSG00000248994_54 (sequence is synthesized)
tgaaatcatcaccacaaccaagccaagtgcatccatcgctcaggcagtcaccatggtgtgagtgcggtgagacggctttgatctggctctcagccacttctgatgctcctggtacctgca

SEQ ID NO: 883605 - DNA, 120 bp, Artificial Sequence
  ENSG00000248994_55 (sequence is synthesized)
agctctcagaattgtacttttgatttctaataaatgccaaaatatatcttatcaaatatttacagtggagtcaggcataaagtctataacctcaagaacatgaactgtcaatttatacta

SEQ ID NO: 883606 - DNA, 120 bp, Artificial Sequence
  ENSG00000248994_56 (sequence is synthesized)
ccgtggactcaatttggcaagttaaggggtgaggaatgggatttcaggaaaagccaaagggtctaattgtttatgatacatattttaagtatctgtcataaaatgtgaccaagcctgttg

SEQ ID NO: 883607 - DNA, 120 bp, Artificial Sequence
  ENSG00000248994_57 (sequence is synthesized)
tattctttgaatagctgatttccctgttttatcccctctttgagttattttcatacagtttcacagataactgcaatactttttcttaacctgagatttctgaagttaatatgatggaac

SEQ ID NO: 883608 - DNA, 120 bp, Artificial Sequence
  ENSG00000248994_58 (sequence is synthesized)
tgctgtgtgacactggaattcggactgagggcgttgaagaagaacagggcttcctcccagccaagggctctttaatgcggagcctggagcagcccagaaatcttgcagcaaatctacaag

SEQ ID NO: 883609 - DNA, 120 bp, Artificial Sequence
  ENSG00000248994_59 (sequence is synthesized)
atgggccgtgaccgggtcaaacggaaatctctttcagtactttgttcatgccatgcaatactcttattctcatcattttgataaggaataggtttttttcccctttagttcctcttccct

SEQ ID NO: 883610 - DNA, 90 bp, Artificial Sequence
  ENSG00000248994_60 (sequence is synthesized)
aattgtatctcccagaattcccatatgttgtgggagggtatctttcctgtgctattcctataatagtgaatgagtctcatgagatctgat

SEQ ID NO: 883611 - DNA, 120 bp, Artificial Sequence
  ENSG00000248994_61 (sequence is synthesized)
ccagggggaggtaattgaatcatgggggcatctttcctgtgctattcctataatagtgaatgagtctcatgagatctgatgggtttatcagcggtttccacttttgcttcttcctcattt

SEQ ID NO: 883612 - DNA, 120 bp, Artificial Sequence
  ENSG00000248994_62 (sequence is synthesized)
gccatgattctgaggcctgcccagccatgtggaacgatacaccgagttttcctgtgtgttcaggtgtttgttccgagggtgcgttagtggacgaattcctccacctgtgcatctggagac

SEQ ID NO: 883613 - DNA, 120 bp, Artificial Sequence
  ENSG00000248994_63 (sequence is synthesized)
gcgcactgtcctagcacctgtgcctaaggagatgccctctatggtaccaagcatctcccaaaatgtgatttgctcttcctgtgatagaatggagtgggctgagggggcgatgggtgctgg

SEQ ID NO: 883614 - DNA, 120 bp, Artificial Sequence
  ENSG00000248994_64 (sequence is synthesized)
aaagccacaaggctgccattgatctgccagagaaggcacctgctcacctggcaggatgctcacctggcaggatgttcacctggcaggatgctcacctggcaggaatagcaaatttgctag

SEQ ID NO: 883615 - DNA, 120 bp, Artificial Sequence
  ENSG00000248994_65 (sequence is synthesized)
gtgcttccacattaaatcaagaaagacacacacacaagtgaactggaagagtatcacaccctcttaggcctcaatgtccacaacatcactggccacagcttttagtttcaggaggtgaga

SEQ ID NO: 883616 - DNA, 120 bp, Artificial Sequence
  ENSG00000248994_66 (sequence is synthesized)
tatgaaaacaaacctaatgggcaaagcagatctaaacagggtaagacctggagccccggccccatgcagcctgcagaagaagccctggaggctctcacctcccacttcaggctgcccaaa

SEQ ID NO: 883617 - DNA, 120 bp, Artificial Sequence
  ENSG00000248994_67 (sequence is synthesized)
gtcacagagcctgtgactccaggactcatctttctacaaacgctttggttggccagcgcttccttttaccgtcagccgcccctgcccgggacacttgcagatcaggggactttgtgggtc

SEQ ID NO: 883618 - DNA, 120 bp, Artificial Sequence
  ENSG00000248994_68 (sequence is synthesized)
tcattgaggctgtatttgcggattcaattacgcatttttaattccgcaaatatttgccactgctgcctgacctggagcctgtgtggccagatcctttgatcgaaagccgtctgcctgtgg

SEQ ID NO: 883619 - DNA, 120 bp, Artificial Sequence
  ENSG00000248994_69 (sequence is synthesized)
atcagaccctgtgagaagaaaatgacaggagcagaaggtcaaagggaagcatcgagagaaagaggatgaattgacacctgtggctaattgaagtgaaatcagatcacagaggccatgaga

SEQ ID NO: 883620 - DNA, 120 bp, Artificial Sequence
  ENSG00000248994_70 (sequence is synthesized)
cccacgtccagagggccctaggagggagctgtgggctcagctggttgatttactctggcttgggtcgctgctactgctttgaggacaataagcttggccatcaccagacaccagaggatg

SEQ ID NO: 883621 - DNA, 120 bp, Artificial Sequence
  ENSG00000248994_71 (sequence is synthesized)
ctgaagggacagccggctagactatttcatggactctctgagcatgtcctattgcagtccaggtacaaacttttcctccagaaatagacagagggatgctgcttcccaatttcagcaaag

SEQ ID NO: 883622 - DNA, 120 bp, Artificial Sequence
  ENSG00000248994_72 (sequence is synthesized)
gggatgctgcttcccaatttcagcaaaggcagtggaaagatcccggtcaaaagtagaaactctgggtccaggccttccagctgacactcactctgatatggtttggctgtgttcccaccc

SEQ ID NO: 883623 - DNA, 76 bp, Artificial Sequence
  ENSG00000248994_73 (sequence is synthesized)
acttgaattgtatctctcagaattcccacgagttgtaggagggatccaggtggaggtaattgaatcatggggtagc

SEQ ID NO: 883624 - DNA, 120 bp, Artificial Sequence
  ENSG00000248994_74 (sequence is synthesized)
aataagtctcaccagctctcatgggtttattaggggtttccacttttgattcttcctcattttctcttgctgccaccgtaagaagtgcctttcgcctcccgccatgattctgaggcctcc

SEQ ID NO: 883625 - DNA, 71 bp, Artificial Sequence
  ENSG00000248994_75 (sequence is synthesized)
ctgaatacagtaaattggtgccactagagtgggcactgctggtaagatacctgaaaatgtggaagcgactt

SEQ ID NO: 883626 - DNA, 82 bp, Artificial Sequence
  ENSG00000248994_76 (sequence is synthesized)
gctcagaagaagacaggaaaatgtgggcccccaaatgctgatagcgatatggacaagaaggtccaggctgaggtggtctcag

SEQ ID NO: 883627 - DNA, 85 bp, Artificial Sequence
  ENSG00000248994_77 (sequence is synthesized)
aaagcattcaagaggtgacttgggtattgttaaaggcattcagttttatcagggaagcagagcatcaaagtttggaaaatttgac

SEQ ID NO: 883628 - DNA, 120 bp, Artificial Sequence
  ENSG00000248994_78 (sequence is synthesized)
ttatcagggaagcagagcatcaaagtttggaaaatttgactatgagatagaaaagaaaaacccattgtctggggagaaattcaagatggctacagaaatttgcagaggtagcagggagcc

SEQ ID NO: 883629 - DNA, 82 bp, Artificial Sequence
  ENSG00000248994_79 (sequence is synthesized)
ctccaggccatgtcagagactggagaaaaaagtggtttcatgggccgggcccagggcccctgtgctgtgtgcagcctaggga

SEQ ID NO: 883630 - DNA, 87 bp, Artificial Sequence
  ENSG00000248994_80 (sequence is synthesized)
gcagcctagggacttggtgccctgtgacccagctgctccagtcatggctaaaaggggccaaggtatggagccttgacaatttccacc

SEQ ID NO: 883631 - DNA, 87 bp, Artificial Sequence
  ENSG00000248994_81 (sequence is synthesized)
ggctgtggcttcagagggtggaagccccgagccttgacaatttccacctggtgttgagcctgcaggtgcacggaggccaggaatttc

SEQ ID NO: 883632 - DNA, 80 bp, Artificial Sequence
  ENSG00000248994_82 (sequence is synthesized)
atttcagaagacgtatggacatgcctggatgcccaagcaaacatgttttgcaggggtgggactcccttgagggagccccc

SEQ ID NO: 883633 - DNA, 120 bp, Artificial Sequence
  ENSG00000248994_83 (sequence is synthesized)
gccacagacactcaatgccagctcatgaaagcagccaggagggagggtgtaccctgcaaagccacagggtggagctgcccatgaccatgggaatccacctcttgcatcagcgagacctgg

SEQ ID NO: 883634 - DNA, 79 bp, Artificial Sequence
  ENSG00000248994_84 (sequence is synthesized)
aaaattttactgccccactggatttctttcccatttggaacagctgtatttacaaaatacctgtacccccattgtatct

SEQ ID NO: 883635 - DNA, 83 bp, Artificial Sequence
  ENSG00000248994_85 (sequence is synthesized)
cctgtagcccctttgttttggccaatttttcccatttggaacagctgtatttacaacctgcttttgattttacaggctcatag

SEQ ID NO: 883636 - DNA, 120 bp, Artificial Sequence
  ENSG00000248994_86 (sequence is synthesized)
agaaaccacagtaaaaacactggtcaatgtatggtaattttaaagtcatctacttcctatacatgtgattgttggccagggcatttatgatttatgttatattttattttcctatggtct

SEQ ID NO: 883637 - DNA, 120 bp, Artificial Sequence
  ENSG00000248994_87 (sequence is synthesized)
taagttgttggttatactctagaactttgcatacatgcagttgttggctgggacatttatgatttatcttgtattttacaattgtcttaagttgttggttatcctctagaacttcctgta

SEQ ID NO: 883638 - DNA, 120 bp, Artificial Sequence
  ENSG00000248994_88 (sequence is synthesized)
catgtagggttggccgggccactcatgatttatgttgtattttattttgctatgatcttaagttgttggttttcctctagaacttcttgtacatgtaattgttggccagggaatttatga

SEQ ID NO: 883639 - DNA, 120 bp, Artificial Sequence
  ENSG00000248994_89 (sequence is synthesized)
tttacattgtgttttattttattatgatcataagttgttggttttcctctagaacttcccatacataattcttggccagggcatttatgacgtatgttgtgttttattttgcaatggtct

SEQ ID NO: 883640 - DNA, 120 bp, Artificial Sequence
  ENSG00000248994_90 (sequence is synthesized)
taagttgttgttgttgttgttttctagaactttagtgcatttcacagtaacatattttagtggatggtgaggtaagggcccaaaccccccaaaacaaattgtaaattccagtaaaaacta

SEQ ID NO: 883641 - DNA, 120 bp, Artificial Sequence
  ENSG00000248994_91 (sequence is synthesized)
ttacccagtagttggcatggaaaagtttggtggctccttacaaagttaaatgtagaactaccgtatcacacagaaactccactcctaggcatatatgtccggaagaattgtgggcagagg

SEQ ID NO: 883642 - DNA, 120 bp, Artificial Sequence
  ENSG00000248994_92 (sequence is synthesized)
ctggaacagataattgtacaggaaagtcataacaacatcattcaccataaccaaaaagcagaagcaaccatgcccatggagaggtgaatgggtaagcccaacgtggtctgtccatacaag

SEQ ID NO: 883643 - DNA, 120 bp, Artificial Sequence
  ENSG00000248994_93 (sequence is synthesized)
ggaatgctttcagcctcaacaagggatggagttttcatacacgctgcaaccaggatggacctgcaaaacacatgaagtgcagtaagccagacacagaaggacagatatgacatgtctcca

SEQ ID NO: 883644 - DNA, 120 bp, Artificial Sequence
  ENSG00000248994_94 (sequence is synthesized)
tggacacggaatacttagaacaggcaatttcacagacagaaggtagagtggagacactcaaggctggggaatgggatggagggggtgttgttattggaggtgccgagcttatgttgggga

SEQ ID NO: 883645 - DNA, 120 bp, Artificial Sequence
  ENSG00000248994_95 (sequence is synthesized)
tggtgaagaagttttggggatagcagtggtgagggctacacaaattgtgaatagatgatttaatgctccttcatcgtctgctgaaaaacggctacaacggcaagcattctattctctatg

SEQ ID NO: 883646 - DNA, 80 bp, Artificial Sequence
  ENSG00000248994_96 (sequence is synthesized)
ggtgcctggaggcgggctcgccccggctgctccacgcccaggccggtccctggcatttcagccagtgggagggcgtcccc

SEQ ID NO: 883647 - DNA, 120 bp, Artificial Sequence
  ENSG00000248994_97 (sequence is synthesized)
acaactccacagcccggcgagcggtatgtgtgcccaagtacataggtgattagaacagaaaggcctgggctggtcatccaagctcttccggtggccacctccgaggaaggtgggggtgtg

SEQ ID NO: 883648 - DNA, 120 bp, Artificial Sequence
  ENSG00000248994_98 (sequence is synthesized)
ttgctttgtggcatttcttagcctctatctttttccatgcacatcagagcaaatgcagacattgtaaacatccccctaaaatctcagcatgcatattgtcatctagagttcagtatttgt

SEQ ID NO: 883649 - DNA, 120 bp, Artificial Sequence
  ENSG00000248994_99 (sequence is synthesized)
cttaataaaaccttctccgtgttttgacgaatgcacacctgtgaggcccaaacctttaaaaagacgacatagaggccgtcacgcggaggccgtcaccccacaaagctccctcatgggcct

SEQ ID NO: 883650 - DNA, 120 bp, Artificial Sequence
  ENSG00000248994_100 (sequence is synthesized)
acccggccaatcctggcccccagcccccagaggcagccactcttgttttcatctgttttacttttccatcacaattagccttgcctgacctagaacatcatgtcaaatggggttgtggag

SEQ ID NO: 883651 - DNA, 120 bp, Artificial Sequence
  ENSG00000248994_101 (sequence is synthesized)
tgtaagcattgtgtagacgtcttctgctcagcaggatgtttctgggattgagccgtgtcactgcgcgtggcaggagctcccgtctctccattgccgagtgcaggtctctccattgccgag

SEQ ID NO: 883652 - DNA, 120 bp, Artificial Sequence
  ENSG00000248994_102 (sequence is synthesized)
cgccgctccagcctaggggcacagcctgtgctgtggttcatccatcctcccatgccagacctggcgctgctgcctgctttggctatgctggggggagcacagcacaggtggttcatccat

SEQ ID NO: 883653 - DNA, 120 bp, Artificial Sequence
  ENSG00000248994_103 (sequence is synthesized)
cctcctacaccagacccaggctacttcccgctttggctatgctggagggagctgctgtggacattcacatgcgggtatgccatggacacatattcactcctcttggatgacattgctaga

SEQ ID NO: 883654 - DNA, 120 bp, Artificial Sequence
  ENSG00000248994_104 (sequence is synthesized)
aaggcgtgtgctgggcactcaggcgagtgtatccttaacattttcaaaagttgctggaattttttctccccaatagttgcaccatttcacatgcctagcaaataggtaacaatttcaggg

SEQ ID NO: 883655 - DNA, 120 bp, Artificial Sequence
  ENSG00000248994_105 (sequence is synthesized)
gaggagagagtgagggggtggtgagagattggtcaagggtatgaagctgtggctggatggcaggaataagttcaggtgttccattccctagcagggtgactagagttagcaatggtgtat

SEQ ID NO: 883656 - DNA, 120 bp, Artificial Sequence
  ENSG00000248994_106 (sequence is synthesized)
tactgctcacttcaaaattgctggaagacgttttggaatcttctcatcatcaagaggtgattagtgtttaggatgatagatatactgatttccttgatgtggtcattacatgatttatac

SEQ ID NO: 883657 - DNA, 120 bp, Artificial Sequence
  ENSG00000248994_107 (sequence is synthesized)
acatgcggaatcatcatgccgtactctgtaacgtgtgcctcacatcctcagcaacacctggtgttgtgggtctttttaaggtttagatattctgagaggcgtgtggtgatttcatactgt

SEQ ID NO: 883658 - DNA, 120 bp, Artificial Sequence
  ENSG00000248994_108 (sequence is synthesized)
ggatttaattggtgtgtccctgatagctgatcatgttacacgtttccttgtgctgacgactggccatatctttctctcctaagtaaatgttcaattttttaaaaattatgttatctttct

SEQ ID NO: 883659 - DNA, 120 bp, Artificial Sequence
  ENSG00000248994_109 (sequence is synthesized)
aatatgcagttggatgatttctctatatatcctggaaactagtgctttgttagacacatgcttttcagatattttatctttctctatggcttacctatttatgaatgatgtgttttaata

SEQ ID NO: 883660 - DNA, 120 bp, Artificial Sequence
  ENSG00000248995_0 (sequence is synthesized)
agatggctgaataggaacagctccagtccgcagctcccagcaagattgatgcagaaggcggatgatttctgcatttccaactaagtgccatgacttaaggagtgaagagagggcatagag

SEQ ID NO: 883661 - DNA, 120 bp, Artificial Sequence
  ENSG00000248995_1 (sequence is synthesized)
ttgaatacttgcagagaatcatgggaaccattataacaaagaagtcaagagtgttggtgtggagtggaccttggtttgaatactcagctctgccacttactagctgtaggctcatatgca

SEQ ID NO: 883662 - DNA, 120 bp, Artificial Sequence
  ENSG00000248995_2 (sequence is synthesized)
agttactatcctcatctgttaaaaaggaataatatctaatgttatataaaatgtaaaagttatttcacacaatgccattcacatagtaaatgttcaataaaagcaaaaacctcaggacat

SEQ ID NO: 883663 - DNA, 120 bp, Artificial Sequence
  ENSG00000285407_0 (sequence is synthesized)
tttttctcattgtgtgttcttaacacctttgccaaaaatcatttgactatgaatgtgtggatttatttctgggctctatattttgttctgttggtctgtgtgtctgtgtttatgtcacta

SEQ ID NO: 883664 - DNA, 88 bp, Artificial Sequence
  ENSG00000285407_1 (sequence is synthesized)
ttttgttctgttggtctgtgtgtctgtgtttatgtcactaccatgcttttatggttgaagctttgtagtagattttaaagtcagggca

SEQ ID NO: 883665 - DNA, 120 bp, Artificial Sequence
  ENSG00000285407_2 (sequence is synthesized)
catgatttttaggatttttttctacttctgtgaaaaatgtcactggaattttggcagtgcctctccgcaagaggctctgggtctgtgttgctgaattggcctgtgtcctcaaagcacgtt

SEQ ID NO: 883666 - DNA, 120 bp, Artificial Sequence
  ENSG00000285407_3 (sequence is synthesized)
ccagctttcaaggggaaaatgacaagtggaagatgagcaatggactgaattgcctaagctcgagctgagcttttgctcaccgtccaccactgctgttggccgccatcgcacacctgccac

SEQ ID NO: 883667 - DNA, 120 bp, Artificial Sequence
  ENSG00000285407_4 (sequence is synthesized)
tgacttccacccctctggatccggctgggtgtctgctgcactcctgatccagcgaggcgcccactgccactcccagttgggctaaaggctcgccattgttcctgcacagctaagtgcccg

SEQ ID NO: 883668 - DNA, 120 bp, Artificial Sequence
  ENSG00000285407_5 (sequence is synthesized)
ggttcatcctaatcaagctgaacactagttgctgggttctacggttctcttctgtgacccatggcttctaatcaagctgtaacactcaccacataggcccaaggtttcattccttggaat

SEQ ID NO: 883669 - DNA, 120 bp, Artificial Sequence
  ENSG00000285407_6 (sequence is synthesized)
ctgtgaggccaggaaccccagagagttggaggaaatgcagagaattacagagaaatacagaggcttacaacatggagaatggagagcaaattccatctaattcttcaaggtccagattac

SEQ ID NO: 883670 - DNA, 90 bp, Artificial Sequence
  ENSG00000285407_7 (sequence is synthesized)
gcaaattccatctaattcttcaaggtccagattacctgcaaccataaatttaggaactaaagataacacagcaatagaaaactagtacac

SEQ ID NO: 883671 - DNA, 120 bp, Artificial Sequence
  ENSG00000285407_8 (sequence is synthesized)
ggtgatttctgcatttccatctgagatccatgcatcaagaagagctacatccaaggaaactcatccatgcctggacttaatttatataatgaaattctgaactttcaatagatgctgtaa

SEQ ID NO: 883672 - DNA, 120 bp, Artificial Sequence
  ENSG00000285407_9 (sequence is synthesized)
gtaataggatgagagttttggagatcttgggagggaatgaatgtgttttgcatggggaagggacatgaatcactgaagcccagatgatggacaatggctgacagactctaaaaatggccc

SEQ ID NO: 883673 - DNA, 120 bp, Artificial Sequence
  ENSG00000285407_10 (sequence is synthesized)
catgatctccacctcctggtatccatacctctacaatcccttccccttattcaatagagtacaaaagaaggataggatttcacttctgttattacattacatacaactgtagtacctgtc

SEQ ID NO: 883674 - DNA, 120 bp, Artificial Sequence
  ENSG00000285407_11 (sequence is synthesized)
ttgctggaagacttcccctttcctggctttaaagaaaaaagttacaaattgtgaacagctgtcccctgtagaagccatgttacaatgaactgaggaaagccaccggccaacatccagcaa

SEQ ID NO: 883675 - DNA, 120 bp, Artificial Sequence
  ENSG00000285407_12 (sequence is synthesized)
gaatctgaggccctcagtccgcattcctcaagaaactgaatgctgctgacaaaaatacaagaggaagtggatccatccccaatcaagcctccagaaaagaacacggtcttggccaaaacc

SEQ ID NO: 883676 - DNA, 120 bp, Artificial Sequence
  ENSG00000285407_13 (sequence is synthesized)
ttgatggtaaccttggagaagactcagctaagctgtgcctggatttctgactcactgaaactgtgggataataaatgtgtgttattttcagccaataaatttgcagtaatgttattatgc

SEQ ID NO: 883677 - DNA, 120 bp, Artificial Sequence
  ENSG00000285407_14 (sequence is synthesized)
atgcagcaaaagttaactaatttattatctttcagtaccttatccttgattgatgtttgttctgtataaaattgcatacttaaaatatataatttttactcaaaattttgaaaaataata

SEQ ID NO: 883678 - DNA, 120 bp, Artificial Sequence
  ENSG00000285407_15 (sequence is synthesized)
agtccagcagacatcaacactgagaaagtgaactaaacgaaaaaaaaaaaaagagagaaaaggagctggatgctatcatatgctgagagaaaggaatttacctccaccaacctatagaat

SEQ ID NO: 883679 - DNA, 120 bp, Artificial Sequence
  ENSG00000285407_16 (sequence is synthesized)
tgaggatatgaagaaaaaagagacagagaggaggtcacttggctggaaactgatggtggctggatataaagactggagaaggcaagagtcaaagctgattttttgtttctgccttggtga

SEQ ID NO: 883680 - DNA, 120 bp, Artificial Sequence
  ENSG00000285407_17 (sequence is synthesized)
gagataacgaggtttcattcaaattcattgaatgtgacatacatgtcttaagacactcaggtggcaacctcctgacaaagactcaggagggagttgagagctggagttataattgagagt

SEQ ID NO: 883681 - DNA, 120 bp, Artificial Sequence
  ENSG00000285407_18 (sequence is synthesized)
gggaagaacacaggttctggtaaatcgtgagagagactggagatttcttattaagagcacatgaatgcttgagatagaaaactgacagctgtgtgaaagaagcggagccaatgggtaacc

SEQ ID NO: 883682 - DNA, 74 bp, Artificial Sequence
  ENSG00000285407_19 (sequence is synthesized)
cattcggccatcttggctcctccgaactccaattttgaaataaattatactgtggctaaaatgttgtcaaacag

SEQ ID NO: 883683 - DNA, 120 bp, Artificial Sequence
  ENSG00000285407_20 (sequence is synthesized)
ttgaaataaattatactgtggctaaaatgttgtcaaacagcataacacgctacagagaaaacttttatgaaaggaagagtcaatagttgtagaaaaatttttgttgtttaattttaagaa

SEQ ID NO: 883684 - DNA, 120 bp, Artificial Sequence
  ENSG00000285409_0 (sequence is synthesized)
ggcatagctgccaagccgtgtaaaacgtccaccctcagaatgtattcaggtgtgagagagacatatacagtgcataagcggggagccaagcagctgatgcagaggtgcaaagatacaggt

SEQ ID NO: 883685 - DNA, 120 bp, Artificial Sequence
  ENSG00000285409_1 (sequence is synthesized)
ttcactttcactgaccggtcttcataacctatggactgcatatgtacttctcacagcgcagtcaaaaatgcccatccaactccgccggcaaaggcttgttccttctcagtgctctctgct

SEQ ID NO: 883686 - DNA, 120 bp, Artificial Sequence
  ENSG00000285409_2 (sequence is synthesized)
agccacatggccaacccggaatcagcggggaccgaagactcactcactccgagatcctattcgtgatgccagttgtcaggtgctaactgaggtcagagatggatgaagacttggcagagt

SEQ ID NO: 883687 - DNA, 120 bp, Artificial Sequence
  ENSG00000285409_3 (sequence is synthesized)
tcttcattcacaacattctttgcccaaaaagttgattgacaaaaacaatttggagaccctacatcattttcagcagtcatgctaaggttttgagacaaataaattgtcgtgtgaaaaaca

SEQ ID NO: 883688 - DNA, 120 bp, Artificial Sequence
  ENSG00000236036_0 (sequence is synthesized)
aggaattttatgagtgtccctctgtggaggagcctgagagaaaggctcatggagggcagagggtggagggcgtgggaccaagttccttagataaggctgtggccccatggtgtgttctaa

SEQ ID NO: 883689 - DNA, 120 bp, Artificial Sequence
  ENSG00000236036_1 (sequence is synthesized)
agctggtaaagcctcggatcatcagccagtgtcaggtgtcacagcatagccaagcgaccagacgagcagatgagaccttgttaatctccagtggtgatgagtaaccgttctctctatcac

SEQ ID NO: 883690 - DNA, 120 bp, Artificial Sequence
  ENSG00000236036_2 (sequence is synthesized)
atatcacatactggtgattcatccaggtggcgctaggagggatcttcgccgcagagggcattcgagagatgacaactctagacatccatgcaacttctgttcttgtgctcctgctgtttt

SEQ ID NO: 883691 - DNA, 120 bp, Artificial Sequence
  ENSG00000236036_3 (sequence is synthesized)
gaactgctctgaagaacaaagttgctacttgcttgctacctctggttgctacccctggttgtgtttggttgccacataatgaaatgattttccttccctcttttatttcctttctttctt

SEQ ID NO: 883692 - DNA, 120 bp, Artificial Sequence
  ENSG00000236036_4 (sequence is synthesized)
ttttttctgctacaaatggaaaaatagtttgatcaccttgaatcttttcacccttggtattctcccccttcacacccgagcaccgccccttgataaatgagaacacgtgtactgaaatcg

SEQ ID NO: 883693 - DNA, 120 bp, Artificial Sequence
  ENSG00000236036_5 (sequence is synthesized)
cagacttcaccctccagactcatcgtcctcatgctctcaggggggacatgtttcctttcaaacctccagaataaattcatcacagcaggaagaagattgtttttcttaaaaaaaatcaaa

SEQ ID NO: 883694 - DNA, 120 bp, Artificial Sequence
  ENSG00000236036_6 (sequence is synthesized)
ggaatgtggtgatgaccaacaggaattttatgagtgtccctctgtggaggagcctgagagaaaggctcatggagggcagagggtggagggcgtgggaccaagttccttagataaggctgt

SEQ ID NO: 883695 - DNA, 120 bp, Artificial Sequence
  ENSG00000236036_7 (sequence is synthesized)
tgaccgtggcgatccggcaccctcggcccggctgcttttgcaaagtccacactgattcattatttcagagagccaaagggtgacacatgcatattttgaatattaccctgtatgtagatc

SEQ ID NO: 883696 - DNA, 120 bp, Artificial Sequence
  ENSG00000236036_8 (sequence is synthesized)
tgcctctggcttgacttaggggcttctaactgcctgatgtattggcactcgcatgctttcaatggtgtttgcatttaaaaaatcatcttcaattctttcatttggagggtgaactttctg

SEQ ID NO: 883697 - DNA, 120 bp, Artificial Sequence
  ENSG00000236036_9 (sequence is synthesized)
aaaaggatgctgggaaccatgttatttcagtgttatttctctactataccagcccctttgcaagcaaacccctttttccttaatgacaacacacagtgacaaatgcccagtgctgtaaac

SEQ ID NO: 883698 - DNA, 120 bp, Artificial Sequence
  ENSG00000236036_10 (sequence is synthesized)
gtgaagctccttggtttgactgagacggtctgtagctgacatcgagaagcaggacatcttcctgaaccaaaacacctactcaagaactcctataaacttccttacgctttgttttaagga

SEQ ID NO: 883699 - DNA, 120 bp, Artificial Sequence
  ENSG00000236036_11 (sequence is synthesized)
aaaccgcctgacaagaagcatacttgctcctcgctgccaggcatctttctgtttatgtagcctttgtttacatgtatcccctgttaataacaatcaatatttaacagatgcactcaggca

SEQ ID NO: 883700 - DNA, 120 bp, Artificial Sequence
  ENSG00000236036_12 (sequence is synthesized)
ccctctgtggaggagcctgagagaaaggctcatggagggcagagggtggagggcgtgggaccaagttccttagataaggctgtggccccatggtaagggtctggacggggaagtgattca

SEQ ID NO: 883701 - DNA, 120 bp, Artificial Sequence
  ENSG00000235848_0 (sequence is synthesized)
tctcatcatggccacttagcttgctcgagattacacagaaccatgcctctggtttcctggtacagtgctccggcaggtgacggatgctcctgggtgacatatcacggatctctctgaggt

SEQ ID NO: 883702 - DNA, 88 bp, Artificial Sequence
  ENSG00000235848_1 (sequence is synthesized)
cggatgctcctgggtgacatatcacggatctctctgaggtaagacgtgccttttgccttccaccttctgccgtgattgtgaggacccg

SEQ ID NO: 883703 - DNA, 120 bp, Artificial Sequence
  ENSG00000235848_2 (sequence is synthesized)
acagctccggtctgcagctcccagcgagaccaacacagaaggcaggccgtcatccttaagccataaaatgccctgtagaggtggaacaggtcagaagactgaatgctcaagctgcatgtg

SEQ ID NO: 883704 - DNA, 120 bp, Artificial Sequence
  ENSG00000235848_3 (sequence is synthesized)
gctcaagctgcatgtggagttaacatggcaataacacagaatgtgatgacagcagactctagaatctcatgacatcagtttatattagaactgttctgtagctcacctttctccgaagtt

SEQ ID NO: 883705 - DNA, 120 bp, Artificial Sequence
  ENSG00000235848_4 (sequence is synthesized)
ggaattcacatggctgtggaatgtgtttctaccttcactgttggaggagtcatccaacaaatccaggggtgggaaaacagctggataaggacaataacatatatgacagctgtacaatcc

SEQ ID NO: 883706 - DNA, 120 bp, Artificial Sequence
  ENSG00000235848_5 (sequence is synthesized)
atcctctgtgactgcactaaatattttttaagttgcatactgaggtgttgcagaagttactttattattaaaaaaacagcctgggaactgaagcctagaaatgggataagaattataatt

SEQ ID NO: 883707 - DNA, 120 bp, Artificial Sequence
  ENSG00000235848_6 (sequence is synthesized)
atgggataagaattataatttcaagacaaaagcaagcaactgggtaagacgtgccttttgccttccaccttctgccgtgattgtgaggacccgccagccacgtggaactgtgagtccatt

SEQ ID NO: 883708 - DNA, 120 bp, Artificial Sequence
  ENSG00000235848_7 (sequence is synthesized)
accttggaccatctctctcaccagctgccttccacacccctgtactactaactccttcttctttcacttgaacattctttaccccagatttttgcatccttcagtgatacggaaaagcaa

SEQ ID NO: 883709 - DNA, 120 bp, Artificial Sequence
  ENSG00000235848_8 (sequence is synthesized)
atgttagagactttggcctaaagatacattgagaagggaaaaaaagtttaataagtagcaaatgtcattgccaccacaaaggaaacaagcatcgttcaccttggcagtaaagtatgccat

SEQ ID NO: 883710 - DNA, 120 bp, Artificial Sequence
  ENSG00000235848_9 (sequence is synthesized)
atggccacttagcttgctcgagattacacagaaccatgcctctggtttcctggtacagtgctccggcaggtgacggatgctcctgggtgacatatcacggatctctctgaggcaagatgg

SEQ ID NO: 883711 - DNA, 120 bp, Artificial Sequence
  ENSG00000235848_10 (sequence is synthesized)
atgtctgttagaatggctaaaattaaagattaagactggccatagcaagtgttaacgagaacatggagcaactgaaattctcatgtattttcaatgggaatgtaaaatggtacagcagtt

SEQ ID NO: 883712 - DNA, 120 bp, Artificial Sequence
  ENSG00000235848_11 (sequence is synthesized)
tggcagtttattataaagctaatgtatacttactgtgtgacacaacaatgccactttggggtttttatgtctcccctcccctgcccccaacccaaaataaaaacatgtctgctgaaataa

SEQ ID NO: 883713 - DNA, 120 bp, Artificial Sequence
  ENSG00000235848_12 (sequence is synthesized)
acactcacagatgacagggcttgcggtaccaaaggctctttatcttccagactacagctcctattaatgtgaaaacaggaaaagaagtaaaaattgcacaaaatggcattgaaactttgg

SEQ ID NO: 883714 - DNA, 120 bp, Artificial Sequence
  ENSG00000235848_13 (sequence is synthesized)
tcataggcatctctttatcttcaagttgggcaacatcagcagggttcccatgagtatgtgcccagcgaggctatttagttcctcttatctttttttttttctacttgccctcgtttttcc

SEQ ID NO: 883715 - DNA, 120 bp, Artificial Sequence
  ENSG00000235848_14 (sequence is synthesized)
tgagattttatttccttcctagctggcatacctttccctgctgtggtattcagacctaaatagtgtgtgcacctattacctctgcagagtaattactgtttggtaccatggtagagtttc

SEQ ID NO: 883716 - DNA, 120 bp, Artificial Sequence
  ENSG00000235848_15 (sequence is synthesized)
gacccgccagccacgtggaactattctccaaattgtgtaagcttcggggtccctgaaatttggatcagcctctggatagtccccataattttagctcaataaatgtttgattaattacaa

SEQ ID NO: 883717 - DNA, 120 bp, Artificial Sequence
  ENSG00000235848_16 (sequence is synthesized)
cgggaccagacaagtgaatccgagggtctgtctctgtatgtgttatcatcagactggttccccacgacccaccactgcctgccaagatgaatgtaaatgaagcagaagtctcacaggctg

SEQ ID NO: 883718 - DNA, 120 bp, Artificial Sequence
  ENSG00000235848_17 (sequence is synthesized)
tctcatcatggccacttagcttgctcgagattacacagaaccatgcctctggtttcctggtacagtgctccggcaggtgacggatgctcctgggtgacatatcacggatctctctgaggc

SEQ ID NO: 883719 - DNA, 120 bp, Artificial Sequence
  ENSG00000235848_18 (sequence is synthesized)
caaatctaacctttgtaccacttttctccatggtcaaatgatggtgatatcattttcttaaactatcttagttgttaagaatgatcctctgtgactgcactaaatattttttaagttgca

SEQ ID NO: 883720 - DNA, 120 bp, Artificial Sequence
  ENSG00000235848_19 (sequence is synthesized)
tgctccctagtcctcctctccctctttctccactctctccttgtcacatcatatctgagggtagaaattactttcagtttttttttttttttaaaggaaacttaggaacacgtgaaatgt

SEQ ID NO: 883721 - DNA, 120 bp, Artificial Sequence
  ENSG00000235848_20 (sequence is synthesized)
ttttcttcttcttgagttgtttaatttggtttaacaaatgttaattgagcacaggctgccaggcaggagatacaaaggtaaataatatgaggtccttgtcctcacgttattgaagatctt

SEQ ID NO: 883722 - DNA, 120 bp, Artificial Sequence
  ENSG00000235848_21 (sequence is synthesized)
agggtaggtcaaactaaacgaagatgcaaaaaaatgctccagggctttgaggtgggtgagagcacaactggctatgtggatcagaaggttttgtggcaaaacttccatcccttggcccag

SEQ ID NO: 883723 - DNA, 120 bp, Artificial Sequence
  ENSG00000235848_22 (sequence is synthesized)
gatgtcaaagtactatgctgacattcagagagatggcagagccctagatttgaaaaaagatgcttctgtggttccaggcaagatggctgactaggaacagctccggtctgcagctcccag

SEQ ID NO: 883724 - DNA, 120 bp, Artificial Sequence
  ENSG00000235848_23 (sequence is synthesized)
acattggacagcaagaaagaaagtacagcaacccctgagagatgggtaacaaacaagatgaaccttcttattgtcccagcttactgctttgagagagcatccaggtctgtgtatggagca

SEQ ID NO: 883725 - DNA, 120 bp, Artificial Sequence
  ENSG00000235848_24 (sequence is synthesized)
gaaacacaaaaggagtccagaaatctcctcgtgctgaggaaagacagagctgaggctatggggagaccaaagcaggtagagggcttgaaagacacttgatgtaagtcacctttaaagaat

SEQ ID NO: 883726 - DNA, 120 bp, Artificial Sequence
  ENSG00000235848_25 (sequence is synthesized)
atgcatgctgtttcagtgtacatggaatgtttaccaaaatagaacatattctgggccacagaacaagtctcaacaagtttgaacagattcaagtcgtacaaactgctgaccatgatggca

SEQ ID NO: 883727 - DNA, 120 bp, Artificial Sequence
  ENSG00000235849_0 (sequence is synthesized)
aaaggcaacagcaaatcacaaacatccataattatacatcagggactaataaatggagattgtgccctgtggtttttggtgtgacagatgcaggctgggtgctctttctggactgagttt

SEQ ID NO: 883728 - DNA, 120 bp, Artificial Sequence
  ENSG00000235849_1 (sequence is synthesized)
ctgcgtgtcacaatgccccacaccctggagagagagcttacggagaactcgagccattcaccacagggttgaagcaacttccaaggggaagtgtctaattagaggcactgaattctcttc

SEQ ID NO: 883729 - DNA, 120 bp, Artificial Sequence
  ENSG00000235849_2 (sequence is synthesized)
tttgggagatactatcagatgaattaataattttcactcataatgttacatgggaagtccgtgaattcagatattctttcaggagaatcaccacctgcttcatagtaattgaatttaaat

SEQ ID NO: 883730 - DNA, 120 bp, Artificial Sequence
  ENSG00000235849_3 (sequence is synthesized)
ctccaccttcaataactccacagcttatgtcaaaccttggaaacaattacgaaataaatcacaaggaaggcctgcttaatctcatcaggttaataaacgcagacgaattaatcacctaaa

SEQ ID NO: 883731 - DNA, 120 bp, Artificial Sequence
  ENSG00000235840_0 (sequence is synthesized)
gaagtccgagcaaagatgggaagctttgttttcaaatataatgggaagggtgtgtggaaacagacctggcaaaacaaaggcagattgatgtttctgtttgtgataccagtggagagagga

SEQ ID NO: 883732 - DNA, 72 bp, Artificial Sequence
  ENSG00000235840_1 (sequence is synthesized)
cagattgatgtttctgtttgtgataccagtggagagaggagggcacaagcaggctggagtgctatggcacag

SEQ ID NO: 883733 - DNA, 120 bp, Artificial Sequence
  ENSG00000235840_2 (sequence is synthesized)
tgaagatgcaagcgtgtgggtgggacaagtacaggcagcagtggagatgaattcacttgggatggattccaaggttgtctacacctggagcagtcacagacttcaacatatctttaagtg

SEQ ID NO: 883734 - DNA, 120 bp, Artificial Sequence
  ENSG00000235840_3 (sequence is synthesized)
tggtgccaccagtagctgagttcaggccactccacgcccagccactgtttctgttcaggccaagggagctgatgcgggaactcaccagcatcgtgggaagcagctgctcattgtcctttg

SEQ ID NO: 883735 - DNA, 120 bp, Artificial Sequence
  ENSG00000235843_0 (sequence is synthesized)
tcttggtgagtgctgccaatttcattgcaacttctcagcaggagccccgtctgctgatgtaatttatcataatggaagtggtgcccaacttctgaatgcatgagaaaggctagaccttac

SEQ ID NO: 883736 - DNA, 120 bp, Artificial Sequence
  ENSG00000235843_1 (sequence is synthesized)
ctgttgttttaaggtaaggtctactgctaactagtaggaggtgtctaatttattagactgaaattcacttgcaaaaatattctaaaagccttatattaaaaaaaaactgtaaaagtttat

SEQ ID NO: 883737 - DNA, 120 bp, Artificial Sequence
  ENSG00000235843_2 (sequence is synthesized)
ttcctgtgcattcaactcaaagaagatagggcctagtaaatttacctgaaaaatatttaagtattctaatataaaaactgaatctcactgagggattcaggtggcttaaaactcacctga

SEQ ID NO: 883738 - DNA, 120 bp, Artificial Sequence
  ENSG00000235843_3 (sequence is synthesized)
tcacctgaaccctgaacctctattttctcatttactgaagtttattggggtttttggtttttttgtgtttttttgaaatgaacctgggcaataagagtgaaattccatctcaaaaaaaaa

SEQ ID NO: 883739 - DNA, 120 bp, Artificial Sequence
  ENSG00000235845_0 (sequence is synthesized)
attcttatgcgtggtggggtttgggaagcaatgggctaagccgctgcttgtttcagtgatgaggaaaccagccgggggagaaggggcagttcgccaaaggctgcacagtgaagtggtggt

SEQ ID NO: 883740 - DNA, 120 bp, Artificial Sequence
  ENSG00000235845_1 (sequence is synthesized)
tgagccagctgtgctgactcctggtgcagtgctccttcctagtgccctgccagccacctcctcaggctgtgaggcaagcatgggcaattcagaactccaaggtgttccaggagtcacttc

SEQ ID NO: 883741 - DNA, 120 bp, Artificial Sequence
  ENSG00000235845_2 (sequence is synthesized)
tataaaggttgccccttcacccttagaaattcgtggctatccatgggcctcctggatctgtgaatttctgactagcaggcagagcttctggcagggtcgcctaaagacgactcccacacc

SEQ ID NO: 883742 - DNA, 120 bp, Artificial Sequence
  ENSG00000235845_3 (sequence is synthesized)
aggcagggaacctcggcgcagcagtggaaaggatcgtctggccagggctcctcaggggttaagagaggtgcaggccactgacaatttaaaaacggaagatgccaaaacaggcataggctt

SEQ ID NO: 883743 - DNA, 120 bp, Artificial Sequence
  ENSG00000177757_0 (sequence is synthesized)
accctccttgagacagccctccagtccaggccaaatctcagcctgcccttggtccgctgtggttgggcctgcacccaagccatgagcacacgcagcaattgtggcagcagaagcttcctc

SEQ ID NO: 883744 - DNA, 120 bp, Artificial Sequence
  ENSG00000177757_1 (sequence is synthesized)
tgggctcagactcaggctgatgctgcgtcaggacctgccgcggtctcggctgggcttcctgggactcggtggttgtgggctgattgtaaagcacggaatgactcttagaaactgggcgtc

SEQ ID NO: 883745 - DNA, 120 bp, Artificial Sequence
  ENSG00000177757_2 (sequence is synthesized)
attctttgtggttttccaagcttggtctctgatgatactccaggtcttaggagacatgctgaatatttattatgcttacattcaagcaacattaacccttaaggttgatgtagctccccg

SEQ ID NO: 883746 - DNA, 120 bp, Artificial Sequence
  ENSG00000177757_3 (sequence is synthesized)
tctttttttcccagaaggaggagcactgaaggaacacttttccagtatggattctttccagctccgagaagctggaggcacacggatccctcggccagctctcatctatggacgtgctgt

SEQ ID NO: 883747 - DNA, 120 bp, Artificial Sequence
  ENSG00000177757_4 (sequence is synthesized)
agtcacaaggactgtgactaaggctcagtccctgaggactgccttggcatgggctgctttaggctgtaaacacccagttttatccactttatgtgaagaaagccaacaaggggcatggag

SEQ ID NO: 883748 - DNA, 120 bp, Artificial Sequence
  ENSG00000177757_5 (sequence is synthesized)
tgagttccgcaggttttagcggctgcggcggctggtgctcagtggggatgatggcgggaaggcgcctccctctgtgggccccgaggtctgtgcgggaatcagctctgcagctgtgtccag

SEQ ID NO: 883749 - DNA, 120 bp, Artificial Sequence
  ENSG00000177757_6 (sequence is synthesized)
gggcagccgtagaccacacacggcaggctcacagctctgttccatgagaactttatacacaaaagcagacgggctgggcttggcctctggatcataatctgctgacccctggggcaacgt

SEQ ID NO: 883750 - DNA, 120 bp, Artificial Sequence
  ENSG00000177757_7 (sequence is synthesized)
cggctgcagctgagatggctgctccccggtggggtgtgtgctcggcctgcagtccccgccctccggactccattcgcctccactctcaggtttgcacctcgtcattgtcttctaattttg

SEQ ID NO: 883751 - DNA, 120 bp, Artificial Sequence
  ENSG00000177757_8 (sequence is synthesized)
ctctcagcacaacaagactctatgattctgtctattggaacaaaaagccagtgaggcaagtgtatcatcctgttgatgaattcacagcattaactctgggagttggggacagtgtgtatt

SEQ ID NO: 883752 - DNA, 120 bp, Artificial Sequence
  ENSG00000177757_9 (sequence is synthesized)
cttcctccagacactctctgtttctcctggatggaaaggttctgctacttgtcccgtggtcaggcccagccaatggaacggaatggaagtgactctgccccttattggcagaaactttaa

SEQ ID NO: 883753 - DNA, 120 bp, Artificial Sequence
  ENSG00000177757_10 (sequence is synthesized)
aagccgcacaacgttcctgcaccctcccctctgccatgagcctggcagtgctcaggatgggaaaattatctcacctgggcctgaggatacaggagctacccccagcctgcagtggaagag

SEQ ID NO: 883754 - DNA, 120 bp, Artificial Sequence
  ENSG00000177757_11 (sequence is synthesized)
aagcatggacaagtgattaaactttgtgttttcaagccacagaggttttttgaagttgtttgctaccatgctttgtccctacaaacacagtcatggagaaggccagtggcagagcctgag

SEQ ID NO: 883755 - DNA, 120 bp, Artificial Sequence
  ENSG00000177757_12 (sequence is synthesized)
ccgttcgcgcatctgttcaccagtatccagaataacaatagatttttgaaacattcctgagaaaattctgggagttgcataccggccagtcttattctctaaagttgttccttctaaagg

SEQ ID NO: 883756 - DNA, 120 bp, Artificial Sequence
  ENSG00000177757_13 (sequence is synthesized)
gtgtgatgaccgaaaatttcagaaaagcaaaccaccgctgaaaggcaacgttatttctgttggcagaaggcggcctgagcaatctagattttccacggttcaccaactagtttttaagga

SEQ ID NO: 883757 - DNA, 120 bp, Artificial Sequence
  ENSG00000177757_14 (sequence is synthesized)
aatatggctgtgagaggaataaaacatgattcctacctttaaggaactcagagaagtgaattaaaggaagtcacagatcagacaaccaaccacacaaagtttctaagagcaaactgttca

SEQ ID NO: 883758 - DNA, 120 bp, Artificial Sequence
  ENSG00000177757_15 (sequence is synthesized)
ggtcggcaagtcactcttatccactgttttgccttctaaggtttcagttactctcagtcagtcatggtccaaaaacattaaatgaaaaattccagaaataaacaatacacacgtgttaaa

SEQ ID NO: 883759 - DNA, 120 bp, Artificial Sequence
  ENSG00000253122_0 (sequence is synthesized)
tcacccacactggacttcggtggtacaatcctagctcactgcggcctcgaacttctgggctcaagtgatcctccagattctgacagaagatacagatggaactcattggtcagagatcac

SEQ ID NO: 883760 - DNA, 120 bp, Artificial Sequence
  ENSG00000146521_0 (sequence is synthesized)
gcgggcagcaggcaggacacgtggaaacgcaaccgccaggaggaaaggcgggacacagcgggaagggaggtttgcctcccctctcttcctgtggtgacccccacctcacttacaaaaatc

SEQ ID NO: 883761 - DNA, 120 bp, Artificial Sequence
  ENSG00000146521_1 (sequence is synthesized)
accaccgacgtttgggaaccgtgcacgccgactgaaagcaaagctcagctgacctgcgaggagtccccggggagctgccgcggtggtcgccgttgagtccgtccgtgccgctggggccga

SEQ ID NO: 883762 - DNA, 120 bp, Artificial Sequence
  ENSG00000146521_2 (sequence is synthesized)
ggcagctggagatgtggtcaacgggctgatgggcacggctgtgggaccccatcattcccctgccccgcatgactctgctctcccagctcgactgctcacttcagacttcccttatggaag

SEQ ID NO: 883763 - DNA, 120 bp, Artificial Sequence
  ENSG00000146521_3 (sequence is synthesized)
gagttgccagatagagcaagtaaaatacagtgtgccagacacaggtttatttcaacactgggaaggctccattcctacttaaacccagcagggaacagggagcggtgtgcagaggaggtg

SEQ ID NO: 883764 - DNA, 120 bp, Artificial Sequence
  ENSG00000146521_4 (sequence is synthesized)
gcctgcccgggaagccggccttggtgctgggactgcagggagagggctgtgaggaagagcacaggcttcatgcacattgcacagaggaggagattcatggggacagcaggcactggttag

SEQ ID NO: 883765 - DNA, 120 bp, Artificial Sequence
  ENSG00000146521_5 (sequence is synthesized)
ttaggcacagcgggaaggttatcgaagacaaaacacatttctacccaagtttaaatgacctgctatgcccacagagcttgatccagaagtgcacagtagagacggggtttcaccatgtta

SEQ ID NO: 883766 - DNA, 120 bp, Artificial Sequence
  ENSG00000146521_6 (sequence is synthesized)
acttttaataaatataaatacacaggtaattttaacacatattcctgatgaaatcattattatctgcaatgctttcattctgctttttctcttaacaatggcataaacatttttcaaggt

SEQ ID NO: 883767 - DNA, 120 bp, Artificial Sequence
  ENSG00000146521_7 (sequence is synthesized)
caataaatgtttttcaaaatcgcatttgtattagtggctgtatagttttctatcaaatgtggaataaactcaatttatttctcccttttgttcttgaacatttaagatcattggttcata

SEQ ID NO: 883768 - DNA, 120 bp, Artificial Sequence
  ENSG00000146521_8 (sequence is synthesized)
gttactaatcatgttacaacaaatattcatgtattccaaattttgctcattcctgattatttccttagatttccaggtatggaataattaggttgaagtgtttgaaatctttttttgttg

SEQ ID NO: 883769 - DNA, 87 bp, Artificial Sequence
  ENSG00000146521_9 (sequence is synthesized)
ggaataattaggttgaagtgtttgaaatctttttttgttggtttgtttgtttttgagatgtagcttccctctgttgcccccactgca

SEQ ID NO: 883770 - DNA, 120 bp, Artificial Sequence
  ENSG00000146521_10 (sequence is synthesized)
ggcgtgagccactgcgcccggccgaagtgtttgaaatctttaagcatcctggtaaatattgagttttgtcaatatttagaaaagttgcatgattgacatcgcttccacccatgtttcaga

SEQ ID NO: 883771 - DNA, 120 bp, Artificial Sequence
  ENSG00000146521_11 (sequence is synthesized)
ttgcatgattgacatcgcttccacccatgtttcagagcatctgatttgtcagaccctcaccaaaaatgggcttttatcaaaatgtaataaaaaataaatacaacttttccaatgacaaaa

SEQ ID NO: 883772 - DNA, 120 bp, Artificial Sequence
  ENSG00000146521_12 (sequence is synthesized)
gctggccgatgttgatttgaacaatctcaagaatgtgctctttagtgcattaaacatatgtgacgagagctgagcacgtttaaaatctcagtaactttggggtttgtaagtgttgtagct

SEQ ID NO: 883773 - DNA, 120 bp, Artificial Sequence
  ENSG00000146521_13 (sequence is synthesized)
gacatctcagtcacatgctgtcttggcaccagctgtggactgtgctgtgaaagagatctgtgaccttgcaccctgagatctcaggctcaattaagagacaaaacaggcaatgcagtatca

SEQ ID NO: 883774 - DNA, 120 bp, Artificial Sequence
  ENSG00000146521_14 (sequence is synthesized)
gtgcagatgggaaagagaaagcagaaagtatgaagagggaaaggaggagcacaaaggagttagcattagtctctactgagcaattcctattccaaccacgtcctaaatgatgagttggat

SEQ ID NO: 883775 - DNA, 120 bp, Artificial Sequence
  ENSG00000146521_15 (sequence is synthesized)
cctagcagaaagggaacacatgttatttttaactgattttaacttgatttattgtaacctatcaggagctcttaataaatatggctctttatgttgttagcaagtgtgtttgatttttgc

SEQ ID NO: 883776 - DNA, 120 bp, Artificial Sequence
  ENSG00000146521_16 (sequence is synthesized)
cactctaggaggtgagctctgtccatgttttcagagtagaaagtgatctatgatacaatgaactgtttttagcttcatgagttagaagtaggaagaggagaatgtatcaatttgttaact

SEQ ID NO: 883777 - DNA, 120 bp, Artificial Sequence
  ENSG00000146521_17 (sequence is synthesized)
gccttttcctgttcaaaaaaaagctttttcagcaaaacatagtccttaagtttaaaaagtcagtgtttattatctgacagatatgtttaaattagtaaagaaaacattacattttcataa

SEQ ID NO: 883778 - DNA, 120 bp, Artificial Sequence
  ENSG00000146521_18 (sequence is synthesized)
acattgaatgaacattatgtgaacattgagtttaacttttggttgtctcttgggaaatttttgtcaatttgaaaaatgatgaaaagcatcaataaaagatgcaagcaattgtgtaatctc

SEQ ID NO: 883779 - DNA, 120 bp, Artificial Sequence
  ENSG00000146521_19 (sequence is synthesized)
aatgtgctaccgaagtggctctctgcttgggtatgagaaaagctatcaaaggaaaatttgatttaagaaaggaaatctaggccaggagcagtggttcaggcctataattccagcatttgg

SEQ ID NO: 883780 - DNA, 120 bp, Artificial Sequence
  ENSG00000146521_20 (sequence is synthesized)
agaggttgtagtgggaggattactttaagccataagtttgagaccagcctaggcaacatagtaagacctcatctctataaaaataaaatggaaagaaagaaatggaatctaaaataaaga

SEQ ID NO: 883781 - DNA, 120 bp, Artificial Sequence
  ENSG00000259889_0 (sequence is synthesized)
gtgaggggtgaaactggccccccatgggtagccgcagtctgccagggcctcccccaggatccccagccacctcccctatgcaggagcatgcagaggctggggtcaggtttggcttgccct

SEQ ID NO: 883782 - DNA, 120 bp, Artificial Sequence
  ENSG00000259889_1 (sequence is synthesized)
ggagcacaggaaatgccccatttacacatggaccggaggccagtgtctttcgcaccaggatcccggcccccaggctcagaacttgaatatctgggccatgctctccaggagtctctctga

SEQ ID NO: 883783 - DNA, 120 bp, Artificial Sequence
  ENSG00000259889_2 (sequence is synthesized)
gtcctggagcctccagtgccggcactcatacagggccccctgccggggccaggagaaagccgttgctgtgtgtagcctggagagtgcgtcgtcacgtgacagatgcttgtagccacccgg

SEQ ID NO: 883784 - DNA, 120 bp, Artificial Sequence
  ENSG00000259889_3 (sequence is synthesized)
gacctgcgaaaagcctgcagctggtgatgctcccctcccaccaaggggtgcagagctggaggattgctcataaattgttcctgccctgtccaataaataaaatatgccttctggggcgca

SEQ ID NO: 883785 - DNA, 120 bp, Artificial Sequence
  ENSG00000259883_0 (sequence is synthesized)
tctgtccctgaaaggccagaacaaactgcctcctagggtaacactaagtgctactgccatttgagacagacgtgtgcacagacagccctagctcacaggattgtaggtccccagcggatg

SEQ ID NO: 883786 - DNA, 120 bp, Artificial Sequence
  ENSG00000259883_1 (sequence is synthesized)
aatgaactggctgtttgctgggtgccgggaagatgctttggagccacccatagatggacctgcatggggacttgcttttccaggagagatgattgattcaccatgctgacctgaccactc

SEQ ID NO: 883787 - DNA, 120 bp, Artificial Sequence
  ENSG00000259883_2 (sequence is synthesized)
gaccactctcccacgtggtcttcctagtgatcagatggggtatctgaaggttcagaaacagatcaaagaaaacgctgtgcacatggagtgaatgtgcggtggctcagacctgtaatccca

SEQ ID NO: 883788 - DNA, 120 bp, Artificial Sequence
  ENSG00000259883_3 (sequence is synthesized)
ctcaggagtttgagaccagcctgggggaggaaaaaagactcagagaggttaagtatccgacccaaggcacacagctgtttctcaggggagcccggattcaaacccagggactcggatcct

SEQ ID NO: 883789 - DNA, 120 bp, Artificial Sequence
  ENSG00000259883_4 (sequence is synthesized)
gattccagcatttccctgccagaggctatggtgggtgtgccgagcaccaccctgagggggaagcagtatctcagcaactacacccccgaggaagaggcagtccccaatcagcgggagcaa

SEQ ID NO: 883790 - DNA, 120 bp, Artificial Sequence
  ENSG00000259883_5 (sequence is synthesized)
tgggacctgctgatgacaaaataagccacagaatgaatggctctgctccactggccttctctcctccctgcccccttttccccagctgaccagatgcagggcagtggcagggaggggctg

SEQ ID NO: 883791 - DNA, 120 bp, Artificial Sequence
  ENSG00000259883_6 (sequence is synthesized)
ataccaaacccggtctgggagactgcccggagggaacacaggttcccaagctccttttggagaggctggatgtgagttcacctcgaacctttcagctggtaatggccacctcttggagaa

SEQ ID NO: 883792 - DNA, 120 bp, Artificial Sequence
  ENSG00000259883_7 (sequence is synthesized)
tgtaactggttaccagaaaaccccagaggttgtctcccagtacctagcctaaagtgggtgtggccacagaacctaccaaaatttaaataaaagcaagaactaggcgtgtccagggatggc

SEQ ID NO: 883793 - DNA, 120 bp, Artificial Sequence
  ENSG00000259883_8 (sequence is synthesized)
gttgtgctgtttatccgctctctgctcttcccactcctccttcctttgggattttgtccaagactctgtaaattaatttttctgtgcctgtttcctcataaaataaacaagctaacctca

SEQ ID NO: 883794 - DNA, 120 bp, Artificial Sequence
  ENSG00000259881_0 (sequence is synthesized)
gtgtctgctccctccccccacaccccacacgcacctagctgaggcccttcgggaccggcggagctgctgcggggccgggccgcggcgggagcggggcccttctttgtgtcctcggcgtcg

SEQ ID NO: 883795 - DNA, 120 bp, Artificial Sequence
  ENSG00000259881_1 (sequence is synthesized)
ctgtagcgccgcgcccagtggttgagctcctcgcggtcggcctcctggcacctgcgcagcaccgtgagcgagcgccgcgtcttctccaccatgtccatgatgcagttcaggagctggggg

SEQ ID NO: 883796 - DNA, 120 bp, Artificial Sequence
  ENSG00000259881_2 (sequence is synthesized)
ggacaggatgggtgcccgaccagcccaccgcccgtgagagctccaggactgaagccgcagaggccactcccacaggtcaccagaaactaagacgtgagtgacgcccggcagtggccgact

SEQ ID NO: 883797 - DNA, 120 bp, Artificial Sequence
  ENSG00000259881_3 (sequence is synthesized)
cttccgccgtggctgtgcccatgggagacgtgagtgacgcccggcagtggccgactcttctgcggtggctgcgcccacgggagacgtgagtgaccccggcagtggccgacttccacggtg

SEQ ID NO: 883798 - DNA, 120 bp, Artificial Sequence
  ENSG00000259881_4 (sequence is synthesized)
attcgtcgctgaggcggagaagcagagaccctcagggcctcccagctccgagcctctggcccaccagacgctctgagctccaggcttcctggcagaccagcccgtgttttcctacaaagt

SEQ ID NO: 883799 - DNA, 120 bp, Artificial Sequence
  ENSG00000259881_5 (sequence is synthesized)
cccggcagtggcttactctttcgtggtagctgcgcccacgacttctggagacatcagaggcttccaggccccactgttttctgcatttggccactgcccacgcttctggggctgaggtct

SEQ ID NO: 883800 - DNA, 120 bp, Artificial Sequence
  ENSG00000259881_6 (sequence is synthesized)
attcgcggcagccctctgcggtcacccgcaggcgcccatgactccgatgaagccacgccaaacaccacccaaccacgtggcctcggcacccgcctcctgtctctgcctgtgaacaccgcc

SEQ ID NO: 883801 - DNA, 120 bp, Artificial Sequence
  ENSG00000259881_7 (sequence is synthesized)
agccaagccgaggccagggctctcggaacacgctggctctgaggcccatcctattcggggttgttctctgctcagttaaactctgttcaatacagcgtgtctaaggtttttcccttttga

SEQ ID NO: 883802 - DNA, 120 bp, Artificial Sequence
  ENSG00000259881_8 (sequence is synthesized)
gaggaggtggggaagtggcagccacagctcagtcaccagcctgctctgccgcctgtgaagctgcagctggcagcaacaccccaaccaaaatagtggctgagacgtgcccgacagctggcg

SEQ ID NO: 883803 - DNA, 120 bp, Artificial Sequence
  ENSG00000259881_9 (sequence is synthesized)
tttatttctgtattagcagaatcgggtgggagtcagcacctgcctgacccggctgcagcatgccagacgccgtcacctgctgcctgggccctggaaccctccgcaagataccagccaggc

SEQ ID NO: 883804 - DNA, 120 bp, Artificial Sequence
  ENSG00000259881_10 (sequence is synthesized)
ctcacggcagcccttgctgggccctgcattaactcccccaggccttggactctgagagttgggactctcgtctggcccaggtgacagaggaggaaactgagaagcagagagccacgtgac

SEQ ID NO: 883805 - DNA, 120 bp, Artificial Sequence
  ENSG00000259881_11 (sequence is synthesized)
tcacctgtgggtggactgtgggaatcgccaagctcggatgagaaccacgtgggcagttccaggcccgaggccgcccaccccggggggagaggctccccggagcatctgagtctgcagccc

SEQ ID NO: 883806 - DNA, 120 bp, Artificial Sequence
  ENSG00000259881_12 (sequence is synthesized)
cacctcgccacgctccctcagcccgagagagccggccgggctggctgcagccccagaggaggttccctctcttacccagaggggagcagggtgagccgcgtgtccacggcacccccagcc

SEQ ID NO: 883807 - DNA, 120 bp, Artificial Sequence
  ENSG00000259881_13 (sequence is synthesized)
cagatccccggagcccacaggtacctgtcgggcgtcctcctcttgccgttctcgttgacttccagtagcagctctgaggagtcgatgggggaggaggcgctggcgtccagcaggagctgc

SEQ ID NO: 883808 - DNA, 120 bp, Artificial Sequence
  ENSG00000259881_14 (sequence is synthesized)
tcatgctgggccaagtactgggcgggcgtctgcttggccaggcgtgcacagtgcaggagctcccgctgcagcaagggcaggtttgcctgtggggtggggaaggagggcctgggtagcatg

SEQ ID NO: 883809 - DNA, 120 bp, Artificial Sequence
  ENSG00000259881_15 (sequence is synthesized)
caggggtgcacagccctgctcaggtccgagcagagggggcctgggctgggtggccgaaagctcaacttgacctcgggcctcaaaggtcaaggtgctcgacctctctgggcctcaagttcc

SEQ ID NO: 883810 - DNA, 120 bp, Artificial Sequence
  ENSG00000259881_16 (sequence is synthesized)
ttcctagcagtgccatgggagggtggcgtgggagggtgggcacagagcttcgcaggagtgcctcacctgggccacacggcgatgtggggcatgtgggacttgagcccagatcctggactc

SEQ ID NO: 883811 - DNA, 120 bp, Artificial Sequence
  ENSG00000259881_17 (sequence is synthesized)
ccagggtggggctttcccaccgcacccagctccctcccatggcgtggtctggagaaggcgagaggacgaaggggcagcagatcatggttggtcttcccgcctgcacccgccctgcccagc

SEQ ID NO: 883812 - DNA, 120 bp, Artificial Sequence
  ENSG00000259881_18 (sequence is synthesized)
aggcaccacatgacccaacacagctggggaaatgcaggctcagagagggggaggcagccctgggcctacaggcggctcacacgagggagctgggagtgaaacccagctgggattgcctgc

SEQ ID NO: 883813 - DNA, 120 bp, Artificial Sequence
  ENSG00000259881_19 (sequence is synthesized)
agtgtgtctgctccagccctgatgggaagccctgaggttcagcttccccttcccttcccgctggtttccagccttggccttgatggagcgtggacctaggacgtggacacccacgttctg

SEQ ID NO: 883814 - DNA, 120 bp, Artificial Sequence
  ENSG00000259881_20 (sequence is synthesized)
tggctgctcaagtgatcctccagccttggtgaggacggcctcaagacccacgtgtgcgggtaaagactccgcagcatgcggccgaaggacggcccggtgtacgggatccgtatgcagacc

SEQ ID NO: 883815 - DNA, 120 bp, Artificial Sequence
  ENSG00000259881_21 (sequence is synthesized)
ctgcctttgacgcctgtgtgtacccgcggcgcccgccgcctcgtccttggctccaggctggcactgctgggccgcaagccgggctcctcgggtgccttccccaaagtcttcccagagctg

SEQ ID NO: 883816 - DNA, 120 bp, Artificial Sequence
  ENSG00000259881_22 (sequence is synthesized)
ccgcgggagggcggacaggcgtgctggaccctgagcatgctggaccagggcccagcagcaggccacttgggagagccagcggttctaagcatttgtaaataaatccaattccccaacttt

SEQ ID NO: 883817 - DNA, 120 bp, Artificial Sequence
  ENSG00000259887_0 (sequence is synthesized)
cccgagccggctgctcgctttcgctgcagcccccgcaccagagggggctgcgagacgggtgcccgtcggcggccgggcggctatcccctgctctgcccgccccctccccccgagaagtga

SEQ ID NO: 883818 - DNA, 120 bp, Artificial Sequence
  ENSG00000259887_1 (sequence is synthesized)
tgaaccccgcgactagcagcccccgccctctcggccctctccggccccgggccggcggacaaagctccggacaccctgaccgaacggtcacctccccccgccccatcccggcccgcccgc

SEQ ID NO: 883819 - DNA, 120 bp, Artificial Sequence
  ENSG00000259887_2 (sequence is synthesized)
ggccccgtacctcggcatcacggccgggtcctagcccacatttggaagcaaccggcacccacgcaggttctggaacttgccaaggttccaggggttgagcccactccatcctgtccaaag

SEQ ID NO: 883820 - DNA, 120 bp, Artificial Sequence
  ENSG00000259884_0 (sequence is synthesized)
gcaggaggctggaaaggctgcccaggaaggcggggcccatcccttcctcccagccccgctcccacctcaagctctttcttcctgtatttacagcagcactgggcttatttacagcacggc

SEQ ID NO: 883821 - DNA, 120 bp, Artificial Sequence
  ENSG00000259884_1 (sequence is synthesized)
gctatgtgttaaaaacggtttatcttacaaaaaacataaaggccggggccaggctgggggggataagacaaatcgtggggtcacccccatgaaggcatccccctccccaagggcttgagc

SEQ ID NO: 883822 - DNA, 120 bp, Artificial Sequence
  ENSG00000259884_2 (sequence is synthesized)
tgggggtgctctgggggtccgtggactaaaggcacatggggtggcatatgagagtgcgcatgtgcacacgtgttcccaggcccctaaaactgctgcccctgaccacccctcatgctctgc

SEQ ID NO: 883823 - DNA, 120 bp, Artificial Sequence
  ENSG00000259884_3 (sequence is synthesized)
tggcacttcacaaaagcgcattcacatgttggccattagtaagcatcgtcacaagtctgagaagcagtaaccctcattatcctcatactccaagtgagaacccgaggcccaggaggctaa

SEQ ID NO: 883824 - DNA, 120 bp, Artificial Sequence
  ENSG00000259884_4 (sequence is synthesized)
ttccaactacatgtctattttttattcaatatattaaatatattaatcagaaaagtcacatactataaatccaggaaaatacacaaatataaatgtcagaatctgtcatttgtcttcttc

SEQ ID NO: 883825 - DNA, 120 bp, Artificial Sequence
  ENSG00000259884_5 (sequence is synthesized)
tggcatatgagagtgcgcatgtgcacacgtgttcccaggcaggggtcagaagggcagcgtgtccatgaagatcttgtcaatgatgggtggagggggcaccaagtcctccagcttgaggta

SEQ ID NO: 883826 - DNA, 120 bp, Artificial Sequence
  ENSG00000259884_6 (sequence is synthesized)
gaagatgcgctgcaggccctgggtgcacagggtccgcagctcgggcagtttgcccaacagacgtgacaggcagctggctggctggggctcgcccgccacagctgccacgtgctccttcag

SEQ ID NO: 883827 - DNA, 120 bp, Artificial Sequence
  ENSG00000249713_0 (sequence is synthesized)
tcactcagcccacggtccacttctttacatcaacacatgttactataacattctagtccacaagagagtgggcgttcttttagagttcatgtatttgaggcagcagatgagtaaccaact

SEQ ID NO: 883828 - DNA, 120 bp, Artificial Sequence
  ENSG00000249713_1 (sequence is synthesized)
aaagcaaaggctgtacttgatagccaagaacaaaactggcattttccccctgttaatcaatgtcaaccctacaatctttcagcactgagaactaacataccttcatttgtgtaagcagca

SEQ ID NO: 883829 - DNA, 120 bp, Artificial Sequence
  ENSG00000249713_2 (sequence is synthesized)
catacagaaataaccaaagcagaactgaagcatgggtattgccaagaattggggaaaaagttagaaagcaaagatgggacgtgagtctttgttttgcctaccaaaagaaaggagtcctac

SEQ ID NO: 883830 - DNA, 120 bp, Artificial Sequence
  ENSG00000249713_3 (sequence is synthesized)
ttcttgggtggcagttgctgtagcaaccaaaccactgctaaaggagattcagagcattaagacggaggttgtggagaagggcagaagcctgggggactgagctctgtagcgggacactag

SEQ ID NO: 883831 - DNA, 120 bp, Artificial Sequence
  ENSG00000249713_4 (sequence is synthesized)
gagcagtggtggtcccccaacccccacctgatgatgttgaacatctgctcaaattagagcttgcgtcttgactaacgtctggcaagaaccataaactcccaagccaagtatcagaaaaga

SEQ ID NO: 883832 - DNA, 120 bp, Artificial Sequence
  ENSG00000249713_5 (sequence is synthesized)
gctaagtggggtgtgagcaagccgtctcaccgcagagactttaaatgcttcactgaaaggaaatgcagaggcaacagggaagctgtgccgtctcgaaagaaatttagatttgtgcacaac

SEQ ID NO: 883833 - DNA, 120 bp, Artificial Sequence
  ENSG00000249713_6 (sequence is synthesized)
ggatcagtgtaacagtggtacatccatggtaccgtatatagggtagcacacctggatcctgttttatagtaggggcttaaagtgagaatatgtttaaaaaacaagaaccaaaactggcct

SEQ ID NO: 883834 - DNA, 120 bp, Artificial Sequence
  ENSG00000249713_7 (sequence is synthesized)
tgacttttggcccagcactcacaggaaacagcaaagaaaaagaagaaaactttgcaaatgcaattaattaacaaagtcatatgttttatttcaagagtgatcttagtattcctaagttaa

SEQ ID NO: 883835 - DNA, 120 bp, Artificial Sequence
  ENSG00000249713_8 (sequence is synthesized)
atacagcattagaagaccagacctaagaccttacccaaacacactaaaataaaacataataaactgtgagagaagtatctgcccactctatccgcgagcttggagcaaatgagttagaaa

SEQ ID NO: 883836 - DNA, 120 bp, Artificial Sequence
  ENSG00000249713_9 (sequence is synthesized)
agtcaaagctggaaggtggaggagagatcaatgattttagcaacactcacccactgttgctgacaagtcaaaagctcataagccacagaagatggtgttgctttgttttcatggtggaaa

SEQ ID NO: 883837 - DNA, 120 bp, Artificial Sequence
  ENSG00000249713_10 (sequence is synthesized)
acacagctcgaagcttgaatttggtaatgcatactacagaaaagcagtgaatgtatggactgcagaagctacatagctcctcattcttcactctattttcataagcaagatgcaaatgat

SEQ ID NO: 883838 - DNA, 120 bp, Artificial Sequence
  ENSG00000249713_11 (sequence is synthesized)
aaagcagcaagctgacattcaagaaagcatgtttcagggcatatcttcctgaggttggtatgctttcatgctggcagctcataatttctagaaacacagcaaatcaccatgatttgtgat

SEQ ID NO: 883839 - DNA, 120 bp, Artificial Sequence
  ENSG00000249713_12 (sequence is synthesized)
cattaagcaacagttagatcgtgttccaattcctccatttgtggggcagaaaaatcgtgtcatatttcagaaaaaaagatgcccaaataaaaggtcaaaataaaattgggtgcttaaaaa

SEQ ID NO: 883840 - DNA, 120 bp, Artificial Sequence
  ENSG00000249710_0 (sequence is synthesized)
ctggaaaaaatgaggcgagaagagacggatttgcaaaagcagaaagaaaatgagatagcagtaacaactggcaaccatatgttcatctgatgtatttgcaaatatttaagttctaggctt

SEQ ID NO: 883841 - DNA, 120 bp, Artificial Sequence
  ENSG00000249710_1 (sequence is synthesized)
cctcaggaaatctggaaagtattggcactgattaggaaagccttttttattataatacatccatcactgtatgggaaagcaggaaaggatctgccaatgaaacgaaatagttttctggaa

SEQ ID NO: 883842 - DNA, 120 bp, Artificial Sequence
  ENSG00000249710_2 (sequence is synthesized)
gcagttgtttcaagattccataggtaatctggaatggaggcatggaggtggaagttctggactcttcttctcaatgtctagctaacctggtcagaggcttgccagaaggggccccgataa

SEQ ID NO: 883843 - DNA, 120 bp, Artificial Sequence
  ENSG00000249710_3 (sequence is synthesized)
aaggaagctacacccaagatatgagacaagaatatgggacagttagctttgatctctgaatgtgttgtgtattggtttcagtgcccatctcatagaaataaaatactgctttattctgca

SEQ ID NO: 883844 - DNA, 120 bp, Artificial Sequence
  ENSG00000249717_0 (sequence is synthesized)
cccctcaaacttgaaaagaaggacagagccacacaagaggacagctccttctgcagtgcctcctctggcctgactgaaaggagacagcctcagagctatgcctccagacgcatcattcct

SEQ ID NO: 883845 - DNA, 120 bp, Artificial Sequence
  ENSG00000249717_1 (sequence is synthesized)
cttgcaacactgactgttttcacagcaagatgggccctttagctctcctcatgaaatgtgaggctgtgtgccctctctgccttcctctgactacagaggaccactggaatgtatttatgg

SEQ ID NO: 883846 - DNA, 120 bp, Artificial Sequence
  ENSG00000249717_2 (sequence is synthesized)
agttggaagagtcagaatgcgtttgcctatgaaaattttttttggaactgaaacaaaacaaaacaaaaaagcccaaccaactttgaacttgttttcactagcccagccgatgtgccacta

SEQ ID NO: 883847 - DNA, 120 bp, Artificial Sequence
  ENSG00000249717_3 (sequence is synthesized)
taagccttcaagggccttaccccagcaaggcctctgctttggtgctctccatgacgcaatctgtctctctgcagacacaactctaaggtgtctccagagccaaagtcaggtgaagaaatg

SEQ ID NO: 883848 - DNA, 120 bp, Artificial Sequence
  ENSG00000249717_4 (sequence is synthesized)
gggttattgtgtggattattttaggtcagaatacaggccaaaaaaacaaaactggttctgtttgaaattgcctggctgccctcattttgtcacttgactttacatggagagatactgctc

SEQ ID NO: 883849 - DNA, 120 bp, Artificial Sequence
  ENSG00000249717_5 (sequence is synthesized)
caggaattacccaaatgacaaaataaacaaacaaacaaataaaaccgtacattctgcaccaagaataaataacgcaaagtggagactgagcttattaattttttcaaagccttccttacc

SEQ ID NO: 883850 - DNA, 120 bp, Artificial Sequence
  ENSG00000249717_6 (sequence is synthesized)
tgaatatgttaatgtgaattaatgtgctggactggcccagaggaaaataaagtccttctgtagtttatcttctatacctaaattggcagatctatggaattcatgtttgcattacatgta

SEQ ID NO: 883851 - DNA, 120 bp, Artificial Sequence
  ENSG00000249717_7 (sequence is synthesized)
aagtttttacagttcttacacctggataaggatcttttgactggaaaggtcaatatatttcaagggctttggctctgagaaagaacggcttggtggattccaggtaccaaatcatctgta

SEQ ID NO: 883852 - DNA, 120 bp, Artificial Sequence
  ENSG00000249717_8 (sequence is synthesized)
aaatcacatgccaaatcccaaaagcttactgtctccaggaccacaaaccaatcaatttgggaggaaattggctcaaataacatcaacacccgtaatgccaatggccaaactctagatggt

SEQ ID NO: 883853 - DNA, 120 bp, Artificial Sequence
  ENSG00000249717_9 (sequence is synthesized)
gaatgtgaaatcttaagtggaatctgctcccaggccaagacaatacaaccaaatcatctggatgcaagtcaagctatgagatggagacattaaagcccagataagacgtgctgaataata

SEQ ID NO: 883854 - DNA, 120 bp, Artificial Sequence
  ENSG00000249717_10 (sequence is synthesized)
agacctgagttcaaatgtgggtgtcagtaactctgcggctttggacaaattattaaacctcattaaatctctgttttctcatctggagattgagaccagtagtaccaactttccagggct

SEQ ID NO: 883855 - DNA, 120 bp, Artificial Sequence
  ENSG00000249717_11 (sequence is synthesized)
gatatagagccgaaattaaaatgtctgtgaagtgcctaacacaatggctggcatcttattagatttaataaatgtgagttccctcttcccttgcccactatatggcagagatgtaattca

SEQ ID NO: 883856 - DNA, 120 bp, Artificial Sequence
  ENSG00000249717_12 (sequence is synthesized)
aaagcagggaggtgggcctccaaacccaagttcttggcacatctgtaatgagaacttgtctgagctgctcctccaccactgtggtgatacaatcagattggctgaacttgaatgattctt

SEQ ID NO: 883857 - DNA, 120 bp, Artificial Sequence
  ENSG00000249717_13 (sequence is synthesized)
tcctttatactggcaaaccactctctattattttatgtatttagcccagatgtaaatcttgtacaagtcaaaatcaaaatatataaatcatgcatctcccagtgcattctaatgtgcctg

SEQ ID NO: 883858 - DNA, 120 bp, Artificial Sequence
  ENSG00000249717_14 (sequence is synthesized)
cagtacagcctgatcataaaaatatcagtcatagacctactcagaaaaaaggtttaacattggcaaaagattatagagtaaatactgggcttcaggttctagggaatttgcgaaaagcca

SEQ ID NO: 883859 - DNA, 120 bp, Artificial Sequence
  ENSG00000249717_15 (sequence is synthesized)
ataagacatagggaacaccaatagcctttcttgtgctaaatctctctcacagtccccctgttttgaatcaggccatgtcttcccctgggaagaaaagaaatgcaagttcacaaaaaatgt

SEQ ID NO: 883860 - DNA, 120 bp, Artificial Sequence
  ENSG00000249717_16 (sequence is synthesized)
tcttgtgaaaagttgtaagctgcatttacaactggggaagatttcagtctcagttgttttcttgctggtcatagatatatttgtcctttgcttgctatggagaaagattctgaactttca

SEQ ID NO: 883861 - DNA, 120 bp, Artificial Sequence
  ENSG00000249717_17 (sequence is synthesized)
gaaaaaacttccaagtctagactccaaagaatatagtttatcttactatggcatttattttgcagacagttccctctccaacacatgagtctatacaaatggtctcacctggcaacatat

SEQ ID NO: 883862 - DNA, 120 bp, Artificial Sequence
  ENSG00000249717_18 (sequence is synthesized)
ttcccagcccatgcacccctcccctatccctgatgccctaaggacactgcagagacagctgtgggtacaatgaaaaagtgcaaacttggagtaatgagatcagcatcgagttctaactct

SEQ ID NO: 883863 - DNA, 120 bp, Artificial Sequence
  ENSG00000249717_19 (sequence is synthesized)
gcacttttctctctgactttgtacatgtcacctcaattctatgagttttgacttttgtcatctctataatggggacattagctgactaccaggtgttccacctgaaagctctgtaaaaga

SEQ ID NO: 883864 - DNA, 120 bp, Artificial Sequence
  ENSG00000249717_20 (sequence is synthesized)
aagcacattgtgttatataaatttttaaaattagaatttagagagcagaaactgaagaactgtatgttcagctggtattttccatttttaaattaaaattcatacttgctactagtctga

SEQ ID NO: 883865 - DNA, 120 bp, Artificial Sequence
  ENSG00000249717_21 (sequence is synthesized)
ctttaactcagtgtttcaacctctgcatcgtgactagatgacatgtgagtggagatactgaccgccccctgccccgccttcatccctaggctggtcatctggctgtgaaccgctgtgatt

SEQ ID NO: 883866 - DNA, 120 bp, Artificial Sequence
  ENSG00000249717_22 (sequence is synthesized)
tttaaatctgccagtgacttagacaataacaaaaggttgcatccagactaacttggcccatgttaagaaccctgggagctcagcccacagatctcaagatgagagtgcagtgcgctatca

SEQ ID NO: 883867 - DNA, 120 bp, Artificial Sequence
  ENSG00000249717_23 (sequence is synthesized)
atttctacaatctcaaaaacagtgaaaaacaaaacccctattgctccttggctactttattcttatctgctgggtgatagctgatagtaaggtgttgagagcacccagaagagaaggaac

SEQ ID NO: 883868 - DNA, 120 bp, Artificial Sequence
  ENSG00000249717_24 (sequence is synthesized)
tccacttgcccaggaagtttccggaatccacctgctctagcccatctgtaccccagatccccactttttcttgctatgcatctgcatgccatcatctagttcagcaaaagaccttctgaa

SEQ ID NO: 883869 - DNA, 120 bp, Artificial Sequence
  ENSG00000249717_25 (sequence is synthesized)
gactatctgcgcagaagtcacctgaagatagtattaataactaagaaacagtttttcagtctcaaataactttcttcctttatacaaaaaaaggttattaaaaacatttttactccacaa

SEQ ID NO: 883870 - DNA, 120 bp, Artificial Sequence
  ENSG00000233033_0 (sequence is synthesized)
caaggtaacagaatcattgtttattattattaaaatagattatagaaagcagcatctattttgtgcagtttttaggggccttggaaataaaaagctatgatttccaaaaatataacattc

SEQ ID NO: 883871 - DNA, 120 bp, Artificial Sequence
  ENSG00000233033_1 (sequence is synthesized)
caaaggattgaataatacatacatttaaagatacattttattaaagtttaggagaactgattaaaaaagatactgtctctttaaattagtgtgtaattgtttttctcctcctatctattc

SEQ ID NO: 883872 - DNA, 120 bp, Artificial Sequence
  ENSG00000233033_2 (sequence is synthesized)
caactaggtagtctctagggaccatgacctgctgacacaaggccgataacaaagagacctttcctgggaggctgctgggaggtccaggcaagcctcagctctctgggtacagctctcaag

SEQ ID NO: 883873 - DNA, 120 bp, Artificial Sequence
  ENSG00000233033_3 (sequence is synthesized)
aaaggggactagaagtgagataaagagacttgcttgattctgtcctggcactgcagtgggcatgcgcagacaccacagcagacaggaactcaatcttttctctcagggcactctgaacca

SEQ ID NO: 883874 - DNA, 120 bp, Artificial Sequence
  ENSG00000236003_0 (sequence is synthesized)
attgaaagaactaacctgcagaaaaggctgctgcccttcaaactgtgtactgttgtctaagctagttcagaagaatacacgagcttccttcacatactccaatctgttggtttgacttct

SEQ ID NO: 883875 - DNA, 120 bp, Artificial Sequence
  ENSG00000236003_1 (sequence is synthesized)
gaagaaccagcagagttggaaaggcctcgagatctctgtcctggtgctggcctggggctcccctaggtctcgcctgaaagtgtcccattcaccaccagtcttctacaatgttatccggaa

SEQ ID NO: 883876 - DNA, 120 bp, Artificial Sequence
  ENSG00000236003_2 (sequence is synthesized)
ggagagacgggaccggggctgctgtgactggaggctgatggggctccaccgtgccccatcctctcatcccacagtcttccttcacatctgctctgcccaccacagccctgctctggagtt

SEQ ID NO: 883877 - DNA, 120 bp, Artificial Sequence
  ENSG00000236003_3 (sequence is synthesized)
ctctgctctgccacttctgccatccccacctaggcagacaggtttcatccagcctccaggacggcccacccacttgctcctgcagcaggctgctcttcccaggtgcacagcccagagaat

SEQ ID NO: 883878 - DNA, 120 bp, Artificial Sequence
  ENSG00000236003_4 (sequence is synthesized)
taagtgcatatatttaccagaagacatgaccaaagccattcctggggttgccttcatgtagccaacatctggaactaacaccaaagttcattaggcacaaaataaaagagttatctggaa

SEQ ID NO: 883879 - DNA, 120 bp, Artificial Sequence
  ENSG00000233030_0 (sequence is synthesized)
gcggggttggagggactcagctacgcgcctggggaggccgcgggccctcgcagactaccgaacttccattctgccgccgggttttcacacctgccggccccgaggaaacaatgacgttgg

SEQ ID NO: 883880 - DNA, 120 bp, Artificial Sequence
  ENSG00000233030_1 (sequence is synthesized)
gattttggggggccgccccttgactcgggcgaatgggacacgaacggcgaccccttgctctcttccatccgcctgccgccgttgctgcccaccgactcctacagctcatttctcgctcct

SEQ ID NO: 883881 - DNA, 120 bp, Artificial Sequence
  ENSG00000233030_2 (sequence is synthesized)
gcagcctccaggaatgcaaataatttctcactgggttttggcgggggcgcggagctgcggagaagcgcgcgcccaacagctttcgccgcagctgggtccccgggcgctggcggctgcggc

SEQ ID NO: 883882 - DNA, 120 bp, Artificial Sequence
  ENSG00000233030_3 (sequence is synthesized)
ccccagatacaggcggaggctgcaatatgcacatgcggccacagtgtggcgccaggggcccgccgcgggacacgctcggagcgcgacgccccatcccatcatttacggatcaaaccaaat

SEQ ID NO: 883883 - DNA, 120 bp, Artificial Sequence
  ENSG00000233030_4 (sequence is synthesized)
aatctagaatcaagttgctgtgtgtgtcatactcctcctgttttttttccctaaacttttagtagagtcatttacatagttcagtttttacctcagctatgttacacagtggcaggaaaa

SEQ ID NO: 883884 - DNA, 120 bp, Artificial Sequence
  ENSG00000233030_5 (sequence is synthesized)
tattttgtctccaaactacagcccaagtatgagagcagcgtatcctgaagctaattagtaaccagaaaatcaggaaggtaaagcaaatctctggaggcaagatctggactctatggtatc

SEQ ID NO: 883885 - DNA, 120 bp, Artificial Sequence
  ENSG00000233030_6 (sequence is synthesized)
gccgcttctccccacttgaagcgtctctttgcagtgccgcacttggagatttggacttaatcgttaaacaaacagaacagttacattctgccttcctacagggcaggggcctaggactgg

SEQ ID NO: 883886 - DNA, 120 bp, Artificial Sequence
  ENSG00000233030_7 (sequence is synthesized)
cagcatttttgttgtctctagaaatagaggggttatgagagagcctcaaaagagagggcaagaataacacatccatttctcatcatgagttacccccttgtatgcctagaacgcgtatgg

SEQ ID NO: 883887 - DNA, 120 bp, Artificial Sequence
  ENSG00000233030_8 (sequence is synthesized)
agacattctcttttagtaaagtcaaagagaaaagccatgaactaagtatcctgaacacagaggcgtgagccctctcagtctcacagtcccttaggagtcatttatctcagaagttggttg

SEQ ID NO: 883888 - DNA, 120 bp, Artificial Sequence
  ENSG00000233030_9 (sequence is synthesized)
aaacaaaaacagttcatacagcatggtaggcagaattctaaaatgatcccaatgactcactcccttgcataatccccttgagtgtgggtggaacctatgacttgcttctagccaacagaa

SEQ ID NO: 883889 - DNA, 120 bp, Artificial Sequence
  ENSG00000233030_10 (sequence is synthesized)
tatgacaagggtgatgaaatgtcactcttgggattgctacattatgtaagactctatcttagcagtctggatggaaagtctcctcctgaacttgaagaggtaagctgccatgccaggaga

SEQ ID NO: 883890 - DNA, 120 bp, Artificial Sequence
  ENSG00000233030_11 (sequence is synthesized)
gggcctacaagagtgccacaaggcaagggcctctaggagctgagagtggccccccactgatgggcagcaagaaagcaggaacctcagtcctacaaccacaaagaactgaattctgccagt

SEQ ID NO: 883891 - DNA, 120 bp, Artificial Sequence
  ENSG00000233030_12 (sequence is synthesized)
gaccttgtgagcctggaagagctgcaaaaagaaacacagcaaagtcaacaccctaactgcagccttggaagactctcagcagagcactcagctaagctgtgatgggagtcctgacccatg

SEQ ID NO: 883892 - DNA, 120 bp, Artificial Sequence
  ENSG00000233030_13 (sequence is synthesized)
gaaactggaagatcttaaatgtatgttgttgctaaatttgttacacagcaatagaaaacaaatacactccaactcttgacaaatttgttaataggaccacgcatcctaagacaaacacac

SEQ ID NO: 883893 - DNA, 120 bp, Artificial Sequence
  ENSG00000233030_14 (sequence is synthesized)
atcaatgatatcactagcaaaacaagctccaagtcaatgggcttttcctttcgacatacacctctacacataaccaaaaatgcttcaactacttttcttttctccagaggcagttggttt

SEQ ID NO: 883894 - DNA, 120 bp, Artificial Sequence
  ENSG00000233030_15 (sequence is synthesized)
ggctaagtaaaaatggggttcttaggagactaaggcggaaaagagacaatagtgccttttccccctccagaacttatctaagaatggaaggcaggtgtttctatgctatacatagcatga

SEQ ID NO: 883895 - DNA, 120 bp, Artificial Sequence
  ENSG00000233030_16 (sequence is synthesized)
attttacagtcatggatactgatataatgcttccaaatagaattaattctcttccctcccttattcccacccacagccagcagatgctgaaagactgcactgcccaaacactgccatctt

SEQ ID NO: 883896 - DNA, 120 bp, Artificial Sequence
  ENSG00000233030_17 (sequence is synthesized)
tgctttatatatccaaaagagtgggaagtgctgtcacatctccatcagaaactgtcaaacactagtaatggtagaaaatatttgaatgacacaattaataggcttgattttgtggatgct

SEQ ID NO: 883897 - DNA, 120 bp, Artificial Sequence
  ENSG00000233030_18 (sequence is synthesized)
ctactttagaaagaaaattcatatgcttttcaaacacacatgcaatattagaaaaattaagtgtgaactaggccacaaagcaattttcaacaaatactaatgaactgataccatgtttaa

SEQ ID NO: 883898 - DNA, 120 bp, Artificial Sequence
  ENSG00000233030_19 (sequence is synthesized)
cacaaattctaaccaaagtgctataatattagaaatcaatagcaaaaaactaccctccaaaaaacatctaagtaattcatgaataaaataatgtataatggaaatttatgagtttttaaa

SEQ ID NO: 883899 - DNA, 120 bp, Artificial Sequence
  ENSG00000233030_20 (sequence is synthesized)
cttaaatggtaatggtagtattatatatcaaaactcacgagatgcagcttttagcagacattactaatttcctactcaacaatcattcccctaccttcatgactttggtgtcagccatat

SEQ ID NO: 883900 - DNA, 120 bp, Artificial Sequence
  ENSG00000233030_21 (sequence is synthesized)
gattagggctcgggtccaccaaccagctgcattttcttggtcttagcatatactgattaaattgaaatgactaagagtcagtgagctgcaattgaattccccatggctgactgtggcaaa

SEQ ID NO: 883901 - DNA, 120 bp, Artificial Sequence
  ENSG00000233030_22 (sequence is synthesized)
acattttaaaatagggcatagacggcaccaaccaaaaatgttggtgtattgtactgtagtaaaattaacaagtcttgttcattgaaaacaaacaaaactttaatattatagtgaaaagaa

SEQ ID NO: 883902 - DNA, 120 bp, Artificial Sequence
  ENSG00000233030_23 (sequence is synthesized)
aagccacagagtgggagaagatatttaagacacttgaaaaaggacttatatccagaatatataaataactcctgtaagtcagtaagaaaaagacagacaatagaaaaattatcaaaaaga

SEQ ID NO: 883903 - DNA, 120 bp, Artificial Sequence
  ENSG00000233030_24 (sequence is synthesized)
ccttacaaaaaaggatacccaaataggtaataaacgtgaaaaatggtcaatatcatagtcattagggaaatgcttaatttgcatttgtatatccaaaagagtgggaaattgtaacatacc

SEQ ID NO: 883904 - DNA, 120 bp, Artificial Sequence
  ENSG00000233030_25 (sequence is synthesized)
tccatcagatactgtcaaacattagtaatggtagaaaatatttgaaacatgtaaacaaaaatatccacagcattactatttgtaagtggtcaaaaccagaagcaacccgagcccctcagc

SEQ ID NO: 883905 - DNA, 120 bp, Artificial Sequence
  ENSG00000233030_26 (sequence is synthesized)
agaatgggaaaatatgaaatatacagtaataagaacaaatgaacttcaatttacaacatgtatacagttcacaatcataatgttgagaaaaataaaccagacacaaaagagtacatcctg

SEQ ID NO: 883906 - DNA, 120 bp, Artificial Sequence
  ENSG00000233030_27 (sequence is synthesized)
tcccataccgtagccctttatatgaagttcaaaaataggcaaaaaacctatggtgctggaagtcagtgtcaggggtggactagaaatgggcaagaaggagtttctgaggtgctggaaatg

SEQ ID NO: 883907 - DNA, 120 bp, Artificial Sequence
  ENSG00000233030_28 (sequence is synthesized)
tctaaaatagatctggatgctgtttactttgaaaaaatttactgtggcatacatttatggcttgttgtacataagttatatttcaatgaaaattcacattaaaatgtaatataaaaaaga

SEQ ID NO: 883908 - DNA, 120 bp, Artificial Sequence
  ENSG00000236009_0 (sequence is synthesized)
ctcatctggccaaccatcttcagtggccaatgcccaagtgtcttcttggtactacacatgaagatgtcctgctctcccctgctcaaggatagagtgcctgacctgagctgggcccatcag

SEQ ID NO: 883909 - DNA, 120 bp, Artificial Sequence
  ENSG00000236009_1 (sequence is synthesized)
atctagtacttacccggaataggaaaaagatggagagggtgaccaaagattacaaaaatctccgaagcttatccacttgagagagagtccctgaagatactggcctttcattcccgctat

SEQ ID NO: 883910 - DNA, 120 bp, Artificial Sequence
  ENSG00000236009_2 (sequence is synthesized)
caatgtgactgaactctgaataacatatacaggttataataatgtagtagttggccctcaaactaggacacaaacatgttagaggttatctacggagaaatagacaagtgatgcacgaca

SEQ ID NO: 883911 - DNA, 120 bp, Artificial Sequence
  ENSG00000236009_3 (sequence is synthesized)
gatacatgtgtcagtctggtccctgcagttgtatttgtaataatacacattggagcaatttcatggccatcggttagagaatgtttgaagaatgacccattaatatcaggaaggacgttt

SEQ ID NO: 883912 - DNA, 120 bp, Artificial Sequence
  ENSG00000236009_4 (sequence is synthesized)
caaagatcaaagcctgatggaaatgctggaggccgtgacgctgataggagctcatgcgtgttgaccaactgctatgtgacaggcattggctccacgcttttcctgcgctgctcatttaaa

SEQ ID NO: 883913 - DNA, 120 bp, Artificial Sequence
  ENSG00000236008_0 (sequence is synthesized)
agaagaggaacctgctgcaggcgccggcgcgggcggcgaggacgacctgtttttctgacccagcccggaagcgctggtgcaggccttgagcttccttttttcttctcgctgtggaaattg

SEQ ID NO: 883914 - DNA, 120 bp, Artificial Sequence
  ENSG00000236008_1 (sequence is synthesized)
cctggaaagctatgaactgttggttcttgaatcagttggctgccccggatgtctgaatcccttggaaggaacctggaggagttggctgatgggctccaggtgctaccggatcaccctaac

SEQ ID NO: 883915 - DNA, 120 bp, Artificial Sequence
  ENSG00000236008_2 (sequence is synthesized)
aaccctctgggacctgtggccatgtgttcacaacagcagccattacaggtgtttcctgaactcttgtcgcgagcctctgtcggctccatctcatcgatcctcccagcaacccacaaggaa

SEQ ID NO: 883916 - DNA, 120 bp, Artificial Sequence
  ENSG00000236008_3 (sequence is synthesized)
ggactggacgggagtttcccagctggagttctctcggccaagctgcctgtgacatggggttggaggtgctccagagagtcatggccacccctggaggaagtgacttgtggctgactgctc

SEQ ID NO: 883917 - DNA, 120 bp, Artificial Sequence
  ENSG00000236008_4 (sequence is synthesized)
aaggggaagtcctgtggcagtggagtcgtcagcattaattcaaataaggtgagcaacaaggaataccgagaggaggtttccacaccatgaacaaacatggcaccaggatctggaagctcc

SEQ ID NO: 883918 - DNA, 120 bp, Artificial Sequence
  ENSG00000236008_5 (sequence is synthesized)
gggcttctccgtcttctagaattctgggagcctcacatggccccctccttggcgagtgtattaggctgtacttgtatttctgaaatacaaataaatacctgagactgggcaatttataaa

SEQ ID NO: 883919 - DNA, 120 bp, Artificial Sequence
  ENSG00000236008_6 (sequence is synthesized)
aggcagggaggccatgaggagtgcggtgcagagaggctgcctctcaggattcagcttctggaggagccgttcctgttctgttctgctctccattgccccgtcccactgactcttgacacc

SEQ ID NO: 883920 - DNA, 120 bp, Artificial Sequence
  ENSG00000236008_7 (sequence is synthesized)
ttctccatgtgcctctgtctgctacctggctagctgtctggctcacgaactccccgtgcagttaggaaatgtgtgcactgaaaaacctgcaaccctgtgcacaacagcgctggcctcgtc

SEQ ID NO: 883921 - DNA, 120 bp, Artificial Sequence
  ENSG00000236008_8 (sequence is synthesized)
tccccgaatgcaggcagggcttatgatgcagctctctgcaggcactctctagcacgttggtaggcacacaggaagctgtatttatatatgtgtgttgaatacataaattttaacgtggaa

SEQ ID NO: 883922 - DNA, 120 bp, Artificial Sequence
  ENSG00000236008_9 (sequence is synthesized)
ttccggaagtggaagaagtctcatgctcctttctcctgacacctgtggaaagctctacactgtccctggctgcatctctttgaatgctcccagggatgaggtgctcactcacaaaatagc

SEQ ID NO: 883923 - DNA, 120 bp, Artificial Sequence
  ENSG00000236008_10 (sequence is synthesized)
aatgtccctcctgggaaatgttgacggtgaaaacattatttatgtatggcagctgcattgtggctccctctcacgtttgccgcatggtcttcgtcatggacagaactttggggatctctc

SEQ ID NO: 883924 - DNA, 120 bp, Artificial Sequence
  ENSG00000236008_11 (sequence is synthesized)
gagtcgtcagcattaattcaaataaggctcactccagagaggaaaaagaagaccagaactgaaccaagcttgcccagtcatgcatcctaaaatatcaactggaaggcactctctgtccct

SEQ ID NO: 883925 - DNA, 120 bp, Artificial Sequence
  ENSG00000236008_12 (sequence is synthesized)
tggtgggcagtaggaaaggctaccgaaaggaagcatctagagagggaagaagcatttctccttctaggagaactgaccaaccttgtaaagtctgcatgctgaccctgatctcctgctcag

SEQ ID NO: 883926 - DNA, 120 bp, Artificial Sequence
  ENSG00000236008_13 (sequence is synthesized)
atacattcaagccctccatttttgtgtccccagtcttattctcccaaagagaatagtctcccaagctccatttttgtctagattagccaaaggtcaataccatttgtcttgtgcttttcc

SEQ ID NO: 883927 - DNA, 120 bp, Artificial Sequence
  ENSG00000236008_14 (sequence is synthesized)
ttctttgtctacatttaaattggagtcattgaaagtttacagagacttcaagttcaagttcaagttcaaccaccataacaatcactgcagtagcaattctcaataccaagctcccaagct

SEQ ID NO: 883928 - DNA, 120 bp, Artificial Sequence
  ENSG00000236008_15 (sequence is synthesized)
cccactgtgggccaaagcagggcactagatgctttagaaatgcactcttgtttaattctcaagtgtagaaaacctagcctgcctgacttaagcagtagggaatttattgggtcatgtaat

SEQ ID NO: 883929 - DNA, 120 bp, Artificial Sequence
  ENSG00000236008_16 (sequence is synthesized)
taaacagttttttagacccagctccctctatccaggctcaaagaaggttatcataattggtatctatctttccactgctctccatacttggtccatggacccatttttatgtcccatgta

SEQ ID NO: 883930 - DNA, 120 bp, Artificial Sequence
  ENSG00000236008_17 (sequence is synthesized)
tgctttcgtgttcctgatggattgaatcaagagtgaatgagctcctacttcgcgaaagcaaaacaaactaaacgcatcaaccacgaccgcagagcccccatctctcccaggagggtgagc

SEQ ID NO: 883931 - DNA, 120 bp, Artificial Sequence
  ENSG00000236008_18 (sequence is synthesized)
ccatgttgtgttttcatttgtcagaaatctatcttaggaagccattcctgagatctgttctaatttaggccatttttaaaaaaaataatgcagttgattcttttcccgtgatctttcttt

SEQ ID NO: 883932 - DNA, 120 bp, Artificial Sequence
  ENSG00000236008_19 (sequence is synthesized)
tctccatgacttaaatttccccaggaactattcaaatgccgcatctggggttttgtttttgttttttgatgaagtcatgactttctttaaacagtaattattaaacaaaccaaagggaaa

SEQ ID NO: 883933 - DNA, 120 bp, Artificial Sequence
  ENSG00000236008_20 (sequence is synthesized)
gaccatctgctaccggccccagcccagatgatacagttagagcctacccacagcatcctccccgccttcagacagttccaggaacagggggattctgaagggcccgcccttggcattggc

SEQ ID NO: 883934 - DNA, 120 bp, Artificial Sequence
  ENSG00000236008_21 (sequence is synthesized)
tgaaacgcggtgggagtattgaaaacgctggacctgtaactccacagagaagcgcctccccacctcaacaccagcactgttctcaatgtgtggtggcctctccctgcctgagagctggtc

SEQ ID NO: 883935 - DNA, 120 bp, Artificial Sequence
  ENSG00000236008_22 (sequence is synthesized)
attttggcttcagggagccgggcaccaggatctgtgctgggcacagcaagggaccacctggcctcgggagctaagggctctgtctccaggggtcccagtctggagaaggtgggtaaagca

SEQ ID NO: 883936 - DNA, 120 bp, Artificial Sequence
  ENSG00000236008_23 (sequence is synthesized)
aacaaggaagcctcctaataagaagttccctaatcagacatggactttgctgccaggagcacccagtggggccagcctggggcccagggagttttggatcctaaaatcaaccaaaagcag

SEQ ID NO: 883937 - DNA, 120 bp, Artificial Sequence
  ENSG00000236008_24 (sequence is synthesized)
aatctgaccactttccaaagcaatggtcctttagattgagaacaaaatcgtggaacagcgcttcatttttcccgtctcaagaagtcacaaggcccagaatgcaagaaaatcatggctttt

SEQ ID NO: 883938 - DNA, 120 bp, Artificial Sequence
  ENSG00000236008_25 (sequence is synthesized)
cgatgaccaggccttgttggaatggctgagaagctcctcagccccgaccaggtgcagtgactgcattcggctctcacggagcaggtctgagtggagccaggatttgctctgttcaaagat

SEQ ID NO: 883939 - DNA, 120 bp, Artificial Sequence
  ENSG00000236008_26 (sequence is synthesized)
atctcaatcctataggggcctgctccggggtgttttgcacgaggctccatgttaaataagcctccattcgagcgcagcctcaggacggccatccttcattcctctcagtcacacaccttc

SEQ ID NO: 883940 - DNA, 120 bp, Artificial Sequence
  ENSG00000236008_27 (sequence is synthesized)
cacttcaggatggccatccttcattcctcccagtcatgcaccttccactgcctggttctctgagcgcttccgtctagcgggagagacgccttcgaccaataattgcacataggtctggat

SEQ ID NO: 883941 - DNA, 120 bp, Artificial Sequence
  ENSG00000236008_28 (sequence is synthesized)
gatgcccagccacagtcactcctctaaaagcaaggaacttgcttctgcagagtcaaacggagctcacgtgaggttcctggaggcactgaggtttctttctagtctcctgttttgcacaga

SEQ ID NO: 883942 - DNA, 120 bp, Artificial Sequence
  ENSG00000236008_29 (sequence is synthesized)
cctttttcttactgagcaattcactatctgctggcttcggaagaggtggattgggtttcaggtgggggcaccaagaagcagccagatgtccaaatttggaggcaactcaggccacccaag

SEQ ID NO: 883943 - DNA, 120 bp, Artificial Sequence
  ENSG00000236008_30 (sequence is synthesized)
tgcctgcacaggaaaatgtatgcagctgccgtgccacatcaaaggcaggtggtccagggtgatccgggtgctattcgtggcacaggcaccaaagtactgtcatccgaagcatcctctatc

SEQ ID NO: 883944 - DNA, 120 bp, Artificial Sequence
  ENSG00000236008_31 (sequence is synthesized)
tcggtttcctcatctctaaaatggggctccatctaagttttctggttctgcaaaaactcctgagcaaaccacttcactagccaggaacctggtatgcctgccatgcctggggcaggcagg

SEQ ID NO: 883945 - DNA, 120 bp, Artificial Sequence
  ENSG00000236008_32 (sequence is synthesized)
gctttccaatttcctccccaaggttttctgagaattcatctgacagtgtctgtaaatgtccctccattctctttcatagaggaaatgctcacattagaagaaagtctcttatgaccagca

SEQ ID NO: 883946 - DNA, 120 bp, Artificial Sequence
  ENSG00000236008_33 (sequence is synthesized)
agggacacttcagctgagccctctgtgaaaacaccaacccctgcaggaggtggcaggcggaggggcccaggctgcactcaggctgtaggaagtttgtttctgtgtttgccctccccatgg

SEQ ID NO: 883947 - DNA, 120 bp, Artificial Sequence
  ENSG00000236008_34 (sequence is synthesized)
ggctcccagaagaggaacctgctgcaggcgccggcgcgggcggcgaggacgacctgtttttctgacccagcccggaagcgctggtgcaggtggccttgagcttccttttttcttctcgct

SEQ ID NO: 883948 - DNA, 120 bp, Artificial Sequence
  ENSG00000236008_35 (sequence is synthesized)
tgcgtgctggctcccagaagaggaacctgctgcaggcgccggcgcgggcggcgaggacgacctgtttttctgacccagcccggaagcgctggtgcaggccctgtgctgcaaggcgcccat

SEQ ID NO: 883949 - DNA, 120 bp, Artificial Sequence
  ENSG00000236008_36 (sequence is synthesized)
aggcgccgtgtcccttttgtcaaattgcggccgaggagcagagcatcggcatcacccggcagctggttagaatgcagctgctcaggccccgcccagacccatgagtcaaatctgcatttt

SEQ ID NO: 883950 - DNA, 120 bp, Artificial Sequence
  ENSG00000236008_37 (sequence is synthesized)
caccaaatccagcaggtgattcctgcacgtgtacgtctgctacctgcttccctggtcttcatcccctgcaatatgcagaaatgtttccatggagaattccagaagagttgacagcctggc

SEQ ID NO: 883951 - DNA, 120 bp, Artificial Sequence
  ENSG00000236008_38 (sequence is synthesized)
cacagggctgttcttgcgagattggaatttattcctaagccacacggggaagcctcttctcaggcttatgggaggcagcctggaagccactggtgaaatgtgagctgggagtgtgagcct

SEQ ID NO: 883952 - DNA, 120 bp, Artificial Sequence
  ENSG00000236008_39 (sequence is synthesized)
ctgtgcctccgctgacttctggaggcatctcggggagatacgtcactcctccaagattgctttctcctctgtaaaacagggataataaaaaaaaatctttctttctgggttgttgggaac

SEQ ID NO: 883953 - DNA, 120 bp, Artificial Sequence
  ENSG00000236008_40 (sequence is synthesized)
acaagcagatccacagcgtgtggagggcctgccctgagccaggtgtggctgcaccctcatgacaggcagaaggctgcgctggaggaagctggagctttggggctgggccccttatcacca

SEQ ID NO: 883954 - DNA, 120 bp, Artificial Sequence
  ENSG00000236008_41 (sequence is synthesized)
acgcagggacagtgcttgctgcacagactgtccctaggactaagtgaaattctgtgagcaaaacaccctgaaccgtagcgttatttttataacaatcggcttgtgtaactgccctgtgtg

SEQ ID NO: 883955 - DNA, 120 bp, Artificial Sequence
  ENSG00000236008_42 (sequence is synthesized)
cagtgccagcccttgactcatacccagagacaggtgggggcaggtggaggaagggaccactgttggctgaagcagtgtcttctagattgttcaaagaggcaccattcaccttagcgtact

SEQ ID NO: 883956 - DNA, 120 bp, Artificial Sequence
  ENSG00000236008_43 (sequence is synthesized)
caggcctagatttctgagagtccgtaagaaggtgcagaagttaatgtgccatgttgctaagtagatttctttttaaaaggtgttctcttctaaggtagcgacagatgtgagggttgctat

SEQ ID NO: 883957 - DNA, 120 bp, Artificial Sequence
  ENSG00000236008_44 (sequence is synthesized)
ggcaacaggtgtctgtttggagagcaccgcacaataggtgagatggctcaccaacaatttatggtcacggaaggtgagcttcctcccaggaaattttagtgacggatcaccttgctctgg

SEQ ID NO: 883958 - DNA, 120 bp, Artificial Sequence
  ENSG00000236008_45 (sequence is synthesized)
gtttacattttccgaagctggttttattttgtgccttgggagactgggcaggatggggaagcctttgtgtggattcagagcagactccgtgcgcagcagatggtcaaagggtcagagtct

SEQ ID NO: 883959 - DNA, 120 bp, Artificial Sequence
  ENSG00000236008_46 (sequence is synthesized)
tttcaagaattgaaggagattaaaaaagagccttgaaaaattcgatggtctaagatcctccgagaacatttcaccagcctgcaaatttctttgtagcaaacagcactgcaattttgcaga

SEQ ID NO: 883960 - DNA, 120 bp, Artificial Sequence
  ENSG00000236008_47 (sequence is synthesized)
gttaggagtagaatctgtagttggccacaactttattctttccatagaacaagtcttcaatgagtgcctcctgggtacattgaaggtcatgtgctggggaggggaccaaggtggcatggc

SEQ ID NO: 883961 - DNA, 120 bp, Artificial Sequence
  ENSG00000236008_48 (sequence is synthesized)
aggatatgaagatgaataagacctgggctctgcccttcagaagtcaaggtgggagagacagatggacataggccgattgtggagaggcttaagctgctatgaacgtatagctggggtgta

SEQ ID NO: 883962 - DNA, 120 bp, Artificial Sequence
  ENSG00000236008_49 (sequence is synthesized)
gtggatgaatttggaaaacttggctggggatcatggagcatcctcagtgtggggttgaggagtctgaactctctccctctggagacttttcttctgggaatgagatgtggtcagccaggc

SEQ ID NO: 883963 - DNA, 120 bp, Artificial Sequence
  ENSG00000236008_50 (sequence is synthesized)
ccatcgtggttagcaggtgagggcagcatgggagggagaggacaggcagggggctggaggactctgtcagggcaaaaggtgacggatgggcaccagtcctcagtcctgcatgccaagact

SEQ ID NO: 883964 - DNA, 120 bp, Artificial Sequence
  ENSG00000236008_51 (sequence is synthesized)
gtccaggtcccagctaacagcctgggctctgctggttccccaaagtcctgggagtttgctgtctcttctaggcctgggtcagggtggagaggtggttctctgcaatccccccagagggct

SEQ ID NO: 883965 - DNA, 120 bp, Artificial Sequence
  ENSG00000236008_52 (sequence is synthesized)
tccaatcttagccagaggggaaggccattggtgaagtgcctgggtcccgagttctgggccagagccctcttgtgcatctgccgggcacctttctcatcccagacattcttctcctggtgg

SEQ ID NO: 883966 - DNA, 120 bp, Artificial Sequence
  ENSG00000236008_53 (sequence is synthesized)
gttcctggaccccagtcagctctggccaggatcagattcccaggccttgctctctaaccaggctggcccatcctcgcctggagccactgcccagagacccagcatggcccgtggatgaac

SEQ ID NO: 883967 - DNA, 120 bp, Artificial Sequence
  ENSG00000236008_54 (sequence is synthesized)
cccagggatgtaagccttattggactgagataggagagccaggagtaggaacagaggaggatgtgtccagagcctgctggaaagagccgtcatccacaggagccccctggaagctctgct

SEQ ID NO: 883968 - DNA, 120 bp, Artificial Sequence
  ENSG00000236008_55 (sequence is synthesized)
gcagcacctggcaacctctggtgcaacagccacgtgactagacacaagctgaaccccagaacagggcagggagccagatgggcacctgagctgtggatcctcagccctgtctaaggagga

SEQ ID NO: 883969 - DNA, 120 bp, Artificial Sequence
  ENSG00000236008_56 (sequence is synthesized)
cacagatgagaccgcacgggaggccgggccagaggggctcttctcgccgtggattctgcaccctcctctgcttcctgcccatctgcacttggctgcaccagtggacagcgagccctggag

SEQ ID NO: 883970 - DNA, 120 bp, Artificial Sequence
  ENSG00000236008_57 (sequence is synthesized)
agccacggagcacccatctgttctgggcagggcatggtctcagcttgctccccgccttccccagccataaagtagagataaatcgtacctgcttgggctgcctcagttcacccagggggt

SEQ ID NO: 883971 - DNA, 120 bp, Artificial Sequence
  ENSG00000236008_58 (sequence is synthesized)
gatttaatgcaaaagatttgaaagctctaactaggattccactccatgggatttgaaggatgaaacaaaaacatttattttgttccagaacataaaactgatacatgttttcagcataca

SEQ ID NO: 883972 - DNA, 120 bp, Artificial Sequence
  ENSG00000236008_59 (sequence is synthesized)
atttggaaaatacacacaaaaaagagaagatagaacaacccattatgccagtgctcagatgcaaacgctgttcatattttgtaatattaactgccattcttttctctgtgtgtagacaca

SEQ ID NO: 883973 - DNA, 120 bp, Artificial Sequence
  ENSG00000236008_60 (sequence is synthesized)
catttctaccttttatttcctttggtccaaataggatcatagttcatgaacagctttgaaaacatttcttttccatttaacaacaccttagaaacatgttttcttatcaaaccttcggat

SEQ ID NO: 883974 - DNA, 120 bp, Artificial Sequence
  ENSG00000236008_61 (sequence is synthesized)
gtaacatcatttatgattgcctgtaatttcatcctatgtatgggtcccacattttgttcactgggtgtcttcaatgctcctttaggttgcttccaaattgtctctactgtgagcagtagt

SEQ ID NO: 883975 - DNA, 120 bp, Artificial Sequence
  ENSG00000236008_62 (sequence is synthesized)
gcaatgactggttttgctgtgtacctctgccttttgaactgtacagttgtaataggagatatcttagtgtaggcagagtcttcattctagggaaatgcatgcccaggtctccctgtcgcc

SEQ ID NO: 883976 - DNA, 120 bp, Artificial Sequence
  ENSG00000236008_63 (sequence is synthesized)
tcaggcccggcccacccatgcttcatgctgagcacgtgctggtctttgtcctggcattttccgcgctctgtgtctttgctttgatttttctgtgtctcttctgtcttaaatgtgaaaaaa

SEQ ID NO: 883977 - DNA, 120 bp, Artificial Sequence
  ENSG00000236008_64 (sequence is synthesized)
ggtgcccctgcttctgagaacagagagaaccaagtgacaggccccgaatttcctggtgcaccagtgaatggccacttcgcttgctgtccgtgagctgatcgtgaagctggatggttttta

SEQ ID NO: 883978 - DNA, 120 bp, Artificial Sequence
  ENSG00000236008_65 (sequence is synthesized)
acctgggccaagccatgggttgtccccgcctttgtcctgtgatgctttcttctcctgcgccagcactgagctcgtcttccagggcttgcctcccactgtggttctatctattccccagcg

SEQ ID NO: 883979 - DNA, 120 bp, Artificial Sequence
  ENSG00000236008_66 (sequence is synthesized)
tggccccaccccggcaatgccatttcctgcccagcattcaggactccatgaagcagaattgtagggtgcatgctggtgcctttgaggggcagccttgagtcttcccctgagagtgtcccc

SEQ ID NO: 883980 - DNA, 120 bp, Artificial Sequence
  ENSG00000236008_67 (sequence is synthesized)
accaggcagagggaaggaacaggaaccactgttcacttgatatctgttaggacctaggtcctggcctgggcactcacctgccctcagattcgggctgccttgtcacactgcggtcagaga

SEQ ID NO: 883981 - DNA, 120 bp, Artificial Sequence
  ENSG00000236008_68 (sequence is synthesized)
tgtgtcaggtggaccataggatgatgtgtcagcaatttctaacccacagatctagacccagcagccccctccaacaggtttgggaggcaagtcacccagcacacaactcagctcagacag

SEQ ID NO: 883982 - DNA, 120 bp, Artificial Sequence
  ENSG00000236008_69 (sequence is synthesized)
acttggtttggatgacaatggtgggaaccatcacacagccagctgcatgaggccagcaggcaaacttctctagtccacgggccggactggctatgcaggttcagcaaaatcccaaatccc

SEQ ID NO: 883983 - DNA, 120 bp, Artificial Sequence
  ENSG00000236008_70 (sequence is synthesized)
gctctctggagcagactcccattaaccctgtgcacagtactgatatatatggcagatgtcagcttattattactgttagtattctaccattttattgaggcctgactgacatatgaaggc

SEQ ID NO: 883984 - DNA, 120 bp, Artificial Sequence
  ENSG00000236008_71 (sequence is synthesized)
tgtccatatttaatgtatacaacttgatgagtttggagctaagcatacctctgtcaaaccataaccacaatctacactgtaaacatttccactgtttccaagagtgttctcctcccttct

SEQ ID NO: 883985 - DNA, 89 bp, Artificial Sequence
  ENSG00000236008_72 (sequence is synthesized)
aaacatttccactgtttccaagagtgttctcctcccttctttgcttattgtatcatgttaaatatttttttgtgacaaggctgggcaag

SEQ ID NO: 883986 - DNA, 74 bp, Artificial Sequence
  ENSG00000236008_73 (sequence is synthesized)
cactgctaaattttgtgacaagaacacttaacatagatctatatttttagtgaacatttaaatagacagtactg

SEQ ID NO: 883987 - DNA, 120 bp, Artificial Sequence
  ENSG00000236008_74 (sequence is synthesized)
agatctatatttttagtgaacatttaaatagacagtactgaacgatgttgataatgcaatactgaacaatatgagatactgaacgatattgataatgacaggcactagactgtacagtag

SEQ ID NO: 883988 - DNA, 120 bp, Artificial Sequence
  ENSG00000236008_75 (sequence is synthesized)
acctctaggtcttatccgccacacataactgaaacttggtgccctttgaccaacccctccctgtttccctgtcccccggtccctggcaaccaccatgctactttctgcttctatgagttg

SEQ ID NO: 883989 - DNA, 120 bp, Artificial Sequence
  ENSG00000236008_76 (sequence is synthesized)
gactatttcattcatagattttttccgcttactgagttatcattgacaaatattgtataaatttcaggtgcacaacatgatgtttgatacatgtatacattgtgcaagggttaccacaat

SEQ ID NO: 883990 - DNA, 120 bp, Artificial Sequence
  ENSG00000236008_77 (sequence is synthesized)
ctaatttacttatccatcaccttatatagttaacttgtgtgtgtatgtggagacaacttagggtctacttactatcttagcaaatctcacgtatacaatacattaactctaatcaccatg

SEQ ID NO: 883991 - DNA, 120 bp, Artificial Sequence
  ENSG00000236008_78 (sequence is synthesized)
ctgtacatcagctctctagaacttattcattctgcataactgaaactttgcatgctttggccaacatctccccatttccctctccttccagcccctggtaaccaccatcccactctctgc

SEQ ID NO: 883992 - DNA, 120 bp, Artificial Sequence
  ENSG00000236008_79 (sequence is synthesized)
ttcatttctggcttattgcacttagcataatatccttcaggttcatccatgttgtcccaaatgataggatttccttcctttgtaaggatgaataacattccctgctgtgcatatgtgtgt

SEQ ID NO: 883993 - DNA, 120 bp, Artificial Sequence
  ENSG00000236008_80 (sequence is synthesized)
ctatcaactcttccttatccactcatccatctgtggacactgaggttgtttccatgtctctgccatcgtgaataatgctatagtgaacatgggagtacacatatctcttcaagaccctga

SEQ ID NO: 883994 - DNA, 120 bp, Artificial Sequence
  ENSG00000236008_81 (sequence is synthesized)
tttcaaatcctttgaatgtatatccacaagtgggataagtggatcctgtggtatttctatttttaactttttgaggaaccgccatactgttttccacagaggctacaccaatttgccttc

SEQ ID NO: 883995 - DNA, 120 bp, Artificial Sequence
  ENSG00000236008_82 (sequence is synthesized)
ctgcctacagtaacaagggctctttcttttccatatccttgccaatacaaccttttttttttttttggtaattgccatcttaacaggtgtgaggtgatatctcactgtagctttgcattt

SEQ ID NO: 883996 - DNA, 120 bp, Artificial Sequence
  ENSG00000236008_83 (sequence is synthesized)
ccttgattattggtgatggtgggcactctcatatacctgttggtcatttgtatatcgtctttggagaaatgtctactcagataacttgcctatttttaaattgggttatttttgcaatct

SEQ ID NO: 883997 - DNA, 120 bp, Artificial Sequence
  ENSG00000236008_84 (sequence is synthesized)
tgtaccctaaaacttaaagtataataaactgggttatttattttgctattgagctgtaggcgttccttatatattttagatattaacccccattatcaaatatatggtttgcaaatattt

SEQ ID NO: 883998 - DNA, 120 bp, Artificial Sequence
  ENSG00000236008_85 (sequence is synthesized)
tattaacccccattatcaaatatatggtttgcaaatattttctcccgttttttaggttgctttttcatcttggttatggcttcctttgtggtgcagaagcctttcagtttgacacaatcc

SEQ ID NO: 883999 - DNA, 120 bp, Artificial Sequence
  ENSG00000236008_86 (sequence is synthesized)
cacttgtctaattttaagtcttgctctatttttgttggtctgtagtgttgtttaagtctgttgtttcctcactgattttctgtctgaatgatccatctattattgatagtattgaattat

SEQ ID NO: 884000 - DNA, 68 bp, Artificial Sequence
  ENSG00000236008_87 (sequence is synthesized)
ggcaatagtgagacttcatctcgaaaaaaaaaatttgtacatgtttactttataactttagctgctat

SEQ ID NO: 884001 - DNA, 120 bp, Artificial Sequence
  ENSG00000236008_88 (sequence is synthesized)
aaaaatttgtacatgtttactttataactttagctgctatgatgttgggtgcatatacatttataattgctatatcttcttgttgaattgacccttttatcattatgtaatgaccttctc

SEQ ID NO: 884002 - DNA, 120 bp, Artificial Sequence
  ENSG00000236008_89 (sequence is synthesized)
tgtcccttatgacagtttttgacttaatgtccattttctgtgatataattatagctaccctgctttcttttgcttaccatttacatggaatatcttttttccatcccttcactttcagct

SEQ ID NO: 884003 - DNA, 120 bp, Artificial Sequence
  ENSG00000236008_90 (sequence is synthesized)
tctgtatgtccttaaatctaaaatgaatctcctatagatagtatatagttggatcttgttttttatatatatatccaggctatatcttctggttagtgaatttaatccatttatattaaa

SEQ ID NO: 884004 - DNA, 120 bp, Artificial Sequence
  ENSG00000236008_91 (sequence is synthesized)
gtaattatttatagctaagtacttactatgaccattttaaaaattgttttctgttttgtagtacttttgattctttcttcctctcttgtatatcttggtgatttgatgatttttttggtc

SEQ ID NO: 884005 - DNA, 120 bp, Artificial Sequence
  ENSG00000236008_92 (sequence is synthesized)
atgatatactcaatgattatattatctttatggtatctaccacaggtttttttcttgtggttatcatgaggtttgcataacattttttatagttataatagtctgttttaagctgataac

SEQ ID NO: 884006 - DNA, 120 bp, Artificial Sequence
  ENSG00000236008_93 (sequence is synthesized)
aacttcaattacatacaaacgctgtacacttttactgctcccctccttcactttatgctattgatgtcaaaatttaatttatattgtgcattcattaataaatgtttatggttatagcta

SEQ ID NO: 884007 - DNA, 120 bp, Artificial Sequence
  ENSG00000236008_94 (sequence is synthesized)
tggagtcgtcagcattaattcaaataagccccagccggagttctgcctcatgccacacgtgggtccattcccgcggagtctggactctgggttaagagagatctctccctgcacacaatc

SEQ ID NO: 884008 - DNA, 120 bp, Artificial Sequence
  ENSG00000236008_95 (sequence is synthesized)
tccagagcggggcacttgagatgttcaaagtgcttcctgagagacggccaaagggtgttccctgggtggcctgggagtccaagagacatgtactctggggcaggaagagggcaggtgcta

SEQ ID NO: 884009 - DNA, 120 bp, Artificial Sequence
  ENSG00000236008_96 (sequence is synthesized)
cggaggaggtgctgtcagcgcaggctgagggctgctctccaagcaaagagcctcctcttttgggaaccgagtccctcatttggactcgggatccataggagactggaacctggactgcag

SEQ ID NO: 884010 - DNA, 120 bp, Artificial Sequence
  ENSG00000236008_97 (sequence is synthesized)
tcccttcgggggccgtggctggtgcctgctgcggggtcattgcgtgacgcgagcaccgcagcatctcaggtgcacgcgcccttcgatggccctgaggtgcccgggagcaggcgagggccg

SEQ ID NO: 884011 - DNA, 120 bp, Artificial Sequence
  ENSG00000236008_98 (sequence is synthesized)
agtcttaacagctccacttcctgtccccgagtctatctgccactgctctgtagagtcctacagtttatctgtggtcagttttcttacccatttcctgccagctgctactggttttttagt

SEQ ID NO: 884012 - DNA, 120 bp, Artificial Sequence
  ENSG00000236008_99 (sequence is synthesized)
cagctctgacagctacggtaattgggaaaggacgcaggctgctggggccgggtgattcaccagctctggccaacagggacaaggagcacagacggaggcaccccgtcggtcccccagggc

SEQ ID NO: 884013 - DNA, 120 bp, Artificial Sequence
  ENSG00000236008_100 (sequence is synthesized)
ctggtcccccaggcttcaatgagtgagacacagaaaagacccaggggcacactcattgtgaaccgaaagctgatctctgtgcacgcgcgcgtgcatgtgacataagggaatttttttttt

SEQ ID NO: 884014 - DNA, 120 bp, Artificial Sequence
  ENSG00000233038_0 (sequence is synthesized)
agaacagacaggacgtttcacagagcaggctgccatgtccctcggggccttgggggctgctgaggccctgagaaagaacagaaatgggtgcccagctggtcaacatacatttgttacctt

SEQ ID NO: 884015 - DNA, 120 bp, Artificial Sequence
  ENSG00000233038_1 (sequence is synthesized)
gctttaaaatgccttgagagtggaaccaccggtgcaggcttggctggtcaagaatcatgttctagaaattatttccagtgctgagcacagtccctgagatttaaaaacgcttatgggatg

SEQ ID NO: 884016 - DNA, 120 bp, Artificial Sequence
  ENSG00000233038_2 (sequence is synthesized)
acagacccagctccgggaagcacaagcctggtggtgtgcgggaagcggcgaggtgcgcgggaagcggcgaggtgtgcgggaagcggcgaggaccggctttaaagtcacagcagtttcctg

SEQ ID NO: 884017 - DNA, 120 bp, Artificial Sequence
  ENSG00000233038_3 (sequence is synthesized)
aaagatgagggggaggaggacagtgacgctcacagcacagccacttgtcaacttggacatgacacacacaaagcccagagctcggacggcaccgcgaggaggctgggattcacgtcaggc

SEQ ID NO: 884018 - DNA, 120 bp, Artificial Sequence
  ENSG00000233038_4 (sequence is synthesized)
agacggaagcagcagcattccgcttgcaggtttttgaaaaaacaaatggggcaagagaggccaggaccacgcctgactcaggcgatcggacgggcagggaggctgcaaggcatggcatga

SEQ ID NO: 884019 - DNA, 120 bp, Artificial Sequence
  ENSG00000233038_5 (sequence is synthesized)
gcaggtggagctgtcaggactgccccagcccctggctcaaagatgcccgaccccaggaccctgcctcgctggatggtgaaggccaacttcccctctgttggagctggcctgggcgttgtg

SEQ ID NO: 884020 - DNA, 120 bp, Artificial Sequence
  ENSG00000233038_6 (sequence is synthesized)
ggaagggctgggaggaggcccaggacaatgcagaacagacaggacgtttcacagagcaggctgccatgtccctcggggccttgggggctgctgaggccctgagaaaggtcactggaggcc

SEQ ID NO: 884021 - DNA, 120 bp, Artificial Sequence
  ENSG00000233038_7 (sequence is synthesized)
tggccggaagtgcagggttatctcagtacttgatttaaggctcctgcagctgaaaagctgccccacacggcggaccgggtggaggaagtcagctgtgctgcttaaccgtggagtctccgt

SEQ ID NO: 884022 - DNA, 120 bp, Artificial Sequence
  ENSG00000233038_8 (sequence is synthesized)
tcctccctgcctgattctcggcaccatttttaacacgcctatggagaggccacgttgagtccagaggtccgtgcgcctcatggccacatcacggcacccgttcacccacacaagggccag

SEQ ID NO: 884023 - DNA, 120 bp, Artificial Sequence
  ENSG00000233038_9 (sequence is synthesized)
gagcatcccctagggaggaggagatggcagatctgcacaggctctgcgctcctctctctccggagcgtcctctcctctgtgtggcaggctcggcgcgtgatggaggagccccttctgcag

SEQ ID NO: 884024 - DNA, 120 bp, Artificial Sequence
  ENSG00000233038_10 (sequence is synthesized)
ggctctgtttagagggtgcccgccccacagcctgtggctgctcctactcatgccaggtgaggctcctacacccaccagtggccaccggggagtcacagctccttctgcatcatccgcctg

SEQ ID NO: 884025 - DNA, 120 bp, Artificial Sequence
  ENSG00000233038_11 (sequence is synthesized)
acctgtttcctcatctgggatgacaaccagatccagctctgaggtccgtgccctgagtagaaaagttcacacagcaaagtttccggagccttccctgacgcgccacgtgtccgtccataa

SEQ ID NO: 884026 - DNA, 120 bp, Artificial Sequence
  ENSG00000233038_12 (sequence is synthesized)
ctggtcatcctccacatcctgtgaggcacgtctcagcacctcttcgtgcaagcgcccgcactagacgtttgagaaacagatgtgagcaggcgtggtcctgacctccatcccgaggttggg

SEQ ID NO: 884027 - DNA, 66 bp, Artificial Sequence
  ENSG00000267939_0 (sequence is synthesized)
gaaaccaagtgatttccatgtcaagtggtgaacaggctaagaagaaaaacagagtctcgctgcatc

SEQ ID NO: 884028 - DNA, 120 bp, Artificial Sequence
  ENSG00000267939_1 (sequence is synthesized)
acaggcatgagccaccttgcctggcctcttcctaatgattttttaaagtacatcttgttttctctgtcttactttatcataaaaatatatgatacaaataaaatacagaatatgtgttaa

SEQ ID NO: 884029 - DNA, 66 bp, Artificial Sequence
  ENSG00000264365_0 (sequence is synthesized)
tgtggaggcacgtgcctatagctccagtatttgggggactgaggcaggaggatcacttgaacctgg

SEQ ID NO: 884030 - DNA, 67 bp, Artificial Sequence
  ENSG00000264365_1 (sequence is synthesized)
gggccttgtcttgattaaaaaaaaaaaaaaaaaaatccatacaccttcactctactttagaagcagt

SEQ ID NO: 884031 - DNA, 120 bp, Artificial Sequence
  ENSG00000264365_2 (sequence is synthesized)
tcctttatcaatttaataagttttgaggaaaaaagatgccattatttaaatgtacagatgaattgtaagatgcaagcaaatttcagaactatcagaatgtgagaagttattcatcataga

SEQ ID NO: 884032 - DNA, 120 bp, Artificial Sequence
  ENSG00000264365_3 (sequence is synthesized)
attaagaaatatgagctctcaattctctttaaatacagtgctaagagattgtgacattgttttttctttttaatttttatttgtgtattgacattattttttaattatttagggtgtgct

SEQ ID NO: 884033 - DNA, 120 bp, Artificial Sequence
  ENSG00000267934_0 (sequence is synthesized)
catctcctcctccttcttctgctcccgattctcctcctctcctttctcttcgtcttctcctcttccttgtcccctcctcctccttgtccatctcctctactcctccttctcctcctcctc

SEQ ID NO: 884034 - DNA, 120 bp, Artificial Sequence
  ENSG00000267934_1 (sequence is synthesized)
cttctcttcctttcctcctttcctctttttctcatcctctcctcctcctctcgtcctcttctcttttcctcattcttttcttcttctcctccttttttctccctacttcctcctagcttc

SEQ ID NO: 884035 - DNA, 120 bp, Artificial Sequence
  ENSG00000267934_2 (sequence is synthesized)
ccttttctcctctcctctcctggtcctgttgtccccctctcctttttttctccacttcctctcttcttactatcttcttctcattttctcttctagttcttctctttcctcctccttttc

SEQ ID NO: 884036 - DNA, 120 bp, Artificial Sequence
  ENSG00000267934_3 (sequence is synthesized)
ttctcttctcctcctcctctttcttcactcctccactcctactccttctcttactgtgccactggccatgccaaacagcacccagcacaagtagtggcaccctcttcagcgctgcgctag

SEQ ID NO: 884037 - DNA, 120 bp, Artificial Sequence
  ENSG00000267934_4 (sequence is synthesized)
aaagaactgatgtgcatttatattagcttttggaggatagtactaatccggcctaactcaggcggccaagtatatatatatatatacgtatatacatatgtatgtatatacgtatgtata

SEQ ID NO: 884038 - DNA, 120 bp, Artificial Sequence
  ENSG00000267934_5 (sequence is synthesized)
catatatatatacacatatatatttatagatatattctatgagaaataatcttgctctgtcacctaggctgcagtgcagtggcacaagattatgactcactgtagcctcaagagatcctc

SEQ ID NO: 884039 - DNA, 120 bp, Artificial Sequence
  ENSG00000267934_6 (sequence is synthesized)
cccgagtagctgggactacaggcgtggcccatcacacctgactaaattcttttttagtgacggggtctcaacacgttgcctagtctggtctgaaacttctgggcgcaagctctctaatgt

SEQ ID NO: 884040 - DNA, 120 bp, Artificial Sequence
  ENSG00000267934_7 (sequence is synthesized)
gctctctaatgtttttgcattcatagtctcccttattttaatttctcaagtttttgcaaaattgttacataactatccgcccttttcatagagcgctgtttcttgagccaggtcttctgt

SEQ ID NO: 884041 - DNA, 120 bp, Artificial Sequence
  ENSG00000267934_8 (sequence is synthesized)
ccatgcatgtcctcttgagagagtggatgtcagccagctaccctggctgagagggatggggataatacagggatgcaataaaggagacagtgataatttatatgatctgggaccccaggc

SEQ ID NO: 884042 - DNA, 120 bp, Artificial Sequence
  ENSG00000267934_9 (sequence is synthesized)
ctcacaccagaactgtctagtatacttttagcaaacaagtgccactgatctgagccttgttctgcccttccactttccactttattacacaagcaggagataggcaagggagaaggcagg

SEQ ID NO: 884043 - DNA, 120 bp, Artificial Sequence
  ENSG00000267934_10 (sequence is synthesized)
atgatgaggagactaaattccagaaaagaaagggctgcgtgcagtaagcagacagttgcccccaaagtggtctgggctcccacttaccttagagacatgtgcaacacttgtgaatagttg

SEQ ID NO: 884044 - DNA, 120 bp, Artificial Sequence
  ENSG00000267934_11 (sequence is synthesized)
ttttacaattcttaaatcagtggacagactgtaagcatcccattggtgtcagttgccaggtgcccaatgcctgttctctgcagcaacctttgtggtcccatacctgggcgtgagttctgt

SEQ ID NO: 884045 - DNA, 120 bp, Artificial Sequence
  ENSG00000267934_12 (sequence is synthesized)
tcctgcagagtgccctgtgcattctggtgcttttgtgccctctcctctaacctataaactgacaactctaactctatattttcacttacaatttttctgaagcagtgatcttttgtcatc

SEQ ID NO: 884046 - DNA, 120 bp, Artificial Sequence
  ENSG00000267934_13 (sequence is synthesized)
ttgatcacactacaagtcgctcaccctgcaagtacttgtaaaaatgaaagtaatctccattccttctggaaggtgattgccatgtacacaacctactaggccaggaacattactgatggc

SEQ ID NO: 884047 - DNA, 120 bp, Artificial Sequence
  ENSG00000267934_14 (sequence is synthesized)
tgtcctgatgcatgtctctctcacccccatgtccaatcagtcaccaggctctccccaaaaccatgctccggtcactgactttggctgtttaatcacttctgacctaaggtcctcattgag

SEQ ID NO: 884048 - DNA, 120 bp, Artificial Sequence
  ENSG00000267934_15 (sequence is synthesized)
tcataagtacctcttgagttaattttctgcctccagtttctctctactgctgtttatcttccaccctgctgccagagtcatcatcctcaaaaatgaaagctgctctcattgtttgcctgc

SEQ ID NO: 884049 - DNA, 120 bp, Artificial Sequence
  ENSG00000267934_16 (sequence is synthesized)
ctaataacatctcttccctccctgttgtctacaaaaagaaaaatccaaactccttcacttgttttacaaagaccctcatctgcttccaaaccaaattgctagtcttggctcttgtctctg

SEQ ID NO: 884050 - DNA, 120 bp, Artificial Sequence
  ENSG00000267934_17 (sequence is synthesized)
tcttccacatcactgccacactgaataattctttactgcctctgttgttgcacgggttgttctttttgttttgtctccatccccttcccccagcaaagaatatttactctttactcttct

SEQ ID NO: 884051 - DNA, 120 bp, Artificial Sequence
  ENSG00000267934_18 (sequence is synthesized)
gttgagacccatctcaaatactaccttttctagggaaaattaggccttctgttcctaataacttttacccccatctatcaagtctgtctgctgtaatttatctgttaacatgtttctccc

SEQ ID NO: 884052 - DNA, 120 bp, Artificial Sequence
  ENSG00000267934_19 (sequence is synthesized)
acctcaagaatattttttccatcttctgtacctagcacaattgcatggttggtgctcactgactactacatgttgatttatttattttacttgtttgagaggtggagtcttgctctgtta

SEQ ID NO: 884053 - DNA, 81 bp, Artificial Sequence
  ENSG00000267934_20 (sequence is synthesized)
tttattttacttgtttgagaggtggagtcttgctctgttatccaggctggtgtgcagtgatacaatcttggctcactgcag

SEQ ID NO: 884054 - DNA, 120 bp, Artificial Sequence
  ENSG00000267934_21 (sequence is synthesized)
ctggcaaaatgctgggattacaggcataagacaccatgcctggacttgcatgctgatttccgatataaaaatgaaatttttgaagattttggagaataccatcatgtaaattggaagcta

SEQ ID NO: 884055 - DNA, 120 bp, Artificial Sequence
  ENSG00000267934_22 (sequence is synthesized)
aggcctaactattactacacattcagcaaaggaagtgggtataaactaacaactttggcacatctgtcatgcagtagtttgctgcaaggtggaaaagattttggtgctttggtgggaaat

SEQ ID NO: 884056 - DNA, 120 bp, Artificial Sequence
  ENSG00000267934_23 (sequence is synthesized)
actgttgaattacagaaattctaaaacaaaagctggctcagcttaaagagaaaagaaaatgcttgctaatgcctgcttgcactaaaagctgtcacactgtggcctttaataattctaaac

SEQ ID NO: 884057 - DNA, 120 bp, Artificial Sequence
  ENSG00000267934_24 (sequence is synthesized)
atttttaatggattttggtttgaacttcaaattcaataggaaaaataaatgcacagataaaggacccagatcatttcagagctccaatgtgtgaacccgttttctctacttatttagagt

SEQ ID NO: 884058 - DNA, 120 bp, Artificial Sequence
  ENSG00000267934_25 (sequence is synthesized)
tttgtttcactagtggcatgagttaataggagtgttgctttgtacataaattctctttattccataattcttggttttaaaaattgaatgcaataccagaaacctacagggtataaatct

SEQ ID NO: 884059 - DNA, 120 bp, Artificial Sequence
  ENSG00000267934_26 (sequence is synthesized)
tgcttgatgtgtgtgcaatgtacatacttgataataattgattatatatcatatttataaaaagaatcatgtgtactgttttaggagaacatactttaccctgatactttattgttaaaa

SEQ ID NO: 884060 - DNA, 120 bp, Artificial Sequence
  ENSG00000267934_27 (sequence is synthesized)
acaacaaagcattgttctaactactaaaaatcaaaaatttaactttcttttaaaagaggtacatgtatcttcagaaataaaagggatacccagaagataaggtaggtgttctgaaacacg

SEQ ID NO: 884061 - DNA, 120 bp, Artificial Sequence
  ENSG00000267934_28 (sequence is synthesized)
aggtgaaacatttgaatgggttttttttgtcaaacaataaatttttaacaaagaaaaagtttgcattatgggtgaagtatccttagtatctttatacaagatgaaatcctgattgattaa

SEQ ID NO: 884062 - DNA, 120 bp, Artificial Sequence
  ENSG00000267934_29 (sequence is synthesized)
agatacgttactaactttaaatgtcttttaataagtgcttacatgctaactagtatttagactcatacctggcagatacatttagacataagattctaacttagtttcatttctgaggag

SEQ ID NO: 884063 - DNA, 120 bp, Artificial Sequence
  ENSG00000267934_30 (sequence is synthesized)
gcttgtgtattttcctctgtgatacagaaaatagatttttttaagccattttatcttttactttagagttttaattgtttgttaagtggtttataatggtttaattaacaacccgaacag

SEQ ID NO: 884064 - DNA, 120 bp, Artificial Sequence
  ENSG00000267934_31 (sequence is synthesized)
gttttctgtgatttggttggttaaatctatatgtatttggttaaaatattctacgtcaaagttttaaaccaagagtaacttaaaggagtcttaacttgtgtttctctgaatttgatttgt

SEQ ID NO: 884065 - DNA, 120 bp, Artificial Sequence
  ENSG00000267934_32 (sequence is synthesized)
gtttaaattatgaaattaagttttcaaagaacgatttttgtgttcaaaagcttaaggtttcacaacttaattttcctaagtacaatttttttctatcggacttagcctccttttagaaga

SEQ ID NO: 884066 - DNA, 120 bp, Artificial Sequence
  ENSG00000267934_33 (sequence is synthesized)
cagttttttactaccaaatttaccattcccatttttttttttacttttacagatctgtatttagtccataaatatccaaatatctgcttgtgaaggttctgtctttaccaccaagcctac

SEQ ID NO: 884067 - DNA, 120 bp, Artificial Sequence
  ENSG00000267934_34 (sequence is synthesized)
cggtatggcaaagacatacagttgctaatctcattaaagatagatcacaatgagagagactcatctagccatgaacaggtcacttctatcagtgttaactgctcaaagttaagtatgaca

SEQ ID NO: 884068 - DNA, 120 bp, Artificial Sequence
  ENSG00000267934_35 (sequence is synthesized)
agaagctatgaagtaaagtttggcctttgtgtatgggagaggaatggaggatgccaggatgcaggtcaaggaaggcatcctgtggaagtaacatttgagctaatatctgaaggatgtgtg

SEQ ID NO: 884069 - DNA, 120 bp, Artificial Sequence
  ENSG00000267934_36 (sequence is synthesized)
atagaaggaaaaagaatgcttcagagaacagctggtacaaaagccctgaggttgaaaaggtggatgtgtcagggaaatgggggaagtacagtgtctggaagaagaaaagacactgaatga

SEQ ID NO: 884070 - DNA, 120 bp, Artificial Sequence
  ENSG00000267934_37 (sequence is synthesized)
ggtgaatgacaggaatgatgaagtagataggggctagagcagattgtaagaactctggaaagctttgaaaactgttgggccaaaaagtagtatgatgaaatttgcatgctaaggactatt

SEQ ID NO: 884071 - DNA, 120 bp, Artificial Sequence
  ENSG00000267934_38 (sequence is synthesized)
tttacccaagtagtaaatagaccaggtagaaggaaataatgattggccttctgtttggaagatcagttagaaggctagtttatgaaaactttgaaaagcagtgatggcctgcagcatcgt

SEQ ID NO: 884072 - DNA, 120 bp, Artificial Sequence
  ENSG00000267934_39 (sequence is synthesized)
gacagtaaagatgggagctcaaatggatttgataaaggtttaagaggtaagagaggcttgctgattggatggtgtggggaagggatagataacttcctgatcttggattttatagctggg

SEQ ID NO: 884073 - DNA, 120 bp, Artificial Sequence
  ENSG00000267934_40 (sequence is synthesized)
tggatggtggtgcctcattgagactggaatgctggattaagcaatgtatatgaacagggcatgttccctaccctttaaagagttatgtatatgttttccatgtttttagctatttctcca

SEQ ID NO: 884074 - DNA, 120 bp, Artificial Sequence
  ENSG00000267934_41 (sequence is synthesized)
cttgtaatgtgttttagttggttaaaaattatgtacctggcatggatgacgcattaaatgtacttatgtaactgataaaccaatgttacattcttgaaaataaattacattctatgaaaa

SEQ ID NO: 884075 - DNA, 120 bp, Artificial Sequence
  ENSG00000228830_0 (sequence is synthesized)
aaattatacagccatgtttatgaagtctacatttcccttgtcttggatatatatatatatggagatatatatacaattcaagcagttttaattaagggtaatcattgggtttttctgaaa

SEQ ID NO: 884076 - DNA, 120 bp, Artificial Sequence
  ENSG00000228830_1 (sequence is synthesized)
ccggaaaagtcacgagtctctctcttttttcactttcacatctccagcaaggatggttgcaatttccccttgcataaaggcccaggggacattggagcccacaagagggcatttttcccc

SEQ ID NO: 884077 - DNA, 120 bp, Artificial Sequence
  ENSG00000228830_2 (sequence is synthesized)
ctgcacaaaatgggtgtcctccagccgctcgtggcagagggtgcagcacagcggggcactggttgccagagaggagtccgggaggctggcagggtgcactggctccagtcctcctgtgtt

SEQ ID NO: 884078 - DNA, 120 bp, Artificial Sequence
  ENSG00000228830_3 (sequence is synthesized)
gcctgctccctggccccccacctctctggggcccagccttctttggttcatagaggacggagagggcggactgttgctattcctcctggtagtggagtgaacctggttggcatcttttga

SEQ ID NO: 884079 - DNA, 120 bp, Artificial Sequence
  ENSG00000228830_4 (sequence is synthesized)
ggcatgactgccccctgcattgtctgctactaagatcagggctgccatgggggactgggcatgcggggcaggtcacacaggtagcacgactgccgccgggacgcggccgccaccgccacc

SEQ ID NO: 884080 - DNA, 120 bp, Artificial Sequence
  ENSG00000234899_0 (sequence is synthesized)
aatattccccgtgtcacttagacctgcatggtgaggatttaattcagaaccttccctgagctgtagattggctttgcaggaatgtcccctcttggcctcctgcagtcctaacctcttggt

SEQ ID NO: 884081 - DNA, 120 bp, Artificial Sequence
  ENSG00000234899_1 (sequence is synthesized)
tagcactgtgtcattacagcctatagtggaaatcaagtcctcctgtgggtctgaagttgggtgtgtagttgggtattggtctttcccgtgggtcaaacatttgttaagtgcctactgtgt

SEQ ID NO: 884082 - DNA, 120 bp, Artificial Sequence
  ENSG00000234899_2 (sequence is synthesized)
actaggcactcgacagtcacgtaatgctgtgtaccttatgtctatcaacctgcattcacaacaactctgtgtggtaggtgtcattggatctgctgtacagatgccatcttcagtagcttg

SEQ ID NO: 884083 - DNA, 120 bp, Artificial Sequence
  ENSG00000234899_3 (sequence is synthesized)
actatggtcaccagacaaggtcagcctggaagacctcctgtgcagtgtcttcctttacacaaaggctccaaaatagcagaactttaatcttgagcatgcatttttccatctagttgcagc

SEQ ID NO: 884084 - DNA, 120 bp, Artificial Sequence
  ENSG00000234899_4 (sequence is synthesized)
ttagtctggaaaaataggtcatacccagaggtgatgggtccacttgaagatttttattttggtcatttatcacatattagcaactgagttctattcagatacaggtaatataatttcatt

SEQ ID NO: 884085 - DNA, 120 bp, Artificial Sequence
  ENSG00000234899_5 (sequence is synthesized)
actttttaatgactgatatggtttggctctgggtctccacccaaatctcatgttgaattgtaacgttgggagagggatccagtgagaggtgattggattacgggggcagacttttccctt

SEQ ID NO: 884086 - DNA, 120 bp, Artificial Sequence
  ENSG00000234899_6 (sequence is synthesized)
gctgttcttgtgatagtgagtgtgttctcacaagatctggttgttttaaaagtgtatatcacttcccttttcactccctctctcctgctgtgccatgtgaagattgtgcctgcttccctt

SEQ ID NO: 884087 - DNA, 120 bp, Artificial Sequence
  ENSG00000234899_7 (sequence is synthesized)
ggggtgctgcggggaaggcgggggacccgggacttccaagtgtccaaaaacaatccattgatacacttggtgacattaattgagaaaaaaacaatatggtctggccatggaggcatggta

SEQ ID NO: 884088 - DNA, 120 bp, Artificial Sequence
  ENSG00000234899_8 (sequence is synthesized)
tccgtaacatcccccaaaggagctaaagaagaaatccacaatttaccatgagcatttctcgtctgaagattgccaagcgattcctccaggacattcctcaagatcaatttctgttcatcc

SEQ ID NO: 884089 - DNA, 120 bp, Artificial Sequence
  ENSG00000234899_9 (sequence is synthesized)
accttgtcctgggagggacatcaatgggtttccatgtcctttggcttctggttgagttcactcagtggagaaccctggcaagaggcaggaaaaggggaggaaggtgaaaaccatccattt

SEQ ID NO: 884090 - DNA, 120 bp, Artificial Sequence
  ENSG00000234899_10 (sequence is synthesized)
cttggagaagtgccacggtggggttgcaagtcccaggatcaagttttcgatgtgtctctttttcccgtaaagtggctgaaatctgaagctgaatctgcaagtgtcatggagtcattgaat

SEQ ID NO: 884091 - DNA, 120 bp, Artificial Sequence
  ENSG00000234899_11 (sequence is synthesized)
ctcacagtctcaactgataaaagttattaaaggtcgtctggttcagccttctacttgatgtggaaatcctttctacagtaactctgtgtgggaatcacagttcacttaggggcttagtct

SEQ ID NO: 884092 - DNA, 120 bp, Artificial Sequence
  ENSG00000234899_12 (sequence is synthesized)
catagtcaaaatgtcttcttcctaagtgggaaattacttccagcttctattcattcagtagttgtttaatactatctctctctctctctatatatatatgtattatatatatatatatat

SEQ ID NO: 884093 - DNA, 120 bp, Artificial Sequence
  ENSG00000234899_13 (sequence is synthesized)
tataatgtgtatatatatctatatatggatatgtatacgtatatatacatatatagagagagagaaagagagagagagagtatatctccatctaaaagcagaagcataaaacattatacc

SEQ ID NO: 884094 - DNA, 120 bp, Artificial Sequence
  ENSG00000234899_14 (sequence is synthesized)
attatacctttaacaccaagatccagttaggtgtgagccccacaggcatgctgctgggcccatgggaccttaagtttagtaaattccagaatttgcctttaataagttcagagtcttaat

SEQ ID NO: 884095 - DNA, 120 bp, Artificial Sequence
  ENSG00000234899_15 (sequence is synthesized)
atctaaatatatattttaaaagatgtctaaaacaagtttcctactaaaaagtgacttatagtctagaaggcaaggaatgacagtcactcatactttctttcatgtggtaatcataatggt

SEQ ID NO: 884096 - DNA, 120 bp, Artificial Sequence
  ENSG00000234899_16 (sequence is synthesized)
aataagaatgataccttacatgcattgaatgctttctctgtgcaggtacagttttaagtgcttgacgtgaattaactcatttagtcatcataataacactgcaaggtaggtaagcacgtt

SEQ ID NO: 884097 - DNA, 120 bp, Artificial Sequence
  ENSG00000234899_17 (sequence is synthesized)
cattaacttacccatttcacagaggagaaaaccgaggcacagctgctcaagattatacaactaagaataagaggatccaggattcaaagtaaagcattttgcctcctgagtctgtagact

SEQ ID NO: 884098 - DNA, 120 bp, Artificial Sequence
  ENSG00000234899_18 (sequence is synthesized)
gtactggtatgctgtttaatctcttgcaaacaactaagatgtttggtagaaagagagaaatgccatgaaagagaaagggcagactcttgtgcttggaaaagatgacctgttttgatgcct

SEQ ID NO: 884099 - DNA, 120 bp, Artificial Sequence
  ENSG00000234899_19 (sequence is synthesized)
ttgtagatgatttatgcctggtgtcggcttctctcgggcatgtttctaggtatgagggagaagggagtcactggcttaatctgttggttaccacctgtaatttacagcagcagggttcac

SEQ ID NO: 884100 - DNA, 120 bp, Artificial Sequence
  ENSG00000234899_20 (sequence is synthesized)
actcaactggaacttggtgttaaaatgataatattttatgcttttgcttttagtgggtgacaataaaaaaatcaatggattataattacaggaccttgaagtttagtgttgccccagact

SEQ ID NO: 884101 - DNA, 120 bp, Artificial Sequence
  ENSG00000234899_21 (sequence is synthesized)
ataatgaaaatccatttgtggtatgacaaccacagattagcaatttatctctcctgaaatagcaaggcagtttattgtgttgctggtttgctaccacttgcagaagggaccagataatgt

SEQ ID NO: 884102 - DNA, 120 bp, Artificial Sequence
  ENSG00000234899_22 (sequence is synthesized)
gccaggttgccctgtgagtaataacctggttttattatacaggataaatcaatcacatagcttcttgcattggcttaatgaggttagattagcatgcacagagcttgggaaatagttatt

SEQ ID NO: 884103 - DNA, 120 bp, Artificial Sequence
  ENSG00000234899_23 (sequence is synthesized)
ggtcaacagcctccaagtgctgacagaggaccctcaatgggctgaatctggagtgaatactcagcaatttgctttgcaggagggtgataagaatctgagacttggtttgggagttggttt

SEQ ID NO: 884104 - DNA, 84 bp, Artificial Sequence
  ENSG00000234899_24 (sequence is synthesized)
agggtgataagaatctgagacttggtttgggagttggttttcaagagggcaagatttcagatggagtcacccaggctggagtgc

SEQ ID NO: 884105 - DNA, 120 bp, Artificial Sequence
  ENSG00000234899_25 (sequence is synthesized)
aaagtgctgggattacaggcatgagctatgatgcctggccaagagggcaagatttctaaaatacagttgaaactgcagacaacttttgtagatgagtagatcagtaatgaaacaaacaaa

SEQ ID NO: 884106 - DNA, 120 bp, Artificial Sequence
  ENSG00000234899_26 (sequence is synthesized)
caaacaaaaaaacccccaaacaataatttttttaaaaaaagaactggcagtctttgtcatttccctttggaatgatggatttacttaggagaggacatacatagaaggggaatggattat

SEQ ID NO: 884107 - DNA, 120 bp, Artificial Sequence
  ENSG00000234899_27 (sequence is synthesized)
agaatatcacactagctgagggccccaaaaggaaagcatcctgcctctctatggctaacattggttggggtgtgggagttgttttggcacaatgtctagtgactccctgtctttccaagc

SEQ ID NO: 884108 - DNA, 120 bp, Artificial Sequence
  ENSG00000234899_28 (sequence is synthesized)
tcccttatgtcacaagtgccacctttattgcttgagctaggttcgtggcaggggaaagacattatagttcccctctgccctttgtaccctggcttttctgtagatgtgttagagccttcc

SEQ ID NO: 884109 - DNA, 120 bp, Artificial Sequence
  ENSG00000234899_29 (sequence is synthesized)
tttgaatatctttcagacatttgccaataagagcaagctgaaagtaatcaagaccttctcccttgggtgagccttcctcactacatatctctcatgaagctaatatcttaatttgccccc

SEQ ID NO: 884110 - DNA, 72 bp, Artificial Sequence
  ENSG00000234899_30 (sequence is synthesized)
ctacatatctctcatgaagctaatatcttaatttgcccccactctgtgtgtacaactaataagagtgccatg

SEQ ID NO: 884111 - DNA, 120 bp, Artificial Sequence
  ENSG00000234899_31 (sequence is synthesized)
actgcactctagcctgggtgacagagtgatactccgtcttaaaaaaaaaaaagaaaaagtgccacgcattaaaaattaaccataaggagttgtgttgtgggatctggaagagggaaaagt

SEQ ID NO: 884112 - DNA, 120 bp, Artificial Sequence
  ENSG00000234899_32 (sequence is synthesized)
cataaggagttgtgttgtgggatctggaagagggaaaagtagactcagagagagggttcaggtgaggtccagtattggcattctctatttcagggtcagtcatgtcttgccttttgtaat

SEQ ID NO: 884113 - DNA, 120 bp, Artificial Sequence
  ENSG00000234899_33 (sequence is synthesized)
gaagccataatccctaaggaaattctagacaaggcagatttgaagactttttgcctccataatgcatttcatgtttcatttcaaatttctgctttgtcctttccattaagagacttagac

SEQ ID NO: 884114 - DNA, 120 bp, Artificial Sequence
  ENSG00000234899_34 (sequence is synthesized)
ttatcagaaaaaacaaacgttttagttctcatatctcagaagatagaaatttgttgacattgaagcagaagggggataactgagacataagaaagcatggtataaaagggaccacgatgg

SEQ ID NO: 884115 - DNA, 120 bp, Artificial Sequence
  ENSG00000234899_35 (sequence is synthesized)
tgtatcagtcagctttggttgcattagggtgtggtaataacccttaaacattttgtaactttttcatgtcaaataaaaagatacagaaacccacacaaaacaaatatttatcatattatt

SEQ ID NO: 884116 - DNA, 120 bp, Artificial Sequence
  ENSG00000234899_36 (sequence is synthesized)
agaaagctaatgtccctgtaaccagcactggggttgggaaatagagcataggtagtcaccccagaaatcccttcataagctttgtcctttctcttccttcaaaactagctgtcttcctca

SEQ ID NO: 884117 - DNA, 120 bp, Artificial Sequence
  ENSG00000234899_37 (sequence is synthesized)
ctcttatggcaatgaccccatatcttaatggattaagataatgaaagtgtatttcttacactctgtatctatcaccagaagctgaggtgatagcccgcttgtcattgtcatccatattct

SEQ ID NO: 884118 - DNA, 120 bp, Artificial Sequence
  ENSG00000234899_38 (sequence is synthesized)
gggactcaggcgggaactttctggaatattgccagggagcatggcagaggggcacagtgcattctgggggaatgcacattggctcagcctgggtaatgagtgatatacattacctctgtt

SEQ ID NO: 884119 - DNA, 120 bp, Artificial Sequence
  ENSG00000234899_39 (sequence is synthesized)
attacctctgttcacaactcattgcccagcaccagtcacaaggccccaccaaataccagagcccaagaaatgtagtcctgttgatatggttttgctgtgtcccaacccaaatctcatctt

SEQ ID NO: 884120 - DNA, 120 bp, Artificial Sequence
  ENSG00000234899_40 (sequence is synthesized)
gtgggaggtaattgaatcatgggggcgcgtcttttctttgccattctcatgatggtgacagtctcatgagatctgacggctttataaagcggagttcccctgcacaagctctctttcctg

SEQ ID NO: 884121 - DNA, 120 bp, Artificial Sequence
  ENSG00000234899_41 (sequence is synthesized)
tttataaagcggagttcccctgcacaagctctctttcctgctgccacgtaagacatgactttcctcctcatttgccttctgctgtgattgtaagcctccccagccatgtggaactgtgag

SEQ ID NO: 884122 - DNA, 120 bp, Artificial Sequence
  ENSG00000234899_42 (sequence is synthesized)
cagaagacaagtcatttttctagacctcccatagacgccatcgttgatcaagccattttcattttcacgaagtattttattatggaactcctaaagaccatcagccctacctggcactgg

SEQ ID NO: 884123 - DNA, 120 bp, Artificial Sequence
  ENSG00000234899_43 (sequence is synthesized)
ttagtttgctgtcccagttgaattctgagtttccgggaatccctagtgcaatgagaaatgatggagaaccaattctcattatctgatgaaggaaagagccatgtacctacaacagcaaag

SEQ ID NO: 884124 - DNA, 120 bp, Artificial Sequence
  ENSG00000234899_44 (sequence is synthesized)
gctcagacaagccttctcctgccttgggttcatggtcacgtgctgtaggtgtcttgtcttcccatgtgcacctgtctgcatcctcatggtgcatcctcaggatgtcccgtacagtgtctt

SEQ ID NO: 884125 - DNA, 120 bp, Artificial Sequence
  ENSG00000234899_45 (sequence is synthesized)
ggcggggggtgctgcggggaaggcgggggacccgggacttccaagtgtgttcatctcaaagatctctctttgcataatgtgtgtgtggacctgcctacagatacattgggtggaagccct

SEQ ID NO: 884126 - DNA, 120 bp, Artificial Sequence
  ENSG00000234899_46 (sequence is synthesized)
aggagcctcaagcaagtctgaagattggccctgagaaccactgttctcattatcagcaaggattttatccagagacctctaggaatacattcactaaaatgtgactgtggtcctgtggtt

SEQ ID NO: 884127 - DNA, 120 bp, Artificial Sequence
  ENSG00000234899_47 (sequence is synthesized)
gtatgaactctggctcttctcgtgaattacatttcactggagtcaggtgttttctgtaaacatcgttaaaccacgagaccaactgcattgaacattttttgcactacattgttttatttc

SEQ ID NO: 884128 - DNA, 120 bp, Artificial Sequence
  ENSG00000234899_48 (sequence is synthesized)
gggaacagccaaaggaagagaaaaggcaaaagatttggacaagactcatgaagactaacagctcttggataattgagagaaggcagctgcgtgaacagttttgatgcaatcatgaaggca

SEQ ID NO: 884129 - DNA, 120 bp, Artificial Sequence
  ENSG00000234899_49 (sequence is synthesized)
gggcccagtgcctgtggcatctgcctttttctggaaccaatccatatttccttgtggttttctaaggtgcagagagggcacattgggaactttgcttggggtctttttcacatcttagag

SEQ ID NO: 884130 - DNA, 120 bp, Artificial Sequence
  ENSG00000234899_50 (sequence is synthesized)
ggaaggtccctcaacatctgcattggcggagtgtgatcctcatgtccctctgaatgatctggacttgaggtaaccagccccttccaggaagctgtcccatgagtgaagcctcagcagcag

SEQ ID NO: 884131 - DNA, 120 bp, Artificial Sequence
  ENSG00000234899_51 (sequence is synthesized)
cctctgtcagtccctcccccacagaacctttggcttccatttgaccagccttgacatccagtgtccaaacaccgataaaattgattccactaagcgtgggaaagtcctggagcatcgatt

SEQ ID NO: 884132 - DNA, 120 bp, Artificial Sequence
  ENSG00000234899_52 (sequence is synthesized)
gtttcctcctctgcacccccgataccctggcattagcactctcccagaatgtaccttgcttgtttgattggaggaggtcaaagccctgatgaagaatgagtggaattccacaggattgga

SEQ ID NO: 884133 - DNA, 120 bp, Artificial Sequence
  ENSG00000234899_53 (sequence is synthesized)
gcagtcttgataaatgacagcaggggatggtgtggggaggggaaaggatcagaggaagtgtggataaatgaatggcttaaaaaataatccacctttgcctcccccttttctaccagtctg

SEQ ID NO: 884134 - DNA, 120 bp, Artificial Sequence
  ENSG00000234899_54 (sequence is synthesized)
tctagtgcttcagggtgaaaaaaaaaaaaaaaagcttgcctttctaaacatttggagtttcagaaatgatctatagagcatgtttagtttttcaagttaaaaatattaaaagaaaaaaaa

SEQ ID NO: 884135 - DNA, 120 bp, Artificial Sequence
  ENSG00000234899_55 (sequence is synthesized)
aatttcttaaaatcttgttttctctcgttgtcttcggaagaagcccgacatttcttataggaaatggaactcttcataaggtcgccccgacccctcctccctgacctgggaagacgcgcg

SEQ ID NO: 884136 - DNA, 120 bp, Artificial Sequence
  ENSG00000234899_56 (sequence is synthesized)
ttcccgcaaagagctagagccacccaagcaggattgactgtcattggtttgaggtttctgtttgctttgaggctattttttccttagtgctataaactagatcagtccatttttagctga

SEQ ID NO: 884137 - DNA, 120 bp, Artificial Sequence
  ENSG00000234899_57 (sequence is synthesized)
taaccctttccaatttcgctgtgaaatgaggggctggttgggtggtttttttttatgttctttccagcgttgacttttatggtctttgattccaaggtacctcgtcgactctgaagacga

SEQ ID NO: 884138 - DNA, 120 bp, Artificial Sequence
  ENSG00000234899_58 (sequence is synthesized)
taggttctaactccagatgagccactgcaagatggtaccaggatgagatagagagtctctgtactatcttttatatgttctcaaacccagccagggatcagagtgacaatataacatggg

SEQ ID NO: 884139 - DNA, 120 bp, Artificial Sequence
  ENSG00000234899_59 (sequence is synthesized)
gaatcatagagatgtttatggtaattctgctatgagtcaactgagatgtcccttatggagataacttcccatactataggcagttggacaaagatgtaaatgccttgtttacaaatgcta

SEQ ID NO: 884140 - DNA, 120 bp, Artificial Sequence
  ENSG00000234899_60 (sequence is synthesized)
cccagatctcctaattaggaccacacatgcggagaacccaacagcttttggacttatcggccaatggtcttcttgggaaggtctctcctagtcatgggaattgtctttttattgttcaag

SEQ ID NO: 884141 - DNA, 120 bp, Artificial Sequence
  ENSG00000234899_61 (sequence is synthesized)
cttttgcatagacctggaagaggcatccattgctgttacccctgagtttataatcatgctgcaagtccagtggggaactttggcacaaagcattgaatgagatgggactgcacttatgta

SEQ ID NO: 884142 - DNA, 120 bp, Artificial Sequence
  ENSG00000234899_62 (sequence is synthesized)
gcctgcatttcttgagaataaagatttctgttcatttagtgcagtggttatcatctgggggaaaaccagtgagtagaggccagggatgccactaaaatccctacactgtgcaggaaagct

SEQ ID NO: 884143 - DNA, 120 bp, Artificial Sequence
  ENSG00000234899_63 (sequence is synthesized)
gtcagccctttgtcccacaagagattaactggttccaaaagtcagtagtgctgtggttgagaaaccctgtttaccacctgtaggttccagagagctcggatggtggtggtcattgtgcta

SEQ ID NO: 884144 - DNA, 120 bp, Artificial Sequence
  ENSG00000234899_64 (sequence is synthesized)
agtttcaaattcagtatttaggtttggtttttagcttataggcaacaaattggctgactatggggtgaaaaggaagcacctcctttatcaagattggcttcaaaagatgtctgcctcccc

SEQ ID NO: 884145 - DNA, 120 bp, Artificial Sequence
  ENSG00000234899_65 (sequence is synthesized)
ttctggtgggtcctgtgtccattcacagtgtgagaaatggaaaggaggtcactaagagacttgcaatggatgtaataactggatgcagaaactctggatctgaagggaatgttcatgact

SEQ ID NO: 884146 - DNA, 120 bp, Artificial Sequence
  ENSG00000234899_66 (sequence is synthesized)
gaaacagaagctctggcaatagtcggctgcttgctcaaggtgacacagttaatggagaggcagatctctggatgcggcgtctcaggggccacgcctgcctcccccgccgccgcgcgcata

SEQ ID NO: 884147 - DNA, 120 bp, Artificial Sequence
  ENSG00000234899_67 (sequence is synthesized)
ggatcggtcctgcatttctgcaggggcctcctggtgtccactcccctttccccattcaggggctccattcgcttcgttgtgtctttctcaggtcgccccgacccctcctccctgacctgg

SEQ ID NO: 884148 - DNA, 120 bp, Artificial Sequence
  ENSG00000234899_68 (sequence is synthesized)
attcaatgtctggagcaagctttctgcactccactgccggtgctttctggcttcaaaagcagcttcgagactgaggaatagtagacaggattagaataaggcccgggagttctacaactc

SEQ ID NO: 884149 - DNA, 120 bp, Artificial Sequence
  ENSG00000234899_69 (sequence is synthesized)
tgctgaattcaaaaggaccatgatcttggtcagctaaaccacacccgatggccaaggggcagaggaaaagatggcagagtagagactcttggacttactcatttggattttggagtttta

SEQ ID NO: 884150 - DNA, 120 bp, Artificial Sequence
  ENSG00000234899_70 (sequence is synthesized)
atccaagttggtcaaaggaagaggaggatcaatggccttttttcctccccccaacctttttttttttttttttttttaaacaaagaagcaaagtgagaacattaagcccgaaagagaact

SEQ ID NO: 884151 - DNA, 120 bp, Artificial Sequence
  ENSG00000234899_71 (sequence is synthesized)
gtgttcattgcaggactttttgaggtctggttaagccatttatataaagaaattacacagttcctctttggtaacctcaatcctgaaagttagtgtgacaggcctacagctttttgttct

SEQ ID NO: 884152 - DNA, 120 bp, Artificial Sequence
  ENSG00000234899_72 (sequence is synthesized)
attaagccctgcatgcattagctattagtcctgatgctctccctcccccgcaccccctagcaggtccctggtgtatgttgttccactccctgtgttcatgtattctcattgttcaactcc

SEQ ID NO: 884153 - DNA, 82 bp, Artificial Sequence
  ENSG00000234899_73 (sequence is synthesized)
cagtttactgaggatactggcttccagcgtcatccacgtctcagtataggacatcatctcattcctttttatggctgcatag

SEQ ID NO: 884154 - DNA, 120 bp, Artificial Sequence
  ENSG00000234899_74 (sequence is synthesized)
tattccatggtgtatatgtatcacatttttctttatccagtctaccattgtgggcatttgggttcattccaagtctttaataagggtttggtcttacctgatttatgttagaaggaaacc

SEQ ID NO: 884155 - DNA, 120 bp, Artificial Sequence
  ENSG00000234899_75 (sequence is synthesized)
atgttagaaggaaaccatttgtttggaatgaatagagtaaatcttttgggaaaatagaaaaaaagattattttaaaatcatgtgaatatttaggtctaagagttgtccatgaatccttag

SEQ ID NO: 884156 - DNA, 120 bp, Artificial Sequence
  ENSG00000234899_76 (sequence is synthesized)
gttaggataggaaaaaattacatctttattttttctaacctctatttgaaatgtagtatttctttccatcacaagtgtatgtgacaagacacaatagtgttggtcattactaaggcttta

SEQ ID NO: 884157 - DNA, 120 bp, Artificial Sequence
  ENSG00000234899_77 (sequence is synthesized)
tcaccgacaaaaatcataggtatttttatatcacactgcagtgttgtaaaaatctcaagatatcatctatactcttcactgcttcgaaattatggtagttggtagacccaccttcaggtc

SEQ ID NO: 884158 - DNA, 120 bp, Artificial Sequence
  ENSG00000234899_78 (sequence is synthesized)
ttgttattggcggcattaataaggaagtgtatatgttatgtttcacaattttattttctaaatactttcagattgcaactgcatttccatataatttattttataattcgttgtgtttca

SEQ ID NO: 884159 - DNA, 120 bp, Artificial Sequence
  ENSG00000234899_79 (sequence is synthesized)
agttatgcatttacacatgtaattctaaaaagaagtccatagacttgaccacatttccaaaagagttcacagtaaacaaattattaaaaatctctgttaattcatagatactcattccag

SEQ ID NO: 884160 - DNA, 120 bp, Artificial Sequence
  ENSG00000234899_80 (sequence is synthesized)
aaaatacagcaatggctgcatatcaggaatatctttttccagaaaaaaaaatatccgaagttactagatattctgtagtttctgtatgtggagtttctggggtaaatcctttgagttcaa

SEQ ID NO: 884161 - DNA, 120 bp, Artificial Sequence
  ENSG00000234899_81 (sequence is synthesized)
tatgttgactatgtgctatgtcatctcaaatatttgaccttattctgtttttcttctctgggtcattgtatgttttgtaactagatttcctatttggtatttgtctcccaaattttaaga

SEQ ID NO: 884162 - DNA, 120 bp, Artificial Sequence
  ENSG00000234899_82 (sequence is synthesized)
gcaaaacttgtcatctatcgccttattttaattctcactatgtaaacttgtaagaactaactcacaacttggtgtctcataactcacttctgaaatatccaataaaaaactgccaagtta

SEQ ID NO: 884163 - DNA, 120 bp, Artificial Sequence
  ENSG00000234899_83 (sequence is synthesized)
attcattgtgcaggtgagtgtcttaggtgaggctggactcttcctccgagaagatctgaaatgcagtgagcacttttgcttgaagacagggactgattttggtagcatcctttggtctct

SEQ ID NO: 884164 - DNA, 120 bp, Artificial Sequence
  ENSG00000234899_84 (sequence is synthesized)
ctactcccttcctagcagaaccttgattaggtcgaggtttaaacagcaatgtgtcaaggcaggtggaccaggaggatcctaagggagggaacttgattgatctgggccaatcgtaacact

SEQ ID NO: 884165 - DNA, 120 bp, Artificial Sequence
  ENSG00000234899_85 (sequence is synthesized)
cttgaacatcccttggtcagcaattggcttagaggtgggcatcctaaacttggcatatgagaaagacagtaggaatttgctgggcgctcttgggaaatattgcataaaacaattcatcaa

SEQ ID NO: 884166 - DNA, 120 bp, Artificial Sequence
  ENSG00000234899_86 (sequence is synthesized)
aattggcctttcctttttgccttgacttgccatgtaagaagtaatgcctaatgctgcgacagacaaattgcaaccatcagggaaagccaggagactctgagagagaccaattattgagct

SEQ ID NO: 884167 - DNA, 120 bp, Artificial Sequence
  ENSG00000234899_87 (sequence is synthesized)
gatgaatgaacccttcctgaagccacctacttcctcacttattggtgtgtccttactgtgtaaaccccttttaactgggtgttttgtttcttgcagccaaaaacaatccattgatacact

SEQ ID NO: 884168 - DNA, 120 bp, Artificial Sequence
  ENSG00000234899_88 (sequence is synthesized)
gggggagagtttgctaactgctctggctttgagagatagaagtttgccaatgcggctgtcccgggccgcgaggcccaggccggtcacttggtttgtaaaagaccaaacaaatgggcacca

SEQ ID NO: 884169 - DNA, 120 bp, Artificial Sequence
  ENSG00000234899_89 (sequence is synthesized)
ccgcagacaaaacgctccactctggcggagtcatgctgcttgcctgcttttgctggcatttacgaaacacctgaaggggtgaagcgccggtgcttctgactctagtccgccaaaaacaat

SEQ ID NO: 884170 - DNA, 120 bp, Artificial Sequence
  ENSG00000234899_90 (sequence is synthesized)
ttgcagagctggggctggggtgaggtgtgtggtgtacctagcactcaaaatgtaaggattctcagagtcatacaggtgcacggtcagcacctgagagtgagccaccctttaacattttgc

SEQ ID NO: 884171 - DNA, 120 bp, Artificial Sequence
  ENSG00000234899_91 (sequence is synthesized)
cttctaggtgcttcacttgccttgcccaagcactagccctagattaaataatatgtttctattagttttttaaaattataatattaacaataactagcacttattgagcactcccttatg

SEQ ID NO: 884172 - DNA, 120 bp, Artificial Sequence
  ENSG00000234899_92 (sequence is synthesized)
tgccagcaaatgtgacttacatgtatctgcttatttttccttacatgaaaccctctgaagtagatacaatgggtatcatccatgtttctcagacaaggaaactaaaacactggaatgtta

SEQ ID NO: 884173 - DNA, 120 bp, Artificial Sequence
  ENSG00000234899_93 (sequence is synthesized)
aatcagtatttcaagactcatctaggaagtgccagatccaggactgggacctgggccatctgattttcagcacttgatctcaaactttccactgtatacctcctcaaggacatttttgtc

SEQ ID NO: 884174 - DNA, 120 bp, Artificial Sequence
  ENSG00000234899_94 (sequence is synthesized)
catgtgacaagtagaaaaattccacagctagtttactgaccagccaagtcagagcttccctgacaccagtgtaatcataacacatggggtttgaaactgtggtcaagaattttcagacta

SEQ ID NO: 884175 - DNA, 120 bp, Artificial Sequence
  ENSG00000234899_95 (sequence is synthesized)
gctctccaataagagaaacttcaaatatcaaaccccagggcagctcgttttcatcagggtcttttaaatgactgattcttggaccagtccattgatacattcattcaacaaatatttatc

SEQ ID NO: 884176 - DNA, 120 bp, Artificial Sequence
  ENSG00000234899_96 (sequence is synthesized)
gggcccctcctgtgtgctagatatcgttctaaatgcttagaacacagctgtgattaaattaatgcccctatctgcatagaggttacattccaatagtggggacagatcataaggaaacaa

SEQ ID NO: 884177 - DNA, 120 bp, Artificial Sequence
  ENSG00000234899_97 (sequence is synthesized)
acaaacatacagtttgatgtcacaaagaaaataaagcagatctcgagggaaagtgagtgttgggtggccaggaaagacttctctgagaaagtggcatttgaccagggtcttgagtgacat

SEQ ID NO: 884178 - DNA, 120 bp, Artificial Sequence
  ENSG00000234899_98 (sequence is synthesized)
gagcagagagagagaatgcgagcctcacatagcagtactgtagctactttataaataaatttttcctattgtgtgtttgacttgacattttaaaaaagtacaagatcaacattgacaaca

SEQ ID NO: 884179 - DNA, 120 bp, Artificial Sequence
  ENSG00000234899_99 (sequence is synthesized)
atgtcacgagaatgtcactcaccatggcttcatgagctattttcacctccttgctgtggcaggagggagtaggtggggtagatggcccatgaaacgatttgctccacgggcaaaatcttc

SEQ ID NO: 884180 - DNA, 120 bp, Artificial Sequence
  ENSG00000234899_100 (sequence is synthesized)
tgactggggatttgaagtccgctgagtgatgccctgtttgttcttctgaattaaattagaattgggcagtctccattttgcggttttcttcttcagcctctggtggaccagagcatcagc

SEQ ID NO: 884181 - DNA, 120 bp, Artificial Sequence
  ENSG00000234899_101 (sequence is synthesized)
agttgtggcagaggctgccccatgtgtgcgaaagaccaccgttcctgggctgtggctgcagcctctgtttccgttagcctttccgtacggcagtgttgtcaggtcaccgattccaaatgt

SEQ ID NO: 884182 - DNA, 120 bp, Artificial Sequence
  ENSG00000234899_102 (sequence is synthesized)
caaaatgtcatcagggtaagtgcgagtgtgagtaaaggtagatgtttttagggcatctctggccggaggtaacattttaacatttcagagccaaatttttagttttggcaaaaacatgtt

SEQ ID NO: 884183 - DNA, 120 bp, Artificial Sequence
  ENSG00000234899_103 (sequence is synthesized)
ttgcaactcaaaacttctcttcctgctttaccctgattagttgctagttgaaaacgctcggtatctcaactgtgtccttccctccctattgccaccccttctctccagctgctaacttgc

SEQ ID NO: 884184 - DNA, 120 bp, Artificial Sequence
  ENSG00000234899_104 (sequence is synthesized)
gaactcagggctgtgcccagcgtagacgtttatagcagttgcagggaggtaggtgggaagaaaggagggaaagaagacagggaaggaaggtggaagggaagaaagaagaaattcattatc

SEQ ID NO: 884185 - DNA, 120 bp, Artificial Sequence
  ENSG00000234899_105 (sequence is synthesized)
tatccacttttagacttggagataacatttttctccaggacacggtgcaggcctgagcagttaggacagtcgggttcaaatcttaatcccccactgaaaacactgtgtgacgttggacaa

SEQ ID NO: 884186 - DNA, 120 bp, Artificial Sequence
  ENSG00000234899_106 (sequence is synthesized)
gtgacagaacctttctgagcctcagattttcctcatctctaaaggaagaatgtgagggattgatttcagtgaaatagctcccgtcaaatgctgctgctaccatgtttagcaaattgttta

SEQ ID NO: 884187 - DNA, 120 bp, Artificial Sequence
  ENSG00000234899_107 (sequence is synthesized)
acacataataagcattcaacctgagagttttattgttactttatttgggtactgagacctctgtttctggggtggcactgcctgacctggggtggagttacaccgtgtatcctaggtcca

SEQ ID NO: 884188 - DNA, 120 bp, Artificial Sequence
  ENSG00000234899_108 (sequence is synthesized)
ccaagtctgtggctttacatagctaagaggtttgaacaaccccagagcttctatcatacaggatttcatagagattcagataccagcaaagccgttggaagctgtgatggataagtttat

SEQ ID NO: 884189 - DNA, 120 bp, Artificial Sequence
  ENSG00000234899_109 (sequence is synthesized)
gtgtcaatttggacaggctgcagtattcagtcatttaatcaaacaataatctaagtgttgctaaggaggtattttgtggatgttaacattgacaacctgttgactttaagtaaaggggat

SEQ ID NO: 884190 - DNA, 120 bp, Artificial Sequence
  ENSG00000234899_110 (sequence is synthesized)
taccttggataatgtgggtgggcctcatccaatcagttgaaggccttgggaccaaaaacttggaggagaaattctgccttaagactgcagcctcagctcacacaggaatttccagcctgc

SEQ ID NO: 884191 - DNA, 120 bp, Artificial Sequence
  ENSG00000234899_111 (sequence is synthesized)
cagcctgccctatggattttagactttctagccctgagaattgcatgagctaattcctgaaagtaaataagctaataaatacttgtatattatgttattgtattattttatataatacaa

SEQ ID NO: 884192 - DNA, 120 bp, Artificial Sequence
  ENSG00000234899_112 (sequence is synthesized)
cctgtacagcctgtggaaccatgagccaggtaaaaatggtgctacccttggaaatccaagagcagcttcaagagtcaactataccagcaatccctaaagctggagaatttatgcccatgg

SEQ ID NO: 884193 - DNA, 120 bp, Artificial Sequence
  ENSG00000234899_113 (sequence is synthesized)
gcccatggaaaagtctgtagcgttttgcaaactgtgaggctgaggaatagacctagttcctgcagcagatcaaaatggtagccccttttctttccatgaaaagaatttctacggagacag

SEQ ID NO: 884194 - DNA, 120 bp, Artificial Sequence
  ENSG00000234899_114 (sequence is synthesized)
agaaagactttttcctttttgagcacctctttggaccatttacattcattgacagctcagaagaatccaacagttcctggagtttggcaacatttcatggtggagagaaaagcatcccaa

SEQ ID NO: 884195 - DNA, 120 bp, Artificial Sequence
  ENSG00000234899_115 (sequence is synthesized)
ggatctgtacataaatagctggtgcacatcggtctcaggtgtaaacagaaggaagtccaaggaagccaagtgggaagatccttgctggtttctccctctgaggaagaaggaaaatgccat

SEQ ID NO: 884196 - DNA, 120 bp, Artificial Sequence
  ENSG00000234899_116 (sequence is synthesized)
tcatttctaggagagcgaatgccttttgcctctttgatgagaaaactagacgagacattgtttagaaattcttgagctcagactttggcattatgacaacgtgcattcaaatctgcccca

SEQ ID NO: 884197 - DNA, 120 bp, Artificial Sequence
  ENSG00000234899_117 (sequence is synthesized)
gccacttgcgagctgggacctaaagccgtgagcttctggttgtttatctataacaagcggatcccagtacctacctcatagggctgctgcgaggattaaaataaaatgcatctatcagcc

SEQ ID NO: 884198 - DNA, 120 bp, Artificial Sequence
  ENSG00000234899_118 (sequence is synthesized)
catattcatatgctcttgttccttctcaaataattccatcactaatacacattccttgctgctgcttcctgctttcgcttttgaagtgcccttccatccactcctcagctctattccctg

SEQ ID NO: 884199 - DNA, 120 bp, Artificial Sequence
  ENSG00000234899_119 (sequence is synthesized)
ttcctacatgagaagtcattttgggttggctgtttcccccaagtgaagatcattgactctctaaagctggccaactcaacttgtccttttactaattggatcaagtaattgctacctctg

SEQ ID NO: 884200 - DNA, 120 bp, Artificial Sequence
  ENSG00000234899_120 (sequence is synthesized)
tttgtccttttgagtctaaaaatggcaagccccaggttactgcattgtcttttgtgatttccctataccacacctctgtaaataaacctttcttaaatcatccctttttgaatgtgccat

SEQ ID NO: 884201 - DNA, 120 bp, Artificial Sequence
  ENSG00000234899_121 (sequence is synthesized)
ctgcttcctgttgtggctctgagctatataaatatgatgtgaaaaacctaggacacaacgtagatcaaagagtgcctggaagaatcttttttcccccttattttattttattcttcccat

SEQ ID NO: 884202 - DNA, 120 bp, Artificial Sequence
  ENSG00000234899_122 (sequence is synthesized)
ccatatttaccagtgagatatctttatattacccctgagatctgaaaccgtaaaacataaaacatagaagtgttttttttaaacattttattttattttttatttatttaatttttacat

SEQ ID NO: 884203 - DNA, 120 bp, Artificial Sequence
  ENSG00000234899_123 (sequence is synthesized)
gttccgtgtggatttatgaagtggtcacatctccccttccagataaagcttggcagagactcggccacccagggtcacatttcctctgcagccaagcgcagagggaagattctccaatgt

SEQ ID NO: 884204 - DNA, 120 bp, Artificial Sequence
  ENSG00000234899_124 (sequence is synthesized)
gggtgtgcaaataggaccaccagtggggagcagaggccgcttttccagaccaagaggagtctagactatcactcacacattccctggtcatctggggccgccagaattctgagagtgctt

SEQ ID NO: 884205 - DNA, 120 bp, Artificial Sequence
  ENSG00000234899_125 (sequence is synthesized)
atttaggaccgctatgtgcagaggtctgtattagagagccagctagagtagccagcagtgacataactatgtagggagaagacacagttgtcaccttgaccccactggatacagaaatgt

SEQ ID NO: 884206 - DNA, 120 bp, Artificial Sequence
  ENSG00000234899_126 (sequence is synthesized)
caatggaaaaacaaattctgcatctgctgaattgttctgtcaatgcttgcactttcttgtcatttactatatagaaagaattattagtatcttttatttgtcagttattgatccaccttt

SEQ ID NO: 884207 - DNA, 120 bp, Artificial Sequence
  ENSG00000234899_127 (sequence is synthesized)
agatatgcccaagctttctgggttggaagactgtagtgtctggactgtctggagtcaaagcagtgttgaatctataacagcaagaaactatttcagcagagccagatgtcaggttctggg

SEQ ID NO: 884208 - DNA, 120 bp, Artificial Sequence
  ENSG00000234899_128 (sequence is synthesized)
ctgagctttgatggaaactaaagacaggacaagaggagtttgcttcccatgcagaggaggctggaatattgtacgtgagtgaagtgatgagctttaaagattcatccgtgctgttagccc

SEQ ID NO: 884209 - DNA, 120 bp, Artificial Sequence
  ENSG00000234899_129 (sequence is synthesized)
actgtatcaaatgctggattctttcattttgactttttaagtttctttttagtggtagttgggagtggaggtggctagtgagaagagaaagactttttcctttttgagcacctctttgga

SEQ ID NO: 884210 - DNA, 120 bp, Artificial Sequence
  ENSG00000234899_130 (sequence is synthesized)
ccatttacattcattgacagctcagaagaatccaacagggtccatcccctttctccctggagaggacgcggagctgtgtatggctaactcggacctctcagctgtccggggcacaatggg

SEQ ID NO: 884211 - DNA, 120 bp, Artificial Sequence
  ENSG00000234899_131 (sequence is synthesized)
ggggaaggcgggggacccgggacttccaagtgtgtctggtttcccgcagaatccagcctctgtccacgtgaactctgctctgtcctctgggctcataatgttctgagactcttgctgcct

SEQ ID NO: 884212 - DNA, 120 bp, Artificial Sequence
  ENSG00000234899_132 (sequence is synthesized)
ctttcatggattccccttctatttccctgagacgactcacaggtcacagaaagctgcctcccatccttgcggctccatcaaggtgctttggaggcaggtaaagcgcagccaaaaacaatc

SEQ ID NO: 884213 - DNA, 120 bp, Artificial Sequence
  ENSG00000234899_133 (sequence is synthesized)
acaagatccaaatcaatgtccttccgggagaatttcttaaaatcttgttttctctcgttgtcttcggaagaagcccgacatttcttataggaaatggaactcttcataaggttcatctca

SEQ ID NO: 884214 - DNA, 120 bp, Artificial Sequence
  ENSG00000234899_134 (sequence is synthesized)
acaatgtgagatgcccaggaagctttgctgtaatcctgaatctttagacttttctaggagacttgggcatcacaagatcaaaacagagaccttcacactcaagtttttaagacagagaaa

SEQ ID NO: 884215 - DNA, 120 bp, Artificial Sequence
  ENSG00000234899_135 (sequence is synthesized)
aagccaagtgggaagatccttgctggtttctccctctgaggaagaaggaaaatgccatgactcccactatggcctctcttggaaccatattttgaggttcatctcaaagatctctctttg

SEQ ID NO: 884216 - DNA, 120 bp, Artificial Sequence
  ENSG00000234899_136 (sequence is synthesized)
ctgattttggtagcatcctttggtctcttctagtctgggagtcagagaaagtttgcatcaaaatgtcatcagggattcatttccatcatttcaagcagggtcatcttggaacaggacaca

SEQ ID NO: 884217 - DNA, 120 bp, Artificial Sequence
  ENSG00000234899_137 (sequence is synthesized)
gacctggcctttctctgcagctcctcttgggaaggcattttcttctttctgcaaaccgtgctgctgtttgtttggagaaggagagctgtggccaaaaacaatccattgatacacttggtg

SEQ ID NO: 884218 - DNA, 120 bp, Artificial Sequence
  ENSG00000234899_138 (sequence is synthesized)
tggtatactagtgtagactgtgttaatgtgtagacaactgaaagaagtggcatatttgggaagctttaggatgtccatggtgaaaagtacctacgaacaagagatcaatttctgttcatc

SEQ ID NO: 884219 - DNA, 120 bp, Artificial Sequence
  ENSG00000234899_139 (sequence is synthesized)
ctggcctgagctccggactccggggacagcgcgtcctgtcccgagggcctcccgccccccgggaaggccaaggtcatgaggtcaaaccccaacttttgggcttccgcgagagtaaagccc

SEQ ID NO: 884220 - DNA, 120 bp, Artificial Sequence
  ENSG00000234899_140 (sequence is synthesized)
atgaaagatgcagaaatgcagcaactattgcagggattccgtgagaccaaggacctgtctccatagcagggctgaggaggaagaggaagaggaggggttggtcttgctgtctcaagagta

SEQ ID NO: 884221 - DNA, 120 bp, Artificial Sequence
  ENSG00000223381_0 (sequence is synthesized)
tctcagagtccatgacagctctgtcctcttcaataatggtgcatggtgaccctcaatatgagatacaagcatctgttatctggagactggctgctctcagtgaaaaaagaaggagtactg

SEQ ID NO: 884222 - DNA, 120 bp, Artificial Sequence
  ENSG00000223381_1 (sequence is synthesized)
ctaataggctttcacctcacagcctgaatgccaggccaccacacaagaactgaagaggccaggctcctccccattctcccagtgtgcaggtgggcccctcatccattgcaggcatgtgca

SEQ ID NO: 884223 - DNA, 120 bp, Artificial Sequence
  ENSG00000223381_2 (sequence is synthesized)
gaaaagaccctgggcaggttccctcatctgcacaaaagcatctgatgtaaacacttgtggggtgagtcggagattctctggggaccctccctcatctgactcctgcatctatcactacca

SEQ ID NO: 884224 - DNA, 120 bp, Artificial Sequence
  ENSG00000223381_3 (sequence is synthesized)
ttacctcaaaaacaataaaaaagttaaattggcatttttttttaacctaaaggctagtgtatctggcaacatacaagatacatacctctcatagaagattaaaagctttttcgtaccagg

SEQ ID NO: 884225 - DNA, 120 bp, Artificial Sequence
  ENSG00000223381_4 (sequence is synthesized)
ttctcccagtgtgcagataaagacacatgtacttagagagaaagagttgatttaaagttacacagctatgtagcagcagaaacaaaatttgagtccaggatacctggccccagaatctac

SEQ ID NO: 884226 - DNA, 120 bp, Artificial Sequence
  ENSG00000223381_5 (sequence is synthesized)
ctctacttcacatggcttctcaaatacatgctgcctggaaaatagagcagccagtctccagctaagagatgctgtgtaaagaagagaaaaaacgtaaagccattaaaccatttcattata

SEQ ID NO: 884227 - DNA, 120 bp, Artificial Sequence
  ENSG00000223382_0 (sequence is synthesized)
aagaagaaggggccaccgagaccccaagagagtcagggagacagacgcaccaaacgaccgacacaaccagggacagtcatgtcgtagccaccacctaggagctgggactgcccccctgct

SEQ ID NO: 884228 - DNA, 120 bp, Artificial Sequence
  ENSG00000223382_1 (sequence is synthesized)
caccatgtctgcccttcctatcacccctcagcagggaggaaaagttgcctatctgttgggtcagatttctgaagactgatgaggcccattttctgatatccttcgagttggatttcgact

SEQ ID NO: 884229 - DNA, 120 bp, Artificial Sequence
  ENSG00000223382_2 (sequence is synthesized)
gggttctgccagtgggatgtatccatgcgagattctggaactaacatcagagagagtccaagcttctaacttttatcagcggcagtgacaatagtcaagcagcattgatgacaaacggca

SEQ ID NO: 884230 - DNA, 120 bp, Artificial Sequence
  ENSG00000223382_3 (sequence is synthesized)
aggatcttggaatggtatcccatggttcaatcttctggattcaaccacataaatttaccccacccatgtcgtggacccaagcttcctaccatgtatacttagcttaaatgcaagatagta

SEQ ID NO: 884231 - DNA, 120 bp, Artificial Sequence
  ENSG00000223382_4 (sequence is synthesized)
ctattttgttcatcttgattggagtgagaaatgaataggtccatgcacatatatttcttttaccacaacaagatgatgaagaaataaatccataatatcgatacttttgtataagttgtg

SEQ ID NO: 884232 - DNA, 120 bp, Artificial Sequence
  ENSG00000223382_5 (sequence is synthesized)
tttacagttgcggtaagaaattttataattgttgatttgctttatataatttctgcttgctttttatgatatttaaaacaaaatctaagcaacaaattttatgtctgattagatttacag

SEQ ID NO: 884233 - DNA, 120 bp, Artificial Sequence
  ENSG00000223382_6 (sequence is synthesized)
aagctgcttaagtgcttagggataatttgttcatcatatttgtaagtctcccttgttaggtgtttgaagtgtttgaattggctaaattaaatttgtaattgtagtttgaaatatctaaag

SEQ ID NO: 884234 - DNA, 120 bp, Artificial Sequence
  ENSG00000223382_7 (sequence is synthesized)
tttaatctatcaaatttatgagttaattgaatatgaatcaatgaacaagtaaatgtgatcttgcttttatataaaaactactaagttcataaataaaatacaaagatccataagttgaga

SEQ ID NO: 884235 - DNA, 120 bp, Artificial Sequence
  ENSG00000223382_8 (sequence is synthesized)
actgcgcccttgtttggacaagacgaggaggcgcactcagagtcagagaccccggggcagagacaggggcaagaagaaggggccaccgagaccccaagagagtcagggagacagacgcac

SEQ ID NO: 884236 - DNA, 120 bp, Artificial Sequence
  ENSG00000223382_9 (sequence is synthesized)
acacacaaaacaaaatgttaccctgaacatactaaacaaataaaaaaccacgtggtaattactatacacatgctcactgctggaagcattcatactgcactcaaatccaggtgggagaat

SEQ ID NO: 884237 - DNA, 120 bp, Artificial Sequence
  ENSG00000223382_10 (sequence is synthesized)
gcagcgtgtgctacaggtgaatctcggctgttctcttatggggatcaggtctttttcttaattatcttccacggatttttcttcctttacccagagacctggaggccctcccagcccagg

SEQ ID NO: 884238 - DNA, 120 bp, Artificial Sequence
  ENSG00000223382_11 (sequence is synthesized)
tccaattcagatggatacatacttaacatcactaacctattgatttgcttgtttatttacactgcagcacatgtttgttgtggtgcagaaggaaaacctccttcacatcttatactgaat

SEQ ID NO: 884239 - DNA, 120 bp, Artificial Sequence
  ENSG00000223382_12 (sequence is synthesized)
aatatcaatgcacagaaacctacccactgattgtttgcttagggttaagttactgggtgattttaaaataataacaatgtttttatttgcttccattaaaacgctttgttttaggcagaa

SEQ ID NO: 884240 - DNA, 120 bp, Artificial Sequence
  ENSG00000223382_13 (sequence is synthesized)
agagtcagagaccccggggcagagacaggggcaagaagaaggggccaccgagaccccaagagagtcagggagacagacgcaccaaacgaccgacacaaccagggacagcagggaggaaaa

SEQ ID NO: 884241 - DNA, 120 bp, Artificial Sequence
  ENSG00000223382_14 (sequence is synthesized)
ggcgttgcagagggatgttcggaggaagctccgggcgggagagccgcgtccactcctctttccagactatgatggggcccagggacccctcccctccgactgagccccatagacccccta

SEQ ID NO: 884242 - DNA, 72 bp, Artificial Sequence
  ENSG00000223382_15 (sequence is synthesized)
gggtcagatttctgaagactgatgaggcccattttctggctggagtgaaatgacatgatctcagctcactga

SEQ ID NO: 884243 - DNA, 120 bp, Artificial Sequence
  ENSG00000223387_0 (sequence is synthesized)
cttcacctgaggaataaagtgtaagatcttcagaacttttattcaggggagaaaggcccaggtagctgctgctgttcagcttaaggctaatctgaccttctataacaggagttcaagtcc

SEQ ID NO: 884244 - DNA, 120 bp, Artificial Sequence
  ENSG00000223387_1 (sequence is synthesized)
tacctcctgaaggacacgcctgaggatgttttacagttaactttttaaaaaatacataagtagaaagagaacactctaaaataaaaataaaaggtatagtataataaacacaataacaaa

SEQ ID NO: 884245 - DNA, 120 bp, Artificial Sequence
  ENSG00000223387_2 (sequence is synthesized)
ctcaattcaaaaacttatctaaaacatgtaattactgggaaattccagattaatttcctgcaagttttagttagttaacgattgtgttaaacacttaagagagcagctcctagatgacta

SEQ ID NO: 884246 - DNA, 120 bp, Artificial Sequence
  ENSG00000223387_3 (sequence is synthesized)
gaggcttcactcattacaggagaagagagtctgggttgctccctcatcaatcaagtgcagagtccaggaagggagaggcgggcagtaacgtgcatggagctgtcacctcctatgacaaca

SEQ ID NO: 884247 - DNA, 120 bp, Artificial Sequence
  ENSG00000223387_4 (sequence is synthesized)
agaaatagatggggcgagtaaatactgcactttcaaccgaaacatacagatacacatgttggaattcatcaagaaaacaacctgacccatggagaatggagaaaagcagggcaggacaac

SEQ ID NO: 884248 - DNA, 120 bp, Artificial Sequence
  ENSG00000223387_5 (sequence is synthesized)
cgcccacacgggagaaacatggagccaggggaacctccccatccagggaagccgtgagtgaatgagcgaccctgcggaccaatgcttctcccatggatcgttgctactcttgggtcagga

SEQ ID NO: 884249 - DNA, 120 bp, Artificial Sequence
  ENSG00000223387_6 (sequence is synthesized)
gatcccctcatgaacccactccactagggccttcagtcagatacacagagctatggggagtcttggcagagcagccgctcaggtacacacggagccccaggagccttagatatcctggct

SEQ ID NO: 884250 - DNA, 120 bp, Artificial Sequence
  ENSG00000223387_7 (sequence is synthesized)
tcctggcaaaagtaactgctactccagccaagtgggaggttagacccccatacctactcctatgaaaggggctgaatccagggggctgagcagcgatgatctgcaggcctcacttccata

SEQ ID NO: 884251 - DNA, 120 bp, Artificial Sequence
  ENSG00000223387_8 (sequence is synthesized)
gcacttcagaggtcacaggataagacccactggcttggaactctagccagctgctggtagcagcattacacatccctgagagggagctctcagaggaaggggtaggcggccatctttgct

SEQ ID NO: 884252 - DNA, 120 bp, Artificial Sequence
  ENSG00000223387_9 (sequence is synthesized)
gtttcacagcctcagtccttgttgccttcaggctttagagagtgcaaggtgatccatcagtgactggagtggaccccccagcacaacatggctgtcctgtggaaaagtggccagactgct

SEQ ID NO: 884253 - DNA, 120 bp, Artificial Sequence
  ENSG00000223387_10 (sequence is synthesized)
tttttacacaagtctccaaacctgtttctcctcactggatgagtcctcctggcctgggtctccacccaccccctgccagggatattgagccagtagcagctccataactctctgggacag

SEQ ID NO: 884254 - DNA, 120 bp, Artificial Sequence
  ENSG00000223387_11 (sequence is synthesized)
cgctcccagtgtttgggggttggggggtgagagggtggggggtgtgatgtttgctgtcttgcagcccttgcccttactgtctccaggctctgaaaagtcctctgtgagtaccaggggctg

SEQ ID NO: 884255 - DNA, 120 bp, Artificial Sequence
  ENSG00000223387_12 (sequence is synthesized)
gtccagacccccagcacagagcgcccaccttagaaaagcggtcagactgttccccacaagtcccagtcctcactgcatagggctgcccgacctgagactccagcaccaccatcctgtttc

SEQ ID NO: 884256 - DNA, 120 bp, Artificial Sequence
  ENSG00000223387_13 (sequence is synthesized)
cgcctgaccacttcaatcagaggcacccccgcatttcttcgaagaggaaataaataccagagtgaacccacaaaccttcgcctctgcagttgcagtggtactgccctaacagacctcagg

SEQ ID NO: 884257 - DNA, 120 bp, Artificial Sequence
  ENSG00000223387_14 (sequence is synthesized)
ctggggaaggaacaaaggtcccagtcactacactggtatctttagtgcaccgcagccaccatatggaaaggagttcagtttctctttcctgggaatccccacccgctactcttcaccagg

SEQ ID NO: 884258 - DNA, 120 bp, Artificial Sequence
  ENSG00000223387_15 (sequence is synthesized)
tctcagaggtatatgacagtctctccaccacagtgaccacatggagaggagaccattatctcctctcagtgagcccttgaacccctgctccccaacaagtggagcctccaactcacacca

SEQ ID NO: 884259 - DNA, 120 bp, Artificial Sequence
  ENSG00000223387_16 (sequence is synthesized)
gcagtgcagccacccacctcactggctgaacattcccagtaacagtgactctgcatttcttggggttggagccctcaggggcaaccaaaagcctctctgccactgcctctgtagtagtac

SEQ ID NO: 884260 - DNA, 120 bp, Artificial Sequence
  ENSG00000223387_17 (sequence is synthesized)
tacccctactacctttagactaattaaacagcaaagaccctaagtgcctcatccacacccccaacaagctgcagttaacccaaggagaggagaccagtccatctcccacaggtcccatcc

SEQ ID NO: 884261 - DNA, 120 bp, Artificial Sequence
  ENSG00000223387_18 (sequence is synthesized)
acccctgctgcttgtcaccagggaaccccccagcttggacccacagtacagatcacccatcttgggcctatcacactgagcaattgctgacctgcatctctgtggagtggagcccccagg

SEQ ID NO: 884262 - DNA, 120 bp, Artificial Sequence
  ENSG00000223387_19 (sequence is synthesized)
agacaagtaaaagacccccagccacaaccactgctaaggtccttctctctgctgcctccaagctggggaggaaacataaaccctgagatctccccagagctgtggtgggcagcctaggag

SEQ ID NO: 884263 - DNA, 120 bp, Artificial Sequence
  ENSG00000223387_20 (sequence is synthesized)
tgccaagtctcaatctgtagccagcactcaaatgggagaggagtccacactttcagagcattgagaggtagcccagctgcaaccatgaggaaatatagaggagtcacatgactgggaaag

SEQ ID NO: 884264 - DNA, 120 bp, Artificial Sequence
  ENSG00000223387_21 (sequence is synthesized)
agtctacctactgaccactacttcacaaaacccctcatttccttctgtcctccctaaagcctctcagttttgaatctcatgtcttcaaattgtatcacccactggcctccatgaagcgcc

SEQ ID NO: 884265 - DNA, 120 bp, Artificial Sequence
  ENSG00000223387_22 (sequence is synthesized)
taagcaccacctactggatcacaccccgcagcttcaacaccaaaaagttagaaagacttcaaattaacaacctaacatcacaactaaaagaactacagaaccaagagcaaaccaatccca

SEQ ID NO: 884266 - DNA, 120 bp, Artificial Sequence
  ENSG00000223387_23 (sequence is synthesized)
aagctagcagaagacaaaaaaacacatgcttatctcaacagatgtatctcactaacatacccgccctgtaaaaccaaagataagaagtcagctgcaaataaagacctcgcacaaagcctc

SEQ ID NO: 884267 - DNA, 120 bp, Artificial Sequence
  ENSG00000223387_24 (sequence is synthesized)
agccctgtgaaaatattcaggaaaaaagtcttctgactgtactcaatctatgctgcagttaaaggaacacccatacacagagatgagaaagaaccaatgtaagaactctggcaactcaaa

SEQ ID NO: 884268 - DNA, 120 bp, Artificial Sequence
  ENSG00000223387_25 (sequence is synthesized)
tgaccagtgtcttatgtactccaaacaatagcaccagttctccaatgagggttcttaaacaggctgagttggctgaaatgacagaaatagaattcagagtatagataggaatgaagatca

SEQ ID NO: 884269 - DNA, 120 bp, Artificial Sequence
  ENSG00000223387_26 (sequence is synthesized)
ttgagatttaggagaagaggaaaacacaatccaaggaaactaagaatcacaataaaatgataaaggagctgacaggcaaaatcgccagtattaaaaagaaacctaactgatctgatagag

SEQ ID NO: 884270 - DNA, 120 bp, Artificial Sequence
  ENSG00000223387_27 (sequence is synthesized)
ctgaaaagcacactgcaagaatttcacaatgcaatcgcaagtattaacagcagaatagaccaagctggggaaagaatctcagaacttgaagactggctctctgaaacaagacagccagac

SEQ ID NO: 884271 - DNA, 120 bp, Artificial Sequence
  ENSG00000258820_0 (sequence is synthesized)
ggatgggatccaggagaaaacgtgctgaacgtgcagcttgctcctaccgattacagcccagcagatgacatagttccactgtgctctagtccattaaacagaaagaaattgaagacagag

SEQ ID NO: 884272 - DNA, 120 bp, Artificial Sequence
  ENSG00000258820_1 (sequence is synthesized)
atgaacacagatcaagagcccaggtttcttgatatctaatactaatatactgatggagttaaacattccaaggaatatagcatgtcttggtctctgagagccaatatatctgggttacac

SEQ ID NO: 884273 - DNA, 120 bp, Artificial Sequence
  ENSG00000258820_2 (sequence is synthesized)
caaacttgccttggatatcaaagtactagtagcaaaggaactcccaattcctcacctgctgtgaagtttcccattcactgcaagcaaagtccaggtgaaagcaaagattcttcacccgca

SEQ ID NO: 884274 - DNA, 89 bp, Artificial Sequence
  ENSG00000258820_3 (sequence is synthesized)
caagcaaagtccaggtgaaagcaaagattcttcacccgcagaaaccctctgggcaggccaggcacggtggctcacgcccagaatcccaa

SEQ ID NO: 884275 - DNA, 84 bp, Artificial Sequence
  ENSG00000258820_4 (sequence is synthesized)
cccaggagttcgagaccagcctggacaatatagtgagaccccatctctacaaataataaaaaaaagtagccgggcttggtggcc

SEQ ID NO: 884276 - DNA, 120 bp, Artificial Sequence
  ENSG00000258820_5 (sequence is synthesized)
agctctctaacaaaggacacaatggaatgtgcctgttttcaaattcctgtaaaaaagggccctggaagacctccaagcctgctcagacagacatcagctggatgaagccccaggttcaaa

SEQ ID NO: 884277 - DNA, 120 bp, Artificial Sequence
  ENSG00000258827_0 (sequence is synthesized)
ttcttttatagcaaaaattggcttggaaagaaatcatggttaacttcttattctgtagactgttaaaagacttgaggcccagagaggtgaaatatcctgcctaacatttcccagtgagtt

SEQ ID NO: 884278 - DNA, 120 bp, Artificial Sequence
  ENSG00000258827_1 (sequence is synthesized)
agtggcagagctgggactagaaaccagatcttttgaggaattccacacacaaggaaattacttggctgggtcaaagtcacaccctgagtaaagtgggaactgacaggatttcagccaaga

SEQ ID NO: 884279 - DNA, 120 bp, Artificial Sequence
  ENSG00000258827_2 (sequence is synthesized)
tctgtctgtctccaaagtctacgctttctaggactctatacactgctgttttaaaattaattaggcattctaattacaaacttacctcaggctaagttatgacagtagagaaagacatta

SEQ ID NO: 884280 - DNA, 120 bp, Artificial Sequence
  ENSG00000258827_3 (sequence is synthesized)
tacacttcctgaaattgcatgtatatctttaaaaaagattttatttggaaaaacattgaaacttacaaaaaagttgtaagaaccgtaaaaggaactttttacctggattcactgctgttg

SEQ ID NO: 884281 - DNA, 120 bp, Artificial Sequence
  ENSG00000258827_4 (sequence is synthesized)
acattttgccccatttgctttatcatttcttctctatagctacctatctatatatccatccatctattgattgattattattttttttttttgagatgaatttcagtcttgttgcccagg

SEQ ID NO: 884282 - DNA, 120 bp, Artificial Sequence
  ENSG00000258827_5 (sequence is synthesized)
ctgcagtgagctgagatagcaccactgcgctccagcctgggcaacagagtaagaccttgtttcagaaaaacaaaaaaactaaataaaagttagaataaaaaaagcactttcgtaagaacc

SEQ ID NO: 884283 - DNA, 120 bp, Artificial Sequence
  ENSG00000258826_0 (sequence is synthesized)
taaagtgggaagatgccaataagggtccttgctccttgagtatgtgatcctgacacccagagatgctaagcccaaatgccctcagaagtcaggcagggaaggagaatatgtggagtaaca

SEQ ID NO: 884284 - DNA, 120 bp, Artificial Sequence
  ENSG00000258826_1 (sequence is synthesized)
actgtaagaaggaagaaaacaaggatcctgctagaacaacatggaaacaggacctacaacaaagagatttctcactggcttcctggtggttcattcaatagggaattcctgcagcaagtt

SEQ ID NO: 884285 - DNA, 120 bp, Artificial Sequence
  ENSG00000258826_2 (sequence is synthesized)
ggagggagggaggagaagcagggaggccacctcctgtcaaagctgggacatctgagagacagtggtcacacaacaactcaactgcatgtgcacctaaaacagtagcttattttctctgac

SEQ ID NO: 884286 - DNA, 120 bp, Artificial Sequence
  ENSG00000258826_3 (sequence is synthesized)
atagtgactgatagagagcagcagtctcagctgtaaaaatagagtccccagggaatactgatagcctttttccaataaagcgaaatctatttgcaataataggtatatgcaaagacctcc

SEQ ID NO: 884287 - DNA, 120 bp, Artificial Sequence
  ENSG00000258826_4 (sequence is synthesized)
ggtatcagtgcaaaaaattattttacttgcgaattaatgatatcaccacgttttcttgcttaaactgtctttttaggttagctcagctactctgggctaaacattcagtctttcagatat

SEQ ID NO: 884288 - DNA, 120 bp, Artificial Sequence
  ENSG00000258826_5 (sequence is synthesized)
actccacttaccttagctcctcccatggtggttccggggttggagaggcttacgtgaccttatggtagcagggcagaggcagggctatgctgctcatggggcattctgtaaaagtaagat

SEQ ID NO: 884289 - DNA, 120 bp, Artificial Sequence
  ENSG00000258826_6 (sequence is synthesized)
gtgtcttccttatgataccttccttccagttgttggaaagttgtcgtgctgcttttattagagcaagcatcttgttgccatatgctttaaaatggacataataaatgtgcaaatcttcaa

SEQ ID NO: 884290 - DNA, 120 bp, Artificial Sequence
  ENSG00000258824_0 (sequence is synthesized)
ttacttcccccagtggaaaggaaaagggcccataggagctgaatctgactttgggaccctcagtgggtgaggtggtgagcccgcagtgacgtatgcaatgcctgtcacagtgcaggctaa

SEQ ID NO: 884291 - DNA, 120 bp, Artificial Sequence
  ENSG00000258824_1 (sequence is synthesized)
aaccacaggctataaccaatagcagtaactgaaaaacaaaataaagctaaaagcagtgctgtacaatcagctccaggagattttccacattcatccttttcgcttacactctacacttac

SEQ ID NO: 884292 - DNA, 120 bp, Artificial Sequence
  ENSG00000258824_2 (sequence is synthesized)
tactgaagcctttttcaaccagctccaggttctgtaaaaacaacagtgaaaggcctatgagatcagagagttgaaaaccactgcaggttcttcttcaaaggcaaacaacctccttgagcc

SEQ ID NO: 884293 - DNA, 120 bp, Artificial Sequence
  ENSG00000258824_3 (sequence is synthesized)
agcagccactcactatcaggacaaggaggccaagaaagaagagagaaggtcccttggtgcattttttccagtgcggtaagagacacatatctttgactacatgactaaacgcagcactgg

SEQ ID NO: 884294 - DNA, 120 bp, Artificial Sequence
  ENSG00000265425_0 (sequence is synthesized)
aaaattgttgtcagataattctctgtagatctctctcatttctgcatatcttgaatgcacaggtactaattgacctttgttctggagcaaagagcagccatgtatgctgtttagaataat

SEQ ID NO: 884295 - DNA, 120 bp, Artificial Sequence
  ENSG00000265425_1 (sequence is synthesized)
gaataagttgtctgtctgtggcaaagatcaggcctgctgactcccggttttgaaagacttgggttccataagctcaggaatcctctcctgtagaatgtgttcaagcatttatctgggcac

SEQ ID NO: 884296 - DNA, 120 bp, Artificial Sequence
  ENSG00000265425_2 (sequence is synthesized)
ttcttggaaacaaaggaaactggcaaatatgcagatgctcatgcttcttgctttgtttaaagaggaaaactgaagcattgtctctaaaagttggaaacatatggttaaagtacaggtgac

SEQ ID NO: 884297 - DNA, 120 bp, Artificial Sequence
  ENSG00000265425_3 (sequence is synthesized)
gaaagggtctgggaagaggaagaaagtcaccactgaggaagtgaagaaggagttgccatctggaaaatagaggttatgacgcaagaaggcaaaaggaagaggattccgtgaagagaacag

SEQ ID NO: 884298 - DNA, 120 bp, Artificial Sequence
  ENSG00000265425_4 (sequence is synthesized)
gaaacaggaaatgcaggcatccgggcaacagtaaaatcacaaatacaaatatgtcctctgactaatgcacacccacacacactcaaatgcagaaaagggtaaaattagttgctttctcac

SEQ ID NO: 884299 - DNA, 120 bp, Artificial Sequence
  ENSG00000265425_5 (sequence is synthesized)
attggataacttctcagggcacaatctcaagattggtgattcgataaaaaattacgtaatgtttcacatgtctagacttcaatccattctaaatgaatattttccttctttaaccagtat

SEQ ID NO: 884300 - DNA, 120 bp, Artificial Sequence
  ENSG00000238099_0 (sequence is synthesized)
attctgcaatgatgaagggggatgattgaaaagagctggactaaattggtctaactaggacacttgaaggcttgtgaatcagttcacacgatcagtgtgaaaagcgggtatgaagaccca

SEQ ID NO: 884301 - DNA, 120 bp, Artificial Sequence
  ENSG00000238099_1 (sequence is synthesized)
gatgctggtgtgtacgtgtgcatataagccccaacagctagaaatcaagcctttctggcttccgattgttggagaagtggaaacagttaatggagtatgcaatgaggggaaatagtttga

SEQ ID NO: 884302 - DNA, 120 bp, Artificial Sequence
  ENSG00000238099_2 (sequence is synthesized)
atccaaaaggatgtcattgagtgcaaacacagtcctggaactgggcccgttgggcgtgaacctcaggagctattaatcgacatgcttcaatttatccctgggtccagaaagtgctcttct

SEQ ID NO: 884303 - DNA, 120 bp, Artificial Sequence
  ENSG00000238099_3 (sequence is synthesized)
tggtctgtgggcagaaacggcttccttcccttccttccagcagcctgcactatcttctgtgacaatggcctctgccagaccacatccatcactcctaggacatttgtgtcttaactggag

SEQ ID NO: 884304 - DNA, 120 bp, Artificial Sequence
  ENSG00000238099_4 (sequence is synthesized)
ctgtttaaattttcaagtacaataaccaaggactgctgcaagaaatttaaatatgatagcaaagtttataccctcaccgtttctctagcggttcccttagcaacagctcttactttttac

SEQ ID NO: 884305 - DNA, 120 bp, Artificial Sequence
  ENSG00000238099_5 (sequence is synthesized)
gactcaccttggctacacactgccttcgcaatcgtttgtcagactgatttccaaaacagctcagatccctctcagaactaaacattcagagcaggagttgaagtggaaaacataaaacct

SEQ ID NO: 884306 - DNA, 120 bp, Artificial Sequence
  ENSG00000238099_6 (sequence is synthesized)
ttttgaacagaggtttaaaatctccttaaaagtcatcatagcttcccaggtcaacggaaaaaaatatatatgtcaaaaaataagtggggaaaagtaaagaaactacaaaaagctgttgca

SEQ ID NO: 884307 - DNA, 120 bp, Artificial Sequence
  ENSG00000238099_7 (sequence is synthesized)
ctgcaattctaagtatttgacaaatgtatacagagatgaagaataacagctgaaaatgaaaatagttttattggtgtattacgaaagtaggagattaaaaaataatattatattcttgtt

SEQ ID NO: 884308 - DNA, 120 bp, Artificial Sequence
  ENSG00000238099_8 (sequence is synthesized)
atatttgttttttataaaaatgtcaaaacacctctcatgcactcattcaacaaacatttatggtactcttaacttgtgtttacctttgtttactccaccctcccctcatctttttctcat

SEQ ID NO: 884309 - DNA, 120 bp, Artificial Sequence
  ENSG00000238099_9 (sequence is synthesized)
ctctcctatgccttcaggtgtttaatcagtcctttaatatttgcacctgtgtgtatactttccctcccgatcgggcttttcgatggcaatggattgtctatttttttcccctataaacct

SEQ ID NO: 884310 - DNA, 120 bp, Artificial Sequence
  ENSG00000238099_10 (sequence is synthesized)
tcactacttctctcctgtggatagtatacttgagttacatgaaacaagttcaagtttacaagttcagctaacataccggataaaatacagagaaggatcttcatgccttcccccactagg

SEQ ID NO: 884311 - DNA, 120 bp, Artificial Sequence
  ENSG00000238099_11 (sequence is synthesized)
gttggtggtccccaagagaggataaacaacatctgaacaccagggccaccgttttaaaagggatgctggtattcatttagggtaagaatgggtgtgtgaatcaaggttcaatgagataag

SEQ ID NO: 884312 - DNA, 120 bp, Artificial Sequence
  ENSG00000238099_12 (sequence is synthesized)
cagaactaccgtgagtgatgtaaaatagggattcaagtcttaacactagtatgggagctagtggaaaagtctacatgaggctgtggcttctgtgactggcatgggcatggagtggctgtg

SEQ ID NO: 884313 - DNA, 120 bp, Artificial Sequence
  ENSG00000238099_13 (sequence is synthesized)
ggagtggctgtggacctgagccaacagtcaagaaggaaagctggtcgtcagtgcaggagcgcaaggacaaaccagagcgtaagagaataaactgggccaagcacggtggctcacgcctgt

SEQ ID NO: 884314 - DNA, 120 bp, Artificial Sequence
  ENSG00000238099_14 (sequence is synthesized)
tatcaggaaaaaaaaaaaaaaaaaggagaaagagagagaataaactggaacccatgaggacaaattggaattcacgtctgtctttcatccgcttcagcatcagtgacaaggaaatctgca

SEQ ID NO: 884315 - DNA, 120 bp, Artificial Sequence
  ENSG00000238099_15 (sequence is synthesized)
tggtaaagccaacacactttaccatggagctgtgcatatatcaggctagagattcagagaagccaaaggaagatccgtggttgctggaggagctgtggcctgggtggtccacaatgtgaa

SEQ ID NO: 884316 - DNA, 120 bp, Artificial Sequence
  ENSG00000238099_16 (sequence is synthesized)
tcttttttgtgcctaaatgtaacctggagccacaatgaaagggattacgagaaatggagtttaactaagatgacccagtacaaaggtacacaatagatgtctccatttctctccccggaa

SEQ ID NO: 884317 - DNA, 120 bp, Artificial Sequence
  ENSG00000238099_17 (sequence is synthesized)
tgagtttgtagaaacaacagctataatcattctaaattcaatttaatcctaggcttggcaccaaatctcaaggttctggaatttccagaagacttgcttaagggtctcattctcatgtct

SEQ ID NO: 884318 - DNA, 120 bp, Artificial Sequence
  ENSG00000238099_18 (sequence is synthesized)
aaatgtaggaatggagaagtcaactaaataggagatccttacagaaacaagaagaaatgaaggattggagttgggaactatttgaaattatactaatgatcatgtcttctattgaattaa

SEQ ID NO: 884319 - DNA, 120 bp, Artificial Sequence
  ENSG00000238099_19 (sequence is synthesized)
aagcaactaccagtaatgtactaaggagttttccaaattcctaatcctctctgttgccctccaaaaaaaaggagagagacagagagaaagataaaagtagcaagctgctctttgcatgaa

SEQ ID NO: 884320 - DNA, 120 bp, Artificial Sequence
  ENSG00000238099_20 (sequence is synthesized)
gaagtcattcatgtattcatcgacaagaagcagcagccaagcatttacagagtacctatccagctactcgggcaggctgggcactgtgctaatatagcgtcctacatggggactgtctta

SEQ ID NO: 884321 - DNA, 120 bp, Artificial Sequence
  ENSG00000238099_21 (sequence is synthesized)
cagaagattggaaaaaggataagaatccatttttagcatatttgaacagaaagttgctatgcaacagcctcacacctaagcaaaatgctggctgctggccttcagcctgggcatggccca

SEQ ID NO: 884322 - DNA, 120 bp, Artificial Sequence
  ENSG00000238099_22 (sequence is synthesized)
gggcaggtggaggcaactgacaccaaggacattctctcagagacaagacagcccctggaagccccactagcagatctacctgggatccttagattaaaaattatgtgcaaatagctatca

SEQ ID NO: 884323 - DNA, 120 bp, Artificial Sequence
  ENSG00000238099_23 (sequence is synthesized)
aaatgtcagagaacactcaactaaaagcatgatcatgatcgtcatcatcatcatcatcgtcatgactcctgctacccacacaatctgcaaatagcaagacttttgtccttctacacagac

SEQ ID NO: 884324 - DNA, 120 bp, Artificial Sequence
  ENSG00000238099_24 (sequence is synthesized)
gtggagtccagccaaatacctctgtggcctgaggcatctgcagatctggacccagtcaacagaggttgagtgattggatgtgggccagaaaattccttacttttatttcttccacttggt

SEQ ID NO: 884325 - DNA, 120 bp, Artificial Sequence
  ENSG00000238099_25 (sequence is synthesized)
ggaataagaacacagtgttgtcttggtaaaacccgctcctgtgcttcttccctttgcaaaaggcaggctggacatcattactttgaaaacatgacattttttgcattggtgagttgggtt

SEQ ID NO: 884326 - DNA, 120 bp, Artificial Sequence
  ENSG00000238099_26 (sequence is synthesized)
gggttttgttttgctgttgttgtttcctgtataatgattattcacatacacctgactaatcacttgtcacattaaaagtcaaaggcctcccatcaggaatttagaggatttattttcccc

SEQ ID NO: 884327 - DNA, 120 bp, Artificial Sequence
  ENSG00000238099_27 (sequence is synthesized)
accatggagttctcatcaggactgacctgttagaaccagtttgatggccacagctgcttgcatccccatgactgccgcacagtccctttaatcacttctcagagtccagggaggtccctg

SEQ ID NO: 884328 - DNA, 120 bp, Artificial Sequence
  ENSG00000238099_28 (sequence is synthesized)
ggaaggctgattccactgcgggatatttatctgaagtaaattcagaaaatggtgtcatctcttgccatgtggatgcagaatatcataataatatcattcctattcgttccagtaaggttc

SEQ ID NO: 884329 - DNA, 120 bp, Artificial Sequence
  ENSG00000238099_29 (sequence is synthesized)
atttgactgtatctgcttttattttaaaatagaaatcttgccctgctgtggatcacacattttcccacccaagttaattggtaatgccaaaaatgtaccttataatggatttttactagg

SEQ ID NO: 884330 - DNA, 120 bp, Artificial Sequence
  ENSG00000238099_30 (sequence is synthesized)
gctcactcctgtaatctcagcactttggaaggcagaggcgggaggatcgtttgagccagggagttcgagaccagcatgggcaacatgagaccctgtctctattttataaataaaaaataa

SEQ ID NO: 884331 - DNA, 120 bp, Artificial Sequence
  ENSG00000238099_31 (sequence is synthesized)
gaccctgtctctattttataaataaaaaataataacaaaattttaaaatacataatcaagtaagagcagctatattgaaacattcatataaactctagtcaatacatttggtttctcagc

SEQ ID NO: 884332 - DNA, 120 bp, Artificial Sequence
  ENSG00000238099_32 (sequence is synthesized)
tattcctccacagtgaaatatttggtattaaataagtgtatgttaagtggtaataaatcttcaacttcagtcatttcaatattttgctaacctccaagcaattgacttttaaattcatct

SEQ ID NO: 884333 - DNA, 120 bp, Artificial Sequence
  ENSG00000238099_33 (sequence is synthesized)
aacctccaagcaattgacttttaaattcatctaatttttattattatgataatacataaaatcatgttcatcaatacaaaatagatccatttagctcatcagtattttatatattcataa

SEQ ID NO: 884334 - DNA, 120 bp, Artificial Sequence
  ENSG00000238099_34 (sequence is synthesized)
gcaagagcactgtagtaagacataaccctcctttgcctctctatgtcctctgccccatgctgcttatgtccttattgaagttaagagtccggctgtcattgagaacctctgatactgcac

SEQ ID NO: 884335 - DNA, 120 bp, Artificial Sequence
  ENSG00000238099_35 (sequence is synthesized)
catttgatgaagggctatgaaaaattcccccgagaacagcaatgcacactgatcctaccagctcattcactagaatacactttctaaagccaatactaatggctgtaggcaaatagagca

SEQ ID NO: 884336 - DNA, 120 bp, Artificial Sequence
  ENSG00000238099_36 (sequence is synthesized)
ggacggtcaagatacctctacccacttcattctacgcatagactgtctggttctctgaggtcacagcagtataatcttaaggtgaccattaagatctgattgacacattttcaggattta

SEQ ID NO: 884337 - DNA, 120 bp, Artificial Sequence
  ENSG00000238099_37 (sequence is synthesized)
aagtaaaattaaaagaacgtggaaggcagctgtttgtggcactgtaacagatagccatgtttacgaaaacaaattcaagttgagcaatgatctggcagattttgtttgccagggaggacc

SEQ ID NO: 884338 - DNA, 120 bp, Artificial Sequence
  ENSG00000238099_38 (sequence is synthesized)
ttttttttttctcaatgacattatataactgattcagatatcatttttcctttacatacccagacacaaccctagagatgccgagcccccagatatttcactttttatcagatatttggc

SEQ ID NO: 884339 - DNA, 120 bp, Artificial Sequence
  ENSG00000238099_39 (sequence is synthesized)
acaaagaaacacttctgcagtctatagtttaaactatacaactgtctgggaaaactttgtgattgtaggtgctaatttcaactgtcctgtaactcattcctcggtattaccatctataaa

SEQ ID NO: 884340 - DNA, 120 bp, Artificial Sequence
  ENSG00000238099_40 (sequence is synthesized)
atggatgtagcaataataaattaagtcatgaaattgtttatggggaataaccactgatgggattatgtggcactttacatacgtaaaatcctaagtagtccaagcaatcaaaagtaacat

SEQ ID NO: 884341 - DNA, 120 bp, Artificial Sequence
  ENSG00000238099_41 (sequence is synthesized)
tttccagtgacatctccataaaagccactttcttctgaacaaatacaaactttccagagatgtctaagccacagaactgcacaggcagatgtgaaatgtaagccctatagagaaacagag

SEQ ID NO: 884342 - DNA, 120 bp, Artificial Sequence
  ENSG00000238099_42 (sequence is synthesized)
aaacgaaacaaaatctgcatttgaacattggagttttatcacaattgcaatacatctaacagtcttctttgttttagttactatactttttcttaccatcatgaagaaaagatatcacag

SEQ ID NO: 884343 - DNA, 120 bp, Artificial Sequence
  ENSG00000238099_43 (sequence is synthesized)
aaaatgatgttaaagacaggcctaacatacattttctgagctttctggtgaaagattatgttttcaaaaaacttctccaagggaaactctttgaagtgtttttactgccatttgatcagt

SEQ ID NO: 884344 - DNA, 120 bp, Artificial Sequence
  ENSG00000238099_44 (sequence is synthesized)
taaaattttgttatttgcattattttgaaatgtctttgtactctaaaggctggtaaaagaatgcataattgtggaaaacaatttaataaataagagaaaactaacaacaacaatataaaa

SEQ ID NO: 884345 - DNA, 120 bp, Artificial Sequence
  ENSG00000238099_45 (sequence is synthesized)
gctctgaatctgttataattgactcaccacgacctgcatgtacacatggaattcctcatggcatccttagatcttttttgccacatccttttgctctgactcgaagaggaagccaaccca

SEQ ID NO: 884346 - DNA, 120 bp, Artificial Sequence
  ENSG00000238099_46 (sequence is synthesized)
tctcttcgctggcctgtgccacagatgcattccatgtcaataccatctgtgatcccgacggaaatgatagttaaaatttgttgcatctgttattgagcctatctttgtagtaggagtaat

SEQ ID NO: 884347 - DNA, 120 bp, Artificial Sequence
  ENSG00000238099_47 (sequence is synthesized)
acctgcaattaaaacactgaaagtagtcacaactgggagatacaaaataaatgtgggaaaaagttctttttcaataaagaagcttgattagtttgagaaacatcaactccaaggactata

SEQ ID NO: 884348 - DNA, 120 bp, Artificial Sequence
  ENSG00000238099_48 (sequence is synthesized)
atctaagctggtagaaattaaaattatgggaaaatagaattttgccgatagacttgaaactgtgaaaataagtagtgtttgataacctgaaataaactctttctaaagcactatttttat

SEQ ID NO: 884349 - DNA, 120 bp, Artificial Sequence
  ENSG00000238099_49 (sequence is synthesized)
agtggaaccaggggcagctattattttgttattattttaattgtttgtgaacatatgggataaagaaaaggagcatgaatgtgattgcagctacagtatatctagaagagtcaattaaat

SEQ ID NO: 884350 - DNA, 120 bp, Artificial Sequence
  ENSG00000238099_50 (sequence is synthesized)
ttatgttctaaaggagcataagaatgatgattctgtcactcagaattgaagatgtttaatgtatattgtaaactggtaatgtttaagattttcagatagtgtgtatattgattaaacaag

SEQ ID NO: 884351 - DNA, 120 bp, Artificial Sequence
  ENSG00000238099_51 (sequence is synthesized)
atattgagagatttcaaatggccaaaaagtagaattgtctttatgtatatcaaaatatatttttgaaacttctgaatttctcagtcatataaacaataaacatctacctctagaagaaaa

SEQ ID NO: 884352 - DNA, 120 bp, Artificial Sequence
  ENSG00000238099_52 (sequence is synthesized)
tggtgccaaatgggtcacttgcacagtgcaaagctttctctccacagagctcagcgtgatacctccgtctgctgttggcaaagctttaagactgctgggaactcagacgaaatcatccac

SEQ ID NO: 884353 - DNA, 120 bp, Artificial Sequence
  ENSG00000235066_0 (sequence is synthesized)
ggagactatataacttactcatggatccatagctagccagctgcaaagctgggagtcacaactcaagagactattctacaccgaagactggacaaatggtttcatgaaatgtttcccagc

SEQ ID NO: 884354 - DNA, 120 bp, Artificial Sequence
  ENSG00000235066_1 (sequence is synthesized)
tttgttaggctgatacccagaaacagctgctcttcacttctcccaactgaaaactccagttattatcattaaaacaccaccctgcagaagatccacctgcagaagatccacccgccctga

SEQ ID NO: 884355 - DNA, 120 bp, Artificial Sequence
  ENSG00000235066_2 (sequence is synthesized)
gggtaaaaacctgcagaagatccacccgctctgagggtaaaactttggctggtaaaagatatgctgaataaaggaacaccaggtatatcccctgatgccacaagctcattgccaaggagt

SEQ ID NO: 884356 - DNA, 120 bp, Artificial Sequence
  ENSG00000235066_3 (sequence is synthesized)
gtggacagtgttgttggagtcacaaatgggtccgcggtcctcaacgggctgttaatcttcatagctgagggagacacatgcccaagtagtatatactactcatcacatgctgaaggaatc

SEQ ID NO: 884357 - DNA, 120 bp, Artificial Sequence
  ENSG00000235066_4 (sequence is synthesized)
cagggaaaaggaagaaagacctccactgatagtactgtggaatattgggttggacggatttaaagtagaacgtgggagaccagacagaagtctacagcaaaaggccaggcaaaaacttga

SEQ ID NO: 884358 - DNA, 120 bp, Artificial Sequence
  ENSG00000235066_5 (sequence is synthesized)
tgagagcctagaatacagaagtggcaaaaaagaaaacttcaaatgtcacagtacaaatcctattgttcactatcctgggtcccatcccaggcaacgtgcatgtaagattttacctaatac

SEQ ID NO: 884359 - DNA, 120 bp, Artificial Sequence
  ENSG00000235066_6 (sequence is synthesized)
cctttattactgaagaacatcacagaaggggtgccactccctctccagagaaagctactgcatctcaaaagcagttttgggatagtagctgtgtttcgccaacagcatatcacacttggt

SEQ ID NO: 884360 - DNA, 120 bp, Artificial Sequence
  ENSG00000235066_7 (sequence is synthesized)
gagggttagctacctaggaaagcaggcacatggcacataacactgtgctgcacggtgttcccgcagatgtttgttcacaaagcgcagccagctcaagtaaagcacatgtttaggaaatag

SEQ ID NO: 884361 - DNA, 120 bp, Artificial Sequence
  ENSG00000235066_8 (sequence is synthesized)
ctgctcagaatagagcaaataactctgaggaatattccttgctgtcagtatcttctatatatttctaccacttcacccccaaacagtgacctcaggcaaagactaaaatccagaagcaga

SEQ ID NO: 884362 - DNA, 120 bp, Artificial Sequence
  ENSG00000235066_9 (sequence is synthesized)
tgatcccattatgaagggaaagcttgttgagtcctaacagatgttttggagtttccagcatgaaaggctatagagggaaactcttggacagcctagctctgccacaggttccctagcact

SEQ ID NO: 884363 - DNA, 120 bp, Artificial Sequence
  ENSG00000235066_10 (sequence is synthesized)
caagaaaaatattgaccttcacaggagtcacatgtccaacccaggagaaaaagatatgatctagaactaccaggggccagaaattagatctgcttttttcttggctgcatccagagaaag

SEQ ID NO: 884364 - DNA, 120 bp, Artificial Sequence
  ENSG00000235066_11 (sequence is synthesized)
ttactacagctttgctaaaatggtgtgaacacggatgatgggcttctagaatcacataagagaagtaggtcaatggcttacaactgctggccagtgattattctttcacgagtgcccggg

SEQ ID NO: 884365 - DNA, 120 bp, Artificial Sequence
  ENSG00000235066_12 (sequence is synthesized)
aacaaacagagctatctcccaacttcctggtcctactggcagatcttcatgtaaatctctttttcttgtgctccttacacgacagaccagggaaaagggagagaaccacagagaatgcta

SEQ ID NO: 884366 - DNA, 120 bp, Artificial Sequence
  ENSG00000235066_13 (sequence is synthesized)
gtgtaactccccatttgacaagtgaaaaaatgtccaaaatactcagatttgacaatggtgcatactgagtacgcagttgaaggcactggtttatcctgacattcataacattctctctta

SEQ ID NO: 884367 - DNA, 120 bp, Artificial Sequence
  ENSG00000235066_14 (sequence is synthesized)
acgtgcatactatatatattcccagcttctggacacagaacacagtgatccctcaattagtggatacttgtgatatgaaagaactgaggatttgggaggaatgcagaggagtaacattgg

SEQ ID NO: 884368 - DNA, 120 bp, Artificial Sequence
  ENSG00000235066_15 (sequence is synthesized)
tcactggcagaaacagaagaggagggagcaggaagggagcagaaaggaggaactgagaaaatcaccatctgtgatattttatttcttagggcaagaagatcttaaaaaaaagacaatgtc

SEQ ID NO: 884369 - DNA, 120 bp, Artificial Sequence
  ENSG00000235066_16 (sequence is synthesized)
agtgataaaaagtgggtgatgaatacatagggaagaagccagttgagattttttaaaaaatcttgaaacacaaacttggacattggagccttagctttcagaatcctccctgaaagaaga

SEQ ID NO: 884370 - DNA, 120 bp, Artificial Sequence
  ENSG00000235066_17 (sequence is synthesized)
aaaatacatgtttttctcccccactatattgtcacttcctcgaggaaggacaagggctcatgtattctgtttatctgcatgcctggagcctaacccaattcatctgtttgttctattttg

SEQ ID NO: 884371 - DNA, 120 bp, Artificial Sequence
  ENSG00000235066_18 (sequence is synthesized)
tctgaggctacgcaggactctgacagaagaatacggccaggggacttactgagaggtccacaactgtcttgatggccttttcttttctctttatgaagtcatcatcctacaagacaaaac

SEQ ID NO: 884372 - DNA, 120 bp, Artificial Sequence
  ENSG00000235066_19 (sequence is synthesized)
agagcgattaaacaaatcccaagggaaaattaaaactcaagtggaccactcagatatgtcttataaattgacttctcatctcatcactactttgcctgacgaagtctcaattttcgaaca

SEQ ID NO: 884373 - DNA, 120 bp, Artificial Sequence
  ENSG00000235066_20 (sequence is synthesized)
aattgtaatatattctccatgggaaaaggctacaaaccctgcagatggctccaacatagatccctacacagccagtaagaaaaagggggtcataaggaatagtgcttaagacgagagttc

SEQ ID NO: 884374 - DNA, 120 bp, Artificial Sequence
  ENSG00000235066_21 (sequence is synthesized)
tcatttcaaatcctcttaagcactgaaacctcagctcgtttcaccagccactggggaagaaagtgaaaagacaagagttgctaaggacaacatcccactgaagtgaaggccagttcagac

SEQ ID NO: 884375 - DNA, 120 bp, Artificial Sequence
  ENSG00000235066_22 (sequence is synthesized)
gcccaactcatgaactcaaatcagcatagttgaactgactaggtgataagaagctatcaacacatgctgttctataggaaaagcaaccagctgggtatccaagatgttaagatccaatgg

SEQ ID NO: 884376 - DNA, 120 bp, Artificial Sequence
  ENSG00000235066_23 (sequence is synthesized)
gacctagtgctgagtagccgtgcaggagctttaaagccttacttcacatccttgagcctcagttttcctttctgtaaaagtatatcagttcccttcacctcacagagctaacatgggagt

SEQ ID NO: 884377 - DNA, 120 bp, Artificial Sequence
  ENSG00000235066_24 (sequence is synthesized)
aggacaagccaggcccatcacaggaattctgatgttaagaggacaagaaaccacacagaggctctcacctgaacaacaggaaatatgtgaataaaatccatcccctggatctggtggggc

SEQ ID NO: 884378 - DNA, 90 bp, Artificial Sequence
  ENSG00000235066_25 (sequence is synthesized)
gctgggctcaagtgaccctacatgcatgtgccatctgttttatctggctaaagtacaatttttcaatgtggaatagaacacatttactaa

SEQ ID NO: 884379 - DNA, 120 bp, Artificial Sequence
  ENSG00000235066_26 (sequence is synthesized)
atcacataagagaagtaggtcaatggcttacaactgctggccagtgattattctttcacgagtgcccggggggaaaacaaaacaaacaaaaacaggcaaaagctacaggcacatgaaaga

SEQ ID NO: 884380 - DNA, 120 bp, Artificial Sequence
  ENSG00000235066_27 (sequence is synthesized)
ccccaaacatttttgatgcattgtttgttgaatttatggatgtggagctgcgaatatggagggccggctgtttgggagctgtacagcacgagccacttaatcataggggtttgggaaaca

SEQ ID NO: 884381 - DNA, 120 bp, Artificial Sequence
  ENSG00000235066_28 (sequence is synthesized)
gctggaggcaaagagaagtctctcccttaggcatttagccatacggactgaatatctacaaattgtaagatgttctggtaggtactggaaacaaagcaataagcaagacagccatgcaga

SEQ ID NO: 884382 - DNA, 120 bp, Artificial Sequence
  ENSG00000235066_29 (sequence is synthesized)
cttgctctcatgcagcttaagagtctaatgagagaagcagataaacaatcacacacacatggatacacatgattatgaactgctgtaagattctggtgaaggaaaggaatgtggccgtag

SEQ ID NO: 884383 - DNA, 120 bp, Artificial Sequence
  ENSG00000235066_30 (sequence is synthesized)
aagaaaagaactggcctttttcttcctttagccctgtgagacagacattctgcacttaaattatcagccacagggcatccgtggctgggaatccaaacagatgctaatgaatttggaaca

SEQ ID NO: 884384 - DNA, 120 bp, Artificial Sequence
  ENSG00000235066_31 (sequence is synthesized)
acatttaagtggctgaacaaaaatggatcctaaacacccccaaatcaagtgcaacaaacaagaaataggctgacacatttctatcaggaaggcaaccagaatgtcaaactcttgaatgat

SEQ ID NO: 884385 - DNA, 120 bp, Artificial Sequence
  ENSG00000238097_0 (sequence is synthesized)
ggaggactgcgctccaggatgcaaccaaagccgggtgcacagcagccggcatggcgccaaaactgaagccctgagctgctctgcggtgctaccctttgtccctccagactctcttttcct

SEQ ID NO: 884386 - DNA, 120 bp, Artificial Sequence
  ENSG00000238097_1 (sequence is synthesized)
tcatctgtttgtcagtaaaccgaagccaccacagtttgtcatttggatgattttcgccagatggagaagctgcagctccagactcttgacagccgcacaacttccaaggcagtggccccg

SEQ ID NO: 884387 - DNA, 120 bp, Artificial Sequence
  ENSG00000238097_2 (sequence is synthesized)
cgggctgcaaaccccaccttcctgcagttgcagagccagctaagaggtgggcagcatgccaggccccatcagcagcccctggagcacacaccaattgcagatgctcaggagactcggggg

SEQ ID NO: 884388 - DNA, 120 bp, Artificial Sequence
  ENSG00000238097_3 (sequence is synthesized)
tcccaggttacccagccacaacacacagatgctgggtctgggacggctccactggaacctgagatgacctgagggtgtcccagtgatataacatatgaggaaagcagaaacaactaagaa

SEQ ID NO: 884389 - DNA, 120 bp, Artificial Sequence
  ENSG00000238097_4 (sequence is synthesized)
atagactctgaatgtggcagattctagaactgagcaatgcaagaacagcctaataagctgtgtgactaatcactgcatgaaacggagggagagagttgtgcagcttccaagaaccttcct

SEQ ID NO: 884390 - DNA, 120 bp, Artificial Sequence
  ENSG00000238097_5 (sequence is synthesized)
taagagattatgtcagttcaccccttgccttcttcttcttcattccttcctccatcctgctgactagaatgaagagatgttgtcatcttggaccatgaggtcaaggccatgagtggacca

SEQ ID NO: 884391 - DNA, 120 bp, Artificial Sequence
  ENSG00000238097_6 (sequence is synthesized)
acaggatgtaaatgtcatgagggcagggattttgtctgttccccattccccagctgctgtgaccccaatgcctagtcggtgctaaataaatatttgctaagtgaatgaatgaacgaacaa

SEQ ID NO: 884392 - DNA, 120 bp, Artificial Sequence
  ENSG00000238097_7 (sequence is synthesized)
ttctagaactgagcatccagtcttcctaatttagaagaaccccaaaataggtgaaaagtacaaccccacctctgatcccgcctctgaccccgcctcctgtcacagaggcggaagaggagc

SEQ ID NO: 884393 - DNA, 120 bp, Artificial Sequence
  ENSG00000238097_8 (sequence is synthesized)
agatcttcactttccacacctcaaggtactcagccaatcacctgttcatgcctgagattgtgaatccaataggaaagtacaaggacatggagattgtcagagctgttgtatgatggtggc

SEQ ID NO: 884394 - DNA, 120 bp, Artificial Sequence
  ENSG00000238097_9 (sequence is synthesized)
agcagagtcaagagtccagcggagaggcagcaagcatcccaaggatcccatgactgagaaccagcttctgtggtttagaagcaaggcgccaactggtatgagaagcacagacagatggtg

SEQ ID NO: 884395 - DNA, 120 bp, Artificial Sequence
  ENSG00000238097_10 (sequence is synthesized)
ccctgggaacactggctgtcacgtgctggaggaggttcctcagcaagtcaccttccctccatgggcctctgttggaaagaaggcatcaagatcattccagctatgattcctgagctttta

SEQ ID NO: 884396 - DNA, 120 bp, Artificial Sequence
  ENSG00000238097_11 (sequence is synthesized)
gtgagactccatctcaaagaaaaaaagagatatatctgcatgtgacatggaaagaggctcagaatatcagacattttactacagatcttgaaaacagctctccaaaactaactccagatc

SEQ ID NO: 884397 - DNA, 120 bp, Artificial Sequence
  ENSG00000238097_12 (sequence is synthesized)
caccctggggttctcaactccacatggttttctaaaattgagaccaagactaagatgaagagctatgcctcgccctgatgctgccaggactactgttcccatgactaccttgaggtgcag

SEQ ID NO: 884398 - DNA, 120 bp, Artificial Sequence
  ENSG00000238097_13 (sequence is synthesized)
gctgagaccctgggtgtctgtggtggcagagtacagcagaggagttggagtcaaagcagtttggatcctcatcccagctgggcctcctgatgttggagggccctggacaaagggttttca

SEQ ID NO: 884399 - DNA, 120 bp, Artificial Sequence
  ENSG00000238097_14 (sequence is synthesized)
tttgctgggtctcagttctccacatggacaacaatgcactgtatgagttttaaggttcttttcagctctgactctctgtgagtctgaatccagtaggagctattatttccttgattcctc

SEQ ID NO: 884400 - DNA, 120 bp, Artificial Sequence
  ENSG00000238097_15 (sequence is synthesized)
cttactgttttgttcccttcttctctggtttctgtattaaaactttatatgtttatgaatggataatcaaaatgtggtatatccatatcatggaatattatacagccatgaaaaggaatg

SEQ ID NO: 884401 - DNA, 120 bp, Artificial Sequence
  ENSG00000238097_16 (sequence is synthesized)
aagtactgatgcatgctacaacatggatgaaccttaaaaacactaggctaagtgaaagaagccagtctccaaagaccatatgtggtatgatttcattgatatgaaatgctcagaataggc

SEQ ID NO: 884402 - DNA, 120 bp, Artificial Sequence
  ENSG00000238097_17 (sequence is synthesized)
agatttgtagtgacagaaagtacattagtggctgcctagggctaggaagagatgaggagtgactctcaatgagtacaggatttcttttggaagtgatgaaaatgttcaaaaattgattgc

SEQ ID NO: 884403 - DNA, 120 bp, Artificial Sequence
  ENSG00000238097_18 (sequence is synthesized)
agtgatggctgtacaactctgtgaatatatgaaaaacccttgaattatacaattgaaattggtgaattgtatggtatatgaattgtatctgaataaagctgttaaaaaaacggggaagaa

SEQ ID NO: 884404 - DNA, 120 bp, Artificial Sequence
  ENSG00000223528_0 (sequence is synthesized)
agaacaactgagagtggcctctcgcgctttcccccagttctcccttaaaaatacttgggggaagaaagtgcttgactactcacagtcctgtgatgacctgtggcggaaggtaaaccgaag

SEQ ID NO: 884405 - DNA, 120 bp, Artificial Sequence
  ENSG00000223528_1 (sequence is synthesized)
gtgactgcggttaacgtcctcgatgggaatggccaccttcaagaattgaaaaagaagtttaagcactgttatcaatatcatccagcgtaacagctttattcaactggagctatcagagcc

SEQ ID NO: 884406 - DNA, 120 bp, Artificial Sequence
  ENSG00000223528_2 (sequence is synthesized)
aacccctggcctggttttcaaatattcaagctcttggcggtgagacggtgtttactccatcgtggagatgtgagcacgctgcattatgaaaaggcaccatatcagagctacagaacagga

SEQ ID NO: 884407 - DNA, 120 bp, Artificial Sequence
  ENSG00000223528_3 (sequence is synthesized)
cagcaatgacctccacaggctggcagctcggtttttttgtttggtgtaaagacagcatgccacacataaaacagtactgggaagagaaagacaatagctatcttaaaaagactctgtcat

SEQ ID NO: 884408 - DNA, 120 bp, Artificial Sequence
  ENSG00000223528_4 (sequence is synthesized)
ttgtctccatgaacgtcctatttttacgtccaaaaggagatgagagtaaatgtattctaagaaacaccagtgtggttccttagcaaccttgaatgactttgttgggagacactctgcctg

SEQ ID NO: 884409 - DNA, 120 bp, Artificial Sequence
  ENSG00000223528_5 (sequence is synthesized)
cctggagcagctcccgggctgaggaggatgttaggatgtttccttgggttacaaatgagcatttcataatcagcgccatgtgataaaatgaccatgtaaataataccttaacagtctcaa

SEQ ID NO: 884410 - DNA, 120 bp, Artificial Sequence
  ENSG00000223528_6 (sequence is synthesized)
atcaccaagacctgaaaacctccactgactggcttccctacagactgagaatatggaaaagcttataaatcacagctgtgcattgtccaatcaacattcaacagtgattcttttgaaagt

SEQ ID NO: 884411 - DNA, 120 bp, Artificial Sequence
  ENSG00000223528_7 (sequence is synthesized)
gactgtgaagatctgaaactctcaaggaaacacagagaaatagattaccagccactccaaaaggtcgccgcaaccccgaggtaatcctgaactggaccagcgaaccaggcaccattctaa

SEQ ID NO: 884412 - DNA, 120 bp, Artificial Sequence
  ENSG00000223528_8 (sequence is synthesized)
atgatgtattccagccaatcatcttgcagaaaaaacaagacaaaactcacagaaatggcattcatagaaaccaaattttgaaaaatggaaatagtgatatttgagggaccaggatatata

SEQ ID NO: 884413 - DNA, 120 bp, Artificial Sequence
  ENSG00000223528_9 (sequence is synthesized)
aaatcttacgaagacaacttaggaaacaaagtattacttcaatcttcagctacactcttaagatacggccagagtgtacctgcaactgctataactctacgagcaaatagcaatctacac

SEQ ID NO: 884414 - DNA, 120 bp, Artificial Sequence
  ENSG00000223528_10 (sequence is synthesized)
tggctgccatcacactgtctaagacagctcttgactcggctgcttgctcgtgtccagcagccattcatccaaggcctctcagcatgaatgggacgcttcagtggttctgatcccaagttc

SEQ ID NO: 884415 - DNA, 120 bp, Artificial Sequence
  ENSG00000223528_11 (sequence is synthesized)
ctaacactaaccaaagaggaaagacggcagccaagaaatgtcacccacctgatgaatttggactccacagggtcatatagagacatgaggacttcagcatcttctcctattttacaaacc

SEQ ID NO: 884416 - DNA, 120 bp, Artificial Sequence
  ENSG00000223528_12 (sequence is synthesized)
acatttttgaggttcacaaacaaggccagagaaggggttgcagcaaacttggcttgtctgttaatatctatgttctgcttttgagactgtgtatggaaggaaacagaaagtcaaccccag

SEQ ID NO: 884417 - DNA, 120 bp, Artificial Sequence
  ENSG00000223528_13 (sequence is synthesized)
caacactcatcactgacacttgctttctttattccctacagaatagaaaattgtaataactcattggcataacccagcaaaggccttggtgcagtcactttcttatctcccctgcacatt

SEQ ID NO: 884418 - DNA, 120 bp, Artificial Sequence
  ENSG00000223528_14 (sequence is synthesized)
cttaaatcatgcattcacacaacagacaaaaaattgtatcctgtgcaactgctgtgctgagtattttcagagatacaaaactttcaggtgtccatccaataaatcaaaataatgattata

SEQ ID NO: 884419 - DNA, 120 bp, Artificial Sequence
  ENSG00000223528_15 (sequence is synthesized)
ccaaaaataacagagcaacagcagggtggaggaagagcaccagcacggtggaggaagagcaccaacatggcagataaagagcaccaacatggcggaggaagagcaccaacatggcggaga

SEQ ID NO: 884420 - DNA, 120 bp, Artificial Sequence
  ENSG00000223528_16 (sequence is synthesized)
caacatggcggaggaagaacaccaacatggcggagaaacagcaccaacatggcggatgaagagcaccaacatgaagctaaccgcgttctcttcacagtttgcctttcttcctcttcttcg

SEQ ID NO: 884421 - DNA, 120 bp, Artificial Sequence
  ENSG00000223528_17 (sequence is synthesized)
ttgctttgaccgtcctgcacatatccattcttatgtccatcaccaagacctgaaaacctccactgactggcttccctacagactgagaatatggcagaaaagcttataaatcacagctgt

SEQ ID NO: 884422 - DNA, 120 bp, Artificial Sequence
  ENSG00000223528_18 (sequence is synthesized)
atatgcaactgcgaagttctcacgggagaagtcctgagcacactgcaaggcatcctgggaccacagtctcaagggtcacagaggaagggacttcggggctgagacctgcaggaagtgagg

SEQ ID NO: 884423 - DNA, 120 bp, Artificial Sequence
  ENSG00000223528_19 (sequence is synthesized)
ccaaagagagccacaggtcctggcgctggctgcatctccctactcacctggttgatgaggcccctttttctaattcacacaaaagcaccctgagctaacagcagctccagacctgcagaa

SEQ ID NO: 884424 - DNA, 120 bp, Artificial Sequence
  ENSG00000223528_20 (sequence is synthesized)
taggcggagcacagaggacttttaggatggtgaagctacccagtgagagactacaatggtgaatatacggtattattcatttgtcgaaacccacagaaggcacaacatcaagaatgaacg

SEQ ID NO: 884425 - DNA, 120 bp, Artificial Sequence
  ENSG00000223528_21 (sequence is synthesized)
ctaatgtaaactacagacttcacagggcgacgatgtgtcaatgcggttcaccaactgtaatcaatgtaccaatctatggtggatactgataatggggaggcagggggaaggaaggagaaa

SEQ ID NO: 884426 - DNA, 120 bp, Artificial Sequence
  ENSG00000223528_22 (sequence is synthesized)
tggcttggtggtaataacattagcatatgagaaatcaacactctgaatagaaatacaagcttaacaaaaggtaatctactgcaaatatgaatttatgtgcaaagaaatgccccgagggaa

SEQ ID NO: 884427 - DNA, 120 bp, Artificial Sequence
  ENSG00000223528_23 (sequence is synthesized)
tacgaaatggaagatgtcagagcttcaacctctctgcattaataagacttcttctgtgatcaggagaactggacaattgcacacgaagctagaatgtaaaatatttccctattcctgtca

SEQ ID NO: 884428 - DNA, 120 bp, Artificial Sequence
  ENSG00000223528_24 (sequence is synthesized)
acccagacaggagcacatgtaccactgcccagaatgtgcatttcactagacaagtgaccacaaaaggcggagcacagaggacttttaggatggtgaagctacccagtgagagactacaat

SEQ ID NO: 884429 - DNA, 120 bp, Artificial Sequence
  ENSG00000223528_25 (sequence is synthesized)
gcggaaactcttttcggatctgatggatatctccaggaagtaatttcaatgttacccacaaacctggaaaaacaatggatgctcttaagtcgcattttatcctatgcatttttagaagtt

SEQ ID NO: 884430 - DNA, 120 bp, Artificial Sequence
  ENSG00000223528_26 (sequence is synthesized)
acttgaaaatgcccactcctcccagaagttcaaggaactggacccccggacatgagcccaaggttcgccggcttcaaagatcctggccacacaccagtgagcctggcagaggcaggcttc

SEQ ID NO: 884431 - DNA, 120 bp, Artificial Sequence
  ENSG00000223528_27 (sequence is synthesized)
tggtcctctttcccagtgatttcctgctggcctgacaccaaactccactttccctgaatgactctaataaaagtttatcaaaactccgatgactgcaaaagaaactggagatccgagggc

SEQ ID NO: 884432 - DNA, 120 bp, Artificial Sequence
  ENSG00000223525_0 (sequence is synthesized)
gggctaagacgagcctactctaattctttaatctatgtagtagttgcttatatattaaacgtgtgaaaatcgtatgaaatcattgttaattcatactgaaatattcacttacctctgatc

SEQ ID NO: 884433 - DNA, 69 bp, Artificial Sequence
  ENSG00000223525_1 (sequence is synthesized)
gttaattcatactgaaatattcacttacctctgatctatttaagccaagctaataggtaagatagccag

SEQ ID NO: 884434 - DNA, 75 bp, Artificial Sequence
  ENSG00000223525_2 (sequence is synthesized)
tactcgggaggctgaggcaggagaatctcgaacccgggaagttgaggttgccgtgagctgagatcacatcactgg

SEQ ID NO: 884435 - DNA, 120 bp, Artificial Sequence
  ENSG00000223522_0 (sequence is synthesized)
aggataaacagggggtgcagtctttaaaactgctctcagagaagcttccagtggaaccaaaggaatacagatggagggcctggggagagatggcctgaggggacctgcagaagggattta

SEQ ID NO: 884436 - DNA, 120 bp, Artificial Sequence
  ENSG00000223522_1 (sequence is synthesized)
cctgctgcccctcccccaggggagccaggagactgagctgggctgtaaacactccgtgcctggtgcagcctggtctgcacaggctgagaggatgctctacttctaaaccccataaggaaa

SEQ ID NO: 884437 - DNA, 120 bp, Artificial Sequence
  ENSG00000223522_2 (sequence is synthesized)
aggcccaggagggacggggatgttgctgctgatagctaaaaatgatcaaattcttaccatatgccagaccttatgctggacaattcactgacattatcccacgtagtaggcagaattcta

SEQ ID NO: 884438 - DNA, 120 bp, Artificial Sequence
  ENSG00000223522_3 (sequence is synthesized)
acgtgacccccaagattctccaccttctgtgtaatccccaggattgtgaatgtgatggatttcattctggtaaacaggttttgttatatggcacagatgactttaagacagggaggcttt

SEQ ID NO: 884439 - DNA, 120 bp, Artificial Sequence
  ENSG00000223522_4 (sequence is synthesized)
aaatctgtgactagcagaagacatatggaaggcagagattcaaaatataagagggatctgacgcaccactactggcttgaaaatggaggggaccacatggcagaggacgcacgcagcctc

SEQ ID NO: 884440 - DNA, 120 bp, Artificial Sequence
  ENSG00000223522_5 (sequence is synthesized)
tagttgctgagggtggtctccagttgacagcggcaaggtaacaggggcctcagtcctacaaccacaaggaactgaactctgccaacatactgaaagagcttgaaggaggagcataagcct

SEQ ID NO: 884441 - DNA, 120 bp, Artificial Sequence
  ENSG00000223522_6 (sequence is synthesized)
caggggtgagatcatagacccagacaaagccttgattttagttgcctaaaaccccgaactgagaacccaggcatcttgagtgggactcctaacccacagaaactgtgagattaataatta

SEQ ID NO: 884442 - DNA, 120 bp, Artificial Sequence
  ENSG00000223522_7 (sequence is synthesized)
gtggcgttttaaaagggttaacttatgatatttttaaaattagcaacacagaaaatcatacaccccatgtgatacccatcataaccctctcaagtaggcttcaccattttatagacaagg

SEQ ID NO: 884443 - DNA, 120 bp, Artificial Sequence
  ENSG00000223522_8 (sequence is synthesized)
aaacaaagacccagggaaattaggaatttgcccaaagtcacatagcctgtgagtggcagagacaggtttaaacccagctatgtcttgactttatggtcagtgctcttcattgcctcatgc

SEQ ID NO: 884444 - DNA, 120 bp, Artificial Sequence
  ENSG00000223522_9 (sequence is synthesized)
tggttttaaatggtgaaaagacatatacatagaatcaactagctggattcagtttagatgatcccaatatgccttcttctctccatcaggcctgatcagggtgttggctttggccacagc

SEQ ID NO: 884445 - DNA, 120 bp, Artificial Sequence
  ENSG00000223522_10 (sequence is synthesized)
ctgtttgatctggtgcttgttggctttgacatccacaatggacacaagttgtgttgttgtcttctatcttcttcatggctgactcagtggttgggggaacctgatgatgaattattggtc

SEQ ID NO: 884446 - DNA, 120 bp, Artificial Sequence
  ENSG00000223522_11 (sequence is synthesized)
gaacctgatgatgaattattggtcaagcttgtttctcctgggagtgctcttccaagcatatttctgctgcctgcagagccacactgtcttgggccactggcaggtgggtgatgtgtggat

SEQ ID NO: 884447 - DNA, 120 bp, Artificial Sequence
  ENSG00000223522_12 (sequence is synthesized)
tggatcttctttttgtggctgtggacacctttaagcactgccttcctggccttcaaagcattcgctttggcttcagctttgggaggggcaagaacttttttcacttttggtgccataatg

SEQ ID NO: 884448 - DNA, 120 bp, Artificial Sequence
  ENSG00000223522_13 (sequence is synthesized)
tgaaaatgaggacctatgttgagccctcactcctctagaagccagctgtgtgccctcggcaaagtcaattaatcactctgagcctcagtttttataatctgtatgaggcctactaagaat

SEQ ID NO: 884449 - DNA, 120 bp, Artificial Sequence
  ENSG00000223522_14 (sequence is synthesized)
ttctgcattataacccttgaagggctgcagctgatgatcccataaaagtgtgtgaggggccactgtgaatgaagtccacagggcagacagaggcacctggatgtcatgtagatatcattt

SEQ ID NO: 884450 - DNA, 120 bp, Artificial Sequence
  ENSG00000223522_15 (sequence is synthesized)
tcttttcttgatgactgccaatttcaatgtcctctgcctataggctggatatggtcactctgatggcttatttggaggaagtaattttaaataggttttttttttagaggaaatgattat

SEQ ID NO: 884451 - DNA, 120 bp, Artificial Sequence
  ENSG00000223522_16 (sequence is synthesized)
ttattacatttattgaaaaactacagaataagatggaaggtaatttttctttttttcttgaattctttaaaagttagttgactattaaaagccaaagtaataacaatgtattgtggaatt

SEQ ID NO: 884452 - DNA, 120 bp, Artificial Sequence
  ENSG00000223522_17 (sequence is synthesized)
cataaaatacgaagactgaaagtgtgtgaatatgacagcacaaagataaatagaaggtacacagataattacactgtttatacaggaagcattataatattaattcacggtaggctgtga

SEQ ID NO: 884453 - DNA, 120 bp, Artificial Sequence
  ENSG00000223522_18 (sequence is synthesized)
taagttaacggtgtatttttagtgtataaatgactaaaatatacaaagaaatatagctaacacaccaacagaagagaaaatggtaaactaaaaaatactttaataaactgaaagaataca

SEQ ID NO: 884454 - DNA, 120 bp, Artificial Sequence
  ENSG00000223522_19 (sequence is synthesized)
tgacctcagtccccaattcctgtgtcgctcaccagcactgactttattgtcttctcgggggctctgatcacccgagctatgttggcctgggcctggaaaactccctcatctctcttgtgg

SEQ ID NO: 884455 - DNA, 120 bp, Artificial Sequence
  ENSG00000223522_20 (sequence is synthesized)
aaggaataaaaaaaaaaaacccaaaccaaaaatatgaatagaaagactgtagggcttaaacccagtaagcttattatttatattaaatgtataaataaatgaaatactccaattaaggcc

SEQ ID NO: 884456 - DNA, 120 bp, Artificial Sequence
  ENSG00000223522_21 (sequence is synthesized)
gaagatacaaccacaggggatgacagtccattaatggggtggccttaaactttgggaactctagccaagttaccgaggttaagggactgtttactggggtacatatgatggtatcaatat

SEQ ID NO: 884457 - DNA, 120 bp, Artificial Sequence
  ENSG00000223523_0 (sequence is synthesized)
gtgggattgggctcctgatgaaagaatgagttcagcccctttcctctctaatgtatgcacatgttctcttgccttctgccttctgccatggaatgatgtagcaagaagcctctcatcaga

SEQ ID NO: 884458 - DNA, 120 bp, Artificial Sequence
  ENSG00000223523_1 (sequence is synthesized)
tgcacgcccatcagccttgtactttccagcctctagaactacatgatcacataaccacagagagctttgaaaacaccagccctattaaaatctagcaggccttgactcctcttttcgcca

SEQ ID NO: 884459 - DNA, 120 bp, Artificial Sequence
  ENSG00000223523_2 (sequence is synthesized)
acaagaccaggaacagagagtaccttcatactgtccctgagcttgtcagtgttcgtgttgttcactttgaagatctaaggaaggactctggccatttgtctatgctgctatagaccaaaa

SEQ ID NO: 884460 - DNA, 120 bp, Artificial Sequence
  ENSG00000223523_3 (sequence is synthesized)
aatcaaaatcaaaattatgtaactcttgtactacccagcaaataagtgaagtcaagtaaagctggagtggaatgatgtgatcttggctcacgggaacctccatctcctgggttcaaacga

SEQ ID NO: 884461 - DNA, 120 bp, Artificial Sequence
  ENSG00000223523_4 (sequence is synthesized)
ttacaggtacaacaaacaagaaaaactttaccaaaaaggccattcaaagagtattactcaacatgtcaaagataactgcatcattctttgtactccctggcccgaaaatggttcaacttg

SEQ ID NO: 884462 - DNA, 120 bp, Artificial Sequence
  ENSG00000223523_5 (sequence is synthesized)
tctgaaaagtgaagaggtcaaatatgtgcacacagccactttgccaagtgtgggaaagaaccagtgtctggactagttccaagccatccagacagctatttcaactggaacaagtgacct

SEQ ID NO: 884463 - DNA, 120 bp, Artificial Sequence
  ENSG00000261423_0 (sequence is synthesized)
ctctatccccagcagaggcagcggagaagacaaggccgggaggcaccgggctaggctgcgcaccaggcccaggcctgtccctcgggaccgcgcgtgccgcctgaatccgctcccccgtcg

SEQ ID NO: 884464 - DNA, 120 bp, Artificial Sequence
  ENSG00000261423_1 (sequence is synthesized)
ggcccggtccagctggcgcggcggccaccctcacctggatgacctcgttgacctcccggatacattccaccatgtgttgtagaatctgctcggccgtgagcacctcgtagcggtaatcct

SEQ ID NO: 884465 - DNA, 120 bp, Artificial Sequence
  ENSG00000261423_2 (sequence is synthesized)
agaatctgctcggccgtgagcacctcgtagcggtaatcctcctcctgctcatgccccggcccgccaccaccaccgccgccgccgccgccgccgccaccgccgggccccagagcgctgccg

SEQ ID NO: 884466 - DNA, 120 bp, Artificial Sequence
  ENSG00000261423_3 (sequence is synthesized)
ccccgccgacgcccagcccgggctccaccagctccacctcgcccagatccagggtatcatcgtccggctcgtcgtcgtcttcgtcctcctcctcctcggcgccgctgtcctcctcactgc

SEQ ID NO: 884467 - DNA, 120 bp, Artificial Sequence
  ENSG00000261423_4 (sequence is synthesized)
actcctcgtcctcgtcgaactcgtagttgtagccctcgtccgagtccatggcgcgacgcgcgggggcccggcggacgctggccgaggcggggagagggcggggacgccgaggccccggct

SEQ ID NO: 884468 - DNA, 120 bp, Artificial Sequence
  ENSG00000261423_5 (sequence is synthesized)
ctcgctccggctccggctgatgtccggacgcaggcctggctccggccccgcgagccgcggctcctccccaggagcggcggttggcgtttgacggctggtggcggcggggagggcgcggag

SEQ ID NO: 884469 - DNA, 120 bp, Artificial Sequence
  ENSG00000261423_6 (sequence is synthesized)
gagggagggagggagcgagggggccgcttgctgcccgcctcagtcagacgcggctccgctccggcctccgagagaaaacagtccccaacgccacctccacggccgctgctatcgctactg

SEQ ID NO: 884470 - DNA, 120 bp, Artificial Sequence
  ENSG00000261423_7 (sequence is synthesized)
agccaacaaaggggcgtgcgtcaccgcgtcgcgctgcgtcgtcgcgtcactcctctttgcgtcactgcgccccgccccaccgcccctgcgtggagcccggggagaccccacggcccggcc

SEQ ID NO: 884471 - DNA, 120 bp, Artificial Sequence
  ENSG00000261423_8 (sequence is synthesized)
ttcctgggcctgggacccgaggggagccgagcgggaattgctttcctggttcgatccgctgccgctgtgagggccgagcggaaacccgtagaccttttatgtgaagagattgcggcctcc

SEQ ID NO: 884472 - DNA, 120 bp, Artificial Sequence
  ENSG00000261423_9 (sequence is synthesized)
tggtgtctgccgcaggccatagggatccagcccacttaggcagtcccttggggacgcggccttccctccggagcggaaaggcgcttcccgcccgccctgcggtaatcccggaagccctca

SEQ ID NO: 884473 - DNA, 120 bp, Artificial Sequence
  ENSG00000261423_10 (sequence is synthesized)
gccgttaagctaaaatttctgttgctttggctactgatggaaacctgttgtaagtggaacctctaaactgtatgacaggtgaacccactttaggtagctgtgtgattctgtccacttgta

SEQ ID NO: 884474 - DNA, 120 bp, Artificial Sequence
  ENSG00000261423_11 (sequence is synthesized)
cagacgtgcagtggtttttaagtctcctataatgacgtcattttaaagaggcatttcctccaccccgctgacaagagcgcctcttgagggccctaaacaatgtaaacagcgatgattttc

SEQ ID NO: 884475 - DNA, 120 bp, Artificial Sequence
  ENSG00000261423_12 (sequence is synthesized)
atgaattgagcactgtgtaagggctttacatatattctgtctcatcttcacggagccatagtacccattttatacctgaggaacctgaagctcagaaaggaaaagggacctggccaagac

SEQ ID NO: 884476 - DNA, 120 bp, Artificial Sequence
  ENSG00000261423_13 (sequence is synthesized)
cacataacccttgccctattttaaccgctggatgccccaaaacatgaatcataaaaatgctttgtaatgtagatatattatgtactatgtagtacataaaagacatgaatgcttcaacaa

SEQ ID NO: 884477 - DNA, 120 bp, Artificial Sequence
  ENSG00000261423_14 (sequence is synthesized)
aatacaggcaataatagaaatatctacaagggccaaatgtagccagagagataatgcttgaatctcatctgaaagtgtgctatgtgagctgagtgttgatgaatggctaggagttcaaca

SEQ ID NO: 884478 - DNA, 120 bp, Artificial Sequence
  ENSG00000261423_15 (sequence is synthesized)
gagaaggtagggaagatggtctagccgcagagaacaagcaaaagcgcagaaggtgtcaagtaagtaatagtttggggagcttaaagtgcatggagggtacatggcaaaatattaggcaag

SEQ ID NO: 884479 - DNA, 120 bp, Artificial Sequence
  ENSG00000261423_16 (sequence is synthesized)
ttagtcaggggtcatgtcagttaagagcattttatgcctaagagtgggcttaaatctttgcaaacaggacatgcgagccagagaagtgttatgaaggaagaagaggcataagaaggctcc

SEQ ID NO: 884480 - DNA, 120 bp, Artificial Sequence
  ENSG00000261423_17 (sequence is synthesized)
ctcttgagataatctgaagaattggccagattgaaaaccttttaaaatcaaaacccctgatttgttgataaatcttactgttcaacctataggttccctttggaaattgattttgaaaag

SEQ ID NO: 884481 - DNA, 120 bp, Artificial Sequence
  ENSG00000261423_18 (sequence is synthesized)
tgaaaaattccattataatgttaaaaagcctcttccaatttgtccattttgtaagttttaaaataccgataattatatttcttaacctcaggatttacaaagtaaagcatttaacctcaa

SEQ ID NO: 884482 - DNA, 120 bp, Artificial Sequence
  ENSG00000261423_19 (sequence is synthesized)
ggctgggcttgtctatgtttggctgggctaggctggactccaatcttcaggtcaggtttacatctgcttcacatgtcttcatcattctagaacaagttgcctgcctgagatacattcttc

SEQ ID NO: 884483 - DNA, 120 bp, Artificial Sequence
  ENSG00000261423_20 (sequence is synthesized)
ccacagtgggggacagaagtacaagagagacaaaggcccagaaacagcctgaagagcctctgaactaaggccacttgaagcaaggaggcacaagtaattctgccataacgaaactcacct

SEQ ID NO: 884484 - DNA, 120 bp, Artificial Sequence
  ENSG00000261423_21 (sequence is synthesized)
gattggaagaggggcgtgaagaaagggttttctaaggcaggatcaaaatgagagattccatctcagaccttggcccttcatctttagcaggtgatactgtagtcaccggaccaaccccca

SEQ ID NO: 884485 - DNA, 120 bp, Artificial Sequence
  ENSG00000261421_0 (sequence is synthesized)
ccttcactaacacactgttctaccttactattttcttctttgcttgctttgaaaacatttggttttatgttcacctacatgaaatgcactaaatctctggtgatggcagtgttttacatt

SEQ ID NO: 884486 - DNA, 120 bp, Artificial Sequence
  ENSG00000261421_1 (sequence is synthesized)
aacttaacaggagcacactggaatctacaatctcaaggtattagggaaaaatttttctgaccatacaacctacccaaaggatgaaaatctagctcagtttcagcctttttagttgttatt

SEQ ID NO: 884487 - DNA, 120 bp, Artificial Sequence
  ENSG00000261421_2 (sequence is synthesized)
tccatacctgctttacaaaattctacactttttctcctgcaattggcaacagtcatgcatgtgtgtatggagatggcatcctctttagggaacatattaaattgattatgcacatctgaa

SEQ ID NO: 884488 - DNA, 120 bp, Artificial Sequence
  ENSG00000261420_0 (sequence is synthesized)
aggctccagcggctcccggccagcggggacgtggaggtgacatttctctgacccacaggactgtgggcgccctgccgagcgtcgcgcggtcttggggcgacctgcagtggggcccctgcg

SEQ ID NO: 884489 - DNA, 120 bp, Artificial Sequence
  ENSG00000261420_1 (sequence is synthesized)
cagggcctgtgtctgcgccggttcctggcaagggcaccttggccgggcggcccgcgtcccctgcgcttcccacacccacgtgggcggacccggcccgcaagctgggccagcctgcggttt

SEQ ID NO: 884490 - DNA, 120 bp, Artificial Sequence
  ENSG00000261420_2 (sequence is synthesized)
cacgtgggcggacccggcccgcaagctgggccagcctgcggtttccgggcactggggagtgcgcagagccccgggccagcgaccgcagccggggcccctggcttctcccgagcactttcc

SEQ ID NO: 884491 - DNA, 120 bp, Artificial Sequence
  ENSG00000261420_3 (sequence is synthesized)
gaccggtccctccagggtggcgggcggcacccagggccggcgctcctcaccaacgcgctgcagctacgggctcaggagggagccgcagcgtcggaggaggaaagcatttaagaatagcac

SEQ ID NO: 884492 - DNA, 120 bp, Artificial Sequence
  ENSG00000261420_4 (sequence is synthesized)
aaagccttaggctcgaggaagcgtgactgcttacgtgttgaaaataaaggttctgtaagtcccaccgcgggtgcatattgaaaagaaagggatcattagcacgcgaccctcgcctaggag

SEQ ID NO: 884493 - DNA, 120 bp, Artificial Sequence
  ENSG00000261420_5 (sequence is synthesized)
tatataaaccgcagcacgactttcggatcacaaaggcagagaaaagaacacattgaaggcttttgctcacttttccaagttgtttcgtttcgttttgtttctaatgtggacgatcattta

SEQ ID NO: 884494 - DNA, 78 bp, Artificial Sequence
  ENSG00000261420_6 (sequence is synthesized)
gccaggcgtggtgatgcgctgttgaacccgggaggtggaggttgtagtgatccgagattgtgccattgcactccagcc

SEQ ID NO: 884495 - DNA, 120 bp, Artificial Sequence
  ENSG00000261420_7 (sequence is synthesized)
tgcactccagcctgggcaacagagggagatcctgtctctaaaataaaaaataaaagaaatgcctttggtgaacaggaattctcaacattagtgacccgcagtgtattagtgttaataatg

SEQ ID NO: 884496 - DNA, 120 bp, Artificial Sequence
  ENSG00000261420_8 (sequence is synthesized)
gtgtattagtgttaataatggacatcccctttgatccagcaagcccatctagagatttcctaggatagacaagccagtttgtgcaatttcatgtgtacagcattgtttttagtatggaaa

SEQ ID NO: 884497 - DNA, 120 bp, Artificial Sequence
  ENSG00000261420_9 (sequence is synthesized)
gattagagtttacatatctacccatagggagagagttaaataaattatggtgcatccgtttagtggattagtatacagccattaggaataaaggaattctttatgtgctgatatgaaata

SEQ ID NO: 884498 - DNA, 120 bp, Artificial Sequence
  ENSG00000261426_0 (sequence is synthesized)
ggtgaccatgtagaatccagatggtaggttcaaccaagagtgaatttttgcatgcagcaagtatcccagcaagatttgtctgggaggttcagttgtctaattaaacatggtgctgaggtt

SEQ ID NO: 884499 - DNA, 120 bp, Artificial Sequence
  ENSG00000261426_1 (sequence is synthesized)
tgaatcagcctgtgaagatgttctttggaagataccaagaatgaaaatcaaaatgctgtgaccttataattctgcaaaagcagaggttttcaaaggactagtttttagcaaaaaactaca

SEQ ID NO: 884500 - DNA, 120 bp, Artificial Sequence
  ENSG00000261426_2 (sequence is synthesized)
ctgaaagccctttgatgtagcattttggctttgcatccagtgtttcaaaacatgaaaaatatacacatggtaaaaatgtttttctctgtgatttcaccatatgaaaggaactgggatttt

SEQ ID NO: 884501 - DNA, 120 bp, Artificial Sequence
  ENSG00000261426_3 (sequence is synthesized)
ttcaccaggaacactctgctcagcatgctgcgatgctcccccaggagccttttactcagaggcaacatcatgttcaggtttaagttattctcatggcttctaaccgtctagggcttacct

SEQ ID NO: 884502 - DNA, 120 bp, Artificial Sequence
  ENSG00000261426_4 (sequence is synthesized)
gtccacctgagattttagagccagatatcatttcttcaagggagcatctctccaaacaagggtgcatcagaagttgttcatctgccaaacataatgcttcattcttcaagattcccaggg

SEQ ID NO: 884503 - DNA, 120 bp, Artificial Sequence
  ENSG00000261426_5 (sequence is synthesized)
acgagaaagtacataggtgaaaaatagcaattgtattgataagcaaccacttaggaaaagaataccatactgtaaattgatataaattatagaaatgtttgcaataacttcaattttaag

SEQ ID NO: 884504 - DNA, 120 bp, Artificial Sequence
  ENSG00000261426_6 (sequence is synthesized)
ggcttagaaactggtacataattcattacaatttgtatcctcctgagtttgtgctctttctggcccccaaaagaggctgtccctatttgctggaaggggactcaacatccccacatttca

SEQ ID NO: 884505 - DNA, 120 bp, Artificial Sequence
  ENSG00000261426_7 (sequence is synthesized)
gacctcctccacaaacactgcaaaggcacatttctctctgtcatataggagtctgctctccttcttgcaggtgaaataagcaggaatatcatgtgtttctcatggtctaagttgggcaag

SEQ ID NO: 884506 - DNA, 120 bp, Artificial Sequence
  ENSG00000261426_8 (sequence is synthesized)
atctttatatgttaaggggtcagaaatggggaaggaggccagtccctgccaccaggaagtcccacccaggaggattccaggtgcagctggccacaggaatcatgaaaatcttaagactag

SEQ ID NO: 884507 - DNA, 120 bp, Artificial Sequence
  ENSG00000261426_9 (sequence is synthesized)
aatggagagcaaagaaaggaaactcatcaagatcaacaatagaagtagagaggacagggtgtggcccgagggacagaagctactcagattgagttccctgaaaatattaatggactgagt

SEQ ID NO: 884508 - DNA, 120 bp, Artificial Sequence
  ENSG00000261426_10 (sequence is synthesized)
tggtgggccatatggagaggactgctggagattgccctcgggagtcacctgcttagggaagtgagggtgcaggattcagcagagggaaaaactgatccatagcacgcctgccaccaggag

SEQ ID NO: 884509 - DNA, 120 bp, Artificial Sequence
  ENSG00000261426_11 (sequence is synthesized)
ccatgacagcccttcaggggagaccaaaatcgaggcagtcaggcaagtctatatccatctccacctgggaggggcattttctcccctcccctctgcacttacctaaccatacacctctca

SEQ ID NO: 884510 - DNA, 120 bp, Artificial Sequence
  ENSG00000261426_12 (sequence is synthesized)
aaacagtcatgcatgagttattagtattattctaggggatatcagcatggaaagctctgatagacttacattgcaggagcggcgctgtctttgaaatttcagacatgagcaaatggagag

SEQ ID NO: 884511 - DNA, 120 bp, Artificial Sequence
  ENSG00000261426_13 (sequence is synthesized)
acagacaggttgtggcagtgtttgatcctctggccatcctgatccgtggcctgccctctgaagccattgagttttggtccaggagtgtgagatctgatggacacatatgttgggtccaaa

SEQ ID NO: 884512 - DNA, 120 bp, Artificial Sequence
  ENSG00000261426_14 (sequence is synthesized)
taaccaaagtggactttcctttagaagagcaggacgctgatgtttgtaccaaaaaatggtgggtttgtgacagaggacagtcactaccgaaacacaaggtatcatggtatgtacatgtaa

SEQ ID NO: 884513 - DNA, 120 bp, Artificial Sequence
  ENSG00000261426_15 (sequence is synthesized)
ttgtgcagtgacttcagtaaacgttttaaaaatcacagttttgttgttacatcaagcttgcattatgaaaacctccttctggttttatatatttcaagacggaagtgaaacagacaaatt

SEQ ID NO: 884514 - DNA, 120 bp, Artificial Sequence
  ENSG00000261426_16 (sequence is synthesized)
gcttcaaatgaaaggcagcagtttttgtctctaacatttaatttgtgcagcagtcacatggccacattatgcttacacactctgtgcctcactgggcattaataggaccccgcagggcag

SEQ ID NO: 884515 - DNA, 120 bp, Artificial Sequence
  ENSG00000261426_17 (sequence is synthesized)
tacatgactccgggctggactctgggtaatgatgggcactcttatgttgcctgataacaagtggttcaatcacaggaggcaaaagtgtttcttctttgaggacaggatggcacgttgaaa

SEQ ID NO: 884516 - DNA, 120 bp, Artificial Sequence
  ENSG00000261426_18 (sequence is synthesized)
cattgagacaggaccgtaaatggagatactgttcagatatcatttggaaaggcacagctccgcagataagaaaattacacacatcctccctgctctgagttgctgagtggttttgtgtct

SEQ ID NO: 884517 - DNA, 120 bp, Artificial Sequence
  ENSG00000261426_19 (sequence is synthesized)
ctggtttttcaccaacactgaaagtagccttcatagtaagtcacagcagtcggtagaggggaggagagcagactgatttttgtcagctttcctggagtagggttggtttggggcaaatta

SEQ ID NO: 884518 - DNA, 120 bp, Artificial Sequence
  ENSG00000261426_20 (sequence is synthesized)
ttaaaaagatttgtataacctggctacatcatgatcactaacacattactgaaggtttactggtctactcaaaggtaatcataaaggagtaatgcaactagcgcaaagcagccagcctgc

SEQ ID NO: 884519 - DNA, 120 bp, Artificial Sequence
  ENSG00000261426_21 (sequence is synthesized)
tacacaagaaagggtatcctataatacatggtattgctacttatctcagatgtgtcgtgacttttttagcctttttgttttaatttcaggcttacaagaaacttgcaagactaggacaaa

SEQ ID NO: 884520 - DNA, 120 bp, Artificial Sequence
  ENSG00000261426_22 (sequence is synthesized)
gaatttttgtagacacatattcctcaaatgttgatattttaccacccaaagatggtgagagaacttgggagttccctctctctctacacacactcacacagataaggtttggtttaattt

SEQ ID NO: 884521 - DNA, 120 bp, Artificial Sequence
  ENSG00000261426_23 (sequence is synthesized)
ttgttcttgctgatccatttgacagcaagtggcagacatggtacctctttacccctaaattctttagcatatatttcccaaagccagaaatttttatgtaatataaatacatttacaata

SEQ ID NO: 884522 - DNA, 120 bp, Artificial Sequence
  ENSG00000261426_24 (sequence is synthesized)
aataatcagggaaatatactgatacactactaagcattctatagaccttatttaaatttcaccatttgtcccaattacggcatttatagctaagacacacacagacacagacacacacac

SEQ ID NO: 884523 - DNA, 120 bp, Artificial Sequence
  ENSG00000261426_25 (sequence is synthesized)
acacacacacacacacacacatattaaccttccactcttccctgtccgcagtgcaagatccagtctaggataacaaacaagtaactcagtattttgcctttcttttaaatgtcctttaat

SEQ ID NO: 884524 - DNA, 120 bp, Artificial Sequence
  ENSG00000261426_26 (sequence is synthesized)
ctggcctggttcttcaatctctttaagacactgacatttcgtagtgggcacaccaggtattttgcaggattttcttgatgtttcctcctggtcagagctgggctgtgcatttttagcagg

SEQ ID NO: 884525 - DNA, 120 bp, Artificial Sequence
  ENSG00000261426_27 (sequence is synthesized)
aacaccccagaggagaggttggcagtgcttatgccagggcacaggtgacactgactcgtcccctaactggtgatgttaactttgatgactcattagggaggttgcccagtttccccacta

SEQ ID NO: 884526 - DNA, 120 bp, Artificial Sequence
  ENSG00000261426_28 (sequence is synthesized)
ccattatttttctctctgtaattgattattactaggaaggttgtgtgcaaaacattcctgtgaggacagaattattactcattaaaaaataaagaaccagagtacaaagtcctatcttct

SEQ ID NO: 884527 - DNA, 120 bp, Artificial Sequence
  ENSG00000261426_29 (sequence is synthesized)
gttggagatgaagccaagaatcaaattcatgtctcatgctgaagtttaagctgctttcactatactgtgaaagacagtagcatcaaaagccaaaaaataaataagttaaatagttcattt

SEQ ID NO: 884528 - DNA, 120 bp, Artificial Sequence
  ENSG00000261426_30 (sequence is synthesized)
tttaattgatttatagggcttgttgttattcctcaaatgtacagattttgatttttctaggcataaatggaagaaggttcccctttatgggagttcgttttcagtagcatcagataagag

SEQ ID NO: 884529 - DNA, 120 bp, Artificial Sequence
  ENSG00000261426_31 (sequence is synthesized)
gaagaagaacgaaaacttgcaacatgaagtggtctcctttccatctgtagttcgtggaaacaaacacatgaagcttctttcaggtttaggcatctgaatccaaagacatccatggaagca

SEQ ID NO: 884530 - DNA, 120 bp, Artificial Sequence
  ENSG00000261426_32 (sequence is synthesized)
ctatcatgagacaccgattgctcttctagtttaaatagagggcacgcaggcatgtggactcgggagatggcagaaggagccccaagatcatgatgagcccacggtcatgcagccagctgg

SEQ ID NO: 884531 - DNA, 120 bp, Artificial Sequence
  ENSG00000261426_33 (sequence is synthesized)
gctccagacttccaactccgggctctttcctgcatcatatggagaagatcctttggagtgggataaagacatattccctaaagctcttgggtgaaaataataaaaggaaaaggaatccca

SEQ ID NO: 884532 - DNA, 120 bp, Artificial Sequence
  ENSG00000269210_0 (sequence is synthesized)
gctcttgggcagcggctgcagcgggtgctccggccgctcggcctccatggcgaagctgacgggccgcaggaagcagatgtccaggctggactcggaggaggcaggcgagcagttctcgaa

SEQ ID NO: 884533 - DNA, 120 bp, Artificial Sequence
  ENSG00000269210_1 (sequence is synthesized)
gagggccggagcctggaacggctcctcgtcgtagggcgcgggcagcgcgaagatctcgccgccgtactcgaactcttcgtaggccgcgggcacgaagccgcgggcatcgggcaggagctc

SEQ ID NO: 884534 - DNA, 120 bp, Artificial Sequence
  ENSG00000269210_2 (sequence is synthesized)
ggccggggcgcgcagggagcgctccacgttgcccagcggctccgccggagaggactcgaagtccatctccgggatggcctgcaggggcccggccagcgccttcacgtcctgctcggccgc

SEQ ID NO: 884535 - DNA, 120 bp, Artificial Sequence
  ENSG00000269210_3 (sequence is synthesized)
gcagaactgcgtcggtgccagaaggctctcgggccgctcgtgcttcctgccctccagctcccagtcactgggcttcccgggctgcatgctctccatcaggctttgctgctgttggctttt

SEQ ID NO: 884536 - DNA, 120 bp, Artificial Sequence
  ENSG00000269210_4 (sequence is synthesized)
cctcggggccgcgctccgaggcgcctgtgcatgccacctcccgagctccacaaacttccactaaggcgctcccacgaacccccgttcccaggcggagagtggacaaggcagtccgtcgag

SEQ ID NO: 884537 - DNA, 120 bp, Artificial Sequence
  ENSG00000269210_5 (sequence is synthesized)
cggaggcccgaaggtattgtctgagcttctgggaaatggcctgcgggccagggactgtcatcaccccgcgtggaagccctgaccctcctcaccacctgcggtgctccaaggcacaccttc

SEQ ID NO: 884538 - DNA, 120 bp, Artificial Sequence
  ENSG00000269210_6 (sequence is synthesized)
aactctcttctctcccttgcttgccctagcagagtcatacggaataatggaaaactcaacttctgttcgacttgtggatcttcacactcagaaacaaattacgttcctagataaagtaaa

SEQ ID NO: 884539 - DNA, 120 bp, Artificial Sequence
  ENSG00000269210_7 (sequence is synthesized)
cgtggcatgatcttgataactgttgaatctggatgagggcatgtggagttcactgaactcttctatgtaaatttgaaattttcataataaaaattttaaaatattccttgtcactgtaaa

SEQ ID NO: 884540 - DNA, 120 bp, Artificial Sequence
  ENSG00000224077_0 (sequence is synthesized)
ttcggtaaaattccttcctcttacaaaatccagctcaccctgcacagtcaacctaattgtcaccgaatataggagaatggggaaactaggatttgcgtgttcaagggcggacaagccagt

SEQ ID NO: 884541 - DNA, 120 bp, Artificial Sequence
  ENSG00000224077_1 (sequence is synthesized)
ccaaacaggcattccagtcattgggtgggtgacagccaaagaagatccacctggtcacatcccaatttccccagggcatccgaagcaggtctgagcagccaaggataactacttagtctc

SEQ ID NO: 884542 - DNA, 120 bp, Artificial Sequence
  ENSG00000224077_2 (sequence is synthesized)
ctagaaaatatctcagttgttatccccactttatagatggtcaacttactttatctatctgatgattggctcctacagccagtaagtggtgaagctgagatgtaattccaaggctgctga

SEQ ID NO: 884543 - DNA, 120 bp, Artificial Sequence
  ENSG00000224077_3 (sequence is synthesized)
tctccaaagccagttgtctttccaaatattagaatatactagtgtctgtggtctgttaaaaaaaatgatgacagtgcctttttaaataaaatttaaagcatgtacatgaaaaatactaaa

SEQ ID NO: 884544 - DNA, 120 bp, Artificial Sequence
  ENSG00000253616_0 (sequence is synthesized)
gaagtggcattaaatgagctctcagaggcctcccagcagtgacccagaatgaggttgttaggaaaatccactacatgaagatgtgcagtctctggctgggagcaggacaccagctgccca

SEQ ID NO: 884545 - DNA, 120 bp, Artificial Sequence
  ENSG00000253616_1 (sequence is synthesized)
aggacagagaaccggaactgggactgtggtctctcagtagaggctgtgaacagccatctgtggccacacggattgagacctttcctgctcactcttcaaactggggcaccggctgggtgc

SEQ ID NO: 884546 - DNA, 120 bp, Artificial Sequence
  ENSG00000253616_2 (sequence is synthesized)
ccaacagaaagacaattggaagagtggcaggtaaaccaggctgtggccctgcagtgccatcaccgtcctcatttgaattctggctcgtctgttcctctacggcccctccgcatggcgctc

SEQ ID NO: 884547 - DNA, 120 bp, Artificial Sequence
  ENSG00000253616_3 (sequence is synthesized)
gaagtggcattaaatgagctctcagaggcctcccagcagtgacccagaatgaggaaggagctggggccataccagagtcagagctggaccgggagcacggcagggcccagccatccacag

SEQ ID NO: 884548 - DNA, 120 bp, Artificial Sequence
  ENSG00000253616_4 (sequence is synthesized)
cctccaatttcagtactctctaacaacctgagagcctgagccttcggatcttcttgattcctactttgataaagagagggatggggttggaaggacctggcatagagattggaccagtcc

SEQ ID NO: 884549 - DNA, 120 bp, Artificial Sequence
  ENSG00000253616_5 (sequence is synthesized)
ttgacagagccaggacctggggtccggaactgagctcagctccaggctcatctgaagtcaccctgacagcctgaggatggagaccttatttccattaacaggcatggcggttggcaggga

SEQ ID NO: 884550 - DNA, 120 bp, Artificial Sequence
  ENSG00000253616_6 (sequence is synthesized)
ctggccccagctgagcacggttttccaagtacacagctgggaattaagtcttctctgccgccctcccctgtagtcttgcctggatccccccagtcatctactcccagtaccaaaaactcc

SEQ ID NO: 884551 - DNA, 120 bp, Artificial Sequence
  ENSG00000240980_0 (sequence is synthesized)
acagctgtgctcccgctcgttgaaaaaaagatgccaaaagtgtagaatttgaccacaaacaaccgagcttcacaacggagtgtggcttgtgtgccaggccctgtgctgggggtgcaaaag

SEQ ID NO: 884552 - DNA, 120 bp, Artificial Sequence
  ENSG00000240980_1 (sequence is synthesized)
ggtgagcagagggaacaccgagttctgtccttttcccacacctaggaagacaagctatcaatttacgttgccaggctgaaattcaacagaactgttttagggttttgccgtccacaagga

SEQ ID NO: 884553 - DNA, 120 bp, Artificial Sequence
  ENSG00000240980_2 (sequence is synthesized)
atttccttgtgggaaattgtgatggagggcctggcctcacacgtgcctggtagcaggatggcaacccgatggcgacttcaggcttcacacccacagacgaccgtaatcagagaaagtaaa

SEQ ID NO: 884554 - DNA, 120 bp, Artificial Sequence
  ENSG00000285555_0 (sequence is synthesized)
agatgtgcagggaggaagcactcaaagggagggccggtccctcacccagtgtttctgatgcttgccctgtcctgcacctggaaaggctgggagtagacacatgtgaaagaagagaacaga

SEQ ID NO: 884555 - DNA, 120 bp, Artificial Sequence
  ENSG00000285555_1 (sequence is synthesized)
gcagacctgccttccagggacaggagggagccacgctgtgcatgtcctgctctgtctgatggctgccacccgtggaaaggtgctgccattctgtcttccatacctgcacatctttctaca

SEQ ID NO: 884556 - DNA, 120 bp, Artificial Sequence
  ENSG00000285555_2 (sequence is synthesized)
ttatgtttaaggttttttttttttaactaatatgctctacagagcagatgacctaaagaaaatcaccctggagattgtctcaagaggaaggaaatggctcttgacatcgtaaatcacaga

SEQ ID NO: 884557 - DNA, 120 bp, Artificial Sequence
  ENSG00000285555_3 (sequence is synthesized)
tgtttgttttcatggtgttttaaattccagtgacttccggaaggtgggagcctgcaggcatggcggaagagaccactgagttatggatcataaatcactggggccacttgtggaacccag

SEQ ID NO: 884558 - DNA, 120 bp, Artificial Sequence
  ENSG00000285555_4 (sequence is synthesized)
cctaaaatcgccagcagccaagatgaggctgccgggtgggggtaacctgaaggagaaggatttataagcatggagggcccacctcttgtaggcaaattcatcttctgaggcaggaagcag

SEQ ID NO: 884559 - DNA, 120 bp, Artificial Sequence
  ENSG00000285555_5 (sequence is synthesized)
cattaggaatgatctagcccatctccttgccccagggtgagacaataagggatcttccactctgcccagcatcgtactgtttgcagaaggagtaagaagggataaagaggaagttagaag

SEQ ID NO: 884560 - DNA, 120 bp, Artificial Sequence
  ENSG00000285555_6 (sequence is synthesized)
ctggaaggaggctggatggcgcggtcatgcttcctatgcacaggcatacagtttgccttccccttaggccactgtgggatgagaattccaggagaaaacgcaggaaggatgcttgttatt

SEQ ID NO: 884561 - DNA, 120 bp, Artificial Sequence
  ENSG00000285555_7 (sequence is synthesized)
taataacaagcttgaggaaatcacaacagagaggaggaagcaaacaggctgacaagtcaggatggcagcgtgggggccagcgcccccagttcacccaccatgggcatgatccaggaggcc

SEQ ID NO: 884562 - DNA, 120 bp, Artificial Sequence
  ENSG00000285555_8 (sequence is synthesized)
aggcagggctggaattaagagcacaggttttggagtctcccaatctcacctggaattccagccgcacctcttactacacactggccttgggtaaatcattctgtctctccaatacttagt

SEQ ID NO: 884563 - DNA, 120 bp, Artificial Sequence
  ENSG00000285555_9 (sequence is synthesized)
gttccttatccactagggggattaaatgagattccggagtgcccagcacacagcccatcaagacctgtaggtgtgccacactccacgttgtcaccatgacatcagcaacccctcctcttc

SEQ ID NO: 884564 - DNA, 120 bp, Artificial Sequence
  ENSG00000285555_10 (sequence is synthesized)
ccccacggagtcttccccactttctgaagtctgaagaactgggactggaacatgtccaaggggctgctcgtcactgccggagggataactgttcagacactgtcgtcacacagtcacaga

SEQ ID NO: 884565 - DNA, 120 bp, Artificial Sequence
  ENSG00000285555_11 (sequence is synthesized)
aagactcagaacttcattgctactttatttgttgttttctgcctttaggatacttccttatgataaaaaatgtgatattactaaaaaaatattaaaaagtagggagaaatgctaccaagt

SEQ ID NO: 884566 - DNA, 120 bp, Artificial Sequence
  ENSG00000228659_0 (sequence is synthesized)
agacacacagctcctgtcctgggaagctgattctgagggcgggaccctgcccctaccccagggagcccagagtctgaggggagacgccatctcagccctgccctgttccttccttttgga

SEQ ID NO: 884567 - DNA, 120 bp, Artificial Sequence
  ENSG00000228659_1 (sequence is synthesized)
ctctctctaaagacttgaatgcctactcccttcactgagtggtttcttctgttcctggccaactcagtgagaaagcaatcatctgcaagccgggaagagagccctcatcagaactcaacc

SEQ ID NO: 884568 - DNA, 120 bp, Artificial Sequence
  ENSG00000228659_2 (sequence is synthesized)
aaacttctgagcgatcagattcctgaaagagcagtctctccatgacaaaagatggatttggaaatgagaaagcaatttctgtaaaacttctgcacctgtggtagactcagaaacacacac

SEQ ID NO: 884569 - DNA, 120 bp, Artificial Sequence
  ENSG00000228659_3 (sequence is synthesized)
aaggctataaatgtctttatgcacttattaattttccaataaacatactcaacagtacacctaatagggaagttctgtgattaatttttcaaacaataagaaaataaatgatcagaaagg

SEQ ID NO: 884570 - DNA, 120 bp, Artificial Sequence
  ENSG00000228658_0 (sequence is synthesized)
ccttccttccctatggaagctgcggaggaagcacctcctcactgtgggcacgctggaaccccagggagaggctgcctggtcacaccagagtgaagtaactgaccaaactcagcagggaag

SEQ ID NO: 884571 - DNA, 120 bp, Artificial Sequence
  ENSG00000228658_1 (sequence is synthesized)
tgccattcccgactccccgcggccctcacacagcttctccgcctctgagcccttgagggtcctcttgagcttcaggaccacagagttgctgagcctacacttctactgtctccagctttt

SEQ ID NO: 884572 - DNA, 120 bp, Artificial Sequence
  ENSG00000228658_2 (sequence is synthesized)
ggaatctagccaaagtggctgtctattctcccagggccctggtccctcctgcccgcttgtattaagcaaccaactgtcgaacattttaatttggtgaataaaaatctcttgaccctggaa

SEQ ID NO: 884573 - DNA, 120 bp, Artificial Sequence
  ENSG00000228650_0 (sequence is synthesized)
acagcactagggggcccctgccacatcaaagagaagcatctatgaggggttactgccataatgccaaccttcttgctgtgctttgagaaacaaaccaaatcccacctcccttcaaagagc

SEQ ID NO: 884574 - DNA, 120 bp, Artificial Sequence
  ENSG00000228650_1 (sequence is synthesized)
tctacttgctatgaaaagtaatcccaccccctactaaagtcctgagacttaggtggccctgaggccagtaggaggctttggggtatctcaagagcagccacacttctccaccaaggaagt

SEQ ID NO: 884575 - DNA, 120 bp, Artificial Sequence
  ENSG00000228650_2 (sequence is synthesized)
gttcacatagtgcacactcatcttgtgttcgtcatcctggaccatcagggagaagagtctgaccatggtgggacggcaggtctggaagagccagggacaggctggcatcagcgacatcag

SEQ ID NO: 884576 - DNA, 120 bp, Artificial Sequence
  ENSG00000228650_3 (sequence is synthesized)
tagatatccaataatgaccctccctctgactggtaggatgaaaagataatggggaaagatcccagaaggaatctttggaggccccttctatggtcctcgaactctagaacaagctcagtg

SEQ ID NO: 884577 - DNA, 120 bp, Artificial Sequence
  ENSG00000228650_4 (sequence is synthesized)
gcatgggggacaatgggcacccaagcccataactttatcaaggaaacccccaagaaggaaactgcctcaaaacagagaagccagtagctgtgtaggaactatgagcctgtagggaaagaa

SEQ ID NO: 884578 - DNA, 120 bp, Artificial Sequence
  ENSG00000228650_5 (sequence is synthesized)
gagtggaagctccaggaggccactatcgtggaaagtcccacctccctttcagcttcttactccccactacccagccgggcaggacaggacaaagacttagcagtctcagcttgtcaaagt

SEQ ID NO: 884579 - DNA, 120 bp, Artificial Sequence
  ENSG00000228655_0 (sequence is synthesized)
gtggtttcagagctcccagaactttgcacataactccctatgtcagagtgggcagaaagggtgaaaatcagctttgaggtcttcagttatttgctggacaattccctgatgatattaaag

SEQ ID NO: 884580 - DNA, 120 bp, Artificial Sequence
  ENSG00000228655_1 (sequence is synthesized)
gttgattgcttacggctgttttagactaaaagaccaacacaaaatgggttaaagacgctaaccactttcaaacaaccatctgagaaaactaattcccaacgtattggagtagatgagaga

SEQ ID NO: 884581 - DNA, 120 bp, Artificial Sequence
  ENSG00000228655_2 (sequence is synthesized)
ataaaaggtgtgttattgaaagggaatttggaacaagtaatcgttctgaatgtgtgtacatcagagactcctcaaagcctgcctggcaatctgttttttatggtctcttctcctcaacag

SEQ ID NO: 884582 - DNA, 120 bp, Artificial Sequence
  ENSG00000228655_3 (sequence is synthesized)
aatgccactacaaaaagggtttgcaggagtaggcccactctctcttgttcttctgccttctgacaggttcattgctaaggaatggattgaatcagtacctaaaccagctgacagctgcca

SEQ ID NO: 884583 - DNA, 120 bp, Artificial Sequence
  ENSG00000228655_4 (sequence is synthesized)
tgctgtaagatggtccacaaggcttttggccaacaaccaatgatggattgaggccttcagtccaacaacccacaaggaactcaatcctgccaatgactatgtgaacctggaagcagacct

SEQ ID NO: 884584 - DNA, 120 bp, Artificial Sequence
  ENSG00000228655_5 (sequence is synthesized)
tgaataaagaatgcatcttttgccaagtactgggtagaatttccttggagagactacagaagtgtgagcaatttggctctgttcattacaaacagtgtctatggcagacatatgaagacc

SEQ ID NO: 884585 - DNA, 120 bp, Artificial Sequence
  ENSG00000228655_6 (sequence is synthesized)
acaactccctccttgatggaacaggaccctcgccccagagtgagaaaactgacgctcaggcatcgattaggcagggatgactatgtaagttatagtctctctgggccttaattttgtggt

SEQ ID NO: 884586 - DNA, 120 bp, Artificial Sequence
  ENSG00000228655_7 (sequence is synthesized)
ctataaaggaaagacaaagaattgagaaaatttttgcaaaataatttatcttagtgtctttggtatactgagtgttttagaagaagtttaccagttaatggttacgaaaattacaatgtt

SEQ ID NO: 884587 - DNA, 120 bp, Artificial Sequence
  ENSG00000228655_8 (sequence is synthesized)
aaactggtctcattccaattatgtaccagtaactctcttacaaactttgagccctgagcaaatcctgtgggataatgtgcttctgcacgttgccaagagatcgagtgacaatcatcatgg

SEQ ID NO: 884588 - DNA, 120 bp, Artificial Sequence
  ENSG00000228655_9 (sequence is synthesized)
gtggtttcagagctcccagaactttgcacataactccctatgtcagagtgggcagaaaggatggaatgtcagctctggggagaatctaaagatccaaggaactgagctgtgaaaatcagc

SEQ ID NO: 884589 - DNA, 120 bp, Artificial Sequence
  ENSG00000228655_10 (sequence is synthesized)
attaatgcacgtaactttttgcagttattgtcagaagcatactttgtgcatacggcatccattcttaaacttttgaccttcacagctacagcatgtctattgtctttacaactccagttt

SEQ ID NO: 884590 - DNA, 120 bp, Artificial Sequence
  ENSG00000228655_11 (sequence is synthesized)
tctctcataaagacctaaatgaccttctgggtactatataagccccagactttgaaactggctttacttacatactataatagatattttaataaagaccagtaagatacataaagagaa

SEQ ID NO: 884591 - DNA, 120 bp, Artificial Sequence
  ENSG00000228655_12 (sequence is synthesized)
gaggaaactgaaaaatagctcagtctccagcatctaacagtcatgaaagggagagaagtggcatatgaaatagactaaaaccagtactgaaacacagggacaacatgctatgggaacaca

SEQ ID NO: 884592 - DNA, 120 bp, Artificial Sequence
  ENSG00000228655_13 (sequence is synthesized)
gtggaagaagcagctaattcctgttgagatttatgccaagaatcatgagatctgtgtcaaggaggtgagctcatccatcagcaaaaccactgatgatgtgcatcttgctctgaaagactg

SEQ ID NO: 884593 - DNA, 120 bp, Artificial Sequence
  ENSG00000228655_14 (sequence is synthesized)
ttctgctgggacctatcaaataataatacgcatacatactccagcccccaggactgatgggatattgaattccaacatcctaagcagataatgggatgaataaagaatgcatcttttgcc

SEQ ID NO: 884594 - DNA, 120 bp, Artificial Sequence
  ENSG00000228655_15 (sequence is synthesized)
aagtactgggtagaatttccttggagagactacagaagtgtgagcaatttggctctgttcattacaaacaggtgaaaatcagctttgaggtcttcagttatttgctggacaattccctga

SEQ ID NO: 884595 - DNA, 120 bp, Artificial Sequence
  ENSG00000228655_16 (sequence is synthesized)
aatgcttccttcctctcccctggagctttctattggaatcatgaaacataccatgattttctccacacctgtgcctgtcttcttggagtgcatttcctctgcctgaataatcccttcaag

SEQ ID NO: 884596 - DNA, 120 bp, Artificial Sequence
  ENSG00000228655_17 (sequence is synthesized)
tccttcatgaaccacctcaaatgtgaacattggcttttcccagtctgggtaatttactcagactcctaccacatgcacctatgggactctacggtttcatctgacagcttaaaacactga

SEQ ID NO: 884597 - DNA, 120 bp, Artificial Sequence
  ENSG00000228655_18 (sequence is synthesized)
gaatagaagagttccaataagttttaacatttccttggcatttaaacatttaatatttataatttcacctccttatgaaattccccaaagcgtgtgccatacagaaatttgcagaatccc

SEQ ID NO: 884598 - DNA, 120 bp, Artificial Sequence
  ENSG00000228655_19 (sequence is synthesized)
aaacaaaactatgcaagaagggggactactacccacagacaccctttagctgattagtctaatcagccgctctgactcagcatctaaaacggttttcacatttttacttaaaacagtatt

SEQ ID NO: 884599 - DNA, 120 bp, Artificial Sequence
  ENSG00000228655_20 (sequence is synthesized)
gtatcactataataatttaagaggattttccattattgtgaaatatactgggaattataaggacatttttaatttagaaagttgaaggaggaaagtgattttctcactgcacagctaatc

SEQ ID NO: 884600 - DNA, 120 bp, Artificial Sequence
  ENSG00000228655_21 (sequence is synthesized)
agagttggtgctggctataggtcaagatcagtatttctcaaagtatgttccaggactcactggtcccttgggattctcaataaaagtgtccatgatcagatatgtttgggaacactgaat

SEQ ID NO: 884601 - DNA, 120 bp, Artificial Sequence
  ENSG00000228655_22 (sequence is synthesized)
tccaggtccttaacatattaaatgccctgagaaattctccagtcaagacatctatttatctttgttatgctcaacatttcccaaattcctttgatcgtgagtttgatgacattataaaaa

SEQ ID NO: 884602 - DNA, 120 bp, Artificial Sequence
  ENSG00000228655_23 (sequence is synthesized)
ctcactatggaaaaagctagtcttggtcaccacattctcatcccagtgtttgccttttacttacagtagtatgtgcatagcaaagtcgagatctgaagcaattatttgatctcgaactcc

SEQ ID NO: 884603 - DNA, 120 bp, Artificial Sequence
  ENSG00000228655_24 (sequence is synthesized)
cgacctcagatgatccaaccaccttggcctcccatagtgctgggtcacaggcatgagccaccacgcctggctgttgaagcagttatttgggatacatttagttaccaattttattttgaa

SEQ ID NO: 884604 - DNA, 120 bp, Artificial Sequence
  ENSG00000228655_25 (sequence is synthesized)
actcgtcatctacattagaccggctgctacaaacaccgtgtctttatctacccgaaactttgttctcagcttccttctcccctgacattctcagtacctctctattcatgaaatcctacc

SEQ ID NO: 884605 - DNA, 120 bp, Artificial Sequence
  ENSG00000234336_0 (sequence is synthesized)
cccacccccgggccatttaccgatgtggttgtcctcgatgtgctcgatgaggtcggccagggtggggaagtggagtccgcagcccccgaatcggcagagatggagttttgccatttgccc

SEQ ID NO: 884606 - DNA, 120 bp, Artificial Sequence
  ENSG00000234336_1 (sequence is synthesized)
cctcccaaagtgctgggattacaggggttcctgttgagattaaagtaaatgcatttaccagcatacatgtcatggaagactgactctgcaccatgctctgtgacaaaaggcttcaagatt

SEQ ID NO: 884607 - DNA, 120 bp, Artificial Sequence
  ENSG00000234336_2 (sequence is synthesized)
tctgcaccatgctctgtgacaaaaggcttcaagattaaaccggtttgtttcttaacagtgtgacccacatagccaatgttagcaagcactggaagagaacactattaattacagctttaa

SEQ ID NO: 884608 - DNA, 120 bp, Artificial Sequence
  ENSG00000234336_3 (sequence is synthesized)
gtggccactaaacatgcagaagatttcctctgaactgagagttgaaggatatggtgcaacaagcccatttcctggcactggaaagcggagagagagctgcaggagaggcggtggtgaagg

SEQ ID NO: 884609 - DNA, 120 bp, Artificial Sequence
  ENSG00000234336_4 (sequence is synthesized)
aagcagtgcagggccatgcgtggcccccgacgtgggcattcggctggagctcttgattctaggtcccagcctgagtacacgaggattcctctggcctgttagctacaacttcctcttctg

SEQ ID NO: 884610 - DNA, 120 bp, Artificial Sequence
  ENSG00000234336_5 (sequence is synthesized)
gaggtcttacttgtcatctatgtcttggtcgtctgcatatattttctagaaatttcctcaagcccttctaccgtgaaggtgagccgtgaagtctattgcccagggattggggacgtttgt

SEQ ID NO: 884611 - DNA, 120 bp, Artificial Sequence
  ENSG00000234336_6 (sequence is synthesized)
attaaagaaggttttggagtacagaagcaggaagatgtgttgtggagatgctgttggcagaaacaactggccttgactaaacaaaccaagagttcctacaggagcagaggcaaccgggtg

SEQ ID NO: 884612 - DNA, 120 bp, Artificial Sequence
  ENSG00000234336_7 (sequence is synthesized)
aaggctgacgcccttgcacaggcttgggcagctcttctccacatgtccacgtggctcacttccttacctacttcagggctctgctcacacgtcacctcctcaagaaggccttccccaact

SEQ ID NO: 884613 - DNA, 120 bp, Artificial Sequence
  ENSG00000234336_8 (sequence is synthesized)
accctgtcctcactcccaccccttacccctgcattccctgtccctctcactctgctgtggtttatcctacctgacatagaacaggtttatctccctgttgtctagcaggcttttatccag

SEQ ID NO: 884614 - DNA, 120 bp, Artificial Sequence
  ENSG00000234336_9 (sequence is synthesized)
ttctgctttgccggactgtattaagtaagtctcagttcctgggctttatcactcagcatgggtggaacacacgaaaatgggattttcctgttcccactacagcacttttcttgtggatac

SEQ ID NO: 884615 - DNA, 120 bp, Artificial Sequence
  ENSG00000234336_10 (sequence is synthesized)
cacatctccccatgtgcaatattctattcccatctcactcttaccttgtgcagagctattttctcagagcatgagtctctgaacggaaaatctactgctttgtgccctgcctgaggataa

SEQ ID NO: 884616 - DNA, 120 bp, Artificial Sequence
  ENSG00000234336_11 (sequence is synthesized)
gcttcaccagagcagtctatattgttgttgctgttgttgttgtttattgctgtattcctagcttctagaacagtgcctggcatggcaatcagtggcatgagtaaatttatgagtatatat

SEQ ID NO: 884617 - DNA, 120 bp, Artificial Sequence
  ENSG00000234336_12 (sequence is synthesized)
aatggacaagtttgggagaagataattagtttggaaacgggagagtttagtgggagagacagggccctgactacctcaaaaagcagcagtactataagaggacagagtttctatttttct

SEQ ID NO: 884618 - DNA, 120 bp, Artificial Sequence
  ENSG00000234336_13 (sequence is synthesized)
gcctggtctaggacttgtactggtctttcaacttgaattcatgcagcaagacagtggtggtgaaaagataaaggcatttctacctgggtagacagtttctttttctggagacaagaattg

SEQ ID NO: 884619 - DNA, 120 bp, Artificial Sequence
  ENSG00000234336_14 (sequence is synthesized)
agaaggcctaccagattctggcagtgagttgactgtacttgtttttagcattgtgaatttttgccttcatatgaatttaagtagggagtttagcaatgctgtttcagggtttccatccag

SEQ ID NO: 884620 - DNA, 120 bp, Artificial Sequence
  ENSG00000234336_15 (sequence is synthesized)
attttccgtttcaaattggacatctatttgcacctttaattcgcgtaacaaatacttcacagagaatacaaagttgaattatgggcagctcaattcatccccccaaaggcagacaagaga

SEQ ID NO: 884621 - DNA, 120 bp, Artificial Sequence
  ENSG00000234336_16 (sequence is synthesized)
tggcaggtccaagttatgcctatattacacagtagagattattttaagtgttttgttattgcttccaagttcacacaaatgcttcttactaatttatattggtcacattcactattctta

SEQ ID NO: 884622 - DNA, 120 bp, Artificial Sequence
  ENSG00000234336_17 (sequence is synthesized)
acctccagattaactaaaacatttaaatatgaattgtacataggctttattcatttataaaatgcaaagaaattaagattaaaaggaaaaccacatcaaaacccagagacataaataaaa

SEQ ID NO: 884623 - DNA, 120 bp, Artificial Sequence
  ENSG00000234336_18 (sequence is synthesized)
tgcatttaaatggctctttggtagtttattgatgctgagatagtttttttctccccttgaaaatatataaaattttcttttcatcttccctgaagcatatccaaataagttagtgactac

SEQ ID NO: 884624 - DNA, 120 bp, Artificial Sequence
  ENSG00000234336_19 (sequence is synthesized)
ataattaatatccaggtattttgtgatatttggataataggcttcaacttcttctaaacttattttatatttcagaccacacatttgccgtttgttgataatgtttttggttgcagcctg

SEQ ID NO: 884625 - DNA, 120 bp, Artificial Sequence
  ENSG00000234336_20 (sequence is synthesized)
agatatttccaggtctaaagccaggttcacattttgctttgaagagacagaaattccaaacaaatacagatagtcaggccataaacttaattaaaatttctgctttactggatgttacat

SEQ ID NO: 884626 - DNA, 120 bp, Artificial Sequence
  ENSG00000234336_21 (sequence is synthesized)
taaatatggccataatgccaagagaaatacttgaaaaatccatttgcatccacatactgctgcttccacatagaataaaataacaaaatgctaagaagtacatgtttgtgtgtatgtgtg

SEQ ID NO: 884627 - DNA, 120 bp, Artificial Sequence
  ENSG00000234336_22 (sequence is synthesized)
tgagagcacatttgtattaagctagttctctcttttggctgggtggccatactagtcatattttgactaataaaagattttttaaaaaaaatttaaaattaatttttttttttttttttt

SEQ ID NO: 884628 - DNA, 83 bp, Artificial Sequence
  ENSG00000234336_23 (sequence is synthesized)
tttaaaaaaaatttaaaattaattttttttttttttttttgagaccgagcacttggctcactgcaacctatgcctcctaggtt

SEQ ID NO: 884629 - DNA, 120 bp, Artificial Sequence
  ENSG00000234336_24 (sequence is synthesized)
agtgctgggattacaggtgtgagcctcgacacctggcctaaaagatgggttttaattaaaatctgggattggccagctccatatctgttaactttcccatatagtgctggagcactaatt

SEQ ID NO: 884630 - DNA, 120 bp, Artificial Sequence
  ENSG00000234336_25 (sequence is synthesized)
aatttagagagcttttgaactactgtgtggtttgtctgcctcctttttgtgtaaatctaggacatcttttttttttctttttcaatttgcctggaatattttcttatttagaattctatg

SEQ ID NO: 884631 - DNA, 120 bp, Artificial Sequence
  ENSG00000234336_26 (sequence is synthesized)
gagatcataactcatctccaggagagtgaacaaggtcactcataggaaggtggagcatgtctttcttatacaattggaagggaggaagggacccagccctgtcatttacaggtgaggact

SEQ ID NO: 884632 - DNA, 120 bp, Artificial Sequence
  ENSG00000234336_27 (sequence is synthesized)
ctgtgtcccaggagggcaagggaacatgcagagtctggtgtggtgagcacaggccaagccctgtgcagatggggcagtgagagcagaaaggacggctggggccacatttgacaggtctgg

SEQ ID NO: 884633 - DNA, 120 bp, Artificial Sequence
  ENSG00000234336_28 (sequence is synthesized)
ttgaccctgcagtaggacatcatccagaatttccattagatgccttagtcccaattcttcagaaagaagggcttgagagcaagcctatgtatgaagtctttattggtgagtatgatccca

SEQ ID NO: 884634 - DNA, 120 bp, Artificial Sequence
  ENSG00000234336_29 (sequence is synthesized)
aagaggagtagggttgtaaaccaggaaagacgggtaagtcagccactacagtcaactggttgttctgcccatcaggaccttgtgaggagcctaatgaattgtagcctgggaccctctgtc

SEQ ID NO: 884635 - DNA, 120 bp, Artificial Sequence
  ENSG00000234336_30 (sequence is synthesized)
atgggttgaattgtgtttctccaggattcatatggtgaattcctaaccctcagtatctgagaatgtgacagcatttggagatagggcctgtaaagaagtgattaagataagtgagcctga

SEQ ID NO: 884636 - DNA, 120 bp, Artificial Sequence
  ENSG00000234336_31 (sequence is synthesized)
tagaatgggccctgttttaatctgactagtgtccttttaggaacagaaaatttgtacacacacagagacatcaaggatgcatgttcacagaggaaaggccaggtgaggccatagcaggaa

SEQ ID NO: 884637 - DNA, 120 bp, Artificial Sequence
  ENSG00000234336_32 (sequence is synthesized)
ggcggtcatctgcaagccaagaagagagacctcagaagaaaccaacctgctgacaccttgatcttggactcccagcctccagaagtacgataaaataaatttctgttgtttaagtcacca

SEQ ID NO: 884638 - DNA, 120 bp, Artificial Sequence
  ENSG00000234336_33 (sequence is synthesized)
ctgccgcctccctccccgccggccacccctggccattccggggctccccgcccgggcaggagtttccgcgcgcctggcacccccgcccacccccgggccatttaccgatgtggttgtcct

SEQ ID NO: 884639 - DNA, 120 bp, Artificial Sequence
  ENSG00000239572_0 (sequence is synthesized)
gagtcagacctgcggcaactaggcaagctgcagccgcgaggtagaagctctctctgacccttttaccttaatggttcgtacccgcgggaaataaagttggaaaactgcaagcgatttccg

SEQ ID NO: 884640 - DNA, 120 bp, Artificial Sequence
  ENSG00000239572_1 (sequence is synthesized)
atctacggcttcttccagctcctcagatttatcttaccgtcccccccgcgaatcctctcaagatcccaccgagagatggattcgaagactctcccctccttccgctgctggattctggcc

SEQ ID NO: 884641 - DNA, 120 bp, Artificial Sequence
  ENSG00000239572_2 (sequence is synthesized)
cgtgccccgtctctctccaccccagcggcttcccgagtgattctccaagggcaaatgaattttgaccaggaagacagtgaagaaatttcataaaagtgaaatactaattggaagctccta

SEQ ID NO: 884642 - DNA, 120 bp, Artificial Sequence
  ENSG00000239572_3 (sequence is synthesized)
tcggcattggttgatctgacaagttgtgtgtatagaaactagcctatatggagacacgaatgtcaaaagaagttttaccgatgatagaaatatgagaggatcattatgtattcttcaaga

SEQ ID NO: 884643 - DNA, 120 bp, Artificial Sequence
  ENSG00000239572_4 (sequence is synthesized)
gagtcaaagttatttttctaggaggagaagaacacattgcagaacagaagatggcaaataaatgcttttccatgaaagaggcacagattgcttctacttaccaaagcaagtcacatggcc

SEQ ID NO: 884644 - DNA, 120 bp, Artificial Sequence
  ENSG00000239572_5 (sequence is synthesized)
atgcctcaccaaggagttaagaaagcagagtcctcccaaggaagcatgtgtccaggaaagaactgtatattgttgactagcaacaatgtctgacaccttgacttaaactttacgttacaa

SEQ ID NO: 884645 - DNA, 89 bp, Artificial Sequence
  ENSG00000239572_6 (sequence is synthesized)
caacaatgtctgacaccttgacttaaactttacgttacaaatttctgatcacattagctataaccttttgaaacttaccaataggctgg

SEQ ID NO: 884646 - DNA, 120 bp, Artificial Sequence
  ENSG00000239572_7 (sequence is synthesized)
ctactcatccctgagctctcacagcccctttaggggcaggacccctgaggatgaaccctcattccgccggtctctcggatccccctttctcttttgcttgattgcccctccaaacaggaa

SEQ ID NO: 884647 - DNA, 75 bp, Artificial Sequence
  ENSG00000239572_8 (sequence is synthesized)
gagcgactctcctgccacagcctccagagtagctgggattacagtcatgtgtcaccacgtctggctaattttgta

SEQ ID NO: 884648 - DNA, 120 bp, Artificial Sequence
  ENSG00000239572_9 (sequence is synthesized)
gtgctggggttacagggtgcacagcgggccagcctaaaacgacctttttaaagcaattgaaagtattcactcagtgagacaaagtagtgaacatagtggcgtgtctggagtctgtccctt

SEQ ID NO: 884649 - DNA, 74 bp, Artificial Sequence
  ENSG00000239572_10 (sequence is synthesized)
atgtgattccaataaataaaccagggcacctgctggttctcaatacatacttgagatcctaacaacttggaaga

SEQ ID NO: 884650 - DNA, 120 bp, Artificial Sequence
  ENSG00000239572_11 (sequence is synthesized)
ggttctcaatacatacttgagatcctaacaacttggaagaagaaacaaaaatgtcttcaaaggaacaagaatttggcatttcattgacaactctggaacacggaatacaacaagacatgt

SEQ ID NO: 884651 - DNA, 120 bp, Artificial Sequence
  ENSG00000239572_12 (sequence is synthesized)
cttcagaattcttagatgtattttcaactttgaattctatactgaaactatgaaccctgagggcagaaaaagtattcaagaactcaggaagtatctccaaaaacccacacagaatattac

SEQ ID NO: 884652 - DNA, 120 bp, Artificial Sequence
  ENSG00000239572_13 (sequence is synthesized)
tcaaagatctgctggtggcagatgatggcataaaccaagaaagaagaagcactgagtccaaaatggtagtgacagaaatgagtgcagctgatcttgagtgtgattagccaggttaaagta

SEQ ID NO: 884653 - DNA, 120 bp, Artificial Sequence
  ENSG00000239572_14 (sequence is synthesized)
ggccaaaggaaaattctggaaagagatatctaagagagacgtgtccaggaaaaagagaacttgatgtataaataattttaaaaactgaaaaaagtgaggaaaacaaatgcaagttatggg

SEQ ID NO: 884654 - DNA, 120 bp, Artificial Sequence
  ENSG00000239572_15 (sequence is synthesized)
acagataaaagactggcaataagtaattccagggagagtacaacccagtgtaccaattggtaaataatattaaattatataatacaaacactgcttacagatgtttcacttttaaaatca

SEQ ID NO: 884655 - DNA, 120 bp, Artificial Sequence
  ENSG00000239572_16 (sequence is synthesized)
atccattggcagatttaataatggatgcagaagaattaaatggcttcgcatttattttaacaaagtgaaagtaagacttttggaggtagaagaaggagagctggggaaagatattttctc

SEQ ID NO: 884656 - DNA, 120 bp, Artificial Sequence
  ENSG00000239572_17 (sequence is synthesized)
atttcatagagaaaggcttcagaacatgcccacgtgatggacaatatataaaggtaaatgtttattatttaaataataatgctatattaggcagtgtgaactaaatacttactataataa

SEQ ID NO: 884657 - DNA, 120 bp, Artificial Sequence
  ENSG00000239572_18 (sequence is synthesized)
ttagaaatgtgaatataatcatcagatataaataataaataattaaaataattaaatagatttcctttaggttgcaggactgcaaattgggaatggtgagggttttttttcccctacaaa

SEQ ID NO: 884658 - DNA, 120 bp, Artificial Sequence
  ENSG00000239572_19 (sequence is synthesized)
tgagggttttttttcccctacaaatcctttattaattgcattttatatgtgtgagtatattaaaaatttaaaaactaaattaaacaacataagtagtaaaataatacatagcttatagaa

SEQ ID NO: 884659 - DNA, 120 bp, Artificial Sequence
  ENSG00000239572_20 (sequence is synthesized)
tttaatgtaaaagtagaatttccaggcatttcgaagatgcttatagcttcctttttctgtattctcttattatcaagtctccctagacataatatagttaaacagttttcatctcttttc

SEQ ID NO: 884660 - DNA, 120 bp, Artificial Sequence
  ENSG00000239572_21 (sequence is synthesized)
tcaaagctggattcttaggagcaatttgtacaaaatgatcctgagtatcccagtcttcttatgtatgttgtctttttaaagatacaatgcaggtcaattcaggcttttgatttacaacgc

SEQ ID NO: 884661 - DNA, 120 bp, Artificial Sequence
  ENSG00000239572_22 (sequence is synthesized)
ccacttctctgctagtttgagtttccaacttagtagtacaggacaactgtcagttcctagaaaatataagccttacattttgttctaaggcctgaatttttctcttaactattaaaattt

SEQ ID NO: 884662 - DNA, 120 bp, Artificial Sequence
  ENSG00000239572_23 (sequence is synthesized)
attttaaacataacagcttagagtaacttaaattcatgctgttaaacatacacacacagtcaaaatctgataaggcacatgtatttaatttcagtgactctgacatctactctgttcttc

SEQ ID NO: 884663 - DNA, 120 bp, Artificial Sequence
  ENSG00000239572_24 (sequence is synthesized)
atgaagatgatgaatggtacattatagctcttttgtacaaatatttggttttggtccccttgaaaatgaccttaaaatcacctggggctattgttaaaaatgcacacatgcccactgcat

SEQ ID NO: 884664 - DNA, 120 bp, Artificial Sequence
  ENSG00000239572_25 (sequence is synthesized)
cctcagtcttactaaatcaagaatagcaatctcgatgagtaattcgattagtgatctcgattagtaattcctgcagagcacaggaatcaatttcaatgaaaaattttctctgtgattttt

SEQ ID NO: 884665 - DNA, 120 bp, Artificial Sequence
  ENSG00000239572_26 (sequence is synthesized)
caatatttttaaatgtttccaaatctttagtgccccctctgcaaagtccggacttgtctcttagtttgaactttagtaaaatgtaaagcttaagaacagcattagaattgttcccattcg

SEQ ID NO: 884666 - DNA, 120 bp, Artificial Sequence
  ENSG00000239572_27 (sequence is synthesized)
ttcaattgatccactcaacacatataatatgcatcttctaactgtgggcactgtcctgagtcctggacacatgaactaacaaaagagctcgccttaggagtgaggcagggtcttaggcat

SEQ ID NO: 884667 - DNA, 120 bp, Artificial Sequence
  ENSG00000239572_28 (sequence is synthesized)
atcagagaggacattcatgacttatgttggcaagtttaatatgacatataagtgaatattaatttctccattgcaccctttgtgagtttctgagaaaataaataacatatatatgtgtga

SEQ ID NO: 884668 - DNA, 120 bp, Artificial Sequence
  ENSG00000239572_29 (sequence is synthesized)
attacaaatacaaatatatatcccttgaatggcctagggtaaacagataaaagttgttgtttgttagagtaaaatcctaactgaacaaatggggtaattttatatgcattgtacaattcc

SEQ ID NO: 884669 - DNA, 120 bp, Artificial Sequence
  ENSG00000239572_30 (sequence is synthesized)
agatcaactctggtaaacctcaccaggagtaaggatttttgttgtttatgtgtaagattgccgatacattttattttattttgatgacaaagcaacttggttttgactactgaattgtta

SEQ ID NO: 884670 - DNA, 120 bp, Artificial Sequence
  ENSG00000239572_31 (sequence is synthesized)
agtttgcctctgctattttcaattcctctgtaatttagggattgtgaatatcagtcagagaaaaactgcagtgggacttgaagccctgatgtgctgttcggtcagacttttttttttcct

SEQ ID NO: 884671 - DNA, 120 bp, Artificial Sequence
  ENSG00000239572_32 (sequence is synthesized)
gaattttaaagatagagtttctctattgtaggaaaacatatcttagttattttttattttaaatacattcctctggaggaagaacaaaaagcaaagcaaagaaaaacaaaacatagcttt

SEQ ID NO: 884672 - DNA, 120 bp, Artificial Sequence
  ENSG00000239572_33 (sequence is synthesized)
ttctatgttgttttatacttaatatctaaagctcttcatgaaagcaagaaattttgaccttaagactattcctgaatatatgtattcttgaatataatatcatatatattacacatatct

SEQ ID NO: 884673 - DNA, 120 bp, Artificial Sequence
  ENSG00000239572_34 (sequence is synthesized)
gttatgaaagcccaaataaactgcacatctatatctattcatactgccacttgaatgaaagcacattcaaggtaaaatgtttctttgaataaaaaagcttggcaaattccattgactttc

SEQ ID NO: 884674 - DNA, 120 bp, Artificial Sequence
  ENSG00000239572_35 (sequence is synthesized)
aagttctttttttcttttctttctcaccttaactcttaaatagccatttgctttggtgatcattttacatttagctcagtattgtccatttactaccagccaatcagccatcccatgact

SEQ ID NO: 884675 - DNA, 120 bp, Artificial Sequence
  ENSG00000281778_0 (sequence is synthesized)
gtggtgatcaatgggcctagtccagaagactctgtctgtatgtcccatagggaggtcacaaagaagtccttattgagggcagatatctggactcaccacattcagtaactgggagagagc

SEQ ID NO: 884676 - DNA, 84 bp, Artificial Sequence
  ENSG00000281778_1 (sequence is synthesized)
ccgctgactgcgcctgacccatttccttgtttctcttttctttgtttttcccacctcccgtagaaacaactgaagaacagcaga

SEQ ID NO: 884677 - DNA, 120 bp, Artificial Sequence
  ENSG00000281778_2 (sequence is synthesized)
gcttcgaaagtttataagcaaaagtgccatgggtttcttctactcagactccaatgtccaggggctttatgatagctgacaagaagcactttgtactcaactcctccactagaagcacca

SEQ ID NO: 884678 - DNA, 120 bp, Artificial Sequence
  ENSG00000281778_3 (sequence is synthesized)
aaattatgaatagattatcacacctcaaatcgatgaaacaagagaaaatggaaattcaatggaaaagtgacagacaataattaaagcaaaggagaaggaagcaaggcagcttgcaaggcc

SEQ ID NO: 884679 - DNA, 120 bp, Artificial Sequence
  ENSG00000281778_4 (sequence is synthesized)
agcagtggctgagagctgagagatactccccagtatggagaaagagtaagcgaaataccctcagaggtttacgtttgcatcatgtactctggcaatcctagccataggaaagacccttaa

SEQ ID NO: 884680 - DNA, 120 bp, Artificial Sequence
  ENSG00000281778_5 (sequence is synthesized)
cccttggaggaccctgaaactaacataaagagctagaaggaaattgtgtgaaggcactgcaccaatgaggaaggtagcactgagtcccacacattctctgagaccacagcagctacagca

SEQ ID NO: 884681 - DNA, 120 bp, Artificial Sequence
  ENSG00000281778_6 (sequence is synthesized)
aggcaccattttagagccccgtcttcaacagactgctcactgtgctagagtccaacatcactggcgctgaggcacaagagacgtgacagctgctgccaccaggccttaggtgcaagcaac

SEQ ID NO: 884682 - DNA, 120 bp, Artificial Sequence
  ENSG00000281778_7 (sequence is synthesized)
catggttgaccacacctgagactgagcagcaagcaaggctccccaataactgcacttcacctgtaaagacatataaagtctgaaaataaaggaatgacaaaagatatttcacgtaaatgc

SEQ ID NO: 884683 - DNA, 120 bp, Artificial Sequence
  ENSG00000281778_8 (sequence is synthesized)
aagctagcaggactagctctagttagagtagataaaacagactccaagttaaaagcagttaagaaaaaaaaaagaaaaagaggacaatgaagggcatcatataatgataaaaggaaaaat

SEQ ID NO: 884684 - DNA, 120 bp, Artificial Sequence
  ENSG00000281778_9 (sequence is synthesized)
ctggcaaaaggatataacaattctaaatatgtatgcacccaacactggagcacccagattaataaagcatatattcctagatctaaagagagagacagactgcaatacaataatagtgga

SEQ ID NO: 884685 - DNA, 120 bp, Artificial Sequence
  ENSG00000281778_10 (sequence is synthesized)
ggacgttaacaatgcactagcagcattaaacagatcatctagacagaaaatcaaaaaagaaacattgaatgtaaactggatcttagaccaaagggacctaacagacatttacagaacatt

SEQ ID NO: 884686 - DNA, 120 bp, Artificial Sequence
  ENSG00000281778_11 (sequence is synthesized)
ttatccaataactgcaaaatatactacacattcttctcatcactacatggaacattctccaggataggccatatgttattcttcaaagcagtttcaacacattttaaaaaattatattat

SEQ ID NO: 884687 - DNA, 120 bp, Artificial Sequence
  ENSG00000281778_12 (sequence is synthesized)
cttctaagaacacaatggaatataactagatatcaacacgacgaggaacttttgaaactgtacaaatacatggatgtgaaataacacgctcctgaacagccattgggtcaatgaataaat

SEQ ID NO: 884688 - DNA, 120 bp, Artificial Sequence
  ENSG00000281778_13 (sequence is synthesized)
taatataaaaataaaaaaaaattatcacaaacgaaaatggaaacacaacataccgaaaactatgggattcaacaaaagcagtactaagaggggaatttgtagcaataaacatgtatatca

SEQ ID NO: 884689 - DNA, 120 bp, Artificial Sequence
  ENSG00000281778_14 (sequence is synthesized)
aaattagcaaaaggaaagaaataataaagatcaaagcagaactaaatgaaatagacattaaaaaacacacaagttcagtgaaaagttgattctttgaaaggataaaaaaaaatgattaaa

SEQ ID NO: 884690 - DNA, 120 bp, Artificial Sequence
  ENSG00000281778_15 (sequence is synthesized)
tgttagctagactaaccaggaaaagacccaaataaacaaaatcagaaatgaaaaaagcaacattgcaactaatactacagaaatacaaaatatcatcagagattatgaacaactatgtat

SEQ ID NO: 884691 - DNA, 120 bp, Artificial Sequence
  ENSG00000281778_16 (sequence is synthesized)
taaaatagtggaaaacatagagaaaatgggtatatttctgtaaacatacaacctatcaagattatatgagaaagaaatagaaaatctgaacagatcaataatgagtagtgatattaaatc

SEQ ID NO: 884692 - DNA, 120 bp, Artificial Sequence
  ENSG00000281778_17 (sequence is synthesized)
actgataaaaaatctttcaacaaataaaagctcatggctgaatggattcactatggaattctaccaaacatagaaaaaggaaatagtaccaatccttctcaaagtatttcaaaaaactga

SEQ ID NO: 884693 - DNA, 120 bp, Artificial Sequence
  ENSG00000281778_18 (sequence is synthesized)
agaggagagaattctttctaactcattgtaagaggccagcattcccctgataccaaactaaccagaggcctaacaacaacaaaaatacttacaggtcaatatccctcatgaagatagatg

SEQ ID NO: 884694 - DNA, 120 bp, Artificial Sequence
  ENSG00000281778_19 (sequence is synthesized)
caaaaattttcaataacataatagcaaataaaattcagcaggacatcaaaaagataatacatcatgatctattgggatttttcttaaggattcaaggatggtttaacatatgcaaatcta

SEQ ID NO: 884695 - DNA, 120 bp, Artificial Sequence
  ENSG00000281778_20 (sequence is synthesized)
ttgaagggatgtatcacatcatgaaaatgaagacagaaacatatactcacaatagatgtagaaaaagcatttgataaaattcaacatctcttcatgacaaaaactcaatgaactagacat

SEQ ID NO: 884696 - DNA, 120 bp, Artificial Sequence
  ENSG00000281778_21 (sequence is synthesized)
atgagaaacatacctcagaataataaaggctacatatgacaaatccacagctaatgtcattctgaatgggaaaggttgagagtctttcctctaagcactagaataaaacaagaatgttca

SEQ ID NO: 884697 - DNA, 120 bp, Artificial Sequence
  ENSG00000281778_22 (sequence is synthesized)
ctttcatcactctttttcaacttagtattaggaagtcctagacagtccaatcaggcaaaacaaaaaataaaagatatccaaattggaaaagacaatgttaaatagttcctatctgcagat

SEQ ID NO: 884698 - DNA, 120 bp, Artificial Sequence
  ENSG00000281778_23 (sequence is synthesized)
gaaataatgttatatttacaaaaacctaaagactacaccaaaataactcttagtgcttaaaaataaattcagtacagttgcagaagacaaaattaacatatacaagttaataacatttct

SEQ ID NO: 884699 - DNA, 120 bp, Artificial Sequence
  ENSG00000281778_24 (sequence is synthesized)
atacaataattaaatagttgaaaaataaatcaagttggtaatcctatttccagtagctacaataaaaacaaaatacctaggaataaatttaactaaggaggtaaaagatctgttcaagga

SEQ ID NO: 884700 - DNA, 120 bp, Artificial Sequence
  ENSG00000281778_25 (sequence is synthesized)
aaactataagacattgatgaaaaaattgaacaaacaaatgaaaagacatcttatagtcatggataagaagaattaatatccttgaaatgaccatactaccccaaataaaatacacattca

SEQ ID NO: 884701 - DNA, 120 bp, Artificial Sequence
  ENSG00000281778_26 (sequence is synthesized)
ttcaatgccctccctatcaaaataccattgtcatttttcacagaaatagaaaagcaatcctaaaatttttatggaaccaagatgtagtcggaatagccaaagcaatcctaagcaaaaaga

SEQ ID NO: 884702 - DNA, 120 bp, Artificial Sequence
  ENSG00000281778_27 (sequence is synthesized)
agttcaaaacctcacacaaactgacttcagattataaggctataataatcaaaacagcatggcattggtatagaaatagacacaatgggacagaataaagcacccagaaataaatccaaa

SEQ ID NO: 884703 - DNA, 120 bp, Artificial Sequence
  ENSG00000183146_0 (sequence is synthesized)
acaggaggacaaggactcaggggtctgctggtccatctctgcaccttgaaacagcagctggggcaccagaagtaacccttacagccaacaccatgtgatgatgaggaggagtccatctgg

SEQ ID NO: 884704 - DNA, 120 bp, Artificial Sequence
  ENSG00000183146_1 (sequence is synthesized)
gttaaagagcccacgtgtgagccaaggcaggaaaccccgggatccagaaagccttctgtttttgcgatgctgcctgggatcggagccgcacaacctgtcctcattgctctctccggaggc

SEQ ID NO: 884705 - DNA, 120 bp, Artificial Sequence
  ENSG00000183146_2 (sequence is synthesized)
cgggcaggaacctctgccaaagcttctacctcagccgctggcaggccatgcggcctggggcattcacggagttccaacgagtctgttactggctggggagtgctggggccagggcatggc

SEQ ID NO: 884706 - DNA, 120 bp, Artificial Sequence
  ENSG00000183146_3 (sequence is synthesized)
cttctcctcgaccaccacctggaccactgccacgatatcgtccacagcagcaccttctcctccccctagggcgcctccacgctctgtgccctggctgtcctctccagcagagcctccaat

SEQ ID NO: 884707 - DNA, 120 bp, Artificial Sequence
  ENSG00000183146_4 (sequence is synthesized)
ccctggctgtcctctccagcagagcctccaatttgaacggggtacactgtccgctccacgtctgtggtcatggatgaagctggaaaccatcatactaagcaaactatcacaaggacagaa

SEQ ID NO: 884708 - DNA, 88 bp, Artificial Sequence
  ENSG00000183146_5 (sequence is synthesized)
catggacacagggcagggaacatcacccaccgaggccggtcgcgggggtggggggttgagggagggatagcatttaggggcagcaaac

SEQ ID NO: 884709 - DNA, 82 bp, Artificial Sequence
  ENSG00000183146_6 (sequence is synthesized)
aatacctaatgtaaatgacgagttgataggggcagcaaacaaacatggaacatgtatccctatgttcaggataataaaacaa

SEQ ID NO: 884710 - DNA, 85 bp, Artificial Sequence
  ENSG00000267115_0 (sequence is synthesized)
cagtgggactctgtctctaaaaaaacaaaaataataatattgaagtaaaatgagtatttataaagtgcctattaaatgcctgatt

SEQ ID NO: 884711 - DNA, 120 bp, Artificial Sequence
  ENSG00000267115_1 (sequence is synthesized)
taaaatgagtatttataaagtgcctattaaatgcctgattgatcactggcctgctcacttcaagggctgttcttattctaggattagaccaataaagcagccacaactggtaaattgtca

SEQ ID NO: 884712 - DNA, 120 bp, Artificial Sequence
  ENSG00000267115_2 (sequence is synthesized)
catttccattcactagtctttgagacgtcacatggccacccaggagtgtgatagcagacatgtaatcctaccataattctgggatgggaagagctggcgatattttggaataacattaaa

SEQ ID NO: 884713 - DNA, 120 bp, Artificial Sequence
  ENSG00000267115_3 (sequence is synthesized)
gactgccacaaacattgtaaagatagtgttatcatcacgcttcaaaagaaactgcaacacgggggtgaggtgacctgtccgtaatcattcagtgagtaaataaagcaacaaggattcaga

SEQ ID NO: 884714 - DNA, 120 bp, Artificial Sequence
  ENSG00000267114_0 (sequence is synthesized)
gggaagacgtagttagatggcgaatggaaaacatcaggccctgggcctcatgcttaagtggtcaatatttggagcgctgtgattatgaaccttatatattacctggaaaaagaagacgga

SEQ ID NO: 884715 - DNA, 90 bp, Artificial Sequence
  ENSG00000267114_1 (sequence is synthesized)
tccgcctccagagggtgtaccagaagtaaccagtggaaggggaatcctctagggggaatttaaactcccaaaaattctgtaacagggctt

SEQ ID NO: 884716 - DNA, 120 bp, Artificial Sequence
  ENSG00000267114_2 (sequence is synthesized)
agggggaatttaaactcccaaaaattctgtaacagggcttttgaacccatatgcttgggcccgctcccacactgtttagtgtatgttcgttttcaataaatcccttcattccttccttgc

SEQ ID NO: 884717 - DNA, 120 bp, Artificial Sequence
  ENSG00000267117_0 (sequence is synthesized)
cctcacgtcagcccagattcccataaggtgggtctgattccagtgagcaaacacaagagggatgacagaagcaggtgtcaccctctgacaaccagagggcagcaactgcttcagggtggg

SEQ ID NO: 884718 - DNA, 120 bp, Artificial Sequence
  ENSG00000267117_1 (sequence is synthesized)
tcagacgctccttgagtacacagccccagagggagcttccaagtggacagacagcacagacacgtgttccgggccagcgtgaagacatctgttggctagaggtctgattttctgtttttt

SEQ ID NO: 884719 - DNA, 72 bp, Artificial Sequence
  ENSG00000267117_2 (sequence is synthesized)
gaagacatctgttggctagagggtcgctcgtttccccagttggagcgcaatggcgcaacctcagctcactgc

SEQ ID NO: 884720 - DNA, 120 bp, Artificial Sequence
  ENSG00000267112_0 (sequence is synthesized)
attgaactgcaagggttcacttacatgtaaatgttcttccgcctctgccacccctaagacagcaagaccaaccctcctcttcctcctcttcctcagtctattcagtgtgaagacaaagat

SEQ ID NO: 884721 - DNA, 120 bp, Artificial Sequence
  ENSG00000267112_1 (sequence is synthesized)
gaagactcttatgatgatccactttcacataatgaatagcattgagataatgaagagcatcccagaggaaacaccatgggagggaatacccagccacaacccatcttcgaacctgttgcg

SEQ ID NO: 884722 - DNA, 120 bp, Artificial Sequence
  ENSG00000267112_2 (sequence is synthesized)
tttgattcatggcacatttatgggtctagtccatcctaagaacattataaagagacatttccttggatctgtctgtgtttctgaaactgattcaataccagatagaagttcgcagagcag

SEQ ID NO: 884723 - DNA, 120 bp, Artificial Sequence
  ENSG00000267112_3 (sequence is synthesized)
tgtgcaagtcacatgccatctcagtgtaactgacttacccatatttgtcagccagttcccgagcttgccgttcattgacttccctctgatctgatgtgcctgctcccccgtcaccttccc

SEQ ID NO: 884724 - DNA, 63 bp, Artificial Sequence
  ENSG00000286204_0 (sequence is synthesized)
aaactccgaacacatttgaagggccgcagcttcattcttgaagttcctggagatggagcccta

SEQ ID NO: 884725 - DNA, 120 bp, Artificial Sequence
  ENSG00000286204_1 (sequence is synthesized)
ccgcagcttcattcttgaagttcctggagatggagccctagccagggaccatgcccttcccgtttccatatcatttaaagggaccatgcctttctctacccagcacagcgaccgaatttc

SEQ ID NO: 884726 - DNA, 120 bp, Artificial Sequence
  ENSG00000286204_2 (sequence is synthesized)
atttgctggctggaggatgaaagcagggccaagtaagaagacctggaagtgccaaaaattgttggcctttcaatgtatcttcagatgcagtaaagcgggaaaagatctcctgaggttctt

SEQ ID NO: 884727 - DNA, 120 bp, Artificial Sequence
  ENSG00000286204_3 (sequence is synthesized)
tttatatggatacttacatcttttataagggctctatgatcattacctaatcacatcccaaggctctacttcttaataccctcacattacaggtgtaggatttttgacatataaattttg

SEQ ID NO: 884728 - DNA, 120 bp, Artificial Sequence
  ENSG00000286204_4 (sequence is synthesized)
gggagacacactttgtccactgaaggccccagtcaggtgatttaaatttggaagatatactgaatgatctgatttactcaattggaagggagattatcctaggtgggcctgaataaatca

SEQ ID NO: 884729 - DNA, 120 bp, Artificial Sequence
  ENSG00000286204_5 (sequence is synthesized)
ggtgaaaaatttgtcaaaaacaccttagtctctctttggagagagactacttgtggacatcaactaaaatattagaaggttatttattttaagtaataaataattaaaggcatctataaa

SEQ ID NO: 884730 - DNA, 120 bp, Artificial Sequence
  ENSG00000286205_0 (sequence is synthesized)
ggcctcatgaaagttacaatcatggcggaaggcgaaggggaagcaggcacgtcttagctggtgggaggagggagagcgagtgagtaaaaggggaaagtgctgcacgcttccaaacaagca

SEQ ID NO: 884731 - DNA, 120 bp, Artificial Sequence
  ENSG00000286205_1 (sequence is synthesized)
gatcttgtgagaactcactatccggagaatagcaaggggaagtctgccccaggatctagtcaccccccagcaggcccctcccctgacatgtggcgattacagtttggcaggagatttggg

SEQ ID NO: 884732 - DNA, 120 bp, Artificial Sequence
  ENSG00000286205_2 (sequence is synthesized)
tggggacacagatccaaaccatactgtcagaagagcagcaagctcagtaaatggggccagatcaaaaggagggaggtagtgaacgactccattcgtgtaaaattccagcaaatgtgaagt

SEQ ID NO: 884733 - DNA, 120 bp, Artificial Sequence
  ENSG00000286205_3 (sequence is synthesized)
ccgcgacaggccagcagcagatccgtggctggcgggtgtgggcggaggaggatgtgctggcttcaggcaagcacgcgtcaaatgcctcaaactgtgctcctcaaacgtgtgcagattgca

SEQ ID NO: 884734 - DNA, 120 bp, Artificial Sequence
  ENSG00000286205_4 (sequence is synthesized)
tttctgtcctgcgggggctcagaccctcaatagtaagctccagtgggttaagcaggctgctttccaggtggcccgtgacacccccccatcccccagatgtccagctgccctcaggccacc

SEQ ID NO: 884735 - DNA, 120 bp, Artificial Sequence
  ENSG00000286205_5 (sequence is synthesized)
tccctgggctcccatgggcctcctctccctgtgcccccagggagctccagggctctgaggaaggccaaccccagaggtgtgggcatctgccccaagatggaggccccccccaactctgtg

SEQ ID NO: 884736 - DNA, 120 bp, Artificial Sequence
  ENSG00000286205_6 (sequence is synthesized)
ggcctccaagtgggaggacttggctgcaaggagatgaggggggcactgagtcatgcaggaggccagtgtggctggaatgaggttcagatctgggggaggggctgattttgtccctgagct

SEQ ID NO: 884737 - DNA, 120 bp, Artificial Sequence
  ENSG00000286205_7 (sequence is synthesized)
gtcttcatctccaggagctcatccccgctcctgcactgtggccatagctccaggcagccgcgcgccgaccccacccacaggcctgggtggagctgaaggtctaagccccatgccagaccc

SEQ ID NO: 884738 - DNA, 120 bp, Artificial Sequence
  ENSG00000286205_8 (sequence is synthesized)
tcatccaggcagcgacccctgggcacagggggcatggcagggacaccgatttcctcctccttctgtcagtttggacaaagattccagggccacagaccaccgtctggccgccccaaactg

SEQ ID NO: 884739 - DNA, 120 bp, Artificial Sequence
  ENSG00000286205_9 (sequence is synthesized)
ctttctccaaaagggcttgccccaaagctttgcccaccgagtcctggagctgctgagcgtcctgccgggcctcaccttagtctctcctgtcgccttgtgaggaagtgcctgcttcccctt

SEQ ID NO: 884740 - DNA, 82 bp, Artificial Sequence
  ENSG00000286205_10 (sequence is synthesized)
attgtaagtttcctgagacctacccagccatggcacccagtcttgggtatttcttttttttttgagacggactctcgctctg

SEQ ID NO: 884741 - DNA, 89 bp, Artificial Sequence
  ENSG00000286205_11 (sequence is synthesized)
ctcccaaagtgctgggattacaggattgcaggcgtgagccaccatgcccgaccagatgtaatcttgacctgtcgctcaggctggagtca

SEQ ID NO: 884742 - DNA, 120 bp, Artificial Sequence
  ENSG00000286206_0 (sequence is synthesized)
agctagacagaaaagttctccaagaccccacctgacccagaagcctagctggcttcatctctcaaaatgtgactataaagaaaaatttagcagaatggacagcagaacaagcatacattg

SEQ ID NO: 884743 - DNA, 120 bp, Artificial Sequence
  ENSG00000286206_1 (sequence is synthesized)
gaagactttctaagaccttttgctcaagggcaaaccttattctcagattggatcaagttgagaagcccatgaagtattgtcaccaagcatacaggaggaaaaaacaggtctaattttatg

SEQ ID NO: 884744 - DNA, 120 bp, Artificial Sequence
  ENSG00000286206_2 (sequence is synthesized)
attacaagaattacattaagaacaactgctaatcatctgcttcagctaatttcaaagaaaaaatgtctaatagtacttttacattttctaattagacccagaatccgtagccagcatgat

SEQ ID NO: 884745 - DNA, 120 bp, Artificial Sequence
  ENSG00000286206_3 (sequence is synthesized)
gagttcagagacctggcccctaccctgggagtagcacattcagtcagagaggtttaggtggattcatccaaatactttaatcccagagctctgtcctacaaaaaccaacaggcttgctca

SEQ ID NO: 884746 - DNA, 120 bp, Artificial Sequence
  ENSG00000286206_4 (sequence is synthesized)
actgtagcagtcaacaagaattcatggtgcttggttggactgcatacatattatctttttcctttagaaagctgtgaattccttggctgttttatttttgaaataaatgtgtcaattcca

SEQ ID NO: 884747 - DNA, 120 bp, Artificial Sequence
  ENSG00000286207_0 (sequence is synthesized)
tggactgtgattagtacattgctgaatgggtcttgtccacagtgtttattaatcaggcaggtggctaggtgtggccacgaggaaaaaaaaaatggagcatgatgacatatcaataacaat

SEQ ID NO: 884748 - DNA, 120 bp, Artificial Sequence
  ENSG00000286207_1 (sequence is synthesized)
ggaaatcctttaaatgaaggagctctgctgaaacttacagggttccaatgcagagtattggggcagtatacatgctgctgtaaatggacttcaaagcctctctgcatcactctgggtgtg

SEQ ID NO: 884749 - DNA, 120 bp, Artificial Sequence
  ENSG00000286207_2 (sequence is synthesized)
aataaagtcaactaatgaacttgacaaccctggacaaaagaagctgcaaaatctgcatgcatcccagtctaggtgaggccagtgggatctccatgggccacagtgaagaaatatctttta

SEQ ID NO: 884750 - DNA, 120 bp, Artificial Sequence
  ENSG00000286207_3 (sequence is synthesized)
cctgtgataatatcttcaatggcaccatcttttccctcatatacatgtctgttatctttaacttgtcgtcttcttaattctgcaattaactcttgctgctgcctctttgatttatgagaa

SEQ ID NO: 884751 - DNA, 120 bp, Artificial Sequence
  ENSG00000286207_4 (sequence is synthesized)
ggagactgagaagaaagaagggcagagattagtgaggccagcacccattaggagtttgtgaaaatccaaaatgtgcctgagcattatgttactaataagcagcttcggccaaaaacacac

SEQ ID NO: 884752 - DNA, 120 bp, Artificial Sequence
  ENSG00000286207_5 (sequence is synthesized)
acacatcccacattctgctcagttgcagagaactcaagcttctgggaaggaaacaaaaacttccactgacgaacacacaaaacttcacctggcagcaacaagaaggctggagtctacggc

SEQ ID NO: 884753 - DNA, 120 bp, Artificial Sequence
  ENSG00000286207_6 (sequence is synthesized)
aacaagaggcaactggtaatgaccatagatgtcttaaactgtgttgccaaggatcacaatgaagaaaactttggactgccagcctttatgctctttacctactaacgaggttgccctcca

SEQ ID NO: 884754 - DNA, 120 bp, Artificial Sequence
  ENSG00000286207_7 (sequence is synthesized)
tgaaatgttccctccattcctgctagcaagtccctccagctatcaaggccagcaccaatgggcatctgcataaagccttctctggatgctaagccctctggtcactgggtcatctggtgt

SEQ ID NO: 884755 - DNA, 120 bp, Artificial Sequence
  ENSG00000286207_8 (sequence is synthesized)
ggcctctctgtatatccaactaagttccagatgtctatacgcttggatatgctacacaaacatgctcttagcctcattccagtggttgcagaacaaagtaatcaatgagcatatttccat

SEQ ID NO: 884756 - DNA, 120 bp, Artificial Sequence
  ENSG00000286207_9 (sequence is synthesized)
ttgccaagtgtccaggcaccagaaggaagtggtcaggatcctgggcacacctggcttgctggtcctttgtatggcttgctctgaagagccctctcagcctctcctcacggacctgtctca

SEQ ID NO: 884757 - DNA, 120 bp, Artificial Sequence
  ENSG00000286207_10 (sequence is synthesized)
tgagtgcggcacttcttacctttggatcctgctgctccatcagagcttcttgctctaggagtttttccatgagagcttgttcctgctttttcctcagctcattttcctcttctgcttgct

SEQ ID NO: 884758 - DNA, 120 bp, Artificial Sequence
  ENSG00000286207_11 (sequence is synthesized)
gggtaaatcaaaagaaccagaaagatgatgttaatggaaatgagagcagccaagattttttaaagtcattcttcaagcatccttagtgagttgagaattacaataaatggaaggttgaga

SEQ ID NO: 884759 - DNA, 120 bp, Artificial Sequence
  ENSG00000286207_12 (sequence is synthesized)
agatctacactttatgcctgtatttagctctgcttctgggcttcgctacctgtcacatctctttaaaagctgggagctgagattcaattcatccagaagtcctttcctgatgatcgctcc

SEQ ID NO: 884760 - DNA, 120 bp, Artificial Sequence
  ENSG00000286207_13 (sequence is synthesized)
ctgtttgaactttctcttagtctctgtcccacacactggtgggcacctaccatcctggcagctgtgctcagtgattttgttttcctttcagagacagtctgcctacctagagttcctctg

SEQ ID NO: 884761 - DNA, 120 bp, Artificial Sequence
  ENSG00000286207_14 (sequence is synthesized)
atagcaggatctaagattcttctgccttctgcctattgttaggggaaaaccctcatttcttttcggggcctcaccagagtgacactcttggactctcccatgccttgctccttcccaagg

SEQ ID NO: 884762 - DNA, 120 bp, Artificial Sequence
  ENSG00000286207_15 (sequence is synthesized)
aaggcagtgtgactagtctgatgaatctagaagaaagtgaataggctcacctcagctcagccctcttgggcactctttcttttgaagccggcctccccgaagagacctctagttgtcaag

SEQ ID NO: 884763 - DNA, 120 bp, Artificial Sequence
  ENSG00000286207_16 (sequence is synthesized)
ctgtgaactgatggacaggtcatctacctaatttgcagctgaagcagaaggtcacagacaccacatcctccagcccagctgttatcagtaataaagtttacatttgggtctccattgctt

SEQ ID NO: 884764 - DNA, 120 bp, Artificial Sequence
  ENSG00000286207_17 (sequence is synthesized)
ttgttttcattttggtctatatgagagggatgatgtcctaaaaccccaacctctgcctacaaagtccctaggtgagtgccaggctaggaggctattcatcacgtatagggcaagaaaaac

SEQ ID NO: 884765 - DNA, 120 bp, Artificial Sequence
  ENSG00000286207_18 (sequence is synthesized)
atcctggcagtcacatcactgcctggcacatgcttcactgaatcagctgtgaaaaatcacagggaggaacagtgaggtggaaggagcacgctgatggacaggctgggacctccaacacag

SEQ ID NO: 884766 - DNA, 120 bp, Artificial Sequence
  ENSG00000286207_19 (sequence is synthesized)
gagacaaaccccagccacttcccaacctgtcttagccgattttaaaatatattttctcttttgaccttagacttacatgtttttatgtgaaaaaaatggcacagcacatgacaagggcca

SEQ ID NO: 884767 - DNA, 120 bp, Artificial Sequence
  ENSG00000286207_20 (sequence is synthesized)
tcgcagactatctctacagcacataaacacagccagccagtgggcttgggctaccaagcactgcagacggcagcagttggtggcccgcagccttctcatcacgagcaaatcctgagtctg

SEQ ID NO: 884768 - DNA, 120 bp, Artificial Sequence
  ENSG00000286207_21 (sequence is synthesized)
gcacacggagtttgtgctgtgtttctgttcaccctgactgccacagacgttccttctaccagcagcttatagctctactgctacattaagccatgctgagggaagatgggctaagaatat

SEQ ID NO: 884769 - DNA, 120 bp, Artificial Sequence
  ENSG00000286207_22 (sequence is synthesized)
tttgactttctgagttttagtaaaaggcccaataatgattttccagagccttcagcccctagtggtgttagggaagtgtccccctatttccaacaggacttctcaaaagtgtggagaacc

SEQ ID NO: 884770 - DNA, 120 bp, Artificial Sequence
  ENSG00000286207_23 (sequence is synthesized)
ctgccacatccctcctcccctctgcaataaacattcctcctacctccaccagtgttatcagtgctacatgaagatacgcctggaggatatagattgaggtgttgccaaggtcagctaaaa

SEQ ID NO: 884771 - DNA, 120 bp, Artificial Sequence
  ENSG00000286207_24 (sequence is synthesized)
tcttctaacagccttcttgtaatttctcaaatggacaaatccttctgatacatgtctctttgcgtcataggctttttcaagaccacagccctggattatgtccaagagggcctcccattt

SEQ ID NO: 884772 - DNA, 120 bp, Artificial Sequence
  ENSG00000286207_25 (sequence is synthesized)
aaaggaagggccacttactgatccacacaaagaaacagagagtgcccatccttaaaagcaccatcctttagtccatactagagaaatgctggtctaagaggtcctaagccctgtgctatg

SEQ ID NO: 884773 - DNA, 120 bp, Artificial Sequence
  ENSG00000286207_26 (sequence is synthesized)
acttacacaagcaggctctccttaacttcagctgtatcatgcaccttcaccacagcccacagctcacttctacccattaaagaattccacaagaggcctggattttcaagtacttcacct

SEQ ID NO: 884774 - DNA, 120 bp, Artificial Sequence
  ENSG00000286207_27 (sequence is synthesized)
tgcctgcctaggtgaacagtcaatggggcagcaatgtctttgagcatctcccttgccccaagggggctgccaagagctttgttttctggctgaggcagaggactggctaggtggagaaag

SEQ ID NO: 884775 - DNA, 120 bp, Artificial Sequence
  ENSG00000286207_28 (sequence is synthesized)
ggaccataatgtccctcagcctccacagagctagggactgctatctcgtgaatgccacccagatctgctgtccacaggaactgggaggcctctgcagagagttgggactcagacacatct

SEQ ID NO: 884776 - DNA, 120 bp, Artificial Sequence
  ENSG00000286207_29 (sequence is synthesized)
caaggagggcaattgcttgagaaataagggcaaggagggccttaacatataccttatatgctttcacaaaccggacaaagacaggaaagaagacagagggtggtgttgtcttggggtttt

SEQ ID NO: 884777 - DNA, 120 bp, Artificial Sequence
  ENSG00000286207_30 (sequence is synthesized)
ctccaaaatacttcacaacatcatcaaaggcatcctgtgaagaagcaaatttttcttgagtttcattagttaggcatttgaactggatgctctagggggaacgctgatgcaaagcagcag

SEQ ID NO: 884778 - DNA, 120 bp, Artificial Sequence
  ENSG00000286207_31 (sequence is synthesized)
ccacaagacagaggctcccatggccttgcgttgctgcacctcccttacctcccaagattgcctaacgcctccgtgtttcctccaaacgcctcagcagaggcaatccgaggaatgcaatag

SEQ ID NO: 884779 - DNA, 120 bp, Artificial Sequence
  ENSG00000286207_32 (sequence is synthesized)
tggggcacaggaattcatctgcaggacctcctgccacttctacacacaggcatacatgcatgcatgcacacgcacacaccccacatacaaaacaaggaaatctttcttacaggagtttcc

SEQ ID NO: 884780 - DNA, 120 bp, Artificial Sequence
  ENSG00000286207_33 (sequence is synthesized)
aaaggccgtggcagaaccccttaaaaccaacaaggtcaaaagggatcttggtcactctgaccctaaattccacttccttgcttcaacactccctatgacagcctcacacaggggacactc

SEQ ID NO: 884781 - DNA, 120 bp, Artificial Sequence
  ENSG00000286207_34 (sequence is synthesized)
agtctctgcctgaactcttccatgatacaagattgccccaaaccagaggcccttccactgaatctgctttctgagtccccatcccccaactttgcctctgcctcttctgatagcgtactg

SEQ ID NO: 884782 - DNA, 120 bp, Artificial Sequence
  ENSG00000286207_35 (sequence is synthesized)
ttcattctgttttgcaggcctgcctatctatcagcaacccccagtatagtgtaagattttcaaggacaagatctacagaaacccactacacaggaaacactgctttgccgagcacaggcc

SEQ ID NO: 884783 - DNA, 120 bp, Artificial Sequence
  ENSG00000286207_36 (sequence is synthesized)
tgacgcatgtgggctgaactgaatacagcacccacactggaactacggaaatgacgttagacaaaaagcaaattcaagcaattttcttatttgagttcaaaacgggttgtaaagcagtga

SEQ ID NO: 884784 - DNA, 120 bp, Artificial Sequence
  ENSG00000286207_37 (sequence is synthesized)
agacaactcgcaacatcaacaatgcatttggcaatgcatttggtggttcaggaagttttgcaaaggacacgagagccttgaagatgaagagcttagtggccggccatcagaagttgacaa

SEQ ID NO: 884785 - DNA, 120 bp, Artificial Sequence
  ENSG00000286201_0 (sequence is synthesized)
ctgacaaccggtgcatgaaacccctgtcacatactccctagatggctcaatcaatcatgacactttcatgtaaaatctttagtattgtgagcccttaaaagggacagaatttgtgcactc

SEQ ID NO: 884786 - DNA, 120 bp, Artificial Sequence
  ENSG00000286201_1 (sequence is synthesized)
aagaagctcggattttgagatgttagtctgctgatgcttccagctgactaaagccacttcctccactccctcagtgtctgtgaggttttgtctgcagctcatcctgctacatttcttgtt

SEQ ID NO: 884787 - DNA, 120 bp, Artificial Sequence
  ENSG00000286201_2 (sequence is synthesized)
tccctgatcaggaagcgaggtaactgacggacggctgaggcatccccttaggcagcttaggcctgctctatggagcatccctgtgggagactctggcctgccttagtgacgtgatccaaa

SEQ ID NO: 884788 - DNA, 120 bp, Artificial Sequence
  ENSG00000286201_3 (sequence is synthesized)
gagtgatcccaggtaggcaattgccctggtggaatgccttgccagagcagcatgtgccaggcccacatggaggatcaacgcagtggctgaacacaagggaggaactggcacttggagtgc

SEQ ID NO: 884789 - DNA, 120 bp, Artificial Sequence
  ENSG00000286201_4 (sequence is synthesized)
ggaactggcacttggagtgcagacatctgaaacttggtttttgcatgaagaggagcaggagtctcgaaggcacagccagagtcttactctctcaccaggctggagtgcagtggtacaatc

SEQ ID NO: 884790 - DNA, 120 bp, Artificial Sequence
  ENSG00000286201_5 (sequence is synthesized)
ccagaatggtctcgatctcttgactttgtgatccacctgctacaaggtggcaccctcccaaagtgcagagattacaaacatgagccaatgctcccagccacaatttctatcatatcttca

SEQ ID NO: 884791 - DNA, 120 bp, Artificial Sequence
  ENSG00000286201_6 (sequence is synthesized)
tattcacttatctttcctctgttctatccattctgctcttaagcctatctggtaatcttttattcagttacaatatttgttagtgctaacaaatttttgttcttctctatgtcttctatt

SEQ ID NO: 884792 - DNA, 120 bp, Artificial Sequence
  ENSG00000286201_7 (sequence is synthesized)
aattatctgaaactttctatctgttcatctgcctcaatagtttttaattactcattgaaggaatgttatgtttcagcatggacagtgattggacagtgattctcagttgtatcctggcca

SEQ ID NO: 884793 - DNA, 120 bp, Artificial Sequence
  ENSG00000286201_8 (sequence is synthesized)
tttaggattatgtttgagatttggcacattgtgtaattattatttttttttgtggagacctcttctaagattatgcccacaggataagtggagtgccacctcactacagggaagaggggg

SEQ ID NO: 884794 - DNA, 120 bp, Artificial Sequence
  ENSG00000286201_9 (sequence is synthesized)
tggaagtccacattttccctataatctctgtgatccatgttggtaagtccagtgtgggattgcaaggagggtaaacagatgcctcataatgactgcaatgacaccacaatgggaaacagg

SEQ ID NO: 884795 - DNA, 120 bp, Artificial Sequence
  ENSG00000286201_10 (sequence is synthesized)
taaacttctcaccctaaaactccactgggtgtcttttgacaccactctagtggggttggagagacagtttgtattagccagtgttctctgagaaagcatccatagaagatagatagacac

SEQ ID NO: 884796 - DNA, 120 bp, Artificial Sequence
  ENSG00000286201_11 (sequence is synthesized)
atagatagattcaaatagatttatttatgtatttacttatttatttttagacagagtcttgctgtgtcacccaggcttgagtgctgtggcacgatcttggtgcactgcaacctctgcctc

SEQ ID NO: 884797 - DNA, 86 bp, Artificial Sequence
  ENSG00000286201_12 (sequence is synthesized)
tgtggcacgatcttggtgattctcctcagcctccaaagaagatgggattacaggctcgtgccacaacacctggctaattttttgta

SEQ ID NO: 884798 - DNA, 120 bp, Artificial Sequence
  ENSG00000286201_13 (sequence is synthesized)
gctggtcttgaactgctgaccttgtgatccacacacttggactcccaatgtgttggaattagaggcgtaaaccatggcacccagctcaaagagatttataaagagaaactggctcagaaa

SEQ ID NO: 884799 - DNA, 120 bp, Artificial Sequence
  ENSG00000286201_14 (sequence is synthesized)
ttgaatatgagagttcctaacatatggaggcagcaatgggagattcaggagagctggtggtctaagttctagtctgagactaaaggccagagacccaggacagctgatggtgtgagctcc

SEQ ID NO: 884800 - DNA, 120 bp, Artificial Sequence
  ENSG00000286201_15 (sequence is synthesized)
tatctgagtctgaaggcccaagacccagaagagcaaatggtgtgagttcaagtctgagtctgaaggcctgaggccaatgagagctgatggtgtaagttctaatctgggtctgaaggccca

SEQ ID NO: 884801 - DNA, 120 bp, Artificial Sequence
  ENSG00000286201_16 (sequence is synthesized)
aggcccaggaaagctgatgatgtgaagtccagtctgagtgtgaaggcctgagactcaagagagttgatggcatgagttctagtctgagtctgaaggcccgagatgcaggataactgaggg

SEQ ID NO: 884802 - DNA, 120 bp, Artificial Sequence
  ENSG00000286201_17 (sequence is synthesized)
tatgacttccagtctgagtctgaagacctgagacccaggagtcctgatcatgtgaagtccgatctgagtctgaaggcgtaaggccaggagagctaatggtgtgaattccagtctgagtca

SEQ ID NO: 884803 - DNA, 120 bp, Artificial Sequence
  ENSG00000286201_18 (sequence is synthesized)
gaagacctgagacccagaagagctttgagtgtgaattccaatctgagtcagaaaatccaagacccaggagagctgacagtgtgggattcacactggagactcaagacccaggaaagccca

SEQ ID NO: 884804 - DNA, 120 bp, Artificial Sequence
  ENSG00000286201_19 (sequence is synthesized)
tgatgtaggtgccagtttaaagacaggagaatcctgatgtttcagctcaatcaggcaggagaggtttcctcttactccatctttgtttcctattccaggctttcatagattgtagaggac

SEQ ID NO: 884805 - DNA, 120 bp, Artificial Sequence
  ENSG00000286201_20 (sequence is synthesized)
ctttgtttcctattccaggctttcatagattgtagaggacccaccaacaggaggggtcaatccactttttgcagtgtatgaattcaaatgggaagccaggtgcagtggctcacacctgta

SEQ ID NO: 884806 - DNA, 120 bp, Artificial Sequence
  ENSG00000286201_21 (sequence is synthesized)
gagccaagatcaccccattgcactccagcttgggagacaagagtgagactctgtctcaaataataaataaataaatacataattgaaagaataaaaaaagaattcagatgggaatctcat

SEQ ID NO: 884807 - DNA, 120 bp, Artificial Sequence
  ENSG00000286201_22 (sequence is synthesized)
gaataaaaaaagaattcagatgggaatctcatccaagtacccatcttgcagacatattcagaataatgatttcccaaatatctccatgccctgtgactcagtcaagttgatacaaaaaaa

SEQ ID NO: 884808 - DNA, 120 bp, Artificial Sequence
  ENSG00000286201_23 (sequence is synthesized)
tcagtcattattgttgtcttggttctgcctggtaaaatcaaagtccagaccagctagtctggcctggtatccacctggatattacagatgggcaatgttggaagtttatgcttgaagctt

SEQ ID NO: 884809 - DNA, 120 bp, Artificial Sequence
  ENSG00000286201_24 (sequence is synthesized)
ggtctttgctaatgggggtggagcggaagccacagtgcatctgtggtatatgctggataacagaaaacccagagaactcattcccatgattttcctcaggttctcaggtcttttttcttc

SEQ ID NO: 884810 - DNA, 120 bp, Artificial Sequence
  ENSG00000286201_25 (sequence is synthesized)
atgtctgtacttaaaatggaaacaggcagaagtgcatctatgtcatcttgttccagaattacaaatttgaagtattgcagcttttttagtataactgaaaaaatatctacaaactcatct

SEQ ID NO: 884811 - DNA, 120 bp, Artificial Sequence
  ENSG00000286201_26 (sequence is synthesized)
gcaaatctgcaagtggtgcacaaaataaatccacttaaatagtcctctttgaccatgttaagtgtttgaatcaagtaaaattacacgaataaagtcgatggtagttacaaaccaaatgga

SEQ ID NO: 884812 - DNA, 120 bp, Artificial Sequence
  ENSG00000286201_27 (sequence is synthesized)
ctctctatccacagaatataatttttaacagtcatatacacctgtttccaatctaacaaaggcttaaaagagactttctaagagaagtttaagttttattactcagaaactctggggatt

SEQ ID NO: 884813 - DNA, 120 bp, Artificial Sequence
  ENSG00000286201_28 (sequence is synthesized)
ttcagcaatgtaagtgaatactagagagcattcaagaaatcttagatcttcagagttgttttccttgaagctttgaatctttgtgcacttttaaaattgtttttctctgcatttagcaat

SEQ ID NO: 884814 - DNA, 120 bp, Artificial Sequence
  ENSG00000286201_29 (sequence is synthesized)
gacatatattgtaaaaaatgtgtcttatgtttatcttcagccaaatttatttgcatgttctactttgtgtgttttagtaaaagttcaatatttgatagcttgagtaattctttcatcttt

SEQ ID NO: 884815 - DNA, 120 bp, Artificial Sequence
  ENSG00000286201_30 (sequence is synthesized)
gatgcaaagctacattttgaaaatattgactgagaatacaatgaagtatataatcattttccagtagcaatgactggaatgtgtgacacatgtctcagtagcaacatttcactttgttca

SEQ ID NO: 884816 - DNA, 120 bp, Artificial Sequence
  ENSG00000286201_31 (sequence is synthesized)
agatctgattttctataaataattcctaatgcagtcagctacaaaccaagacaagaatgtaattgaaagcctctgagttattaataatttactttctctatgtggccacacttaggacct

SEQ ID NO: 884817 - DNA, 120 bp, Artificial Sequence
  ENSG00000286201_32 (sequence is synthesized)
aagccaaaaaaaaagtatagaaaaactccttaagagtaaaaaaaattaaataaaaaagcatataatggatatgtgtcaactgagttatgtggaaaggcagaaaaggcattttagaaacaa

SEQ ID NO: 884818 - DNA, 120 bp, Artificial Sequence
  ENSG00000286201_33 (sequence is synthesized)
tgatctgaggttattcaatataaggatatagaactctatacccttgaatatccatgaagttctttctgtatggtccagcagaagaagaatgttaattccttgcaggtactgcactgctta

SEQ ID NO: 884819 - DNA, 120 bp, Artificial Sequence
  ENSG00000286201_34 (sequence is synthesized)
gatgttatttttgaaaacctctccagatttttaataccttccttcattgaattttgagttataaatgcaaccattttacagatgcagggagatataacacaagttgtaaagccctgtgtg

SEQ ID NO: 884820 - DNA, 120 bp, Artificial Sequence
  ENSG00000286201_35 (sequence is synthesized)
aagtcatatggttgacaggaataagaattcctcatttgaaggaatttttatactctaccctgacttactgatgactcacagtgtatgtgactctagagtttaatgattatgttactttgg

SEQ ID NO: 884821 - DNA, 120 bp, Artificial Sequence
  ENSG00000286201_36 (sequence is synthesized)
gaatatagagttttgtgatctgggaagacgtataaatgtgcttccctgatctactcaaatgcacgagagaggtatttttcatgtatattttagcccagagaaagggcttaatctcttcag

SEQ ID NO: 884822 - DNA, 120 bp, Artificial Sequence
  ENSG00000286201_37 (sequence is synthesized)
ccagtggatgtatattacacttttaaagaattcttctgaaatctttttctgtgccatattttcagacaatttcaagtttattctgcttcagctgtcatagtggcaacccgcactaagagt

SEQ ID NO: 884823 - DNA, 120 bp, Artificial Sequence
  ENSG00000286201_38 (sequence is synthesized)
ttgtcaccaaactctcatcgttaagcttggaatgtcttcaagtacaaatggttatgcaatttgggaattaccagtttattttccaagaaggtaagatgcatcctgttggtgaatgcagga

SEQ ID NO: 884824 - DNA, 120 bp, Artificial Sequence
  ENSG00000286201_39 (sequence is synthesized)
caacctggcgggccaggtgcataaatctttgacttccccaccatgacgaggtttggataagacttcaacccagtgatggccaatgagactggatggtgcagtctacaaatattccactag

SEQ ID NO: 884825 - DNA, 120 bp, Artificial Sequence
  ENSG00000286201_40 (sequence is synthesized)
cttgtggtggaataaatcagtgttgtgtattttctttggtcttttcttctcggtgctcatgtgaatgtgcctatctgttctaaaaccaggtcattaaaaatatgtcaatattttaaacat

SEQ ID NO: 884826 - DNA, 120 bp, Artificial Sequence
  ENSG00000286201_41 (sequence is synthesized)
aaaatatgtcaatattttaaacattaaatatttaaatctgttataattacacaaatttacatggtttacataggtttattctttttttcttgttgtttgtttttttgagacggagtctcg

SEQ ID NO: 884827 - DNA, 120 bp, Artificial Sequence
  ENSG00000286201_42 (sequence is synthesized)
tttattttttaatatctataaactttttgcttctagttagttcacagcagagggcagactcattcttttttgtaacttaaagagtcaaattgttgataaattacacttacagataatgtg

SEQ ID NO: 884828 - DNA, 120 bp, Artificial Sequence
  ENSG00000286201_43 (sequence is synthesized)
ctcttgagtttatcgcacctgaaattctcccattgacctgtatatttttggacatgtatgtgtactactatatatgaaatatgaaatatatgtatctttgattcatatatgtatgtattc

SEQ ID NO: 884829 - DNA, 120 bp, Artificial Sequence
  ENSG00000286201_44 (sequence is synthesized)
ttgtctacttagtattctggaaaaaaatttagaagactaatgctgttacatgctattttagagtggttatgatcaaagtcataaaatgagaaagtggtgaaccaggatgcaaatggaaca

SEQ ID NO: 884830 - DNA, 120 bp, Artificial Sequence
  ENSG00000286201_45 (sequence is synthesized)
ttgacatactaatacaatttcacctaatgtatgtagccagaagtcagacacagtcaagaagttgggatttgaagatagaaatttttaagagcaaaagaagagacactattccatggagtt

SEQ ID NO: 884831 - DNA, 120 bp, Artificial Sequence
  ENSG00000286201_46 (sequence is synthesized)
tgcattgtgagtttatgaatgaatgtagaaaatggtaatttggtctccttcattcctatggtaaatgtcttcattgatcatagaaaagaggatgttattggatatgtgtgtccagatagt

SEQ ID NO: 884832 - DNA, 120 bp, Artificial Sequence
  ENSG00000286201_47 (sequence is synthesized)
catttagctgattctccaatcaccaggcttgtcactaccaatgaatgatccaaaaaagttccaccatgtgactgaccaggcacctaacacacactataacttttgctaggatgtgcaatt

SEQ ID NO: 884833 - DNA, 120 bp, Artificial Sequence
  ENSG00000286201_48 (sequence is synthesized)
ttgacttaagatgtaggctgggcttctactctcatattggctgaatctaagtagcacctgaacattgatcccaaagagatgaaccctactgaatgtctttgtgaaaaaatggtagggtaa

SEQ ID NO: 884834 - DNA, 120 bp, Artificial Sequence
  ENSG00000286201_49 (sequence is synthesized)
aatacatgcagcagtacagaacctccaggctggatgctgtggctcaggcctgtaatcctagcagtttggaaggctaaagtgggaggtgagcttcacttgagctcaggtgtttgacaccag

SEQ ID NO: 884835 - DNA, 120 bp, Artificial Sequence
  ENSG00000286202_0 (sequence is synthesized)
gagactgcaagcagggattagggagaggagtagacgtggctggacgtcgctaaggaatttgcaatgattactttaatttcgggaggtaacaagatcaaatcagtgccttggggaagactg

SEQ ID NO: 884836 - DNA, 120 bp, Artificial Sequence
  ENSG00000286202_1 (sequence is synthesized)
agctggcaatctagagaaaataagcttgtttttggaattccgaaatatagcatcacatttgctacatggaatagtgaaaaaaggaactacataagtttaacacacaatgcgacttgcaaa

SEQ ID NO: 884837 - DNA, 120 bp, Artificial Sequence
  ENSG00000286202_2 (sequence is synthesized)
ccggaccctgacgatgggtgcagaggaaaagctgggtcactgaggacaaactgaggctcttggcagtgtgatggtcttcctgcactctctatttgtgttctttagaccctgtgcatatac

SEQ ID NO: 884838 - DNA, 120 bp, Artificial Sequence
  ENSG00000286202_3 (sequence is synthesized)
tcattgtgtactccaatcttttctgcttttaaaatctatgaattcggtctaacagcgttcattgaacaatggaaggataacactgagtgaggccactcctggtctcagaatgcacctcca

SEQ ID NO: 884839 - DNA, 120 bp, Artificial Sequence
  ENSG00000226542_0 (sequence is synthesized)
acgagttctctcccctggaggcccagccctcactcacagcctcctccagcccagctggagatggaaactttcggaaaatgtacaggcagcgcagtgtggggtagttgcaatgcagtgtgg

SEQ ID NO: 884840 - DNA, 120 bp, Artificial Sequence
  ENSG00000226542_1 (sequence is synthesized)
cactttctgcattcctgaggaggccttaggaaacttacaatcatggcagactgccaaggggaagcaaggcaccttcttcacagagcggcaggacagaaaggaattggaagagttcaggat

SEQ ID NO: 884841 - DNA, 120 bp, Artificial Sequence
  ENSG00000226542_2 (sequence is synthesized)
gcaaggagcagagttctcagtgtttcagctattagttgctaaggaacaaaattccccaaaacttacaggaggaaaacaaccaacattttattattatcatggattttgtgggttgggaat

SEQ ID NO: 884842 - DNA, 120 bp, Artificial Sequence
  ENSG00000226542_3 (sequence is synthesized)
ttgggcagggcactgtagagttggcttgtctctgttctctgttccacaatgtaaaagacttgaatgactgcaatcttctagaagtttcttcactcacatctctggtgcctgagctcggct

SEQ ID NO: 884843 - DNA, 120 bp, Artificial Sequence
  ENSG00000226542_4 (sequence is synthesized)
gggactgctgatcagagtgtttccacacagcctccccacgtggcttgggcttcctcagagcatggcagcttcagaggcattggtctttttaccaggcagtcaggacttcaagagcaaatg

SEQ ID NO: 884844 - DNA, 120 bp, Artificial Sequence
  ENSG00000286208_0 (sequence is synthesized)
acataagtgagatgaatctgcttgtttttctatgcctggcttattttatttaacatattttccaggttcatccatatggctccaaatgaaaattacgttagtttgttatggttgaagagt

SEQ ID NO: 884845 - DNA, 120 bp, Artificial Sequence
  ENSG00000286208_1 (sequence is synthesized)
attgcgttgtgcagataaatactgcagtttcctcatcccttcatctgtggatgaacaggttccacagtgttgccacggatgacctgatttcagtacccgtgtctggctgtagagtatctg

SEQ ID NO: 884846 - DNA, 120 bp, Artificial Sequence
  ENSG00000286208_2 (sequence is synthesized)
gtcgtgactggatactgcagtttctggatctcatcctctgggggtggacaggtttttccatcttgctggtagtgaactgatgtccggaagtttgatggctgaagagtataccgttgtgca

SEQ ID NO: 884847 - DNA, 120 bp, Artificial Sequence
  ENSG00000286208_3 (sequence is synthesized)
tatatccttcaattcctgcattttttaatctgtagaaagacaagtaggttgattccccatcttagttattgtccagagtacttcatgaaacatgagagggagatacctccttaaggtagg

SEQ ID NO: 884848 - DNA, 120 bp, Artificial Sequence
  ENSG00000286208_4 (sequence is synthesized)
tttggttggctttgcaggtatacccagtgttgggatggctagaggaactggtggttgtgttaattgtttcagaaacctccagctgtctcccagcaggtatacgaatttgcattcaaacca

SEQ ID NO: 884849 - DNA, 120 bp, Artificial Sequence
  ENSG00000286208_5 (sequence is synthesized)
gtagtgtgtaatagttcctctgtctgcaaatctacactgcccttatcttccaaagttttattgctgtttctggtcatactcgttctctgggaagaaactcttctgatgtggacaaacttt

SEQ ID NO: 884850 - DNA, 120 bp, Artificial Sequence
  ENSG00000286208_6 (sequence is synthesized)
tctattacctgagagtctgtttcaggttttttcagaaatggctatgccagtcctttgggcatttttagcatgtgttttggtttttgtatttttgtccacttaggaccattagtttcttga

SEQ ID NO: 884851 - DNA, 120 bp, Artificial Sequence
  ENSG00000286208_7 (sequence is synthesized)
gtatgttagataagaagcccttccagattgacagtttttcataattttcttctagtctgcaagatgccttttatttgggttcagtattttctgtcctgtgttgaagctgcgtgaagctct

SEQ ID NO: 884852 - DNA, 120 bp, Artificial Sequence
  ENSG00000286208_8 (sequence is synthesized)
gaagttgtccttagtctcacatggtcacattagcttttgttagtggtgatttctgtgtccctttgagaagaaaagtgagatggcgaagccattgtatggtctatgggtatttggttccta

SEQ ID NO: 884853 - DNA, 120 bp, Artificial Sequence
  ENSG00000286208_9 (sequence is synthesized)
tgtcttccttttctgtttgtggcttaggttcacaggttcaagtttacccacagtagacacacaccctacgtgttttccttggagattttggtttcaggattgaacttaggtgttcagtag

SEQ ID NO: 884854 - DNA, 120 bp, Artificial Sequence
  ENSG00000286208_10 (sequence is synthesized)
attttgtgtcgctttttgtgtcttgggtaaaggaaaggttcggtcctttgcacgtgacccctcagtttcctcaaccattgtgcctttggtgtgcttttggaggaacaacaagaatcccat

SEQ ID NO: 884855 - DNA, 120 bp, Artificial Sequence
  ENSG00000286208_11 (sequence is synthesized)
gggttcagtgtttataattgtgggttgattatttggctccttcgttgtgtccattcggttgtctttctgtgttcatgccactaatggatggattgggtcactgtaggctttttgttttgt

SEQ ID NO: 884856 - DNA, 120 bp, Artificial Sequence
  ENSG00000286208_12 (sequence is synthesized)
tttgtgtgttttcttccttttttctatttttatttccaaagctgggttttctaaaatgatagctacttttattgtgatcgaggggtacgcctgcaggttcatttcactacatggctatac

SEQ ID NO: 884857 - DNA, 120 bp, Artificial Sequence
  ENSG00000286208_13 (sequence is synthesized)
agtagaattttgatgcttggggtcctaacgtacctgtcacccaggcggtgaacacagcaccagttgggtctttcttcctccaaggctccctgtctcccttttttttctgtctggaagtac

SEQ ID NO: 884858 - DNA, 120 bp, Artificial Sequence
  ENSG00000286208_14 (sequence is synthesized)
ccagcgtctcttgatttcatctttatgttgatgtgtattgggtgttgcgcttccacttataaatgagaacctgcagtgtttggtcttctgttcttgcctcagttgcttagcagagtggcc

SEQ ID NO: 884859 - DNA, 120 bp, Artificial Sequence
  ENSG00000286208_15 (sequence is synthesized)
tccagttccacccatgttcctaccgagggcatgattttgtttctgtgtttgattttccttagtggctttttagcattctgtgatgtataggaaccacatttttaaaaatccagttttctg

SEQ ID NO: 884860 - DNA, 120 bp, Artificial Sequence
  ENSG00000286208_16 (sequence is synthesized)
atgtgtctttttgatagacgcatgtgtttttccctggggtagatgcatggggtaggattgctgggtcaaagcatagctctgccttccatccttttttttttccagaaatcttcagactgg

SEQ ID NO: 884861 - DNA, 120 bp, Artificial Sequence
  ENSG00000286208_17 (sequence is synthesized)
tttccacagtttaggatctagtttgcattacctccaagagaatagccatgtttgcttttctctgctgccacactgtagcatgttatgttttgacttgggacaaatggccactctgaccag

SEQ ID NO: 884862 - DNA, 120 bp, Artificial Sequence
  ENSG00000286208_18 (sequence is synthesized)
catgtgatggtactggtacctcatctctgatgattagtgatgttgagcgtttcccatgcctgttggaatggcaatccgttggaaatgtcttctcagttactacccatatgtatgttgctc

SEQ ID NO: 884863 - DNA, 120 bp, Artificial Sequence
  ENSG00000286208_19 (sequence is synthesized)
aggccactgtgtggccccagcactgttggtttgcatcgggacttggggattgtttgtcgttgttagccaagacaaatgttacactgctgttcctacagtgagtagtgggagtggggtatg

SEQ ID NO: 884864 - DNA, 120 bp, Artificial Sequence
  ENSG00000286208_20 (sequence is synthesized)
gggacatatgcttatgcccacagttccatcagaaatcccactgccttaagacagtctcacgggaacccagtcccagccttgcagcactgggtagccctgtggcattttgactttggatgt

SEQ ID NO: 884865 - DNA, 120 bp, Artificial Sequence
  ENSG00000286208_21 (sequence is synthesized)
atctgcattgttgaagtcactcagcatgttgccatgcatttatccacttaggtcaatgttaagggaagttcatcgcctctgcttcttcagtaactgatgtctggtgcatcaactgaatgc

SEQ ID NO: 884866 - DNA, 120 bp, Artificial Sequence
  ENSG00000286208_22 (sequence is synthesized)
atttcaggcttttaagcagttcccacggatctatgggtaaaaaaggctttcaccatgcccacctactcagtgagtgaccaatgtctcattgttagtgcatctgatgcacagagtttagtg

SEQ ID NO: 884867 - DNA, 120 bp, Artificial Sequence
  ENSG00000286208_23 (sequence is synthesized)
gtctgagggaggtcagtcgccaagcagagattgaaatcacatttgtatttacattattacttttctacagcttggttccttgcagggtttcacactatttagtctggattgaatccttga

SEQ ID NO: 884868 - DNA, 120 bp, Artificial Sequence
  ENSG00000286208_24 (sequence is synthesized)
attactttactttgtctaccaaggctttcaaagaacttgataaacttgttctaattagccaacatattcatccatgatgtccgtataccaggtctaaaaataaaacatttcttaatgcac

SEQ ID NO: 884869 - DNA, 120 bp, Artificial Sequence
  ENSG00000286208_25 (sequence is synthesized)
acaggacatggaaggcaatctacacattttcaagtgtagactttgcttgtgactcttttgtgaggaatagtcattgttactttaggaaaaccctgagtttatccaactcttgttagaatt

SEQ ID NO: 884870 - DNA, 120 bp, Artificial Sequence
  ENSG00000286208_26 (sequence is synthesized)
ggataagtgtaaaaacctacaatagaatgcaagtgtgagagccaagtcctctggtaaaataaactcatattattctttatatatgtctggtcattgtattaataaaatcagtttgttttg

SEQ ID NO: 884871 - DNA, 120 bp, Artificial Sequence
  ENSG00000286208_27 (sequence is synthesized)
gctgaaacacatggttggcctttacaatagatgtgaaaatgggcttatagatcattgctctttattgtgaatattaggttgtatttattgccaaactctttcaacagcttctaagcagtg

SEQ ID NO: 884872 - DNA, 120 bp, Artificial Sequence
  ENSG00000286208_28 (sequence is synthesized)
aatttcagtgtgttgttgttgttctccaagcacaagcagctacttcagttttaccacattcatctcccacacactgatgaaccatatggagacagcaggaactgcagtagaaccagaggg

SEQ ID NO: 884873 - DNA, 120 bp, Artificial Sequence
  ENSG00000286208_29 (sequence is synthesized)
agtagttaggacagacactctgattcattcattctgattctcactgttgtcagtgagtaaaggtcattgaatttttcttctgatgaataaaatggacaattttctcagtgcaatggctta

SEQ ID NO: 884874 - DNA, 120 bp, Artificial Sequence
  ENSG00000286208_30 (sequence is synthesized)
cttttggaagagcagccctaaagactttactactgatcagtaaagtctaaactgctttctgtgtatttttttaattaaacttttattttagattgaataaaaatgtgcaggtttattgtg

SEQ ID NO: 884875 - DNA, 120 bp, Artificial Sequence
  ENSG00000286208_31 (sequence is synthesized)
tgatactgagttttggggtatgattgaagccatcactaaggtagtgagcatctcaccttctccctctcttcactctgttacagagaacagaccctcccagtcttcagtgcactctaaata

SEQ ID NO: 884876 - DNA, 120 bp, Artificial Sequence
  ENSG00000286208_32 (sequence is synthesized)
ctggctaattctggccaatggaaggcatctgtggaagagaaaagcctcaggtcatgtgctatctgtctttattcactgtgacatattaggtaatggtcacagccactcaccatggcccca

SEQ ID NO: 884877 - DNA, 120 bp, Artificial Sequence
  ENSG00000286209_0 (sequence is synthesized)
cactaagagttatggatgctggaacctacccaggtttgatttcctgctctgccattcattaattgtctgacttgggcaagaataactaatacaacaggataatgtgaagcccaaacagaa

SEQ ID NO: 884878 - DNA, 120 bp, Artificial Sequence
  ENSG00000286209_1 (sequence is synthesized)
caaactggaagactgagaagtacagttcctaatggaaagaagaaaggtcctctccagacattgactgttccaactgagaaatgggagctaacctatgaggatggaaaggcacaagaacga

SEQ ID NO: 884879 - DNA, 120 bp, Artificial Sequence
  ENSG00000227634_0 (sequence is synthesized)
gatgtcaagacttggagtaggtgacagttggccttgggcttcggtggccaacccatgactacaaaagcccgagaagccagcagcttccccggctcctccaccaagtggcctctgggtgat

SEQ ID NO: 884880 - DNA, 120 bp, Artificial Sequence
  ENSG00000227634_1 (sequence is synthesized)
ggggaagcttgtcctctgctttgtcacacacaaaactctaaaagtcagcatcccaacgcatcggcctggagagcccgtccaggaggatttatgtggaatctggcttttctgatagcatcg

SEQ ID NO: 884881 - DNA, 120 bp, Artificial Sequence
  ENSG00000227634_2 (sequence is synthesized)
ttctgagtctgtttctcttaatttgactgtggtctctgctcttcgctggactcagtgttgaacaggacactgaaggacaaggaggaacttatccatggagggggtagggggagatgtcac

SEQ ID NO: 884882 - DNA, 120 bp, Artificial Sequence
  ENSG00000227634_3 (sequence is synthesized)
aaattctgcaccagaatctcacaaatcacaaagaacttactcatgtaacgaaacaccacctgtttcccagtaactatggaaataaaaaaaaattaataataaaaaatttaaaaaataaaa

SEQ ID NO: 884883 - DNA, 120 bp, Artificial Sequence
  ENSG00000227634_4 (sequence is synthesized)
ggtgattttgaaaggtctcagcttcttatgcataccccttggggtcaggagagctgggaccaatgagtgggaggtggattttggcggaacacaggaggaattctcttagtcagagccatc

SEQ ID NO: 884884 - DNA, 120 bp, Artificial Sequence
  ENSG00000227634_5 (sequence is synthesized)
caaaaatggaaagacctgactcagaagacagcgtgtcccctgcctgcataaggtcctggtgaggtcctgtcaagggtgctctgccctgtgctttgacaggtgtgtgcggagatgaaagat

SEQ ID NO: 884885 - DNA, 120 bp, Artificial Sequence
  ENSG00000227634_6 (sequence is synthesized)
ataccagtctggcagcatgtatgaaaagaacggtgagagaagctgttttatgcatttctaaaggaagcagagaagtaagagcttggtatttttcaaatggaactcaaaggtctttgcagc

SEQ ID NO: 884886 - DNA, 120 bp, Artificial Sequence
  ENSG00000227634_7 (sequence is synthesized)
ctgggctcggcactgggctgagagccgtcagaggagctgctgcaggggtggctgccattcctcaacccgattctatcgttattatttacattctatgtcttctctttcaagattattttt

SEQ ID NO: 884887 - DNA, 120 bp, Artificial Sequence
  ENSG00000227630_0 (sequence is synthesized)
gcatttaaagaaagtcagaggcgagggggaggctacaggaaaaagtggaacatctcctgaaaggtgacaagtcgtgatcaaaggcaagtctccaggcagagagttggcaggtttccgaag

SEQ ID NO: 884888 - DNA, 120 bp, Artificial Sequence
  ENSG00000227630_1 (sequence is synthesized)
caaaggttacttagaagtggaggctccactgccagcttccccccgctgcaaaatctgacactcctcaccctcagggttcagcaagattctcggaaaggccttttctgattctaggaggtg

SEQ ID NO: 884889 - DNA, 120 bp, Artificial Sequence
  ENSG00000227630_2 (sequence is synthesized)
ctgcagcaggagctgactcggccatttcctggcctctttagttggaagatgacagaaaggcggaagcagggactgctattgtgaggcccatggcagccttcctgtaaaacaaattggcaa

SEQ ID NO: 884890 - DNA, 120 bp, Artificial Sequence
  ENSG00000227630_3 (sequence is synthesized)
attgtcaccttcagatggaccacagctggccctctgaacagccctccttggcctttccagagtgtacatgattgtgtcccatgtccagggagaggacagagccaccaggagggtcaaggt

SEQ ID NO: 884891 - DNA, 120 bp, Artificial Sequence
  ENSG00000227630_4 (sequence is synthesized)
cgtggagggaaacatggcttgtttcccattgcaacaaggcctcccactgcaagacagagaggaagagctctgccacccatgtgtgtaaggccatgtggatacctcatgacatcctggaag

SEQ ID NO: 884892 - DNA, 120 bp, Artificial Sequence
  ENSG00000227630_5 (sequence is synthesized)
gccacagggctgtggccgccattcaacttaggttgacatggccaagaccatagagctaatgagtggcaatgttgagcctagaccctaagtctctagattcctcctgcagggcgctgggtg

SEQ ID NO: 884893 - DNA, 120 bp, Artificial Sequence
  ENSG00000227630_6 (sequence is synthesized)
ttgtgggggcgtctctgaggtgggtcagagtgaacctgcaggggccacttaaaacccttgcaggccttggctccttctccaaagaagcccaagccagaatggcagtagaagtatctcctg

SEQ ID NO: 884894 - DNA, 120 bp, Artificial Sequence
  ENSG00000227630_7 (sequence is synthesized)
tgaccgcaagccaggcactgattcttaggttgcttcctggtccttctgtatgtattgctaagagcagcagtgttctttcttgccacagagtgagtcctggtgcataaatctgtgctcatg

SEQ ID NO: 884895 - DNA, 120 bp, Artificial Sequence
  ENSG00000227630_8 (sequence is synthesized)
tcacccagtgctttcacctgcctgttcgtgataatcctgggacaagaccctcacctgcctgcacgggggcggggggggcgtgaggtctagagacccaaatgaaggcctcactgaatggac

SEQ ID NO: 884896 - DNA, 120 bp, Artificial Sequence
  ENSG00000227630_9 (sequence is synthesized)
ttccctgaggtgtcggggccactgatgtggtgccagggcctgtctattcttcctgctagccaaaggctggcttctcaagccgctggatgaatggggagcctggagatgttgaacaagtca

SEQ ID NO: 884897 - DNA, 120 bp, Artificial Sequence
  ENSG00000227630_10 (sequence is synthesized)
cgtacgtctctgattgcctcgatttccccattttggccgatggcatcgctaaagcatttgatgattccaccgtcaagtgtgagagctacaggagataaaaattttaaattactaatcacc

SEQ ID NO: 884898 - DNA, 120 bp, Artificial Sequence
  ENSG00000227630_11 (sequence is synthesized)
catggtaatgcatggtaatgcatgctgaacaaacagtgaggaggccagacgccaccgcattccaaaacaggaagcactcaggaactctaccagagcatggctgccctctccacatctgca

SEQ ID NO: 884899 - DNA, 120 bp, Artificial Sequence
  ENSG00000227630_12 (sequence is synthesized)
ctactggactgagggcttagttgatccatctcttccacagatttgcagagatatgctcaagcgtgacttaagtgacttaaggctcatgtgttgcctccctatgtcaagcttttcacccag

SEQ ID NO: 884900 - DNA, 120 bp, Artificial Sequence
  ENSG00000227630_13 (sequence is synthesized)
tgagctctttgagaacaggggctgcattttaggacatctcccccagtgtcttcgtagaaccaggcaagacacacggccttgttggaagtgccaaacatctattcttcatcagcagaatgg

SEQ ID NO: 884901 - DNA, 120 bp, Artificial Sequence
  ENSG00000227630_14 (sequence is synthesized)
atgagcccctgaaaggcatgagttgagctgcgcagtctgaactcagggaagtcctcgcagcgggctcccaattcctgcctctcaagaagcaagctgagccttaaagatggctgaaaatgt

SEQ ID NO: 884902 - DNA, 120 bp, Artificial Sequence
  ENSG00000227630_15 (sequence is synthesized)
agcgaagaaagggcctgcaagcagaccagaaaatgccccattcagtcatgctgcttagtcatggcccaaacctgcagcgtttaattctgctcactgtgactttattgcaatggcacacac

SEQ ID NO: 884903 - DNA, 120 bp, Artificial Sequence
  ENSG00000227630_16 (sequence is synthesized)
atttacatcactttatgtgcgataacagtagagaagttagttaggtttttctgttttttgtttttttaagataatgagaaaagtctgtaatattcagccaaaatgtatccttgtggctgg

SEQ ID NO: 884904 - DNA, 120 bp, Artificial Sequence
  ENSG00000227630_17 (sequence is synthesized)
tgtagatttttggcgaaatgacactgtacataatcagaagaaggcaaacatgcatattatctccatctccttataactgcacgagataacataaaactgcaggaagtatcaagcataaga

SEQ ID NO: 884905 - DNA, 120 bp, Artificial Sequence
  ENSG00000227630_18 (sequence is synthesized)
ataaaagccgtctattgaagtctacgtggcatcccctgcgtgccccaggaacacccttcggtggattaggatgagcacgctggaaaatacacaccctgccgctgcatctggctaatgcca

SEQ ID NO: 884906 - DNA, 120 bp, Artificial Sequence
  ENSG00000227630_19 (sequence is synthesized)
ggccccagcccctgttccttaagccacagatcccctgagtgtctgtgttgtgtctgctggaatttagtttaggcaggtgacgtggctccaaagaaagtcacaggctggtttctgctgcag

SEQ ID NO: 884907 - DNA, 120 bp, Artificial Sequence
  ENSG00000227630_20 (sequence is synthesized)
agatttgtgtccacttcatgcatgtttattgcccgttaactctatatgaagccacagcaaaggggaagtgatgttagagaggtcacaatctagttagtggggtcaagacaagagatggag

SEQ ID NO: 884908 - DNA, 120 bp, Artificial Sequence
  ENSG00000227630_21 (sequence is synthesized)
acagcaggtcttgacactctggaatcattctgatttgtaaatatgacaattgatgaaggggaagagtgcctagtctccaggagggatttcctgctgagacccaccaggtatacagtcggt

SEQ ID NO: 884909 - DNA, 120 bp, Artificial Sequence
  ENSG00000227630_22 (sequence is synthesized)
ccttgtctgcagtgaccccagagacatttattgcaacacctgcacatcaggttgcagcaactgtgttctgcctggcccaggacagactctgctccacctaagagtcagcctctccaaggc

SEQ ID NO: 884910 - DNA, 120 bp, Artificial Sequence
  ENSG00000227630_23 (sequence is synthesized)
agcagtggggttgggaagaggggaggagggacctccatgctgcaccagctcctacagagccagctcaagctacatttcaggacatcttggaggctacttctggacaattgtggattagct

SEQ ID NO: 884911 - DNA, 120 bp, Artificial Sequence
  ENSG00000227630_24 (sequence is synthesized)
aagtgacagtccaggaacctggatcccatcctggccagggagttgtggcttctgagataaggactttgtgcattggagataaactgaagtgtttctgcctctgctccctccaggggcggc

SEQ ID NO: 884912 - DNA, 120 bp, Artificial Sequence
  ENSG00000227630_25 (sequence is synthesized)
ttatggcacaggctcaccaaattgcaggccccagagcacctgcaacctcagggagctcaggggcttcccagcatgggcaggggaagccacagattcacttctcctacagatgcacagacc

SEQ ID NO: 884913 - DNA, 120 bp, Artificial Sequence
  ENSG00000227630_26 (sequence is synthesized)
ctggggtggatggtctaaagctcaggatcttataatgcagagaagatggaatagagcaggaaccaggcccctgtctggaggaaggaaccaataacaacaacaacaaaactactgacaatg

SEQ ID NO: 884914 - DNA, 120 bp, Artificial Sequence
  ENSG00000227630_27 (sequence is synthesized)
tgcgcgctttacaattttcaaagcgctctcatctcagtcaaggaaggatgcattctttccacaggctgacgttcaaaacccaaccaccagaaacatgaagataaaacaaaaggaaccacc

SEQ ID NO: 884915 - DNA, 120 bp, Artificial Sequence
  ENSG00000227630_28 (sequence is synthesized)
agaaacaaacaagacacctgtccatcctccaggtttgcaaatcagatcaagttctgacaactggtaaagaggaagatgagaagatcctgccagataaattctctggtaccttcattgatc

SEQ ID NO: 884916 - DNA, 120 bp, Artificial Sequence
  ENSG00000227630_29 (sequence is synthesized)
tcattctttcaccatcaaaggggaatgcagtagtgccagcaggagcagaaaaaaaaaaaaaaaaccctaaaaagaacaagagagactagtcaaagctagtacagtgtttccctggtactg

SEQ ID NO: 884917 - DNA, 120 bp, Artificial Sequence
  ENSG00000227630_30 (sequence is synthesized)
agtcatacttttacaatgacccaggcccacggcctcaactgatgacaaataatgagaatccaacaatcattctttctcgcatattcacttgtgaataaatgcaagaactggtgtatttgt

SEQ ID NO: 884918 - DNA, 120 bp, Artificial Sequence
  ENSG00000227630_31 (sequence is synthesized)
ccccgggagcactcgatggatggtattgactggctgactcaggccccgtctgcccacatgagccattttgagcagctttaactaaaatgcggacagaatcagtgagagccaaataagcag

SEQ ID NO: 884919 - DNA, 120 bp, Artificial Sequence
  ENSG00000227630_32 (sequence is synthesized)
tcgattctcttccctcccaccctattccgaatgcctcctggaaactgctggtcctcctcgcccacggttctctccttcactaggggcccagagtctgcaaagcgcccatctcctctccag

SEQ ID NO: 884920 - DNA, 120 bp, Artificial Sequence
  ENSG00000227630_33 (sequence is synthesized)
tgccgtttgcatcctcagagcagcgccgcaccttgaacttgttagaggcatcctgattcacccaaggcagtctcagatttggaactgtcatttttctattcctgccatcttcacccgaca

SEQ ID NO: 884921 - DNA, 120 bp, Artificial Sequence
  ENSG00000227630_34 (sequence is synthesized)
aatagtactgaacacctgctctgtgccaggtagaaagtataaatgcaacctctgttgtcctgagaaacaataggagagaaaggtgattcttgaaacttaaaacaaacaaacaaaaggaat

SEQ ID NO: 884922 - DNA, 120 bp, Artificial Sequence
  ENSG00000227630_35 (sequence is synthesized)
ctgtggttactcaagaatttacttacttagtctacacactaaacaaattatagcctttattggtaaaattaattggacacaaaacaggtcagggcatgttcactagttggatcttccaaa

SEQ ID NO: 884923 - DNA, 120 bp, Artificial Sequence
  ENSG00000227630_36 (sequence is synthesized)
ttcggaaaccctactttttaggaatctatatttcaaaggaaagagaaaatgaaatgcacatacacaaatttgcttgtaaatacgtcaagcatctctggtacaaattaatgatatcagttg

SEQ ID NO: 884924 - DNA, 120 bp, Artificial Sequence
  ENSG00000227630_37 (sequence is synthesized)
ggtgaacccagcgagcaggagccagtacgtggctgtggcccaagcctctgcctgctgctggagcatggccaggccgtcgtcgtagggttgcaggctgttcgggggtcctgggtcccacgg

SEQ ID NO: 884925 - DNA, 120 bp, Artificial Sequence
  ENSG00000227630_38 (sequence is synthesized)
agccctgggacctgagggacagggatgttcccttttcccccttggaggtgtagccagtagtttggctttacagggggactctgtgaagagtccagttccctatttttaatcaggttcatt

SEQ ID NO: 884926 - DNA, 120 bp, Artificial Sequence
  ENSG00000227630_39 (sequence is synthesized)
ggaaacatgggcttgtcaggcagactgaagaggaggatcctaggagacttttctttcctgagaaacccaaagaaagcaacagcagatccgtagggtgtgggggaagggggcaggggaagt

SEQ ID NO: 884927 - DNA, 120 bp, Artificial Sequence
  ENSG00000227630_40 (sequence is synthesized)
gtattttcagtaacagagacctaaagcagaaactatttgcaaacaggtgacctgctcaatttctcctgtgatctttcatttctaatgctggtttttccccctcattaaaaaactcaattt

SEQ ID NO: 884928 - DNA, 120 bp, Artificial Sequence
  ENSG00000280916_0 (sequence is synthesized)
cggggagacaccgggagaccaggcgccccgacccatcggctggtcttgaggagaagcaggaccgccccagactgtcgccgcggccggcagggccgggcgctccgcggggaatctgggccg

SEQ ID NO: 884929 - DNA, 120 bp, Artificial Sequence
  ENSG00000280916_1 (sequence is synthesized)
cggtgccctgtgccccactccggcaggactgggcttccccggctcttcgagggaagaccgcacagagaagaccctgggcacccctgtggcgggccggaccccgggaaagtagggcccctg

SEQ ID NO: 884930 - DNA, 120 bp, Artificial Sequence
  ENSG00000280916_2 (sequence is synthesized)
ctgccccgcgcacttggtggccaaacacctccggagcctgaggtcttgggcctcctctggctctgcgtccggggttctcttctctcccccaagggttggcctttgggtcaatcgtccaga

SEQ ID NO: 884931 - DNA, 120 bp, Artificial Sequence
  ENSG00000280916_3 (sequence is synthesized)
cccaagccaagcttgtgttgggcaagggaggaattcctggaaaaggaaaaagcccctgccaccctccgcccttcattcatcttccctgccacccactctctccttttccctgctcctacc

SEQ ID NO: 884932 - DNA, 120 bp, Artificial Sequence
  ENSG00000280916_4 (sequence is synthesized)
ccaaccctgaccctcaaggcctacctggccaaagacaacagctgcgttagtcgctaggccttggtgggactgaaggcggaggagcctgggcatctgctgggggaaggccgcactagactg

SEQ ID NO: 884933 - DNA, 120 bp, Artificial Sequence
  ENSG00000280916_5 (sequence is synthesized)
caagtcctgggtagaagccctccccatcttgggccagctctcttctgagagcctcagtttccctctctatgatgccaagggcttgactttggtgacttctggacagccccggcatggtgt

SEQ ID NO: 884934 - DNA, 120 bp, Artificial Sequence
  ENSG00000280916_6 (sequence is synthesized)
cctggagaaatttttctactaaggacggggctgaattggagggactgtgctgacaaatcctctacttgaaaatcccccagctaaggagtatctgcccaaggtcgcggccacccagatgtt

SEQ ID NO: 884935 - DNA, 120 bp, Artificial Sequence
  ENSG00000280916_7 (sequence is synthesized)
cggtccccactccttcctccgctgaaaagtcgcaccgatgactaacgttgcctgccggcctggtggtttgaaaacgaatgccgggcattgatgcaaggatatcctcccctacccctggga

SEQ ID NO: 884936 - DNA, 120 bp, Artificial Sequence
  ENSG00000280916_8 (sequence is synthesized)
tggagaactaagacaattatctaagtaatctaaaaagctcaaagacatccccaagcggaccttgctccagtggtctgtgatggcagcctagtggacagttttctagtggccctctggggt

SEQ ID NO: 884937 - DNA, 120 bp, Artificial Sequence
  ENSG00000280916_9 (sequence is synthesized)
taattgccttaatcttccactctgtctgccccagcaaagggaaagatgctaaagcagctgtggacttgcagcctccctcctgtgtgtgcagagcccccaggaatcactgccccagtgcag

SEQ ID NO: 884938 - DNA, 120 bp, Artificial Sequence
  ENSG00000280916_10 (sequence is synthesized)
caggagaagcgccttccctcatgccctaagcctgccttttctgttgtcccccagctcctgggccaggtggagccccccctgaagctggtttctacctgccctcgcctccccactgcagcc

SEQ ID NO: 884939 - DNA, 120 bp, Artificial Sequence
  ENSG00000280916_11 (sequence is synthesized)
cacagttcggctttcagggctgaacccagagcccagaggatggagaagccagaaagcggggaggtaagggagagggcgtctaggcacaccacagaggtgattgggctgtgacggggacaa

SEQ ID NO: 884940 - DNA, 120 bp, Artificial Sequence
  ENSG00000280916_12 (sequence is synthesized)
tccgcacaacacgagctaagctcacacccctagggagtgatttttccggactgcccccatcccaatctccacctcctctgctttacttgaaaaagaaaaagaaaaaagagagctccttct

SEQ ID NO: 884941 - DNA, 120 bp, Artificial Sequence
  ENSG00000280916_13 (sequence is synthesized)
ggctcctggtgacccatatttaggacaccatcccatcccccagcacacacattcctacagtgtcacctggtccccaatccgagcatttcctggagtgctcgccacattccccttcctggt

SEQ ID NO: 884942 - DNA, 120 bp, Artificial Sequence
  ENSG00000280916_14 (sequence is synthesized)
gcttttctatggtggggccaggggaggccttgttttgaacatcgctgtgacgtcactccccctcctccgagctaagcacccctcggtgggccctgggaattgttgcccggcctgctgggg

SEQ ID NO: 884943 - DNA, 120 bp, Artificial Sequence
  ENSG00000280916_15 (sequence is synthesized)
aggggcggagtgtgggcccagggagggttccaccaaacatccattaccgctgtcgcctgcggggccttcaggctgcaagtacgtgaggtgtcagaaaagaagccgaagggttcccgtggg

SEQ ID NO: 884944 - DNA, 120 bp, Artificial Sequence
  ENSG00000280916_16 (sequence is synthesized)
ggctcttctgccaaatgagtcaagagatgtgcggaagcggatgattgaagtaccccgtggagtagcagaaaggggcatcaaaaactgtaacctgaaaataaaagctttaacctgttcccc

SEQ ID NO: 884945 - DNA, 120 bp, Artificial Sequence
  ENSG00000280916_17 (sequence is synthesized)
tttccgatcatctatccctttacgaattttatttttattccggattgttaatgcaagacgacagtttgaatctccatttacctctgcctgaacacaagaagccctgagtcttttgaagcc

SEQ ID NO: 884946 - DNA, 120 bp, Artificial Sequence
  ENSG00000280916_18 (sequence is synthesized)
gggggctttcctgccaaggggcgataggtgggccatcccgaggcgggaacgatcagaaatttttctactaaggacggggctgaattggagggactgtgctgacaaatcctctacttgaaa

SEQ ID NO: 884947 - DNA, 120 bp, Artificial Sequence
  ENSG00000260468_0 (sequence is synthesized)
gccaaactgctggaattgcaggtgtgagccactcactgtgtccggcataaagtagaacattcttacaagaaataaatatttcgtagtcatggagaagaacgctcctaaaatgatgaacgc

SEQ ID NO: 884948 - DNA, 120 bp, Artificial Sequence
  ENSG00000260468_1 (sequence is synthesized)
acgacggaaaagagtagggaacattttgcttgatgagaaaatccgccagcaaggatgttgggctctaagcagaactgaagctctggaattaagaacacagccaaggaagagctctggact

SEQ ID NO: 884949 - DNA, 120 bp, Artificial Sequence
  ENSG00000260468_2 (sequence is synthesized)
acttgtaaggcaattccaggtaagattggtgaatcaagttaagaatcaaaagcaactgagatcaacgtggaggcctggaaggtaagggccatattttacctagatactagcttagagact

SEQ ID NO: 884950 - DNA, 120 bp, Artificial Sequence
  ENSG00000260468_3 (sequence is synthesized)
tgctacattggcactgtattttaagtatgttatttagtagtattgtgaaatcaactggtttcaacattgaaaaggataaaaatagcttatgaaaacaaaacggttttttttttttttaaa

SEQ ID NO: 884951 - DNA, 120 bp, Artificial Sequence
  ENSG00000260469_0 (sequence is synthesized)
aaaaatctttctcaagcctctccaggctcggggtcgggaatgagcgagggtccggcagatttggggctccgaggccacagatggggcccatgagtgaggaggacaagagagaaaggagaa

SEQ ID NO: 884952 - DNA, 120 bp, Artificial Sequence
  ENSG00000260469_1 (sequence is synthesized)
gtttgggtgtaaatcccagagattgttcatcatgtgagaggagccgtgcatgcatttcatgccatactcacaccatggatggagaaaaaaaatcaagcttcactttctgagaatggccct

SEQ ID NO: 884953 - DNA, 120 bp, Artificial Sequence
  ENSG00000260469_2 (sequence is synthesized)
gggggcactgcatctagtgcctgtgcatctgcagacctgccggatgcctccaggggaatcatgccaccccaagcaagaaagggcccagttgccaggagcctggaggcagagagctgagga

SEQ ID NO: 884954 - DNA, 120 bp, Artificial Sequence
  ENSG00000260469_3 (sequence is synthesized)
gccagcccctgacatcagaatggagctcaaaggttggctgggtgtgactctgccgtggacagcttctcttgggaaatctactttaatgaatccaggggaccaatttgtaatcagcccatc

SEQ ID NO: 884955 - DNA, 120 bp, Artificial Sequence
  ENSG00000260469_4 (sequence is synthesized)
agatgttcagcgacacttagctggaatctcgttgctggactctgtgccccgcagtggatgacagttctccatcagggtctgcagtcctctaccctggacttgctgcatcctggagccccc

SEQ ID NO: 884956 - DNA, 120 bp, Artificial Sequence
  ENSG00000260469_5 (sequence is synthesized)
actgcctgcatcccattggcctgagctgctgtctgccagggctgctggtaaccaggcccacagggttggatattcccccaacagggcagctcccagtccaagcccaactgttaccagccc

SEQ ID NO: 884957 - DNA, 120 bp, Artificial Sequence
  ENSG00000260469_6 (sequence is synthesized)
agaaagatgtttcaggatacccctttcctccccacttccctgccctctgcagctccagctggtgcaccccatctttctctccccctccctgctaggctgggccctaacaggagacctttg

SEQ ID NO: 884958 - DNA, 120 bp, Artificial Sequence
  ENSG00000260469_7 (sequence is synthesized)
aggtggttgggcttgttctgcaaccttgagtacccttgagctactgcctcactcctcagttttcttcttcttaaggtttctaattggactttgccagtgtatttatttcaaaactggtca

SEQ ID NO: 884959 - DNA, 120 bp, Artificial Sequence
  ENSG00000260469_8 (sequence is synthesized)
tcttactgacctcgctcatagtctcttattacttttctagttgattctcttgagttttctggataaacaataatatcatgtacaaataatgatgacaatttctcctcctttccaaatgtt

SEQ ID NO: 884960 - DNA, 120 bp, Artificial Sequence
  ENSG00000260469_9 (sequence is synthesized)
gtgtttccttttgtgtattaatgtactcttgccttggctaaaacttccaaaacaatgtaaaataattgtgttaatagcaggctttctcattctaccctgactaaaatatgaatgaccctg

SEQ ID NO: 884961 - DNA, 120 bp, Artificial Sequence
  ENSG00000260469_10 (sequence is synthesized)
aggttgggggctggggacatgccaggccaggacctgcaacagaaaccgccgccccacctttcctttctgtgccccaccccatcctgcctaaaaagttgctttccatgagggcttggtgct

SEQ ID NO: 884962 - DNA, 120 bp, Artificial Sequence
  ENSG00000260469_11 (sequence is synthesized)
gagtgtggcccccacagggatgtctgtgtggtcacagagtacctgtgggagggcaattctgaccccaaggtaggaagcagtgatccggtaattccaggcaccaaggcagataaaaagacc

SEQ ID NO: 884963 - DNA, 120 bp, Artificial Sequence
  ENSG00000260469_12 (sequence is synthesized)
aagccacagcctcctcaagaagtttgaagtctgcattgaactcattaatttccagcttttggccgggcgtggtggctcatgactataattccagcactttaggaggccaagatggggccc

SEQ ID NO: 884964 - DNA, 120 bp, Artificial Sequence
  ENSG00000254349_0 (sequence is synthesized)
ccgtgggcgtaggaccctccgagccagttcccgagagatcccatgatccagagacaaaggtggcagctttggagcaagtggagagccagaaaaggatccagaactggagtggaagctgaa

SEQ ID NO: 884965 - DNA, 120 bp, Artificial Sequence
  ENSG00000254349_1 (sequence is synthesized)
tggagtggaagctgaagctatgccatcttttatgtctgatgaggcagtttcatctgatttgaagatgatgaagaaaagttctttgcaaggttgcttattgaatattactgggaaaacagg

SEQ ID NO: 884966 - DNA, 120 bp, Artificial Sequence
  ENSG00000254349_2 (sequence is synthesized)
aaaattaggaggaatgttctggagtgatttatctttttcatcaggggcccgcgttcagtccagccaccagatcaacacattctccaaactcattaactttggagaggctacccagagttc

SEQ ID NO: 884967 - DNA, 120 bp, Artificial Sequence
  ENSG00000254349_3 (sequence is synthesized)
ctgaagagttcatctgaaagtcacacagcaagaacacagcagaacaaagattagatcccagcttggtcttcttcaatggtcatgcttttccagataccttaaagaaaaccaaatggacag

SEQ ID NO: 884968 - DNA, 120 bp, Artificial Sequence
  ENSG00000254349_4 (sequence is synthesized)
tgattctacactgacagataagcatgcttataattgcttgtttgatatctgttttttccctggtagtttgtaagatgtgaaagaaaaaatatgtgttgccttttctgacagccactcccc

SEQ ID NO: 884969 - DNA, 120 bp, Artificial Sequence
  ENSG00000254349_5 (sequence is synthesized)
caaccccagcacctagtatatattattttctattagctgttaaataaatacttaccatatgaacaagtgaacctgaataaagcagtactcattggtcctggagtggatgaaatagactag

SEQ ID NO: 884970 - DNA, 120 bp, Artificial Sequence
  ENSG00000254349_6 (sequence is synthesized)
ggactggccagctagaaggatcagggactcccaaatatgtagcatttttagttggtactgaatgtgtgaatgagatgggtagctatggcatccaggctaggtgaagtcagttataggcat

SEQ ID NO: 884971 - DNA, 120 bp, Artificial Sequence
  ENSG00000254349_7 (sequence is synthesized)
ggatgtggaggactctgtgggagggaaagagtgagtggttcagggcactggaggtcatgcagagatttgatgctatgaaaagcaagttgcacctgtgagagtgtcattaggttaataaca

SEQ ID NO: 884972 - DNA, 120 bp, Artificial Sequence
  ENSG00000254349_8 (sequence is synthesized)
ctgccaaaaatagttagctttattatgagctcttgtactggcttcagacagagcctttgggcatcatgggagttactgctgcttcccttgggaactactgtcactgccatgggcatctgc

SEQ ID NO: 884973 - DNA, 120 bp, Artificial Sequence
  ENSG00000254349_9 (sequence is synthesized)
atctgagaagcattccttctctgtgacaattatcatagtaacttttgcccagcaagttggcttttctggatgtgttaatgatggtaataatgataattgctaagattatgaatgtcttgc

SEQ ID NO: 884974 - DNA, 120 bp, Artificial Sequence
  ENSG00000254349_10 (sequence is synthesized)
atgaattatttcatttaatcctcacaataaccgaatgaggcagaaacaattttgtgtcttttttacaaatggggaactgagatttggggaagttaaatcatttgccaaagtcatttgttc

SEQ ID NO: 884975 - DNA, 120 bp, Artificial Sequence
  ENSG00000254349_11 (sequence is synthesized)
aatgatgagtagtctcaaaattttaacccaaatctaatcaacatattgtaagattgttacagtaagaatgttattagaacatcctgagaaagagctgatatacatattaaagagtccttc

SEQ ID NO: 884976 - DNA, 120 bp, Artificial Sequence
  ENSG00000254349_12 (sequence is synthesized)
attttcgtgatgcctactccttgcttgggtgcaaggttatttctgcttgttgattctgtccctttgaaaatcagattttaacctctagcctgctagttcctttgtggggaaaaatgatta

SEQ ID NO: 884977 - DNA, 120 bp, Artificial Sequence
  ENSG00000254349_13 (sequence is synthesized)
ttgctgttttccaaaataccaaaaaatgtcagcccaaccgcctgagtttaatcagatgtttaatctgatatagcatctgcataatgacaccacaaagaataaacaagaagatcgggactg

SEQ ID NO: 884978 - DNA, 120 bp, Artificial Sequence
  ENSG00000254349_14 (sequence is synthesized)
tgtcataaatattgattcttctatagtcagggcctgctgactttcatataaaactttttatttaattaaatctattgcaaacaatgcagcaaaaccttattctagttttatctttcagaa

SEQ ID NO: 884979 - DNA, 120 bp, Artificial Sequence
  ENSG00000254349_15 (sequence is synthesized)
tgttgaaatagtcacagcccatggaatcaatgttttgggtaagattttttttaatggaattctgtctctattgctttaatttctttaatctttcactgcatgaaaaatactctaatatct

SEQ ID NO: 884980 - DNA, 120 bp, Artificial Sequence
  ENSG00000254349_16 (sequence is synthesized)
taaaatttcatgtatttccagcctaaaaataacatctattatagattttcctcattttattgtgtaaatgtagataagcataaagaagaaaataaaaattgtccagaaagaaccacaatt

SEQ ID NO: 884981 - DNA, 120 bp, Artificial Sequence
  ENSG00000254349_17 (sequence is synthesized)
accttaacggttttgaagagaattggtcaggtgctttgtggaatgcctttctttggaatttatctgtgttttttcctcaagatagaactggagttaatgtgttttggggagaaacactat

SEQ ID NO: 884982 - DNA, 120 bp, Artificial Sequence
  ENSG00000254349_18 (sequence is synthesized)
ttctccagagggacagaactaataggatacatatatacatgaaaggagcttattaaagagaattgattcacgtgatcacaaggtgaagtacacaataggccgcctgcaagctggggaaga

SEQ ID NO: 884983 - DNA, 120 bp, Artificial Sequence
  ENSG00000254349_19 (sequence is synthesized)
aggtgaagtacacaataggccgcctgcaagctggggaagaaagaagccagtggtggatcagtctgagtccaaaagcctcaaaagtagggaagacaacagtgcagccttcagtctgtggcc

SEQ ID NO: 884984 - DNA, 120 bp, Artificial Sequence
  ENSG00000254349_20 (sequence is synthesized)
ataccagagaaagaatggacaatttttgtgagaaacaagcaattctctgatgtttgagataatattaaataaatcaaccggagatgatgatggattaactaattaagggatccacgtagt

SEQ ID NO: 884985 - DNA, 120 bp, Artificial Sequence
  ENSG00000254349_21 (sequence is synthesized)
ctttacaaaggcacccaggaggtgcttataatatccttgaggatggatgtctttatgatgcaaacagtgaaaagaactctccttggaagaagacaagatgaaagaactttgtctaagttc

SEQ ID NO: 884986 - DNA, 120 bp, Artificial Sequence
  ENSG00000254349_22 (sequence is synthesized)
caaatggaaatggaactcccccattaaaagttaaaaaaagtaaagaggaagacctagaggaagttcttcaatagagagtcttcggctttctctatctgtgagccattttgctccagggaa

SEQ ID NO: 884987 - DNA, 120 bp, Artificial Sequence
  ENSG00000254349_23 (sequence is synthesized)
tatgtttcctcataaattttatgaagagaccccgtgatctggcatcttgagttggcatataattgaacccactcacaggatcttaatatcctctgccaaaggagtcatcatctgaatggg

SEQ ID NO: 884988 - DNA, 120 bp, Artificial Sequence
  ENSG00000254349_24 (sequence is synthesized)
aaaacctttgcaaaattttcccttcatcttacaagaatgactaattttagttgtatcacaaggaagcattttgttccaaacacagttcctagaaatagcggggcattccagtccaacaga

SEQ ID NO: 884989 - DNA, 120 bp, Artificial Sequence
  ENSG00000254349_25 (sequence is synthesized)
tgcaaaccttcctcatgagaaccaaaccagcatgcttgggcaacttgtcaatgaagccaaattccctgctttcaagaagattggaagaagatggggcttctaaaagaagagatagttccc

SEQ ID NO: 884990 - DNA, 120 bp, Artificial Sequence
  ENSG00000254349_26 (sequence is synthesized)
acaactctgtgtgggttatctggattgtagaatattgacagcaaaatttaaatcccaggaggtctcttcctcatctctcttggaccccctcctttgttactcttctcactcgttaaatga

SEQ ID NO: 884991 - DNA, 120 bp, Artificial Sequence
  ENSG00000254349_27 (sequence is synthesized)
aagcatatttcatcatgaagctaaacaaaacttagttgaacatttaaatttattatataattgtgacaaagtaaaatataatgtataaattacacagttatgtatatgcaatgtgttagt

SEQ ID NO: 884992 - DNA, 120 bp, Artificial Sequence
  ENSG00000254349_28 (sequence is synthesized)
attttaaaatctaaatttaaattttaaaagtgcatggcatattgggaacttcactgaactgtaagatagaaaatgagtcccgcttatggcttttctagtaactaatttagattagtagct

SEQ ID NO: 884993 - DNA, 120 bp, Artificial Sequence
  ENSG00000254349_29 (sequence is synthesized)
tcatctttgtatttagtcatccgtataatgatagaatggacctaattaatctgtaacttatttgtagacctaaaattctttgattctgaatataacatgttcctctgccttgtatcagaa

SEQ ID NO: 884994 - DNA, 120 bp, Artificial Sequence
  ENSG00000254349_30 (sequence is synthesized)
ataatcatcaatatcagatggtgtttgctaagtgttgagtgagctaattagacaagggaaaagaggtcagttccagacagcatggcaagatagtttcagggaactactgggacttgagaa

SEQ ID NO: 884995 - DNA, 120 bp, Artificial Sequence
  ENSG00000254349_31 (sequence is synthesized)
gtgaacaggaatgtagtaagtgaattgcagagcactcaaggcattaggatgtggcataagttaatgtatggaggaagtaaactccagatgtgttgagcatcaggaagtagattaactggc

SEQ ID NO: 884996 - DNA, 120 bp, Artificial Sequence
  ENSG00000254349_32 (sequence is synthesized)
atcatggagaattaagacaggctagcatgaagttagagaccaaattatggagagtattcagtgcctggatattcagaatttatgctaacaaatagacaacatcagacctttttttttgat

SEQ ID NO: 884997 - DNA, 120 bp, Artificial Sequence
  ENSG00000254349_33 (sequence is synthesized)
tgggggaggagttgggtaaatgggggaattacatgggcataagtttttgaaaaagaggaaaatgttactccttttcattatctatctgtttcagaattttttttcaaaagcatggacagc

SEQ ID NO: 884998 - DNA, 120 bp, Artificial Sequence
  ENSG00000254349_34 (sequence is synthesized)
agttgatttcttcattggggcaatatcttggaatctcttagatttctatattagctcaaattttcttattttattgcttaacccaatttatctgattaattagaagttcattagggaatt

SEQ ID NO: 884999 - DNA, 120 bp, Artificial Sequence
  ENSG00000254349_35 (sequence is synthesized)
ttttgtgtgtgtcacacattacttagcagttattaatttattcctcaagtatttcatgtgtgctgtgcttatggggttgggctgagttctggcaataagacagacacattcttcactttc

SEQ ID NO: 885000 - DNA, 120 bp, Artificial Sequence
  ENSG00000254349_36 (sequence is synthesized)
tgaagcttctagtctgtccatttacttttttgagtgagtgatatttcagaacttgtatttttgtatggattttgcatattttattggcagtggtaaataatgataatttttaaaattggc

SEQ ID NO: 885001 - DNA, 120 bp, Artificial Sequence
  ENSG00000254349_37 (sequence is synthesized)
agtggtaaataatgataatttttaaaatttctgcaatatgcatctagtttaacagttatcagaaattcttgtttcctctgaggaatagtttgcagccaccccattccatatcatttgtgt

SEQ ID NO: 885002 - DNA, 120 bp, Artificial Sequence
  ENSG00000254349_38 (sequence is synthesized)
taccaaatcctctatgttcataatgataaattccaagtatgcccatctaagtagcgatttttaaacttaaaccatttgatttgcattattcttcctggaataagcagatttgaactttag

SEQ ID NO: 885003 - DNA, 120 bp, Artificial Sequence
  ENSG00000254349_39 (sequence is synthesized)
aaaatcctctggttcctttgggggaaagaaggagtaagcaggcataacagaggaaataaaataatcagtgggtcagggatgttcagtggagaaagtgaaaatggatccaccaattttgat

SEQ ID NO: 885004 - DNA, 120 bp, Artificial Sequence
  ENSG00000254349_40 (sequence is synthesized)
tatattttcaagactcataatttaccctcaggaaagttaaaaatgctttattagtccttttgtgatctcatttctcttgcaaatttcattttcaactaatttcccttgtataaaatgtga

SEQ ID NO: 885005 - DNA, 120 bp, Artificial Sequence
  ENSG00000254349_41 (sequence is synthesized)
ggcaacttggggattttgcaatgtgatgtgattgtgcttagggatggtctgggtaccacgtttttaagtagaccgtaagagaagggtgacacttgtcttaatttagagatttttaacatt

SEQ ID NO: 885006 - DNA, 120 bp, Artificial Sequence
  ENSG00000254349_42 (sequence is synthesized)
ttaaggtacttaaaaaccattataaaatttagtatggcgtttatagcagagtaatgtggtggaaactttttgcactgagagtccctgaactatataagtattcacaattccaggcctaga

SEQ ID NO: 885007 - DNA, 120 bp, Artificial Sequence
  ENSG00000254349_43 (sequence is synthesized)
agtcgttatgaaatgaagttttacatagtggagactatcctgggttttaaaggatactttggaatctatctacttatggggttcatacaaagtcctgggagatgatccagcatatctgta

SEQ ID NO: 885008 - DNA, 120 bp, Artificial Sequence
  ENSG00000254349_44 (sequence is synthesized)
atcagtgcttttaaccagatttcatttacttaggagatttgtttactttatctgattatgagggaactgtatgagtcacaattcaaattaccaataatatcagacagttagattgagcat

SEQ ID NO: 885009 - DNA, 120 bp, Artificial Sequence
  ENSG00000254349_45 (sequence is synthesized)
agctgggtcaagttattgttagtgctgggtgactctctgatgtgagcaaactgtgccccacgttttgactcaacctgctccgtacctctatgctgtcatggactgccatcatggacaaca

SEQ ID NO: 885010 - DNA, 120 bp, Artificial Sequence
  ENSG00000254349_46 (sequence is synthesized)
ctatgccttgacagggctcagtagtggtccctacttttgacatttttctcctttctcttcttcaatacaagtctatcacttttgtgaactatgcattgttcattatccaagtccactgga

SEQ ID NO: 885011 - DNA, 120 bp, Artificial Sequence
  ENSG00000254349_47 (sequence is synthesized)
aaactgaaacatgaacacaaactttgcctcctctggaagctttccctggcccactagctaggtcatattctagctgtcacacattctcctggctctctgtgcatctgcactgcccttttc

SEQ ID NO: 885012 - DNA, 120 bp, Artificial Sequence
  ENSG00000254349_48 (sequence is synthesized)
ccaggtataattagatattcatgtaagtacttctttaatgtacattttcccactgtactgtatgctctaagaatgaagggacactatattgtttactgttctatacccattccctaactc

SEQ ID NO: 885013 - DNA, 120 bp, Artificial Sequence
  ENSG00000254349_49 (sequence is synthesized)
aatgccttgtgtatgtaggaggatcttaatcattttactgaatgaatgaatagaatttcagctagattttatataatagtaggcactccatacatgttgagttgaatactgcctcaattc

SEQ ID NO: 885014 - DNA, 120 bp, Artificial Sequence
  ENSG00000254349_50 (sequence is synthesized)
catgtataagaccttttctcaaatgggattttgtggaacagtggttggaatttcagtcacagtgacagttccatgggagatataatgcctgctcggcatttgattagagctgttcctagt

SEQ ID NO: 885015 - DNA, 120 bp, Artificial Sequence
  ENSG00000260464_0 (sequence is synthesized)
cctgcaactctggggtcccggccgggctggagcggccgccggagagacctggtaggcggggcgcttggggcaggaagggagccggggagggaaaagcgcgactgtgattcgtacggctgg

SEQ ID NO: 885016 - DNA, 120 bp, Artificial Sequence
  ENSG00000260464_1 (sequence is synthesized)
gcccggaccgtgaaggggaccgggttgcggctgccctcacaccgaccaggtgggaccgtcggactgcggccgcccttggctcaactgggtcgccgaccttgttgaggggcgaccactgcg

SEQ ID NO: 885017 - DNA, 120 bp, Artificial Sequence
  ENSG00000260464_2 (sequence is synthesized)
gggagaccgagagcctgcggctggcgtttgaggcggatggcagtgccctgagcgcggcggctgggtctcggtgacactgacgacgggaggcgcggtcggaagagcgcggggccgtcgcct

SEQ ID NO: 885018 - DNA, 120 bp, Artificial Sequence
  ENSG00000260464_3 (sequence is synthesized)
ctggcttaacatagcagatgcgctgagactccaacaggtggctccgtggcgcaatggatagcgcattggacttctagaggctgaaggcattcaaaggttccgggttcgagtcccggcgga

SEQ ID NO: 885019 - DNA, 120 bp, Artificial Sequence
  ENSG00000260464_4 (sequence is synthesized)
gtcgtaacgcttttttccctcccccctacaatttattttctgcctccatcatgtctcttattttttttttttgctaaacggtttaacttctctctcattccctgctctcgcagttcactg

SEQ ID NO: 885020 - DNA, 120 bp, Artificial Sequence
  ENSG00000260464_5 (sequence is synthesized)
cattcggttcttgcggtcctttcttaagcggctcgcagggtcccgagcccctcagctccccgggcctcggtggcccagggcccagctcagccgactgggcagtcgatgtaggtcctgaga

SEQ ID NO: 885021 - DNA, 120 bp, Artificial Sequence
  ENSG00000260464_6 (sequence is synthesized)
agagcggcggcggcggcggcggcggcggcgaaggaaaagcgacactgaagcgaaggctcgcggtttcggcctaaaggaaagtgcaggggaggcccgggtctcgggtgacacccccacgcc

SEQ ID NO: 885022 - DNA, 120 bp, Artificial Sequence
  ENSG00000260464_7 (sequence is synthesized)
ggcttccagatgagcagacacccgaatcccagcgggagcccgtcaaaaatggagatttctgccgtcactctgggactcttaattcggtccgtctggggtggggcccaggaatctgcattt

SEQ ID NO: 885023 - DNA, 120 bp, Artificial Sequence
  ENSG00000260464_8 (sequence is synthesized)
ctgataaggtcacccgctcccctcccccattattccagtgcaaagaggtcctaggcccagtgcccatcagctcctcaagacaggaattactatatctttttctgacaactgttaactttg

SEQ ID NO: 885024 - DNA, 120 bp, Artificial Sequence
  ENSG00000260464_9 (sequence is synthesized)
tacaaggttagcaaataaatccaggaatgaatggaatcttaaaactcgtaaaacaacaatgaaaggtaattcacacaaaagatacaaaatccaaaattgtcaaaaaagatacagggaaaa

SEQ ID NO: 885025 - DNA, 120 bp, Artificial Sequence
  ENSG00000260464_10 (sequence is synthesized)
gtaaacatccatgttattcctatagtccagccttgcaattctctccacaagccattagtggtaatggtttcttggaaatattttcagatttattttatgcccatatcagcatttttaaca

SEQ ID NO: 885026 - DNA, 120 bp, Artificial Sequence
  ENSG00000260464_11 (sequence is synthesized)
tcttttgtcataaatatgtcgtaaataacaatgttattgatacatatccttttaaaaacacaatggtagtatgctatactggcttgttttacttatgaatatatgtagagctgcctcgtt

SEQ ID NO: 885027 - DNA, 120 bp, Artificial Sequence
  ENSG00000260464_12 (sequence is synthesized)
ccattgtacgtatgtatggtaatgatttaacagtccctaatagctggacatttagattgccagtattttcctattacaaacaatgcatcagtgaacatccttgttcttttattattgtac

SEQ ID NO: 885028 - DNA, 120 bp, Artificial Sequence
  ENSG00000260464_13 (sequence is synthesized)
acaagtacaggtacatctatctgtaggatagattcctagaaagttgaattgctggttcaaaggtttgtgcgttcttaatctgtacattttttaatatatattggcaaattgccccataga

SEQ ID NO: 885029 - DNA, 120 bp, Artificial Sequence
  ENSG00000260465_0 (sequence is synthesized)
aagcagtctggattcgtgtttattgaagccagtaattagagacatctttttttcccaggactagaaagcaaggttccacatgactgcatactgcacccggacagagccacacccctggac

SEQ ID NO: 885030 - DNA, 120 bp, Artificial Sequence
  ENSG00000260465_1 (sequence is synthesized)
taaggctggtgggggataatctgcagtcttacttttaagttagaaacaccaataaatttagtatacagacgacagtgaactttcacttacagcattaacattgttaaggtcatgatgtac

SEQ ID NO: 885031 - DNA, 120 bp, Artificial Sequence
  ENSG00000260465_2 (sequence is synthesized)
agagcagtcactttcaactttgttaaattaataaaacatgacaatgtcttcagtttaaataccgattttaaaatgccaatcaaaaaaaagtgcaaacaaaataacaatctagcagcatta

SEQ ID NO: 885032 - DNA, 120 bp, Artificial Sequence
  ENSG00000260465_3 (sequence is synthesized)
tctgttgcatttttaggaaagaccaattcttggctgttatcttcagccacgtattcaaaggtgggcttttctctgatttttttttttattttaaagacaaaaagcagatgtaaccattat

SEQ ID NO: 885033 - DNA, 120 bp, Artificial Sequence
  ENSG00000260465_4 (sequence is synthesized)
aatgtgcataaatagtcataaaattgtctttaacagtctaccatacaagtgtactctgcaaataaaatgaattttactttaaaaactaaaggctgtttattatttggcctttggttccaa

SEQ ID NO: 885034 - DNA, 120 bp, Artificial Sequence
  ENSG00000260465_5 (sequence is synthesized)
tgcttgaaaaccccaaaataacaaaactcatctcccttcctcccacctcccaaaaagaaccctgcagctccccaaagttggtagactttggcaaccactgagcacatgacactatgtatc

SEQ ID NO: 885035 - DNA, 120 bp, Artificial Sequence
  ENSG00000260465_6 (sequence is synthesized)
agcttcttctgatactaggagcttccacttctcatgagtaaataaaagtggtctccaagaaaccttccttcacaagacatgtcttagcatttcatcagttttagtatattttatattgac

SEQ ID NO: 885036 - DNA, 120 bp, Artificial Sequence
  ENSG00000260465_7 (sequence is synthesized)
tcttgtttctgaggtcactcattttactcccggggactaagcgaccccacctttagtgaggccacaagctgtttggcatctattggtcactataccacaattatcattctacagtcagtt

SEQ ID NO: 885037 - DNA, 120 bp, Artificial Sequence
  ENSG00000260465_8 (sequence is synthesized)
tactgtcattacctagacaacctggtaactaccaacaggaccaaatgtgcaaacgggcagggcatgattgagatactgccgtgagccatgcagccttcggaagctgagagatgcttcttc

SEQ ID NO: 885038 - DNA, 120 bp, Artificial Sequence
  ENSG00000260465_9 (sequence is synthesized)
attccagaccagccccaaatccaaccggtctccttgctcctagggatgacatgtgatttggataccaagtgattccaaacacacctctcacagggcttgtgcctctggcgcctgcctgac

SEQ ID NO: 885039 - DNA, 120 bp, Artificial Sequence
  ENSG00000260465_10 (sequence is synthesized)
tgctctgaacaactatctaaaatcagcccaagcctgtaggtatgccatctatgactagcctgagtgacactctccttgactgtgcaggaggcaacccaaatccctgagagctcctggctt

SEQ ID NO: 885040 - DNA, 120 bp, Artificial Sequence
  ENSG00000260465_11 (sequence is synthesized)
tcacatttccagcctctcacagactgcactccccggctccccctattgcaattctttccagtccgcctgggatctaccatttgtcttccagcatcaccctcctgctttccctgccatact

SEQ ID NO: 885041 - DNA, 120 bp, Artificial Sequence
  ENSG00000260465_12 (sequence is synthesized)
tcctccataaccccatcactgcccttcccttcttcagctgtgtatgtcccctctagacagtgccatatgcaaggaacacgtatcattcatttctgtgtcctttgcagagaacctgagcac

SEQ ID NO: 885042 - DNA, 120 bp, Artificial Sequence
  ENSG00000260465_13 (sequence is synthesized)
ctagtgggtgctgaataaggtttcctgaatgaataatgtaattgtttgttaagtcaggaggatactgaagcctgaacatcaatctgctaacacaagtcttgtcagagaccacagcttcat

SEQ ID NO: 885043 - DNA, 120 bp, Artificial Sequence
  ENSG00000254344_0 (sequence is synthesized)
agagtgtgaaggactttgcaccaagacgcaaggatccaagagactgcctgtgctttctggcatttgaaggttcgcattttaatggcaatccttgaaaacctaaaagccttagaaactaga

SEQ ID NO: 885044 - DNA, 120 bp, Artificial Sequence
  ENSG00000254344_1 (sequence is synthesized)
agaaatcaatgtttaatgatggaacttgaaacattatgacaaaggagaaggagctgaaaggaatttttagacatcactgagtgcaaccaattcatcttctgcatgagcaaacatagaagg

SEQ ID NO: 885045 - DNA, 120 bp, Artificial Sequence
  ENSG00000254344_2 (sequence is synthesized)
agagagagaaatgacaggtgtcacactacagccccagatttcctaacacaaactccaggaaaagaatcatattgactcacctagtaatctaccaagccctgtcagaggctatggaccttc

SEQ ID NO: 885046 - DNA, 120 bp, Artificial Sequence
  ENSG00000254344_3 (sequence is synthesized)
ctattccacttttcaacgcctgtcaaagatgacaaagatgacaaacaagtgatgaggacactgaggcacaattaaagaataacttgtcaaagatcacagtgttattagcagtgagaaaga

SEQ ID NO: 885047 - DNA, 120 bp, Artificial Sequence
  ENSG00000254344_4 (sequence is synthesized)
cccacaccttgccccggggttactgaagacagagaaccactgcaaactggtcgcaggctaccttttcaaccctcactgtcaccacactagatgctgggctgctacttctggaatgctcta

SEQ ID NO: 885048 - DNA, 120 bp, Artificial Sequence
  ENSG00000254344_5 (sequence is synthesized)
ctcactccgtgctttctccattgctgaggttttcctctccctccctctcttctctgtgctcacctggagaaactccttcatccttcaaggtctccaatgtcactcactccctgtggactt

SEQ ID NO: 885049 - DNA, 120 bp, Artificial Sequence
  ENSG00000254344_6 (sequence is synthesized)
cccttcccacctcccttcccttccctagacaacgtttaattatttccacagcactaggatcaggcttctgtcatgcagttcgcatgttatgtcacagctaattgtttactattctgtctc

SEQ ID NO: 885050 - DNA, 120 bp, Artificial Sequence
  ENSG00000254344_7 (sequence is synthesized)
ttctttcagattaagagctcctcaaagaagaaatatcattttattcatctgtgttctctaatgtcaaacaaagtgactagcatataatagataggcatttaattatatattgaattgaat

SEQ ID NO: 885051 - DNA, 120 bp, Artificial Sequence
  ENSG00000254344_8 (sequence is synthesized)
tggatacaactgctttagctgtccatttgattttgacccaataagggttacaacaaaataaaatcagaaaccctttcacctagtgtaggactaatataataaaagattttagtcaatgaa

SEQ ID NO: 885052 - DNA, 120 bp, Artificial Sequence
  ENSG00000254344_9 (sequence is synthesized)
gcccgtctcggcctcccaaagtgctgagattccaggcgtgagccaccgtgccccggccggaggcgagaactattttacttggtttaacttacctgagcgccagaatcttgactgtaatag

SEQ ID NO: 885053 - DNA, 120 bp, Artificial Sequence
  ENSG00000254344_10 (sequence is synthesized)
gattctgcaaccacagctacacacctgatcttccagagcccagcttcctgcaaatgcctgaattcagtttgattttaacatctttggttttcttccgaagcctttcctgatatattctat

SEQ ID NO: 885054 - DNA, 120 bp, Artificial Sequence
  ENSG00000254344_11 (sequence is synthesized)
ctcactatgatcacttccttgctctttttcccttcatttttttgcttgactctagtgtgcatttgttatgaggccttttcaccactcttgagtcatttcctgtaacatgttttgtctctc

SEQ ID NO: 885055 - DNA, 120 bp, Artificial Sequence
  ENSG00000254344_12 (sequence is synthesized)
cctaagagcctatgcggttttccactttgttactcctccactgtacttagtaaaggccttgacattaaattaggcttgtattcaaaattatttattaaaggaataaaaggcttgaacaaa

SEQ ID NO: 885056 - DNA, 120 bp, Artificial Sequence
  ENSG00000260467_0 (sequence is synthesized)
tcatttgaaggggctatggacttcctgatagggggaaaccttctggactgtaggagtgtctgatctaatgccctctgactggagaagctgacgaatttggtcagaagcccaaagatgggg

SEQ ID NO: 885057 - DNA, 120 bp, Artificial Sequence
  ENSG00000260467_1 (sequence is synthesized)
ttagggccacgggcagccgggcctcccctctctctttcctgtaccgcttgaagccatggcagggaagctctgaatgcaaaggagaaaagaggtgggaaccagaagcccaggcttgctgtg

SEQ ID NO: 885058 - DNA, 120 bp, Artificial Sequence
  ENSG00000260467_2 (sequence is synthesized)
tgtcctcagcttcttctccaggtctctgagcgtctcctgctttaaggtgatttcctccttccgcacctcaactggcctcatcattttctccatcctcgcccattcagcccactcggccgc

SEQ ID NO: 885059 - DNA, 120 bp, Artificial Sequence
  ENSG00000260467_3 (sequence is synthesized)
aatgtctctgtggggaaggatccctggagatcccatccatgtcatgtggacatcatatcacatgattctgcccttctggtcgcagctgattggaccagagatggacgatggacacccaac

SEQ ID NO: 885060 - DNA, 120 bp, Artificial Sequence
  ENSG00000260467_4 (sequence is synthesized)
ttgcaagacaacacagcccatcacctccctggtgcaggggcctcaccttgcaaggagttgaaaagtgcaaagatgtagacggtggagaggcccaacggggtgaagatggccaacccccat

SEQ ID NO: 885061 - DNA, 120 bp, Artificial Sequence
  ENSG00000260467_5 (sequence is synthesized)
gtcacacccaccaggctcgagaggcccagcaggggggaatctgggagaacgaaccacaggactctgcactatttttgcatctttctgttttatctcaaaataaaatccttctcaatcctg

SEQ ID NO: 885062 - DNA, 120 bp, Artificial Sequence
  ENSG00000260460_0 (sequence is synthesized)
cctttcacagctgctccttgcgctgctgggggaggttgctgaggtatggggaagaggtacgctgtcgctaagcaacaagaggctgtgcacctggaggtcctaggaggagaccctggcacc

SEQ ID NO: 885063 - DNA, 120 bp, Artificial Sequence
  ENSG00000260460_1 (sequence is synthesized)
atcggtatgggggaggcagggagacagtaaagggttgatcaagctcaaggctccctctcccatcctccccaagacagttacagaggagggatgtacccatcgctcaagaagcctgttgaa

SEQ ID NO: 885064 - DNA, 120 bp, Artificial Sequence
  ENSG00000260460_2 (sequence is synthesized)
ttggctcacaatcctccagaaggctgcgattgtgcatgcaaacctgtgtgacattccatagactgagagttggagagggcaggggctagggcatgaaagacaagggtgagcatctttcac

SEQ ID NO: 885065 - DNA, 120 bp, Artificial Sequence
  ENSG00000260460_3 (sequence is synthesized)
atcaatcttggaggaaggtcgaggacttgcctgtctgctaaaaggtaggaacttccatggaagtgtaaaggtctgagggcggaaacttagtagggaggcgacagaatgggaagggaagcc

SEQ ID NO: 885066 - DNA, 120 bp, Artificial Sequence
  ENSG00000260460_4 (sequence is synthesized)
ggttggaccctggggcagcctcccagtcacagaggctaccaaggagcctacacagaagggaggtggcagggcagcaggggccccacacccatcagccatctgctggaattctcagtgtcc

SEQ ID NO: 885067 - DNA, 120 bp, Artificial Sequence
  ENSG00000260460_5 (sequence is synthesized)
tcaaagctgaagtgctgcactgtatgccgttatttttcttctcttttattattgttttttggtggactggagtttgaatgaggtaacgatcaagagggaaagactcgtcgattgaccctg

SEQ ID NO: 885068 - DNA, 120 bp, Artificial Sequence
  ENSG00000260460_6 (sequence is synthesized)
tcacccgcctcactgcatctctaacaggcctgtagccctgtaaacgtgaggagcagctcagggttgacagagggccattgcctccctttttctgtcacttcctccattgcctcaacccct

SEQ ID NO: 885069 - DNA, 120 bp, Artificial Sequence
  ENSG00000260460_7 (sequence is synthesized)
agcatggatcaagcactcgtgacgtgccagccagggcgctggggaaatgatgagggttgggttccgtggtggccgacacccagcccctcctccacagtgcctgtctccttgctggtatct

SEQ ID NO: 885070 - DNA, 120 bp, Artificial Sequence
  ENSG00000260460_8 (sequence is synthesized)
tggcaggctcccgttctcccatcagacgctacactcacacatgctgcacatactggtgaatagcttcttgcagtccatcctggcacggtccccaaattccgcagggaacagggtgtgctt

SEQ ID NO: 885071 - DNA, 120 bp, Artificial Sequence
  ENSG00000260460_9 (sequence is synthesized)
cagccctctccctctctcactaagggctaggaagttttgagtcttccatctcacacaccccagaggctgcgttgccgagaagacacaggggcaatgtgaggccttcttattcctgaccca

SEQ ID NO: 885072 - DNA, 120 bp, Artificial Sequence
  ENSG00000260460_10 (sequence is synthesized)
cgagaacgatgccaagttggggacaagaagggtagaggcttgttttgctttcattcctgctttatgccaggcactctgaaaggcattgtgtacactattttcatcatcagacaatagccc

SEQ ID NO: 885073 - DNA, 120 bp, Artificial Sequence
  ENSG00000260460_11 (sequence is synthesized)
ataatactttgtctgacatctgacaaagaacgatcagcctcattttacagatggtgaaactgaaggagcatgttcatgttcatacagcacaaagtggctctgggatttcaacccatagag

SEQ ID NO: 885074 - DNA, 120 bp, Artificial Sequence
  ENSG00000260460_12 (sequence is synthesized)
catacagcacaaagtggctctgggatttcaacccatagaggagtgttagaataataccctcacaaattcaatgttgaaagtgctaatgaagtccgggcgcggtgcctcatgcctgtaatc

SEQ ID NO: 885075 - DNA, 120 bp, Artificial Sequence
  ENSG00000254343_0 (sequence is synthesized)
gggttgattctattatctgatgttttattaatctctgtgaaataattgtgtaaattaatatagagactagttgagaaatggtggataacatgaagaagatacccatttttgcatagatta

SEQ ID NO: 885076 - DNA, 120 bp, Artificial Sequence
  ENSG00000254343_1 (sequence is synthesized)
gatgtgatcaacctcacactatcatatgaaagttggctgcattggagagacaggaattaatattaaaaatgttttcagttcagattgatatcttacatttccaaatattattttcttttg

SEQ ID NO: 885077 - DNA, 120 bp, Artificial Sequence
  ENSG00000254343_2 (sequence is synthesized)
caatgactttagggtttcagcttttcctgtcttttaaaacaaattagccattttttattctaagaaagggttgtattataaagctgacctactactagcttatcagaaaaaacacgtggg

SEQ ID NO: 885078 - DNA, 120 bp, Artificial Sequence
  ENSG00000254343_3 (sequence is synthesized)
tctcatatctgattctcctatgtagccaaaagtgccatttgtaagtctactaaatgacggatattttctgaagatcttttgcctggaaaacaaatagtgcattaaaaagcttttttggta

SEQ ID NO: 885079 - DNA, 120 bp, Artificial Sequence
  ENSG00000254343_4 (sequence is synthesized)
acatggatccttaagtcctccctatgccccgttagagcactgatgacatttactttgaaattcccctgttacatgtctgtttgcctaagtagactctaagcatctgcagaacaggggcta

SEQ ID NO: 885080 - DNA, 120 bp, Artificial Sequence
  ENSG00000254343_5 (sequence is synthesized)
gctatgtcttagtatccagggtattttcttcacctggcacaattcctgccacagagtagtgtgtcagctctctattgttgtctaaaaacccacctcaaggtgctgggattacaggtgtga

SEQ ID NO: 885081 - DNA, 120 bp, Artificial Sequence
  ENSG00000254340_0 (sequence is synthesized)
tcttgctgctcagctgaatacaaggcctcagtggtttgctgggctttggtgagatcttaaaggcaaacctctcttggcgcaaggaaggagccatgcagttgtatctgtactcgatgtcca

SEQ ID NO: 885082 - DNA, 120 bp, Artificial Sequence
  ENSG00000254340_1 (sequence is synthesized)
taaaggcatcattccagcagggactggcaaacaatatttccttttatctatgcccacctggctacaggtccacgtatgctcagattctcttctgcctctgccgccctgagacagcaagac

SEQ ID NO: 885083 - DNA, 120 bp, Artificial Sequence
  ENSG00000254340_2 (sequence is synthesized)
agacagcaagaccaaccccttctcctcctcttcctcctcctcagcctactcaacgtgaagaggatgagaatgaagacctttatgatgacccgcatccacttaatgaatagtaaatatatt

SEQ ID NO: 885084 - DNA, 120 bp, Artificial Sequence
  ENSG00000251191_0 (sequence is synthesized)
agacacacctgggttcctggtgagcttcactgcttcctggtctctgatatcagctctgcccaaatttcagctgtcacagaatgagtgatcctcatagtataatggaaatgcatcatctca

SEQ ID NO: 885085 - DNA, 120 bp, Artificial Sequence
  ENSG00000251191_1 (sequence is synthesized)
gtttccccatggcctgaatgtccatacaaaatgagagccagtagagaaaaacagaggacgtgaggagtttttaaaaattgaggaaaagtggaaggaaaagtaaggatgaaggtgaagatg

SEQ ID NO: 885086 - DNA, 120 bp, Artificial Sequence
  ENSG00000251191_2 (sequence is synthesized)
aaggaatatgtcagagatgctagcactggcatcccccaccacacagtaccatgtactgctaaagaactctagaacatacagggtgtagacggcagtcttcttggggaaaaagaggcttca

SEQ ID NO: 885087 - DNA, 120 bp, Artificial Sequence
  ENSG00000251191_3 (sequence is synthesized)
ggattgcaagatttcagctactgtctctcctcggagcaggattccatcttttccatggctggggcccttgacacatgtcactgtgcactgctcttctcgctgggaaaaggaaactgaggc

SEQ ID NO: 885088 - DNA, 120 bp, Artificial Sequence
  ENSG00000251191_4 (sequence is synthesized)
ccagagagggcaagtgaatttcccaagagtgtccagatgatacggagctgagctggaaagtgagcctggatctctctggttctgaaagctttgctcgaaagcacaggatgacacctccat

SEQ ID NO: 885089 - DNA, 120 bp, Artificial Sequence
  ENSG00000251191_5 (sequence is synthesized)
cctgctgtccctgaaggttgacactctcatttcaaaccacagcgagaaccccaaaaggaaacagtgcaaggaaaataatgtgatatttgagaggcagcatggattattggggacagggtt

SEQ ID NO: 885090 - DNA, 120 bp, Artificial Sequence
  ENSG00000251191_6 (sequence is synthesized)
catgtcccttctctcccacacacgtggcatgatgttaagcgggtcacctcacctctccagggttgtttcctcaactgagaaaatgagggggttgagatgaacgccagccctggggtgctc

SEQ ID NO: 885091 - DNA, 120 bp, Artificial Sequence
  ENSG00000251191_7 (sequence is synthesized)
aatgctgcagtctagggtggtgtggactggaatcagaattctttctcctccgctctgggtgctgacacatgatctctggctctcactccccacccctaatcttgcccatctgagtttcag

SEQ ID NO: 885092 - DNA, 120 bp, Artificial Sequence
  ENSG00000251191_8 (sequence is synthesized)
gttattttttccttcctcctgctcttcaatttccttattgaggaagctctttcctgctgcctctgtccccgctggagctgtttgatccagtagagccagtcgaagccaaggggaccctga

SEQ ID NO: 885093 - DNA, 120 bp, Artificial Sequence
  ENSG00000251191_9 (sequence is synthesized)
cttgaatcttgctttctgacatgctggctgtggcttgcttgggacctgaataagagcttgcttactcccggtgttcaccacagcggaaccatgggtgcagaaatgtaattctcaaccagc

SEQ ID NO: 885094 - DNA, 120 bp, Artificial Sequence
  ENSG00000251191_10 (sequence is synthesized)
ccagtttaatcagcgaaagacaatagagcttgcaggcggtgtcatgctgagtatctgaacacaccatggctgctgtcgcccttttcattaaaatgattgaaaatgtatttctaaacagaa

SEQ ID NO: 885095 - DNA, 120 bp, Artificial Sequence
  ENSG00000251191_11 (sequence is synthesized)
atgggaagatgtgcctacttcccctttgccttccaccgtgactgtacatttcctgaggactccctagccatgctttctgtacagcctgctgaactctctgcccaaatttcagctgtcaca

SEQ ID NO: 885096 - DNA, 120 bp, Artificial Sequence
  ENSG00000251191_12 (sequence is synthesized)
agaagaaagttacaattgctttatctgatgctgtcactcatgcctggtgttgagaggcgcacattttaaaaagtctaatagctccgacatatctaggaaacagatgggaaacaaatgaag

SEQ ID NO: 885097 - DNA, 120 bp, Artificial Sequence
  ENSG00000251191_13 (sequence is synthesized)
cattgatggattcgcaaattccagttctttgatatttgtctgcccaggaatgggtgggacagagaaatgtaagggaataatgaggatacgggtggggaaaggcttgcaatttttcccgtt

SEQ ID NO: 885098 - DNA, 120 bp, Artificial Sequence
  ENSG00000251191_14 (sequence is synthesized)
cttctttggatatggactgaaggaaggatgtggggaggaggtgtttatcttttgcttgtactctgaacttttccaaagttactgcattccttgggatataaaactgtaatcaagagtctc

SEQ ID NO: 885099 - DNA, 120 bp, Artificial Sequence
  ENSG00000251191_15 (sequence is synthesized)
taatggataactgcaattatgcattgagtcattcaacaaatacacattaatactgactaaattaagctcgaatggaacttcagggcaaaagaacagagaaaataaaataccactagagaa

SEQ ID NO: 885100 - DNA, 120 bp, Artificial Sequence
  ENSG00000251194_0 (sequence is synthesized)
ggttgtgatgcagggacagaaaattcagaatgccacatgcttggcctcatttctctgggtggcctacccaagagcttcaagaaaaacagtttaagaaaatgctaacttcagcaatattgg

SEQ ID NO: 885101 - DNA, 120 bp, Artificial Sequence
  ENSG00000251194_1 (sequence is synthesized)
caagacaaagccccttacactccttagttctttattcagcattgttctgctctcatttattaaaaattccaagtaccattgtcagtattcttcagaaaatcttatagtgctgtctcattt

SEQ ID NO: 885102 - DNA, 120 bp, Artificial Sequence
  ENSG00000251194_2 (sequence is synthesized)
tcccccaaaaaagaactgaagcatttagaatcatagtggcagtggtggtggtggtgatggtgatggtgatggtgataatgatggtgatgggatggtgacggtcatggtgattttggtagt

SEQ ID NO: 885103 - DNA, 120 bp, Artificial Sequence
  ENSG00000251194_3 (sequence is synthesized)
gggagtattggtgtggcatttcagcaaatgttgttttcatttgttttaaccatcagccaaggaacaaagcaatctgtctcttcaatatagttacacaggtgactaagtgtcacccgcttc

SEQ ID NO: 885104 - DNA, 120 bp, Artificial Sequence
  ENSG00000251194_4 (sequence is synthesized)
caccttctctaatcaaggaaatggtgacgatcaggttactatagattccttataaggtgccttcataatggataactgtagccattttatgtaagcattgtcctgtgattaaaaaaaaaa

SEQ ID NO: 885105 - DNA, 120 bp, Artificial Sequence
  ENSG00000251199_0 (sequence is synthesized)
gtcgatgaatgtggggtaccattccttgatgatgtggtcatgtttgtagtcggccttattgtcctttagatgttccacggtgttccgctcgctcttctcataggcctcccggggcttccg

SEQ ID NO: 885106 - DNA, 120 bp, Artificial Sequence
  ENSG00000251199_1 (sequence is synthesized)
gacagacaccttgcattctcggaccttgttgacgatgaattcttggatgagaaacctgatatcttccatgaggcagtcatcataaagaagtctgaatatcttggttgagagctagacttt

SEQ ID NO: 885107 - DNA, 120 bp, Artificial Sequence
  ENSG00000251199_2 (sequence is synthesized)
ggaaacagagagaccctgtataataacagactaagaagtaaggaagacaagcccagccagtcccacaactatttcattaataccaggtaaagcaacagacctgccagtgaagcatcttgg

SEQ ID NO: 885108 - DNA, 120 bp, Artificial Sequence
  ENSG00000251199_3 (sequence is synthesized)
ttcttgtagtaattttggaagtcaatactttccttaagaatactaaagttttcttttgggaaaagagaaaaactgaggagaggaaacaaactgctcttataccttcttccatggtctttg

SEQ ID NO: 885109 - DNA, 120 bp, Artificial Sequence
  ENSG00000251199_4 (sequence is synthesized)
gatgaaggttaagttatgggccccaaaagtgggctagcctcatttggataatactccatcctaagcagtatggttttgaataagttgctgagactttctgtgcctccatttgtaaatggt

SEQ ID NO: 885110 - DNA, 120 bp, Artificial Sequence
  ENSG00000251199_5 (sequence is synthesized)
ataataatacctagttcatggaattgttgtgagaatgacataagtgaaagtatgtatatttccatgttctatataaactggttttctacaaattacaaagcaacaactaaccaagttaat

SEQ ID NO: 885111 - DNA, 120 bp, Artificial Sequence
  ENSG00000251199_6 (sequence is synthesized)
tgaaatcgagtactttattcaagtaataaatatctggtatttacaaatcaaaattgaaaatcatagtacataacgaaaattcatatatacagatcaacaaatatagtaatttaaaacacc

SEQ ID NO: 885112 - DNA, 120 bp, Artificial Sequence
  ENSG00000251199_7 (sequence is synthesized)
gtaaccctcagagggcctgaaggaaagcgatgctggtgtgacctgcccaagaggatggtgcccaaggcagagcattctagaccctcataggcaacagagccaggtattgctagcttgtgt

SEQ ID NO: 885113 - DNA, 120 bp, Artificial Sequence
  ENSG00000251199_8 (sequence is synthesized)
aaagagttcccacggatttataagaaggttcgactatgcttttcccggataaaacgtgtctctttccctttcattgccatctgctggatgacaatcctttattctgatacagtcatcttt

SEQ ID NO: 885114 - DNA, 120 bp, Artificial Sequence
  ENSG00000251199_9 (sequence is synthesized)
acaaatgactaaccaaaggtctgttttgaaagatcagcagaaataggtactgtgattataattttaaaaaattacagtgttttttaaatcaatgatctgttgttgctactgcccaagaac

SEQ ID NO: 885115 - DNA, 120 bp, Artificial Sequence
  ENSG00000251199_10 (sequence is synthesized)
tactaatctttgaaaaacttgggactacttagttcaattgatatttctgagagcttcctgtgccatataggcatttttttctcatttacatctcactattcatttattagaaattcactt

SEQ ID NO: 885116 - DNA, 120 bp, Artificial Sequence
  ENSG00000251199_11 (sequence is synthesized)
tttttcctctgcataaacatgaaatacacctttcaatccatattgtgtatcttttgcttttacgaaggcagtcgtcagtgtgaggaaagacagataagccagacagttatttttcaaaga

SEQ ID NO: 885117 - DNA, 120 bp, Artificial Sequence
  ENSG00000251199_12 (sequence is synthesized)
aagaagtgacaatcttttgttctggaatgctatttgcatttatgagatttttttatgtgtctatcagacctagttagcagtacagtgctcaatgtttcagaatgtgcctgcattttccat

SEQ ID NO: 885118 - DNA, 120 bp, Artificial Sequence
  ENSG00000251199_13 (sequence is synthesized)
ccttgatgaccttttgacatggcctctatgtgatttaaaggaaaggctctcaatctctccatcaccccagtggctgacatttataaatatatgaaaatatagaaaagataaaagtgaaaa

SEQ ID NO: 885119 - DNA, 120 bp, Artificial Sequence
  ENSG00000251199_14 (sequence is synthesized)
cttttcagattcatagggtttggtgttcactttgtttttatgagtcttttgatgaatataagtacttaaatttaatacatttcaatgtatcattttttatccattaagccatgtgaaatt

SEQ ID NO: 885120 - DNA, 120 bp, Artificial Sequence
  ENSG00000251199_15 (sequence is synthesized)
cgttttgcttaaggtatgaatgttattttaatttgaaaaatctatataataaagtaatccataaatacttaaatagtctatccagttccactgatttgaacaaacacttctgttatatcc

SEQ ID NO: 885121 - DNA, 120 bp, Artificial Sequence
  ENSG00000251199_16 (sequence is synthesized)
atattccataaatgtataggtctgtagctttctattctgttctccttttttatttgccttttttgtactatttccacactgtcctaaatatttatagctttagaagaagtcgttatattt

SEQ ID NO: 885122 - DNA, 120 bp, Artificial Sequence
  ENSG00000251199_17 (sequence is synthesized)
aaaactagaattcctttttccttgtctgttttcaggaatttttctgtttttcttgtccctttacttttccaaataatttagaataaagttgtcaagtagaaaaaatatattgttatgatt

SEQ ID NO: 885123 - DNA, 120 bp, Artificial Sequence
  ENSG00000251199_18 (sequence is synthesized)
attggcgggaaactcatccacctcggcctcttcctctgtgataggcaccaccgcgcgggccaggctggcactgagggcctccagtttctccactgggctctctgagtccagcgcgtaggt

SEQ ID NO: 885124 - DNA, 120 bp, Artificial Sequence
  ENSG00000251199_19 (sequence is synthesized)
gccctcactggctttcccctctgcttgggcctgaccctcagcttgaggggatagtgaacgttgagcgactggcagaggctgaagttcatcaatgaagcccagtagggtgctgtagaatta

SEQ ID NO: 885125 - DNA, 120 bp, Artificial Sequence
  ENSG00000251199_20 (sequence is synthesized)
ggtgaaggtggccatgactctgtagtccacgtctgtccggtggtcgtgggagaaagcacagggggtgatccacacgatgggctgtgccagcacctcagcctggtagtaaatgcgtttgat

SEQ ID NO: 885126 - DNA, 120 bp, Artificial Sequence
  ENSG00000251199_21 (sequence is synthesized)
ggacaggaagaccttgctcggggcacaggcagcgatgatgtaatacgtgaactccgctgcgagcctgcagcacagcggaacgatctgcacatggcacttgtcagtccgggggaaggtgga

SEQ ID NO: 885127 - DNA, 120 bp, Artificial Sequence
  ENSG00000251199_22 (sequence is synthesized)
ttagctttaggctcataggtggaaggaacttatctcaaatgaagttttgtaccatggacttttgtgttaatggagaaatgagttaagactttgggtaatttttgaacagcatgattggtt

SEQ ID NO: 885128 - DNA, 120 bp, Artificial Sequence
  ENSG00000251199_23 (sequence is synthesized)
ggaatgatatggtttggctgtgtccctaaccaactctcatcttgaattgtagctcccataatctctgtatgtcatgggagggacccagtaggaagtaattgaatcataagggcaggtctt

SEQ ID NO: 885129 - DNA, 120 bp, Artificial Sequence
  ENSG00000251199_24 (sequence is synthesized)
ggacccagtaggaagtaattgaatcataagggcaggtctttcctgtgctgttctcatggtagggattaagtcccagaagatctgatgattttgtaaagagcagttcccatacacagattc

SEQ ID NO: 885130 - DNA, 87 bp, Artificial Sequence
  ENSG00000251199_25 (sequence is synthesized)
tcttgtgtgccgccgagccgtggttgtgagacctccccagtcatgtggaactgtgagttcattaaacctccttttctttataaatta

SEQ ID NO: 885131 - DNA, 120 bp, Artificial Sequence
  ENSG00000251199_26 (sequence is synthesized)
ttgaaaagaaaaagcagcgtgctgattgcagtgactggtgcatggatctcgatggctactctgtactgtaggcagtgatgacaccctgttgaggagattggtaggagccatagcaacaca

SEQ ID NO: 885132 - DNA, 120 bp, Artificial Sequence
  ENSG00000251199_27 (sequence is synthesized)
ggaggcacaattttagggatggtttacattcctagctggagtttccacaaagcccaggtgcttgcatagagccttacccttgcctataaacaactacatggtttagtgtccccgtaaaat

SEQ ID NO: 885133 - DNA, 120 bp, Artificial Sequence
  ENSG00000251199_28 (sequence is synthesized)
tgggaaataatgtcagggcagcaatacagtttggggcagtatttaagatctagtgctcagcttaacataagtcatcctgagactgagaaaaaaatgacaggcaataatttagtttcagta

SEQ ID NO: 885134 - DNA, 120 bp, Artificial Sequence
  ENSG00000251199_29 (sequence is synthesized)
cagtattttagttccgatattcactataagtccttcccaggaattgaaacaacattcaagtgtttaaatttaatactaagacataacccctaacatcaccaaagaacatctgcaaaaact

SEQ ID NO: 885135 - DNA, 120 bp, Artificial Sequence
  ENSG00000251199_30 (sequence is synthesized)
ggaagaggtgggtgtctcctcaaatgtgcaggcatcaacataagcacatcagaatggtgaaaactcaggtagatatgaaattaccaaaaggcatcaaggaggctccatcgatggatccag

SEQ ID NO: 885136 - DNA, 120 bp, Artificial Sequence
  ENSG00000251199_31 (sequence is synthesized)
aataaataaagatctgtgagatgtctgacagagcattcagaaaaatctcttcctctctttatataaataatggctgggaattcagccattccaaatctggagaacccctaaagaagttta

SEQ ID NO: 885137 - DNA, 120 bp, Artificial Sequence
  ENSG00000251199_32 (sequence is synthesized)
cccctaaagaagtttagaaaatcacaaagaaatatggaaagtaaataaaaattaaaaaacaatcaattaacaaaatgagaaacttgaaaaaaatagaaacaatattaaaagtccaaggaa

SEQ ID NO: 885138 - DNA, 120 bp, Artificial Sequence
  ENSG00000251199_33 (sequence is synthesized)
tgaaccaaaaaactcattagagagctgtcacaacagacttgatcaaaaagagaaaagaattagtgaacttaaagatggaatatataaaattacccaatcagagaagcaaaaagaaataaa

SEQ ID NO: 885139 - DNA, 120 bp, Artificial Sequence
  ENSG00000251199_34 (sequence is synthesized)
caagggtagtttaaagcctgaaaaactgaggtgccagttccagatacagtccatgacttgagtgagaacttccattgccatcttactcactctctctagattggttccttctgaatgatg

SEQ ID NO: 885140 - DNA, 120 bp, Artificial Sequence
  ENSG00000251199_35 (sequence is synthesized)
ccttgtaaccaatcaaatggtgctttttccaagaccacccatggaccaatcagcacacactgccttattctaagcccataaaaaccctggactcagcctcacaaacaactattgggtacc

SEQ ID NO: 885141 - DNA, 120 bp, Artificial Sequence
  ENSG00000251199_36 (sequence is synthesized)
ctcttgattctgagagctttctttctgtcacccaataaaattctactctgccttactcactcctcagtgtccatgtaccttattcctcttagtcacaggacaagaacccaaaactcacca

SEQ ID NO: 885142 - DNA, 120 bp, Artificial Sequence
  ENSG00000251199_37 (sequence is synthesized)
aactgcaggagcaaaagatctgtaacactcctgcttgctgagctgctggcggtggtagtaaaagagctgaaatatttcctattgcttgtcagacaacaagagagaagaagctgctgggtg

SEQ ID NO: 885143 - DNA, 120 bp, Artificial Sequence
  ENSG00000251199_38 (sequence is synthesized)
ccattttttctcattctccaaactaagggagtgaaaaagccatatcatttgtatttgataaattattattttgtaataatttcttatatagaaaaaaacattaaaaatcactgtattgaa

SEQ ID NO: 885144 - DNA, 120 bp, Artificial Sequence
  ENSG00000251199_39 (sequence is synthesized)
tccatgtaggaatagagggagtagacagttaagatacaatgataaagggcattcattccagagggaagagtggaaataaaggcatagaagcatgaaactactgtgtatgcctgaatacat

SEQ ID NO: 885145 - DNA, 120 bp, Artificial Sequence
  ENSG00000251199_40 (sequence is synthesized)
tccagtagcctgttagtcaaagtggctagtgataagatgattaacttgaaaaggttttttttttttttaaagtaaattttctaggagtaaagagatgacatctcatctctgaaaatttaa

SEQ ID NO: 885146 - DNA, 120 bp, Artificial Sequence
  ENSG00000251199_41 (sequence is synthesized)
ttgctaagattgttgctgataccacaacaattgatagaaatactgtatcttgccagtgacacgtttttgcatgtgtgtgcaaataatgtaaaatatccaattcagcaggtattataaagt

SEQ ID NO: 885147 - DNA, 120 bp, Artificial Sequence
  ENSG00000251199_42 (sequence is synthesized)
gtaaagtgtggcctaaagactaaacttctggtccagtttgttgtgtgactataagcaagttacttaaatttgctggtctgcagtatgttttaatccataaaataagggaactaaaataaa

SEQ ID NO: 885148 - DNA, 120 bp, Artificial Sequence
  ENSG00000251199_43 (sequence is synthesized)
cataggacagtacagaacaaatgtgggcaaaagtcaaatctacaaatgatgaactcttccctttatatccaacccaataggcagtcatcataaagaagtctgaatatcttggttgagagc

SEQ ID NO: 885149 - DNA, 120 bp, Artificial Sequence
  ENSG00000251199_44 (sequence is synthesized)
gcctcagaagaaagaaaccaaatctacagacaccttgatcttcaacttctggcatccaaaactgctgggaattctagatcaaggtatgaagacagccagttcctagattcagagccatga

SEQ ID NO: 885150 - DNA, 120 bp, Artificial Sequence
  ENSG00000251199_45 (sequence is synthesized)
ggaagaatccattctgtgacttttccctagcttctgatgtttgtctggcaatctttggcattctttggctcgtagacctctgttttcatcttctcaagaaaatttccctgtatgtttgtc

SEQ ID NO: 885151 - DNA, 120 bp, Artificial Sequence
  ENSG00000251199_46 (sequence is synthesized)
taggtctaatttttcctttttatagaacaccagtaagattggactggagctcacgctaatgacctcactttaacttcattatctctataaagaccctatctccaaataaagatacattct

SEQ ID NO: 885152 - DNA, 120 bp, Artificial Sequence
  ENSG00000251199_47 (sequence is synthesized)
acctagagttacctgaagattcaactgaagaggacattcaatgtggctttctaaagattgtaaattgacaatttgtaattgtataaacttatggagtacaatgtgatgttgtaatttatg

SEQ ID NO: 885153 - DNA, 120 bp, Artificial Sequence
  ENSG00000251199_48 (sequence is synthesized)
atccaatgtgaaataattaaatcaaactattaacatatccatcatctcaaatatttgagtatagtcaccatagaaaacaatatgcagatttctcaaaaaataaaaaatacaattactata

SEQ ID NO: 885154 - DNA, 120 bp, Artificial Sequence
  ENSG00000251199_49 (sequence is synthesized)
aagaacactgatggatatgatggtttctgtttcatcaatattaatttaaagctgctgaatatccttggagagctaatcaagaaggaatggaagtgaggatacagagaatgcacaaacggg

SEQ ID NO: 885155 - DNA, 120 bp, Artificial Sequence
  ENSG00000251199_50 (sequence is synthesized)
ccatcagatggaagacatctggagtatattttcaagctctatattacagatctcttaaaaatcagaaagtaattaggcaaaggagataaagaagtaaaagcatgtttattaaaaaaaatt

SEQ ID NO: 885156 - DNA, 120 bp, Artificial Sequence
  ENSG00000251199_51 (sequence is synthesized)
taccaagaatatggaaacattataagaacaatctgttctgtaaaagaagtactaccttgaaataataaactataagagactgaattttaatggacttttcttaaataatgatgattctaa

SEQ ID NO: 885157 - DNA, 120 bp, Artificial Sequence
  ENSG00000251199_52 (sequence is synthesized)
tgcaaacactaactttgtttttcatataaaattttctaaattgttttacctagccattttaaaaaacacgttagcaagttttgtgtttgggaaataaaagaacatacagaagaaaaatta

SEQ ID NO: 885158 - DNA, 120 bp, Artificial Sequence
  ENSG00000251199_53 (sequence is synthesized)
cagtgtattatttttctcataagcaatttatatttcacatttttctaatgaaattaacagaatcacttaccttcttgaatactatttcagaatcagccagtttaatttatgggtaacact

SEQ ID NO: 885159 - DNA, 120 bp, Artificial Sequence
  ENSG00000251199_54 (sequence is synthesized)
taaaagaaaaatgctacctttaatattattttgttaattataatttatttgttaaatgtctggtatgaatgtttttagtgatttaaacatatttttcagtaacttggcaaatgatggaaa

SEQ ID NO: 885160 - DNA, 120 bp, Artificial Sequence
  ENSG00000251199_55 (sequence is synthesized)
tggcaaatgatggaaaaatctgttattacaagcataaattagacttatttaatccttatgttaagaaaactatatgaaatgtttctatagctgaaaaaaagttaatgttattaaactaat

SEQ ID NO: 885161 - DNA, 120 bp, Artificial Sequence
  ENSG00000251199_56 (sequence is synthesized)
atttagagacatttgtcatctttgtaatatcttttcctatgaatatgatataacgttttatatcctgtttcatttctttcaatatataatatggtataatttcatttaaaaagcttttgt

SEQ ID NO: 885162 - DNA, 120 bp, Artificial Sequence
  ENSG00000251199_57 (sequence is synthesized)
gcttttgtagaaccttagatttattcataatttatttttgatactattcttaaatttcagacatcatttgatttttgtatattgaccttgtgtatgtcaaacttgcctaactttattaat

SEQ ID NO: 885163 - DNA, 120 bp, Artificial Sequence
  ENSG00000251199_58 (sequence is synthesized)
tttaattacttgcttttgtaaactttttgtaaacttgagttttatttcagtctagaatcataacatctggcatcactgatatttttgttttcatttctaatgaattttatttctttgtat

SEQ ID NO: 885164 - DNA, 120 bp, Artificial Sequence
  ENSG00000251199_59 (sequence is synthesized)
tttcttatgtttatggctaaacaaccaattttgtgttgaatgtaaaggctgacaagaaatatccttttatcatttgtgatattaaaatgcattattttaaaataataaaacatttttaca

SEQ ID NO: 885165 - DNA, 120 bp, Artificial Sequence
  ENSG00000251199_60 (sequence is synthesized)
tggcatccaaaactgtctgagaaggatgccagacacctgacaggcactcaagcatttgatgaatgaacaaaatgttgttgtgacctattccaatcctgagcatgtgtttgcacagtcatt

SEQ ID NO: 885166 - DNA, 120 bp, Artificial Sequence
  ENSG00000251199_61 (sequence is synthesized)
ctagattcatttaggggtactggttccagaactagaatccaaagtgaattatgagtataacatcagggttttgtttctctgtctctctctctctgtttctctctttttctttgtctattc

SEQ ID NO: 885167 - DNA, 120 bp, Artificial Sequence
  ENSG00000251199_62 (sequence is synthesized)
tgaggtagttgattggtctgcgaagggtaaaatatggcaaaaatgatttccatttggtgtttgtaagttatttcaaagacatagcagcttgagaataaaaattctttttttctttctcaa

SEQ ID NO: 885168 - DNA, 120 bp, Artificial Sequence
  ENSG00000251199_63 (sequence is synthesized)
tatgggaaaccatcaagtaaactaatctccgcataattggaatttttggggaagatgagagagaaataggcttataaacacatttaagaaaataattgctgaaaagtttttaaatcagga

SEQ ID NO: 885169 - DNA, 120 bp, Artificial Sequence
  ENSG00000251199_64 (sequence is synthesized)
gaattatgacagtatccaggttcaggaatctcagaagtcactaatcaaattcaacaaaaagtaggatttcccaaagcacgttataatcaatttagcaaaactcaaatacatagaaaaaaa

SEQ ID NO: 885170 - DNA, 120 bp, Artificial Sequence
  ENSG00000251199_65 (sequence is synthesized)
ctgctgaatatccttggagagctaatcaagaaggtagaagtttttccacattaatgttgtcaagtgacagtagatttaagaggaatggaagtgaggatacagagaatgcacaaacgggaa

SEQ ID NO: 885171 - DNA, 120 bp, Artificial Sequence
  ENSG00000242925_0 (sequence is synthesized)
aaaccaaaatcgtacagccattgaaatatattcaaaccaagaaagcagcagctcacagcatgtttgcacaacttcatgcacatcttatcaaccttactttgcaaggacttcagccttcca

SEQ ID NO: 885172 - DNA, 120 bp, Artificial Sequence
  ENSG00000242925_1 (sequence is synthesized)
tggtaggaaaagtctccacagctcatagactgctatgaacttcaggcgccttaaagcaacagatgcatgtttcaaagtgatgagaggcaagaccccaacaagcagcacaaacagaaatcc

SEQ ID NO: 885173 - DNA, 120 bp, Artificial Sequence
  ENSG00000242925_2 (sequence is synthesized)
aggactaaacacaggaagttatggtataaaacttcacgagtcttagaaattaggatccttacccccacctccacgcccttgctgacagatatgaaaataaactttacactccctaattca

SEQ ID NO: 885174 - DNA, 120 bp, Artificial Sequence
  ENSG00000206337_0 (sequence is synthesized)
agattctccccagacgccaaggttgcgggtcatggagtcccgaaccctcctcctgctgttctcgggagccgtggccctgatccagacctgggcaggaccctgactgtcccacagaagaag

SEQ ID NO: 885175 - DNA, 120 bp, Artificial Sequence
  ENSG00000206337_1 (sequence is synthesized)
caggaccctgactgtcccacagaagaagtgacaagaatttatttatgacatgacaataacacatgtattcatggtgttaattcgatttgtttcatagagacagggtcttgctatgttgcc

SEQ ID NO: 885176 - DNA, 120 bp, Artificial Sequence
  ENSG00000206337_2 (sequence is synthesized)
gaaaaaaatagaagtattctggaaatggaagaggaaagaaggctaaggtggaaatcatcaatctgtgtcatctgagaagccccacgtgcagaggctgtcccgggactttaggggagaaca

SEQ ID NO: 885177 - DNA, 120 bp, Artificial Sequence
  ENSG00000206337_3 (sequence is synthesized)
aaaacaaagcacccaggatcctggtgtcagggacagagcatggccacggcgggatggtagtggctctcctatgaaataatgctcataaacatcccttgtgagaaggatcagatcaacata

SEQ ID NO: 885178 - DNA, 120 bp, Artificial Sequence
  ENSG00000206337_4 (sequence is synthesized)
agattctccccagacgccaaggttgcgggtcatggagtcccgaaccctcctcctgctgttctcgggagccgtggccctgatccagacctgggcagattacaattacaatcaaggcagaaa

SEQ ID NO: 885179 - DNA, 120 bp, Artificial Sequence
  ENSG00000206337_5 (sequence is synthesized)
gaacacaggaatggtcctgctttggtgtccctggtgtgacccatcacccgctgggaacagcctgagagaagtagggcctctgcaccaatgctgctgaggatgtcagagcacaggaacgag

SEQ ID NO: 885180 - DNA, 120 bp, Artificial Sequence
  ENSG00000206337_6 (sequence is synthesized)
gccttgggaaattacctggaaatgcgactgaaatcttccttcctgaggggtctgggctcttggaaatcaaaccctctcaggttgggtggctggacgattctcctcacacttacaatggga

SEQ ID NO: 885181 - DNA, 120 bp, Artificial Sequence
  ENSG00000206337_7 (sequence is synthesized)
ctcctaccctcattgtgtgacagcagccatgcctcctcctggggatcaggatctattacctgtgcctggagaggaggggactcctcttctcacccgctggtctctggacacatactgtcc

SEQ ID NO: 885182 - DNA, 120 bp, Artificial Sequence
  ENSG00000206337_8 (sequence is synthesized)
aattcccctgtggcagctgtaatgtgtagttcaatgggcactcatttgtccccttttaagggtaccctcctttagaatccaggaccttctaccctgcagagtgtggttttgggagagaag

SEQ ID NO: 885183 - DNA, 120 bp, Artificial Sequence
  ENSG00000206337_9 (sequence is synthesized)
tgcaaaatcccacgacaggtgagttgaaggaatgggatatggagccacatccacttccaccccttggtatctggacccacgtgttcttcctactgagattacagaactgtagagatgtct

SEQ ID NO: 885184 - DNA, 120 bp, Artificial Sequence
  ENSG00000206337_10 (sequence is synthesized)
ttgatttttaaaatgcaccatgtcctgaaagatggcaccctcccacccgcagagtgcttcctgcaagctggcgttgagctgtgcctatagaagctcttttcaacattctttatggccagc

SEQ ID NO: 885185 - DNA, 120 bp, Artificial Sequence
  ENSG00000206337_11 (sequence is synthesized)
agcccttggttggtgcagatggtgataggaccagtgggtcccacagcatggccacactgcacctccttcgctgtcaagtgggtcccccacgaagatactgcacggagagcagtgccaagc

SEQ ID NO: 885186 - DNA, 120 bp, Artificial Sequence
  ENSG00000206337_12 (sequence is synthesized)
agtggtgctggctgagggtctgagagcaggacaggaaaacccacctatggaataggtgcctatccctgtgaagatgaacctctggcccttccaggatggaaggagtgcaatgtagtcaac

SEQ ID NO: 885187 - DNA, 120 bp, Artificial Sequence
  ENSG00000206337_13 (sequence is synthesized)
tcctcacttagggtctggttggtcacctaaagaaatagagccctaccagggaagatcattgggttcaaatgctgatgagtaggacatttagaggtggcagtgtctggatctaccttggta

SEQ ID NO: 885188 - DNA, 120 bp, Artificial Sequence
  ENSG00000206337_14 (sequence is synthesized)
ggagggagtcagtactgttggacccataggtagcctcatccctgccactgtgtttgctccatttatgtacccatcctacccggcctgggctgacccatggggaaggctggctaatttcag

SEQ ID NO: 885189 - DNA, 120 bp, Artificial Sequence
  ENSG00000206337_15 (sequence is synthesized)
tgcttctgcttggttgttcagggccatttcaggtttgggtgttttctggggatgttaacatgggattcaggctcaactcacaagaaacttttccatctcatgatggatgctgttgggcat

SEQ ID NO: 885190 - DNA, 120 bp, Artificial Sequence
  ENSG00000206337_16 (sequence is synthesized)
gtccaatgtatgacttcatgagttacacagatgctaattcgtaggggcacttggaatcacatggttgttttgtgtcccatggtcaagcattctatcttatcagggcctacagtaacatgc

SEQ ID NO: 885191 - DNA, 120 bp, Artificial Sequence
  ENSG00000206337_17 (sequence is synthesized)
caaaagttgcttccaacatatttctctgctttggatggggcatatttctgtgctgtggatgacatggccttactccagaatcccaggccctccactgtgactctcctactggtgcttggt

SEQ ID NO: 885192 - DNA, 120 bp, Artificial Sequence
  ENSG00000206337_18 (sequence is synthesized)
tcagctccaccccaaatcttaccccaccactggcactttcagcaccagggggtctgaaggatggtgactgcgccatggcctggatctgctgcagtgtcctttcctgtggaggctccactc

SEQ ID NO: 885193 - DNA, 120 bp, Artificial Sequence
  ENSG00000206337_19 (sequence is synthesized)
aaagctggcatcctcctatgtcacctagagtgtgggtcaaagcaatacacctacatgtagaatgtgatgtcagaactcaaacaggctcaccaggcagtgtgcttccttccttgcatgagg

SEQ ID NO: 885194 - DNA, 120 bp, Artificial Sequence
  ENSG00000206337_20 (sequence is synthesized)
atgcaagatgcaacagtttgtctttcacattggaagggacacccctggatgcccctaaccactagacctgtaaaacttcactgcagtggccacttctgaatctctgtaaggtttatttat

SEQ ID NO: 885195 - DNA, 120 bp, Artificial Sequence
  ENSG00000206337_21 (sequence is synthesized)
cttcaccctctggagagaagatgttttaccaaagcctctagtgtaccttcctcctcttactcatccatcccagtcaacatgatgttgtcaatgaaataaaggaatttaatattctatagt

SEQ ID NO: 885196 - DNA, 120 bp, Artificial Sequence
  ENSG00000206337_22 (sequence is synthesized)
tttcttttccggaccctgcagtggcgcctaaagtctgagagagggaagtcgcctctgtgctcatcagccaatcagtgtcgccgcggttcctggttctaaagtcctcgccggcccaccggg

SEQ ID NO: 885197 - DNA, 120 bp, Artificial Sequence
  ENSG00000206337_23 (sequence is synthesized)
ctcaaggcaggagtgggactggccattctcagcccgtgacctccatggacttggagaaaggctcagcctggagatgtgtgaggcctccgacctggagcagcacccgcccctaaagaccag

SEQ ID NO: 885198 - DNA, 120 bp, Artificial Sequence
  ENSG00000206337_24 (sequence is synthesized)
gcacaaatcccagcacatggagggatccagacaaatacacaagagatgaccacagcaggagctttactgggcacagagcgaggccacacaccactcagctcctgcccctccacctgccct

SEQ ID NO: 885199 - DNA, 120 bp, Artificial Sequence
  ENSG00000206337_25 (sequence is synthesized)
tctctccccacctgcccctgccccagcacagcagatcctcagaatccaaaaagagaacctaacttccatgttttattaatggcttataatattttatcacatcttcagaaaacactatgc

SEQ ID NO: 885200 - DNA, 120 bp, Artificial Sequence
  ENSG00000206337_26 (sequence is synthesized)
agatctgggagggagaccctgtaaccctttcattccaagaaaagaaaggtcgatccaaagaaggggaccccaggcctggatattgggattacatgaaaggggttctggggcatcagggga

SEQ ID NO: 885201 - DNA, 120 bp, Artificial Sequence
  ENSG00000206337_27 (sequence is synthesized)
atgggtccctctccctacatcctcccggggctgtgcttgggaggacagcagctgggggaagaaaagtcagggtccacagagatataagggggctgagaactatctgtgtcttgctggtct

SEQ ID NO: 885202 - DNA, 120 bp, Artificial Sequence
  ENSG00000206337_28 (sequence is synthesized)
gcacaaggcagctctcaaactgtggagaacatggtaatgaccagattcagctcagccactctcagcctttacacctagagcattatgggcagcccatcaccatcccctaccttcaaatcc

SEQ ID NO: 885203 - DNA, 120 bp, Artificial Sequence
  ENSG00000206337_29 (sequence is synthesized)
aaagatcgctacagcccaaagctgctccctggcctcaactcctgttggtatcaggccccaaggaagctgtgagcacgtctgcctgggaccctgtcaccatctggagaatgacaataaaga

SEQ ID NO: 885204 - DNA, 120 bp, Artificial Sequence
  ENSG00000206337_30 (sequence is synthesized)
ggacccagcagcctgcaggaggagactgtatttgaggcaggaccatgggatgggtgaggcacaggactgtggctccatcctctctatttgaggagttagagatgagctgcctctgccacc

SEQ ID NO: 885205 - DNA, 120 bp, Artificial Sequence
  ENSG00000206337_31 (sequence is synthesized)
ccttccatggtgatatttctagagtacacccctgtgctgaaattcttatgaggaaagagacctgatgagatgctatggtgaagaggggccataagggtcttgaataccaagttaattttg

SEQ ID NO: 885206 - DNA, 120 bp, Artificial Sequence
  ENSG00000206337_32 (sequence is synthesized)
ctaccagctgagattaggaagtgaagcccaggacccaggagaggaggaggaggagataacacaggaccctgtgatcactctcctggccatctgtgtacagtgagatgcttcccttcgggg

SEQ ID NO: 885207 - DNA, 120 bp, Artificial Sequence
  ENSG00000206337_33 (sequence is synthesized)
ttgggagcacccagtgtcatggtcctgagtgttgctaccctgctgttctcatctgtgaatgcagccagaccactttcttcctctgatataaataacttggaggatctgtcaccagacacc

SEQ ID NO: 885208 - DNA, 120 bp, Artificial Sequence
  ENSG00000206337_34 (sequence is synthesized)
tctttcttttccggaccctgcagtggcgcctaaagtctgagagagggaagtcgcctctgtgctcgctagtcaagtgaaacagtgggagtgaagaagaaacaaagacatctataactggtt

SEQ ID NO: 885209 - DNA, 120 bp, Artificial Sequence
  ENSG00000206337_35 (sequence is synthesized)
gtgatcaattagttgtaaacactgcactcagaccagcctgggaagattttaaggatatggtgtggtctgatgggttccaaggcagaggttacaatagcctggaagagggagactgcttag

SEQ ID NO: 885210 - DNA, 120 bp, Artificial Sequence
  ENSG00000206337_36 (sequence is synthesized)
gcagtggcatcctggtgggatagggtgaggagatcccagagcccacgtttactgcaaccctggggagatgtcaccagagaaatgggggtggtgccagacagcagattgtggcagctgagg

SEQ ID NO: 885211 - DNA, 120 bp, Artificial Sequence
  ENSG00000206337_37 (sequence is synthesized)
ttttccacggtagagtagaagcatccatcatgtgtgacattcagcagatggggcgctgtgggtggcttggagcactctggttgtaactgaggcaggcaccgtgtttaggaaggctgtgca

SEQ ID NO: 885212 - DNA, 120 bp, Artificial Sequence
  ENSG00000206337_38 (sequence is synthesized)
tcagaagggaccaaggatggtgatgttcttaagagaaactgaggaggaagagaggatgatatggtggcagacgtatagagagtctttgtagatctctcacattggaggggactatggtcg

SEQ ID NO: 885213 - DNA, 120 bp, Artificial Sequence
  ENSG00000206337_39 (sequence is synthesized)
gaggtacagatgtcctaaggcaggctggaaaagggagtctggagagagcttggtgttgtagtgaaccacagggagccgcctccttggccctgtgatcacccagggactgaatagagaggc

SEQ ID NO: 885214 - DNA, 120 bp, Artificial Sequence
  ENSG00000206337_40 (sequence is synthesized)
ggccctgggagacttcagacacttagaggatataagggggtgaaaggggggcctggctttgagtcaaagggaggagaaggagattataaagctgaaacgtctaagagagtttgtggtctg

SEQ ID NO: 885215 - DNA, 120 bp, Artificial Sequence
  ENSG00000206337_41 (sequence is synthesized)
agcggttctactgcggcaggtgcttctgagaggcagaggtggctgagatctggaaacaggtctgcaaatctggtcactggtctcattgccagtaacgctgtgcgcggttgagggagtgtg

SEQ ID NO: 885216 - DNA, 120 bp, Artificial Sequence
  ENSG00000206337_42 (sequence is synthesized)
agattctccccagacgccaaggttgcgggtcatggagtcccgaaccctcctcctgctgttctcgggagccgtggccctgatccagacctgggcagaaatgatctcatttttacattacaa

SEQ ID NO: 885217 - DNA, 120 bp, Artificial Sequence
  ENSG00000206337_43 (sequence is synthesized)
ctctggaaaaggcaatagactgagatgcaagtgtgcccccaagtgatgggcagaaggagagaaggtgttttggatgcattctagaacacaggtaatctaaggagagttgatcaaggccgt

SEQ ID NO: 885218 - DNA, 120 bp, Artificial Sequence
  ENSG00000206337_44 (sequence is synthesized)
gaattataatagccctgaggcaaactatgaattaaagtgttgtggatcccacatgaatcactttatatccacttttgtgtgtgtgtgtgtgaggcagagtcttactctgtcacccaggct

SEQ ID NO: 885219 - DNA, 120 bp, Artificial Sequence
  ENSG00000255041_0 (sequence is synthesized)
cctgatgcaggcctcaccctcctgtcagcacccacagcaggaactctcatgcggggtaggagggggagcttaggaacttagacccagctggttctagacctggctctactgcttagcagc

SEQ ID NO: 885220 - DNA, 120 bp, Artificial Sequence
  ENSG00000255041_1 (sequence is synthesized)
caagacacttcagtttccttgtatgtgagatgggagtgttatcgatgtgtaacacgcagagctgggcagtgtccctcttgctcacaagatctgaagtccatgagggcagggatcatgagc

SEQ ID NO: 885221 - DNA, 120 bp, Artificial Sequence
  ENSG00000255041_2 (sequence is synthesized)
ctacccctccctgctccagagtataacatccttgggacctaaaacagagcctggcacaggggtatgtcccagcacgagtctgtgggcgcatgaattagtgaagtctggattggctttttt

SEQ ID NO: 885222 - DNA, 120 bp, Artificial Sequence
  ENSG00000255041_3 (sequence is synthesized)
tctagtgcctggtctgtgtttggtaaatgcccctccctcctcctgttggcctgtttttgacaagcatttcttggatgcccgacatgtgctgggcattggatatggggcttcacttgtagg

SEQ ID NO: 885223 - DNA, 120 bp, Artificial Sequence
  ENSG00000255041_4 (sequence is synthesized)
agtagatgaatagagtcactcattcatgcatttcttcaactcatgcaagattctgggcatctctctgccgtcaccctttgcgagctcttcctccttttcaaagaggctctggcagaaagg

SEQ ID NO: 885224 - DNA, 120 bp, Artificial Sequence
  ENSG00000251448_0 (sequence is synthesized)
acacagaaagccctgaggactgaaaccctgcatgggtacattttgatggggcaggaagaaaagttctggagtgtggagagcagaggtccagagcattcactgatttagccacagaagaaa

SEQ ID NO: 885225 - DNA, 120 bp, Artificial Sequence
  ENSG00000251448_1 (sequence is synthesized)
cagatgcggaaaccggggcacagcaggcgaagtgaaacttcccatgttccagcaaagcccagtccataacgtgaggctttgtgaggtttgtgtgtgcgaccttcaccccttcacctggac

SEQ ID NO: 885226 - DNA, 120 bp, Artificial Sequence
  ENSG00000251448_2 (sequence is synthesized)
cctctctttgtcctcctttcgcacccagtgatgtgtggcctggatcacttccctgccctcaagtcttgccctggcctgacgttcagcggaccctccgtgcattaaggatggaggatggtt

SEQ ID NO: 885227 - DNA, 120 bp, Artificial Sequence
  ENSG00000251448_3 (sequence is synthesized)
ccttgtgcttcctctaccaggtgcacttgtatctgctcggaattctggaagagcaaagacccactggccccactaatccatctattgatcctgccccggtcagcaggctgggtctagcct

SEQ ID NO: 885228 - DNA, 120 bp, Artificial Sequence
  ENSG00000251448_4 (sequence is synthesized)
ccacactgccgctgctcagggtctgtggaggaagtcgctgcagccattcagccagatgaatcgcaattaataaatgtggaacgaatgagagacgaagacgatgagcaccagaggactgca

SEQ ID NO: 885229 - DNA, 120 bp, Artificial Sequence
  ENSG00000251448_5 (sequence is synthesized)
gggagcacggctgaggcaacatcaccagaggatagtaaaattagcagacagagatctaagcacaaacagtgtctctgtgtagccttaaagcatctctttgaatatttaatggttacaaag

SEQ ID NO: 885230 - DNA, 120 bp, Artificial Sequence
  ENSG00000251448_6 (sequence is synthesized)
gaaaaacagtgagttgatgggggagaaccctggcaggcaccaccctaaccaagagatcaaagttggcatgaccaggcacaaggcacactaacagcccacacccactgatctggcccaccg

SEQ ID NO: 885231 - DNA, 120 bp, Artificial Sequence
  ENSG00000251448_7 (sequence is synthesized)
aaaatgcacatcacttctgtggcattgccacggaatttccaaaaaggcattacctcagtccaatgcagagaaggcgtcaggcagacctaggcggagagactgtccaagagcgacagaccc

SEQ ID NO: 885232 - DNA, 120 bp, Artificial Sequence
  ENSG00000251448_8 (sequence is synthesized)
ggagctgggaacagaggagggcactgggaggggcctgcctgccgtccagctctcgagaccacggcgagattcagaagggaattgggccattccttctccaaagcagaacgtactgcagct

SEQ ID NO: 885233 - DNA, 120 bp, Artificial Sequence
  ENSG00000251448_9 (sequence is synthesized)
gtgagagttctaggagaaaattcagatgaactttcaaatcagcttctcaagtgtcaacatcctgttgcgattttcattgatattgaactgaatttatagattttgtaagcagaaaaaaat

SEQ ID NO: 885234 - DNA, 120 bp, Artificial Sequence
  ENSG00000251448_10 (sequence is synthesized)
tattttaattttttgagaaaaaaagttttaaatggtttgttttcagactgtgtcaagatatccctacctccgaagttgtcaggtttgcggaccttggggtgaagcgtggggctgctggag

SEQ ID NO: 885235 - DNA, 120 bp, Artificial Sequence
  ENSG00000251448_11 (sequence is synthesized)
gcgtccagccctgactgtgtgtccaggacaatgagccccgaagtgagcgggccgcgtcctgttggcgcagccaacttcacgccctctgtccagggaggactaagggacaagctgcagcag

SEQ ID NO: 885236 - DNA, 120 bp, Artificial Sequence
  ENSG00000251448_12 (sequence is synthesized)
gcgcagaggacgctgttggtgtccgggaggccgctggtacagggcgttgggcgtggctcctttccaagtgccttgcactttccaggctgggctgcagaagcaggctcgggggcgactcgc

SEQ ID NO: 885237 - DNA, 120 bp, Artificial Sequence
  ENSG00000251448_13 (sequence is synthesized)
gtggggactgaagcagccagccttggcacctgcccacagcaaataactgccttgacttgatctggtttttttgaagaaaggtttattcatacccattatgtgcgcatgtgtaaattcaaa

SEQ ID NO: 885238 - DNA, 120 bp, Artificial Sequence
  ENSG00000251448_14 (sequence is synthesized)
cccacggcttgccggagcctgggctttctcgaacatcagttgctcccatgctaccattttgcagtttgcccgtctccagtagatgatttctgaatattttaatcaactcattattaacca

SEQ ID NO: 885239 - DNA, 120 bp, Artificial Sequence
  ENSG00000251448_15 (sequence is synthesized)
ttcacacgtctaccttagcctcattttaagcaattgcacctgtgggtttcacaggcctgctgtatttttagtacatattaaataaagcatgtctgttggggcgtgctgtgcttgcccacc

SEQ ID NO: 885240 - DNA, 120 bp, Artificial Sequence
  ENSG00000251448_16 (sequence is synthesized)
gtctgcatccaagcatccctgtgctttccctgtgagctggcagtccccactatgagattctagcctgggaatgtgctatagggaagcttacagcagcagatcatagaaaagcaaaataga

SEQ ID NO: 885241 - DNA, 120 bp, Artificial Sequence
  ENSG00000251448_17 (sequence is synthesized)
aatgtgaaaggaaaataaaaacttgggacccctactccctccgccaaaagaaaaaaaaaatgctgaaagtggagtcatgcaagaagctgcctttccctttgttcctaagcagatagagac

SEQ ID NO: 885242 - DNA, 120 bp, Artificial Sequence
  ENSG00000251448_18 (sequence is synthesized)
agataaaaggttaaagatctccactctgcattcaccttatcttgtgtgaagagtcgagttactgagcatgggacgaacacataactgaccattcccctacatgctccttttcttttgcaa

SEQ ID NO: 885243 - DNA, 120 bp, Artificial Sequence
  ENSG00000251448_19 (sequence is synthesized)
catttggattcagtaatgtgaccataccctccctctgtcccctccagctggctttttcctttaaatactgaagccctcgaaatcatctttggagaaaggcacagacctgtctcccaagac

SEQ ID NO: 885244 - DNA, 120 bp, Artificial Sequence
  ENSG00000251448_20 (sequence is synthesized)
gtgtccttaatcttggcaaagtaaacttctaagttgatcgaggcttgtctcagatattttcaggtttacagaaagaaattcaatttcagtcacaaacggaatgataaaataagttgttac

SEQ ID NO: 885245 - DNA, 120 bp, Artificial Sequence
  ENSG00000286678_0 (sequence is synthesized)
ctctctcactttcaccccgtcttatattctccttaagcttgcttcgttagccgacacacattctagaaatcttcctctttttctttatcctcttaatcttttcttcttttcttgccctcc

SEQ ID NO: 885246 - DNA, 120 bp, Artificial Sequence
  ENSG00000286678_1 (sequence is synthesized)
caacatacggttcacacccccatatcacacccctcaaactctccatatccatgtccccttacactcacaccccctacacacacgcacccctataactagatatccatcccacatacacta

SEQ ID NO: 885247 - DNA, 120 bp, Artificial Sequence
  ENSG00000286678_2 (sequence is synthesized)
ggaccctctgtgtctctccctgcctcttcactgaggaaacccagcctttgtaaaatcaggctgagcaggccagctgaagactgcccatctgattgcaatgctattgagggatgaatatgt

SEQ ID NO: 885248 - DNA, 120 bp, Artificial Sequence
  ENSG00000286678_3 (sequence is synthesized)
ccaggctctagagctcatggaattccttcaacccctcaagcagcattgaatttgagctgcacaaagaagaaagaaaaagagaaaaagcaagctgatcgcaggtgacaactggagttccct

SEQ ID NO: 885249 - DNA, 120 bp, Artificial Sequence
  ENSG00000286678_4 (sequence is synthesized)
agcaagccacatcatgagtggcagagccttcctgcagccctggaccactcagctatagactttcacatgagagagaaaaacaatcctccgcagtttaagcagctgtgttttgagtctttc

SEQ ID NO: 885250 - DNA, 120 bp, Artificial Sequence
  ENSG00000286678_5 (sequence is synthesized)
tgtgagaggaaattaaccgttagtctaaccaatatggaaatcttcctataaggatctaagaagttagaaagtaattaatactatcatcaggaaaaaagttagaaacagcaatgggattgt

SEQ ID NO: 885251 - DNA, 120 bp, Artificial Sequence
  ENSG00000286678_6 (sequence is synthesized)
attgaaagaagacaggctaaggagcctggcagacctggatttgaatcccagctctgttgcttaccagttctgtaattttttttgtttttggttttgttttttggtttttttgttttttgt

SEQ ID NO: 885252 - DNA, 86 bp, Artificial Sequence
  ENSG00000286678_7 (sequence is synthesized)
tttgttttttgttttttgtttttgagacaatgctgatctcggctcacagcaacctctgggttcaagtgattctcccatctcagcct

SEQ ID NO: 885253 - DNA, 120 bp, Artificial Sequence
  ENSG00000286678_8 (sequence is synthesized)
ccaccatgcctggctaattttttgtattaacggatcatttaccctgtgtctgtttgctcatctataaaatagcaaaatgctatctggtttagttgtgaagaagagatcaagatggaaaag

SEQ ID NO: 885254 - DNA, 120 bp, Artificial Sequence
  ENSG00000286678_9 (sequence is synthesized)
tcaaaatgcatcattgaaagaatcaattcaaggaggacttaagcagtaggactcaaggaggagaggcatttttattattttcatgtgtggggcaatagctctcaacttcagagcctccag

SEQ ID NO: 885255 - DNA, 120 bp, Artificial Sequence
  ENSG00000286678_10 (sequence is synthesized)
cattcccaagttccaaccaatgtgagagagaaggtggttagcaaaatgactaaaagcccaaaggggaaccaaaaacagaaataccttaacataaaggagtgactttcgcgggactgggat

SEQ ID NO: 885256 - DNA, 120 bp, Artificial Sequence
  ENSG00000286678_11 (sequence is synthesized)
caggagacatttctttctggtcctagagtcaagaagaattgtgcctaatggacactgtaaattttatagctgagcaagtctccctcttggccttgactgctgaaaaactcaaagccaaat

SEQ ID NO: 885257 - DNA, 120 bp, Artificial Sequence
  ENSG00000286678_12 (sequence is synthesized)
ttgactcctggaaaatgcaaaggtgttacacctagctggtaagacaagctcttttctgtttgcttaattcctgacttcatcttacatctctaacctgaatgattttttttctctttcttg

SEQ ID NO: 885258 - DNA, 120 bp, Artificial Sequence
  ENSG00000286678_13 (sequence is synthesized)
cttcttccaatttgtgttctctcctggtatattatgaattcctataagactcttaaattttttcttggagcaaagaatgaatgaatggatggatgggtaaatgagggaataacatcctca

SEQ ID NO: 885259 - DNA, 120 bp, Artificial Sequence
  ENSG00000286678_14 (sequence is synthesized)
cagatggtcagtccaattgcctaatcttgatatttgcagtgattagaagctccccatctgataaaatagtccatttcagcttcattattagaatattctggcttacacagttgatatctg

SEQ ID NO: 885260 - DNA, 120 bp, Artificial Sequence
  ENSG00000286678_15 (sequence is synthesized)
cttccttataggaaataataatattattcataacaagaggaattttttgtttttttgtttgtgtttgcttgttttttagaggcagggtctcactctcacccaggctgcaatgcaggggca

SEQ ID NO: 885261 - DNA, 120 bp, Artificial Sequence
  ENSG00000286678_16 (sequence is synthesized)
ggcagggtctcactctcacccaggctgcaatgcaggggcacagtcacagctcactgcagcctcaaattccttggggactactcaagcaatcctcctgtctcaccctcccaagtagctggg

SEQ ID NO: 885262 - DNA, 120 bp, Artificial Sequence
  ENSG00000286678_17 (sequence is synthesized)
ctcaaaaggttaaacatagagttattgtataatccgtcaattctactcctaggtgtatacccaagataaatgaaaacatatgtccacaaaaaacccactttgtacacaaatgtttatcgc

SEQ ID NO: 885263 - DNA, 120 bp, Artificial Sequence
  ENSG00000251442_0 (sequence is synthesized)
aaagaagcagaaggatattaaagtgagcctcccaaaggaaaacgtggatctacttaccaacgcagaaaatgatacacacggattcgatttaggcacgctacattcaaatgacttggaaga

SEQ ID NO: 885264 - DNA, 120 bp, Artificial Sequence
  ENSG00000251442_1 (sequence is synthesized)
gcaggttctctgagccaggatactaaagtccctgtttaggaaagagccacgttgtatgtttaccctaccacaaagatacagtcatgtgcctgggaaagattgatgccagctccagaaagg

SEQ ID NO: 885265 - DNA, 120 bp, Artificial Sequence
  ENSG00000251442_2 (sequence is synthesized)
catccgaatggtctaagtaatgccatccatctgtcagtaatagattcagaaatggaattctggaggaaagtggctctgggaattgaacagtggctcagtgatgttggggccaccaagtct

SEQ ID NO: 885266 - DNA, 120 bp, Artificial Sequence
  ENSG00000251442_3 (sequence is synthesized)
gcaattctccctacctgttcttcatggttgtaagatgactgctgcaattctcggcatcatgtgcatgttaatgtcaggaggaagaaaggaagagggagcactgggatgttacattcattt

SEQ ID NO: 885267 - DNA, 120 bp, Artificial Sequence
  ENSG00000251442_4 (sequence is synthesized)
tgtcaggaaaagcaaagcctttccagacagctccgaaacttgcttacctctcattggccagcaccatcacttgaccacttgtccactcctagctgcaaggaaagtggcaaagtagaaggt

SEQ ID NO: 885268 - DNA, 120 bp, Artificial Sequence
  ENSG00000251442_5 (sequence is synthesized)
atttgagaatgtctgctgggttagccaaaacaatagtgacttctacacccaattttctgggcactgcagaagtatccttgagtcctatgtgatcagagggagagcaaacctcaataatga

SEQ ID NO: 885269 - DNA, 120 bp, Artificial Sequence
  ENSG00000251442_6 (sequence is synthesized)
aacagattcaatttccatcacccagtgagacaccatgggattagaataaatttttaaaaaaacaaattgaaaaaaatgcatttttaaaacaacaaaatcagaaaggatgaaaggtgatat

SEQ ID NO: 885270 - DNA, 120 bp, Artificial Sequence
  ENSG00000251442_7 (sequence is synthesized)
ttctagcatatcagtttgtggtggtaaattaattaccttatacaaaggcctcagtgactttcttctccttacctaacgaatcatctttaaaataagtaaaataaagaaacaagagcagca

SEQ ID NO: 885271 - DNA, 120 bp, Artificial Sequence
  ENSG00000251442_8 (sequence is synthesized)
gcagatgcttcctaaaaagaagttaccaaatctgttcaccacaaacctgagaattcaactgtggacatttggacaccagcaatgaacatgaaactcagcttatgaggcatatttggctaa

SEQ ID NO: 885272 - DNA, 120 bp, Artificial Sequence
  ENSG00000251442_9 (sequence is synthesized)
tggactccttccaagtctcatttaattggataatgcctacgttttaagtatcagaagtgagtctttctctattaaatgaagtcagttccactaaaacctaaatcttgtttggcaggcact

SEQ ID NO: 885273 - DNA, 120 bp, Artificial Sequence
  ENSG00000251442_10 (sequence is synthesized)
ccatgtttcttaatttttattccatgctgtatattcttttagacttgattttcacttttttttcttttttcctgtacatttatctttgctgtgaaacaaagtgccctgctttgaaggaca

SEQ ID NO: 885274 - DNA, 120 bp, Artificial Sequence
  ENSG00000251442_11 (sequence is synthesized)
ggtttgtgggctgctggtggtgagacaacagcagtccttccaagtcttcctcccatcactctgttagctctccctttgtttttaattagcattacaccagttaattctgttatctcttaa

SEQ ID NO: 885275 - DNA, 120 bp, Artificial Sequence
  ENSG00000251442_12 (sequence is synthesized)
ccctggttctgcatcctcttcttcttttctattccttactccgctcctgttttttcttgttctgcttttccaagaaatgtcttgtctcctcatcagttgactgtcttctctttccagagg

SEQ ID NO: 885276 - DNA, 120 bp, Artificial Sequence
  ENSG00000251442_13 (sequence is synthesized)
gaccataaaggtgccagcctaaggaacacgtaaaacgtgggaacagacaaacaagctgctgcctattacagagatagataattaactttggaccattacatgcaattcatcagcttatct

SEQ ID NO: 885277 - DNA, 120 bp, Artificial Sequence
  ENSG00000251442_14 (sequence is synthesized)
ttttcaaactttatataagaagtcatttcccaatggtaaccacttgccagctgcaactttgacgcatattatcaggataggtgagattgatgggggccctttgaactcttcccagggaat

SEQ ID NO: 885278 - DNA, 120 bp, Artificial Sequence
  ENSG00000251442_15 (sequence is synthesized)
tatctttataatgttacagttttctctatagcatggtcatattgttaacattggttataaggtcatatggttagtatggttagtattggtggctcacagctgtaataccagcactttggg

SEQ ID NO: 885279 - DNA, 90 bp, Artificial Sequence
  ENSG00000251442_16 (sequence is synthesized)
aggccaaggtgggaggatcacttgagccctggtgttcaaaaccagctctggaaaattaaataaattaaaagattagctgggcatggtggc

SEQ ID NO: 885280 - DNA, 89 bp, Artificial Sequence
  ENSG00000251442_17 (sequence is synthesized)
gggcatggtggcacatgcctgtagtcctcactacttgggaaactaaggtgggaggatccttgtggttgtgccatggcactccagcctgg

SEQ ID NO: 885281 - DNA, 120 bp, Artificial Sequence
  ENSG00000251442_18 (sequence is synthesized)
tcagaaatggagatccacaggaatccagccttttgctccttgaatgggataaggaagcacataatcccagttgctcttccagtcatcccagacccacagccctgctttagccatcctata

SEQ ID NO: 885282 - DNA, 120 bp, Artificial Sequence
  ENSG00000251442_19 (sequence is synthesized)
gccatcatatattcacaaggggagagcaactgaggacaacactgtggatccttgtgacataaccaagccagtgaaccaatcaatacatttatttattgtttgagccattgtagttgagct

SEQ ID NO: 885283 - DNA, 120 bp, Artificial Sequence
  ENSG00000251442_20 (sequence is synthesized)
tacgttactggcagctgaaagctgaaagttattctatctgccaatcctcatcttgcacgtctcttagttttgctcttatctctccttttcctctttttcacacataaatcccaatctttg

SEQ ID NO: 885284 - DNA, 120 bp, Artificial Sequence
  ENSG00000251442_21 (sequence is synthesized)
ttccaactcacactgtcaacactctgacctttccctcttgctttcttttcctcttctctctgtccctctcccttttgcctttctttctgccagtgctacccacaggtatatcttaaatct

SEQ ID NO: 885285 - DNA, 120 bp, Artificial Sequence
  ENSG00000251442_22 (sequence is synthesized)
tattagccatagccatgaccaaagactaggaccaccactaggtataactggattaggtggagttttgctcatttgccctcctttgtactttcgacatcaacatccctcacccctcagcaa

SEQ ID NO: 885286 - DNA, 120 bp, Artificial Sequence
  ENSG00000251442_23 (sequence is synthesized)
tctgaaacatccacccaaaaactatattttcactaaaattcctttggtgataatgccttaacatggtggtttccaaagctttttaaaaccataacccacattaagtatcctcactcagta

SEQ ID NO: 885287 - DNA, 120 bp, Artificial Sequence
  ENSG00000251442_24 (sequence is synthesized)
tacacagaatatacacataggcacttgatatagtctggatatttgtccctgcccaactcttatgttgaattgtaatccccagtgctagaggtggggcttggtgggagggtgtttggatcc

SEQ ID NO: 885288 - DNA, 120 bp, Artificial Sequence
  ENSG00000251442_25 (sequence is synthesized)
ctcatggcttggtgctgtcttcacaatagtgagttctctagacatctggtcatttgaaagtgtgtggcaccttccccctctccttgcttctgctctgactatgtgacatgcctgctttcc

SEQ ID NO: 885289 - DNA, 120 bp, Artificial Sequence
  ENSG00000251442_26 (sequence is synthesized)
tgctttccttttgccttctgccatgatcataagcttcctgaggacttcccagaagtcaagctgatgctagcatcattgcttcctgcaaagcctgcagagctgtgaacctcttttctttat

SEQ ID NO: 885290 - DNA, 120 bp, Artificial Sequence
  ENSG00000251442_27 (sequence is synthesized)
gaattatccagtctcaggtatttctttataatgtgaaaggaaaataaaccttggggcccccaaatcactaagctaaatggaaaagtcaagctgggaactgcttagagcaaacctgcctcc

SEQ ID NO: 885291 - DNA, 70 bp, Artificial Sequence
  ENSG00000251442_28 (sequence is synthesized)
gaaaccattcatttgtctctcgcctatctgtgacctggaagccccctctctgcttcggcttcaaggcttc

SEQ ID NO: 885292 - DNA, 120 bp, Artificial Sequence
  ENSG00000251442_29 (sequence is synthesized)
tgacctggaagccccctctctgcttcggcttcaaggcttcctgcctttgcttcaagttgtcgcgcctttccagacccaaccaatgtacttcttacatatactgattgatgcttcatgtct

SEQ ID NO: 885293 - DNA, 120 bp, Artificial Sequence
  ENSG00000251442_30 (sequence is synthesized)
tcatgtctccctaaaatgtataaaactcagctgtgccccagccaccttggccacatgtcatcaggactccctgaggctgtgccgcaggctcatcttcaaccttggcaaaataaactttct

SEQ ID NO: 885294 - DNA, 120 bp, Artificial Sequence
  ENSG00000251442_31 (sequence is synthesized)
gcattttggccattgtggtgaagctggggcacattttatcttcagtaccaactgttggcagtctttttttttttctgctacttgagtttcatttcctttcacacagtggctagatacttt

SEQ ID NO: 885295 - DNA, 120 bp, Artificial Sequence
  ENSG00000251442_32 (sequence is synthesized)
cgttccagtttcttcttttacttaaagttgtcctctctacaagaaattctgttctgtcttcctgaggctgctgtttctgggcatggccaggggatcttcagactttacaaaccagttgtg

SEQ ID NO: 885296 - DNA, 120 bp, Artificial Sequence
  ENSG00000251442_33 (sequence is synthesized)
tttttttttttttttttctgttcagagcttcctgcttggtgtttgcctaagtagggaggaaagccattgtttgaactttgcaacaacagattgcaagctaaggcttttctacactttgtt

SEQ ID NO: 885297 - DNA, 120 bp, Artificial Sequence
  ENSG00000251442_34 (sequence is synthesized)
taattttcctgaaatgttcctttttacagaaaagatctgttgttgacctagcatgctttttgtcttactcaatactcccctggggatgtagttaaaacaacacttagctgtaattctcct

SEQ ID NO: 885298 - DNA, 120 bp, Artificial Sequence
  ENSG00000251442_35 (sequence is synthesized)
gggtggagaagtgtttggtggtggcaatgaaactaaagcacagatttgagcaactgtgggctgttgactttatgctagcctttcataaagagaaacctcaaaacaccgtggccattcagc

SEQ ID NO: 885299 - DNA, 120 bp, Artificial Sequence
  ENSG00000251442_36 (sequence is synthesized)
gggctattaacacaggtttgagtcaggctgaccggagctgtaaagcccttctcgttctcactgtgtgttcttttcagttctgtcttcctgaggctgctgtttctgggcatggccagggga

SEQ ID NO: 885300 - DNA, 120 bp, Artificial Sequence
  ENSG00000251442_37 (sequence is synthesized)
aaaaaaaaaaaaaaaaaaaagtacctgtaaggtctttgggattttgaagatgaaaggtgttgcataaattgaatgaattcacttagagagatagaaggcaactacagggaatattacgta

SEQ ID NO: 885301 - DNA, 120 bp, Artificial Sequence
  ENSG00000251442_38 (sequence is synthesized)
catcatggagcggaaagcactaaggcctgtggaattattctcagtgacacgtcgttgagggcagtggtccacatgttttgaacatggtttctcccaggtgaaaaggatgagtaatttgtt

SEQ ID NO: 885302 - DNA, 120 bp, Artificial Sequence
  ENSG00000251442_39 (sequence is synthesized)
ctccttcacatgtgtgtatgtaggtcttatacacagcagatttgccacaaaacaaatgaagattacactttgggcccctctctcacatgagccccttccaaagttctgtttgctaatttt

SEQ ID NO: 885303 - DNA, 120 bp, Artificial Sequence
  ENSG00000251442_40 (sequence is synthesized)
acattttgtaatttcttattatttttcttaaagaagcctcctccaattgcataaacttcaagcctcacaaaatttggatccatacctgagccaacatacaatacaattttccatttctaa

SEQ ID NO: 885304 - DNA, 120 bp, Artificial Sequence
  ENSG00000251442_41 (sequence is synthesized)
gaatggtctaagtaatgccatccatctgtcagtaatagattcagaaatggtgctggcagaggaaacagcagcaatgatgctctgcgagcctgactcagggccagcagtgatggcagccca

SEQ ID NO: 885305 - DNA, 120 bp, Artificial Sequence
  ENSG00000251442_42 (sequence is synthesized)
gactaacacaacactgcaggaaaagttctatgaaacacacttacctttactaccagtgacacattctgatattacatattctgttctatttcatttttaaaaagtgtttgtctgtactca

SEQ ID NO: 885306 - DNA, 120 bp, Artificial Sequence
  ENSG00000251442_43 (sequence is synthesized)
ctaaattgatgtcatggatagttgttgtgaccaccaaaaacacttccttcacccacagcagaaattctggtggtcgtgtgataaacttgtcaaaaagtcctttgagggtaattagactca

SEQ ID NO: 885307 - DNA, 120 bp, Artificial Sequence
  ENSG00000251443_0 (sequence is synthesized)
tggtggacatagaggggagcagcatgccaagcagacatatctactttcctgtctacaaatcccatgctcttttccctataggcactactgagatacagagtaaactatcattgtttgaaa

SEQ ID NO: 885308 - DNA, 120 bp, Artificial Sequence
  ENSG00000251443_1 (sequence is synthesized)
aaactaggaaggagacttcagtcttattgagatatgtatttctgcaggttaggctgaagcctctgcatgtcccgatgcctgatggagatggaggaatcctttctacccagacagaagtca

SEQ ID NO: 885309 - DNA, 120 bp, Artificial Sequence
  ENSG00000251443_2 (sequence is synthesized)
cactatgtagcctgtcctctttagaactgaatccgattgggatttcttcatggtctccaccctggaaaaccagcttgaattcttgtatgcgggccagattccaagagacatcataattag

SEQ ID NO: 885310 - DNA, 120 bp, Artificial Sequence
  ENSG00000251443_3 (sequence is synthesized)
atcccagaagactacatggcagctgaagaggatgtcccctgtggaatatatggaggaaaggctggccaaagcaatgttcacattcatgcaattatccagttaattgcacaagtcaaacca

SEQ ID NO: 885311 - DNA, 120 bp, Artificial Sequence
  ENSG00000251443_4 (sequence is synthesized)
agacttgttctaaagccacaataacaacgaaattgatgctttcatctcccagaaatatggctgtgctgtgatccatgaattttaaattagaagtaaatctagatcaaaacttctcgaagt

SEQ ID NO: 885312 - DNA, 120 bp, Artificial Sequence
  ENSG00000251443_5 (sequence is synthesized)
tgactagtttcacatggaagctagaagaccaaatacaggactatacccataaagaagagtcacctggcatgagaaggtgaaactcatgattactctacaagtcttcaacatgtagttacc

SEQ ID NO: 885313 - DNA, 120 bp, Artificial Sequence
  ENSG00000251443_6 (sequence is synthesized)
attcccaccaaaagagaactctgatccagttattcagtgtgccgtactggcttggaaacattcaatactccccatcaccactacaagcactacagagatccaaagattctcaccccttcc

SEQ ID NO: 885314 - DNA, 120 bp, Artificial Sequence
  ENSG00000251443_7 (sequence is synthesized)
aacatccttaaccaaaagacatattcagaaacaggaaataacaaaagtttcatactctctcttttttattgagacctctgaagacctcccacccaccctcacaaacactcacacacccat

SEQ ID NO: 885315 - DNA, 120 bp, Artificial Sequence
  ENSG00000251443_8 (sequence is synthesized)
gactagaattacagttgttatttcaatgggaagaaatgacgcggggcaggaaatgagaatctgttagatgagaagagcagtcttctcatcctaatatttgagacattcctctttcatttt

SEQ ID NO: 885316 - DNA, 120 bp, Artificial Sequence
  ENSG00000251443_9 (sequence is synthesized)
cctatgactcatgcttctttctttctggcatcttgttggaggaggaggaggaggtgggcaaacccagtgttttgaccaaaaaaaaaaaaatcttaataccaaaagcaatagaaaattcca

SEQ ID NO: 885317 - DNA, 120 bp, Artificial Sequence
  ENSG00000251443_10 (sequence is synthesized)
agaaatgtatggagaaaacaagggctattggtctaaaaatctatagttagtacaaactgacactgggtaactgggtagcttcaagtagtctcagttaacagaattcatgtttgtattgta

SEQ ID NO: 885318 - DNA, 120 bp, Artificial Sequence
  ENSG00000251443_11 (sequence is synthesized)
aaaaggaaagatctagaaaatctgatttaaactaaacaataaacttcaaaaataaaagcaaatttgtctgtttctgagatagggttttggagaatgatgttctaacatttgtttgtaatg

SEQ ID NO: 885319 - DNA, 120 bp, Artificial Sequence
  ENSG00000251443_12 (sequence is synthesized)
gaaaaataagaactaactagatttgtaaatatgcgctgacctgacaaaaaactctaatgaatggcttataacagacatggaaagttatggttgagaaaatttttttcaaaaagaacataa

SEQ ID NO: 885320 - DNA, 120 bp, Artificial Sequence
  ENSG00000251443_13 (sequence is synthesized)
aagctagaagaccaaatacaggactatacccataaagaagagtcacctggcatgagaagtctcgctgtgtcgccaggctggagtgcaatggtgccatctcgactcactgcaacctccgca

SEQ ID NO: 885321 - DNA, 61 bp, Artificial Sequence
  ENSG00000251443_14 (sequence is synthesized)
gagtgcaatggtgccatctcgactcactgcaacctccgcgcaccaccactcccagctaatt

SEQ ID NO: 885322 - DNA, 120 bp, Artificial Sequence
  ENSG00000251443_15 (sequence is synthesized)
cacctcagcttcccaaagtgctgagattataggtgtgtgccagtgctcctggtcaaccattttacttataacaaaaattttgaatgtcaacaatatgcaaggaggttaatagtttttcaa

SEQ ID NO: 885323 - DNA, 120 bp, Artificial Sequence
  ENSG00000251443_16 (sequence is synthesized)
tcaaaattctcttagaagtaaaaaagcaaaattctttgatactatcatattctctaatgttagggcaattctgtggcattttcagcagcttataagcaaatttgcaaaagacaataaggc

SEQ ID NO: 885324 - DNA, 120 bp, Artificial Sequence
  ENSG00000251443_17 (sequence is synthesized)
ttgaaggctgagacccattggaaccatttgtgcttccactattgatctaaaatgccagcatagtctcagaggcctcatcggtatctgagagactgtatgtgagttctgtttcaaatgctt

SEQ ID NO: 885325 - DNA, 120 bp, Artificial Sequence
  ENSG00000251443_18 (sequence is synthesized)
aatccatgttttcactttattatcaaagaattaacagtatttcaccaaatcttacatgaagttatttcctcttttaatttgtatgcaataccatcatcattaacagtgtgtcacaaagag

SEQ ID NO: 885326 - DNA, 120 bp, Artificial Sequence
  ENSG00000251443_19 (sequence is synthesized)
acatgagcacttagaggaaacagaacactctccagagtctctactcccagctcagccacttctagctgagtgaactcagataactctgttgagctctgaaatctgtctttcaatctgtaa

SEQ ID NO: 885327 - DNA, 120 bp, Artificial Sequence
  ENSG00000251443_20 (sequence is synthesized)
aagaaaagaaattaatatctgccttgctacttcactgggtttttgtaataaatgatgttgtatttcttactaaactgtaaagatctatgtaaaacttaaatactatttttagtgaaaaag

SEQ ID NO: 885328 - DNA, 120 bp, Artificial Sequence
  ENSG00000251446_0 (sequence is synthesized)
gagaacatctttttgtccttgagcgggtggtgatagatagagaaaccagctcagagaagggaggatgatgtgagcagagattcaagaaagaggagagcggcacacagctgtctgcgggga

SEQ ID NO: 885329 - DNA, 120 bp, Artificial Sequence
  ENSG00000251446_1 (sequence is synthesized)
gaaccttccaggttggagcatctttgtgagtctccagtgcaaatctgaggcctattaaactgaggcctaggagagcagcctgcacggacccctttccttccctgtgagggaagatgccgg

SEQ ID NO: 885330 - DNA, 120 bp, Artificial Sequence
  ENSG00000251446_2 (sequence is synthesized)
tgaggctcagatgaggttctggggcccatcagagccctgagggcgagtgtgtcctgcctcaggaatcctcccaaggtacccacctggggacatcgagtagacagagcacccccaccgcac

SEQ ID NO: 885331 - DNA, 120 bp, Artificial Sequence
  ENSG00000251446_3 (sequence is synthesized)
ccggccatggcacagcctgaccctgcagccgacctgggccgcgagatgacagcctccacaacaagtgcttgggccgggcctggcatgttccacgtgagcaacacacatttcctgccattg

SEQ ID NO: 885332 - DNA, 120 bp, Artificial Sequence
  ENSG00000251445_0 (sequence is synthesized)
taccattcatcgcgaagggtgtcgtgaagatgaatgccctgtcgaacatcatccagcaggaggtcaaggaattttaactgaatgattgaatagtcttgcaagatctatgaaacaagcttc

SEQ ID NO: 885333 - DNA, 120 bp, Artificial Sequence
  ENSG00000259697_0 (sequence is synthesized)
gtccatagctttcactagcctcctaaatggggttgatgatgctaaaaagttgaaagccagtactttagagttgaaaagttggattcaatgatgggaatagattgattgtttccaaaaggg

SEQ ID NO: 885334 - DNA, 120 bp, Artificial Sequence
  ENSG00000259697_1 (sequence is synthesized)
ttctcttaatatgtctgaatagtaattgctgtgcttctttgtgtagtaaaattcttaatgtggcctgatagctgtacagaacatttgagattgggactgaaaatcttggacatatgtccc

SEQ ID NO: 885335 - DNA, 120 bp, Artificial Sequence
  ENSG00000259697_2 (sequence is synthesized)
tcggtagccattagattatctaattgccattagtgttaaggtgagcataaagcaaattattaactgcatggccctaagaaagtcaccttatctcatgggatctgttacctcatttataag

SEQ ID NO: 885336 - DNA, 120 bp, Artificial Sequence
  ENSG00000259697_3 (sequence is synthesized)
acatttttaaaaggaggaatgtgaccttgaagatttccaaaactcctagtttggattctctagaaaagtgagatcaatgctggacttggatggagcccttttgtggcagaaatgaaccag

SEQ ID NO: 885337 - DNA, 120 bp, Artificial Sequence
  ENSG00000259697_4 (sequence is synthesized)
gctttgcatagaaggaaaaagacagagtgtccaaatgaggaagaggcccagaggatccaagaagcctcttcctccataaatgggaaacacaagcctgctgtggcaaagagccagtgtaat

SEQ ID NO: 885338 - DNA, 120 bp, Artificial Sequence
  ENSG00000259697_5 (sequence is synthesized)
cagggcaggatgagggctactgtgacactttttaacatccaggactctgagggaacagaggctcaacctctacttttcaccctgggactgacttgccagaacacaagttgtccctcagtg

SEQ ID NO: 885339 - DNA, 120 bp, Artificial Sequence
  ENSG00000259697_6 (sequence is synthesized)
agtgaatacaccatctcgcctgcactaagaacttctgattctcataggagaaaatgctttgggtcttcccactttccacatcagctggcttggctgtgtctggaaaatgctgctctccaa

SEQ ID NO: 885340 - DNA, 120 bp, Artificial Sequence
  ENSG00000259697_7 (sequence is synthesized)
gtgcctgaaggcacaagtaagtcctagggtgaagctgtttggaggggtaagagaacagcttacctgtactttaggatatattggaatcccaccccacaacaataactgtcagcataaaaa

SEQ ID NO: 885341 - DNA, 120 bp, Artificial Sequence
  ENSG00000259697_8 (sequence is synthesized)
attttaaaccactattgatacattattataaactattttgtacatcagagttgagtatttgtgtcattgtggtttaaattttcaatttcctaaatgaatagtgatgtggagcatcttttc

SEQ ID NO: 885342 - DNA, 120 bp, Artificial Sequence
  ENSG00000259697_9 (sequence is synthesized)
ctttaaaaatattctagatacaagccctttatcaagtatatcatatgcaaatattttctcccaacatatggcttgtctttaacagtgtattttaaggagcagaaatttttaatttttata

SEQ ID NO: 885343 - DNA, 120 bp, Artificial Sequence
  ENSG00000259697_10 (sequence is synthesized)
aagtccagtctatcaatttgttcttttatggattgcatttttggtgcagtattttaaaaaatctttgcctaactgaagatcacaagggtttcttctgttttcttctagaagttttggtgt

SEQ ID NO: 885344 - DNA, 120 bp, Artificial Sequence
  ENSG00000259697_11 (sequence is synthesized)
ctcagcctcctgaatatctgggattacagagactgaaaaacttggctccttggtttagaagcagtactggctgaaacttagttctttggaaatacacaagtaaaaccagaaaattcagat

SEQ ID NO: 885345 - DNA, 120 bp, Artificial Sequence
  ENSG00000259697_12 (sequence is synthesized)
agatcagcaaataaagaaatattagaatcacctctaatcccagtcatccggagttaacttgctggtgtcattttcctggatattctcatactgtttacccatgtcccattccaggaggct

SEQ ID NO: 885346 - DNA, 120 bp, Artificial Sequence
  ENSG00000259697_13 (sequence is synthesized)
tttcatatagaagatgagtggacaccaactagagacactggagcaagggccccacagtgtgacatttggttgtctcttgatgggggagggaaagtgtgcttttgtgtacaagtatgagat

SEQ ID NO: 885347 - DNA, 120 bp, Artificial Sequence
  ENSG00000259697_14 (sequence is synthesized)
aggtggattctatcatgtggaggatattgcttctcagccttttggctaagatcaagtgtagtatcatgaggagttttcttcgaaattgtggatttccacttatgtaactagtggtgctat

SEQ ID NO: 885348 - DNA, 89 bp, Artificial Sequence
  ENSG00000259697_15 (sequence is synthesized)
cgaaattgtggatttccacttatgtaactagtggtgctattatgtgcccagcacgaaggtatgtaaatgttgcattaaaaccttcttga

SEQ ID NO: 885349 - DNA, 120 bp, Artificial Sequence
  ENSG00000259697_16 (sequence is synthesized)
agaaagcttttactcttttgttttcctctgacctgaaaacaaacttgaaatttggaagtagccaaagagctttccttagtttggattcatctgaatccattttaagctgtttgtgttttt

SEQ ID NO: 885350 - DNA, 120 bp, Artificial Sequence
  ENSG00000259697_17 (sequence is synthesized)
tccaaatgaacctctctaggtaaccattgactgcatattaattatgatactgagtacttttaaaggtcaagaagcaaaataaccaaaatcaaaacatgtcattcagtgtaaactacctcc

SEQ ID NO: 885351 - DNA, 120 bp, Artificial Sequence
  ENSG00000259697_18 (sequence is synthesized)
gcacattcattccccctaatgtgcacatcacctgagacacttgattttcttcctgggaaatgggcagggacccatctgtccaatgctcagtgccacacagatccataccactacgttact

SEQ ID NO: 885352 - DNA, 120 bp, Artificial Sequence
  ENSG00000259697_19 (sequence is synthesized)
cctgtggctcgttccgtgcaccactctggaccgggcctgattttattctcccacagactcatggttcttgttttccccactctttataaatgcaatgctttcttatcaagcccttattta

SEQ ID NO: 885353 - DNA, 120 bp, Artificial Sequence
  ENSG00000259697_20 (sequence is synthesized)
tacggctttacttattatactagcatttgacatataaggtaactagggaaaactacgccttttcattttttcttgggcttttagagaactcatgcaatataacctaccaagcatctaaac

SEQ ID NO: 885354 - DNA, 120 bp, Artificial Sequence
  ENSG00000259697_21 (sequence is synthesized)
cgcctttacccacacttgtgcttttccaggtacccaggctctgaaatggcaactcgtaatacactacctccatttaaaagttccatccctgatgtctttagctattgatcactcaaatgc

SEQ ID NO: 885355 - DNA, 75 bp, Artificial Sequence
  ENSG00000259697_22 (sequence is synthesized)
cttgaggtgtttgccatctcacaatgtatttatttcaaagtgatgccaaggagctataataaagtgtacttatga

SEQ ID NO: 885356 - DNA, 120 bp, Artificial Sequence
  ENSG00000259697_23 (sequence is synthesized)
ggaggaaggtgtttttcctgagaccagaactaggaaagtgagaaagtttcctggtaacagggaacctgaacgaaggactacctttaaaattttggggaagggcgagggtttgttcttaaa

SEQ ID NO: 885357 - DNA, 120 bp, Artificial Sequence
  ENSG00000259697_24 (sequence is synthesized)
acccatttttcgaataggttaaacctatatacaaatagcagcattcttggtggcagtaattagagaagattcatcacagtggttgggaacataaaggaaacgagagtggggatgggcaag

SEQ ID NO: 885358 - DNA, 120 bp, Artificial Sequence
  ENSG00000259697_25 (sequence is synthesized)
cctgggattagaaaaaaatatgacctcttcctttctcctgaattagtgcctcgtcactgtaagcagtcctggaattcaggaacaatgttacagagagactgaaaaacttggctccttggt

SEQ ID NO: 885359 - DNA, 120 bp, Artificial Sequence; identical to SEQ ID NO: 874308
  ENSG00000259694_0 (sequence is synthesized)

SEQ ID NO: 885360 - DNA, 120 bp, Artificial Sequence; identical to SEQ ID NO: 874309
  ENSG00000259694_1 (sequence is synthesized)

SEQ ID NO: 885361 - DNA, 120 bp, Artificial Sequence; identical to SEQ ID NO: 874310
  ENSG00000259694_2 (sequence is synthesized)

SEQ ID NO: 885362 - DNA, 120 bp, Artificial Sequence; identical to SEQ ID NO: 874311
  ENSG00000259694_3 (sequence is synthesized)

SEQ ID NO: 885363 - DNA, 120 bp, Artificial Sequence
  ENSG00000259692_0 (sequence is synthesized)
tgagggaacagcaagaagacagccatctgcaaagaagagggctgtcaccagacactagctctgctggcatcttggacttcccagcctccagaatgatggcctgggaagccctctgcacgc

SEQ ID NO: 885364 - DNA, 120 bp, Artificial Sequence
  ENSG00000259692_1 (sequence is synthesized)
ctttctcaactaaggaatttgtggaagtagaatttcttctgttgacagaattctgctgagaactgaattttctgctgttttcattactcttttctaaatgtttcacagttctgttttttt

SEQ ID NO: 885365 - DNA, 120 bp, Artificial Sequence
  ENSG00000259692_2 (sequence is synthesized)
tacagccagatttccatttgatactggttgtggttacactaaaagtaacatctatggccaaatggctggaaattttacatttttgacaccgagatttttcctgtacttcacggagggcaa

SEQ ID NO: 885366 - DNA, 120 bp, Artificial Sequence
  ENSG00000259692_3 (sequence is synthesized)
gggttataccctattttttcccagtctcccacagtgcccaacccagacgaccgtacataataagcgctttattctcagcactgctgtatgcctcattggaacaggatgcccaaggtgatg

SEQ ID NO: 885367 - DNA, 120 bp, Artificial Sequence
  ENSG00000259692_4 (sequence is synthesized)
gctgcagaaatggatggattggagcgtgacttgccaagacagggctgctgtaacaaactactacaaactttgccgcttaaaaacagaaatggcttccctcacagtttctggaagtccaag

SEQ ID NO: 885368 - DNA, 120 bp, Artificial Sequence
  ENSG00000259692_5 (sequence is synthesized)
tggctgctttcctgtgcctgatatcacatcaccccattatctgcctccgttttcacatcgctttctcctcttgtgtctctccaatctccttctgcctccctcttctaagaacacttatca

SEQ ID NO: 885369 - DNA, 120 bp, Artificial Sequence
  ENSG00000259692_6 (sequence is synthesized)
tcggatttatgacccactcagataatacaggattaattcttcctctcaaaacccttaattgcatccattgccaaataaggtaacatttactcttttaccgataaggtaatactcacaggt

SEQ ID NO: 885370 - DNA, 120 bp, Artificial Sequence
  ENSG00000259692_7 (sequence is synthesized)
tctgagaattagggcatggacatatctttttggggcccaccattcagcgcactacatttacacgagaaaatgataatattcaaaatagcgtgaaagtaccaaaacgaaggtaggcactgt

SEQ ID NO: 885371 - DNA, 120 bp, Artificial Sequence
  ENSG00000259692_8 (sequence is synthesized)
aggagacgaaaatagagatgaggtatgagggagattcagggaccagtccgcatgttataaattttcaatctcgcaagcattcacattttttaaatattgaatttttgcctttgttttctg

SEQ ID NO: 885372 - DNA, 120 bp, Artificial Sequence
  ENSG00000259692_9 (sequence is synthesized)
caatcaccaaagatttcaggttttattaaatatccaaagttggtggtggcatgggaaaagaacactattttactgctggtagaagtacacatggaactttaataaagccatcctcaaaga

SEQ ID NO: 885373 - DNA, 75 bp, Artificial Sequence
  ENSG00000259692_10 (sequence is synthesized)
ggatataatctcgtggtgcgccggggattttccagagtttaggatgcttcaagggaaagatgaaccggggaaccg

SEQ ID NO: 885374 - DNA, 120 bp, Artificial Sequence
  ENSG00000259692_11 (sequence is synthesized)
agtttaggatgcttcaagggaaagatgaaccggggaaccgccaccgtgactatttctcatctacatatccaccccccgaagttcttaaggtggagcggaattcattttatttgcaaatgt

SEQ ID NO: 885375 - DNA, 120 bp, Artificial Sequence
  ENSG00000259692_12 (sequence is synthesized)
ggaaggcattataaaaaccgtgaatgatgccccctcccatgagggatacagggagagccacgtgaagaggatgttgggcttcttcaagctggcagggcactgagctgactgtccaccaca

SEQ ID NO: 885376 - DNA, 120 bp, Artificial Sequence
  ENSG00000259692_13 (sequence is synthesized)
ctcaccaggggcctttgtgcatcccgtggggcagctctgggaaaggagggccagaaaggatgggctttcccttttcctcgtggcagaaacttccctgacttcatagctgggttcccccta

SEQ ID NO: 885377 - DNA, 120 bp, Artificial Sequence
  ENSG00000259692_14 (sequence is synthesized)
tccacagtttacagtacaactatctcctccaagttggccagcattgcctctgatacgtgaacaagaagtatttggagggttaataaatacaaatcaacacatatacacatgaagagaaaa

SEQ ID NO: 885378 - DNA, 120 bp, Artificial Sequence
  ENSG00000259692_15 (sequence is synthesized)
tggatgtaataaccaaggactgcctgatatgcgggaactgaagctcagaaaggcaaaacaacttttcatgctcttctacctaataagtcggagaaccaagattcaaattctaaatgcggg

SEQ ID NO: 885379 - DNA, 120 bp, Artificial Sequence
  ENSG00000259692_16 (sequence is synthesized)
tctgattgaggccaagcaggtgaagaaatggaagctcagagaagttgtggtgcctgttcaagatcactcagctgtacagagaatgagtatcattatctctgactgaagatgaagaacaga

SEQ ID NO: 885380 - DNA, 120 bp, Artificial Sequence
  ENSG00000259692_17 (sequence is synthesized)
ctctaaaactggcttttctgggatagagatctttgttccttggtctgaaatccaaatacatgatgcagaaaaagtgagaaaagtgatttaggaacaagtggttcgtggagagggctcctc

SEQ ID NO: 885381 - DNA, 120 bp, Artificial Sequence
  ENSG00000259692_18 (sequence is synthesized)
attttctggataaaggcagtagctctacttagaatcacagaattaaaaccaagagaggcctcagagaccatttagccccccatcccactcctaattgtacagtggcaggaagtgaggtgt

SEQ ID NO: 885382 - DNA, 120 bp, Artificial Sequence
  ENSG00000259692_19 (sequence is synthesized)
gagaactggaactatgagctcagtatcacctagtgagtggcatcctggatggaacttagggctcctggctttcagtttagtgcctttttctccatcccactttgttattcgactacacta

SEQ ID NO: 885383 - DNA, 120 bp, Artificial Sequence
  ENSG00000259692_20 (sequence is synthesized)
ggctaaccgaagagaaagttcttgtaatttcagagaaatcttcagctttttcttctgcaaatctgggatgacactctcatagtaaatggagaataactgtgctccaaacaagaatgctag

SEQ ID NO: 885384 - DNA, 120 bp, Artificial Sequence
  ENSG00000259692_21 (sequence is synthesized)
gatttaggtatcaagagtattaggtactcaatcagaatgggatgccctctggacctgggactcacttaaaaatagaagtcagtgtttcaacagagatccttgctgcattatgaactgaca

SEQ ID NO: 885385 - DNA, 120 bp, Artificial Sequence
  ENSG00000259692_22 (sequence is synthesized)
gaaaggttttgatcctaacacagtgatacaggggggattaacagaagtgaattcaactgcagctaaggggttggtacagctcatgtcccagttgcatcctgtcttaccaaggaagctgaa

SEQ ID NO: 885386 - DNA, 120 bp, Artificial Sequence
  ENSG00000259692_23 (sequence is synthesized)
taccaaggaagctgaagtgacagatcctgagatttggccaagcctcgtgatctaattggaagtgtcagtaggattggacagataagaatacagctggccaggcgcggtggctcacgccta

SEQ ID NO: 885387 - DNA, 120 bp, Artificial Sequence
  ENSG00000259692_24 (sequence is synthesized)
ggccatcttggctcctcctcgaaatggcaacgcatatggctaataaaacatattgaggatgaatgagaaaacaacctggttcctggaaggagagaaacaaggtggagtcttctcacagaa

SEQ ID NO: 885388 - DNA, 120 bp, Artificial Sequence
  ENSG00000259692_25 (sequence is synthesized)
acaaggagaaggtcagagagacctccgggagcatctcatcttggaggtagctgtttgcatgagggcagtgcttgtcctgagatgctagtttcgcagagtggtgttcacaagggaaataag

SEQ ID NO: 885389 - DNA, 120 bp, Artificial Sequence
  ENSG00000259692_26 (sequence is synthesized)
ctaggtcattaccgtctacccttacaccaggaagaggaaaacatttcaggcttatataccaaggctttcctgcccctaagctgtccagagttgccttagtattgattatcttaacttaat

SEQ ID NO: 885390 - DNA, 120 bp, Artificial Sequence
  ENSG00000259692_27 (sequence is synthesized)
tattataaagtttgctggtaatgcttttgtattaagagtaaaagataaccttgagagctgcaaacatgagcccagcgatccaggagatcaagttaataattctggatatcaagagatcca

SEQ ID NO: 885391 - DNA, 120 bp, Artificial Sequence
  ENSG00000259692_28 (sequence is synthesized)
cgattagtcaattccaacctgttttcctttgatgccttaatcaaggtttagttatagttaacctactttcaaaatgcttacttccaccctccctccaagaatcaccctgagcatttcctc

SEQ ID NO: 885392 - DNA, 120 bp, Artificial Sequence
  ENSG00000259692_29 (sequence is synthesized)
cactctctaagtttaggaatttaggactttcccccaagaaaggcactgtagagaacaaacatatgacatctcaaagacacttcgccatttcaaataggaaagaaaaatttgcatccaaac

SEQ ID NO: 885393 - DNA, 120 bp, Artificial Sequence
  ENSG00000259692_30 (sequence is synthesized)
tttagtttcctctacaacctccggaagagttttcctcagccctgttacctgtttcgtccatcattctgttgctcactggattggtttttacattagtgtgttttgacagcacacaatggt

SEQ ID NO: 885394 - DNA, 120 bp, Artificial Sequence
  ENSG00000259692_31 (sequence is synthesized)
ttcctcagttacacaacagactcagtgccaataaacttttttttaggtaatgtaaagcatatttgagcacaagaatgattgcattttcatggctaaaaataaacagttgtttttaatttt

SEQ ID NO: 885395 - DNA, 120 bp, Artificial Sequence
  ENSG00000259692_32 (sequence is synthesized)
ccatgagaatgctggctcttagcacaaggggccaccttctacctggtgaactctttatgccaaagtcatcactacgtggctagaaatgtgaaattcaagttttccttatgtaacataaag

SEQ ID NO: 885396 - DNA, 120 bp, Artificial Sequence
  ENSG00000259692_33 (sequence is synthesized)
ggaaaagcccataggcaaatctctctttaattccatcgtatcactgctcatgcacagtgcttttaaaacagactataacaaacataccctaacagagaaacaagtcctaccctagctaat

SEQ ID NO: 885397 - DNA, 120 bp, Artificial Sequence
  ENSG00000259692_34 (sequence is synthesized)
ttacataaaaagactatctttatttttatagtaacaaaaaaagctaggattatctcatttaatccttataccatcattatgaagtgggtaatgttatacttacaaaaggaagttaatcat

SEQ ID NO: 885398 - DNA, 120 bp, Artificial Sequence
  ENSG00000259692_35 (sequence is synthesized)
ttcttattttccacagacaccacaagctcaagaggctgcattagcgttttttattggaggcattttcttttcctccagattttgtttttgactgttaaggtcatagctacaaacaattga

SEQ ID NO: 885399 - DNA, 120 bp, Artificial Sequence
  ENSG00000259692_36 (sequence is synthesized)
tcaagcctaaaagggcatttataaaccacctgcatctacatttttttcttactgtggatggatttaaaaagccgtttcaagatgaaatcttatgagtcattatcatgtcttctgagggct

SEQ ID NO: 885400 - DNA, 69 bp, Artificial Sequence
  ENSG00000259692_37 (sequence is synthesized)
taggaccctccgagccaggtgcgggacataatctcgtggtgcgccgttttttagagggaacagcaagaa

SEQ ID NO: 885401 - DNA, 120 bp, Artificial Sequence
  ENSG00000259692_38 (sequence is synthesized)
agaagacagccatctgcaaagaagagggctgtcaccagacactagctctgctggcatcttggacttcccagcctccagaatggtgagaaataactatttgttgtttcagccaccctgtct

SEQ ID NO: 885402 - DNA, 120 bp, Artificial Sequence
  ENSG00000259692_39 (sequence is synthesized)
acagtaattttttctagcagcttgaactaaggggtgcctcacatcctcaccagaacctctccttttgcattaagcaatttttatcttttatcacagtgacttactataaggttcttgaag

SEQ ID NO: 885403 - DNA, 120 bp, Artificial Sequence
  ENSG00000259692_40 (sequence is synthesized)
gcagagtgtgtgactaactcacatttttatcatcaggagcacatagaggttgtctatacatacttaaatggcaataagaatgcacaaatcaggagaaataagctggccagtcattctagc

SEQ ID NO: 885404 - DNA, 120 bp, Artificial Sequence
  ENSG00000259692_41 (sequence is synthesized)
atgagtcagaagagttggtttagtcctagctctgctagtggtgtccagagaacctcagtttcctatacttaaaataaagacattgcatcaggaagtttctcaggtcttgtcaacctctaa

SEQ ID NO: 885405 - DNA, 120 bp, Artificial Sequence
  ENSG00000259692_42 (sequence is synthesized)
caatctgtagttcaaggttctgtctgactagaacacgtttcctttgccccatcccttagctgtgatggaaggagtcactctctcttccaatttcaacctaaagatcacttcctccagaaa

SEQ ID NO: 885406 - DNA, 120 bp, Artificial Sequence
  ENSG00000259692_43 (sequence is synthesized)
atcttcccgcccttctcccccacctctcctagattaagttaatgctttttattgcccatattacatatatttttcacatcacaataatcaccccattcaataatacttatttgtctgatt

SEQ ID NO: 885407 - DNA, 120 bp, Artificial Sequence
  ENSG00000259692_44 (sequence is synthesized)
ccaagtataggctttctgagggcttgtttaaattgcttctattatctcccctgttcctagcatagcatctgacccagagtaggggcttaatatatatttttaaaatgaaaaagaaataaa

SEQ ID NO: 885408 - DNA, 120 bp, Artificial Sequence
  ENSG00000259692_45 (sequence is synthesized)
agagcacacttgcatggggtggaggatattttcagctgctgagtcttcttcaaggaggagttagagtcaagactctctgtctcagaaccttggagtccaaatagaaaaaaaaaattggag

SEQ ID NO: 885409 - DNA, 120 bp, Artificial Sequence
  ENSG00000259692_46 (sequence is synthesized)
atgtggtaacatcaagtgtcagccaagctgagaaaactagatgccaaaaatgatatgtgtaaaaagcaagcgggccaagcagacacaacagttgcagagataagaggcagtcgcttttct

SEQ ID NO: 885410 - DNA, 120 bp, Artificial Sequence
  ENSG00000259692_47 (sequence is synthesized)
tcaatggaggtgccgatgcctacagaggactcacccagacccttcaatctgatgtagcaaataataaagagagagattcggtacctatgggaacagcctctactcagtgacattcaagac

SEQ ID NO: 885411 - DNA, 120 bp, Artificial Sequence
  ENSG00000259692_48 (sequence is synthesized)
atttcaatgcaccatctacctcatctacccaggtggcaccaccagtgtggggtccaggagacagtgcatcgggaagggacagaacagcgatctcagagaccaggacaggctcagagggac

SEQ ID NO: 885412 - DNA, 120 bp, Artificial Sequence
  ENSG00000259692_49 (sequence is synthesized)
accttgaccctggggaaagaagaggagccagggccttgtttacatgttgaaatcctcaggaggtcaaggacgagccatactgatgagaattaaagactcttggtgtgtcaggagagagga

SEQ ID NO: 885413 - DNA, 120 bp, Artificial Sequence
  ENSG00000259692_50 (sequence is synthesized)
agagttaaagtcttgaagaggactctgtgacagctaaaggtgccataatagtgaaaggaaatacaagattcctgttgtcaaggaccttacattcaataggagaaagacgtacaataagca

SEQ ID NO: 885414 - DNA, 120 bp, Artificial Sequence
  ENSG00000259692_51 (sequence is synthesized)
gcctcctgagtagctaggactacagagaggaggttcttagtctgttgcccaggatggaatgcagtagtgtgattacacctaacttcagcctgaaactcctggggtcaagttatcccccga

SEQ ID NO: 885415 - DNA, 120 bp, Artificial Sequence
  ENSG00000259690_0 (sequence is synthesized)
gggcccacagctccaaggtctttgcagccactccattcgccctgcaggcctggctggctgagtacaggcatgagtggcccctgctgctggagcgttttggtgctgccattgctctcctgg

SEQ ID NO: 885416 - DNA, 120 bp, Artificial Sequence
  ENSG00000259690_1 (sequence is synthesized)
cagcagctttcctctgcagggctcccaagcacaaggccatccggagccctgctgcagctccttcttttcatcattctgcgcttacagacacacagagcgagatgaaggagagctgtacag

SEQ ID NO: 885417 - DNA, 120 bp, Artificial Sequence
  ENSG00000259690_2 (sequence is synthesized)
tccctgccggagtgactgatgtgcgggagggcaaagagaggggagcagcagctcactgtgagcactcagtgagggaggcctccctttgtaggctggcgaatgcaatgtcggaggggaaga

SEQ ID NO: 885418 - DNA, 120 bp, Artificial Sequence
  ENSG00000259690_3 (sequence is synthesized)
tgtgtgtgtgtgtgtgtgtgtttaccatagtgttttataagtgcctttctaaatgctgaaaactagcgacatgaataaagaatatgtattttcacattactgggatagttttttttttaa

SEQ ID NO: 885419 - DNA, 120 bp, Artificial Sequence
  ENSG00000259690_4 (sequence is synthesized)
ttactgggatagttttttttttaaatctgttcttagtgtcttctatgattgagatcattgtcttccttacattaaactataacgggttctatattatgctggatgccaattagaaatcag

SEQ ID NO: 885420 - DNA, 120 bp, Artificial Sequence
  ENSG00000259690_5 (sequence is synthesized)
attatatagctctgattagatgattttttgaaagattcagtgaaccatcttgtgatggcttatgtatgaataatggaaacagtctcccacaatcacaggcggtataagttttaaaacctt

SEQ ID NO: 885421 - DNA, 120 bp, Artificial Sequence
  ENSG00000259690_6 (sequence is synthesized)
gagtacagtagcactgaactggatattagattattcataataactaatactgttgagaaactaataaccatggagttgaaaacattttttagaatttatttttaccaataacaaattagt

SEQ ID NO: 885422 - DNA, 120 bp, Artificial Sequence
  ENSG00000259690_7 (sequence is synthesized)
tacagtttaggacagtttttttttttaaagcaaagtaaatctactttaagaagcactaatctatgggaatatgagtaccatatagatccaataatgtgtttagtattgtttgcattttat

SEQ ID NO: 885423 - DNA, 120 bp, Artificial Sequence
  ENSG00000259690_8 (sequence is synthesized)
attacattgtttgagggatctggctttttgccttactcagatggtggtttatttttattgctaagctttatcaacccagacagaaacgtgtatccatcacggctcaatcagagaaacagg

SEQ ID NO: 885424 - DNA, 120 bp, Artificial Sequence
  ENSG00000259690_9 (sequence is synthesized)
gcttttcagagccaacaccaaagatctcggtgagccagtctactctgatggctgctttggctctctgtgcttcacagtaaccacatccaccatgcctttggcaattaagagctgccacct

SEQ ID NO: 885425 - DNA, 120 bp, Artificial Sequence
  ENSG00000259690_10 (sequence is synthesized)
ggcccctgcaaccctggggtctcatcatcttcattgcatttagggaccctagttagatggcagcacagaaattccaactgtaatttgtggcctccaggaagagttcagggatgctgaggt

SEQ ID NO: 885426 - DNA, 120 bp, Artificial Sequence
  ENSG00000259690_11 (sequence is synthesized)
tcctctcgcgtatttatttctcataactgtagagaaaggtgtgcctctggatcctctggggatggattgctgcagcctcctgttgtgagaaggtttctaggccacagcacaggaacctgg

SEQ ID NO: 885427 - DNA, 120 bp, Artificial Sequence
  ENSG00000259690_12 (sequence is synthesized)
gaagagcctggcagtcctgctgagttaaggaggctatactgagcctgggagtccaaggtggctagaatttgcagaacaaagtgccagagaggaaagacttactcaagtagagggttctgg

SEQ ID NO: 885428 - DNA, 120 bp, Artificial Sequence
  ENSG00000259690_13 (sequence is synthesized)
agtcacaaaattagggttttcccaccatccagattggaaacctcatgattcacctgggcattgtatacagcatgcagaagagttttacctcagtagtggagaataactagccttgagcta

SEQ ID NO: 885429 - DNA, 120 bp, Artificial Sequence
  ENSG00000259690_14 (sequence is synthesized)
aatgctgttccagttctgcctaacagatattaaaagcaagatccaaaggaatcagatagtttccaagtaatttacctgtgtcccagagcaaagtttgagaacgttcataggaatacaaaa

SEQ ID NO: 885430 - DNA, 120 bp, Artificial Sequence
  ENSG00000259690_15 (sequence is synthesized)
gtatccagcaccaactagataacattcctaatgtctatcatctaatcaaagattacagttattaaaattgtatgttccaaaagttaagtagacacatggaggtataaaaaaaacccagtt

SEQ ID NO: 885431 - DNA, 120 bp, Artificial Sequence
  ENSG00000259690_16 (sequence is synthesized)
gaacttctactgatgaaaactacaatgtaagagagaaaaaaattcactggatgagattaatggcagatttgagacaagaaaaaagattagtggacttacaggcattgcaatgcaatatac

SEQ ID NO: 885432 - DNA, 120 bp, Artificial Sequence
  ENSG00000259690_17 (sequence is synthesized)
attctccaaaatgaagaacacagagaaaaaacattttttcaacaaaaatatggaaaaaaatcacagagctttgtggaataatttccagaaacactaatatatgtggaataaggagtgagg

SEQ ID NO: 885433 - DNA, 120 bp, Artificial Sequence
  ENSG00000259690_18 (sequence is synthesized)
gcaaacagaaaaaatacttgaagaaatagtagtaattttttttcaaaatggaataaaaactagaaacccacagattcaagaagctgaatgcatgcaaagaaccaaaaataggaaaaaaaa

SEQ ID NO: 885434 - DNA, 120 bp, Artificial Sequence
  ENSG00000259690_19 (sequence is synthesized)
atgcaccaatgtattgtggggtttataacatttgaataagtaattgtgtgaaaatactgtaaaggagggcggatggaactatacaatgtaagattcttagactatacttgatgaagtcta

SEQ ID NO: 885435 - DNA, 120 bp, Artificial Sequence
  ENSG00000259690_20 (sequence is synthesized)
atgtcacctgaaggtaaactatgataaattaaagttgtatactgtaaagcttaaagcaaccacaaaataaaaccaaaaaccccaaagagttggctaagaaaccaacaaaggaaatggaat

SEQ ID NO: 885436 - DNA, 120 bp, Artificial Sequence
  ENSG00000259690_21 (sequence is synthesized)
ggaataataaaaaatatccaattaatgcaaaagaaggcagaaaacaggaaaaaggaaacaaagaatagatgggaccgaaacgaaacaaagaataagattccattacctatttgaatttct

SEQ ID NO: 885437 - DNA, 120 bp, Artificial Sequence
  ENSG00000259690_22 (sequence is synthesized)
tccatgaattgcttgtacatattttttctgtgagactgtgttacattgatgtgtgagatttcttttttttaatttttaaactctagtatattaaatattcattgttttgaatttagcaaa

SEQ ID NO: 885438 - DNA, 120 bp, Artificial Sequence
  ENSG00000259690_23 (sequence is synthesized)
tgcataaaaacacaagacaatttttaaaaatcatcccagatcccaacacttagagatagacaattatattttgctgttttgccttccatttttccccatgcatacacagatgcgtacata

SEQ ID NO: 885439 - DNA, 120 bp, Artificial Sequence
  ENSG00000259690_24 (sequence is synthesized)
tttttatgaaaattagattcatagtgcacctattttgtaacctgcctttttttttctgcttaggagtatttcatgactgttgctccattcactaatatttcttagtacaaactgttttaa

SEQ ID NO: 885440 - DNA, 120 bp, Artificial Sequence
  ENSG00000259690_25 (sequence is synthesized)
acagttgcatattattttgttgtgtgactgtattaacatgtaagcaattagaaagggacattttaaaaattgcaaggaaagaagttgttttcgaatacccttaagcaatttgaaaataac

SEQ ID NO: 885441 - DNA, 120 bp, Artificial Sequence
  ENSG00000259690_26 (sequence is synthesized)
taaccatttaaatccaaacaattatatgattcttatttgtctacaaaagaagattcaataaagcaactcaagtaggagacaataaaaataaaaataaaagaaagcaaaataaaaaaataa

SEQ ID NO: 885442 - DNA, 71 bp, Artificial Sequence
  ENSG00000258125_0 (sequence is synthesized)
attagccaggatggtctccagctcctgacctcgtgaaccgcccgccttcgtcttacaaagtgctgggatta

SEQ ID NO: 885443 - DNA, 120 bp, Artificial Sequence
  ENSG00000258125_1 (sequence is synthesized)
cgcccgccttcgtcttacaaagtgctgggattacaggtgcgacaagataatgaacctccattcctctgagagaagagtattttgaatattcgactttgcccatgaatttccctttccatg

SEQ ID NO: 885444 - DNA, 120 bp, Artificial Sequence
  ENSG00000258122_0 (sequence is synthesized)
gccggaagttgttcaccatgtggatcctctcatcgtcctccgagatgagaaaagcaaagctcaagagaggatgagtgatgggctcgaagatgcacagtgagtgactgaacaaagatgaaa

SEQ ID NO: 885445 - DNA, 120 bp, Artificial Sequence
  ENSG00000258122_1 (sequence is synthesized)
actctcatttgtgtgtgtatgcaagtcctctctaaaaggacttaggagaagctagggagagtgtttacctacagggaggagactggacaccggaaggttgtggaaggttgtggaagggtg

SEQ ID NO: 885446 - DNA, 120 bp, Artificial Sequence
  ENSG00000258122_2 (sequence is synthesized)
tggtatggcgtgggaaggacactctttactggtactcctttgtatctcttgaatgaattaaggcatgtattacctctttaacaaccaaataaaagttgatccagttctttccttcctgca

SEQ ID NO: 885447 - DNA, 120 bp, Artificial Sequence
  ENSG00000258123_0 (sequence is synthesized)
ctcctaaagtgctgggattacaggcgtgatcccctgcgcctggcgagtccttctgttttcaacatgtgtgaacataagtcatattagaagaaaaacctcttggatggtagaaagcaatct

SEQ ID NO: 885448 - DNA, 120 bp, Artificial Sequence
  ENSG00000258123_1 (sequence is synthesized)
agaaaaacctcttggatggtagaaagcaatcttcagcctgagacccattcctagttcagacatatcaccttgcaactacaaaatggctgtcctacttccagcatcacagttatattctgg

SEQ ID NO: 885449 - DNA, 120 bp, Artificial Sequence
  ENSG00000258123_2 (sequence is synthesized)
gcaagaagcacaagagcagcaggagctcttacgatgcatagagtgcctagaaaacccacacaaaattactatccattctacagagcaccaatctcatggaatagaagtttccttaatgat

SEQ ID NO: 885450 - DNA, 120 bp, Artificial Sequence
  ENSG00000258123_3 (sequence is synthesized)
tttgtccttctctgggaacctatctgtgagttctagagaactcacaccacaaagaaaactgtctgctctgaatatgccggatccactcaatgctgaagtgtgttctctgcttcattggcg

SEQ ID NO: 885451 - DNA, 120 bp, Artificial Sequence
  ENSG00000258123_4 (sequence is synthesized)
tcatctctcatcaccttaccatcaggaaacattctgaaacaagcatctgaaacacatgattctcaatgctttatgctggttaatgattctttattgtttaaaatatttaagcatggtatc

SEQ ID NO: 885452 - DNA, 62 bp, Artificial Sequence
  ENSG00000258123_5 (sequence is synthesized)
taatgattctttattgtttaaaatatttaagcatggtatcaaatgttgctcaaaagctgacc

SEQ ID NO: 885453 - DNA, 68 bp, Artificial Sequence
  ENSG00000258121_0 (sequence is synthesized)
cccggccgcccattgtctgagatgtggggcgcgcctctgcccccggagaaataaggaacaaatgttgg

SEQ ID NO: 885454 - DNA, 120 bp, Artificial Sequence
  ENSG00000258121_1 (sequence is synthesized)
gccgcgaccctgtctcggagaaataaggaacaaatgttggaaacaatatcccaactctcccagaatctgaagtgacacattatgaaactggtggaagacaagatgtttcttggaattgag

SEQ ID NO: 885455 - DNA, 120 bp, Artificial Sequence
  ENSG00000258121_2 (sequence is synthesized)
tgacaggagatggagaagagggaggacacatgaaagtccccatcttattcagccaggaagcaagtgaagccaaatgaagagccatagaagacaggaggccctggttcttctcccatagag

SEQ ID NO: 885456 - DNA, 120 bp, Artificial Sequence
  ENSG00000258121_3 (sequence is synthesized)
tatagcaatctaaggatgtttgagggtcatcattagccccattaccttctctgctgcttggaggtcatttctaccttttgttcctgatcctggcagggatgctgtgccatttgttctcag

SEQ ID NO: 885457 - DNA, 120 bp, Artificial Sequence
  ENSG00000286670_0 (sequence is synthesized)
aaattagtttataaatttttttggcaatttcatcttagtaacccgttttgtcctattgccattgtcccaaccattgaaaaagtttacaataatttacatagaaatattttcaaagtgctt

SEQ ID NO: 885458 - DNA, 120 bp, Artificial Sequence
  ENSG00000286670_1 (sequence is synthesized)
aagaatagtgattgttctctgggatatttacagatggcctatacaatgtatgtacaggtggtatacactatagcacaagtttcactgctggaatatggctttctagggaaagtgcatatt

SEQ ID NO: 885459 - DNA, 120 bp, Artificial Sequence
  ENSG00000286670_2 (sequence is synthesized)
tggccagaggtggcaatactgtctagaaattcaagggttacagatactcggtaaccacatccaaagctgaagtagaatgtggacaagaatatttacaaaagtaatataaaaacggtcaag

SEQ ID NO: 885460 - DNA, 120 bp, Artificial Sequence
  ENSG00000286670_3 (sequence is synthesized)
tacacaagcttgatccacgcaaaggtatcttgatgttcttccagccgagaggaagaaaaagagacttcagctgctggctcggttaccattccgacgggggtattatttgtttagacctca

SEQ ID NO: 885461 - DNA, 120 bp, Artificial Sequence
  ENSG00000286670_4 (sequence is synthesized)
aagtcaagctagatcatcatctgtgcttacaactgatatctgtggaaaagaagaagtatagaatgagcttggtgatcactcactgatggcaactctagtctttaaaatggaccttgcttt

SEQ ID NO: 885462 - DNA, 120 bp, Artificial Sequence
  ENSG00000286670_5 (sequence is synthesized)
tgagttggtcattcaaacactcagagtgcttagaagaaaagtcagtcagatacaaaagaatactgagttgtatcattcatgcatttaacttgaattcaactatacctgcttggtagtgag

SEQ ID NO: 885463 - DNA, 120 bp, Artificial Sequence
  ENSG00000286670_6 (sequence is synthesized)
ataagatagtgtgactaattctgtcttttctacttaatgatcataagtcttggggaaaaatgtgaaaagccatgtgtgtgtcaagaattgaccactgttccatgtttcaccggagtttga

SEQ ID NO: 885464 - DNA, 120 bp, Artificial Sequence
  ENSG00000286670_7 (sequence is synthesized)
gaggggagtgatcaatacttgttttgttcagcctgtttcctacgtgaaggccaaatactccacttgggtttcatctgaagaacaagtctcctttctgaaaagtctcacttcaagccatgg

SEQ ID NO: 885465 - DNA, 120 bp, Artificial Sequence
  ENSG00000286670_8 (sequence is synthesized)
tgtataaagacacaaagctgacttactgctgggtacgtgtgtccaacagaagcactgtgtctaccaatgtctatggagaggtcctcttcagtggttttcaagtacacaggattgtcaaag

SEQ ID NO: 885466 - DNA, 120 bp, Artificial Sequence
  ENSG00000256879_0 (sequence is synthesized)
ggagttgccagtgcttacctgttccctcggtatacagggcagggaggtcctccgatgggacttgctgctgcagccggacatctcggcggacacgacggagctggaccgcctcctcctctt

SEQ ID NO: 885467 - DNA, 120 bp, Artificial Sequence
  ENSG00000256879_1 (sequence is synthesized)
aaacaccgggatatcttccttggtcccagcaatcagctgggaccccaaatgctcccttggagccgcctccgcggactgcggcaagatttgttccacgtacctggccaagaggatccccag

SEQ ID NO: 885468 - DNA, 120 bp, Artificial Sequence
  ENSG00000256879_2 (sequence is synthesized)
cctctctaaggaaatgagggacacggtcctgaccgcgctagtcaaggcgatcatgaggacgcccagcctcagcctcagcaccagccatgtcgcggcggccaagcagctgagcaccacccc

SEQ ID NO: 885469 - DNA, 120 bp, Artificial Sequence
  ENSG00000256879_3 (sequence is synthesized)
cgcggcggggagtgagaaccttactaaaaagtcaatattcctacccaactggatcaagattgtagaacacaaggatgcatccttaaccttataaaaatgccttggaatttttaatgagca

SEQ ID NO: 885470 - DNA, 120 bp, Artificial Sequence
  ENSG00000286672_0 (sequence is synthesized)
agatgtaagatggaggatgccgcctcccaggactgagcgtggggggcgagcacaatccacaacagcccaggagcaagacaagacaacaggatccacactaccttttctttgaaaatgacc

SEQ ID NO: 885471 - DNA, 120 bp, Artificial Sequence
  ENSG00000286672_1 (sequence is synthesized)
cctaagtgtattggccacctaagacagactgtttctcagcctcacttgctgctaggtgtgcccacgagattaagttcaaacaaaagagaatcaagccccagagtcatgcacagctttcag

SEQ ID NO: 885472 - DNA, 120 bp, Artificial Sequence
  ENSG00000286672_2 (sequence is synthesized)
aaatgttcttaaacagaagaagtatgccttgcttcctttccttctccatactggctggaatattgatgtgatggctggagcacaaacagctcttggatcatgagaaagaaaccacatgct

SEQ ID NO: 885473 - DNA, 120 bp, Artificial Sequence
  ENSG00000286672_3 (sequence is synthesized)
gaagactgcagaatgagagagagcaacctggatctctgatattttggagcagcagataagccccagatcactcacctctggacttttaatgtgagagaaataagcttttctatcttactt

SEQ ID NO: 885474 - DNA, 120 bp, Artificial Sequence
  ENSG00000286672_4 (sequence is synthesized)
aaggaactgttacttgggttccctgttatgtgcagcctagctaatcctaagtgatcatctatgacataatcaggtggaaatgccatgtagggaaccggacacaagtcagaggtctgcgga

SEQ ID NO: 885475 - DNA, 120 bp, Artificial Sequence
  ENSG00000286672_5 (sequence is synthesized)
ggacttcctttccgagagttccactgctgtcatgcttccaggtaaaatctacggtgaaaatcctactgtgctgttttatgcaaaggaaaagagaaaaggttacttgataattggtgttgc

SEQ ID NO: 885476 - DNA, 120 bp, Artificial Sequence
  ENSG00000286672_6 (sequence is synthesized)
attttgtacctaaaaatatcatcagacaccactcttcttttgaaaataggaaacatcataagtcctgctcttctccatgacttccttatatgaatcacttctgttgttcctgttaagcag

SEQ ID NO: 885477 - DNA, 120 bp, Artificial Sequence
  ENSG00000286672_7 (sequence is synthesized)
tttattttgatgatggctgcatggtcaattatattggacctcagtagttcagagctagactaatattgcctaagcctaaaagctcttggaggaaagagtttagaattataccacagtctc

SEQ ID NO: 885478 - DNA, 120 bp, Artificial Sequence
  ENSG00000286672_8 (sequence is synthesized)
cactagacccagacacagctggcttatctgcagaggacccacttttacaggagcagctggcttcagcagataaagaagctgcttgggggcaaggctagagctatagacaacttctctatc

SEQ ID NO: 885479 - DNA, 120 bp, Artificial Sequence
  ENSG00000286672_9 (sequence is synthesized)
aactcacaggggaatcactggaactcactgtttccaactactttacaacaaacataacataaagcatgaagcaggctcaggtactaatttttaaaagtgatagaggtggtagagaatagg

SEQ ID NO: 885480 - DNA, 120 bp, Artificial Sequence
  ENSG00000286672_10 (sequence is synthesized)
taggggaagagatatgagagaagccaaataatgtcccagtggcatgtggaccccacggctccactagggcagatcccctatgctatgattcagtgagatggggcagtggggtaaggatgc

SEQ ID NO: 885481 - DNA, 120 bp, Artificial Sequence
  ENSG00000286672_11 (sequence is synthesized)
ctggagagacctacccaggataatgagggcaactgctggcctgttccatgagaaagatacttgaggcttcctacagtagggagagtcacaccaggagggccatagcaaaaaacctttgac

SEQ ID NO: 885482 - DNA, 120 bp, Artificial Sequence
  ENSG00000286672_12 (sequence is synthesized)
agcagctgcctcatccagatacgccaacatgagagaagtagagaagagaagcatcattgcccagacaaaaaaatgatgcttgctggccacaatgttgtatctatctctgttcaagaaagg

SEQ ID NO: 885483 - DNA, 120 bp, Artificial Sequence
  ENSG00000286672_13 (sequence is synthesized)
tgtgagggtggggagaagtctgtatttctttggaatttaatttatatccagcaactgacaggtaaataagatgtagtacatccatataatagaatatttggccatagaaaagaatgaagt

SEQ ID NO: 885484 - DNA, 120 bp, Artificial Sequence
  ENSG00000286672_14 (sequence is synthesized)
actgacacgtgctacaacatgaatgaatcttgaagacattacgctaagtaaaagaagccagacacaaaagactccatactgtgtggttccatttatataaaatgtccaggatagggaaat

SEQ ID NO: 885485 - DNA, 120 bp, Artificial Sequence
  ENSG00000286672_15 (sequence is synthesized)
ccctagatacagaagattagtggttgcccagggatacacgggatgggaggcttaggggtgatggctaaagagtacgagtgttctttctggggtgataaaatgttttaaaattgattgtgg

SEQ ID NO: 885486 - DNA, 120 bp, Artificial Sequence
  ENSG00000286672_16 (sequence is synthesized)
tgacatacaactctgtaaatatactaaaaattattcactgtaccctttaaatgagtaaattgtctggcacacgaagtacatcccaataaagctgttaccaaaaaacccacaaaaattgta

SEQ ID NO: 885487 - DNA, 120 bp, Artificial Sequence
  ENSG00000245651_0 (sequence is synthesized)
ccctcccaaaaaaggatatagccaccaccatttataattaattcaggccccacttcactctgtcccacctgctttctgtctctctctctctctttttttttttaagatctttttctgata

SEQ ID NO: 885488 - DNA, 120 bp, Artificial Sequence
  ENSG00000245651_1 (sequence is synthesized)
tgcctggttgccccaatgcaagtctcctctttctgaagcttcctgtgccaccaggggcctgtccacctcagagacctctcaggtgcagctcagctgcatccacagggggtcctgagtccc

SEQ ID NO: 885489 - DNA, 120 bp, Artificial Sequence
  ENSG00000245651_2 (sequence is synthesized)
taggccctgcacagatgtctacccaggttctcttggtctcttccatagctatgaggcctcctcattgagggtgcccaaacaccacccttaatcacaagtttgccagcctccaccttctaa

SEQ ID NO: 885490 - DNA, 120 bp, Artificial Sequence
  ENSG00000245651_3 (sequence is synthesized)
ccctcctagaccacatcagcccctgccttattccagtattttcctgatttcgcctatttccagcttccctcagccattcacaagcacagcctgatgctgtgcataggaagacctggcagt

SEQ ID NO: 885491 - DNA, 120 bp, Artificial Sequence
  ENSG00000245651_4 (sequence is synthesized)
aagcctatggtgaacaaatatttttaatgaacaaacagaaattatggccccaaactgaaaacaccctggaagccacaaactctgttaccttcaaaagaagccagatctggaccgctgagg

SEQ ID NO: 885492 - DNA, 120 bp, Artificial Sequence
  ENSG00000245651_5 (sequence is synthesized)
tttttaaaaaatgcaatgagcgaattagtgaaatcagttcatcacggacactgtgtctttcaggaaatgaagcctccgaagaaaaaagggatcctagcccctgccaaattccattctgtt

SEQ ID NO: 885493 - DNA, 120 bp, Artificial Sequence
  ENSG00000245651_6 (sequence is synthesized)
tcaaattagccttccagtaaaatgagggggctgtcctaactggtctttaaggtcctcctagtaccagagctctgaggctctgtatttcccctgaacaacctcttggaactctccacattc

SEQ ID NO: 885494 - DNA, 120 bp, Artificial Sequence
  ENSG00000245651_7 (sequence is synthesized)
tcagaagtgggctttcacgacagtcatttcaggcctgtttccctttttctcccttccctgaaagggcctctggtctttcccaagctgcctgagtagaaggaaacacacagctcccccaga

SEQ ID NO: 885495 - DNA, 120 bp, Artificial Sequence
  ENSG00000245651_8 (sequence is synthesized)
gcagagaggcccgcgagagggaaagctggcccaggcccagggcaggctcgcctctgactctgcagggacattattccctcccagccagcagggaacttctggaacttctaaacagcacat

SEQ ID NO: 885496 - DNA, 120 bp, Artificial Sequence
  ENSG00000245651_9 (sequence is synthesized)
cctcgagccagcccaggcccccacagcatcctgcaccccaggtttacaagctttttaatggctggtccagagatttcaggatgcatcactgattccaggcagggctccatccccggccca

SEQ ID NO: 885497 - DNA, 120 bp, Artificial Sequence
  ENSG00000245651_10 (sequence is synthesized)
cactcagcccaggacctggccagagaatcaccaagcattcccggcaacacgatgcacggcccattttccatgccaggctcttccagggtctctgggtgggagcagcccggccttctcact

SEQ ID NO: 885498 - DNA, 78 bp, Artificial Sequence
  ENSG00000245651_11 (sequence is synthesized)
ttccagggtctctgggtgggagcagcccggccttctcactgggttcctgctatgtctggggggtacaaaaagcttatg

SEQ ID NO: 885499 - DNA, 120 bp, Artificial Sequence
  ENSG00000245651_12 (sequence is synthesized)
acagccagctctagcccagagggaaagtaagaggatgtttctgcagcagctgtcctttctcctgtaactactaaactgtcgcccctcactaaagaggatggctttgcctatgctgtcccc

SEQ ID NO: 885500 - DNA, 120 bp, Artificial Sequence
  ENSG00000245651_13 (sequence is synthesized)
gtctcagtccctgctttcatcccaaacagaaaccattgaagactcttcgacagagaaaataagaggagaagcaggttgaggggcagctggcaccttaacagccacctgtactgtgagaag

SEQ ID NO: 885501 - DNA, 120 bp, Artificial Sequence
  ENSG00000245651_14 (sequence is synthesized)
cccatgggacaacacagggccatgatgttggcagggatttgacctctgctcaacctacagaacattttccctttatttgtcactgttgatctctctctttgacatgcttcactgacacaa

SEQ ID NO: 885502 - DNA, 120 bp, Artificial Sequence
  ENSG00000245651_15 (sequence is synthesized)
gggcgcaggaggcccactcccccgactgggtcggctgctaccctcaggccagggtgtgcggtggagaaactgaggctctcctccagctgctctgggagaaaggaaagccggggaccccac

SEQ ID NO: 885503 - DNA, 120 bp, Artificial Sequence
  ENSG00000245651_16 (sequence is synthesized)
acactggcgtctgtgtcccagaacacccagcaggggggagagcaatttaagaaataatctggttggcaaagggcgtcatgaaaatcagccatttctagagctgaggggcggtggtgttta

SEQ ID NO: 885504 - DNA, 120 bp, Artificial Sequence
  ENSG00000245651_17 (sequence is synthesized)
gcccagaggacctagctagctttcagggaaaaaacggatgtggcctttcaggcagagcccagaaaaaaagacctgtgattaggagaccctaagaaccagcaaagaacttctaaatattgg

SEQ ID NO: 885505 - DNA, 120 bp, Artificial Sequence
  ENSG00000245651_18 (sequence is synthesized)
aggggaggtggtgtagctgcaaagagcccacacccacgctgagttagctctgacagcttctaaaggaaagggagatgcttagattatcctgagaaactggaggatctcctgagtgacctg

SEQ ID NO: 885506 - DNA, 120 bp, Artificial Sequence
  ENSG00000245651_19 (sequence is synthesized)
aaaaggtcatctcactcatccgcctgtggctggagtaaaatatacggagcccatcccaggactcccagtgggagaggatgaacaatcacttctgaaactaagctcaggagaagttgagga

SEQ ID NO: 885507 - DNA, 120 bp, Artificial Sequence
  ENSG00000245651_20 (sequence is synthesized)
gctttctcaagggagaagagctgccaggagaagcaagggtctctctcagtgccacttcctttccataaaccataatgatgggctctgaaattgtccaaggaaggaaacccatggcttctc

SEQ ID NO: 885508 - DNA, 120 bp, Artificial Sequence
  ENSG00000245651_21 (sequence is synthesized)
agagcaaccagtaccaggggttcaagttcgtcagagagcatgttgaagttctattttattttcctccattggtcacctgctggggatgaggcataggcctagtgttgtcacctggaggaa

SEQ ID NO: 885509 - DNA, 120 bp, Artificial Sequence
  ENSG00000245651_22 (sequence is synthesized)
agacatgatgcaattaacaaagctgctaatgcctcctctcaccctgacctctgctcttagcctctgtaccagcccaccctctgcatcctgcacagccagctgggccctgagaggtcctcc

SEQ ID NO: 885510 - DNA, 120 bp, Artificial Sequence
  ENSG00000245651_23 (sequence is synthesized)
tggccctcctcccacccgtcctttgcctgtcagatggagggtctttatgctgagatcactggagaaacagagcttcagtgcactctgtcacaccagcaatgagaaaacctttctaaaggg

SEQ ID NO: 885511 - DNA, 120 bp, Artificial Sequence
  ENSG00000245651_24 (sequence is synthesized)
gaaagctcacagtaggcagattcctgattattccataaatcctggagaagaaaaatataggttaacataaggattcaagaggatgacactctgtgtgttcaggcataagctaaattcact

SEQ ID NO: 885512 - DNA, 120 bp, Artificial Sequence
  ENSG00000245651_25 (sequence is synthesized)
cattccgttatttagtgattttgttatttagggtgtgcctggcactgagctaggcgccggggctaccacatgaataagacagagatggcccctccctgaaccctgccgcatgcccttcca

SEQ ID NO: 885513 - DNA, 120 bp, Artificial Sequence
  ENSG00000245651_26 (sequence is synthesized)
ctctgcctcccaggacaggaggctatgatacactttcctctcctgcaccagcatatgtctgtctccttcccagcccacccctagcaggtgttgtccccagccccagctgcttatgtctcg

SEQ ID NO: 885514 - DNA, 120 bp, Artificial Sequence
  ENSG00000245651_27 (sequence is synthesized)
tgtgttctgccaagagctgcttctgtcagaaggcactaactctctggtgattgggtggtggatagaagaggtaacctaaaggcctgtccagaaaatgagatcaaagttggcagcctcctg

SEQ ID NO: 885515 - DNA, 76 bp, Artificial Sequence
  ENSG00000245651_28 (sequence is synthesized)
ataactttggcagcagaatgggaagaagattggatgggagagagatcaaaggctgggagattctaagaggctgttg

SEQ ID NO: 885516 - DNA, 120 bp, Artificial Sequence
  ENSG00000245651_29 (sequence is synthesized)
ggagagagatcaaaggctgggagattctaagaggctgttgcagtatagtcgaggtttgtctgccagtggagtccatgtttccaccactgtcctacatggcctctcctcacgaatggctcc

SEQ ID NO: 885517 - DNA, 120 bp, Artificial Sequence
  ENSG00000245651_30 (sequence is synthesized)
aacctcctgggtgcgatggatgaagccgggtgcagagatggaaagagcagcccaactttcctaactggaggactgaagcgagagctctcactgtcggcctagtgtggattgactcctttc

SEQ ID NO: 885518 - DNA, 120 bp, Artificial Sequence
  ENSG00000245651_31 (sequence is synthesized)
caccacattccccaaccaaggacagtctataccaagctcacagcactgaggcgctgggggagggccagcccacacctagccccgtcaatcttggtggcatggactccctcctaaagcttt

SEQ ID NO: 885519 - DNA, 120 bp, Artificial Sequence
  ENSG00000245651_32 (sequence is synthesized)
ctcaggaggccccatttcctactgcagcggggcaagaattcaggaggagcccactcaaaggggagacagaggcagtgctccctgtgagcagctcttcctcctcagagctgtcatggacaa

SEQ ID NO: 885520 - DNA, 120 bp, Artificial Sequence
  ENSG00000245651_33 (sequence is synthesized)
ttggagagaaaaaccgggacattctccccaaccaggatattttgtatgctttgcacttactgctgcgttcccttcatctaaaagctctaaaatttcaaataaaaaggtacaatgaaagca

SEQ ID NO: 885521 - DNA, 120 bp, Artificial Sequence
  ENSG00000245651_34 (sequence is synthesized)
gaatgatttttaattctttttccttttttagtatgtttgtttgaagtaggaatctaaacaagatctatatattgtgattaattgatatgtctccgaagtctcttgtttatagttctctct

SEQ ID NO: 885522 - DNA, 120 bp, Artificial Sequence
  ENSG00000245651_35 (sequence is synthesized)
ctttgtaaatctctctctctccccttgcactttttttaatgaaaaaaaaatctgattgtttatcttacagaatttcccaaatctggatttttaaaaaaaattaaaacacagtgatatcat

SEQ ID NO: 885523 - DNA, 120 bp, Artificial Sequence
  ENSG00000245651_36 (sequence is synthesized)
ggattacaagtgtgagccaccatgccaggtctgagaacagttttaatctggatgtcacccatcgctgagccagagggaaagacagctcaaagggttttgaattagcaattgaattctgga

SEQ ID NO: 885524 - DNA, 120 bp, Artificial Sequence
  ENSG00000245651_37 (sequence is synthesized)
ttgaattagcaattgaattctggaattcttggcccagaagtgaaatgtatgacttccactcacaacccattggctaaagctggtcacatggccccatcgaactacagagagccaggaaga

SEQ ID NO: 885525 - DNA, 120 bp, Artificial Sequence
  ENSG00000245651_38 (sequence is synthesized)
gagatcctaccatatgccagaaggcagagaggcacagatatttagtgagcattggaaagacatctagaaaccaccaaggaagaatgacatttgaaccaagatttgaaaaatattttagtc

SEQ ID NO: 885526 - DNA, 120 bp, Artificial Sequence
  ENSG00000245651_39 (sequence is synthesized)
attccctcccagccagcagggaacttctggaacttctaaacagcacatcctcgagccagcccaggcccccacagcatcctgcaccccaggtttacaagctttttaatggtaagtaacaca

SEQ ID NO: 885527 - DNA, 120 bp, Artificial Sequence
  ENSG00000245651_40 (sequence is synthesized)
tttggcaaacctcctcaagtgtgagccaagccaggcctttttccccaagtcccaagtaacaaagggatgctgggctgggccaaaaacaggatctatctagccagatgagcctagagcctt

SEQ ID NO: 885528 - DNA, 120 bp, Artificial Sequence
  ENSG00000245651_41 (sequence is synthesized)
ggttctcggggccaaggctggacaggaccagagggaaatgtcctcggccagcctcactctggtctccgtcaccatgcaggctggtccagagatttcaggatgcatcactgattccaggca

SEQ ID NO: 885529 - DNA, 120 bp, Artificial Sequence
  ENSG00000245651_42 (sequence is synthesized)
ttcaatagatgaagttaagggccagggaggaggatctgccaggtaattatataagagaagtcacagaggcatgaaatggcctggctggtatgaccaaaagccaggctgaatgaggggata

SEQ ID NO: 885530 - DNA, 120 bp, Artificial Sequence
  ENSG00000245651_43 (sequence is synthesized)
ttgtactctactagattactggcaatagagagctaccaaagagttttcaaacaggaaagcaccatgatctgatttgtgttttaggaagataactttggcagcagaatgggaagaagattg

SEQ ID NO: 885531 - DNA, 120 bp, Artificial Sequence
  ENSG00000257698_0 (sequence is synthesized)
tattcagaggtcttttaggatgcgctaaagggtcgtgagggctctcttaaaattttcttcacaagcggttatccagtcgtgccccgcggccctgctgctggccccggggatctgagtcgt

SEQ ID NO: 885532 - DNA, 120 bp, Artificial Sequence
  ENSG00000257698_1 (sequence is synthesized)
accctcttgtttttctctgagtcagtcttaaggtgaaatgaagtgtggcccagtggctcctcactgtcgcttctctagttttctgcctccttttagaaaatgtaagttgagaatttctaa

SEQ ID NO: 885533 - DNA, 120 bp, Artificial Sequence
  ENSG00000257698_2 (sequence is synthesized)
tttacatcgggatgtgttctaatgcgcttgtttttaaaactgtggaaaatttttaaaagaaaataaatctcaccagtcatccagctacccagaagtaacattttcatgcattacctatta

SEQ ID NO: 885534 - DNA, 120 bp, Artificial Sequence
  ENSG00000257698_3 (sequence is synthesized)
tagggaaaaccattttgtgtccttcatatatggatgaatacaatataattttggtattaatatcatagcaacaaagaaggcattgaaggctttaaatctgtttacagtgaattgaaaaga

SEQ ID NO: 885535 - DNA, 120 bp, Artificial Sequence
  ENSG00000257698_4 (sequence is synthesized)
caggatgaagtggacacagcatgtgaagacaattctttcaagaagtttggctgtcaaggaaaacagagaatgtgctaaagaacatacagacacagagcagacaggccacctttgcaacca

SEQ ID NO: 885536 - DNA, 120 bp, Artificial Sequence
  ENSG00000257698_5 (sequence is synthesized)
catggaggtttgtctgatattgaagctaaagaagctaagctggaagacagagagaccaagtcctgatgacattgtttgaacccagagatccagacatgcctgaaaactagttttaccact

SEQ ID NO: 885537 - DNA, 120 bp, Artificial Sequence
  ENSG00000257698_6 (sequence is synthesized)
agtcctgttaaacgggggggaaacaacaaaagggtcctcagggccctgcccaacaatacgccacattctgtctagtaaagccacacagccagaaaacgccaggtgactggcaggcagata

SEQ ID NO: 885538 - DNA, 120 bp, Artificial Sequence
  ENSG00000257698_7 (sequence is synthesized)
cttccggaagaagtcggccctccgaacccggaagtgaagcgataagacgcacggtgttctgggaggagttacgcaggcagggttgtggttgctggctgttaccaggacaaccggaggcga

SEQ ID NO: 885539 - DNA, 120 bp, Artificial Sequence
  ENSG00000257698_8 (sequence is synthesized)
tcaaaatattctaatatagaagtatacatcattaaatcaacatttctttttttctctgtcttattttaaatgtaactctataaggtactctaaaagtattctacagtctcactaagttaa

SEQ ID NO: 885540 - DNA, 120 bp, Artificial Sequence
  ENSG00000257698_9 (sequence is synthesized)
tctgcaaatttggtaaaattccaatattaatcccaaaagtattttaagagcttgtttttgttgtttgcttgtttgggactaaacagaattactccaaaattcattgagagaaaaaaaaac

SEQ ID NO: 885541 - DNA, 120 bp, Artificial Sequence
  ENSG00000257698_10 (sequence is synthesized)
aaagcataaaacaagaataataaacatagagtggtaatggaataaataaacagtcatggaacagaattcaaagcctgaatatatctaagagcacttaccaaatttaatatgtggtacatc

SEQ ID NO: 885542 - DNA, 120 bp, Artificial Sequence
  ENSG00000257698_11 (sequence is synthesized)
aagaaaagattaatccagtaaagtatataagtacattgagctagatttagaggagaaagataattagatcgttaccttattcccagaataaatttcaaatggatttgtgacttaagtgta

SEQ ID NO: 885543 - DNA, 120 bp, Artificial Sequence
  ENSG00000257698_12 (sequence is synthesized)
aaaattgaagccagattctcaatatacattgattggcatataattggcacagtctttagcaatatcaattaaatgttaaatattaataacaacacagcctttcaattctagaaatatatc

SEQ ID NO: 885544 - DNA, 120 bp, Artificial Sequence
  ENSG00000257698_13 (sequence is synthesized)
ctacagaaacaaaatatatgtataaatatagataatgcagtattggaatatcaaaagtagtacacatatgaaataggatatggaatacctatatcatgaattcacggggtggcaacatcg

SEQ ID NO: 885545 - DNA, 120 bp, Artificial Sequence
  ENSG00000257698_14 (sequence is synthesized)
caacaaggaggtgaaaattgattcttgagggaaatttttttttctaaagcatagatatgtgtgtaaagcacataaacaaatatacagtatatatgtggtattgaaacttcatgggagagt

SEQ ID NO: 885546 - DNA, 120 bp, Artificial Sequence
  ENSG00000257698_15 (sequence is synthesized)
atgtggtattgaaacttcatgggagagtaataattaagaaaaaaatgtctacactgggtgcagtggctcatgcctgttatcccaacacttcgaaaggccaaggtgggtggatcatgaggt

SEQ ID NO: 885547 - DNA, 120 bp, Artificial Sequence
  ENSG00000257698_16 (sequence is synthesized)
gtgacaaagtaagactccatctcaaaaaagaaaaaagaaaaaagtctaaaaggctgagaaaaactgtggtatacaattcaataccatgttaaaaagaatgaggtagacttgtatgttgac

SEQ ID NO: 885548 - DNA, 120 bp, Artificial Sequence
  ENSG00000257698_17 (sequence is synthesized)
ataccatgttaaaaagaatgaggtagacttgtatgttgacaaaagaggatgtcccaagatgcattgcttttaaaaaacaagttgtaaaataatatgcataatatggttccttttttaatg

SEQ ID NO: 885549 - DNA, 120 bp, Artificial Sequence
  ENSG00000257698_18 (sequence is synthesized)
gtttggctgtcaaggaaaacagagaatgtgagtagccaaagcagaatgacagtgaaagaaagaaattgggagccagacaatacagcccgacagtttacgcctgtacggatgtacctcttt

SEQ ID NO: 885550 - DNA, 120 bp, Artificial Sequence
  ENSG00000257698_19 (sequence is synthesized)
cacaaaagattgagtatgcttggggaaaaaaaatacacactataataggagaaaatgatgaagagaaactgaggtaaaggtaattggaaaacaaaataaagccaggggtatattaatacc

SEQ ID NO: 885551 - DNA, 120 bp, Artificial Sequence
  ENSG00000257698_20 (sequence is synthesized)
ccaaaacttcataccaaaaggtccgtgtatttactagaggggtgccacaaattgggctctgaggttcctagcaattaaaccaaagggaaaatataagtttaacatgatccgtatgaggga

SEQ ID NO: 885552 - DNA, 120 bp, Artificial Sequence
  ENSG00000257698_21 (sequence is synthesized)
ggaggcctaatggcatattatagaatcctgttacacattagctgtatgaaattgattgggtaatgtaagctctttagacctcatttctccgtctcttaaagagtggggagaggaagcagg

SEQ ID NO: 885553 - DNA, 120 bp, Artificial Sequence
  ENSG00000257698_22 (sequence is synthesized)
agactgttagacgagttgatcttttaatatctcttccactactgacagtctatgatcatataggccagagacggcaaactcagatgcctaaattagggactaagaaagtttcataagtga

SEQ ID NO: 885554 - DNA, 120 bp, Artificial Sequence
  ENSG00000257698_23 (sequence is synthesized)
aaggagtgatagagattggaatgttagagttgattgagctgtcccatctaaaactccagccaattcttgcaaaaataaggactcagtgttgcctgatttttcaggagaaacaggaaaatc

SEQ ID NO: 885555 - DNA, 120 bp, Artificial Sequence
  ENSG00000257698_24 (sequence is synthesized)
atatttttgataatattatacaaaacaaaacacctctactagctagatacaatttgtgggtcactaattttcaacctctgctataggtgaaaggacctcaacaagagggataattgcttg

SEQ ID NO: 885556 - DNA, 120 bp, Artificial Sequence
  ENSG00000257698_25 (sequence is synthesized)
aattaaagaattaaatatgaaaaagaggaagaagtcaaaaagaataccaagatttccccttggtaataagaaggagttagtaacattgatactaaaatcagcagaaggtttggggagaga

SEQ ID NO: 885557 - DNA, 120 bp, Artificial Sequence
  ENSG00000257698_26 (sequence is synthesized)
aggtgctttattgtgagtttcttgaacatggggcaaacttatttatgtgtatccatagcacatgaatccaattcagctgctggatttgagaaatctgtgggatttatcaggggaaagggc

SEQ ID NO: 885558 - DNA, 120 bp, Artificial Sequence
  ENSG00000257698_27 (sequence is synthesized)
gcaggaatgtaggtcaggagtttggggaaagaagatgaaaaaggagtttaagatgtaagattcattctttcaataaagttttattgattatatatcacaatatgtattttcacgagactc

SEQ ID NO: 885559 - DNA, 120 bp, Artificial Sequence
  ENSG00000257698_28 (sequence is synthesized)
taaactgtctgagggcagaaagcacggggttttttttaaccacttacccagctcctagcacaatacatagtcagtgcttatgtatgttgaaaaaacaaatgaaaaaatacaaaacactgt

SEQ ID NO: 885560 - DNA, 120 bp, Artificial Sequence
  ENSG00000257698_29 (sequence is synthesized)
gctttacagtataggagatgcagagttgaattagaaaatcttaagggaacaagaaacactggggtctgcttgagggtggagggtgggagcatgcagaggagcagaaaaaataactattgg

SEQ ID NO: 885561 - DNA, 120 bp, Artificial Sequence
  ENSG00000257698_30 (sequence is synthesized)
gtactaggcttaatacgtgggtgatgaaataatctttacaacaaaccttcatgtgtacccccaaacctaaaataaaagtttaaaaagaagaaaatcttcttaaagaagtttatagagcag

SEQ ID NO: 885562 - DNA, 120 bp, Artificial Sequence
  ENSG00000196243_0 (sequence is synthesized)
atcttaagaggcgttcctttttgcatagttcccatgagcatgagagaagaagcaatgcacgctccggcagattcctaggaaccaaatacctctgaggagcaccagatttcagcttatggg

SEQ ID NO: 885563 - DNA, 120 bp, Artificial Sequence
  ENSG00000196243_1 (sequence is synthesized)
atgctttgattgctctgtggctgcatttaggagaaggaagctgcagtcatgcgtcatcactgccagcctcacatctcttgacagttaaagccttagggtggagcaagggaaaatttaaaa

SEQ ID NO: 885564 - DNA, 120 bp, Artificial Sequence
  ENSG00000196243_2 (sequence is synthesized)
taacaaatgaagcaaaagcaagaggtgatgttccaaagcagaggaaggctaagtttatatatacaaatgtcaagtgtgtatagtgcaaaactaggaccagttggtggaatctgtggtcaa

SEQ ID NO: 885565 - DNA, 120 bp, Artificial Sequence
  ENSG00000196243_3 (sequence is synthesized)
aaacaaaagccttccttttttttttttcaaggcccagtcccaagacgcaagaccacttgcgccagcagcgtgcatcagcaagatagcaaaagcaggacgagagctgcccggaagacatct

SEQ ID NO: 885566 - DNA, 120 bp, Artificial Sequence
  ENSG00000196243_4 (sequence is synthesized)
acctggccagaagacacctaccctggccggaagacatgtacccctgaagatagagaaagaggccatcgtgtactacgtagcagtcatgtcagactgggacacttcctgtttacagaggac

SEQ ID NO: 885567 - DNA, 120 bp, Artificial Sequence
  ENSG00000196243_5 (sequence is synthesized)
tgttgctccacaccgccttgtattgtttgttggtcccactctctgggctcgaaccaatacaagcacctttcaagcagtatattcttcagtgtcttgatcctccaaataactctcttctaa

SEQ ID NO: 885568 - DNA, 120 bp, Artificial Sequence
  ENSG00000196243_6 (sequence is synthesized)
ttcctcctgaccacaaaaagcacttatactctaggatgactgattccagcccagtggcctggcaagggtgaattacaccttgcatatcacactcttgacatttgtgtgcgctagcataag

SEQ ID NO: 885569 - DNA, 120 bp, Artificial Sequence
  ENSG00000196243_7 (sequence is synthesized)
aattataattgaaacagggatttaagtatctcctctctaggtgcctaccctccttggactcaggtcaaatttattaaaggaagttttgtttctagataggttgtttgaaataaaataaca

SEQ ID NO: 885570 - DNA, 120 bp, Artificial Sequence
  ENSG00000196243_8 (sequence is synthesized)
gaatgttcaagtaacacagtgtacctacagcttttaacaaaattgaggacttgggtctcgaaacaatttcctttgattttcaggtattttatctataaaaagggagataaagcattagtt

SEQ ID NO: 885571 - DNA, 120 bp, Artificial Sequence
  ENSG00000196243_9 (sequence is synthesized)
cataggacagttatatgtttaaatgtgataatgtatattaaccaccttgcatgtattcaaatgtgttttgaaatctaacgtctacattttgatagtttaactgttctacataagtgactt

SEQ ID NO: 885572 - DNA, 120 bp, Artificial Sequence
  ENSG00000196243_10 (sequence is synthesized)
acaacaggcattaaatattgtttggcattttcatatatctgtaactgtatcttaatctacaatgagcttaattttaagtgtagcataaaacagaaccttcaataaagtggtaatattagg

SEQ ID NO: 885573 - DNA, 120 bp, Artificial Sequence
  ENSG00000257696_0 (sequence is synthesized)
ctcaatacaccatccttcttggccttaatcctccctccttccctctgctggtgttcccgcctccatcgctgacccgtcgctgatttttacttccacgtcctacttcccttattcatttcc

SEQ ID NO: 885574 - DNA, 68 bp, Artificial Sequence
  ENSG00000257696_1 (sequence is synthesized)
ttttgcttgtttgtttttttttttgagacaagtcttgctctgtcacacaggctggagtccagtggtat

SEQ ID NO: 885575 - DNA, 120 bp, Artificial Sequence
  ENSG00000257696_2 (sequence is synthesized)
ttttgctggccagaaatctgctcccagcatgtggctgtgctggagtctctctgaatctgctgtgattatgggggctgccagactcaggaatcgttcattgttaaactcctttaaatttaa

SEQ ID NO: 885576 - DNA, 120 bp, Artificial Sequence
  ENSG00000231202_0 (sequence is synthesized)
atgtgatctgccctccttggcctcccaaagtactgtgattacagtcatgagccaccacacctggccagatgaaagtgtttcattatcatttcctctttctatgtcccaggttcatgggga

SEQ ID NO: 885577 - DNA, 120 bp, Artificial Sequence
  ENSG00000231202_1 (sequence is synthesized)
gtggtgtccactgaagactttgtaaatatagttatacactggtaccagcagaaactgaatctaaattatgagccatctgacaaatatcacttcaataacaagccccagttcgagtttgct

SEQ ID NO: 885578 - DNA, 120 bp, Artificial Sequence
  ENSG00000231202_2 (sequence is synthesized)
taggtgagaaaaacaagaaacttgaggcaagaacaaattttcaaatgtctacttcagtctttaccataaacttcataggaaaggaagatgaggccatttactactgcactgcttaggacc

SEQ ID NO: 885579 - DNA, 120 bp, Artificial Sequence
  ENSG00000197595_0 (sequence is synthesized)
agtatcaaaaacaactgagaaaggggccgcagctccggccttcatctgctattgcaaattcggagcagggtgctactggggggtgggggagtaaagagaacgggccctttcttcgtgtgt

SEQ ID NO: 885580 - DNA, 120 bp, Artificial Sequence
  ENSG00000197595_1 (sequence is synthesized)
ccacttcgtaggaacccaggcaagagtacccaagcagacctctgcttaaagcaaaaacagactgaagttgttttcccctcaacacggtgaccatccccaggtttagcagagagaatctaa

SEQ ID NO: 885581 - DNA, 120 bp, Artificial Sequence
  ENSG00000197595_2 (sequence is synthesized)
acaatgacccttgcaaacacagcaaggataccgacaaacgctggaaagctcagctgtggagttttagtcgtggctgagtttaggtggccttgcttcaacgccatcagggttttgaacacc

SEQ ID NO: 885582 - DNA, 120 bp, Artificial Sequence
  ENSG00000197595_3 (sequence is synthesized)
gtcggggggaagacgccagtctgctcaagtggtgcccaaaccagaaatgccagtgtcatgtccacgtttccgcttcttcggagaagggacctgtctcacacgtccagccagagcttctga

SEQ ID NO: 885583 - DNA, 120 bp, Artificial Sequence
  ENSG00000197595_4 (sequence is synthesized)
gctggagatgcaaccctgcgacagagaagccctggtttgtaatcataccgagcttgggcaaggaggccggaaaagaattacacagaagaaaaccaaccattcgatgcctttcttcttcca

SEQ ID NO: 885584 - DNA, 120 bp, Artificial Sequence
  ENSG00000197595_5 (sequence is synthesized)
ttcccaatcagaaggttgtttctgacccattgaaatattacctacaaagaagacgggagcctcctgcagcagcctctagtgatctgagagctgaaccaaggtttgaggcccatctccagg

SEQ ID NO: 885585 - DNA, 120 bp, Artificial Sequence
  ENSG00000197595_6 (sequence is synthesized)
tggtcctgaatatccgtgcatcctgggaccttgttaggatgaactcaccagaggcgaggctctgcgttgctcaatgcagagactcttacccagggtgtcagcctctgaaagatacacgtg

SEQ ID NO: 885586 - DNA, 120 bp, Artificial Sequence
  ENSG00000197595_7 (sequence is synthesized)
cctgggcctcttccctgaagatggacccggcaggtctggagggaggcccccgtgatgaatcccgtgatgagccgccgatccgagctcaggctgcgtcatgggaccagccacaaggttgcc

SEQ ID NO: 885587 - DNA, 120 bp, Artificial Sequence
  ENSG00000197595_8 (sequence is synthesized)
tgacctataaaggtcgcaggagtgcctcagggacacagaagcagttacagctgccagataccctatcatctttactctgttggagaggagctataatggtctatattaaagttactgttc

SEQ ID NO: 885588 - DNA, 120 bp, Artificial Sequence
  ENSG00000197595_9 (sequence is synthesized)
agaaaactggaattaaaatcattgatcctttagagaaataaaacaaaggagaagggagtgtacaaaataaataagaaaagaattcttaccatactttcctgtattcttactgagaaataa

SEQ ID NO: 885589 - DNA, 120 bp, Artificial Sequence
  ENSG00000197595_10 (sequence is synthesized)
aaatgggacattgagaagcaaaattaatcccgattaggctcgctttgggacaagcaaccactttgcatgattacccatcgttaggtgtgaaacggagccaatgatcgctcattgtcgagg

SEQ ID NO: 885590 - DNA, 120 bp, Artificial Sequence
  ENSG00000197595_11 (sequence is synthesized)
agaaaagacctggagaccacggcttatccagtctcgctcctgacctgcatctgaacacctgaaggaagaaactttaacaagaaaaagacttcaagtgacagaggagacaaaagtctcaaa

SEQ ID NO: 885591 - DNA, 120 bp, Artificial Sequence
  ENSG00000197595_12 (sequence is synthesized)
ggtgcagaattcaagaactcatggtgtctcaggatgggtgtgaaagtaacaaatatgagatcccctgacaactaaacccaggcatgtccaggaatcccgggatgcggtgaaagttttcac

SEQ ID NO: 885592 - DNA, 120 bp, Artificial Sequence
  ENSG00000197595_13 (sequence is synthesized)
agtggagctcacaggaatccccagatgccgtgaaagttttctcagcggagctcacaccagcattgtctggaatattaaatgttgttatgctttgagattggcacttatgccattcaaatt

SEQ ID NO: 885593 - DNA, 120 bp, Artificial Sequence
  ENSG00000197595_14 (sequence is synthesized)
tttttattaagaagtacaatgaaatttaacttattccatttttgacaccaatgtaatgaccaaattaaactagattttcaaaaataatcagaggccctgccccacaaactcctcctgggc

SEQ ID NO: 885594 - DNA, 120 bp, Artificial Sequence
  ENSG00000197595_15 (sequence is synthesized)
acaggaagatgtggggccagtcagtagtgactcctcttgggtgctgatccaccatgctgaattcagaccggcgccagtcccctgagcgcctcccaattcctatgtgatttcctgtcccta

SEQ ID NO: 885595 - DNA, 120 bp, Artificial Sequence
  ENSG00000197595_16 (sequence is synthesized)
gtatatgaacatgtcagccttgatgtgatcacacaaattatgggccatgacgcatctaccactcttgcctgttctgaagggctgcctttagttgtcttgcaaagagcacttacacctctt

SEQ ID NO: 885596 - DNA, 120 bp, Artificial Sequence
  ENSG00000197595_17 (sequence is synthesized)
ccctacggcacagaagccctgggtctggggtgacaggggcagagacctgcctgtcctccagccacccaagaccatgcttctgtctgtaggttcccccaataaaacaccctttactgacag

SEQ ID NO: 885597 - DNA, 120 bp, Artificial Sequence
  ENSG00000231208_0 (sequence is synthesized)
cggaagctgaacggaccgacggaggtggcgtggatgagcagcagccgcctgagcagtgaggaaaccccgcggacagcgcgggatcttactggatgcactaaaaatgctattgtgagctga

SEQ ID NO: 885598 - DNA, 120 bp, Artificial Sequence
  ENSG00000231208_1 (sequence is synthesized)
aaaatgctattgtgagctgatcatggtctcacatgcctggggtcccagctactcaggaagctgaggcacaaggatcgcttgagcccaggacgtcgaggctgcagtgagctgagattgcgc

SEQ ID NO: 885599 - DNA, 120 bp, Artificial Sequence
  ENSG00000231208_2 (sequence is synthesized)
aggggccacagctcaccagctgctgagaagacacaaaaggccgagagcccaagtctgagctgaaggcacaggctcacatcacccaagatactcaaagcatctcccccatctgcataaccc

SEQ ID NO: 885600 - DNA, 120 bp, Artificial Sequence
  ENSG00000231208_3 (sequence is synthesized)
agcaaagcaaggactccatgacctgctgtgtacccaggccaggaacctgacctgccacaggcccagggctgcgtgcacactggctgaatgcattagttaatattttggtgacgctggtta

SEQ ID NO: 885601 - DNA, 120 bp, Artificial Sequence
  ENSG00000232936_0 (sequence is synthesized)
tttgcagaggtgtcaggtttgctaatcctgtccccagtgagcaagatacctttgcaaggggatttgatgcagatgatcatcatggcttggagaaacaatgaaggaagcaaagtatgccat

SEQ ID NO: 885602 - DNA, 120 bp, Artificial Sequence
  ENSG00000232936_1 (sequence is synthesized)
ttttaggcagcataagaactactagattttcattgtgggaggatcctcagcagcagcctcagaaaggagattggggaaggagatccctagtcagggagaccaagaagactactggaaaaa

SEQ ID NO: 885603 - DNA, 120 bp, Artificial Sequence
  ENSG00000232936_2 (sequence is synthesized)
aacaggggaatcctcaaggacctgcaaacaagaaaccaaatccccccactccccccagccaaaatgtgttcattttgaccagctgtgtgtgtgttttaaattaaaagtttgaattagaaa

SEQ ID NO: 885604 - DNA, 120 bp, Artificial Sequence
  ENSG00000232936_3 (sequence is synthesized)
gcccgccaccgccaccgacgagtttcaacatggggaatcaagttctctgggcttgcagagaggagatgggcgggttgggctttgtatggcgatgtgaaaaccagatgggtctgggagaga

SEQ ID NO: 885605 - DNA, 120 bp, Artificial Sequence
  ENSG00000232936_4 (sequence is synthesized)
gataaatttatatacttagatgtataaatttaaatacctggcccctgaagcacttctgataggtctcagctacccaaacaagaagaacggaatctttgaatccccaggactcaacgcagt

SEQ ID NO: 885606 - DNA, 120 bp, Artificial Sequence
  ENSG00000232936_5 (sequence is synthesized)
actggacacaaaatgggagctgaaaaagtgtgtgtggagtcagtgaaggatgcaatttcccctcattgtagagatgaagaagctgaggctgcagagtagaataggagcagacagtgggga

SEQ ID NO: 885607 - DNA, 120 bp, Artificial Sequence
  ENSG00000232936_6 (sequence is synthesized)
ttgtcttcaaagtaggttcctagttcctggctcagaggtcccagtttttgttgaccatggacagtaaaactccctggggaagcgggcccagtctcaggagagcagttttgattggtctaa

SEQ ID NO: 885608 - DNA, 120 bp, Artificial Sequence
  ENSG00000232936_7 (sequence is synthesized)
caatgaaatatgagggaaagcctgggggattctgggaaaggttttgtaaaccaaaaagtatttgagacatgtctcaattttagaggattattttgccaaggttaaggaccattgcccata

SEQ ID NO: 885609 - DNA, 120 bp, Artificial Sequence
  ENSG00000232936_8 (sequence is synthesized)
cagcctcaggaggccctgagaacatatacccaaggtggttggggtacagcttcattttatacattttagggagtcagaagttacaggcaaagacataaatcaatacatgcaaggtataca

SEQ ID NO: 885610 - DNA, 120 bp, Artificial Sequence
  ENSG00000232936_9 (sequence is synthesized)
ttggtttggcccagagaggtggaacatctagaagcaggagcttccaggtcataagtggattcaaagatttcctgattggcagtttgttgacagagttaagctccgccccaagagttgatg

SEQ ID NO: 885611 - DNA, 120 bp, Artificial Sequence
  ENSG00000232936_10 (sequence is synthesized)
tcagcttaaattaaggtaagggggtgctttgtggaaaccaacgttcttatcatgtatatgaagcctccaggcttcagcgagaatagatgtgaatgtcttttattggaccttaaaaattgt

SEQ ID NO: 885612 - DNA, 120 bp, Artificial Sequence
  ENSG00000232936_11 (sequence is synthesized)
cagactttctggaaaagacctaataagggaatctttacagaacataattttttcacccacaagtgacagcttggcagggccgtttcaaaatatgtaaagaaatataatttgaggtaaaat

SEQ ID NO: 885613 - DNA, 120 bp, Artificial Sequence
  ENSG00000232936_12 (sequence is synthesized)
aatttgatttccttcagggcccactggctgtcacgtgatgttataccagagtcagattggaatctgttgtcttactgctaccaagattttgtcttgacagtcttaagattcctgttttaa

SEQ ID NO: 885614 - DNA, 120 bp, Artificial Sequence
  ENSG00000232936_13 (sequence is synthesized)
tgtcagttctggtcagttgtgtctaaactcaaaaggaaggagggtataatgaggcatgtttcaccccctctttcccatcatggcctgaactagtttttcaggtgtttttttgaatccctt

SEQ ID NO: 885615 - DNA, 120 bp, Artificial Sequence
  ENSG00000232936_14 (sequence is synthesized)
tggccaagggggatccattcagtcagctgaggggcttagaattttatttttggtttatagtttcctcttgattaaagaaggaagtctgcaatgtgggtttgtaacctagtttttaataac

SEQ ID NO: 885616 - DNA, 120 bp, Artificial Sequence
  ENSG00000232936_15 (sequence is synthesized)
tttacatcagacttgtaatttattgttactttctgaagacacactgataaaacctctctaccatgacgtcattgcatgttttcacggtagaaattctaattatttgctaaagtgaaaata

SEQ ID NO: 885617 - DNA, 120 bp, Artificial Sequence
  ENSG00000250310_0 (sequence is synthesized)
ggtagaagggcctctcacagcagcgctgacctgagcttctactggggggatggaatctaggatcttctgattctacatcagacgagaggtggaggccccctcctgggtgtggataatttg

SEQ ID NO: 885618 - DNA, 120 bp, Artificial Sequence
  ENSG00000250310_1 (sequence is synthesized)
gaatcagttaaaagggagtcttgatgcgtggatttgggtccccaaactgccacctcctttggctctttcctgaccctgaagagaacctgacccggatgtaccaagaccttgccggaagcc

SEQ ID NO: 885619 - DNA, 120 bp, Artificial Sequence
  ENSG00000250310_2 (sequence is synthesized)
gggaaaagatgcccattgcatgaagcggggcctctcaaggaggagccccaggtcacctgttgcaacagaatcgcctgggagctccaaggcccagccccaacccatacccaatgagtctga

SEQ ID NO: 885620 - DNA, 120 bp, Artificial Sequence
  ENSG00000250310_3 (sequence is synthesized)
atctccaggaggtgcccagacatctgcacatccagcaggttcccagcttcacattgtaaggctccacctctttccacccccaggatcttcaggggcacagtaaagtgtccaccatgagct

SEQ ID NO: 885621 - DNA, 120 bp, Artificial Sequence
  ENSG00000250310_4 (sequence is synthesized)
gccttcaccccagcccttgggaccatgtggggaccgggtgggaactctgggctcctgtgacactcagaccaagcccctcacattgcaggggccctgctcagcatcctggaggggagcaac

SEQ ID NO: 885622 - DNA, 120 bp, Artificial Sequence
  ENSG00000250310_5 (sequence is synthesized)
gaaccaccagacaatggaataagaaagcagaacacagtgtaattctcaagcacgaatatagtttaggtttggcaagagaactaggggagacccggagtgaatgccacacccaggatggcc

SEQ ID NO: 885623 - DNA, 120 bp, Artificial Sequence
  ENSG00000250310_6 (sequence is synthesized)
atgggaatggaaagccaaacacctctccagggtacactgatgatgacatgccacgatgttacttgcattctgaggccctggactcccactgggacactgactgggagattcttagagcac

SEQ ID NO: 885624 - DNA, 120 bp, Artificial Sequence
  ENSG00000250313_0 (sequence is synthesized)
agtcatatgtccacacctagatgcagagggtgctgggagacacagttcctggccagacagctgcttcccagtgacaaatctactttatatcaagagtgaaatcatccagaatagagtgaa

SEQ ID NO: 885625 - DNA, 120 bp, Artificial Sequence
  ENSG00000250313_1 (sequence is synthesized)
ttcgggcttcagagcggctgtttaggattcagagctctaccaacatgagcaatctgttggcatgacaggtcagagaagccgtgaaggacatggaaggaagtagatggaactggaaacagg

SEQ ID NO: 885626 - DNA, 120 bp, Artificial Sequence
  ENSG00000250313_2 (sequence is synthesized)
aggccaaccccagcagtcagtggtgctcagaaaaaaataagacactgaaatttgaggacttaatggagtttggtgccttcagttagctgatgtctatgaagcctgaccagtctacttcta

SEQ ID NO: 885627 - DNA, 120 bp, Artificial Sequence
  ENSG00000250313_3 (sequence is synthesized)
agtgacaaacttctactttactaatgattttatgatcctgttacccattgcaattgcttaaatggtattttaattagctgctttaaatgactttgcttttttacaaaaagcagtgtgtgc

SEQ ID NO: 885628 - DNA, 120 bp, Artificial Sequence
  ENSG00000250313_4 (sequence is synthesized)
tttagtttaaaatatgggtcactggtgtttctttctagaagatgactgtgtttagtaccagggaaaattggtgatgtatttggagaggttttaacttctgtaactcaggttgatatctgg

SEQ ID NO: 885629 - DNA, 120 bp, Artificial Sequence
  ENSG00000250313_5 (sequence is synthesized)
aatgtgagtgtttccatacttccgtggatgcagcaaatttatataaagcgttattaaatttgttctagtttttaaatactgttaattctttcatgggctttctatattgccagttttttt

SEQ ID NO: 885630 - DNA, 120 bp, Artificial Sequence
  ENSG00000250313_6 (sequence is synthesized)
ttatggtatctgcaacaagtcaataagctgtgtttatgtttgtatactgttttagaaaggaggattgacccagaacattatgtgctaggagaaataaaaagactctgctatggatacaga

SEQ ID NO: 885631 - DNA, 120 bp, Artificial Sequence
  ENSG00000256257_0 (sequence is synthesized)
gctttctgactccactcttcctactctggcttgctaatcaactttacctggtttgaaatgcccacccttatatacaggcaattatgtggattagaaattaaggatgaaacatcttcccaa

SEQ ID NO: 885632 - DNA, 120 bp, Artificial Sequence
  ENSG00000256257_1 (sequence is synthesized)
aaggtcactgttaagatttacccatcatcttggtgctcctagctctctacgaccaacacagagtggctgacacttcaaccaggcagcttggattgcaatgaggacaatgcaatgcatttg

SEQ ID NO: 885633 - DNA, 120 bp, Artificial Sequence
  ENSG00000256257_2 (sequence is synthesized)
tcaacatcaactggctgtgaaacatgggcaagtgagtaaacgtttctgtgctttggtttcctcaccggtaaaatgtggataaaagcaattccttcacagggttgtttggaggagcaaatg

SEQ ID NO: 885634 - DNA, 120 bp, Artificial Sequence
  ENSG00000256257_3 (sequence is synthesized)
actttatgtatgtgaggcacttagaataatctctcagtgttattatttaaccaacatttttgttgaatatttagttcatttccaggttttcactcttacaaatatactgtaattaacaaa

SEQ ID NO: 885635 - DNA, 120 bp, Artificial Sequence
  ENSG00000256250_0 (sequence is synthesized)
gcctaccaaaaggactcaagagtccaccctactagccaaagagaccatctgagcattaaggataatgcagcaatgaaaacatcagatgtgtttaaatccatgtgttcacgatgatggacg

SEQ ID NO: 885636 - DNA, 120 bp, Artificial Sequence
  ENSG00000256250_1 (sequence is synthesized)
acaagcagcaacagagactctccctggtcatctctggaggaccccagggaactgacctatgaaaattataccagagagagagagagtccaacgctgatcctctctgtcctccatgatctg

SEQ ID NO: 885637 - DNA, 120 bp, Artificial Sequence
  ENSG00000256250_2 (sequence is synthesized)
tggggaaattctgcctggatattctgtactattaagtaattataatgaatttgggtttagatataattgtggttgtgcttttggggaagcttctgtttttgaaatacacactgatgaaat

SEQ ID NO: 885638 - DNA, 120 bp, Artificial Sequence
  ENSG00000256250_3 (sequence is synthesized)
ctcagatgcctgggatgggcttcagaatagtctgggagcgggtgcgggtgggagctcatggagaactgtggagctggggggtcggcttgtggtcgcctctctctgcttctgcacacatct

SEQ ID NO: 885639 - DNA, 120 bp, Artificial Sequence
  ENSG00000256258_0 (sequence is synthesized)
aggccctctgcgccttggtgggaggaagaggaatcatccttgttgctgaccccctgcgacggtgctggctggacggggtgtgcatcgtgccaggagctggtccctcattcatcctcacag

SEQ ID NO: 885640 - DNA, 120 bp, Artificial Sequence
  ENSG00000256258_1 (sequence is synthesized)
cagccctcccgggctcgcccgccgtgactttcactcccatttcacagacgaggaccctgaggtccagggaggctgagtgggctgccctccccagctggagcctggaggggatttgaactc

SEQ ID NO: 885641 - DNA, 120 bp, Artificial Sequence
  ENSG00000256258_2 (sequence is synthesized)
ctgtcgctgtctgggctgggctgagctgactccccagggccgtcagctccactgcatcctgaccacctgggaactgtggtcagcactttccaggctcaaaggcatggctgcttacagcgt

SEQ ID NO: 885642 - DNA, 120 bp, Artificial Sequence
  ENSG00000256258_3 (sequence is synthesized)
gcccgagggacagcccagctgcagcccctcctcaccagcgacccctgggccctttgcctcggggccaggcaagcggagagcagagagcagtgtgtgaggagggaaaaaagccggactaca

SEQ ID NO: 885643 - DNA, 120 bp, Artificial Sequence
  ENSG00000256258_4 (sequence is synthesized)
gggaccccagccacccgccagcccctaccctgcagcctctcctgccagaggccgaggctcctgagctgccccgtgcagggagtgtggccaggcgaggctccgtggagtgcaggagctgcg

SEQ ID NO: 885644 - DNA, 120 bp, Artificial Sequence
  ENSG00000256259_0 (sequence is synthesized)
agaagaaattcctttggattttcatgggggagcaaccaagaagagttcttcagaaactcagatttaaaaattccttttctagagaattaaaatatattaataacagatttgactttagat

SEQ ID NO: 885645 - DNA, 120 bp, Artificial Sequence
  ENSG00000256259_1 (sequence is synthesized)
taaagagactttaagaattactcagtaatcaaaccatgtgaattcaatggtctgcacgcttggaatcttaagaaactgctgatgatgacattggctgcctcggttttaggaactgccaga

SEQ ID NO: 885646 - DNA, 120 bp, Artificial Sequence
  ENSG00000256259_2 (sequence is synthesized)
aatagccactaaccaagagaaagagagcaaggactagccctgaataattggtcaacgatgctgatttcgttggtttcctgttccttttgcttcctggaaaatacagacctacaaagcaaa

SEQ ID NO: 885647 - DNA, 66 bp, Artificial Sequence
  ENSG00000276874_0 (sequence is synthesized)
aggagacatgggttgaatgctgaaaacatgcacagccaagcccagatgccagtcttgttagctgcc

SEQ ID NO: 885648 - DNA, 120 bp, Artificial Sequence
  ENSG00000226367_0 (sequence is synthesized)
acagaaacacacacacacagggagaaagccatgtgaagacaggcagagactggggtaatgcagctacaagggaatgtcagagattgctagcaaacaccagaagctggaagaggcaattaa

SEQ ID NO: 885649 - DNA, 120 bp, Artificial Sequence
  ENSG00000226367_1 (sequence is synthesized)
ggattgctccctagagcttttagagggaggacggctctgccacctgccttgttcttggactcctagcctccagaattaggtcacctgttgggcaatatcaccatagactgaatacagaag

SEQ ID NO: 885650 - DNA, 120 bp, Artificial Sequence
  ENSG00000226367_2 (sequence is synthesized)
cagatattagcctccagcctcctgctcatctggacactagagagatttctaaaaagatataaggaacatttatgaatgaccagaaggaagtattaatcaaacgaaatgtttccaatccta

SEQ ID NO: 885651 - DNA, 120 bp, Artificial Sequence
  ENSG00000226367_3 (sequence is synthesized)
gacaccttgatttaatcccaggaatgggattttgcataaaagaagaaagctcaggaatgataaatttacacaccatggatctagaagggagtctataaccccagaatcaccattattttg

SEQ ID NO: 885652 - DNA, 120 bp, Artificial Sequence
  ENSG00000226367_4 (sequence is synthesized)
ggtgatccatatggctatcaattaaagtgctacctgagtgctgttcaacttcttgagatggatgaaaaaggaatgaaaggagacatagcaatcttcaactccgctcctttacttttgaat

SEQ ID NO: 885653 - DNA, 120 bp, Artificial Sequence
  ENSG00000226367_5 (sequence is synthesized)
aagaggtgatggaaggcaaggtcagagagatctgggttcaaatctcatgatttaactgctatataaccttggccaaattatttaaactttgtgtctgtttttacttagcaatataaagac

SEQ ID NO: 885654 - DNA, 120 bp, Artificial Sequence
  ENSG00000226367_6 (sequence is synthesized)
actggtcatacccaccactcagaatttcaatcagaactaaatgaaataatatatgcaaagtgcttaatatagtacacctggcatggagtggtaactcaataaatagatcttttgttataa

SEQ ID NO: 885655 - DNA, 120 bp, Artificial Sequence
  ENSG00000226367_7 (sequence is synthesized)
cactagagagagtgaggtcagctaaaaacaagaaagaaatttaaagcatcctgggaagtcatcataccctttttctccaagaaaatctagttttgcttgtttttgtgtatcccacaacac

SEQ ID NO: 885656 - DNA, 120 bp, Artificial Sequence
  ENSG00000226367_8 (sequence is synthesized)
ctgtgtttgactatctttttcactttggatttggattttggtgtgatatacacagttccaaaaaatcaatggatagaaaactcaatggcataaataagtgcttaaaacaatacttcaaga

SEQ ID NO: 885657 - DNA, 120 bp, Artificial Sequence
  ENSG00000226367_9 (sequence is synthesized)
aatgttcaacattccacgagaacaatatccacgtgagatgaaaagaaaagtctaagttagttcctgattcctggaagctgggaaagtctcattccagtaactacttaataccccctgtca

SEQ ID NO: 885658 - DNA, 120 bp, Artificial Sequence
  ENSG00000226367_10 (sequence is synthesized)
tggacttctgaaaattgcaagcgcttgctccttgctagtcaccacactccccctttcttagttgcagactccctcttgctgtggtttaccaggtgcccttattgcccctcatgcttgtgt

SEQ ID NO: 885659 - DNA, 120 bp, Artificial Sequence
  ENSG00000226367_11 (sequence is synthesized)
gccactttggacttaatctggcacacttaactcccttcatctacgcctgaagctggacaagctgaagtgactgcgtcactttctcaattctggctcctgcccaccgaccttgctctgcta

SEQ ID NO: 885660 - DNA, 120 bp, Artificial Sequence
  ENSG00000226367_12 (sequence is synthesized)
ggaggaattagctctgcctggccagaacccaagaagtgacaaatcaaactcgctcaataggtggtaattaaacttctggctctaaagcccagaataggttgtcaatgggatttcacagtg

SEQ ID NO: 885661 - DNA, 120 bp, Artificial Sequence
  ENSG00000226367_13 (sequence is synthesized)
gctccctgacactaagcaaggatgtatttctacatctagttttaaatcttaaactctaataggattctcagaaaagacagtaaagactaaggccaaaaaaagttgtttaaaggggaaaat

SEQ ID NO: 885662 - DNA, 120 bp, Artificial Sequence
  ENSG00000226367_14 (sequence is synthesized)
gacagtaagtacaaaagataatctggggaagacctggcaattctgaaatcaaaacatctgttactaagtggatcatgactgcttagtttctaggtgagctgaataaaaatactaactgaa

SEQ ID NO: 885663 - DNA, 120 bp, Artificial Sequence
  ENSG00000226367_15 (sequence is synthesized)
accaactgaggaatagagtggagaggaagggctgaagatgacttcagaaaaaggcctgaggcgtgacaaatgttgatctcactcactgatctatgctgtatttcttttaagaatgtatta

SEQ ID NO: 885664 - DNA, 120 bp, Artificial Sequence
  ENSG00000226367_16 (sequence is synthesized)
atataaatgtccttttcttcccacatccaatccctattactacaccaaatacttgttcctctaggaaatgtgaagttgaaaaaaatttcccccattaaatgagaattattctgcttatga

SEQ ID NO: 885665 - DNA, 120 bp, Artificial Sequence
  ENSG00000226367_17 (sequence is synthesized)
gacactagagagagtggatattctaaaagcagaaatcttgacacttaagccaaaaagccctcccattcagaaggatgtatggatttttcatacttgcatctgcgggacgcagatggtccg

SEQ ID NO: 885666 - DNA, 120 bp, Artificial Sequence
  ENSG00000226367_18 (sequence is synthesized)
acacacaaaccttaataaccctcaaggacaagtggagcaagatctcagacgatctgttcccttttagttacaggaaacttgataatgaagatctccaccctggtcaagaacagaggaaag

SEQ ID NO: 885667 - DNA, 120 bp, Artificial Sequence
  ENSG00000226367_19 (sequence is synthesized)
tagggctaattataggccagatacttttccacagatttctaaaatattattattaattctcataactaccctctgaggtatgtactactactgtcccccttttacagatggggtaacagg

SEQ ID NO: 885668 - DNA, 120 bp, Artificial Sequence
  ENSG00000226367_20 (sequence is synthesized)
tatagagaagttaaggacttgagtcatacgagtagtggcagtagaagaaagagttaaacccgggtagttgggatccaaagtttgtggccctaaccactcacactgccctccacaacaagc

SEQ ID NO: 885669 - DNA, 120 bp, Artificial Sequence
  ENSG00000226367_21 (sequence is synthesized)
tgcctcttttcaggagtaccagagacatgttaccactttaggcagttattattcaataattgtggaccttcctcaggatagatggatgaaaacaaaaggcaaacaaagtatatctgtccc

SEQ ID NO: 885670 - DNA, 120 bp, Artificial Sequence
  ENSG00000226367_22 (sequence is synthesized)
ttaatataccatgaatggttttttatttctaaatctatctcattcatttaatactccacagtactagattgtgtagaggcctacagatgtggttaaatagtctattgatttcttcagttg

SEQ ID NO: 885671 - DNA, 120 bp, Artificial Sequence
  ENSG00000226367_23 (sequence is synthesized)
ttattattcagttgttattactgattttattctgccttttttacaggtctcattccagtaactacttaataccccctgtcagtctccttcaaaggctgaagccagcctctgactgaagcg

SEQ ID NO: 885672 - DNA, 120 bp, Artificial Sequence
  ENSG00000226367_24 (sequence is synthesized)
aaaccttgcaaagctctccatttcacccagagtaaaagctgaaatccttactgtgatcaataagccctgtatgatctttaagctccctcccttctctcccctgggcttattctgttctat

SEQ ID NO: 885673 - DNA, 120 bp, Artificial Sequence
  ENSG00000226367_25 (sequence is synthesized)
ccacccaagattcctttgctgttgcttgaacactccagacatactgctgcctcagggcctttgaaaatacatcacatgactaactttggcatctccttcagtcttcagtcacatatgcct

SEQ ID NO: 885674 - DNA, 120 bp, Artificial Sequence
  ENSG00000246350_0 (sequence is synthesized)
actggttgtgcaaacacctacggtaccagtaattctggggaggcaagtactctggaaacgacggagaattaactccggaattacctagttatctggcatcacggtgaaaagagttccaca

SEQ ID NO: 885675 - DNA, 120 bp, Artificial Sequence
  ENSG00000246350_1 (sequence is synthesized)
gtgtgagtagtgctggagtagatgctgctggtctgtgttttcctgtcaccgtgataaaccatcgctggcactcagacccgtggtgctcaccgcagcgacctgaaacaaaatggagaggag

SEQ ID NO: 885676 - DNA, 120 bp, Artificial Sequence
  ENSG00000246350_2 (sequence is synthesized)
catccctaaggactaccacgtcagcgaatctgtaggatcgtcccccgcctttcctcgttaatttcgggccactttcacctttccctttcaccctaaatcagacttaaaaagaaatttact

SEQ ID NO: 885677 - DNA, 120 bp, Artificial Sequence
  ENSG00000246350_3 (sequence is synthesized)
ccttcttcagcagcaaagcgtcagctttcctgtcagcgtgagtctcactgaagcctgacctaactctttcggatcggaactagaaagtttattatcaaggaggtatttaaccacgactat

SEQ ID NO: 885678 - DNA, 120 bp, Artificial Sequence
  ENSG00000246350_4 (sequence is synthesized)
acttacctactgtacccttgtggttggtcccatggtgtaatggttagcactctggactttgaatccagcaatccgagttcgaatctcggtgggacctttcaaaggtgaacgttttacagt

SEQ ID NO: 885679 - DNA, 120 bp, Artificial Sequence
  ENSG00000246350_5 (sequence is synthesized)
tcctggcttggcctctgaatgtgggaaaaattcgttcctccgcttcccatcgaattctcgtcgaaaacaactttgtggtcgcgtgcacggtattgaactctccccttctatccaagcatg

SEQ ID NO: 885680 - DNA, 120 bp, Artificial Sequence
  ENSG00000246350_6 (sequence is synthesized)
aaagtaccaagctctttcgcctagaagaacgctttcaaagcgtatcaaattcacgggtttggagacaaagagaaagatgctgctcttatcgacttacgaaaagctccagcagcaacgtgg

SEQ ID NO: 885681 - DNA, 120 bp, Artificial Sequence
  ENSG00000246350_7 (sequence is synthesized)
aaacccaattcctgtgatggagacaaacgcttcctcaaaatttcctaggttcgaagccctcctcgctgccacaaccaagtcctgcgtgtaaagtggctgagccttggtctcgggcgtgtt

SEQ ID NO: 885682 - DNA, 120 bp, Artificial Sequence
  ENSG00000246350_8 (sequence is synthesized)
ttgtttgtttttttttttttttttcgctgtggaccttgcgccccgggttacttctcgccccttttccctatcccccatcttgatgagacaattcaccctcatctgctttctctagtcccc

SEQ ID NO: 885683 - DNA, 120 bp, Artificial Sequence
  ENSG00000246350_9 (sequence is synthesized)
gctttctctagtcccctgtacttcttagtctctccgctcaccccgactgcaacgtctggaaatccctccaaagccagcagccccggagggctcgggtccctggtatccacggcgtcgagt

SEQ ID NO: 885684 - DNA, 120 bp, Artificial Sequence
  ENSG00000246350_10 (sequence is synthesized)
cttccagccggagagaaaaactcacctaggaccggacctgggcctcgccgcgctgggagctggcattcccaattcaggaccagacacggtggaggggccctacaacttgtgtgggagaca

SEQ ID NO: 885685 - DNA, 120 bp, Artificial Sequence
  ENSG00000246350_11 (sequence is synthesized)
cactaccaaacactcggtccgaagcatccgggaaacagtcccttggagctgaaggtcaagaacagaaaatgtagccgctatcttgcctcccctgaactgtgtgtgtagacgaggattgaa

SEQ ID NO: 885686 - DNA, 120 bp, Artificial Sequence
  ENSG00000246350_12 (sequence is synthesized)
ttggagatagagttgatgaaacccggaaggtctggaaaattccttatagacactaatttagctgttagaatgaggtgggaaatgtgaggtgtcaaggtgagggaaaggtgtgccctagag

SEQ ID NO: 885687 - DNA, 120 bp, Artificial Sequence
  ENSG00000246350_13 (sequence is synthesized)
gacagagaggacaagaactaaattagaaacaagtatttgtgtttcgtacaaattaatctcttctatgatgtaagagacaacctttaaatccaattatttattttcagatttcttactttg

SEQ ID NO: 885688 - DNA, 120 bp, Artificial Sequence
  ENSG00000246350_14 (sequence is synthesized)
acattttgattttcgcatacataccaaaaaaccaaatcgaatcctactttcaccaagtccattaaaccattaataattcattagctcatattttgaattaccattggttacacagagact

SEQ ID NO: 885689 - DNA, 120 bp, Artificial Sequence
  ENSG00000246350_15 (sequence is synthesized)
ctgtaactaagtttacaaaattcatgaaagcattattttggctcccgttatgtgtgcttgattgtacttcatatggtctgtaatggtgctaattgcagagggaaataacattttcttgtg

SEQ ID NO: 885690 - DNA, 120 bp, Artificial Sequence
  ENSG00000246350_16 (sequence is synthesized)
gtgttgccttagctagtgtggccccaccttctttccactttgttgatgttagcgtgatgagatctcacccaaagtgttctcccttttcctaatggcctaacagcctcttctgcctgtttg

SEQ ID NO: 885691 - DNA, 120 bp, Artificial Sequence
  ENSG00000246350_17 (sequence is synthesized)
ggatgcttataagtccagccatccttccgaccaacaccatagcctgcctgtgttactgtaagtaatcattatgatcacatccatcgtcaagcatccacttatcctagctcaaaccagtaa

SEQ ID NO: 885692 - DNA, 120 bp, Artificial Sequence
  ENSG00000246350_18 (sequence is synthesized)
ctcagactttatcccaagcctctaaattaaggtaatggacaagacctgattggagatggtgcctgcacaacgtgacccagaactgaacagaaggccaaggagcagctgctatgaggaggc

SEQ ID NO: 885693 - DNA, 120 bp, Artificial Sequence
  ENSG00000246350_19 (sequence is synthesized)
ggaagcagccaccaacactgggagaggctgggagcatatgtagatgctccccctgatgccttacatgttctgtgggtctaccaattcctttaggaagctgaggaaattcccgtgggtatt

SEQ ID NO: 885694 - DNA, 120 bp, Artificial Sequence
  ENSG00000246350_20 (sequence is synthesized)
tataaaaactccacccttgaacaaactttagttaggttcctctgagccctcctctcaactaggtcccatccttggcttgtccagcccaatttcagcaaataatccagttgagcctagttt

SEQ ID NO: 885695 - DNA, 120 bp, Artificial Sequence
  ENSG00000246350_21 (sequence is synthesized)
tagcaagaatcttgctaagccaattcagtaagaattcctcacctcaaaatcctatcaagtttctctttttccacccttgatatctaatcaagttcctcgtagtcactttctatcaaatgg

SEQ ID NO: 885696 - DNA, 120 bp, Artificial Sequence
  ENSG00000246350_22 (sequence is synthesized)
ttgtcttacccttactattagctatagatccccagctgtccctgatgtatttggatctgagtttatttaatttctctcccctattgcaattgtctggaataaagtcttccttgcctattt

SEQ ID NO: 885697 - DNA, 120 bp, Artificial Sequence
  ENSG00000255165_0 (sequence is synthesized)
gttttctgtgtgatcttaggtgagtttcttccccactgtagtcctatttcttcatctctgtagactcttatttcactcagtccctcctgctgtgttgggtcccctgatctcagagggaaa

SEQ ID NO: 885698 - DNA, 85 bp, Artificial Sequence
  ENSG00000255165_1 (sequence is synthesized)
tgtgtagttttgccaatttccgtagtgtaaatactcccaccatggctgatttcaagctccttatgtgatatcactgacaaccccc

SEQ ID NO: 885699 - DNA, 120 bp, Artificial Sequence
  ENSG00000244215_0 (sequence is synthesized)
gcacttgccggcccctaactctgtagctgcacacagggcctgggcacttgagacctcagactcgccaccggctcctcagagcccctgcccaggtcacctgtgtaaggagaacacagtgcc

SEQ ID NO: 885700 - DNA, 120 bp, Artificial Sequence
  ENSG00000244215_1 (sequence is synthesized)
aatgcagcacagcatagtgacacccggcctgccgggatttagcccccaccctacctagcggttctggagctgccactgtgacccatgcagggtcgagcatcccaggctcataggaggaat

SEQ ID NO: 885701 - DNA, 120 bp, Artificial Sequence
  ENSG00000244215_2 (sequence is synthesized)
ggacttgccttgtctcagctcgaattctctctcctgccaccctgagaagaggtgccttccaccatgattgcactccctccaagacagacttctctgtggaagcagcatattggaggcctg

SEQ ID NO: 885702 - DNA, 120 bp, Artificial Sequence
  ENSG00000244215_3 (sequence is synthesized)
ttctccaccaagaagtgggtactgtgcaagttatggtcatagtgaaggtgggggacatggagatgatcccgaatgagctgcataggcctcatcgaatcagtggaaagccttgagaacaga

SEQ ID NO: 885703 - DNA, 120 bp, Artificial Sequence
  ENSG00000244215_4 (sequence is synthesized)
gccaaagtttctctgaggaaggggaaattctacctgtagacagcagcttcagttcctgctgcagtttccagcctgcccttcctgatgtccttccctgtggattccagatttgccagccag

SEQ ID NO: 885704 - DNA, 120 bp, Artificial Sequence
  ENSG00000244215_5 (sequence is synthesized)
tcctcatagccacataagccaattgcttgtaataaatctcctagtgttaatgatcctttaataatatacatataaataatatatcctagtattaataaatcaatctccctctctccatct

SEQ ID NO: 885705 - DNA, 120 bp, Artificial Sequence
  ENSG00000244215_6 (sequence is synthesized)
cttgtggtggccgtgtgacagtgttcactgtatgagtgaatgaacaaatgaatgaatgaacggaagacaggagggaactgcaggcagtggacagactcagattcttctatggccatggaa

SEQ ID NO: 885706 - DNA, 120 bp, Artificial Sequence
  ENSG00000244215_7 (sequence is synthesized)
ttcgctgcatcagagccacaaatacaaatgtcgctgtgccgtgaaggcaagcttggctttctgtgtcagagacttgctaagaacatagcccatgtcctttctaaattgtccccagaagtg

SEQ ID NO: 885707 - DNA, 120 bp, Artificial Sequence
  ENSG00000244215_8 (sequence is synthesized)
tgggtaggacacagccatgtgatatatctggaggaaaagttcagactaacaaaattccacttggagaccagggtgctggccaacagcggcaccaaacatccctaaagtcatgtatagatg

SEQ ID NO: 885708 - DNA, 120 bp, Artificial Sequence
  ENSG00000244215_9 (sequence is synthesized)
gcagttgtgagattccctttgaatattgcagcagcgagttgacggttgccaagggaacaggctcataggaggaatggacttgccttgtctcagctcgaattctctctcctgccaccctga

SEQ ID NO: 885709 - DNA, 120 bp, Artificial Sequence
  ENSG00000244215_10 (sequence is synthesized)
aggaccgagctggacacctctgcctgccccagaccggggagtcgctcccaaatcggagctccgcctctgtgcctcctctggaacgtgcgtgtccgtgcctcccgtgccccgccggagtct

SEQ ID NO: 885710 - DNA, 120 bp, Artificial Sequence
  ENSG00000253759_0 (sequence is synthesized)
attgtacagcccagtggttcactgagactctcctgcaaagcctctgatttcacctttactggctacagcatgagcttggtccagcaggcttcatgacagggattggtgtgggtggaaaca

SEQ ID NO: 885711 - DNA, 120 bp, Artificial Sequence
  ENSG00000253759_1 (sequence is synthesized)
agtacaaataaattaacagtcccaagcgacaccttttcatgtgcagtctaccttacaatgaccaacctgaaagccaaggacaaggctgtgtattactgtgagggacacaggagagggaat

SEQ ID NO: 885712 - DNA, 120 bp, Artificial Sequence
  ENSG00000230153_0 (sequence is synthesized)
tgctcagccccctcgacatgtgatgtcctttgccacctcagtactctgcagaatccccgccggcaagaagtccctgaccagatgcagcccctcaaccttggacgtttcagcctccacaac

SEQ ID NO: 885713 - DNA, 120 bp, Artificial Sequence
  ENSG00000230153_1 (sequence is synthesized)
atcagccaccaacccaacagatgaacaacttgacttgctttccaatggagcccagcatttgaagctgtgataattgtcagtttaaatgctgtctatgtcctccaacagctcagagactca

SEQ ID NO: 885714 - DNA, 120 bp, Artificial Sequence
  ENSG00000230153_2 (sequence is synthesized)
gagttgatgcgctggattctactgcaagttgcgtcttgataaacatagttactatgtgagccagcaaattccatttctagatatatacccaagagaaataaaaactcatgttcacaggaa

SEQ ID NO: 885715 - DNA, 120 bp, Artificial Sequence
  ENSG00000230155_0 (sequence is synthesized)
atactgccggaactgtggctaatggtgcggaccaccctgctcactgttagcaaagtgggtagctaccctctcttctggaagcccctctgcagcactcctcttgggagtagaaaaggaagt

SEQ ID NO: 885716 - DNA, 120 bp, Artificial Sequence
  ENSG00000230155_1 (sequence is synthesized)
ggtcaagacctacatttgggagctgatccgtcttgctctcagttagggcccagcccttctgtggggaccaggaaaatctttgctcacctggagaagctgctggttcagcccaactttatc

SEQ ID NO: 885717 - DNA, 120 bp, Artificial Sequence
  ENSG00000230155_2 (sequence is synthesized)
taacgccaaagcctcatttaaggcactgagcttgacagctgcagcccgaagatcagctacttctgtcttcagggtgttttcagaactcgacagctctgcaattgactgctctgcctaaaa

SEQ ID NO: 885718 - DNA, 120 bp, Artificial Sequence
  ENSG00000230155_3 (sequence is synthesized)
aacaaaaaggattaaagagtttcatatttccaattttcctggaacagtaaacagttcacattcccaacactgctgctttttggtacagagatcagttaatactccattccctctcctgca

SEQ ID NO: 885719 - DNA, 120 bp, Artificial Sequence
  ENSG00000230155_4 (sequence is synthesized)
ttctaaacaagttttcccttcattcattcattaaggagtgagacaggacctcacagtatagagataccaaagttaggatagagaaatgactatgattgtaatgatgccacagaaaatgta

SEQ ID NO: 885720 - DNA, 78 bp, Artificial Sequence
  ENSG00000230155_5 (sequence is synthesized)
ccctctcttctggaagcccctctgcagcactcctcttgggagtagaaaaggaagtggtcaagggaatggggtttcgcc

SEQ ID NO: 885721 - DNA, 120 bp, Artificial Sequence
  ENSG00000230155_6 (sequence is synthesized)
taccctctcttctggaagcccctctgcagcactcctcttgggagtagaaaaggaagtggtcaaggtcgacctgcaaagcatttctcgcctgctctgcggcctccattctgctgcacacag

SEQ ID NO: 885722 - DNA, 120 bp, Artificial Sequence
  ENSG00000230156_0 (sequence is synthesized)
aaataataatggctaataatggcaaacaattagtaattgctaggtgccaggagttgtgctaaatgctttacatgagtagataggatattgcagatctcaacagttaagaaatttgcttgt

SEQ ID NO: 885723 - DNA, 120 bp, Artificial Sequence
  ENSG00000230156_1 (sequence is synthesized)
gatcatgtagtttggagagtatcagagtctgaaatgaagacaacttgagggtcaataaacaggaagaaaaagtactctacaagacagtttatctgataacggtatgatggaagatggcat

SEQ ID NO: 885724 - DNA, 120 bp, Artificial Sequence
  ENSG00000230156_2 (sequence is synthesized)
gtgcttcatgtcgagtggtctgcagtggactgtgtctgcttgaagcgatgctccggagggcttattgttgtgtggggtaaagcatgagatcactgaaaaatgagagaaatcgagcatacg

SEQ ID NO: 885725 - DNA, 120 bp, Artificial Sequence
  ENSG00000230156_3 (sequence is synthesized)
aaatgtgaagcatatctgttgacaccatgcgctccctttgcttgcactggatggcgcatggtttccgtgcgcagtgcctgaggtgtggggcaggcgaggcccatgcagcctggctccttt

SEQ ID NO: 885726 - DNA, 120 bp, Artificial Sequence
  ENSG00000230156_4 (sequence is synthesized)
ccagaaggttgctgttcattacagctcgagtgtgctgggttctgcagatattatctattttaaattaacgctccgtaaaaggaatttaaagttttctgaaaagaaaccaatgaatgaagc

SEQ ID NO: 885727 - DNA, 120 bp, Artificial Sequence
  ENSG00000230156_5 (sequence is synthesized)
tccccaaaggcgcatggctaagagtggttatttgtctccttgtcacgctgttttgagggaaggattcctacactaggattatgaagatcgccaaacagatgacgctggatcccagaaaag

SEQ ID NO: 885728 - DNA, 120 bp, Artificial Sequence
  ENSG00000230156_6 (sequence is synthesized)
tggggcagaatgcagtttagttgtcacatatgctcacagcctagggaagaagacagcggacagcccacagggccacgcgatggttcaagaacagagtgaacagccagggcctgtgaaagg

SEQ ID NO: 885729 - DNA, 120 bp, Artificial Sequence
  ENSG00000230156_7 (sequence is synthesized)
gaggaatctcccagtgtttgtgccatgttttgatctgactgaaagccataaacatagccgaagcctgggccatccacagaagacccaatgttctctttttccaagtgggcattttgtatc

SEQ ID NO: 885730 - DNA, 120 bp, Artificial Sequence
  ENSG00000230156_8 (sequence is synthesized)
tctgaagagttctagactgagctacatcagtagacctctgcatttaaagggagcaattctcatccgaggatcctgattcttctactgtagtgcaatttcaccactctctccaaatgtctc

SEQ ID NO: 885731 - DNA, 120 bp, Artificial Sequence
  ENSG00000230156_9 (sequence is synthesized)
aataatgcaaacacaagcaagctgccaagtaagccatttttctattacggagcccttcatcagtcatattattaaagaaaaaacaacaatactagtaataatgatcacctattcaagacc

SEQ ID NO: 885732 - DNA, 120 bp, Artificial Sequence
  ENSG00000230156_10 (sequence is synthesized)
aagaggttgatcctccaaaattcaaacaaggaaaaatctctcccaatctctcctttcctccatcccttttctttacttctcatcccatatataatattatataatgcatacgtaataaaa

SEQ ID NO: 885733 - DNA, 120 bp, Artificial Sequence
  ENSG00000230159_0 (sequence is synthesized)
acacatggcagtctggcctgaagtttcccaaaacaggctgactaggggcctactgcttcccaactaccagctgagggggtccgtcccgaaaagggagaagaggcctaagaggaaacatca

SEQ ID NO: 885734 - DNA, 120 bp, Artificial Sequence
  ENSG00000230159_1 (sequence is synthesized)
acatctttttactcctagcgagcggcattctgtgtgccttgattgtcttctggaaatatcgctttcagggaaacaatggcgaaatgtcatcagtttcaactgcttttgcactactaagac

SEQ ID NO: 885735 - DNA, 120 bp, Artificial Sequence
  ENSG00000230159_2 (sequence is synthesized)
aacgatcttttattcaacaacctctctcgagatattttaaataatttctcacactcgaaaaacatgcagaagcgactattggcaaacctgaagagggtggaataccaaatggctgaactg

SEQ ID NO: 885736 - DNA, 120 bp, Artificial Sequence
  ENSG00000230159_3 (sequence is synthesized)
gaatattttctagttagcgagggtttgagaggtgcgtcaggtctccagaaattcacctcaaaagcgtacaggatgtaatgccagtggtggaaatcattaaagacactttgagtagattca

SEQ ID NO: 885737 - DNA, 74 bp, Artificial Sequence
  ENSG00000229905_0 (sequence is synthesized)
aaagacagagaattagtcagacaggaatcaaggttccctagagaaattttgccagaaagcaaggaagccatcaa

SEQ ID NO: 885738 - DNA, 120 bp, Artificial Sequence
  ENSG00000253752_0 (sequence is synthesized)
atggcctggtcccatttcctgctcaccccctttattcactgcacagggccttgggtcccatctgcgctgattcagtcaccctcagtccctggggctctgggccagagggtcaccatctcc

SEQ ID NO: 885739 - DNA, 120 bp, Artificial Sequence
  ENSG00000253752_1 (sequence is synthesized)
gttattggtgtgatgtacactggttccagcagctccaaggaatgacccccaaactcctcatctataaaaacaattggtgacacctgtgggtccctgacaattctctggcttcaagtctgg

SEQ ID NO: 885740 - DNA, 120 bp, Artificial Sequence
  ENSG00000253752_2 (sequence is synthesized)
caactccatttttgtgaccatcactgtgctacagcctgaagatgaggctgattatcactgccaattctacaaaaacagcctgagtgctttcacagtgctccgggttgaagtaagtcagac

SEQ ID NO: 885741 - DNA, 72 bp, Artificial Sequence
  ENSG00000253754_0 (sequence is synthesized)
aactcaagcaattcaccttcctcagccttctgagtagctgacgggggaggatggcttgagcctgggaggtag

SEQ ID NO: 885742 - DNA, 120 bp, Artificial Sequence
  ENSG00000253754_1 (sequence is synthesized)
cacagccagacattatctaaaaaaaaaagtgttattgtaaaatttgcccaataatatagtcaatacaatataactcataccatgaagcaactgctaaaattgctactgcaatcttaggct

SEQ ID NO: 885743 - DNA, 120 bp, Artificial Sequence
  ENSG00000253754_2 (sequence is synthesized)
atattagtaaaagcatacatacaagtaacatgagctaatattgccactgtaatctataaagtttagatgacaatcctagaataaaatttcaattatgaacatctagattgtaagaatatg

SEQ ID NO: 885744 - DNA, 120 bp, Artificial Sequence
  ENSG00000229901_0 (sequence is synthesized)
gttctaggctgcttggccaagccagaactccactattgccctgcctcctgttctgtccccaccatggctacagagggcccacaggatggattctgggacatggactcatggttgctgtac

SEQ ID NO: 885745 - DNA, 63 bp, Artificial Sequence
  ENSG00000229901_1 (sequence is synthesized)
tgcctggccatctctgtgccatcttcttctgatcctgggcagtgggactaggggaagttacct

SEQ ID NO: 885746 - DNA, 120 bp, Artificial Sequence
  ENSG00000229901_2 (sequence is synthesized)
ttcttctgatcctgggcagtgggactaggggaagttaccttttctggggcacatttagtggtgtgctggcaaatgtttaaccaccagctcttctggaagttaaaaaaaaaacctacctga

SEQ ID NO: 885747 - DNA, 120 bp, Artificial Sequence
  ENSG00000261188_0 (sequence is synthesized)
agcgtgggacgctacggcggatatggctgcagagcggccggctgggatcttagataggaggggtggatttgcaaggcctagaatagctggggagtggtttccccgcggaatcggcctccc

SEQ ID NO: 885748 - DNA, 120 bp, Artificial Sequence
  ENSG00000261188_1 (sequence is synthesized)
tgccgctcctgctttgtactgtgacgctcagcctgtgatgactggtgtggaatccgctgagccaccttggcctaaggagactttaccactctgagattgtaaatctgtaaaatagagatg

SEQ ID NO: 885749 - DNA, 120 bp, Artificial Sequence
  ENSG00000261188_2 (sequence is synthesized)
taggattagcccatacggtagttgtggtaaatactgtgagacaataaggggcctgggacacagcattcaaatgggaataatgaaggtcaagactgtgattcctgtatctttgacgctctc

SEQ ID NO: 885750 - DNA, 120 bp, Artificial Sequence
  ENSG00000261188_3 (sequence is synthesized)
ggtataagcaccgtcgtgggcacagggcagtggcctttatgcaggagtttaagagggaatgaaggaatgaatgggcaaactctggagttcccaagtattctctccaggagctgtttccat

SEQ ID NO: 885751 - DNA, 120 bp, Artificial Sequence
  ENSG00000261188_4 (sequence is synthesized)
tcttttcgtttccagcaggttggtaaattcattaatttattcattgatctaattaaaatatactaagtgcccctcacctgtgctaggccaatgtgatacaatgagcagaacagtcatggg

SEQ ID NO: 885752 - DNA, 120 bp, Artificial Sequence
  ENSG00000261188_5 (sequence is synthesized)
ccctccctgggaagccctcactagcccaaggactccttgtagacatttaagtgtccacaggctctggagttccaaccttgagtgcaatttagcagctgtggaccttgggcaagtcattac

SEQ ID NO: 885753 - DNA, 120 bp, Artificial Sequence
  ENSG00000261188_6 (sequence is synthesized)
atctaagcctgttttctcttctgcaaaatggttaaggattcaataagataaaactgtaggcaatgaaaaccgtacctggtaacagtaggtgctgaagaagtgttagctattaatttttgc

SEQ ID NO: 885754 - DNA, 120 bp, Artificial Sequence
  ENSG00000261188_7 (sequence is synthesized)
ttaatttttctctctctgctctatgtgatgaaaagattcaagaggcaattgttggaatgtaaaaagagcacgggacttggagtcaaatacttaagtctaccatcaagtagttgttaagaa

SEQ ID NO: 885755 - DNA, 120 bp, Artificial Sequence
  ENSG00000261188_8 (sequence is synthesized)
tagtatgtactcaggaaagaaatggaaaatgtggttttagcattgaaggccgggagagagggtctaacagactacaagccctgccaggagcagagtaagggaaacagaggagaaaagtgt

SEQ ID NO: 885756 - DNA, 120 bp, Artificial Sequence
  ENSG00000261188_9 (sequence is synthesized)
ttttagtctgtgcctgaatgtatttacatctgtttgtagcccaaaagccaaaagcatacatacgcttggcttttctgtagctatgtttatggctttacagcagattttatggagctgcaa

SEQ ID NO: 885757 - DNA, 120 bp, Artificial Sequence
  ENSG00000261188_10 (sequence is synthesized)
ttactttgatcatgagggactgatgctagtggatttacttcaccaaatggaactcactttgtggcttctgaagaagggacctttgtggactgtcatggagtagttaagagtgcaggctct

SEQ ID NO: 885758 - DNA, 120 bp, Artificial Sequence
  ENSG00000261188_11 (sequence is synthesized)
gatttagtgatcagagtctgcattgtcaggaatgggacaaagtgaagttatgtggcacttgataggatgccctgagaagattgcaacatcacccctgtgatattcctgctgaagatccat

SEQ ID NO: 885759 - DNA, 120 bp, Artificial Sequence
  ENSG00000261188_12 (sequence is synthesized)
aacctggatgtaatcatgaggatatatcagacaaacccacgtaaagagacatgctgtatacaaaactgtaatcttagaaagtgccaaggtcatgaaaatcaaagatagaccctggaactg

SEQ ID NO: 885760 - DNA, 120 bp, Artificial Sequence
  ENSG00000261188_13 (sequence is synthesized)
ttccaaactggaggggaccaaagaggcatgacaactaaacacaacacatgattctgaactggatctttttgcttgaaaggaagttacagggacagttggaaaagtttaaatggggcctac

SEQ ID NO: 885761 - DNA, 120 bp, Artificial Sequence
  ENSG00000261188_14 (sequence is synthesized)
aatgccgtggtaatgatgtgtccgtgttaatttcctgattttcatggttgcctgttaagttacatcagaggatgttcttgtttgctggaaagtaaatcaatgtatttggcaggggataag

SEQ ID NO: 885762 - DNA, 120 bp, Artificial Sequence
  ENSG00000261188_15 (sequence is synthesized)
gcatcaaatggtcaccttaatttcaaattattacagggaaaatgtttctctctgtacttaataacttttttgcaatttcttaaaatgaaagctctggagtaaaaacttcaaggatccaaa

SEQ ID NO: 885763 - DNA, 120 bp, Artificial Sequence
  ENSG00000285244_0 (sequence is synthesized)
gccgagttccagcaggccagccggtcccggaacctcgcgtgctgcaggagggcacttccctcctcccccagtccctcgcctgcgttggtgcgctggacacatttccccacgaagtgagcc

SEQ ID NO: 885764 - DNA, 120 bp, Artificial Sequence
  ENSG00000285244_1 (sequence is synthesized)
acaaatctggctttttttacttggagaatgagttggcactctccaggaggacacagcactgttagaatgagccccctttctggctcaccgctgacccactctggcaggcaaggatttacc

SEQ ID NO: 885765 - DNA, 120 bp, Artificial Sequence
  ENSG00000285244_2 (sequence is synthesized)
caatgcagctgaaaagatcaggaggatgacattaatacataaaaattcataaattataaaaacgatgcacctctctgcaatttccagaaaagccccacaatatcacctctattcccactg

SEQ ID NO: 885766 - DNA, 120 bp, Artificial Sequence
  ENSG00000285244_3 (sequence is synthesized)
attgaggtccactgaacttaagtatacaaagttgttgattgtcacatgcttccgggaaggagggaattggagagactaccaaaaaagggcaacctgatctccagggaaacagaagaattg

SEQ ID NO: 885767 - DNA, 120 bp, Artificial Sequence
  ENSG00000285244_4 (sequence is synthesized)
gacattgaaccaatctccctacaccctacactcacctgaacagaagaaatccctgtggttgcagcagctttgttggccaggaaggggaggatttgacgagtgagttgtctgtctcctgaa

SEQ ID NO: 885768 - DNA, 120 bp, Artificial Sequence
  ENSG00000285244_5 (sequence is synthesized)
tactccccacatagcccgtatacactgctggggaaactggggctcagagaagtctggtgacctaactcagatcatgcagcaaagaaatgactatagttggaacacaggacttttgcctcc

SEQ ID NO: 885769 - DNA, 120 bp, Artificial Sequence
  ENSG00000285244_6 (sequence is synthesized)
tgcccggggctctctgcttgtcatcctttatttctgtggctccaaaatgacaaaaatgccaaataaccctcatttgcagatggtttatggagatgacataaataaaggacaattctggaa

SEQ ID NO: 885770 - DNA, 120 bp, Artificial Sequence
  ENSG00000229162_0 (sequence is synthesized)
caaaagggaagtcatcttccgttggtctatggggaccctgaggtagtaggagctcggtgataattctagggaccaccctgggttgtcaggtgggggagacagagaagcccacataggagg

SEQ ID NO: 885771 - DNA, 120 bp, Artificial Sequence
  ENSG00000229162_1 (sequence is synthesized)
caccaaatgcaactcactcgtgcccttttactcatgagagaacacggatccagagatgtcaagtgactcagacacagtctcacagcacacaggcggcagaggcaggtaggggactgggct

SEQ ID NO: 885772 - DNA, 120 bp, Artificial Sequence
  ENSG00000229162_2 (sequence is synthesized)
tccctggcagcagtccccaagcctgcctgagaggcacatcagaatcgctttaggggatttgcaaaaccacacctgcccaggcccaaaccctagagattctgattccgcagtctgaggtag

SEQ ID NO: 885773 - DNA, 120 bp, Artificial Sequence
  ENSG00000229162_3 (sequence is synthesized)
tttgctcagggactgagatgggatggcatttggaagacacagctgaaatttagcatcatattccatggcgattttccaccagtggaaatcacaggtgttctctggtatcacagcggggtc

SEQ ID NO: 885774 - DNA, 120 bp, Artificial Sequence
  ENSG00000229162_4 (sequence is synthesized)
agggatgacctgaaatattgttcatgctcatcacaactgcatggcccaccgcggggtcttgtcactcagtgagttcttgaagaggcacagacaaatggagttcaacaaatggaaaacaac

SEQ ID NO: 885775 - DNA, 120 bp, Artificial Sequence
  ENSG00000229162_5 (sequence is synthesized)
tgcctttaattagctccgaggactacaaagggaacaacgttataatagcagcaactccaaggaagcagccacagctctcagctctcagacctggggctgccgctcatcatcagctacagc

SEQ ID NO: 885776 - DNA, 120 bp, Artificial Sequence
  ENSG00000248600_0 (sequence is synthesized)
gacatccaacaagtactctctgtatccagaaacactaacttatctaagagcagagaattcacaggaaccctataatcgtcagttaggttttgcatcaaaacagatgcagcaagaaaagcc

SEQ ID NO: 885777 - DNA, 120 bp, Artificial Sequence
  ENSG00000248600_1 (sequence is synthesized)
gcatctcaatgccgttgtgactttatgaaggtggacaatcctggttgagcagagatattgcagatgtctcccctgtcatggaggataacctgccttcccagcttgtcttacagatgctga

SEQ ID NO: 885778 - DNA, 120 bp, Artificial Sequence
  ENSG00000248600_2 (sequence is synthesized)
ccaaaatatagttgggattttagtaacaaatatcctatgagttgctgaattgaattcagtaatctcagaaaacccagcctggccctccaaactcaagcctctccactgggtctcacacct

SEQ ID NO: 885779 - DNA, 120 bp, Artificial Sequence
  ENSG00000248600_3 (sequence is synthesized)
tgacagtatgctccatcgcaccgccatttctacaccccacgcctgggcctggctgaaacttcaaggctccccttggaaggcagcccatctttgaggtcagaagaaaacactgtcattctg

SEQ ID NO: 885780 - DNA, 120 bp, Artificial Sequence
  ENSG00000248600_4 (sequence is synthesized)
aaagttggccactcaccttcgaaatatcccatccctatggtttttttgttgttgtttgttttgtttaaaggcaacaaaacggctagtctgtgacccataccagaggtgttaaaacagaag

SEQ ID NO: 885781 - DNA, 120 bp, Artificial Sequence
  ENSG00000248600_5 (sequence is synthesized)
gcagatgtggcgaacctggagtgagttcagagaagtgacaaagatgatgaaagggctaaagaatggtttctgagggaaggctgaagggattctttttgcctttatcccaagaaatgagaa

SEQ ID NO: 885782 - DNA, 120 bp, Artificial Sequence
  ENSG00000248600_6 (sequence is synthesized)
aataatgattattaacttcaaagccagtttgctcttcatgtctgcaacaaacccaatgaatggaaataggctcgaattaaaagcaggagagaattgggtgaggtaaaaggaagactttct

SEQ ID NO: 885783 - DNA, 120 bp, Artificial Sequence
  ENSG00000248600_7 (sequence is synthesized)
tgtgcttcagaggaagaaatatggcaatctgaggtcatggagtacagatgtgtatacagattttaatagagggatagaccacacattttttataattaaacttgacttctcattttttaa

SEQ ID NO: 885784 - DNA, 120 bp, Artificial Sequence
  ENSG00000248601_0 (sequence is synthesized)
gagactgggctctcaccagaccaagtgagatgaaagcagagactgggctctcaccagaccaagtgagagcaccttgatcttggactttccagcctccagaaccgaggttctgagagctgg

SEQ ID NO: 885785 - DNA, 120 bp, Artificial Sequence
  ENSG00000248601_1 (sequence is synthesized)
catgaattcagaaactagtccagaatataagaaggctgcctattataaggctttacacaaggacttcattatgttatcaagttaagatgagttcatactagattatggtgggccctaggc

SEQ ID NO: 885786 - DNA, 120 bp, Artificial Sequence
  ENSG00000248601_2 (sequence is synthesized)
caatgactgatgttcttaaaagagaaatttggacatcgattcaggcagagggacgatggctatgtaaagatgaaggcagagattggggggatgctgccacaagccaacaataccaaccac

SEQ ID NO: 885787 - DNA, 120 bp, Artificial Sequence
  ENSG00000248607_0 (sequence is synthesized)
agcccagcaggctggtccatactggcttgggctggacagagctgaagcccacgtggtgcctggccttgcttaaccgagagaacaaagtggaagagacgctgtggtagtcagtttctaggc

SEQ ID NO: 885788 - DNA, 120 bp, Artificial Sequence
  ENSG00000248607_1 (sequence is synthesized)
caacttctatgtcctatctcttgggctgctcatgctcccagccactctgctgtgaggaagaccacgtggtcacacatagaggccgtatgccagggtcctgctcacagcccagccttgcac

SEQ ID NO: 885789 - DNA, 120 bp, Artificial Sequence
  ENSG00000248607_2 (sequence is synthesized)
atgagtgggccgtcttgggctggcccaacagccaccacgcacgcagagcaggcggttcttctcaccgggccctgcccaacctgtagattccgcatcaaacaataattggctttaaacaaa

SEQ ID NO: 885790 - DNA, 77 bp, Artificial Sequence
  ENSG00000248605_0 (sequence is synthesized)
atgtgtccgcatttggtacaacgttcgtcaaagaggatgaggttaccgggattgtcactgatgtgtttaaatgactg

SEQ ID NO: 885791 - DNA, 120 bp, Artificial Sequence
  ENSG00000248605_1 (sequence is synthesized)
tgaggttaccgggattgtcactgatgtgtttaaatgactgcgccagcctccagagaataagatctgtattcattgattcatttaaccaatattcaggtgactaccacatgcaataccaca

SEQ ID NO: 885792 - DNA, 74 bp, Artificial Sequence
  ENSG00000248605_2 (sequence is synthesized)
tagagaaaacatcctgaatgccactgtgaacactcttattgacttctctcagattttctcattgttacataaag

SEQ ID NO: 885793 - DNA, 120 bp, Artificial Sequence
  ENSG00000248605_3 (sequence is synthesized)
ctagaagcattctgtattaggactacaatcagcagtcatggtttgtatgcttcataatcatttcactgggtttacttttcaatatccctagggtattaatcttttgaaaactcacttgca

SEQ ID NO: 885794 - DNA, 120 bp, Artificial Sequence
  ENSG00000248605_4 (sequence is synthesized)
gtggagatgattccattgtaaaatgtttcttcattcccaatagcacaatatagtaagtagtaggtctattttcatgctgtatcaactaatttgcaatcatagcagatcttaagatttctt

SEQ ID NO: 885795 - DNA, 89 bp, Artificial Sequence
  ENSG00000248605_5 (sequence is synthesized)
ccagctacctgggaggctgaggcatgaaaatctcttgaacctgggaggggagatcgcgccactgccctccaactaaagagtacatgaaa

SEQ ID NO: 885796 - DNA, 120 bp, Artificial Sequence
  ENSG00000248605_6 (sequence is synthesized)
acatgaaaagttcccaaatcataaatcaaaaaaaattgtttgaaagtttatttacaaccaacatctcatttccccgtaagtctccatttcttctcatatgcactgcagataacaaaacca

SEQ ID NO: 885797 - DNA, 120 bp, Artificial Sequence
  ENSG00000229160_0 (sequence is synthesized)
gttttagaacatggtagcttcaaagacgtttgttaaaaggataggctggtctgcatggtggctgttttactgcttttctaaacttgggtgaacccctggaggagaagccccaaacagggt

SEQ ID NO: 885798 - DNA, 120 bp, Artificial Sequence
  ENSG00000247400_0 (sequence is synthesized)
gagtgggactatttgatcctttccaggttcgccagcgtggtgttacgagaggaaagcgcagccgcagcgtacgaatgggaaggccaaacacggtcccggggagtctgagggaagctgcag

SEQ ID NO: 885799 - DNA, 120 bp, Artificial Sequence
  ENSG00000247400_1 (sequence is synthesized)
cctcccgctgagcgtcccggaacaaatactgtctgaactgagccgtaagcaagaaacggtcaggagaagctggggcgatctgatgattagaacatttcagggactaccagagagaagtgc

SEQ ID NO: 885800 - DNA, 120 bp, Artificial Sequence
  ENSG00000247400_2 (sequence is synthesized)
gtaattgctctaaggcagctttctgccatgtgaggacgctaccagaaggccctcatcagaaactcaaacctgcaagagccttgatcttggacttcccagcccccagaagtatgagaaaat

SEQ ID NO: 885801 - DNA, 120 bp, Artificial Sequence
  ENSG00000247400_3 (sequence is synthesized)
gcactgtggcttaagagagcaaggcgttcctgaatgcagccaacatcaactggtaaacaaaaaactgtgagaacggatcctgaatcttgcgcttaccaggggaaattcaggagagatatg

SEQ ID NO: 885802 - DNA, 120 bp, Artificial Sequence
  ENSG00000247400_4 (sequence is synthesized)
aacctgagcaagatgaggttgaagttactcaatgcggcattaagcctgttcacggccacttcctccggcgtcaccaacacacacactgtacaccagcagtatttttacacggggtatgtg

SEQ ID NO: 885803 - DNA, 120 bp, Artificial Sequence
  ENSG00000247400_5 (sequence is synthesized)
tgttaagtactatcaggtggataattattacttcacctgtatttgctgccttgataccattagagaaactcatgaattataaatagcatagtgaatttgtgattccctgaagatatacta

SEQ ID NO: 885804 - DNA, 120 bp, Artificial Sequence
  ENSG00000247400_6 (sequence is synthesized)
aggtggacttttaaaaaggcttctattccaaagggaactaatatggaggaaatggtttcgagaaagaaaaaagaaaaaacggagtccttgattagttgtggggaaggcaacataatgtaa

SEQ ID NO: 885805 - DNA, 120 bp, Artificial Sequence
  ENSG00000247400_7 (sequence is synthesized)
aagatgcagtgtttttcccctacaaggattcagcatcaaggcttcatcttggaagcagagattggaccttcaccagaaaatggaacacggcggcaccttgatcttgaacttcccagcctc

SEQ ID NO: 885806 - DNA, 120 bp, Artificial Sequence
  ENSG00000247400_8 (sequence is synthesized)
cagaactgagagaaaataaattttatatcatagcagcacaaacaaagacaggctccttcagcagcttcacagaaccttggatgcctcctggcccaggagccagtggggacacctggccat

SEQ ID NO: 885807 - DNA, 120 bp, Artificial Sequence
  ENSG00000247400_9 (sequence is synthesized)
tcctgggaggtggagaaaggatgcatggaggaagagaggcatccacctggctcagagaacactaagcagcaaaatattgaaagagttgtagtgcttctcttaactgcttctattaaaatg

SEQ ID NO: 885808 - DNA, 120 bp, Artificial Sequence
  ENSG00000247400_10 (sequence is synthesized)
caagaggagagaaatgacttaaagataaaatttataattaaaagagaagcagaatgtaaagatttggaaaattcacagcctgggcatataaagatttaaaaaatgtgttggggagaaaac

SEQ ID NO: 885809 - DNA, 120 bp, Artificial Sequence
  ENSG00000247400_11 (sequence is synthesized)
cgagagtggccaaatgactgttgatatggagattactatggatacaaggaagccagctttctgccatgtgaggacgctaccagaaggccctcatcagaaactcaaacctgcaagagcctt

SEQ ID NO: 885810 - DNA, 120 bp, Artificial Sequence
  ENSG00000247400_12 (sequence is synthesized)
cacgagacgaggctgcgcccgccggtcgcagagctgtcagcaagctccaaaccgcggctgccgcccggagggaagcagacggggagtcggtggcggccgccgagtccgcatgcgcaggct

SEQ ID NO: 885811 - DNA, 120 bp, Artificial Sequence
  ENSG00000247400_13 (sequence is synthesized)
ggctgggcgcagtggctcacacctgtaatgctagcgctttgggaagccaagatgggaggattatttgaggccgggagtttgcgaccagcctgagcaacatagcaggatcctgtctctgca

SEQ ID NO: 885812 - DNA, 120 bp, Artificial Sequence
  ENSG00000247400_14 (sequence is synthesized)
ccagcctgagcaacatagcaggatcctgtctctgcaaaaaaatttaaaactagccaggtgcggtggctcgtgcctgttgccctagctactcagggagactgaggcagaggattgcttcaa

SEQ ID NO: 885813 - DNA, 120 bp, Artificial Sequence
  ENSG00000247400_15 (sequence is synthesized)
cccaggagtttgaggttgcagtgagctaagatcatgtcactgcactccagactgagcaacagagtgacactttataaaaaaaaaaaaaaaaaaaactaggtttttgaacttgcttaatca

SEQ ID NO: 885814 - DNA, 120 bp, Artificial Sequence
  ENSG00000247400_16 (sequence is synthesized)
tgtcagattatctttccctaaaggaataatttctattcctatcagctgtttatattcctgcctagtcaccatcactagatataattgattttcagtttttgccaatctgaggaacaaaaa

SEQ ID NO: 885815 - DNA, 120 bp, Artificial Sequence
  ENSG00000247400_17 (sequence is synthesized)
atgacccttatatgtcaaatttacagtttattttcaaggattttgggattctgatcaaattttggtaccttcatataaaatttggcttttatatcacatcttgtcttctctgctttccac

SEQ ID NO: 885816 - DNA, 120 bp, Artificial Sequence
  ENSG00000247400_18 (sequence is synthesized)
cctcttttatgttgttttttggcttctggccgcatgactataatctccgcttttgtattcacatcaccttctgtcatttttgaccttgcctccgtcttacaaggatccttgtaattaatt

SEQ ID NO: 885817 - DNA, 120 bp, Artificial Sequence
  ENSG00000247400_19 (sequence is synthesized)
atattgggcctgctgagataatccaggatattcttcctactcaagttcctcaatttaatcacatctgcaaaaactgccttttgctatagaacaatgacaggagattagaatgtaaacata

SEQ ID NO: 885818 - DNA, 120 bp, Artificial Sequence
  ENSG00000247400_20 (sequence is synthesized)
tttgggggaccgttattcagcttaacacaatacgtcccccttcatcaggtggagcttattttccctccttccttgagtgtgggctggacttagtgactaacttccaaagaacagagtatg

SEQ ID NO: 885819 - DNA, 120 bp, Artificial Sequence
  ENSG00000247400_21 (sequence is synthesized)
gaaagggaggaggagagtaacttcatagtacagaaacctggaaacactgtcttggccaggtggtcaaagttaatatcatcaagtcatgttgatagcatatactcccaatatactgtgatg

SEQ ID NO: 885820 - DNA, 120 bp, Artificial Sequence
  ENSG00000247400_22 (sequence is synthesized)
agaagggcaattcacctctgtggtattctcaaaacctataacccaatctagtctaaacatgaaaaaaaaaaaatcaaactaaaattgaaggacattctataaaacacctgatcagtattc

SEQ ID NO: 885821 - DNA, 120 bp, Artificial Sequence
  ENSG00000247400_23 (sequence is synthesized)
ctcaaaactatcaacgtcgtggggaacaaggaaagattgaaatactgtaacagaccagaggaaactaaggaaacttaattgatgactgaatgcagtgtgctgtgttgaactggatcctag

SEQ ID NO: 885822 - DNA, 120 bp, Artificial Sequence
  ENSG00000247400_24 (sequence is synthesized)
agaaaatagacattagtggaaaaactactgaaatatgaatagtctcaagtttaatagtagtgtaccattattactttcttagttttgacaaatgtaccatggttatgcaagatgctaaca

SEQ ID NO: 885823 - DNA, 120 bp, Artificial Sequence
  ENSG00000247400_25 (sequence is synthesized)
atacagaaaaataaggggtatttgggacctccctgtattatccttatgcccttacttgaaagttgtttcagcaatagaagtttatttaaaatattgtgaagggcctgagtatttttaaat

SEQ ID NO: 885824 - DNA, 120 bp, Artificial Sequence
  ENSG00000247400_26 (sequence is synthesized)
caactgcagtgactctcttttgtgtatttgtgtacagatgagtttttctgcatcgaattttatctcctttccttgcagaagaaagagaattagccctttacagagataacagttgcctaa

SEQ ID NO: 885825 - DNA, 120 bp, Artificial Sequence
  ENSG00000247400_27 (sequence is synthesized)
gccagctcttttctcctctttttgatgttcttctttttctctcagtttgaaaattgtaggttatttgagtttttaaaatgtctattgctacatacacattctagttatattctagtccaa

SEQ ID NO: 885826 - DNA, 120 bp, Artificial Sequence
  ENSG00000247402_0 (sequence is synthesized)
aaatagagttacatagaggataagcaacatcgtttcttagcagtaaaggtgtccttctggagagatagagcgtgccattattctggcttgatattaacaggtcaggccaggtgcggtggc

SEQ ID NO: 885827 - DNA, 120 bp, Artificial Sequence
  ENSG00000223989_0 (sequence is synthesized)
atatatttttagttgaaatatggagccacagcaacactttgacttttcctcttcagaagatgagacaggccggggtcatcattgttacaaaagcaaggcctgtgatcgtgacaaggacag

SEQ ID NO: 885828 - DNA, 120 bp, Artificial Sequence
  ENSG00000223989_1 (sequence is synthesized)
agtggagggcatgggcctccgatgagagaactccagagctggccgggacctactgtgctggcagcagacaggtggaccctcaggcccagagccggcagcagaggggggtgaatccatggc

SEQ ID NO: 885829 - DNA, 120 bp, Artificial Sequence
  ENSG00000223989_2 (sequence is synthesized)
aacaggagtcacaggtgaaccaatgggaaaccaaacacacgcatcgaaagccaatcaaacacaaaccccaaatgtgaaggcagcagcaagttctttgtgtaataaatattgcaaagcgca

SEQ ID NO: 885830 - DNA, 120 bp, Artificial Sequence
  ENSG00000177596_0 (sequence is synthesized)
gagctttgaactttctttgttttagaaaattgcattgatatagtgttactctcttgtgatattgtgttgatatgacattactctcttaggagacagtaattttctaaaacaaagtcatat

SEQ ID NO: 885831 - DNA, 120 bp, Artificial Sequence
  ENSG00000177596_1 (sequence is synthesized)
tctctcaagttttcctcccctaacttggacaatccctacctaatctccagggatagactcctatcatatttccaaactattaattatagcagaaactagatgtcttttgggattagcctt

SEQ ID NO: 885832 - DNA, 120 bp, Artificial Sequence
  ENSG00000177596_2 (sequence is synthesized)
ttaaaaatagagcattccaacccttacaggtcaaaagccctggatttcaagaatctgtctctgctatgagtctcaagagcctattttgtaactcagaagccaaggacaacaaatgctacc

SEQ ID NO: 885833 - DNA, 120 bp, Artificial Sequence
  ENSG00000177596_3 (sequence is synthesized)
atacttattctgagtcttcctggtcagaaaccaagaagatagtcattgcaacaaaaatacacagctttcagacattctcttcctgctactcagattgtcacgggatacttggggtgttgc

SEQ ID NO: 885834 - DNA, 120 bp, Artificial Sequence
  ENSG00000177596_4 (sequence is synthesized)
ttcaccagctggaaacctctgtggctggtggtaccttctgcctgagtattgctcatgcctggtgggctcgctttgcccactcatcctggaaggctgcactcggctcatgctatcagcctg

SEQ ID NO: 885835 - DNA, 120 bp, Artificial Sequence
  ENSG00000177596_5 (sequence is synthesized)
gattccatacctgccaagggcaagccaggctcggatcagtgaggggtgtgtgggcaagtgagcatggggttcagccacagcgcacaggcaggcacactggctgctgcggcagggtgggca

SEQ ID NO: 885836 - DNA, 120 bp, Artificial Sequence
  ENSG00000177596_6 (sequence is synthesized)
gcttcaggcactgcagctgaaccagatgtactacatgcagcttctgttgtgggcacccatgcctggacaaggggaatgcagtggtgcctggaaacttggagatgccaggaaccacagagc

SEQ ID NO: 885837 - DNA, 120 bp, Artificial Sequence
  ENSG00000177596_7 (sequence is synthesized)
ctcaaagacagtatcatcatagccctaacttggggagcccctaggtctgggcttccctaagggcggcaactcttttctccttcccgtcgctcacaacatggtgagtggcaggtcatgttt

SEQ ID NO: 885838 - DNA, 120 bp, Artificial Sequence
  ENSG00000177596_8 (sequence is synthesized)
cagccctgtttgtgttatagccctttcagtcctgccattcagcaggtcctgagttcttgtcccacatccaggaagaatgaggtacatggacaactggagggtaaacaaggtggagagaag

SEQ ID NO: 885839 - DNA, 120 bp, Artificial Sequence
  ENSG00000177596_9 (sequence is synthesized)
cctttccgcaggcaggttgcagccctcagcggagagaccaagcatgggtagctgccatctgcaggcaagttgtcccaacatctctgtgagtatggctgagtggtggatggggcggaatgg

SEQ ID NO: 885840 - DNA, 120 bp, Artificial Sequence
  ENSG00000177596_10 (sequence is synthesized)
agagagagtcctttatgggcttcagaaggaaggaagtgcattgtgcatgctgattagtccatgggcagccataggcaggcctggaaaaagcaccataagttcttactccaagccatggac

SEQ ID NO: 885841 - DNA, 120 bp, Artificial Sequence
  ENSG00000177596_11 (sequence is synthesized)
tccagccagaactgacagcccagaccccatactttaggtcatctctggcttgaaggtggggcttcactgtgcacccacccttttctatgcagaagtctgtcttcctcctgctgctatcat

SEQ ID NO: 885842 - DNA, 120 bp, Artificial Sequence
  ENSG00000177596_12 (sequence is synthesized)
attgtccatagtgcccacgctgctcatgctgaggagtgcctgcaggcccgacaagctgccgtcaaccctgcctcagcctccctcccatgctgatcagtgcataaagtccaagggggccaa

SEQ ID NO: 885843 - DNA, 120 bp, Artificial Sequence
  ENSG00000177596_13 (sequence is synthesized)
gggccagggtttggcatgtcagcgtcaccccaaacatgcgcacccacaggcaggtcagaagagcacccgggcttgccctcaactttgctctgaaatcagagtgggcaccaggcacaggga

SEQ ID NO: 885844 - DNA, 120 bp, Artificial Sequence
  ENSG00000177596_14 (sequence is synthesized)
gaagccaggcagtgggagtaggcacttctgagcccgcgaggctgagggggctcagaggtccccaggagcacagggtgcccacgtccgcagctgtggctgggtagctgcagcagtgcctcg

SEQ ID NO: 885845 - DNA, 120 bp, Artificial Sequence
  ENSG00000177596_15 (sequence is synthesized)
gagggcagggctcccaccctgccaattcagaagggggcagggctccccctgttcccagccctagctgcacctccccaacttcagcccatgtcttcacagcagccactcccaacgggctgc

SEQ ID NO: 885846 - DNA, 120 bp, Artificial Sequence
  ENSG00000177596_16 (sequence is synthesized)
cactgccaacaagatgacctattttgccaatattcatcaactagaacatatttcacaccacagtgttgataaaggaatatgccaataagatggatgctttcatttatgatgaaaataatt

SEQ ID NO: 885847 - DNA, 120 bp, Artificial Sequence
  ENSG00000177596_17 (sequence is synthesized)
attacagagaagagtctgtataatggcagctataacaactggatctacttgacaaggtggatgtaacatttcaaactattgaaaaggatgctttgaattaatataaaataaagaatgggg

SEQ ID NO: 885848 - DNA, 120 bp, Artificial Sequence
  ENSG00000177596_18 (sequence is synthesized)
ctggaaataacccatctaccattttactgaatgaaaaaatcattactattctgtatatactgtgaagctagtaaattgagacataaaatattttttgtgaattaaaaaataagtcaaatc

SEQ ID NO: 885849 - DNA, 120 bp, Artificial Sequence
  ENSG00000277089_0 (sequence is synthesized)
gtgtgtctgtgtggtgttccagaagagattagcatcagaagactaaagaagatctgccctcaccaatgcagaagaatcagtttcaaaagcaagtttgccaacctgtatcttaattcatct

SEQ ID NO: 885850 - DNA, 120 bp, Artificial Sequence
  ENSG00000277089_1 (sequence is synthesized)
ataacaagcaatgttgatgggctgaaaaccacacagactaccagaggggttgcttttccgaagaatcatgtaaggataaaagagaaagaaagagagaaagaccttggaacccaactagta

SEQ ID NO: 885851 - DNA, 120 bp, Artificial Sequence
  ENSG00000277089_2 (sequence is synthesized)
tctaccaaatagacaggatctcactgtgttgcccaggctggtcgccaactcctggcctcaagtgttcctctggccctggcctcccaaagcactgggattacaggggcagctcttccctgg

SEQ ID NO: 885852 - DNA, 120 bp, Artificial Sequence
  ENSG00000277089_3 (sequence is synthesized)
catcatttctgagtgtgtctgtgtggtgttccagaagagattagcatcagaagactaaagaagatctgccctcaccaatgcagagcaagtttgccaacctgtatcttaattcatctttgt

SEQ ID NO: 885853 - DNA, 120 bp, Artificial Sequence
  ENSG00000277089_4 (sequence is synthesized)
cctcccaaagtgctgggattacagttctcttcagggaattttgtctggttcaagaagtcataccccaacccaagagaagccttggacatctctcataagacatccaagggacagagctcc

SEQ ID NO: 885854 - DNA, 120 bp, Artificial Sequence
  ENSG00000277089_5 (sequence is synthesized)
aagacatccaagggacagagctcctgggagacctagagtgagctggagagtgaacaacataccccactgggaagtaagcagccctggattctgcctcttgctaactgattcgtttcgaac

SEQ ID NO: 885855 - DNA, 120 bp, Artificial Sequence
  ENSG00000277089_6 (sequence is synthesized)
cctgtttttctatctgtaaaagggactgtaactcccctgcccctgcctagattctcatacctggagactagggggctaagaccccttctagagataaaaataaaagtcttaaagagaaag

SEQ ID NO: 885856 - DNA, 120 bp, Artificial Sequence
  ENSG00000277089_7 (sequence is synthesized)
gccgatcacagccctgaacaaaagcatccgatacacatttgtcagtctggtggctttggtgccatgactgcctacacaggctgatgacagccactcggttgtcaccagacgcggtgtgag

SEQ ID NO: 885857 - DNA, 120 bp, Artificial Sequence
  ENSG00000277089_8 (sequence is synthesized)
ggaagggggaggggacaggggaactctcagagcaaacaatcacaaacacactgtgaaatcgaaaataaattacaaaaactaaatagtataaataaattaaaatttaagttaagaagagtc

SEQ ID NO: 885858 - DNA, 120 bp, Artificial Sequence
  ENSG00000277089_9 (sequence is synthesized)
ccacagtgtggctgtttggcaacaaccagtccatagaagaggtagctgtggaggtcacacgcatgttcccaaggctcagaagaaaaggccaggcagcttctgatccccgagcagttgagg

SEQ ID NO: 885859 - DNA, 120 bp, Artificial Sequence
  ENSG00000277089_10 (sequence is synthesized)
aaggcaggcttgctcagaccaagtgactggaaggcatttgggcatttttgctgagaaatgtctctttgtttctgtctgtatccttctttctccttgactcttcatagtgggttctctgtt

SEQ ID NO: 885860 - DNA, 120 bp, Artificial Sequence
  ENSG00000277089_11 (sequence is synthesized)
tctcttgggggcttttaggccacaagaaaagattgatgtggtctaaccatggccagagagtggtgatacccacaacgaaactcagactcacgtgatgcagagaactggttgcagagagcc

SEQ ID NO: 885861 - DNA, 120 bp, Artificial Sequence
  ENSG00000277089_12 (sequence is synthesized)
atggtgcagaggaggacagcaagggcagcagtggagacctgcatgattctgagcaggtgacggaatgtgggctcgagtgtcagcagagccaagaaaggactgaccactgtctgctgcccg

SEQ ID NO: 885862 - DNA, 120 bp, Artificial Sequence
  ENSG00000277089_13 (sequence is synthesized)
ttgcaggctgccaccctccaagtcctgcttctctccagagatgggcagaagcaccagccctcgcctggcaccagcattctcttcagggaattttgtctggttcaagaagtcataccccaa

SEQ ID NO: 885863 - DNA, 120 bp, Artificial Sequence
  ENSG00000277087_0 (sequence is synthesized)
cattttctttctttcttcttttctttctattccctccttttccttttcttttttcttttctttccttttcttcctttttgcctaattgctctatctagaaattccaagactacgtggtat

SEQ ID NO: 885864 - DNA, 120 bp, Artificial Sequence
  ENSG00000277087_1 (sequence is synthesized)
ggaagtggtgaaagtgggcattcttgtcttgttcctgatcttcgaggaaaaagtttgtcttgcatcattgagtatgatttaactatggggttttcatatatggctatcatattgtggtag

SEQ ID NO: 885865 - DNA, 120 bp, Artificial Sequence
  ENSG00000277087_2 (sequence is synthesized)
aatcatgaaagcgtgttgaactttttcaaaagctttttgtgcattgactaagatgatcatgtggtttttgtctgtcattcagttactgttgtgcattacacttaccgattctgggattga

SEQ ID NO: 885866 - DNA, 120 bp, Artificial Sequence
  ENSG00000277087_3 (sequence is synthesized)
ttttaaagcattcattcctccaaacacactcccagggttaggtctcttacctctgcatgtatttaggaaaaagacataatatgaccaacttcccaactattaaaccatgtttaggataaa

SEQ ID NO: 885867 - DNA, 120 bp, Artificial Sequence
  ENSG00000250309_0 (sequence is synthesized)
cggtgtggttgaacttctctggcgggacgcccttcagcggctccgcatagcctaggggcgcggggggaagggagcgcctccgttcttccaccctcagcccccaaccccacctcgccccac

SEQ ID NO: 885868 - DNA, 120 bp, Artificial Sequence
  ENSG00000250309_1 (sequence is synthesized)
gaagccacagttgctccagcacaggagacccctccccatcccaggaaacacggaggactgcagtgaggaagccacgagttcgcagcgcggggagagatgcctaaaaagataacacttttc

SEQ ID NO: 885869 - DNA, 120 bp, Artificial Sequence
  ENSG00000250309_2 (sequence is synthesized)
aaggatcacactgaaaggcaggagcctaatctgatgggaacatcacagtcctcagcctggcttaccgtttgactttaggctaaccagtggctctctgtggtcctcattttccccatgagc

SEQ ID NO: 885870 - DNA, 120 bp, Artificial Sequence
  ENSG00000285939_0 (sequence is synthesized)
caggtcattgggtcaaggttttggccagagaatagcaaggatgacttatctctgctccactatgtctggaacctcttggaatcatttggagtcttcttcactctcttgcctggcacctgg

SEQ ID NO: 885871 - DNA, 120 bp, Artificial Sequence
  ENSG00000285939_1 (sequence is synthesized)
actgggaaaacttggaacccactgggactgttgaccaaagcacaaacatgtggcctcttcatgtggcttgggctttccacagcatggaggctgatttctgaggagaggcccaaaaataat

SEQ ID NO: 885872 - DNA, 120 bp, Artificial Sequence
  ENSG00000285939_2 (sequence is synthesized)
atacacaaagttttgggaatcacctgtaaacagtaagaacaaagtagcaaggctggggctcagctgtagacaataaagcctttgcctgagggttgcaggaatgagaggcctctctgagag

SEQ ID NO: 885873 - DNA, 120 bp, Artificial Sequence
  ENSG00000285939_3 (sequence is synthesized)
gccccaagtcgattttgcccttctccagagacagagagctggtctacctgaggctgacatggggaggaaaggcaaagagaaggattgcctgaatgtcaatggtgattttgcacattttac

SEQ ID NO: 885874 - DNA, 120 bp, Artificial Sequence
  ENSG00000285939_4 (sequence is synthesized)
agtcacttttataaaaaggacacaattggagaaactggttgttttactaagactttgactggaagggtgtgcttccctttaaggaatcaaacgtgacttgcagagccaataaaagccgct

SEQ ID NO: 885875 - DNA, 120 bp, Artificial Sequence
  ENSG00000285939_5 (sequence is synthesized)
aagccgcttgggaaaactggcttcacaccttgtctacacagtcactgtatagggttcctaacctgtgagacggggtcccactatgttgaccaagctggtctggaactcctggactcaagt

SEQ ID NO: 885876 - DNA, 120 bp, Artificial Sequence
  ENSG00000285939_6 (sequence is synthesized)
agcctcccaaagtgctggaattatgggcatgagccaccacacccagcccacaggagcacctcaataatcacaggtgacaagcagactcctggaggctggactggaaggaggccaacctgg

SEQ ID NO: 885877 - DNA, 120 bp, Artificial Sequence
  ENSG00000285939_7 (sequence is synthesized)
accagctgacacatctctgctccaaagctgggacattggtgtttctgcaaataccaacacttgaaatttgccgaaattacctaagtgggcacacaagctgacatgcgtgtgctgcatcct

SEQ ID NO: 885878 - DNA, 120 bp, Artificial Sequence
  ENSG00000285939_8 (sequence is synthesized)
tcctgtcacaaaggtgtgaagaccaattcaagatgaggctcaacatgttgccacaatgttcctgccaaatggatgggagaggcatttggttgtatggttcctaaggataggacacttact

SEQ ID NO: 885879 - DNA, 120 bp, Artificial Sequence
  ENSG00000285939_9 (sequence is synthesized)
aggcttgaattaatagtgaatgattaataaaaagaaagttactttaacagagttgaaggttggataaggcttagaaaaggaagacagtattttttttattattatactttaagttctagc

SEQ ID NO: 885880 - DNA, 120 bp, Artificial Sequence
  ENSG00000285939_10 (sequence is synthesized)
aagagctaagcagtaatgtgaacaagtgtaggagtgtcagatactgtgaacaaatcttactggcttaaacaaaggattcagttaggaaacattaaaactgctacatgttttgtgggcttt

SEQ ID NO: 885881 - DNA, 120 bp, Artificial Sequence
  ENSG00000285939_11 (sequence is synthesized)
aggtatttaaacattgtattgtgtggttgttatgcttttaatcacaaatgtctaaaattcatccactcattcattaacttaaatatttacagagcatctgttattgcctatatatggaga

SEQ ID NO: 885882 - DNA, 120 bp, Artificial Sequence
  ENSG00000285939_12 (sequence is synthesized)
ggcagactacattaattataacatcaagaaaatgctctctcctgaaaagaatactttatgaactcaggggaaatgtatttttcttctccaacagtacaaagtaacttaaatttgattaat

SEQ ID NO: 885883 - DNA, 120 bp, Artificial Sequence
  ENSG00000285939_13 (sequence is synthesized)
agattatgaaacgctgagtggattcgttttcagaattagacagatttgtggagaagtggccttggtcttccagggctcaatgactttgacagcagtgataacagagtgccggaaggtaga

SEQ ID NO: 885884 - DNA, 120 bp, Artificial Sequence
  ENSG00000285939_14 (sequence is synthesized)
gcaacatgatctttgataacctagtctatgaggtcccataggatcacttcacccatattttattggttaaagaagtcattcagattcatagggtagagatatagaacactgtctctcagt

SEQ ID NO: 885885 - DNA, 120 bp, Artificial Sequence
  ENSG00000285939_15 (sequence is synthesized)
gggacaaataccaagaaatttgggatcactttttaaaaacctacacatagacagaagcaaagtaataaagggtcttttaaaccatcatacagagtttaattttaatctaattgcaataag

SEQ ID NO: 885886 - DNA, 120 bp, Artificial Sequence
  ENSG00000285939_16 (sequence is synthesized)
aagccattgcaaactttcaagtaggacattatgatgtacgaacaactgacttaagggactttaactttattccattgcataataaacacttaaaaaaataccaagaaggaatttcataaa

SEQ ID NO: 885887 - DNA, 120 bp, Artificial Sequence
  ENSG00000285939_17 (sequence is synthesized)
atcttgctaatgaccatcaattaaaggagaggaggctcatgttacttcctattttttttcaaacaacatgccataaccaatattttgaaaaaatatattgtgttaggccaggcatggtag

SEQ ID NO: 885888 - DNA, 120 bp, Artificial Sequence
  ENSG00000285939_18 (sequence is synthesized)
ctcatggctgtaattccagcactttgagaagccaacgtgggagaatattttcagtttaggagttcaagaccacctgggcaacatagtgagaactcatctttaattaaaatggaaaaaaaa

SEQ ID NO: 885889 - DNA, 120 bp, Artificial Sequence
  ENSG00000285936_0 (sequence is synthesized)
aattacaggatgagcatcccagagacaaagcctgggccctgggagtcaccagccagtcaccagccacagctcattcccggctctgccccgtggcactgacatacaaccctgaggacaccg

SEQ ID NO: 885890 - DNA, 120 bp, Artificial Sequence
  ENSG00000285936_1 (sequence is synthesized)
cttccttctctctgcagctggacttcctcatctgtcacccagaccccaccatgcctgtcatctgccgatgcctccaaggcatcacacctaccatcaggcagcacccattcccatgcagaa

SEQ ID NO: 885891 - DNA, 120 bp, Artificial Sequence
  ENSG00000285936_2 (sequence is synthesized)
tctcacagctcaggaggcaaggatccccattccacagatgaagaaactgagtctgggggagtttaagcaattctctggatggcacagccagagtttgagccctggtctgtctgcccttga

SEQ ID NO: 885892 - DNA, 120 bp, Artificial Sequence
  ENSG00000285936_3 (sequence is synthesized)
agcacgtgactgaaaggtgcgctgcccttctgagtggaatcccacatcctgccggataccatttggacacatattcacaccctaccagaccggctcgtagaagtttggggccaccaacac

SEQ ID NO: 885893 - DNA, 120 bp, Artificial Sequence
  ENSG00000285936_4 (sequence is synthesized)
ctcccaacgaccctccatcttctctctgcagaaccatctgggggatggaggcattcctacaaccaattcccccgagcagggagaagccccaactgagaaaagccctgtgtgactcccaga

SEQ ID NO: 885894 - DNA, 120 bp, Artificial Sequence
  ENSG00000285936_5 (sequence is synthesized)
tacaaactcagatcgggataaagcccaggaggtacttccaaaagccacctgctcagactgggtacgcagggtacagttgttcatcccacagccacttcaactggccaggcttttctcaaa

SEQ ID NO: 885895 - DNA, 120 bp, Artificial Sequence
  ENSG00000285936_6 (sequence is synthesized)
agccaacggtggatccaacccccaggtgggcttctcctccctcccctgcccttgaagttcgaggccagcagactcggtggccttctagagaccgggggtctggctctgggtctgatacta

SEQ ID NO: 885896 - DNA, 120 bp, Artificial Sequence
  ENSG00000285936_7 (sequence is synthesized)
acccgctatgcacccttggacaaattcatacctttctgggtcttgatttttcttatctgcagaatatgggggttggatcagatgatctctaagtcctttgcattctagcacttcacaact

SEQ ID NO: 885897 - DNA, 120 bp, Artificial Sequence
  ENSG00000285936_8 (sequence is synthesized)
gtggcttcataccttctttcaggccacccttgatgcttattttaagctgaattcctttggatggagacacaggggattgggggtaggggtggggtaaaacaccctgatttttcacagcca

SEQ ID NO: 885898 - DNA, 120 bp, Artificial Sequence
  ENSG00000285936_9 (sequence is synthesized)
catttcttggggcctggtggtgacccaggatctatcaaactccagtgacccaaaagtcctgtgtcttcatcaagggagagtgtcctgcttattttgggaatttactagatgtgaggaaga

SEQ ID NO: 885899 - DNA, 120 bp, Artificial Sequence
  ENSG00000285936_10 (sequence is synthesized)
acagagacaagcaaccagactctcgtttcaaaatattctatcacctgatttctggatcctcagcagggaaatgcagaaaccccccaaaaccaaagcactccatgtgttatgggaatgttt

SEQ ID NO: 885900 - DNA, 120 bp, Artificial Sequence
  ENSG00000285936_11 (sequence is synthesized)
cctgccctgctgagaagccgggtaacagaatgcaggtgaactcgggagtctgccttcttgggtcagctgatttgcaatgtgaccttgggcaagtgacttagtctctctcagcctcggttt

SEQ ID NO: 885901 - DNA, 120 bp, Artificial Sequence
  ENSG00000285936_12 (sequence is synthesized)
cctcgtctgtaaaacaagggcaataacagtttgtagctcatgggggaggtgtgagaactgcaggagttcatcttcttacaatgctcagcccagtgcctggcacacagcacatgttcaaca

SEQ ID NO: 885902 - DNA, 120 bp, Artificial Sequence
  ENSG00000285936_13 (sequence is synthesized)
aacatcagctatttttgatcattcatttaacttgatcagacaactcccttagatcctgcagcagctagggcacagaacacaactggggccccagcttaggtgttaaataagtaccttttc

SEQ ID NO: 885903 - DNA, 120 bp, Artificial Sequence
  ENSG00000285936_14 (sequence is synthesized)
ttgattcagtataaagaaaataaacatttattgaaaatatctatgaaccaagcagtgagctaattgtttttacacaatttctcattgaaccctcttggaaacccactaaggttaatatta

SEQ ID NO: 885904 - DNA, 120 bp, Artificial Sequence
  ENSG00000285936_15 (sequence is synthesized)
ttgtcctcacctaacagaccagaaaacaaaggctcaaagtggttttgtgatttgcctgaggtcatggctaggaagtgacctggtaaagattcaaatcctagctttctgactccggagcca

SEQ ID NO: 885905 - DNA, 120 bp, Artificial Sequence
  ENSG00000285936_16 (sequence is synthesized)
ccttcttccaactggcatccctttcagggtggtgtctttgattcctgattctagtgagtcctgcgttagcatgtccttaatgagcttaaattaagagtgaaactgaattctcttttcaat

SEQ ID NO: 885906 - DNA, 120 bp, Artificial Sequence
  ENSG00000285935_0 (sequence is synthesized)
gatattaactagcttccaggaggcggaggccagcgcctccctgcatccccgtctcggcattaaaccaaacgtggacgcccttgatagacttttaaagggaaagcaggaatcgtcctttac

SEQ ID NO: 885907 - DNA, 120 bp, Artificial Sequence
  ENSG00000285935_1 (sequence is synthesized)
acttcacctgctttttacagcgcaggggcctctgacatttgtgtaaaatccacccgccaggaaccgcaggctcagagctcagaagcgccctgtcctcttcaggagcccgggggctgacgc

SEQ ID NO: 885908 - DNA, 120 bp, Artificial Sequence
  ENSG00000285935_2 (sequence is synthesized)
cactccttcgagggggccaaggctgaaaaatcagctggcaaaaggcagattaattggagaaaaggcatacacgtttatgtaacgtatgtacacaggagccttcagcataaagaacgaacg

SEQ ID NO: 885909 - DNA, 120 bp, Artificial Sequence
  ENSG00000285935_3 (sequence is synthesized)
tacaggggaacttgtccacttttatgcttctgtccaacaaagtatggacggccgggtagaatatgatcagacaagaagggtgtgatctaacgctgagaccgagtgaggacacccagcaag

SEQ ID NO: 885910 - DNA, 120 bp, Artificial Sequence
  ENSG00000285935_4 (sequence is synthesized)
gcctgtccggctagattctgcctggcctctctgagcacacattccttccttctggaatgagggggtcttatgaccagcagtcaaacaaggaatttatagtgacagcctagtggtgaccag

SEQ ID NO: 885911 - DNA, 120 bp, Artificial Sequence
  ENSG00000285935_5 (sequence is synthesized)
ctctaggaaaagacgctgaagaggacgctcccagcacctgggacagaggagagaacagacacaccagggaagcagccttggaaaggggatgcagacatgaggcttttcagggcttcagat

SEQ ID NO: 885912 - DNA, 120 bp, Artificial Sequence
  ENSG00000285935_6 (sequence is synthesized)
ctacatgactgcacccaatggacaggctctgtacaatcactgcccacaagcccaacaggtagccactcgagacacacacactgaggggacttcggggctggctgacttgctcagatgcat

SEQ ID NO: 885913 - DNA, 120 bp, Artificial Sequence
  ENSG00000285935_7 (sequence is synthesized)
tttaacaaaaacccccatcaccatcctgctcacattcctaccgtcacctcaaacatctctgcttttagctccagattcttctcaacataactgagtaactaaccacaatggatatgaaat

SEQ ID NO: 885914 - DNA, 120 bp, Artificial Sequence
  ENSG00000285935_8 (sequence is synthesized)
actgttgagtaggttaaagtccttaataagtcaagcgtcttagcatatttttgaagtcgtatctataatcaaagcctggagcacctgtttgttcaacacagttatctttcatccagaatt

SEQ ID NO: 885915 - DNA, 120 bp, Artificial Sequence
  ENSG00000285935_9 (sequence is synthesized)
acaaaatatagaagctgtcattcttgagtttccccatgggtccctggtattgcccacgtgggaacaacaggaagggtggaggtgagggcacagcactgtactacagctgcagggctgatc

SEQ ID NO: 885916 - DNA, 120 bp, Artificial Sequence
  ENSG00000285935_10 (sequence is synthesized)
agggtgaaggccctcctcacgggagtgatccctaatctggccccagcaccgtgaaaggtgaatagctgtcaatatctactttcacctaaacctaagcttttaaaattctgaccaagtggt

SEQ ID NO: 885917 - DNA, 120 bp, Artificial Sequence
  ENSG00000285935_11 (sequence is synthesized)
gaaaggtgccatctaaagtgctctctgttgctcgctgaggagctaagaactcctgcggctcactcaggacacaggtgtcaggaaactaaaggagcagggctcctttgcagcccaggccct

SEQ ID NO: 885918 - DNA, 120 bp, Artificial Sequence
  ENSG00000285935_12 (sequence is synthesized)
gtgccgcagctctgcccagctcagcggtgtagctcccagagtcatggactgctcgcatctgttctggccggctggtgcccacactggagagactggcaagtatcttgagtgtcatcccca

SEQ ID NO: 885919 - DNA, 120 bp, Artificial Sequence
  ENSG00000285935_13 (sequence is synthesized)
atggccccaggaaggaaaatggactctgttcttcactttcattactgttgagctgctgaattctcttgcaaaaaccatcaacaggcatttactaagcaaatgcccacagggaacccagcc

SEQ ID NO: 885920 - DNA, 120 bp, Artificial Sequence
  ENSG00000285935_14 (sequence is synthesized)
tgaaaagggcccttccaatttcatatttgacaggcatgtgcagaggtaatgaaattattcagcagagcatcagattcactcagaggctaccaagccaagaaactgaaagcagaaacactg

SEQ ID NO: 885921 - DNA, 120 bp, Artificial Sequence
  ENSG00000285935_15 (sequence is synthesized)
gattctccctgtttgttgaacctttccctctaaaaccaacttattcagaaacacatcctttaaaaaaacaaaaggaaaaaccaaagcggtgaaacaatatcacttactggttggaagaca

SEQ ID NO: 885922 - DNA, 120 bp, Artificial Sequence
  ENSG00000285935_16 (sequence is synthesized)
tcactctgacatagtcattagtcttgcagagacctaacaccaggcagcttcacaaacacacagcaagtctgcagagttatattgatcagtaagagtaaacccaaactgcactaaatactc

SEQ ID NO: 885923 - DNA, 120 bp, Artificial Sequence
  ENSG00000285935_17 (sequence is synthesized)
tcatggccaagaggaaagcagatgctgttttcaggacaatgtgatagtgacagcctatttcctcatgtgcagcacaatttgctatgtttagtggcacttaagtattacacagtaaatact

SEQ ID NO: 885924 - DNA, 120 bp, Artificial Sequence
  ENSG00000285935_18 (sequence is synthesized)
gaaaagacccagaatttttggatgtgcagaagcaatatcacattgtttatacaaaaggtgctatgctacgggattagaataccactatttgggtgtagagaccacttaaaatcttcaaca

SEQ ID NO: 885925 - DNA, 120 bp, Artificial Sequence
  ENSG00000285935_19 (sequence is synthesized)
cgctcccacacgcggcctctccgccggcctttgctcagtcggaccagtcgttctcgtcgaactctgagtcgtcgtcagagtcgctgtactccacggcaatgcgccgggacaggatcgtgg

SEQ ID NO: 885926 - DNA, 120 bp, Artificial Sequence
  ENSG00000285935_20 (sequence is synthesized)
ccacgtcattccccactggctcccgcttggcctcctgctcccgctgctcctgcacctttttcagttgaattcctgcagacacaacacgtggttcagaatcacatccttttgctggctcca

SEQ ID NO: 885927 - DNA, 120 bp, Artificial Sequence
  ENSG00000285934_0 (sequence is synthesized)
gccttcagctgcccgattctcctaagaaccacgatgtgaggctgcacgattgtggacctgggacagttggtggatcctggtaactggaggatcttttacaaacttaaatattttcttaaa

SEQ ID NO: 885928 - DNA, 78 bp, Artificial Sequence
  ENSG00000285934_1 (sequence is synthesized)
taactggaggatcttttacaaacttaaatattttcttaaacaagggtttgaagatgcctgtttgaaggaaagaaacac

SEQ ID NO: 885929 - DNA, 86 bp, Artificial Sequence
  ENSG00000285934_2 (sequence is synthesized)
agtccagaaaggtcggcttacccccaaagggaaacccatcagactaacagcagatctctgtgcagaaactctacaagccagaagag

SEQ ID NO: 885930 - DNA, 72 bp, Artificial Sequence
  ENSG00000285934_3 (sequence is synthesized)
tacccatctcacgcaaagagacacatataggctcaaaataaagagatggagaaagatctaccaagcaaatgg

SEQ ID NO: 885931 - DNA, 120 bp, Artificial Sequence
  ENSG00000285934_4 (sequence is synthesized)
gtaaagggatcagttcaacaagaagagctaactgtcttacatatgtatgcactcagtacaggagtacccagattcataaagcaagtccctggagacctacaaagagacttagactcccac

SEQ ID NO: 885932 - DNA, 87 bp, Artificial Sequence
  ENSG00000285934_5 (sequence is synthesized)
cttgctttaaaagttagtgtgggtctgtttgctggtgagcctaggtaatgtgccttgctctaggtccaagagaagctaggaaaatga

SEQ ID NO: 885933 - DNA, 120 bp, Artificial Sequence
  ENSG00000285934_6 (sequence is synthesized)
atgtgccttgctctaggtccaagagaagctaggaaaatgaaattttacagaagctgaaattttcagcttctgtagagttctccaaacttaaaaatggtataggaccatcacagtgacaaa

SEQ ID NO: 885934 - DNA, 120 bp, Artificial Sequence
  ENSG00000285934_7 (sequence is synthesized)
tatccagtacatctctgattttggttattctaaatcaatgtgcactcttctttccttacacagcctgctttgataacatgtatgtctataaagaaataagcttacacgattggttgatat

SEQ ID NO: 885935 - DNA, 120 bp, Artificial Sequence
  ENSG00000285934_8 (sequence is synthesized)
gggaatgatgtcagtataatacaaaagtttcattgatctatttatgatttttctcaccatacaaatgttttgtgccatcaagtaacacagttgaacacagaagactgtggaggagcacaa

SEQ ID NO: 885936 - DNA, 120 bp, Artificial Sequence
  ENSG00000285934_9 (sequence is synthesized)
tattataattatacacagtgtccattccgattactcccttttcttttattctggacatgtattgtgctcatcaagtgcttattgaatggttttgctcaacatttgtgcattttgcccatg

SEQ ID NO: 885937 - DNA, 120 bp, Artificial Sequence
  ENSG00000285933_0 (sequence is synthesized)
gaagctaagaatgtcaacatttacactgactctcaatatgccttttcaacccttcaggtgcgtggagcattatataaagaaaagagcctattgaactctgggggaaaagacataaaatat

SEQ ID NO: 885938 - DNA, 83 bp, Artificial Sequence
  ENSG00000285933_1 (sequence is synthesized)
aaagagcctattgaactctgggggaaaagacataaaatatctacaagaaatcttgtaattattaaaagccgtatggagacccc

SEQ ID NO: 885939 - DNA, 120 bp, Artificial Sequence
  ENSG00000285933_2 (sequence is synthesized)
ttagaggctcgaaaagcaacatctgcccccttccgggcatcagtcacagcccccatgctccctcaagcacctgatcttgtacctacttattctaaagaagaaaaggactttctccaggca

SEQ ID NO: 885940 - DNA, 90 bp, Artificial Sequence
  ENSG00000285933_3 (sequence is synthesized)
cgagagctgcagttgtactggctgttcatgaaaccacccatctaggtcaggaatcacttgaaaagttgttaggctggtatttctacatct

SEQ ID NO: 885941 - DNA, 120 bp, Artificial Sequence
  ENSG00000285933_4 (sequence is synthesized)
tacatctcgcatttgtcagctcttgccaaaacggtgacgcagtggtgtgttacctgccgacagcataaagcgaggcaaggtccagccgttccgcccggcatacaagcttatggagcagcc

SEQ ID NO: 885942 - DNA, 120 bp, Artificial Sequence
  ENSG00000285933_5 (sequence is synthesized)
gatgtcaaagtgtagaggtgatcgagtgtggatcaagaactggaacgtagcctctttgtgtccactgtggaaaggaccccagactgtcgttctgagcactcccaccgctgtgaaggtaga

SEQ ID NO: 885943 - DNA, 120 bp, Artificial Sequence
  ENSG00000285933_6 (sequence is synthesized)
aggaatcccagcctggatccaccacagccatgtaaaacctgcagcgcctgaaacctgggaggcaagaccaagcccagacaacccctgcagagtgaccctgaagaagacgacaagccctgc

SEQ ID NO: 885944 - DNA, 71 bp, Artificial Sequence
  ENSG00000285933_7 (sequence is synthesized)
cacccggaagctgactggtccacgcacggccgaagcctgaggaagctcatcatgatcttactcaaactggg

SEQ ID NO: 885945 - DNA, 78 bp, Artificial Sequence
  ENSG00000285933_8 (sequence is synthesized)
ggacttatacagtaagggcttcaactgatcttactcaaactggggactgttcccagtgtactcatcaggtcaccgaag

SEQ ID NO: 885946 - DNA, 120 bp, Artificial Sequence
  ENSG00000285931_0 (sequence is synthesized)
ggccaaagaaattactagccaatacatatacatcacaactagcactcaacatcttttcctacaactatatgacaaagatatgttaataaataaaaattagataaggtgaaccaaaacaat

SEQ ID NO: 885947 - DNA, 120 bp, Artificial Sequence
  ENSG00000285931_1 (sequence is synthesized)
aatggtattattctgtcagtaaaatgactatagtattatggttaattagacatataagaattacaaaacagaaaggaaagtaaaattgcaacccaggtgaggaattcattttctttcttt

SEQ ID NO: 885948 - DNA, 120 bp, Artificial Sequence
  ENSG00000285931_2 (sequence is synthesized)
gccgcccaggctggagtgcagcaaagtgagaccctatctcaaaaacgaaagaaacaccaaatgatgcttgaaattcttgagaacttgattttttaatttaaaacggtaatttaatttgca

SEQ ID NO: 885949 - DNA, 120 bp, Artificial Sequence
  ENSG00000285931_3 (sequence is synthesized)
agagttgtttaggcacttgggaagaatctgttcattaagtttaaaatattgcctaagtgtttgtatgaatcaattcattcaaaaattctaaggaaagtgataaatatgtaagtagtgtta

SEQ ID NO: 885950 - DNA, 120 bp, Artificial Sequence
  ENSG00000285930_0 (sequence is synthesized)
aagggaaaagggagaggagtcagctctgatcgcctggcgcactgtgcagcaaattcatgtcagagccagccttggaatgtctcccaagctcccaaggctcctggtgaggaggaaaaggta

SEQ ID NO: 885951 - DNA, 120 bp, Artificial Sequence
  ENSG00000285930_1 (sequence is synthesized)
cctcactgggttacagccgatggtgatgaagacatgaagatgatgcctgtgttctccttgggagcctttctcccagatgtgaaactgatcctaagaccccctgtaatttcctgctgaaaa

SEQ ID NO: 885952 - DNA, 120 bp, Artificial Sequence
  ENSG00000285930_2 (sequence is synthesized)
tctccaccaagaaacacagccacagccacagttcttcctggtaagaagcccccagggccaggcaacaagaaaagtgagctcgttcagcaggctgggatgtaaataagccacaagaggctg

SEQ ID NO: 885953 - DNA, 120 bp, Artificial Sequence
  ENSG00000285930_3 (sequence is synthesized)
tgccattctgggttgcacctgtgagcatcactcagctgaagccccatcagcgtttccatgacaaactcgtatttccggatgcctttcttccagcttgaagagcctgcctcgtggttgtga

SEQ ID NO: 885954 - DNA, 120 bp, Artificial Sequence
  ENSG00000285930_4 (sequence is synthesized)
aaagtgaaaaagaaaatctaaaaaagacaaatggagaaggaacagctagtgaagtcagaggaagattggaagaccctggtgtcctggaagcaactgaagaaagtgtttcaagaagaaagg

SEQ ID NO: 885955 - DNA, 120 bp, Artificial Sequence
  ENSG00000285930_5 (sequence is synthesized)
agtgatcacatgacttaaaatgccaccgatgggtcaaataagaacagagaattgaccatggaatctgtcaacacagaagtcatcagtggccttgataaatgtagtttcactgccatgtgg

SEQ ID NO: 885956 - DNA, 120 bp, Artificial Sequence
  ENSG00000285930_6 (sequence is synthesized)
gggaaaaatgatgtcatcagctgaaagtgagaagcaaggagaactgcgtgcaggcctgaaaagaaaggaggcgtgatgcagtcatctgccagagggagtaggagaggcgacttgcctggg

SEQ ID NO: 885957 - DNA, 120 bp, Artificial Sequence
  ENSG00000285930_7 (sequence is synthesized)
gaaaacagtgtaggattgctgggcagcaatatggcagcaatgtggtcctctgaggtcagtggtgatgaatttaaagggaaacctttcagtacagctctgtgtttttctccagccaccttt

SEQ ID NO: 885958 - DNA, 120 bp, Artificial Sequence
  ENSG00000285930_8 (sequence is synthesized)
aacacctggagtgcaggcattaaatagctaaaagtcacatttgacaagtgttgattttgctaggcctataggttgggagagagaaggtcagaatggttgtcattgttatctattgctgtg

SEQ ID NO: 885959 - DNA, 120 bp, Artificial Sequence
  ENSG00000285930_9 (sequence is synthesized)
aaacacatgactccaacacaattactcccaaacaacaaatatttattacctcatagtttctgtgggtcacagtttggaatttggaagcagctcaggctgggcagttctggcttggggtct

SEQ ID NO: 885960 - DNA, 120 bp, Artificial Sequence
  ENSG00000285930_10 (sequence is synthesized)
ttcacgaggctgcagtcaaatgttacctcaggttacagtcatctaaaagcttgtatagggctggaggatctgcttccagggtggtgcactcacatggctggcaagtcagtagtggtggtt

SEQ ID NO: 885961 - DNA, 120 bp, Artificial Sequence
  ENSG00000285930_11 (sequence is synthesized)
ggtggacaactcagttcctctacaggctgtcagagtgtacttacagcctgacaaccagcttctcccagagctaccagtccaagagggagacctaatcagaagctatccttctttgaccta

SEQ ID NO: 885962 - DNA, 120 bp, Artificial Sequence
  ENSG00000285930_12 (sequence is synthesized)
agcaagtcactaagtccagtccacattcaaggggaggggaattagactccaccttttggagggagtagtgttgttatggactgaatgtttatgtctgcccccgccacaaattcccgtgtt

SEQ ID NO: 885963 - DNA, 120 bp, Artificial Sequence
  ENSG00000285930_13 (sequence is synthesized)
ggagccctaacccatagtatggctctatttggagatggggcctctaagaaacaaattaatgttaaataagatcataatgttaaataagatcataaagctctgatccaatagaattcatct

SEQ ID NO: 885964 - DNA, 120 bp, Artificial Sequence
  ENSG00000285930_14 (sequence is synthesized)
ccttttaagaagagacaccaaatagcttgctgtctctctctctgtgctcacacaccaaggaacggccacgtgaggacacagcaagaaagtagccatctacaattcaggaagagtcttcac

SEQ ID NO: 885965 - DNA, 120 bp, Artificial Sequence
  ENSG00000285930_15 (sequence is synthesized)
cagaaaccaaattggacagaatcttggtcttagactactagtctccagagctgtgagaaaaaaaaaatccatgctcaagccacccactctatagcatttcgttatggcagccaagctgat

SEQ ID NO: 885966 - DNA, 120 bp, Artificial Sequence
  ENSG00000285930_16 (sequence is synthesized)
gagtacaagcatcaaagaacttgcagacatattttaatgtcactacaaggccccagggtttatgtaagtatatttatcatgctggaccatggattataagctgagaagtgagggaggtga

SEQ ID NO: 885967 - DNA, 120 bp, Artificial Sequence
  ENSG00000285930_17 (sequence is synthesized)
cagcatggaggaatgcgtgagtgaaaggactggggaaccagtgtgtggaaggaagttctctgaggggaagagtgtaggagtgggtgtacaagggaagcaagttgaacagatatgaggtag

SEQ ID NO: 885968 - DNA, 120 bp, Artificial Sequence
  ENSG00000285930_18 (sequence is synthesized)
tggtcagagaaagctgcttgaaatggagatcttggacatggcacagttactgctggtgataagatctagcattagatgatgggagtgggcagctgaggcaggcagggagggacaggtcac

SEQ ID NO: 885969 - DNA, 120 bp, Artificial Sequence
  ENSG00000285930_19 (sequence is synthesized)
tggtggtgagaagattaattaactggaggcagaatgttggaggggtcatctaatagacacggaccaggaatgatgctgagtatggtgatgaacagactgatagtgagccaggtgctcatg

SEQ ID NO: 885970 - DNA, 120 bp, Artificial Sequence
  ENSG00000285930_20 (sequence is synthesized)
tctttcacaaatgggggagtgatggggagagagtagatgattgccacagggagcagtagcaggacagagcctgacagccagtgagacacaaagggacagtccaggttttaattgaggggg

SEQ ID NO: 885971 - DNA, 120 bp, Artificial Sequence
  ENSG00000285930_21 (sequence is synthesized)
tgggagttactactgggttggctattaaggagccatatgcacaaccaagttaggaggagaagcagaggatctgagtgcatgcgtatgcacacacacacacaaatgcatgtgcatggcaga

SEQ ID NO: 885972 - DNA, 120 bp, Artificial Sequence
  ENSG00000285930_22 (sequence is synthesized)
tggtaatagcatgtatctcatagggctgttaaaaggaccaactgagctaatacttagtgctaagacagtgcctgtgtggggtgttttctgacaccaaccaactctccaacatcaactggg

SEQ ID NO: 885973 - DNA, 120 bp, Artificial Sequence
  ENSG00000285930_23 (sequence is synthesized)
tgtccagcaattcaattcaattcagttctgacactaccgggagttagcatcagttcccacaagttaaagggatcaatccccccacttccagtgccagctgcaaataacaagctacccaca

SEQ ID NO: 885974 - DNA, 120 bp, Artificial Sequence
  ENSG00000285930_24 (sequence is synthesized)
cttctgcccagatgactacaaatttaggcatccccacaccacccccgaagaggttcagtaatttattaggacaacttgcatttattggtttattataaaggatacaaataaacagccaga

SEQ ID NO: 885975 - DNA, 120 bp, Artificial Sequence
  ENSG00000272562_0 (sequence is synthesized)
cgctctcctcccgggcccgggcccccgacgcaagatggctgtgtcgcgtcggcctctaaacaatgtgtggagcgcgcagctcctgcaccagggcctggtggcttgtcctgcccgcccgtg

SEQ ID NO: 885976 - DNA, 120 bp, Artificial Sequence
  ENSG00000272562_1 (sequence is synthesized)
ggggccgtgtgatctgttttcggaaaccgaaatatttattgttggatttatccaggaaggctgttctgcattagttaaatgcatcatatcttcaagaaatgttaaatgacatggatgctt

SEQ ID NO: 885977 - DNA, 120 bp, Artificial Sequence
  ENSG00000272562_2 (sequence is synthesized)
ccagccctgaagcatcagactccaggttctttggcttttggactcttggagttacaccagtggtttcccaggaactctccagccttgggccacagactgaagtttgcactgtcggcttcc

SEQ ID NO: 885978 - DNA, 120 bp, Artificial Sequence
  ENSG00000272562_3 (sequence is synthesized)
ctgcttttgaggttttgtgactcagactgagccaactggcttccttgctcttcaggttgcggacggcctatcgtgggactttgccttgtgattgtgtgagtcaattgtccttaataaact

SEQ ID NO: 885979 - DNA, 120 bp, Artificial Sequence
  ENSG00000272562_4 (sequence is synthesized)
tcctattagttctgtccctctggagaactctgactgctgatacacatagcaagaccccgtctctaaaaaaaagagagaaaggcacattggaaaatagagaatagatcaagaaaacaatcc

SEQ ID NO: 885980 - DNA, 120 bp, Artificial Sequence
  ENSG00000272562_5 (sequence is synthesized)
aaaaggttttcattattaattcaggttggtgctatagtgggtacacagggtcaaggggaaggtacctgcaaagtctaagtgaagcaaagactatcctttgagaatgaaattaggaaaaat

SEQ ID NO: 885981 - DNA, 120 bp, Artificial Sequence
  ENSG00000272562_6 (sequence is synthesized)
tgttgagatcagccctctatagcaatggcccaatctatgaaactgaaataactttgctgagacatttcagctttctcatctgtaaaatggcaataatacttgaattccctccttttcaga

SEQ ID NO: 885982 - DNA, 120 bp, Artificial Sequence
  ENSG00000272562_7 (sequence is synthesized)
cttgttgtgagattaaaataaaataataaaaagcaacaaattataaagtcattagtaaatggatgtatcctactgtgtcatgattatccaatttatttaaatgacataggcaatcaaatt

SEQ ID NO: 885983 - DNA, 120 bp, Artificial Sequence
  ENSG00000272562_8 (sequence is synthesized)
tcataattcaggatttaaaaaattgtacttggggcctctcaattcctttcctgtctgatttggtgaaatataataggtaggtagttggtaaataagtcttgtttctcacaggttgtatat

SEQ ID NO: 885984 - DNA, 120 bp, Artificial Sequence
  ENSG00000272562_9 (sequence is synthesized)
atctatctggttggaaataaaataaagatatggcagactaatgcctatttgcacgtgcttttagaacatctctactgtactgtagcaccattagatgattagtattagtaactaatgctc

SEQ ID NO: 885985 - DNA, 120 bp, Artificial Sequence
  ENSG00000272562_10 (sequence is synthesized)
ctacttcttggctttaaaaaatatttctaaccaagggtcagaccattttaggtagagtaattatgatcttagatgatttgaactaactcagctgtctgtccatttgtgaaatgggaataa

SEQ ID NO: 885986 - DNA, 120 bp, Artificial Sequence
  ENSG00000272562_11 (sequence is synthesized)
taatatttatctctatgaagttaggccacaaattctttctagtaggttcaagtatttaagcacctggagaggtgactggttaccctcctagtggcttcaggaagttttctcactgaatga

SEQ ID NO: 885987 - DNA, 120 bp, Artificial Sequence
  ENSG00000272563_0 (sequence is synthesized)
ggaatccatagcctgctaccatttattgtgtagcctgcaaatggtttttacatttttaatacattggaaaaaaaattaaagaagattattatttcgtgatgtgaaaattatacatgttga

SEQ ID NO: 885988 - DNA, 120 bp, Artificial Sequence
  ENSG00000272563_1 (sequence is synthesized)
aaggaaaactttagagtttaattgagtaaagaatgatctgtgaattaggcagcccccagaaccagagtaggtttggttacagctgagcatttgccttatttgaacctggtttgaagagtt

SEQ ID NO: 885989 - DNA, 120 bp, Artificial Sequence
  ENSG00000272563_2 (sequence is synthesized)
ggctgcctgtggttggctgaagttcagctgctgtgattggctgagactcactacttgttacaagagtaggttacatatcaagttttacatatcaagttgaaatatagttttttatgtact

SEQ ID NO: 885990 - DNA, 120 bp, Artificial Sequence
  ENSG00000272563_3 (sequence is synthesized)
ttaaaatatgtaaggaggcagctttaggccacaatgaatttaacaattcctccttttggtcaacctgtcaattttgagaggatgattaattttgaggttgcccaaaactttaggcattga

SEQ ID NO: 885991 - DNA, 120 bp, Artificial Sequence
  ENSG00000272563_4 (sequence is synthesized)
cccaaaactttaggcattgacatcactttttatcatcataaatagagttatttggtctctaatgccattggaaaatagcagaacactggattttgtaaggtgggaacaaggaaacagtat

SEQ ID NO: 885992 - DNA, 87 bp, Artificial Sequence
  ENSG00000272563_5 (sequence is synthesized)
gaacactggattttgtaaggtgggaacaaggaaacagtatagaaaaaaaaaactgattggttaacatcagattacttttttattttt

SEQ ID NO: 885993 - DNA, 89 bp, Artificial Sequence
  ENSG00000272563_6 (sequence is synthesized)
tgagattgctttcttgtaagtaatctgttgttactttgggttacttttctgtaaaggatagagcagaggggacttccttattatactgg

SEQ ID NO: 885994 - DNA, 120 bp, Artificial Sequence
  ENSG00000272563_7 (sequence is synthesized)
tgtaaaggatagagcagaggggacttccttattatactggaatcttctgtcttcaggagaagaaaaaaaaaaactcatctattttgggacctgttttttaaagttttagtttgattttgt

SEQ ID NO: 885995 - DNA, 120 bp, Artificial Sequence
  ENSG00000272563_8 (sequence is synthesized)
ggtgcttagcatgagtgactccattttggtttggtctggtctgcttgggattagtgcaggagctcagtccaaaacaatgacctctcataattttgtttaatacatgaaattcaaatttca

SEQ ID NO: 885996 - DNA, 120 bp, Artificial Sequence
  ENSG00000272563_9 (sequence is synthesized)
aacttgtagacatttgctctctctcttatattatataagtacctacacaatgtcctcaaatttgctttttgatctgtaaagactaagatatttatcatctagttttacagaaaagtttgc

SEQ ID NO: 885997 - DNA, 120 bp, Artificial Sequence
  ENSG00000272563_10 (sequence is synthesized)
agatcttctggtttaaaagagcaggagatttagtgtcaggcaggtttggattgagcccaagggctgccatttactgattgtatgactttgagcaaggtatttatcttttctaagcctcaa

SEQ ID NO: 885998 - DNA, 120 bp, Artificial Sequence
  ENSG00000272563_11 (sequence is synthesized)
tttcctcatctataaaatgggcacacaaatagtatttaccttggagagttaaatgggataatgcatttaatgtgcttaacacagttgcctatcagatgcttaggggctcaaaacattact

SEQ ID NO: 885999 - DNA, 120 bp, Artificial Sequence
  ENSG00000272563_12 (sequence is synthesized)
attgttgttgttgttgttttaccctaaagtaaatgagacaaaatagcaaagctaaatgaggaggaatttttaagttacatcagaaactgtaatagattctaaaatattataattaagaaa

SEQ ID NO: 886000 - DNA, 85 bp, Artificial Sequence
  ENSG00000272563_13 (sequence is synthesized)
ttaaccctcttataagttaaaaaaaaaaaaaaaaaaactttaggaggctgaggtggatggatcaggaggtcaggagttcaagacc

SEQ ID NO: 886001 - DNA, 120 bp, Artificial Sequence
  ENSG00000272563_14 (sequence is synthesized)
ctgcactccagcctcagcaacagatcaagactccatctcaaaaagaaaaaagaaataaaaataaaaagtcatgaccagctattttgggagaactgaaattacaactctatctgagaaaat

SEQ ID NO: 886002 - DNA, 120 bp, Artificial Sequence
  ENSG00000272563_15 (sequence is synthesized)
aaaatgacaggactccacagaatccatagataaaaatttaactgaagaggaatatggaacagactaaaggaaaaattttatcaagctgtaatctttatacttgtgcctgaggccagaact

SEQ ID NO: 886003 - DNA, 120 bp, Artificial Sequence
  ENSG00000272563_16 (sequence is synthesized)
tgaaactgctgaagacagtgtttctctacaaatgtacacaggcaccccattttgatgcacagataggtgtttatttcttttaagaatagcagctttattgagataaatttcacatatgat

SEQ ID NO: 886004 - DNA, 120 bp, Artificial Sequence
  ENSG00000272563_17 (sequence is synthesized)
acaattcaccaatttaaagtgtacaagtcaatggttttcagtataatcagagttgtactaccatcaccataatcaattttagaacattttcatcaccgcccaaaaaccactgtagtctct

SEQ ID NO: 886005 - DNA, 120 bp, Artificial Sequence
  ENSG00000272563_18 (sequence is synthesized)
ccccagccctccactcctgggaaccattaatgtactttctgtttctatagatttgcctattttggatattttatgtaaatgggatcatacaacgtgtggtcttttgtgaatagctttttt

SEQ ID NO: 886006 - DNA, 120 bp, Artificial Sequence
  ENSG00000272563_19 (sequence is synthesized)
cacttaccataatgttttcaagattggttcatgttgtagcaggtatcagtcctttttcctgtttattgccaaataattttccattgtacggatagatcatattttgtttatccatttgtc

SEQ ID NO: 886007 - DNA, 120 bp, Artificial Sequence
  ENSG00000272563_20 (sequence is synthesized)
acattttggttgtctatcagttgatagatatttgtggtgcatttaatttttggccaatgtgtaaaacttattttgctctcactgaggctacatactgttacaacaatgctatttggtcaa

SEQ ID NO: 886008 - DNA, 120 bp, Artificial Sequence
  ENSG00000272563_21 (sequence is synthesized)
gttacaacaatgctatttggtcaacttgactgagctggcctcataagttacaggttgctcattgttagagatgagactttagaccagactggacaacatagtgagaccctgtctctacca

SEQ ID NO: 886009 - DNA, 69 bp, Artificial Sequence
  ENSG00000272563_22 (sequence is synthesized)
tttaggactgcagtgagctgtgatcgtgccaatgcaatccatgctgggcgacagagtgagaccctgtct

SEQ ID NO: 886010 - DNA, 120 bp, Artificial Sequence
  ENSG00000272563_23 (sequence is synthesized)
gacagagtgagaccctgtctcaaaacacagaaagagggattttagtataacattcagccagtgccatattgggaacccacaagaatgtactttaaaaaatatgtcaaagaacgtggtgag

SEQ ID NO: 886011 - DNA, 120 bp, Artificial Sequence
  ENSG00000272563_24 (sequence is synthesized)
ggctgtaatagctgctattcaggcagtaatgcagtgctgaagggacatcaagcaaatagtgtgatgcctgtgggtgcaatgttactccttcccttaggttgccaaaaaaatcaatacttc

SEQ ID NO: 886012 - DNA, 120 bp, Artificial Sequence
  ENSG00000272563_25 (sequence is synthesized)
atagcattcctgaaacgaaaaagcttatgaaccattgtgtttagggcgtaagctatctattttgggctacccatcacagcttctctcctttggtagaataaagtgaactgaaccaccatg

SEQ ID NO: 886013 - DNA, 120 bp, Artificial Sequence
  ENSG00000272566_0 (sequence is synthesized)
taatttacttaactagtccaagattgaagaataaaattattttgaatcttttgttaatagttaatagctttgatgagtacacttatgcatacattattttacacatgttcaagtatgttg

SEQ ID NO: 886014 - DNA, 120 bp, Artificial Sequence
  ENSG00000272566_1 (sequence is synthesized)
tataaaccccaaagtgggaatgctctgtcaaatattacaggtatttgcaactttgatagatactaattgccctcgatagaggtagtaaaagcttacactccacagccttactgatgatat

SEQ ID NO: 886015 - DNA, 120 bp, Artificial Sequence
  ENSG00000272566_2 (sequence is synthesized)
acttttagttcttgccaatctaaacgtgaaaaatggtatttcatggtaatttaaatgcttttctcgttttataactgaggttgacatctatcaaaaaattatttgaatttttctgagaac

SEQ ID NO: 886016 - DNA, 120 bp, Artificial Sequence
  ENSG00000272566_3 (sequence is synthesized)
tattaatctttgaatccttttctgttgtttatcttttccttcttcatttctaaaagttcctatacagagagattcacccgttatctgtgatatgattacaaatgtctgccctccaatttg

SEQ ID NO: 886017 - DNA, 120 bp, Artificial Sequence
  ENSG00000272566_4 (sequence is synthesized)
ttatatgtctttagatccaaataccttattttttgccatgtagaaatttttaatttgtatgtgataaaatgttaatactttatggattctggattttcagaaataaaaaggtcatcctca

SEQ ID NO: 886018 - DNA, 120 bp, Artificial Sequence
  ENSG00000272567_0 (sequence is synthesized)
tgagtagcatggggcagagttaggtcctcatttttaatggtctcatataagatttctgaactacagaggacattactatatctgggtaggaggaaataaatctttaaatttgaaataata

SEQ ID NO: 886019 - DNA, 120 bp, Artificial Sequence
  ENSG00000272567_1 (sequence is synthesized)
gttattgttgttgttgttttacatttaggatttcaatgtggaatctcagatttcttttgtgaactcctttactgtcagacaattaaccagaaataccaaataaatgaagatgggaaaaca

SEQ ID NO: 886020 - DNA, 120 bp, Artificial Sequence
  ENSG00000272564_0 (sequence is synthesized)
ttgacaacaggtgagatttggggcacctgactgtgacttcaacccagcaggtggggttggcccaaagcagttccccagcttgtcctctcaggtcctctggacacccttccccaccacaca

SEQ ID NO: 886021 - DNA, 120 bp, Artificial Sequence
  ENSG00000272564_1 (sequence is synthesized)
agctctgccgacagctaccagtgtattcttgggcaagtcactgaacctctgtgggtcctgattcccttacctgtaagagagtgataatcataaggccctctgcattgctctaaggatcaa

SEQ ID NO: 886022 - DNA, 120 bp, Artificial Sequence
  ENSG00000272564_2 (sequence is synthesized)
gataatgcttgtgaaagtcttcactgtactctaaagtgtgattaatatatattctttatcctggaatctcctatctcctttgagtcctgttaaataaaccatgatgtgaatggttagtaa

SEQ ID NO: 886023 - DNA, 120 bp, Artificial Sequence
  ENSG00000272568_0 (sequence is synthesized)
aaatgacttaatgtctaaggagaaggctaatttggaagggagtcatactggtacaaggagactaccaaatcaggcttctgacatgggcagatttgcaaaggtggtgctactcaccaggaa

SEQ ID NO: 886024 - DNA, 120 bp, Artificial Sequence
  ENSG00000272568_1 (sequence is synthesized)
agagaaaagagccacatgggagctgcaagtttggcaggcagaatatgtaggattggtttattgtttctgctttccagtatagaaagatgcataccctcaagagaatctgcttgttgtggt

SEQ ID NO: 886025 - DNA, 120 bp, Artificial Sequence
  ENSG00000272568_2 (sequence is synthesized)
tgatttacatagatgatgagattggccccatgtctgaaaaacagtatgtggggaaggcctggagaagcaattgaactgaaacaaagtcaaaagtgggaagtccccctctggcaagcagct

SEQ ID NO: 886026 - DNA, 120 bp, Artificial Sequence
  ENSG00000272568_3 (sequence is synthesized)
ctaagatgacagagccggtgccagaatctaaaccttgggactctggttgctgtataaaaaaataaatattaggaacaaaaataaatacccacatctccatgctggacagcagaagagcaa

SEQ ID NO: 886027 - DNA, 120 bp, Artificial Sequence
  ENSG00000272568_4 (sequence is synthesized)
agtttcagcaagatcaacactgagtatccctgacaggattcagccaagggccagtggcagcttcccagcctctttggagagtgatctgcctgctccccgcagttgagagtgctgcactgc

SEQ ID NO: 886028 - DNA, 120 bp, Artificial Sequence
  ENSG00000272568_5 (sequence is synthesized)
aagtgttacctggtgaggcccacctccagcccactacttctgggaaaaatgacttaatgtctaaggagaaggctaatttggaagggagtcatactggtacaaggaggcaaattaggagac

SEQ ID NO: 886029 - DNA, 120 bp, Artificial Sequence
  ENSG00000272568_6 (sequence is synthesized)
tatatttcctgtcttccatatgttagaagctcagtacaaacaggagaaaaagaaaaaaaaaaaggctggatgcacctcatttgttgtcaacagggatgtttcaaattattgttaaactag

SEQ ID NO: 886030 - DNA, 120 bp, Artificial Sequence
  ENSG00000272568_7 (sequence is synthesized)
aagggactcaatgctttagaaacaactcattactcaattcagccacttttatttcctattaggctgtcatatagcaaaatgtccaacaccgccccatccctctctgctactactaccttt

SEQ ID NO: 886031 - DNA, 120 bp, Artificial Sequence
  ENSG00000272568_8 (sequence is synthesized)
tgacaagacagtctctttgttaaagtcaagttaaaactggatacagctgtggtagtttcaggcctatctgacagacaatattgaactcatttcatcatctgaaactttaatacaaaatgt

SEQ ID NO: 886032 - DNA, 120 bp, Artificial Sequence
  ENSG00000272568_9 (sequence is synthesized)
ctcttaaggactctatgaacagagcaagaggttcttgccctgtgaaaatagattaatgctaagagagctccctaatggcaatagaaaccaacatttattttatgcttattaggtgccagg

SEQ ID NO: 886033 - DNA, 120 bp, Artificial Sequence
  ENSG00000272568_10 (sequence is synthesized)
tagagagagggtcaagtaatttataagcattatctcaattcatcctaataatgaaccctcctgtgagagtggtgggtgataatattatccccatttcacaggtgagggggttcttggaga

SEQ ID NO: 886034 - DNA, 120 bp, Artificial Sequence
  ENSG00000272568_11 (sequence is synthesized)
ggttaagtaacttgcccaaggtcatacagctggtacatggtagagcagggatctattccaagtctaacacagtatccattctcttaatccctatactataatgtcacttgaatatggtaa

SEQ ID NO: 886035 - DNA, 120 bp, Artificial Sequence
  ENSG00000272568_12 (sequence is synthesized)
caaaagtagttagaattgccagtgtaatcaactagaaacaaaattcaagcctacttgatagtttagctcataaaatctgtctggtatcaccaaaggtgataggtgatttgggctggggag

SEQ ID NO: 886036 - DNA, 120 bp, Artificial Sequence
  ENSG00000272568_13 (sequence is synthesized)
aatctataaattattttcaacaattcaaatagcctaatgcatgggttcttaatctgtttctgtgctacagtctcctatgactgtctggtgcagcctgtggactaccttctcacaataatg

SEQ ID NO: 886037 - DNA, 120 bp, Artificial Sequence
  ENSG00000272568_14 (sequence is synthesized)
ctgtctggtgcagcctgtggactaccttctcacaataatgtttctaaatgcatgctggctgggcatggcggctcatgccgataatcctaggactttgggaggccaaggcaagaggatcac

SEQ ID NO: 886038 - DNA, 120 bp, Artificial Sequence
  ENSG00000272568_15 (sequence is synthesized)
agaaaatacaaaaattagtcaggtgtggtatcatgtgcctatggtcccagatacctgggatgctgaggtgggaggatttgttgagcctgggagttcaaggctaaagtgagccatgatggt

SEQ ID NO: 886039 - DNA, 120 bp, Artificial Sequence
  ENSG00000272568_16 (sequence is synthesized)
gctacagcacttcagcctaggtgacagggcaagtccctgccttaaaataaatacatacataattaatacagagtgcatatgcatccacacatatacatagataatatacagtgaattaaa

SEQ ID NO: 886040 - DNA, 120 bp, Artificial Sequence
  ENSG00000272568_17 (sequence is synthesized)
atcaaatcctaggctttgctaggattgcaaatgaaacactccactgaaatcatcaaaacagtaaaaaaaaattgtgagatagcacatacatacttgtatattagcacattcagtaggaga

SEQ ID NO: 886041 - DNA, 120 bp, Artificial Sequence
  ENSG00000272568_18 (sequence is synthesized)
aaccagagggtctgaaaactactataattttaattttagtgataaggataaaaggttttcaacatatctataacagtgtatgtggtatttggtatgagaatgtctttgctttctattggt

SEQ ID NO: 886042 - DNA, 120 bp, Artificial Sequence
  ENSG00000272568_19 (sequence is synthesized)
gacaaaagtcaaaggtactgctgtgccactgtgatttgttgcctacatttataatggaaggaaatgtgaaatttcacaattcataatgaaaggaaatgctatttcagttagaggttagag

SEQ ID NO: 886043 - DNA, 120 bp, Artificial Sequence
  ENSG00000272568_20 (sequence is synthesized)
aaaataaagatgcagttttttcccttccaagttcactgacaactccttgaatcctaaccacagacccttactccaggttaagaatccttattaaatagcctaatgagtaactaatggaaa

SEQ ID NO: 886044 - DNA, 120 bp, Artificial Sequence
  ENSG00000272568_21 (sequence is synthesized)
tactgagcttacttataataagacttcacagtctaaaatgtggcactttttttttctttgctttgacatggaattgtatgaatctattatccagaaaaaaaattcactgtggctagtgga

SEQ ID NO: 886045 - DNA, 120 bp, Artificial Sequence
  ENSG00000272568_22 (sequence is synthesized)
catctttgctgcaaaccatcactctggatgatgtttaaagcagacagtgcttggtagttttttctttgttgaaaggcaacacagacacactactatctaagagcactgcacaccaggaac

SEQ ID NO: 886046 - DNA, 120 bp, Artificial Sequence
  ENSG00000272568_23 (sequence is synthesized)
acgttgtttcagtacagcacaaaactgctgggaaaaggaaactaatgcttttaaacaaataaaagagttttcttacaagtctaaattgccagtgatctatcaataattaaaaagaacaaa

SEQ ID NO: 886047 - DNA, 120 bp, Artificial Sequence
  ENSG00000272568_24 (sequence is synthesized)
gaccacttgtaaacctgcagtgcatggcagggactgaagtctacaatttagattaaggttttggctgatgatttcagagaaccagtgccataccagttgatactactgactggaagacag

SEQ ID NO: 886048 - DNA, 120 bp, Artificial Sequence
  ENSG00000272568_25 (sequence is synthesized)
agacaatgcttcaggtcaatggctgatttgtaaagagtaaaactgtgttctcaaatttctggttagcttgtaagtaaaaatggatttagaacatacttcaggaatcagaatgaaagtttc

SEQ ID NO: 886049 - DNA, 120 bp, Artificial Sequence
  ENSG00000272568_26 (sequence is synthesized)
tccaaacatatgccacatgggggttcctgccagatggaagccatgtcattatcaatagagggacaaaagacatcatagtttagggttcccaaactggctacatattagaaacctctttga

SEQ ID NO: 886050 - DNA, 120 bp, Artificial Sequence
  ENSG00000272568_27 (sequence is synthesized)
agcttcaataccaatgcccaggttccaccccagaccaataaaatcagggtatctacagagcaggtgtggaaatctgtatctgcaaaggttgagacacattggtttagggcaaaggaggag

SEQ ID NO: 886051 - DNA, 120 bp, Artificial Sequence
  ENSG00000272568_28 (sequence is synthesized)
attaaaaatggctccagattctttgccattcttcccaccaaaaggaatctgctttgctctgtgttttgcattgaccaggagagaatgaaatggaaataatgttctgggacttttgagtac

SEQ ID NO: 886052 - DNA, 120 bp, Artificial Sequence
  ENSG00000272568_29 (sequence is synthesized)
agcccaaggcataagctgaaatctgttgattttatttacttgctgcttcttactgagccactgttggcagagttgaattgaaaaggtgctaagggaataactttctgattttttttttga

SEQ ID NO: 886053 - DNA, 120 bp, Artificial Sequence
  ENSG00000272568_30 (sequence is synthesized)
gctggatattttgctagccaacctcagcacaggacacccagaagaaaaatgaacctacataaccacccggacttggatgtgaaatgtccactctgccttcgctgtgtgtgtgtatgccag

SEQ ID NO: 886054 - DNA, 120 bp, Artificial Sequence
  ENSG00000272568_31 (sequence is synthesized)
aaaaaaaaaaaaaaaaaaagacaggagacagctatggaaagagaatacaaaccatgacttttagacgtgagaaaggacagtaagccttcctttaatttaataagctcaggtgaaagaact

SEQ ID NO: 886055 - DNA, 120 bp, Artificial Sequence
  ENSG00000272568_32 (sequence is synthesized)
ttaataagctcaggtgaaagaactagaggcaagtccaagtgtttgctgagatcatggaataatcagaactcttatactttaccggcaagaataatcaatttggaaaacagtttaacatta

SEQ ID NO: 886056 - DNA, 120 bp, Artificial Sequence
  ENSG00000272568_33 (sequence is synthesized)
tctagtgaggctgacacagacacaaggagatatgtgcaaaaatgtccatagcagcactatctgtagaagcaaaatactgaaaacaacccaaatgtccatcggcagtggaatgggtgaata

SEQ ID NO: 886057 - DNA, 120 bp, Artificial Sequence
  ENSG00000272568_34 (sequence is synthesized)
tatgatgaaatactatgcagcaatgaaaaagaataagacacaattgagcatatcaacatgggtgaatctcacatacagcgttgaatagcaaaagtatgtttttgcaaaatacatacagaa

SEQ ID NO: 886058 - DNA, 120 bp, Artificial Sequence
  ENSG00000272568_35 (sequence is synthesized)
taatttcttttctataaaattaaacatgaaaagtaaaatattatatatggatacgtatgtctgcagtaaaactattaacaaagaaaaaagaaaggggatggtaaaagcaaaattcaggac

SEQ ID NO: 886059 - DNA, 120 bp, Artificial Sequence
  ENSG00000272568_36 (sequence is synthesized)
agtagtctacctccaggggtaattaggaagggcaatgtcgtattttttaaaccagctggtgagtacaaaagtgttcatttatcactgttttatcttagacagcatggtaaatattctttg

SEQ ID NO: 886060 - DNA, 120 bp, Artificial Sequence
  ENSG00000272568_37 (sequence is synthesized)
gtatgtattcaattttaaatttaaaagaagaaaagaaaaaccacctgctgatgctgccatccttgcaaaaatgaatctttaggaaatttaacatgttctctgctgtgcttttttcttctc

SEQ ID NO: 886061 - DNA, 120 bp, Artificial Sequence
  ENSG00000272568_38 (sequence is synthesized)
ttggaacaccagcctgctgtattgtggaaaagtccaggccaggacactacatgattagaggtggtatggagagagcactggaggagaggagatcatcttggatgtcccagctttagccaa

SEQ ID NO: 886062 - DNA, 120 bp, Artificial Sequence
  ENSG00000272568_39 (sequence is synthesized)
actcccagctgaatgcagctgcacatgtgacctcagcctaccccatctgaatcagacccacccagctgagctcactcaatccacatatttgtgagaaataataaattgtttgaagccact

SEQ ID NO: 886063 - DNA, 120 bp, Artificial Sequence
  ENSG00000249551_0 (sequence is synthesized)
acaccaactggccaccaacagaaaaaaattcagaaaacaacagaatcgtaactcacattggcccccagctttcagcctgcattccaccatcgtataagtgaagacccgtcagtagagaca

SEQ ID NO: 886064 - DNA, 62 bp, Artificial Sequence
  ENSG00000249551_1 (sequence is synthesized)
attccaccatcgtataagtgaagacccgtcagtagagacaaggtttcactgtgttagccagt

SEQ ID NO: 886065 - DNA, 120 bp, Artificial Sequence
  ENSG00000249551_2 (sequence is synthesized)
tgaagtgtctggatcacgaaactaattccaacaaccaactacatcacataggaagatcattcagtagagcaaggcgtcaaagactcaaggacacaatttcaaaaacagaatggacaccca

SEQ ID NO: 886066 - DNA, 120 bp, Artificial Sequence
  ENSG00000249551_3 (sequence is synthesized)
aggaggataagtgaaaaatccaattttggccatcaccatgacatctcattattgttcccttttgggagctaactcagcacacactcactttatctgactcgtgtcgcttggaagggcaag

SEQ ID NO: 886067 - DNA, 120 bp, Artificial Sequence
  ENSG00000249550_0 (sequence is synthesized)
gggacattttcctggagcggctgggaaagaggagtctctcgaaattcagcaactgctaacagcgaggaggggttttgaaaggtaaaggccattagcttggaggcagaagacagacctccc

SEQ ID NO: 886068 - DNA, 120 bp, Artificial Sequence
  ENSG00000249550_1 (sequence is synthesized)
tgactgctgaattcctgccggcctgaaattggagcattccaagctcctcagatgagtcataagccaccaagattgtgagcctctggaaacttcatcatgaaatgttggggacctgcctca

SEQ ID NO: 886069 - DNA, 120 bp, Artificial Sequence
  ENSG00000249550_2 (sequence is synthesized)
ccaggttgatgtaaggacctcgtgggatgaagccagctcagtgaccattccagagaggacactcgacacatggccaagtttgtgaaatccctcctggttgctgtgtggagccctagttca

SEQ ID NO: 886070 - DNA, 120 bp, Artificial Sequence
  ENSG00000249550_3 (sequence is synthesized)
tccacatttccaacagctgagtcttccgcacaacgggaaaagcaccattaatttcactctcctatcttggagcatttagatcatttcctggttttgcttcttacaaacagagctgctatg

SEQ ID NO: 886071 - DNA, 120 bp, Artificial Sequence
  ENSG00000249550_4 (sequence is synthesized)
aacatccctacctggaactcaggggccacttttctctagggacacattcatctgtctgctagatgcttttttctaaaactctactttcattttaaaaattatgacatggctatacttgct

SEQ ID NO: 886072 - DNA, 120 bp, Artificial Sequence
  ENSG00000249550_5 (sequence is synthesized)
caggcctctaagatggcatcctaggacctactgaatggagtcccagcatctcaaggaaggaatgccagaagccagaacatccaagtaacaatctccacctgcagctgatgctctctggga

SEQ ID NO: 886073 - DNA, 120 bp, Artificial Sequence
  ENSG00000249550_6 (sequence is synthesized)
cccaggaccagccactcttctctgtgccccactttcctcctttgtaatctaattacccagtgatgaccaggatataagaggacttgtctgcattgtctcatggccacaaccacaagaaga

SEQ ID NO: 886074 - DNA, 85 bp, Artificial Sequence
  ENSG00000249550_7 (sequence is synthesized)
gacttgtctgcattgtctcatggccacaaccacaagaagagcgtcctgctgtcacccccattttataaatagggaaactagcttt

SEQ ID NO: 886075 - DNA, 120 bp, Artificial Sequence
  ENSG00000249550_8 (sequence is synthesized)
agcaagaactccgtcttgacaaaaaaaaaaaaaattttttttaaattaactgggcatggtggcacacacctgttgttccaactattcgagaggctgagatgggaggatcatttgagccca

SEQ ID NO: 886076 - DNA, 120 bp, Artificial Sequence
  ENSG00000249550_9 (sequence is synthesized)
ctccagcctggacaacagagtgagaccttatctctaaaaaataagaaaactgaggcacagagaagttaagtaacgtgctcaaggtcatgcaactagtaagtggcagagcctacgtgcttt

SEQ ID NO: 886077 - DNA, 120 bp, Artificial Sequence
  ENSG00000249550_10 (sequence is synthesized)
aaggtcatgcaactagtaagtggcagagcctacgtgctttcccttcattaattcagtcatttattcaacaactattttattgaacatccactatgtacccagcctcggcagtgatcaaga

SEQ ID NO: 886078 - DNA, 120 bp, Artificial Sequence
  ENSG00000249550_11 (sequence is synthesized)
tacccaagatcctagattttacaaaatccaccacttaaaagcagagcatgggatggaaaggagacaaaaattattgtgtctaacttatttgttaatttgcctatgggcagcaataagtgc

SEQ ID NO: 886079 - DNA, 120 bp, Artificial Sequence
  ENSG00000249550_12 (sequence is synthesized)
catggggggaaaaaaggtagagtaataggaactactttggtcagggaagtcctctctgcagagtggagacctcactgtcaaggagaaaacagccaagcaaaggcctaaatcaagggtgtt

SEQ ID NO: 886080 - DNA, 120 bp, Artificial Sequence
  ENSG00000249550_13 (sequence is synthesized)
tgttacaagagaaaggaaaaggcaggagtagagaggccccattgtcagaggcgtttaaaccagagtgactccatcttgaccaggagctgggtacaatgaggctgaaacctactgggctgc

SEQ ID NO: 886081 - DNA, 78 bp, Artificial Sequence
  ENSG00000249550_14 (sequence is synthesized)
ctactgggctgcattcccagatggttaggcattctgagtcacaggataagataggaggtcataagtaaagaagccagc

SEQ ID NO: 886082 - DNA, 88 bp, Artificial Sequence
  ENSG00000249550_15 (sequence is synthesized)
caaaacccaccaaaaccaagatggtgacgagagtgacctgtggtcgccctcactgctgcactcccacccgcgtagaagttacccaaaa

SEQ ID NO: 886083 - DNA, 120 bp, Artificial Sequence
  ENSG00000249550_16 (sequence is synthesized)
gagcaggcctgtctcgtcttctagtcttctactgtatctcaatacaatgcctgggacaggagaaacacccaatacgtatgggcagaataaataaatgacacagttctggggtggcagcag

SEQ ID NO: 886084 - DNA, 120 bp, Artificial Sequence
  ENSG00000249550_17 (sequence is synthesized)
atcaatttcctggtctgtgtctcttcaatggacaagtcgatacatctctgctgctccacgtgtagtccatggaccaggccccttctcatcacctgggagctcatgagcaacgcagcatct

SEQ ID NO: 886085 - DNA, 120 bp, Artificial Sequence
  ENSG00000249550_18 (sequence is synthesized)
cagtatcccaccccagacatctgcatggactgaatccagttcaccacttgcttgagggtaattgcacataagtctccaagtctcagtttcctcagctgaaaaataaaaggtaataaagcc

SEQ ID NO: 886086 - DNA, 120 bp, Artificial Sequence
  ENSG00000249550_19 (sequence is synthesized)
cctacttcaatgaacattcggccaaaagacaaaaggaaggtattgctaggtaatgtgcagccactctgtcacagtcttttttttttaaatgaacacaaattccttgactgtcttcttgct

SEQ ID NO: 886087 - DNA, 120 bp, Artificial Sequence
  ENSG00000249550_20 (sequence is synthesized)
gagaggtgaggtctctgtccccctcctctccctacttgaatctggatgagcttgtgactcacttataaccaagaatatggaagaagtgatgctgtgtgatctcctcatgcctggagcctg

SEQ ID NO: 886088 - DNA, 120 bp, Artificial Sequence
  ENSG00000249550_21 (sequence is synthesized)
tgagcctctctctgagaagtccagtgcccctgagcccaccatgctgaagaagccacctggagaagcccctgttgacagagagccagcatcacctgccagtcaccagaagggagccatctc

SEQ ID NO: 886089 - DNA, 120 bp, Artificial Sequence
  ENSG00000249550_22 (sequence is synthesized)
agacatccagcccagctgagccttcaactgactgctgccccaaccaacatgtgaactgcaaccgcatgagagaccctcaagtgagaaccgcccagctgagcctttcccaagttcctggcc

SEQ ID NO: 886090 - DNA, 120 bp, Artificial Sequence
  ENSG00000249550_23 (sequence is synthesized)
cacaaaacccagaacaaattaaaatgagtgttttaagccattaaggagcagggtaatttgttacacagcaacagtaaccaggacacattcccaaacctaactaggaggaaatttcctctt

SEQ ID NO: 886091 - DNA, 120 bp, Artificial Sequence
  ENSG00000249550_24 (sequence is synthesized)
ccaggtgattcagatgcacagccaggtttggaaatttaagaccttggaagagagtcacattgcctctctctgagtctcagcttccttgtctgtgaattggggaggagtgagagttggtgt

SEQ ID NO: 886092 - DNA, 79 bp, Artificial Sequence
  ENSG00000249550_25 (sequence is synthesized)
cttccttgtctgtgaattggggaggagtgagagttggtgtgagtatcaaagaagacgctgcaggtaaagtctttagggc

SEQ ID NO: 886093 - DNA, 78 bp, Artificial Sequence
  ENSG00000249550_26 (sequence is synthesized)
cgggtggatcatgaggtcaggagttcagcctggccaatatgatgaaacaccaggtgcctgtagtcccagctactcagg

SEQ ID NO: 886094 - DNA, 87 bp, Artificial Sequence
  ENSG00000249550_27 (sequence is synthesized)
gaaaaaaaaaaaaaagtctttaataaggccaaggcatatggaaaggactcaggattggaactgaataattaaccgtggatatcagta

SEQ ID NO: 886095 - DNA, 120 bp, Artificial Sequence
  ENSG00000249550_28 (sequence is synthesized)
ctcaggattggaactgaataattaaccgtggatatcagtatcattgataccaatactgttgttttattgtaactacttcactatcatgggttgaatagcggcatcaaaaatatatgtcca

SEQ ID NO: 886096 - DNA, 120 bp, Artificial Sequence
  ENSG00000249550_29 (sequence is synthesized)
gttcctaacccctgatgcctgtgaatgtgaccttatttggaaatagagtctttgcagatgtagttaaagatctcaagataagctcgtcctagatttagggtgggtcttacatccaatgac

SEQ ID NO: 886097 - DNA, 120 bp, Artificial Sequence
  ENSG00000249550_30 (sequence is synthesized)
aaatgtccttataagatacagaaaaggagaagaagaccacatgcatacccacaagaagatggaggcagagactggagtgaagaagccacaagccaaggaatggctggagccaccaggagc

SEQ ID NO: 886098 - DNA, 120 bp, Artificial Sequence
  ENSG00000249550_31 (sequence is synthesized)
tgaaagaggcaacgaaggatcctcccctggagacttcagagggagcatggccctgctgacaccttgattttggatttctggcccccagaaccatgagagaataaatttctgttgtgttaa

SEQ ID NO: 886099 - DNA, 120 bp, Artificial Sequence
  ENSG00000249550_32 (sequence is synthesized)
ttgtaggagaaatgccttgcaggtgaagatggtgaggaagttggccctgaaatagcccagcccctcgaagagacaaacagggaggagcatcattcaggtgcttcactgggaaatgaacca

SEQ ID NO: 886100 - DNA, 120 bp, Artificial Sequence
  ENSG00000249550_33 (sequence is synthesized)
tccgaagtcacaccagagggagggctggagggagaatcaaatgaaagagagagggagagaaaggaaggaagagaaggagggagaatggaaggatgtatggatttggatgtatgggttcca

SEQ ID NO: 886101 - DNA, 120 bp, Artificial Sequence
  ENSG00000249550_34 (sequence is synthesized)
ttccttctaccctggcaaaagcttactcatccttcagtgtccatccaaaatggcatctcttcttgggcaccatctccagagtctcctgcaagcaggtagctacatcccacaaaacaacca

SEQ ID NO: 886102 - DNA, 120 bp, Artificial Sequence
  ENSG00000249550_35 (sequence is synthesized)
cccatctgaccatgcaagtgtgtgggggaatgaagaccagcccaggaatctgagatgaatgttttgcttcttgctctgccactgactcacagggtaccccaagcaagtcccttcacctcc

SEQ ID NO: 886103 - DNA, 120 bp, Artificial Sequence
  ENSG00000249550_36 (sequence is synthesized)
gcctcaagtctcaacatttttattccctgaaaagaaactcttggtgctgagtggtcttcttctgccctgacatctcacctttcaaacgcttgtctcttctcaccccacccaccacttagc

SEQ ID NO: 886104 - DNA, 120 bp, Artificial Sequence
  ENSG00000249550_37 (sequence is synthesized)
atgtgctcttggagaacacccaggactcagggtctctgcacacatcatgagtccagctcagcatttgaggtggaatcagaggaaaggaaggagagtggggagaatagtcagtattttggc

SEQ ID NO: 886105 - DNA, 120 bp, Artificial Sequence
  ENSG00000249550_38 (sequence is synthesized)
aagctcatcataccttccccctttgtatagaaacttcaaaccatttccctttgaaggcactacctccttcccccagttataaatgagtgaaggtctcaagcctggacaaccaaatgcaca

SEQ ID NO: 886106 - DNA, 120 bp, Artificial Sequence
  ENSG00000249550_39 (sequence is synthesized)
gtgattggttcaactctggacctgtgactcaagccagaccaagggagtgacatgcagggctttgcctggaactattctgaaaggggcactctctttctgctgggctactgataatatgtg

SEQ ID NO: 886107 - DNA, 120 bp, Artificial Sequence
  ENSG00000249550_40 (sequence is synthesized)
catccgtgatagaagagcctgcctgataataaagccaataagggaagagcagagccaagagatggtgggagagcagatgcctgaaaatatcatttgagcccctgggtccagctgcacctg

SEQ ID NO: 886108 - DNA, 120 bp, Artificial Sequence
  ENSG00000249550_41 (sequence is synthesized)
aagccaccacgatctcctggactttgcagttacttgagttcataaataccctttggcattaagccagattgagtcttaatgcatatagaaataagagaaatgagaaaagaaattgaaaag

SEQ ID NO: 886109 - DNA, 120 bp, Artificial Sequence
  ENSG00000249550_42 (sequence is synthesized)
agagacagcagagaactgattctctactagagcctccagaaggaatcaactctgccaacaccttgattttggacttgtggccttcagaacagtgaaatgataaacatctgttattttaag

SEQ ID NO: 886110 - DNA, 120 bp, Artificial Sequence
  ENSG00000249550_43 (sequence is synthesized)
atgggagaggggatgtggcactgtcgttggccttgggtcacctgcctctcccacaagttgggggtggagtcagctacatcaaggccacctggcctgagagggagcaagctgcggttcccc

SEQ ID NO: 886111 - DNA, 120 bp, Artificial Sequence
  ENSG00000249550_44 (sequence is synthesized)
gtagatgaggctggaattatctatcctagctgcccagacccatgtgcctttgttttatgtagttacagcacctatgatacatatttgttaccatgtatgtcactatgaacctcctctgga

SEQ ID NO: 886112 - DNA, 120 bp, Artificial Sequence
  ENSG00000249550_45 (sequence is synthesized)
ggacggagaagtcaaataccttaattattccaacacaagcttgcgtgaacagataatcatcactacgagtatattgtgtgcctgctaagcaccacacctgagataagcatttgctgtggt

SEQ ID NO: 886113 - DNA, 120 bp, Artificial Sequence
  ENSG00000249550_46 (sequence is synthesized)
ttgaatgtcccctccaaagctcatgctaaaatttaattgccattgcaacagtgttgcaaggtgagaactttaagagatgatcaggtcatgagaactctgccctcgtgaatggattaatac

SEQ ID NO: 886114 - DNA, 120 bp, Artificial Sequence
  ENSG00000249550_47 (sequence is synthesized)
ccttatcgcagtagtggaccccccttttctcttgctgtctgtctctcatgttagcttgtgcttcctcctttcaccatgggataacacagcaagaagcccctcaccagatgctggcacctt

SEQ ID NO: 886115 - DNA, 120 bp, Artificial Sequence
  ENSG00000249550_48 (sequence is synthesized)
ggaccagcatacacactgtccttctcagtagccaagaagtttgcttccttctcgtccagagttctcttctagggtttttgagaaaaaaggttttgcaacaggtgttctggatctactaag

SEQ ID NO: 886116 - DNA, 120 bp, Artificial Sequence
  ENSG00000249550_49 (sequence is synthesized)
aagcctacagttttggagttgctatcatcctctacagagctggcccagtggagggctgataagggcagggggtacactccccactctaccaacccctctccctttagatttctaccaagc

SEQ ID NO: 886117 - DNA, 120 bp, Artificial Sequence
  ENSG00000249550_50 (sequence is synthesized)
cagtcacatcagtctggccagtgagtcagagttcatcaaaggactatgtgaccttgggaaaaatagttaacctctctgggcctcaaattcttcatttctgaaatgggcattataatagtg

SEQ ID NO: 886118 - DNA, 120 bp, Artificial Sequence
  ENSG00000249550_51 (sequence is synthesized)
cctatcttacagcattgctgtgagggttagttaacaaactaacagcatgttgtgaaaatgcttaacacagtacctggcacagggtaagggcccaataaaagcaataataataatattaaa

SEQ ID NO: 886119 - DNA, 120 bp, Artificial Sequence
  ENSG00000249550_52 (sequence is synthesized)
ccacctggagtatagtagcacgatcatggctcactacagcctcaaactcctggactcaagcagtcttcccaccttggtctctcgagcagctgtgactacaggtgcacaccaccacaccca

SEQ ID NO: 886120 - DNA, 87 bp, Artificial Sequence
  ENSG00000249550_53 (sequence is synthesized)
tattgcccaagctggtcctgccttccaaagtgctgggattacggatgtgagccaccacacctgaccaggataaattctgatggctgc

SEQ ID NO: 886121 - DNA, 120 bp, Artificial Sequence
  ENSG00000249550_54 (sequence is synthesized)
gggacattttcctggagcggctgggaaagaggagtctctcgaaattcagcaactgctaacagcgaggagggggatgtgatttctttctttttttgaaaagttttgaaaggtaaaggccat

SEQ ID NO: 886122 - DNA, 120 bp, Artificial Sequence
  ENSG00000249550_55 (sequence is synthesized)
tacattatctgtcttattaaaaataatgtttttgcccaggaacatagattcaagttgccctgaatatacattatctccctacattatctcttttaatcctcacctattaggtagataaac

SEQ ID NO: 886123 - DNA, 120 bp, Artificial Sequence
  ENSG00000249550_56 (sequence is synthesized)
tgctattatccccattttgcaggtgaaacctcaagctcccaaagaactgcagcatcgaggaaagtaaaaccaatagctagcatgttcagtagtcccctttacccatggtacaatacagta

SEQ ID NO: 886124 - DNA, 120 bp, Artificial Sequence
  ENSG00000249550_57 (sequence is synthesized)
cgctaagatattctgagaaagtgagaggccgcattcacgtatcttttatcgcagtatattgttacaattgttgtattttattcgttattgttgttagtctcttattgtgcctaatttata

SEQ ID NO: 886125 - DNA, 120 bp, Artificial Sequence
  ENSG00000249550_58 (sequence is synthesized)
aattaagctttaccacaggcatgtgtgtataggaaaaaacagtacggatgctcctcaactcacaatagggttatgtcctgataaacccttcgttcagttgaaaagatctttaagttgaaa

SEQ ID NO: 886126 - DNA, 120 bp, Artificial Sequence
  ENSG00000249550_59 (sequence is synthesized)
atgcatttaatacctctaacctaccaaacatcagagcttagcctagcataccttaaacatcctcaaaacacttacactagcctacagttgaaaaaaaatcgtctaacacaaaacctattt

SEQ ID NO: 886127 - DNA, 120 bp, Artificial Sequence
  ENSG00000249550_60 (sequence is synthesized)
aatcgtctaacacaaaacctattttctaacaaagcactgaatatctcatctcttaattttaatttttttttttctgagtaacaggctgctctgttactcaggctggagtgcagtggcatg

SEQ ID NO: 886128 - DNA, 120 bp, Artificial Sequence
  ENSG00000249550_61 (sequence is synthesized)
acctcagcctcctgagtagctaggatacaagtgcgtgccaccacacctggctaatcttttaatttttatttttgtagagacgaggtactgtttcccagggtggtcttgaactcctggcct

SEQ ID NO: 886129 - DNA, 120 bp, Artificial Sequence
  ENSG00000249550_62 (sequence is synthesized)
gctcagtgaccattccagagaggacactcgacacatgctccgggcagctgccaccaagatggcccgactgagccaaggacatcggaaacgctgaagaacgtaccctggatgagctcagag

SEQ ID NO: 886130 - DNA, 120 bp, Artificial Sequence
  ENSG00000249550_63 (sequence is synthesized)
gctgctggctttaaaggtctcagccagaaagcaagcctccctgcatggcttcatctctcaaacacgattcactgcacctgaagaaggaaagccaaacgccacagtgtccctgcccctgtc

SEQ ID NO: 886131 - DNA, 120 bp, Artificial Sequence
  ENSG00000249550_64 (sequence is synthesized)
tctcaacaggcttgtgtccgtgacccctgcaggaggggcatggcgtgcttccttccttccacaccatcccccttccaggcaaataatccagctctagcttgctttgcggacttgccagat

SEQ ID NO: 886132 - DNA, 120 bp, Artificial Sequence
  ENSG00000249550_65 (sequence is synthesized)
cacccttcccatcacagtttcccaatctttcttctcttccttgcaaaggcgtgtattaagggagatggcaagtcattcattcgatataagctaattgagcacctactatgtgttggctgt

SEQ ID NO: 886133 - DNA, 120 bp, Artificial Sequence
  ENSG00000249550_66 (sequence is synthesized)
aacacacagctgatgttggggtcgggggggtgcagctgataatgggattcaccctccagaggcagagcacttaattaacttctgggacaagaggaggggaagggaaaatgaggctcttaa

SEQ ID NO: 886134 - DNA, 120 bp, Artificial Sequence
  ENSG00000249550_67 (sequence is synthesized)
ggggacaggccaaaggctctcaccccatgatcagccaggattcagccaaggacataaaatctcaggttcaataaatattaactgacaacctagtctgtgcacagagctgtgctagacact

SEQ ID NO: 886135 - DNA, 120 bp, Artificial Sequence
  ENSG00000249550_68 (sequence is synthesized)
agagatacagaagtgaacaaaacagacaacacccttgccctcctggagctgacattcttgtgcaggagagggacagatgctacatgggcacataaatacgtgaagattattaagaatagc

SEQ ID NO: 886136 - DNA, 120 bp, Artificial Sequence
  ENSG00000249550_69 (sequence is synthesized)
tgctgttgtgcaggaaggcttagcctttgccaggaaacgttagatacaagatgcggcagggcggaaaacagggagggtccctgctttcagccagcagctaaacggtcaagttctatgtac

SEQ ID NO: 886137 - DNA, 120 bp, Artificial Sequence
  ENSG00000249550_70 (sequence is synthesized)
cggctgagaatagggcctggggatgaaagccagagaagcctctctcagaagccagggaagtggctgctcacccgcttaatccctccatggctccccattccctcccaatacaatccacac

SEQ ID NO: 886138 - DNA, 120 bp, Artificial Sequence
  ENSG00000249550_71 (sequence is synthesized)
cggagactacaaggccccacccacatcccaaatatcctgtcagatgcacttcccatcagccctgtctgacctctggcctttccccctgttcttactgtcggggagactttctgtaacccc

SEQ ID NO: 886139 - DNA, 120 bp, Artificial Sequence
  ENSG00000249550_72 (sequence is synthesized)
tggtcgccagctgctcagccattgaccacaacaaaaatgagagtgacttttacccgatagtgccaggaaagacacaggaatccttgttcctcagttctgattggctcatcttggggcaca

SEQ ID NO: 886140 - DNA, 120 bp, Artificial Sequence
  ENSG00000249550_73 (sequence is synthesized)
tttaggtaaatctctcgcaaggatgggagacaagatgccgcccagcaggtggaggcctggagctgggaggaggggaagctaggcgttgtgccagtcatcagtgccaaccggtcctggctg

SEQ ID NO: 886141 - DNA, 120 bp, Artificial Sequence
  ENSG00000249550_74 (sequence is synthesized)
cagggaattcttgggatcagaaatctacagtctgagaacttgtctataattttgcaatttctattttctttgctacaaagcagagagaaagccaaaagaaaataaagttcctctcaaaaa

SEQ ID NO: 886142 - DNA, 120 bp, Artificial Sequence
  ENSG00000249550_75 (sequence is synthesized)
tatatattgaatactgtacttaaagtaaaaaattgaatggttgtatgggtactgtaagtatgttttctgctgaatgcatatcactctcacaccattgtaaagtcagaaaattataagtct

SEQ ID NO: 886143 - DNA, 120 bp, Artificial Sequence
  ENSG00000249550_76 (sequence is synthesized)
aaccatcatatgttggggaccatctgtgtattactatccatggttttaagcatccactaaaagtcttgaaatgtatccccctcaggtcaggggacactgctgtaataataaaaacagctt

SEQ ID NO: 886144 - DNA, 120 bp, Artificial Sequence
  ENSG00000249550_77 (sequence is synthesized)
ataggagtgagggtacatgagatatggcaagacccaggttgacaaatctttcctactattattattttaattgtctaatctttttgaattgctgatacttgcatgtggtacaaaatttca

SEQ ID NO: 886145 - DNA, 120 bp, Artificial Sequence
  ENSG00000249550_78 (sequence is synthesized)
aagatacaaatgtatacaaagcatgacaactctccctccctcctctgtcccccagttacctaaacccatccccagaggtttcctgtttctttccaaggatattctatgttgtatatgtaa

SEQ ID NO: 886146 - DNA, 120 bp, Artificial Sequence
  ENSG00000249550_79 (sequence is synthesized)
gtttctttccaaggatattctatgttgtatatgtaattatatgtgtgtatatatattttccttttgtcataacagcatgctatacactcttctagcattttttttttttttgagatggag

SEQ ID NO: 886147 - DNA, 86 bp, Artificial Sequence
  ENSG00000249550_80 (sequence is synthesized)
aatctcagctcactgcaaacttcgcctcccacagctggaattacaggcgcccaccactgcacctggctcatttttgtatttttagt

SEQ ID NO: 886148 - DNA, 69 bp, Artificial Sequence
  ENSG00000249550_81 (sequence is synthesized)
cggcatgagccaccatgctcagccgcatttttaaaatttaatatatcctgctgattcttctatatccac

SEQ ID NO: 886149 - DNA, 120 bp, Artificial Sequence
  ENSG00000249550_82 (sequence is synthesized)
tttaaaatttaatatatcctgctgattcttctatatccacacatgtgacctgtcattcttttatatgcctgcatagtgttccactgggtggatccatcacagtttttttgctcaatccca

SEQ ID NO: 886150 - DNA, 120 bp, Artificial Sequence
  ENSG00000249550_83 (sequence is synthesized)
tggaaaccgagcctagcaactctcagtgaatgagttgaagagtaggggcttctctggtcaaaacccacagcgcatcattaagtctttgggcttcctcactccagcttttattaaattatc

SEQ ID NO: 886151 - DNA, 120 bp, Artificial Sequence
  ENSG00000249550_84 (sequence is synthesized)
ccaatttgtcctttcaaatagatgtcttttcttaagtagtgatttaccacaattaagcccccccaaaattaaattaagtgaattacgtctcttaggttgggtgtctgcgggaaccaaggt

SEQ ID NO: 886152 - DNA, 120 bp, Artificial Sequence
  ENSG00000249550_85 (sequence is synthesized)
tgggcacagtaatggtccaaatgctattaaaagcaaaggcaggagactgtgcgctgagttagaagggaaaattcatagctccactgatacgccatgataaataattatgagttattaatt

SEQ ID NO: 886153 - DNA, 120 bp, Artificial Sequence
  ENSG00000249550_86 (sequence is synthesized)
ttaaattacatctttaatgcgttgcatgattttaattccccctacagtattaatatcggactggctttgattaatttaaagcagaacagaaaggtgccaattaagagagctagctgggaa

SEQ ID NO: 886154 - DNA, 120 bp, Artificial Sequence
  ENSG00000249550_87 (sequence is synthesized)
ctttgaggtgtttatatctgtctcttgatagcccccacggtggggggcaaggtcattcctcaagggaagctggcgattacccacagcaacccagggtgggaggtgtcaagaagagtggga

SEQ ID NO: 886155 - DNA, 120 bp, Artificial Sequence
  ENSG00000249550_88 (sequence is synthesized)
gatggatgttaaccctttttgtatcttcgagtgctagagaggaaagagagaaggatggaaaaatgaaagacctggtccaagccccaaggcctttaatgagccaggagataggtcaggatg

SEQ ID NO: 886156 - DNA, 120 bp, Artificial Sequence
  ENSG00000249550_89 (sequence is synthesized)
gggctgggcatcctgtgtggcctcgaggcagaatcagggaccaggactcctgggttctgggattcactctgtcacctaggacgatggctttgacctgtctatgctttcatgggatctcaa

SEQ ID NO: 886157 - DNA, 120 bp, Artificial Sequence
  ENSG00000249550_90 (sequence is synthesized)
gacttggacaaaaggagtaacgcttggtgaatatgaagcaatgaatcaaagaatttcctaaccagctgaatggtaacagggttatgcttggaacagcagcccaccttaagaatggggcac

SEQ ID NO: 886158 - DNA, 120 bp, Artificial Sequence
  ENSG00000249550_91 (sequence is synthesized)
acatggagatgtgtttggttgacattttattttacataatagctacatatttaatgcatgctagaaatatataaccagctccttgaacctctgatttcatagatacaattgcttcagttg

SEQ ID NO: 886159 - DNA, 120 bp, Artificial Sequence
  ENSG00000241769_0 (sequence is synthesized)
gtgcatgctgatcctgcagctcctcgagggtgtcatcgctttcccccttcccagacccagcacaccctgcctgcatggcgctgcgctgcaccttcactctggtcacgggtctggcagtcg

SEQ ID NO: 886160 - DNA, 120 bp, Artificial Sequence
  ENSG00000241769_1 (sequence is synthesized)
gctcaccaattcgtcctgcttccctgggactcgccggcttttagcactgcaattcactcagcaaactgggactgttggtcaccctacctggcagccagtgataaggtgagggccactcct

SEQ ID NO: 886161 - DNA, 120 bp, Artificial Sequence
  ENSG00000241769_2 (sequence is synthesized)
gttatttatttctccttcgggatagggtgcctgcagcgcttcatgggagggggtgggctgatgctgcgggctcagaagtttcaagggcatctggggagaccagatattcagagaccttct

SEQ ID NO: 886162 - DNA, 120 bp, Artificial Sequence
  ENSG00000241769_3 (sequence is synthesized)
cctagatgtgcctgttccatgtatcagggacacaggttttcccaacagggctggtgtcattggcatgacagacctgccttggctgagcgttcacccgtcttcggagttcagccaccttag

SEQ ID NO: 886163 - DNA, 120 bp, Artificial Sequence
  ENSG00000241769_4 (sequence is synthesized)
gagagctgctttgatcttgtgtgtacattagatgactgccaggggcatgaaggggatgtgcttccagggcatttgctggcagggcgtctcgtgatctcttggtattggtgtgagcacagc

SEQ ID NO: 886164 - DNA, 120 bp, Artificial Sequence
  ENSG00000241769_5 (sequence is synthesized)
ctggcaggagagggcagatctccatgcaaagtatgtcagaaagcagatggaagccaggccccctcctgaaagaggctccttgaagataattctaacatctttgtcatcagtgttgacatc

SEQ ID NO: 886165 - DNA, 120 bp, Artificial Sequence
  ENSG00000241769_6 (sequence is synthesized)
cctggttctggctggcatcctctgacatcactccagcagaagaaagggaaggaacacgctgcattactgcgtggtcacaaggtccccgtctgatctgccttcactccacctttcagagtc

SEQ ID NO: 886166 - DNA, 120 bp, Artificial Sequence
  ENSG00000241769_7 (sequence is synthesized)
ttatgtttgttttgtgtatattatcaaggggttttaggtcacttagtcggaagaatagggaaaagtatgtctactccagcttaatggaagtggaattctcctgagaacctttttttgata

SEQ ID NO: 886167 - DNA, 120 bp, Artificial Sequence
  ENSG00000241769_8 (sequence is synthesized)
caaaatatgtacttgtgcatattttgtatcaaaatatataatgtacatgtcccttttgtacatgtatataaattgtatataaatatttagggttataaaaataaccaaagacaccaaaaa

SEQ ID NO: 886168 - DNA, 120 bp, Artificial Sequence
  ENSG00000241769_9 (sequence is synthesized)
cttttcactcatttcctccaagctcaggttttcagtttggggtatgtgccacctaacagtgagctgtggaactgcagcacaatcatcaaattcaaaaaaggcaaggacatcttgctcagt

SEQ ID NO: 886169 - DNA, 120 bp, Artificial Sequence
  ENSG00000241769_10 (sequence is synthesized)
ttttaagatacgccatagatggagtaaaccataacctttgattccagatccttaaccctgattaaaaacaacacaacccttcatgttgatttaaaacatcccttgcaaaagatggtttga

SEQ ID NO: 886170 - DNA, 120 bp, Artificial Sequence
  ENSG00000241769_11 (sequence is synthesized)
atattccaagttggaaatacccagtcttttaaagttacagcaccctttttgatacaaaaaatgtgcatgacagaaattgtacagtgagtagtgttataaaaataaccaaacacaccaaaa

SEQ ID NO: 886171 - DNA, 120 bp, Artificial Sequence
  ENSG00000241769_12 (sequence is synthesized)
gctgcgggaaattgctggagaagggggagccaagctggagtaaggctggcggtctcccgcattgacttcataaccaagttctgggtccctgcctctggagtgcctgatgagacaaaacgg

SEQ ID NO: 886172 - DNA, 120 bp, Artificial Sequence
  ENSG00000241769_13 (sequence is synthesized)
ctcctcgtcctgcatccccgctgctacttccagaattcaggcctcgtggtctggagcctgcactgttccatgagcctcctgagcaacctggagtcctctgtctttcttccctcagtgaga

SEQ ID NO: 886173 - DNA, 120 bp, Artificial Sequence
  ENSG00000241769_14 (sequence is synthesized)
tgcgcctacttctccctggagaagctcgaggaagcaggaatgctggagatgagctgctcctcactctcactcctgggtgtgctgggcagtggggtgcaatgtgcacgtaggtgcacactc

SEQ ID NO: 886174 - DNA, 120 bp, Artificial Sequence
  ENSG00000241769_15 (sequence is synthesized)
tccctgggcggcagcgagaagcagaggtctgatctgtggtcggatgaggagaggaagtgcaagtaaagcagctgcagcgagacctcgtctgctcaggggcttgttcttacatcttttgca

SEQ ID NO: 886175 - DNA, 120 bp, Artificial Sequence
  ENSG00000241769_16 (sequence is synthesized)
caccactgtctgttctctgagttttcatttccaggcatccgccctgcctggatctcctcacctgccaggaacttcctctccacaagccggccatcccagcaaaagttctaacaccaaaga

SEQ ID NO: 886176 - DNA, 120 bp, Artificial Sequence
  ENSG00000241769_17 (sequence is synthesized)
tatagacagcaaacattatgaatctcgcattctcgaagacacgcactgacgacatcacgcacgtacgcacgccctggctgctaggagacgctattctctttacctggccctgatgcgcgc

SEQ ID NO: 886177 - DNA, 120 bp, Artificial Sequence
  ENSG00000241769_18 (sequence is synthesized)
ctcgcccattgcctggatcgggggctactttgtaaaccaccaggaagactccagtgtttctgcttaatttttagatgtttgttaattgctcttggcctctcattaatcccctgtgggtca

SEQ ID NO: 886178 - DNA, 120 bp, Artificial Sequence
  ENSG00000241769_19 (sequence is synthesized)
attgtgggcagggccgtgggagagctgagcgaggagaagctgcaggaagagctcgcggactcttgagaatcagcagggggagtctcccgcattgacttcataaccaagttctgggtccct

SEQ ID NO: 886179 - DNA, 120 bp, Artificial Sequence
  ENSG00000241769_20 (sequence is synthesized)
ctctccctgggcggcagcgagaagcagaggtctgatctgtggtcggatgaggagaggaagtgcaagtaaagcagctgcagcgggctgttttgaagtcagtattcacttaagcactccaaa

SEQ ID NO: 886180 - DNA, 120 bp, Artificial Sequence
  ENSG00000241769_21 (sequence is synthesized)
ttgtaagtaaccccagaggtcatggagtgtcccactgcccctccatctggaggcagtgacccctctcccacagaggaggtgctcgcatgtgtccagtgccctgcccattagattagagag

SEQ ID NO: 886181 - DNA, 120 bp, Artificial Sequence
  ENSG00000241769_22 (sequence is synthesized)
ggttcccttttttgctctcttgcattcatttgtccgccttttagctttacttttctgccctggactcacacagggtcatgtgaacgtgtggtgtagcaggaggagagaggtaaagtggag

SEQ ID NO: 886182 - DNA, 120 bp, Artificial Sequence
  ENSG00000241769_23 (sequence is synthesized)
gcaagagtcaaaacttgcccgcagcgacctaactgcacctccagtgtctacccccatagggcacggaagcagcaagaagggcgggaacacttgactggggtctatgcagctctaggctga

SEQ ID NO: 886183 - DNA, 120 bp, Artificial Sequence
  ENSG00000241769_24 (sequence is synthesized)
ggcaatcctgtaccaagaccccattttaccacctgctttctcagaccactctggaacccactgtctcagattgtgtcctccaggaagcagaccatgagagggagttggcagggccaaaga

SEQ ID NO: 886184 - DNA, 120 bp, Artificial Sequence
  ENSG00000241769_25 (sequence is synthesized)
tttactggggctaactaacactcaggaaagggataggaaggaaacagggctggagagcaggttgagcccgacctgacagtctcgagcagcccaacagggaggtgtggagcaagggttgcc

SEQ ID NO: 886185 - DNA, 120 bp, Artificial Sequence
  ENSG00000241769_26 (sequence is synthesized)
gagaagctcgaggaagcaggaatgctggagatgagggctgttttgaagtcagtattcacttaagcactccaaattggtcatgtgaacgtgtggtgtagcaggaggagagagacccagcac

SEQ ID NO: 886186 - DNA, 120 bp, Artificial Sequence
  ENSG00000241767_0 (sequence is synthesized)
ctctacctgaatgcacttgtgaacttcagaattttgaagctctgtctcctgacatcacagatagacaagcactgaacttggcaggaaaatcagtaggagtaagtggcggaggcatgggac

SEQ ID NO: 886187 - DNA, 120 bp, Artificial Sequence
  ENSG00000241767_1 (sequence is synthesized)
tggcagagatacggcagcccctgtggagaggctgtctacagataacataacaataacaacaggatctgcggggttcctgcatgcgtgttggcttcactggagaaactaatcaagtggtct

SEQ ID NO: 886188 - DNA, 120 bp, Artificial Sequence
  ENSG00000241767_2 (sequence is synthesized)
gagtcattcaagttatagtctatttgaagacgagttgaatctgaaacaatgagtaagatgatgagagctcgatacttatggtttaaatataaaaggggtatcccaactcagaaagagaga

SEQ ID NO: 886189 - DNA, 120 bp, Artificial Sequence
  ENSG00000241767_3 (sequence is synthesized)
gacacacaggaagaataccatgtgaagactggagttttgcatagagaagccaaggagctaccagaagctaggagaatggcctggaacagacctttccttagtgccttcagagagagcatg

SEQ ID NO: 886190 - DNA, 120 bp, Artificial Sequence
  ENSG00000241767_4 (sequence is synthesized)
gcgctgccaacatcttgatctcagacttccagcatcctgaattgtgagataaatttctgctgtttaaaccatataatttgtgatactttgctatggcaactgtcacagctattataagca

SEQ ID NO: 886191 - DNA, 120 bp, Artificial Sequence
  ENSG00000241767_5 (sequence is synthesized)
cctaaccctttttttaatcttttaagaaactttttgctttcatctactttttttgttctggttattccatattttactttaagatttagtcttctgtcaataaagcaataatttcagatc

SEQ ID NO: 886192 - DNA, 120 bp, Artificial Sequence
  ENSG00000241764_0 (sequence is synthesized)
agtgggaggttgctcaggggatggcggagctgtgaaactcggagctagaaggaaagtctcaacgcttgtctaaattttgctttgtcgtgacgagctacctagacccacgcagagctaact

SEQ ID NO: 886193 - DNA, 120 bp, Artificial Sequence
  ENSG00000241764_1 (sequence is synthesized)
tgggagagcgcttgtgacgctacgaacctctcgaacacctgacgactgggcgccagggccggatggagggtggagagccagtgcggcgcagctgcctcctcttaacggggacaccttgca

SEQ ID NO: 886194 - DNA, 120 bp, Artificial Sequence
  ENSG00000241764_2 (sequence is synthesized)
ggaatgtgcggagtggagctaacgggagcggatagaaaccgagggaggggaagagagcgcgaaggcttggccggaaggagaggttaaaaaggaaaggcctaaaatgaggaagagagttac

SEQ ID NO: 886195 - DNA, 120 bp, Artificial Sequence
  ENSG00000241764_3 (sequence is synthesized)
tgctgctttcatcttcctcagccaacacaaaaggaaagtgccaaggggcgattcctaggaccttcagtgcagtctccaccttgcggacttggctcatttgtgtccactcctttctccagc

SEQ ID NO: 886196 - DNA, 120 bp, Artificial Sequence
  ENSG00000241764_4 (sequence is synthesized)
cttttacacttgatgctcttggatgaatagaaaggagcacaattaatggaaaacacaagcttgggagtcaagggatttgggttctattcttgtcctcccttggtgacgacatcattacct

SEQ ID NO: 886197 - DNA, 120 bp, Artificial Sequence
  ENSG00000241764_5 (sequence is synthesized)
tgggttattcaagctttcagtgccagagttcctatatcaataaaagattattacattgacctcttagagaaatgttttcatggtactgaattgcaaataaagtatgtgtagcgatgtgtt

SEQ ID NO: 886198 - DNA, 120 bp, Artificial Sequence
  ENSG00000241764_6 (sequence is synthesized)
tgattattttcctgagatcttgtaaaagatttttctgctctatatatgcagctttataaacaagtttttaggtacattcacaactaaggacatttgtgaatcaaaattacccctgctttt

SEQ ID NO: 886199 - DNA, 120 bp, Artificial Sequence
  ENSG00000241764_7 (sequence is synthesized)
tttaaatgtaaagttctgtattgctaggtggttttcaagatgctttcagtttctgggattattgttttgggcattggggcttgcctaacctttttcccatacctccctatttttctaaat

SEQ ID NO: 886200 - DNA, 120 bp, Artificial Sequence
  ENSG00000241764_8 (sequence is synthesized)
acagtgttgatatagtcaggcatttttcaccaatttgggttttttttttttttttaagttttcacttagaaagtacttctttttcatattaaaaaaattttttttagagatggggcagcc

SEQ ID NO: 886201 - DNA, 120 bp, Artificial Sequence
  ENSG00000241764_9 (sequence is synthesized)
attttttttagagatggggcagcccaaactggaacacaatggcagaatcatagctcactgcatccttggactcccgggctcaaggggtccttatgcctcagcctccggagtagttgggac

SEQ ID NO: 886202 - DNA, 120 bp, Artificial Sequence
  ENSG00000241764_10 (sequence is synthesized)
gctttgatttttttgttctatcatacttagcctatcagctaacggttaaccttcagattcatggaaatccaggttcagaatagtattattaatgtctgctgatgctaatatttaaataat

SEQ ID NO: 886203 - DNA, 120 bp, Artificial Sequence
  ENSG00000241764_11 (sequence is synthesized)
tagaattaaaaagagctttcaaattgtattttatataatttaacctgtaagttagaagttttgttggcattttatggtgcatcaagaaaatttactgagagaagatgtacttactttaga

SEQ ID NO: 886204 - DNA, 120 bp, Artificial Sequence
  ENSG00000241764_12 (sequence is synthesized)
tctgataaaatgttaaacatttgtttgatttgatttgacatctcttactttcaggcattgctttagcatctgtggtctgtatttacccccttaattgtggttgccttgaattaccaatgc

SEQ ID NO: 886205 - DNA, 120 bp, Artificial Sequence
  ENSG00000241764_13 (sequence is synthesized)
tttattactgccctctagtatctcttttcagcgaccagcgtgctgtaaccagtcacaatttctttatcaagagttgccattaatatttatttatagagcataaggtttatattgcttata

SEQ ID NO: 886206 - DNA, 120 bp, Artificial Sequence
  ENSG00000241764_14 (sequence is synthesized)
tataagctatatatagtttaggtgctgacctaaggtttataaaagtgaaaacttactgtaatgggcagtctgaagcactgaggtgcacctttttatcttactggcaagaccatctactac

SEQ ID NO: 886207 - DNA, 120 bp, Artificial Sequence
  ENSG00000241764_15 (sequence is synthesized)
ctatgaattataaggtagtggtctccaagatgttttgatagcctcccatttacatagttactgtttatgctatgagaaaagtaagaggggtatcagagagcttgttttccccaatagcct

SEQ ID NO: 886208 - DNA, 120 bp, Artificial Sequence
  ENSG00000241764_16 (sequence is synthesized)
gttacggactcctcagtaccaagtaaggacaaaaaccttcatctcctaacactctttcaactgtatcccactgagtgcctgcctaggactgcataaggcaaaagctgtataaataatggc

SEQ ID NO: 886209 - DNA, 120 bp, Artificial Sequence
  ENSG00000241764_17 (sequence is synthesized)
ccctacttcaaggatcctacaggatatcattttaagaaatatgtgaagatctatataatttagttctaagtgttgagaggaaattcagtgctacttacatttagataaagtagtgggact

SEQ ID NO: 886210 - DNA, 120 bp, Artificial Sequence
  ENSG00000241764_18 (sequence is synthesized)
gagagtagttaggttagctttatggagggatttaagctgagccttatgtgaatggataaaatttggagaggaggagagcaataaaaggcatatcacacagagaaaagcaagggcacagat

SEQ ID NO: 886211 - DNA, 120 bp, Artificial Sequence
  ENSG00000241764_19 (sequence is synthesized)
gtgagaattgtatggtttctatagaggacagtgaagagctttatttgtactgttgatccatgtttgggagttctaaaaaaataagttattatggagcaccttgaaaaagtaagatttcag

SEQ ID NO: 886212 - DNA, 120 bp, Artificial Sequence
  ENSG00000241764_20 (sequence is synthesized)
agtaacagtaaagaaatagagcatttaacaaaacccagcataatatattcatagaaacaatataatccagcaaaatatattcaaaaacaatgagcaaatcttaacttggggtggggagat

SEQ ID NO: 886213 - DNA, 120 bp, Artificial Sequence
  ENSG00000241764_21 (sequence is synthesized)
gaatcagttgatgaacaatcagtcagaattaaagtgtaatactattacacctagaccaagaacaattgaccaggaagccagcgatacctatgatagccaaaatgccatgaagtatgaatg

SEQ ID NO: 886214 - DNA, 120 bp, Artificial Sequence
  ENSG00000241764_22 (sequence is synthesized)
aattgttagtaaaaaaaaaaaaacggatccaggtagtgtccagtatatattaatacgtttgataagcagaaatggaaaaggcagtaaaatatcctggttagatatatgccttatcaagct

SEQ ID NO: 886215 - DNA, 120 bp, Artificial Sequence
  ENSG00000241764_23 (sequence is synthesized)
atggcagccagcttttcaaacaccatgaaaaactgggcaagaggcagattcagagaataagagggaaatagactgtaaaaacagaatgttgctgattgaaggcattgtcccgttcctgtc

SEQ ID NO: 886216 - DNA, 120 bp, Artificial Sequence
  ENSG00000241764_24 (sequence is synthesized)
tcgaaggagattcattctcgttgaggcctggcaatatatgtactcatttgaaaaggaaccttttgatctagagaggtcctgcagccttccttcttttctgagaaggaaaattttgttgtg

SEQ ID NO: 886217 - DNA, 120 bp, Artificial Sequence
  ENSG00000241764_25 (sequence is synthesized)
gatatcctttgagctggatagacctgtccctccctacagcttctttgctaatataattgcctccagttcactcctaaaagaatgcttagggtattaaactgctctgtagtaagcaattag

SEQ ID NO: 886218 - DNA, 120 bp, Artificial Sequence
  ENSG00000241764_26 (sequence is synthesized)
tctgtatattgtttcctaaacttaagaaggcttttgttcaagggcccctgaccctaacctcagctgccactccatgccagttgaaaaaggctttcagccttccttggtgctatggtttga

SEQ ID NO: 886219 - DNA, 120 bp, Artificial Sequence
  ENSG00000241764_27 (sequence is synthesized)
atgaaggtattcctccaaaattcatatgttggaacttaaaccccaaggtggtgatattaagaggtggggccttttgggaagtgatttagctgtgagggctttgctgtcatgaatggtatt

SEQ ID NO: 886220 - DNA, 120 bp, Artificial Sequence
  ENSG00000241764_28 (sequence is synthesized)
gcgtgcgcactgccttccggaggccgggaggcggaagtccaagcaggttgtcccaattttggcctgcaaagacttccttctctcgcctctactatccaactcctgtgagggactcaggca

SEQ ID NO: 886221 - DNA, 120 bp, Artificial Sequence
  ENSG00000241764_29 (sequence is synthesized)
attctcgcccgtccactcccagcgtaaagaggattccgcgactcggagaccgcaatctacccgccagtctccataacgtaggccagagcagctgggctaaataaaacagagccggggctc

SEQ ID NO: 886222 - DNA, 120 bp, Artificial Sequence
  ENSG00000285662_0 (sequence is synthesized)
ctctccaggtgccctttgcacccaacagtgcgtgtgaggaacgaactgctgtttgagcgtcccctgagattgtgcgtagccccgtgtaaatgtaatagcctccatggcttaattggctag

SEQ ID NO: 886223 - DNA, 120 bp, Artificial Sequence
  ENSG00000285662_1 (sequence is synthesized)
caagcgaattttcccagatgaaagcaatgttgggttaggggacgacggtgcagccacccagcctttaccagcagcgtgctgcagacgaaggcagtcaaggtgtggaggtgatcacgcagg

SEQ ID NO: 886224 - DNA, 120 bp, Artificial Sequence
  ENSG00000285662_2 (sequence is synthesized)
cgcaggtcagttgccgtgatgctccttgagtcaatgagctctttggtctgctcttctgctcaagcagaaaatgatctgcgcttcacccttgagaagctgacaagaaccacaggcttcttc

SEQ ID NO: 886225 - DNA, 120 bp, Artificial Sequence
  ENSG00000285662_3 (sequence is synthesized)
aggctctagcctgattttctggctcataaggccaaagggagctggaaaggtccccacggcaggactcatggtggagagagaatgatctagaggattcaggcctctgcacactgtgtctgg

SEQ ID NO: 886226 - DNA, 120 bp, Artificial Sequence
  ENSG00000285662_4 (sequence is synthesized)
tactggcaaaggcctcctgtggccaagtttgtcctgggatgagcaaaatttaatgttaacctgctgtatctttgcttttaatatatctgcttgcccatcacaatgatattatggttaatt

SEQ ID NO: 886227 - DNA, 120 bp, Artificial Sequence
  ENSG00000285662_5 (sequence is synthesized)
aatttcaccaatttggtaacctgcctcttgggaagtacgaaagtaagcaagggccaggtatggtgactcacgcctgtaatcccagtactttgggtggctgaggtgggtggattgcttgag

SEQ ID NO: 886228 - DNA, 120 bp, Artificial Sequence
  ENSG00000285662_6 (sequence is synthesized)
ggagttcaagaccaacctgggcaccatgacaaaaccccgtctctacaaaatatacaaaaattaaccaggagtggcagtgcatggctgtaatcccagctactcggaggctgaggtgggaga

SEQ ID NO: 886229 - DNA, 66 bp, Artificial Sequence
  ENSG00000285662_7 (sequence is synthesized)
atcacaccactgcattccagcctgggcaattgagggtgtcctgtgaatcaaatctttgaatggatg

SEQ ID NO: 886230 - DNA, 120 bp, Artificial Sequence
  ENSG00000285662_8 (sequence is synthesized)
acagtgagggtgtcctgtgaatcaaatctttgaatggatgttttcttaactaaccaagacctctgtaagaattctgtctttgattccacaataaagtggtgtgaaattactataagcaaa

SEQ ID NO: 886231 - DNA, 120 bp, Artificial Sequence
  ENSG00000241490_0 (sequence is synthesized)
acactccataagtctcggcactgctcatcagcccatgtgtcagcacgctcttgctgatgggagcagcggggagaaacgccatactgggaagtcactgctggtgtgggacaagttacaaga

SEQ ID NO: 886232 - DNA, 120 bp, Artificial Sequence
  ENSG00000241490_1 (sequence is synthesized)
tgcttctgggggaggaaaatgtgtatcatcaactcctcaggacagtgaagcctgctcagtctagacttacatgagagactactcaatgactctcacagaaaagagatcttcccaaggtga

SEQ ID NO: 886233 - DNA, 120 bp, Artificial Sequence
  ENSG00000241490_2 (sequence is synthesized)
catcttctcctcctaagccaataaggtcatcttactcacagtccacttccaggaactgaccccaaatggacagaatctacttatatcatggcacagctgtcaacttctcttgctaaagaa

SEQ ID NO: 886234 - DNA, 120 bp, Artificial Sequence
  ENSG00000241490_3 (sequence is synthesized)
gagaataacgctcacaaaattgccccagatggcggtgcaacatttttgggccaagtactacaactgaaaagcatgaacagagttttaccagcgggttacaggtttgtttatatgaaaatt

SEQ ID NO: 886235 - DNA, 120 bp, Artificial Sequence
  ENSG00000241490_4 (sequence is synthesized)
gcactccctgtttatttctaatagggaaaatatttctgatggtatatgattcctaaatgaaatgatgctaacaaatgttcacatattttgtgagggagaacacagcaaattgtaagatat

SEQ ID NO: 886236 - DNA, 120 bp, Artificial Sequence
  ENSG00000241490_5 (sequence is synthesized)
gatctgcagatatcaaactcattttctttactggaaaacaggtctgactgcatggcacgattatgttgggaaaaatgcagctatagttctcttcatttggaacacgaacgtatatcacaa

SEQ ID NO: 886237 - DNA, 120 bp, Artificial Sequence
  ENSG00000241490_6 (sequence is synthesized)
agctaaccagatcacattcattcagtagcaaacacaaatcaactgtggctagcaaatgtgtgtacaaaatacattgacatcaataccagtttggtgctttcttgtgatcaaatccaggga

SEQ ID NO: 886238 - DNA, 120 bp, Artificial Sequence
  ENSG00000241490_7 (sequence is synthesized)
aatagaaatcagccatctaaaacttaaccacttgcaaaagagcatttatgttaccagcagtttaaaggaaatgaatgttcattgaagagcagcctatgctgaactctcatttttacatgt

SEQ ID NO: 886239 - DNA, 90 bp, Artificial Sequence
  ENSG00000241490_8 (sequence is synthesized)
attgaagagcagcctatgctgaactctcatttttacatgtattcaactatatatatgctggctcatcattttaaaactattagcattttg

SEQ ID NO: 886240 - DNA, 120 bp, Artificial Sequence
  ENSG00000241490_9 (sequence is synthesized)
tcatttattaaatgtgattaggtagctctggatccttggtctgttattttttttaaggcataataagaccaggacttaaaaaaaaacaccctgtaaaatgtacgctttttaagaaataat

SEQ ID NO: 886241 - DNA, 120 bp, Artificial Sequence
  ENSG00000241490_10 (sequence is synthesized)
gctatctttattgaaatattttaaacatttattgcaaaaacaataaatgctttttatttttcaaacataaacaatacttaagtataaaagtaaaaactgaacattgcatataaccctggt

SEQ ID NO: 886242 - DNA, 120 bp, Artificial Sequence
  ENSG00000241490_11 (sequence is synthesized)
ccatcccatttcctgcagaaaaccactattaacagttttatgcttatacttctagatgtagttttatttcctgaaactttctcttttactaaatactgtatcttagagatgttttgatat

SEQ ID NO: 886243 - DNA, 120 bp, Artificial Sequence
  ENSG00000241490_12 (sequence is synthesized)
cagtacatacagagataccttattgtttcacagtatttcatagaacagatgtaccataacttacttccaactgataaacatttagattgttctcaacgtttcacacataaaaacaaaact

SEQ ID NO: 886244 - DNA, 120 bp, Artificial Sequence
  ENSG00000241490_13 (sequence is synthesized)
gcagcgattattctttgcacgcacatctctgcataatataaaaacatttctgaggatttctagaattgaattaacatgtcaaaggatctacatgttttatattttaatacattgtattca

SEQ ID NO: 886245 - DNA, 120 bp, Artificial Sequence
  ENSG00000241490_14 (sequence is synthesized)
tcaaaacatttttttctgagtttctcattagattagataagctgtgttttgttttgtttgtcttagctcttgtttaacttctagaaaactagtgacatgctcttggagaagcccctctta

SEQ ID NO: 886246 - DNA, 120 bp, Artificial Sequence
  ENSG00000241490_15 (sequence is synthesized)
cagaaggccaaagaagctgagaaagcacagaggaaataatcaaggctcacctgggaaagcaacacagcttcaccatcattctctcgtccctgagaaaataaatcaaaacaaacaagtata

SEQ ID NO: 886247 - DNA, 120 bp, Artificial Sequence
  ENSG00000241490_16 (sequence is synthesized)
ttgagcactgggtgttcaaaaccacatgaagaattgttttttgttaaattaaagccttaagtagtcttaaatgatgtagcaaaatatgcccattcaatgtggttacttacctcctcagat

SEQ ID NO: 886248 - DNA, 120 bp, Artificial Sequence
  ENSG00000241490_17 (sequence is synthesized)
atgaaaggattttatatggcagtatttttatattctacgttcttacaagtttcacatattccattacttaagcgttcatatttctcacaaagacttacattcctcaggagtacaatgttt

SEQ ID NO: 886249 - DNA, 120 bp, Artificial Sequence
  ENSG00000241490_18 (sequence is synthesized)
tagaacaaagaatgcattcaataaatctttacagagttaatctttacagaggacaattctcctgtagacaggagtgaatacatataaaggacaaataacgaggcaaggcctttgtacctt

SEQ ID NO: 886250 - DNA, 120 bp, Artificial Sequence
  ENSG00000241490_19 (sequence is synthesized)
tcagccatctgcaaaatgaagaactgaattcaaattttgataggcatggctttcagagaagtctgacagaagctatgcatgaatttctttttttctcttttacagttcccttcttactta

SEQ ID NO: 886251 - DNA, 120 bp, Artificial Sequence
  ENSG00000241490_20 (sequence is synthesized)
aaaaaaaaaaatcctgaagtggcttagtgatataaactatggagagaggtgtgggtggttcttttaagtgcacaataaccaacaggtctccctcctggaaaaattctcagatgctgagga

SEQ ID NO: 886252 - DNA, 120 bp, Artificial Sequence
  ENSG00000241490_21 (sequence is synthesized)
agatatttcctgtggccaaaagattttcttcactagtttttgtcaaaatgtcttttcgcagtttaagttctctgacgttgactgatgtgggcccacttgcaaaaggccttcccacatatc

SEQ ID NO: 886253 - DNA, 120 bp, Artificial Sequence
  ENSG00000241490_22 (sequence is synthesized)
tcatagagtttatctctggaaggaattcttcaatgccaagtgaggatgagctgcaggtcacagctttcctactgccactgaattcagagtgcttctcctcagtgtggctctctatgtatc

SEQ ID NO: 886254 - DNA, 120 bp, Artificial Sequence
  ENSG00000240687_0 (sequence is synthesized)
catgtccagttctgtaaacaaattctcaactgcaccagaaggcctgacagttaagagaacccagtgaagaaaccttttgcagagagagaaaagaacccttttgaatgtgatcaatcacgc

SEQ ID NO: 886255 - DNA, 120 bp, Artificial Sequence
  ENSG00000240687_1 (sequence is synthesized)
tgatttatttggatgatttctcttctggatttccttaaaccagggaaaacccagggacagcaattgctataattgatgcaaacgatcccagccacactccctgatcctggttctgaaact

SEQ ID NO: 886256 - DNA, 120 bp, Artificial Sequence
  ENSG00000240687_2 (sequence is synthesized)
cagagatgcagctgaccagactgatgtggccagcctcactctgaaggatcctgcagcagacaaattgctggaatgtgttcagacggaatccagctgctacaaccgtcacacaaacttcct

SEQ ID NO: 886257 - DNA, 72 bp, Artificial Sequence
  ENSG00000240687_3 (sequence is synthesized)
agacggaatccagctgctacaaccgtcacacaaacttcctgaaatagaggacaaaagagacacgattctcct

SEQ ID NO: 886258 - DNA, 120 bp, Artificial Sequence
  ENSG00000240687_4 (sequence is synthesized)
cgctcatgcagaaaatgacaggaaatcatccagagacacttgtgacagagatgagaactgtcactgttgagaggtgctgcggagatgggtgtccacggatgaccgttcggaggccgactt

SEQ ID NO: 886259 - DNA, 120 bp, Artificial Sequence
  ENSG00000240687_5 (sequence is synthesized)
cggggatgtggccccattagctcaagagtgggtgactccctaccacactgatggcgttggccaggacaggacaagcctactgcagtgacacagtgtcactgatccctgatgcccacgtgg

SEQ ID NO: 886260 - DNA, 120 bp, Artificial Sequence
  ENSG00000240687_6 (sequence is synthesized)
gtgttttactttagctaatgctgcagagataatgcagacagagaaatgaggccccagcgctgagcagcccaatcacctggttgtaagcagcgagtgtttctggctctgctcctgggcccc

SEQ ID NO: 886261 - DNA, 120 bp, Artificial Sequence
  ENSG00000240687_7 (sequence is synthesized)
aaaccactgtgggctcacgaagaatctttcagagttggagtcagaatgtcagggtttgagtgtagtctccaccccttaatgaccttgcattgataattctattccccgagcctcatttta

SEQ ID NO: 886262 - DNA, 120 bp, Artificial Sequence
  ENSG00000240687_8 (sequence is synthesized)
cccatctataaaatgaggacaaatagtttatttcctggttacttcactaagatgttgtatcaaaaaagaatatatgcaataaaatgctttcctaagtaaaaaaagatttcctaagtcaaa

SEQ ID NO: 886263 - DNA, 120 bp, Artificial Sequence
  ENSG00000240687_9 (sequence is synthesized)
acaggtgcaacagtgacccgtgacgcagtagggagggctgttttccatgcccagtgaggcctgctcagctcccattaggcctttatggatggcctgcctcccagctggtacctggtcccg

SEQ ID NO: 886264 - DNA, 120 bp, Artificial Sequence
  ENSG00000240687_10 (sequence is synthesized)
agaatggagtctggattgtgccaaaacaggagtttctatgtctggtcctgccaccgactgcacctgcattgctgcgtgaccttgacagctactccttccacacctgaacgtcctcatctg

SEQ ID NO: 886265 - DNA, 120 bp, Artificial Sequence
  ENSG00000240687_11 (sequence is synthesized)
gaaactggacttgcctcctagggttcctgcaaatataaaatgagctaatgcctttgaggtgtttgctattgtcctggcacttggcaaacacatgataaatattagcaatcacttgcgagg

SEQ ID NO: 886266 - DNA, 120 bp, Artificial Sequence
  ENSG00000240687_12 (sequence is synthesized)
gggtgtggggttcgggggagctttgcccctcctccccctctccagggctgagcagcagtgaagagctttctgcataagagagagcaagagagataaataaacccacatcttcctctgaaa

SEQ ID NO: 886267 - DNA, 120 bp, Artificial Sequence
  ENSG00000240687_13 (sequence is synthesized)
gcctgtcttcactctttggtccaccctcaagggaaccaggtcacacagcctcagcacttcctgcatgccagtctctagctggtgccttccactggctgaaccccataagaaactagaggg

SEQ ID NO: 886268 - DNA, 89 bp, Artificial Sequence
  ENSG00000240687_14 (sequence is synthesized)
ggtgccttccactggctgaaccccataagaaactagagggcggccgggtgccgtggttcattgttcaagtccagcctgggcaacatggt

SEQ ID NO: 886269 - DNA, 120 bp, Artificial Sequence
  ENSG00000240687_15 (sequence is synthesized)
agccaagagatttaggacatgagaccaaatgagagagattaaaataaaaaacgcaagaagttagtgaaatgaggatttagctcaccaggccaaagcaggcagtcttgggtctttgctgga

SEQ ID NO: 886270 - DNA, 120 bp, Artificial Sequence
  ENSG00000240687_16 (sequence is synthesized)
ctgggatctggaggctgatgctgaaacctcggcctggaaatgatgctgatgaagcagggctctgacagcccctgcactctcagaggtctgggcagcacagatgaaattatcactccaaga

SEQ ID NO: 886271 - DNA, 120 bp, Artificial Sequence
  ENSG00000240687_17 (sequence is synthesized)
tcctcaaagcatccaggaaaaaagcacatctaggaacattagctgaattttgtagaacactagtaagcacctagtagatgctcagaaaatgcatattttccttccctttcctgaattcca

SEQ ID NO: 886272 - DNA, 120 bp, Artificial Sequence
  ENSG00000240687_18 (sequence is synthesized)
ggggccttgcttggtctgtattaattactatatcagagtccttatttgcaagcgaaagaaaccaactctagtggatttgaatataagactattacttcttactgattgtgaggaaggctg

SEQ ID NO: 886273 - DNA, 120 bp, Artificial Sequence
  ENSG00000240687_19 (sequence is synthesized)
gtgaagcaggcttatcgaatgagcaggcgctgggagggtgtgcagctagaaccaatggccaaaatcaccctgcagacctctcccagggagatccctgttgcttctgccactgaacagcag

SEQ ID NO: 886274 - DNA, 120 bp, Artificial Sequence
  ENSG00000240687_20 (sequence is synthesized)
acatcagaccatgctgcactgactccgtggcaccaggtcctggaacctggacgccgacacggtccaggaccctctactctcatttgaaatccatgacactaagccttgctgctgccccac

SEQ ID NO: 886275 - DNA, 120 bp, Artificial Sequence
  ENSG00000262116_0 (sequence is synthesized)
agaatgaactgaaggaaccaggacagtggtggaagcagtggctctggagggataaaaatagggttcaattctcagctctgtcacccactgctgcttgacttgggggttggagatctggcc

SEQ ID NO: 886276 - DNA, 120 bp, Artificial Sequence
  ENSG00000262116_1 (sequence is synthesized)
gaagtgaagacacagaaggagattgtcacagacagggcagaaccatctaccttccctcccatcaccacatcactggagaccaaaactctccccaccctttagggacgcaagtcgcaaaac

SEQ ID NO: 886277 - DNA, 120 bp, Artificial Sequence
  ENSG00000262116_2 (sequence is synthesized)
agcagagggttcacagatacatgggacacaattgagttcatagtcttcactggagagcaaatgaggacagacccttggtccacaaacgacaaattgatggtgtcctgtgctctccttcct

SEQ ID NO: 886278 - DNA, 120 bp, Artificial Sequence
  ENSG00000271032_0 (sequence is synthesized)
gaaggcagaggtcgcaccactgcacgccagcctgggtgacagatcgagactgtctcaaaaaaactgggataacaagagcatcttctcaaaggctggctgtggggataaagcagtcatgct

SEQ ID NO: 886279 - DNA, 120 bp, Artificial Sequence
  ENSG00000271032_1 (sequence is synthesized)
taaaacctagaacagcccagctgcaggtaagtgctcagtctacatctactgtgagcaccaatctgtgacgtcaactctgcacccttagcagtttgacagagaggaaaatgataaaaattt

SEQ ID NO: 886280 - DNA, 87 bp, Artificial Sequence
  ENSG00000271032_2 (sequence is synthesized)
gtctctacaaaaaattttaaaattggccaggtgtggtggtgcctgcctatagtcccagctactcaggatgctgagactacatagggt

SEQ ID NO: 886281 - DNA, 89 bp, Artificial Sequence
  ENSG00000271032_3 (sequence is synthesized)
caaaaaattttaaaattggccaggtgtggtggtgcctgcctatagtcccagctactcaggatgctgagactacatagggtgcatgacca

SEQ ID NO: 886282 - DNA, 120 bp, Artificial Sequence
  ENSG00000224417_0 (sequence is synthesized)
ggagacggaaagcagtgaacctctgtaaaagcttagagtctcctaagcaagggcagggcacacaccgggacagaacagcaaatcgatgactttagtcgctaaactaaagcttcattctcc

SEQ ID NO: 886283 - DNA, 120 bp, Artificial Sequence
  ENSG00000224417_1 (sequence is synthesized)
ttaagaatgactctcctccatcgccacccctcaccccacttgaggacttatctggaatttcaaatgtttgttcctgcaaatgcatcttccatcctgggtgacaggaagtgtctggttcca

SEQ ID NO: 886284 - DNA, 120 bp, Artificial Sequence
  ENSG00000224417_2 (sequence is synthesized)
tgacgatgaagcagccacaaggcctctctgtgtcagtgctggagagagagagcttccttcctcctgtcctggacccctcctggagggacgctcccaaggctgagatgacacagtcatttc

SEQ ID NO: 886285 - DNA, 120 bp, Artificial Sequence
  ENSG00000224417_3 (sequence is synthesized)
ccgcatgctgtctagcactgacccacccatcgcccttgtcctggtgctggtctgcagcagcagtgagggggacccctttgtgtgagggctgcactggccatcgttcaggaaaaggcaata

SEQ ID NO: 886286 - DNA, 120 bp, Artificial Sequence
  ENSG00000224417_4 (sequence is synthesized)
gagcctctgcagtctttgaacgccctcggtgcctccagcgcattggccttaggacaacactccttacggggggtctctgaagtctgcccggaagacactcttccagcccaccgggtcctg

SEQ ID NO: 886287 - DNA, 120 bp, Artificial Sequence
  ENSG00000224417_5 (sequence is synthesized)
cagccaaagtgcatggtgtcccctggccctggaacaagtctctgtgtgaccctgagggtccctgtagaaacagccacatggcccctccttcatggagcccagcgttccttgttgattttc

SEQ ID NO: 886288 - DNA, 120 bp, Artificial Sequence
  ENSG00000224417_6 (sequence is synthesized)
ggctttcttacctggcctccgctgtccatccttgaggtgggctggtgctctagggacttcctgcaatgacgggtttgtgttgggtacagaaagaagctattgtagaaccgtccgacgatg

SEQ ID NO: 886289 - DNA, 120 bp, Artificial Sequence
  ENSG00000224417_7 (sequence is synthesized)
gagccttcagggacgcggtggccccggagcacatggtgacatgctggagaagctgggcagtgcccaggagttggcacgtggggactcggttcgctgagttcgctgaaagcaaatccgtgt

SEQ ID NO: 886290 - DNA, 120 bp, Artificial Sequence
  ENSG00000224417_8 (sequence is synthesized)
tttgcatgagcggcctgtgtgtctgctggctctaaacctgccttgttttgtccagctgtggctgggatctgtgactccttggaaggcatttcacctcactcagagtcacaaaattcaagc

SEQ ID NO: 886291 - DNA, 120 bp, Artificial Sequence
  ENSG00000224417_9 (sequence is synthesized)
aatgacaagaacagtgcctggagtagaataccatttaaattttatttatattcatttattcactgtcaaatatcctttttatttaaccaaatttcaaactgttagaaacagtggaggtta

SEQ ID NO: 886292 - DNA, 120 bp, Artificial Sequence
  ENSG00000224417_10 (sequence is synthesized)
atttgcagctgtgagcacagaactcacgtatgttcatctcagaaagatcacagaagcacaggtgcttagaagagctgacaccaagcatgtggaaggaatttaacttcttcatgtattggt

SEQ ID NO: 886293 - DNA, 120 bp, Artificial Sequence
  ENSG00000224417_11 (sequence is synthesized)
acaactgaaacaaattatgcctaagctggggagacctgcaccagctactggattggttgaggaagatgagataatatgataccctatttaataggaagattattttacatataattttcc

SEQ ID NO: 886294 - DNA, 120 bp, Artificial Sequence
  ENSG00000224417_12 (sequence is synthesized)
acatataatttagggaaaatagtaatttattaaaggactctcagggacttgtagttgagaaaatgttaactatttgggttaagggacatgttcactaactctgagatttatagcatagtt

SEQ ID NO: 886295 - DNA, 120 bp, Artificial Sequence
  ENSG00000224417_13 (sequence is synthesized)
gtgagtggctgacatttactatctactatttatttttaacgagtatatatgattaataattagtatttacaaagtacttccacaaaaatcttcttctggtgcccatgacaatcctgtgag

SEQ ID NO: 886296 - DNA, 120 bp, Artificial Sequence
  ENSG00000224417_14 (sequence is synthesized)
gtagatattgtgggtattttatatctacactatattttaaagctaaaagaaccaaagccgaaatgaatagttggcttgctcagggcacccacccagccagcacgtggaggtgtctgaaat

SEQ ID NO: 886297 - DNA, 120 bp, Artificial Sequence
  ENSG00000224417_15 (sequence is synthesized)
taacctcaggcttcttatttccaaaaccaatctgttgcccaaggtcccagctcacaactagagcagaagcctctttgaacagatcacagcttatgtatgtattcacgtgtaatctccaca

SEQ ID NO: 886298 - DNA, 120 bp, Artificial Sequence
  ENSG00000224417_16 (sequence is synthesized)
gtagctacgctaggtcattgcatgtacatgaaggtacgtgaaggaatggatggaattatcttacattagggaagatgctaacctcccagctgaattttggcgttagcatgacacttagca

SEQ ID NO: 886299 - DNA, 120 bp, Artificial Sequence
  ENSG00000224417_17 (sequence is synthesized)
tctttcttggctgttaaaataaagcataacagggtggcaggagaggatgatataccaccactaaatacagttggatcccaaaggtgtgtacttggcctctctgtttctattggttcattg

SEQ ID NO: 886300 - DNA, 120 bp, Artificial Sequence
  ENSG00000224417_18 (sequence is synthesized)
cctttttcttattcaaaaacatatttaaaattttgaagtatttaaaacaaaaaacaaatgcaagtaccacatacccattcctcatgccctcgccaaatggatctggggcaagttagaatg

SEQ ID NO: 886301 - DNA, 120 bp, Artificial Sequence
  ENSG00000224417_19 (sequence is synthesized)
ctgctccatttccttcaaatagttaattttcaaacaataagtaatgtgtaaaaactgtatctaaagcctctccctccatcacagagttagccacagctctgaagtcaggacggatgtctg

SEQ ID NO: 886302 - DNA, 120 bp, Artificial Sequence
  ENSG00000224417_20 (sequence is synthesized)
ctaagtttgcctatatttacctattttttcctatacttataggtacatgcgtgtacctgaaacaccgccaagcatccttttacattttcatgctttgaataaatgtcatcatttttccaa

SEQ ID NO: 886303 - DNA, 120 bp, Artificial Sequence
  ENSG00000278518_0 (sequence is synthesized)
gaagcgggaaagggcctgggggcagattccagctgctgtgcacctgcctccacatggacaccagcaggaggaaggccgcccacaccagcagggccacggtgactccgagggcagacatgg

SEQ ID NO: 886304 - DNA, 120 bp, Artificial Sequence
  ENSG00000278518_1 (sequence is synthesized)
tgccgctggggccctgctgccagcccgggagacaatcctgtggaaacggaaggtttttataatgtgttctgagaaggagggtgacccaccaaccaatgccctcttgctactcgtctatcc

SEQ ID NO: 886305 - DNA, 120 bp, Artificial Sequence
  ENSG00000278518_2 (sequence is synthesized)
caaattactggtttattattagctgctgttggccatcgtttcaaaggctgattcccgcaatggtggcccccaggggttccagccagtgacctggtgaggatggagttggactgtgtcaac

SEQ ID NO: 886306 - DNA, 120 bp, Artificial Sequence
  ENSG00000278518_3 (sequence is synthesized)
accctggttgctagcacctgtcactgtgccagcaaacacatccaggaacatgttgccaacccatagttaagaacgtggggtgaggtaccgtcctgccctttggcactggttagacaacgg

SEQ ID NO: 886307 - DNA, 120 bp, Artificial Sequence
  ENSG00000278518_4 (sequence is synthesized)
ggaactccagccacatccccatgcatttgtttggagtagggtttatgtaatacaactccaaccccatgccgaccacctctagacacggtaccggccctcctggtgcaacagcctcttgat

SEQ ID NO: 886308 - DNA, 120 bp, Artificial Sequence
  ENSG00000278518_5 (sequence is synthesized)
ccacatgaatggggccagaaggaaaattcaacatcggaattcgattccactttctcaagttaactggaaaattccatggaagaaaaataaaaggaaagagtgagtcaaccaattctgaga

SEQ ID NO: 886309 - DNA, 120 bp, Artificial Sequence
  ENSG00000278518_6 (sequence is synthesized)
gagaaagttaatctctgttttcattttttttaaaggtatatattctggctgtagaaaattaagaaaaattgttctttggaattattccaaatttaaattcttaaaaaattacattagagt

SEQ ID NO: 886310 - DNA, 120 bp, Artificial Sequence
  ENSG00000278518_7 (sequence is synthesized)
ttggatttgttttacattagggtaaatttagaagacgattttaaagatatcttgtctttgttgatcccgggacacaatagagctccacattgactagcttcttctttcatgtattaatta

SEQ ID NO: 886311 - DNA, 120 bp, Artificial Sequence
  ENSG00000278518_8 (sequence is synthesized)
ttttcttcatacagaccctcttccaccttctatgaaggtagtccataggtattttgtggagcttttttgtgtgtgtggttagaatgaagagaatgtttttcattctgtcttctaactggc

SEQ ID NO: 886312 - DNA, 120 bp, Artificial Sequence
  ENSG00000278518_9 (sequence is synthesized)
tggcaatatatagaagttcttaattcataggttgcaattttgtacttttatattaacaatgaatctttatgtataatagaaaatatgatgagaaatgaagaaaataaaagtcatttacaa

SEQ ID NO: 886313 - DNA, 120 bp, Artificial Sequence
  ENSG00000224413_0 (sequence is synthesized)
ggaaaggcctcacacattctgccccggctgacgccttccttgggccagtgctcgggggtgtgtaacaaacgccaagacgcattgtaaagaaggaagcctgcgtttccatcaccggcttaa

SEQ ID NO: 886314 - DNA, 120 bp, Artificial Sequence
  ENSG00000224413_1 (sequence is synthesized)
tatcaaacaaaagtgcaattttgaaaatgtagtccaaggttttctgtggtgcggaaatggccaggccagacctccgtgggtggtccttcgtgtccacgtcagcgccctacatccacactg

SEQ ID NO: 886315 - DNA, 120 bp, Artificial Sequence
  ENSG00000224413_2 (sequence is synthesized)
tgggcaccatgacctcacatgcggagcggagcagggccggcgcccggagagccaggctggtcacgaacgaggcctagagggcgtcaggccccaaagcactcacaggcttctcctctgtcc

SEQ ID NO: 886316 - DNA, 120 bp, Artificial Sequence
  ENSG00000224413_3 (sequence is synthesized)
tcggggccttcagacacctgcatgcgccgattcagccacccgcgcgcgccgattcccctggccatggggtttccaaagtgtgtgctcagaggacagtttcctccaggatgacctgtcagt

SEQ ID NO: 886317 - DNA, 120 bp, Artificial Sequence
  ENSG00000224413_4 (sequence is synthesized)
ggctctctgtgccggggacgtcgcgtgctgggtcccggtctgaatgcttcctaacgatttacccagttccttttctccactcaggaggcgtttgctgagaggcacaggctgagcccccgt

SEQ ID NO: 886318 - DNA, 120 bp, Artificial Sequence
  ENSG00000224413_5 (sequence is synthesized)
gctgatgccacgaccgagggaacgggtctccctgtcggcgtgaactgacccggccaggcgtccactgccactcggactgtctcccaggcacgtggcgcccacacgggcagaacacgccct

SEQ ID NO: 886319 - DNA, 120 bp, Artificial Sequence
  ENSG00000224413_6 (sequence is synthesized)
ccacacacgcggcttcgggcagaacacgaggcgccctccacacacgcggcttcggggcttgtcatgaaaaaagctgaatgctgggggtgcagctttcaccaacagaatcccgtttggaag

SEQ ID NO: 886320 - DNA, 120 bp, Artificial Sequence
  ENSG00000224413_7 (sequence is synthesized)
ggacgcgcctgcaggcctgcagaagctgcatctcgggatggccaagagcccggccaggccccacggctgcacccaggacgggattcatgccccatgcctggcttctcacgaccacagagt

SEQ ID NO: 886321 - DNA, 120 bp, Artificial Sequence
  ENSG00000224413_8 (sequence is synthesized)
gcctttcccgggactggatggaggcagagtgagagaagagcctggagcaagtgttttggaccacagtgatcaaacacggagcccgtgggaggacgtgggaggacgtgcggggctttgccg

SEQ ID NO: 886322 - DNA, 120 bp, Artificial Sequence
  ENSG00000224413_9 (sequence is synthesized)
ggccgctatttgggcggtgttctgagcagccgtcagaccttgagttttgctgtcaaaagctcttctctcctgccccgaaatatacccagtccatgccccaagaggaaaggcctttgtgcc

SEQ ID NO: 886323 - DNA, 120 bp, Artificial Sequence
  ENSG00000224413_10 (sequence is synthesized)
aggtgggcacccggctgcctcttggcaaagacttgttggaaaaatgagtgagtgacgaggctgctggtcagcgtgtggcctgtggcgtcactggggcctctggcggctgctggaaccaga

SEQ ID NO: 886324 - DNA, 120 bp, Artificial Sequence
  ENSG00000224413_11 (sequence is synthesized)
agaggagcctgcgctgcaacccaggccgcaccacatcagggtctcactgggagccggagagcttgttcccaggcaaccctgaaacagagaagtgtccttggaggcttcacccacgcagac

SEQ ID NO: 886325 - DNA, 120 bp, Artificial Sequence
  ENSG00000224413_12 (sequence is synthesized)
ccacggcttcctggtagaagccgtctgcacccccgcactgacctggctctgtgaggagagcggggaggggctccagggaaacatcctggcgttggcgtagccagcctgtgagtcacgggg

SEQ ID NO: 886326 - DNA, 120 bp, Artificial Sequence
  ENSG00000224413_13 (sequence is synthesized)
aagccggctgcccggatgccccccaaggacccggtgagtccacacacagtacagcagggcctgggcccgcaccaccgccttttcctgcaggcccctcatgtccactgactgcacctccag

SEQ ID NO: 886327 - DNA, 120 bp, Artificial Sequence
  ENSG00000224413_14 (sequence is synthesized)
ggactctgcccggcaacccaggcgcccccgacacaccccaccacacagctccttctgcctcacccacaccccgccagaccctgagcgctcacgaagtctccttgtcaagaactttgagag

SEQ ID NO: 886328 - DNA, 76 bp, Artificial Sequence
  ENSG00000278514_0 (sequence is synthesized)
ggcggaggttgcagtgaactgcgatcgcgctactgcaccccagcctgggcaacaaagctagaccttgcatcaggct

SEQ ID NO: 886329 - DNA, 120 bp, Artificial Sequence
  ENSG00000278514_1 (sequence is synthesized)
atcacctattgccaaaaattgaacctaatcaagcctcaagatctaactaccagtttataggctatatagagattagcaggaatatgttaagacaccaaaggtatgaaatcaaccatatcc

SEQ ID NO: 886330 - DNA, 120 bp, Artificial Sequence
  ENSG00000278514_2 (sequence is synthesized)
aaaatgtaggaaattatatgggacaaatgatctgtcgtcttcaaaaaaatggcaaagtgggaaatgtgggaggggaaaacacttcagaataaaagagatttaagagatgtatcaacaaaa

SEQ ID NO: 886331 - DNA, 120 bp, Artificial Sequence
  ENSG00000273760_0 (sequence is synthesized)
tttgcccttcatacctcagagagccttcatccaagtaagatgggtggtgaggagctgtggatgacagcatgaaggatgaggactgatgcagcagccataattagattataggtttccatg

SEQ ID NO: 886332 - DNA, 120 bp, Artificial Sequence
  ENSG00000273760_1 (sequence is synthesized)
ggatgtgccatgactgcttacaaatggggcccagccatggaattgagttatcaactaagctgattcctgaggcacagatcatcctgtcctccacaacatgattaaagactacatgatgct

SEQ ID NO: 886333 - DNA, 120 bp, Artificial Sequence
  ENSG00000273760_2 (sequence is synthesized)
caggaagacctctgcagctgtgtgcttggaagagtgtgtttttcctgctaaagcataagaaaaaagagaccagcaattattatcttaggccttgcagcatcctttctggtcccacaagtt

SEQ ID NO: 886334 - DNA, 120 bp, Artificial Sequence
  ENSG00000273760_3 (sequence is synthesized)
gaagcttccccttccaaggaggacacacctcctttcctagaacattcttcagtgccacaagctgctcagtcagccctgattctggagtctccagtgagcgaggcctggggtggccccagt

SEQ ID NO: 886335 - DNA, 120 bp, Artificial Sequence
  ENSG00000273760_4 (sequence is synthesized)
gggatgagccacactccccacagcactcagcctggatgtggcactggctgcacatagcaagaggcagctattggacacctgctcgccacatgttctgtcttatcctcccagcaacaccga

SEQ ID NO: 886336 - DNA, 120 bp, Artificial Sequence
  ENSG00000273760_5 (sequence is synthesized)
gtgagggagggagtgttaacccaccattcaccaggtttaccagagaccaagcccaggatctctccactgcacacttttaaaagggtcctttcagcttcccattaaagaagtttgttcctt

SEQ ID NO: 886337 - DNA, 120 bp, Artificial Sequence
  ENSG00000224418_0 (sequence is synthesized)
gcgggagccctaggccgcagccgccgcctgtcggcccggcccgggtcccagctgcttcggtgtctgggtgaagtttccagccaacccaagaaggaaaccgaaagggaagaggccgagaga

SEQ ID NO: 886338 - DNA, 120 bp, Artificial Sequence
  ENSG00000224418_1 (sequence is synthesized)
gaggttaattcctagtgctttggttaccgaaaacagcccggctgggactgctgggctgggaacttagctaagcagtgcggaggctgaaccccaccatctctgggatccgcagcaaatcag

SEQ ID NO: 886339 - DNA, 120 bp, Artificial Sequence
  ENSG00000224418_2 (sequence is synthesized)
aagcccccacccacgataaggggaaaatggggcgcagagggcagggaggaagggaagagaatggaaggaaagcgcgtctggactttgaactgcagccctctccctctttcccttgcctcg

SEQ ID NO: 886340 - DNA, 120 bp, Artificial Sequence
  ENSG00000224418_3 (sequence is synthesized)
gaagctccaggcccactcagcaccagttctgtctcctcttttcagccgccttctctctagctactgaggggaaaagtcaggatgaagcgggtccctcggcctccagaaggtgttttatta

SEQ ID NO: 886341 - DNA, 120 bp, Artificial Sequence
  ENSG00000224418_4 (sequence is synthesized)
cagtcgcaaacaggtagagcggcagccaccccagtgatgactccctgctccttagattgtagggacgctggcacctcactcatgctcctaagtggccattttgcgccctggctgggcgag

SEQ ID NO: 886342 - DNA, 120 bp, Artificial Sequence
  ENSG00000224418_5 (sequence is synthesized)
tccatccacgaacttcagttcccccgggtgctctggatctgacatggagtaggatgctaacatctaatcccttctttccctttggaaagatgcatgttttttctcggagtcctagggaat

SEQ ID NO: 886343 - DNA, 120 bp, Artificial Sequence
  ENSG00000224418_6 (sequence is synthesized)
accttagaatactttcatggttgtcattggtacacccatcccttgaggagccctgccacccgtaagtaggactgcaaggaaatacaaaattaagagaagtatgaaccctgatacccagga

SEQ ID NO: 886344 - DNA, 120 bp, Artificial Sequence
  ENSG00000224418_7 (sequence is synthesized)
acttaaaatcaggtgtataaattttgtacacctaaaaaatatggtacctaaagaggcgaacagcaaaacaagcaagaatgtgaatctttaaaatgtttctattcttcagcgcagcccagg

SEQ ID NO: 886345 - DNA, 120 bp, Artificial Sequence
  ENSG00000224418_8 (sequence is synthesized)
aattctacctaaagtaacatatcctaaggcaacaaccaagaagtgtggaagaatgcatgtaagaagacacagtgatgtttagaatcctggggaaacggaacagccaaaaagtctcacaga

SEQ ID NO: 886346 - DNA, 120 bp, Artificial Sequence
  ENSG00000224418_9 (sequence is synthesized)
ggttaagtaaataatagcattttcatacgagtactatgtagtcatttaaaattatgtctttcagtacctagtaatggggaaaatgtattcattatatattattaaagaaaatacagggta

SEQ ID NO: 886347 - DNA, 120 bp, Artificial Sequence
  ENSG00000273765_0 (sequence is synthesized)
ggagaaggctttgccttggcccccagaagagcagatgctccagtcaattctggagtaggaagaaaagatttggaatactttatgactccctgtgatatggtttagatgttttgtctcctc

SEQ ID NO: 886348 - DNA, 120 bp, Artificial Sequence
  ENSG00000273765_1 (sequence is synthesized)
gtcctagtggtaatgattgagttctcattctacgagttcacataagatcttgttgtttaaaagagcctggcacctcctttctttctctcttgctcactctcacaatgtgacacactggat

SEQ ID NO: 886349 - DNA, 120 bp, Artificial Sequence
  ENSG00000273765_2 (sequence is synthesized)
ccccttgactttccaccatcattgtaaggcttctgaggccctcctagaagcagatacctgcaccatgcttcatgtacagcctgcagaactgtgagacaaataaacttgttttcttctaaa

SEQ ID NO: 886350 - DNA, 120 bp, Artificial Sequence
  ENSG00000268296_0 (sequence is synthesized)
atagatacgtcaaaatgacttctgcaggcagggcccaggcaaaagaatcagccaattagctcagcaaacttggattcaatcaaacagttatctaaatagcgactgcagattcatcaagtc

SEQ ID NO: 886351 - DNA, 120 bp, Artificial Sequence
  ENSG00000268296_1 (sequence is synthesized)
agcacattcctacactgagaaggtgaatccaatcagacaattagctcaaggcaggtgattccaatcagcaaattacctcaactcagacacaaaggaagcatcattccttgttgctcactt

SEQ ID NO: 886352 - DNA, 120 bp, Artificial Sequence
  ENSG00000268296_2 (sequence is synthesized)
ctgaaaaacaaaaatgcactgaggttatgaaacattcattgccaggtcaagggtgacccttctctttctggtaaacataggaccagaaataaaatagcctcagtttaaaggctctcactc

SEQ ID NO: 886353 - DNA, 120 bp, Artificial Sequence
  ENSG00000268296_3 (sequence is synthesized)
tcccatagactccagagttgccaaatcgctccatcagatagatcctgccagcttccctttggcctacgtggggagacagattcctggtgcttcctgctctgccacctcccctgatttctc

SEQ ID NO: 886354 - DNA, 120 bp, Artificial Sequence
  ENSG00000268296_4 (sequence is synthesized)
tccgaatgtgttgtcacacacacttcctttcctctcattggaagtaatctaacagctcatggccctgcagttttctcaggctcagttccctcccaataagaaaaagaagagaaaataatg

SEQ ID NO: 886355 - DNA, 120 bp, Artificial Sequence
  ENSG00000268296_5 (sequence is synthesized)
tagacaaattgctgtctgtaggcagcaaatctgaatcaaggtccttcccttcaagaaagagaagtagaataaggaaaaaggctattgaacttttgtgattgatcgagaaccatacatcta

SEQ ID NO: 886356 - DNA, 120 bp, Artificial Sequence
  ENSG00000268296_6 (sequence is synthesized)
gatttatctgtattctagaattagaaaaaatcttcagtgcacagagttaaatactgcaatgctttctacaatattcaaaaccaccagagattaggagcacttcactcaatggggcttgtg

SEQ ID NO: 886357 - DNA, 120 bp, Artificial Sequence
  ENSG00000268296_7 (sequence is synthesized)
cccctaaaaacaaccaaccaaccaaaaaaaaacaggttcctgagattgatctgtctcgacatttttgttttctatcccggtactatcactacgcacttggactgtaacacaaaccgaaaa

SEQ ID NO: 886358 - DNA, 68 bp, Artificial Sequence
  ENSG00000268296_8 (sequence is synthesized)
tactatcactacgcacttggactgtaacacaaaccgaaaaaaatcaacacataaaaaatatgaccggg

SEQ ID NO: 886359 - DNA, 63 bp, Artificial Sequence
  ENSG00000268292_0 (sequence is synthesized)
ctggcacactcaagggcactgaatctagcaatgagtctgcacttctgttatgagagtgggttt

SEQ ID NO: 886360 - DNA, 67 bp, Artificial Sequence
  ENSG00000268292_1 (sequence is synthesized)
tatccacatgttcatggtatacctcggccggtcctagacctagtatcagactctgctgctcctcact

SEQ ID NO: 886361 - DNA, 120 bp, Artificial Sequence
  ENSG00000268292_2 (sequence is synthesized)
ccctgatccgggggatgctggccaagccacgggcagtgcaatgcagtatggcaaaggaaggtttcctgtccacagtgcccctcaaggcagggccccccaggagcccactggccaggccca

SEQ ID NO: 886362 - DNA, 120 bp, Artificial Sequence
  ENSG00000268292_3 (sequence is synthesized)
gaggtggggttagctctgcagtgtgaactcataggttctggtctcccagtgggagaggtccttgtccatcatgctacgctcagtgaaggtcacgtggccgtccgcatctaccaggatgat

SEQ ID NO: 886363 - DNA, 120 bp, Artificial Sequence
  ENSG00000233540_0 (sequence is synthesized)
tgcagggattgcaaggacacctgctgtatttaaaatgctgcattttcttggcataccatttaagacaaattacaaaaacctataactgaagcctgtttttccaaaaggtctccagctgcc

SEQ ID NO: 886364 - DNA, 120 bp, Artificial Sequence
  ENSG00000233540_1 (sequence is synthesized)
acctggtaactggttaaaagaagctaacagagctcatgataaggcttgccagcctagaggacaaactgccagttgtctatagaacagacaggacttgtgggagcatagtgtgttaagtgg

SEQ ID NO: 886365 - DNA, 120 bp, Artificial Sequence
  ENSG00000233540_2 (sequence is synthesized)
aggcccctgagcttagaaaaaggggctttcctattaggcaggaaccaagagaagcacaaagagatcatagtttataaatatgcaacagacacctctgtttggaaggaggcacaacactta

SEQ ID NO: 886366 - DNA, 120 bp, Artificial Sequence
  ENSG00000233547_0 (sequence is synthesized)
tgcttggacagagaggtctccccaacatcacgaggcagcaaactgaaagcaagaacgtggcgaagtgcaaacaaatccagtccacaaaaggcagaaaacaacatttgccaagcccaggaa

SEQ ID NO: 886367 - DNA, 120 bp, Artificial Sequence
  ENSG00000233547_1 (sequence is synthesized)
atcagctaaatccctctctgccgaggagttttcggagctcttctcctcctgttcgccctcgtctttgaaggaaatcagttcgtcgttggcgcctaggtcatcccctccaccgccgttcag

SEQ ID NO: 886368 - DNA, 120 bp, Artificial Sequence
  ENSG00000233547_2 (sequence is synthesized)
ctgcggcatttttttttcacccaccagcagcaattttggaagaaaaatgaaggaggaagaaaagccaaaaaaaatcacccccaaaaagttttgcccccccaaaaaatattgcaagaaaaa

SEQ ID NO: 886369 - DNA, 120 bp, Artificial Sequence
  ENSG00000288080_0 (sequence is synthesized)
agggctgccacaccaaccctaggctgcccactccctggcacacctctcgccaccagcccaaacagttattgtggtgatgatcctttttaagtactagatggtgccatttctaccaaacgt

SEQ ID NO: 886370 - DNA, 120 bp, Artificial Sequence
  ENSG00000288080_1 (sequence is synthesized)
aaacaggctccacaaagcacagcatcaacgcgtgtcaggcagtgcacagcaagagctgaggcattcgtgcagctgttcttcccctctgctgactttatgtggagtaaagggctactccag

SEQ ID NO: 886371 - DNA, 120 bp, Artificial Sequence
  ENSG00000288080_2 (sequence is synthesized)
ccctgaaatatgtctacactacgggatggccaaattgaggcaattaacatatgcaagacctcacaaacttcaaattttttgtggtgagaacacttaaaatccacaaaaattagtaatgtt

SEQ ID NO: 886372 - DNA, 120 bp, Artificial Sequence
  ENSG00000288080_3 (sequence is synthesized)
cagaaatacggatttacctgaacacctgtttttctgggacaccaacctgtagcagtactagaaacagcaaatacgtctatgtgaaaccataagttttatgtaccctatcaacaataaaaa

SEQ ID NO: 886373 - DNA, 120 bp, Artificial Sequence
  ENSG00000235269_0 (sequence is synthesized)
attttctctgaaacttcctccctgtccagtgttatctaccttggaacgattgtctcatttagagggactctctaacctgagtacacatttgaaacatctgagggctttgaaacatacctg

SEQ ID NO: 886374 - DNA, 120 bp, Artificial Sequence
  ENSG00000235269_1 (sequence is synthesized)
ctcctggaccacctgctgaaccaattaaatcagaatttctgttgtgaagatctccacgtgagtttaagctttcctgctcaactgttagttccatgaaggcaacagccatgcctgcttcgt

SEQ ID NO: 886375 - DNA, 120 bp, Artificial Sequence
  ENSG00000235269_2 (sequence is synthesized)
tcactgaaatatcttcgtttcctaacacacagaaagtcatcattttttgacggatgaaagaatggatgaatgcctagtcttggagacatctacttgcaataaaggttagatgaaggaaat

SEQ ID NO: 886376 - DNA, 120 bp, Artificial Sequence
  ENSG00000235269_3 (sequence is synthesized)
ggatgccagtgggagatttgtggatctatttcaccagatttcactctgctgactcagcaaaatggtccccgaagaaagtgaagaaacagaggcaaagggagcataagcaattttccaaag

SEQ ID NO: 886377 - DNA, 120 bp, Artificial Sequence
  ENSG00000235269_4 (sequence is synthesized)
gccatacaacatgtaagtggctgagccaagactgaaatcaccaggttcttaaccactaggccatattgcattggagtgttgcctcctggagtaagactaggctaaaagcttcatagaaac

SEQ ID NO: 886378 - DNA, 120 bp, Artificial Sequence
  ENSG00000235269_5 (sequence is synthesized)
ctaaaggagttagagaaggaagatctctcaatggaaatgctaagaagagacacaaggaaagacacatcactaaggagagacccaaggaaaatggctctatgactacagtccatttaaaga

SEQ ID NO: 886379 - DNA, 120 bp, Artificial Sequence
  ENSG00000235269_6 (sequence is synthesized)
atgagggcgttccttctaccaagttacaggtggagatgtgtttacctgctggataccaatgcttctagcatcagggagaagttgagccctggaggaaacattgcctctaagtttgtgttc

SEQ ID NO: 886380 - DNA, 120 bp, Artificial Sequence
  ENSG00000235269_7 (sequence is synthesized)
tggtgctacatactgcaaagcaaagtatctacaacaactgcaataagccaccctgatcattcttcaacctaaagatttgcaactcatccaagttcaactggttgaaagagcctgcctcct

SEQ ID NO: 886381 - DNA, 120 bp, Artificial Sequence
  ENSG00000235269_8 (sequence is synthesized)
cacagcagtgcctgattgacactatgaactgaaatactaaaggcacttcttctttcaggataactgattaaatgttctggctggtaaagcaggtcatcactcaactgttgtggctttggc

SEQ ID NO: 886382 - DNA, 120 bp, Artificial Sequence
  ENSG00000235269_9 (sequence is synthesized)
cagagatgtaaaggccccacatattacagaacaccctttgatatgcagactaattaatagaagacctaagcctttcaagggacttctataccataggatgttaggagacatcaagaacac

SEQ ID NO: 886383 - DNA, 120 bp, Artificial Sequence
  ENSG00000235269_10 (sequence is synthesized)
aaatgaaactaagattttcatacagggttcaggttttgttacttcagatctataatctaaagttctgtaatcatcacatcactccaagaacaaaatttgataggcaaaattcttcacact

SEQ ID NO: 886384 - DNA, 120 bp, Artificial Sequence
  ENSG00000235269_11 (sequence is synthesized)
catttcatggagaaccttgagggtccagagtgaggcttgatggcaagcaggagctccctgtcccctgtctccacccatgcaacccctagctcccccattgttttcactctagatttgtga

SEQ ID NO: 886385 - DNA, 120 bp, Artificial Sequence
  ENSG00000235269_12 (sequence is synthesized)
agtataacaaccttaaaatcttaagatttaatctttaaatattaagagatttgggtttctgtatcaacaatctttaaatattaagagatttttccgaagattaatgactttcctagagtt

SEQ ID NO: 886386 - DNA, 120 bp, Artificial Sequence
  ENSG00000235269_13 (sequence is synthesized)
ggcctacaaattcaccacctcaactggatgacttgctttggaataaatttctaacaccgcaagtgaattgaatattttcttccttttttatgtaatctaatatagtacatttttaaaaat

SEQ ID NO: 886387 - DNA, 120 bp, Artificial Sequence
  ENSG00000235269_14 (sequence is synthesized)
ttataggatgtccagacacttatagcttatcattctatgattcaaaagaatttggtataattgcattgataagcttactgccctgggcaccaaagtaacctagaatatggagaagtagct

SEQ ID NO: 886388 - DNA, 120 bp, Artificial Sequence
  ENSG00000235269_15 (sequence is synthesized)
tttggtgacatgcatctatttatatctctagcatttactaattaattaatttgtttaacaaatacacattcagtaccattatatgtttggcattgtcatagatgttagaaaatcaaatat

SEQ ID NO: 886389 - DNA, 120 bp, Artificial Sequence
  ENSG00000235269_16 (sequence is synthesized)
aaaaaagaggtaatttcttcacaacacacggaaataagagtatctctaggaattgtctctagttgaaattgttttctcctacccacctctacgattcatcaatttagctttccttcactg

SEQ ID NO: 886390 - DNA, 120 bp, Artificial Sequence
  ENSG00000235269_17 (sequence is synthesized)
tagtgacaggtgttttaatctcacctaacaatatgcctgattaagcttcaacatacacagagagaggcctgaaaaacataacttggtctctatgtctaagtttatgttgttagtaatagt

SEQ ID NO: 886391 - DNA, 120 bp, Artificial Sequence
  ENSG00000235269_18 (sequence is synthesized)
tataagagccacagcgatggcaccatggcgttaccttctctgaaggctttcccagctttcctagcaaagctcttttctcttccctctggttaaaaaataaataaaaaaaaaataaaggtt

SEQ ID NO: 886392 - DNA, 120 bp, Artificial Sequence
  ENSG00000288082_0 (sequence is synthesized)
aaagctgttgatcaactggaatggatttaaatgattctggttaattttttactgtggtcgaagaaccgtgagccttttcctaggaggacaggcacttattcctcgcacaggtttcaacaa

SEQ ID NO: 886393 - DNA, 120 bp, Artificial Sequence
  ENSG00000288082_1 (sequence is synthesized)
gaacattacgagctgcctgcctggcccactggtacatctgagcccaacgtgcctcacatacatggtctctgcggagagaacaacctcggttcagctcctgcctcccacacttaatctacg

SEQ ID NO: 886394 - DNA, 120 bp, Artificial Sequence
  ENSG00000288082_2 (sequence is synthesized)
ggaacttctgtttaccatctttagggtagtggtaatactaattctttctgcaaggaccgttgcaacaattcaataagaccacggatgtgtgagggcttcttcaaggaagccagagggagg

SEQ ID NO: 886395 - DNA, 120 bp, Artificial Sequence
  ENSG00000288082_3 (sequence is synthesized)
gccagtgtggccaccgaggctcctgtctgtgggtggacaccagcacaggggaagcagacgtgttcctgccattgtcagatacaaggctgcagttagggggtcctgcctagtccactggct

SEQ ID NO: 886396 - DNA, 120 bp, Artificial Sequence
  ENSG00000288082_4 (sequence is synthesized)
tgctctgagcagctgttcttattgaagcacgtgcccaggagacggctttatttccctccctctctctgttgttaagcagttcaaaagtcactgagaggtcaagtcctgaaggctatgtac

SEQ ID NO: 886397 - DNA, 120 bp, Artificial Sequence
  ENSG00000288082_5 (sequence is synthesized)
aaagaacgactctcctgaaaagatggcccctgcttcccacagccccaccgctgaagtcagtgtttgtgttggagaataattaaagctgatcacgttttgtccctaacacggagtgacatc

SEQ ID NO: 886398 - DNA, 120 bp, Artificial Sequence
  ENSG00000288082_6 (sequence is synthesized)
ttttgaatctctgcatattgctgttttcactaagccacatgtaacacttcagagtgccaaatgctttttaaaaaatagccctggctctgaaagagtgctgcagaataactctgatggaat

SEQ ID NO: 886399 - DNA, 120 bp, Artificial Sequence
  ENSG00000288082_7 (sequence is synthesized)
atggcttctatgaaaacacaaaatgttaatcacccccccaagaaaaaaagaattcaaagaattgtttgaaaagagatgtttgttctgggcacgtatttcaagggcaaaagtgcttgaaga

SEQ ID NO: 886400 - DNA, 120 bp, Artificial Sequence
  ENSG00000288082_8 (sequence is synthesized)
ggagtggcttacgtttgttctggttccttaagatctccagcccagctccccaaacggagagaaatggagaccagtcttgctttctgcaaattggaggcatcacctgactcttgtgtgctg

SEQ ID NO: 886401 - DNA, 120 bp, Artificial Sequence
  ENSG00000288082_9 (sequence is synthesized)
tccaggtatggtcaggactcatgaaacaagaggtggcattggacaccttggaagagaagccatgccccaggcagaccctttctcactctctgcagccctgcacaggcctgtgttcccgcc

SEQ ID NO: 886402 - DNA, 120 bp, Artificial Sequence
  ENSG00000288082_10 (sequence is synthesized)
gaccaccagcctctgtgaacttctgctccttgtcctgcctccccagcccagccctggattttagtggctactgcgtacaaaccagtttccagccttagccagtgctccttgctgcccagc

SEQ ID NO: 886403 - DNA, 120 bp, Artificial Sequence
  ENSG00000288082_11 (sequence is synthesized)
caagaatctacatactcatcctctgtccccttctggctgcttctccttcccctctgagacaatttcaccagcccccatactgaccggagctgaccctggaactcaactgaaataatagaa

SEQ ID NO: 886404 - DNA, 120 bp, Artificial Sequence
  ENSG00000288082_12 (sequence is synthesized)
agttcccactcaacgtgcttccctgagcctgcctgtctccaggacaaagccacctctgcgctcctcatgcccatcttctcctgccttcccaggaacctcaccccatcaagcacgctttcc

SEQ ID NO: 886405 - DNA, 120 bp, Artificial Sequence
  ENSG00000288082_13 (sequence is synthesized)
ctcctgaaatctccaggttctcttctcttttggctgtttcccctcatcctatgtatacaatccattctctcccatcttaaaaacaaactacagaaacagtaaagagatcagtagttgcca

SEQ ID NO: 886406 - DNA, 120 bp, Artificial Sequence
  ENSG00000288082_14 (sequence is synthesized)
cgggttcagggcaaggtgggagggatgagtagctggagcccagggcactagggtggaggaatgcttccatatgatgttgtcatagtgggtacatgacattgtacatttgccaaaagccat

SEQ ID NO: 886407 - DNA, 120 bp, Artificial Sequence
  ENSG00000288082_15 (sequence is synthesized)
cgatctgtaccacataaagcaccaaccctaaaggagactatggactttagttaatgataaggtgtccacatggcctcatcaactatgacgaagacaccacacaaatgcaagagaataata

SEQ ID NO: 886408 - DNA, 120 bp, Artificial Sequence
  ENSG00000288082_16 (sequence is synthesized)
agggaaattgtatgaagggtggtgggtgggggggggtggaataatacaaggactctctgtacttcctgcacagtgcttctataaacacagaaatgttctaaaagatcatctattaaaaaa

SEQ ID NO: 886409 - DNA, 120 bp, Artificial Sequence
  ENSG00000288082_17 (sequence is synthesized)
gcaaaaccgaacaagaccttccccttggtggctttcatgtaaatggcagggtaagtataggtagttagctcccctttccagagtccaaaggaaatattttttaagctagggaagcctgta

SEQ ID NO: 886410 - DNA, 120 bp, Artificial Sequence
  ENSG00000288082_18 (sequence is synthesized)
ccacacagaaaactgacatcacttgattcatgcaacttccactagaaaggttcaggtatgtctgtactgaaatagaggaaaggtggaattataaccaacgtttcgcggaaagagtaactt

SEQ ID NO: 886411 - DNA, 120 bp, Artificial Sequence
  ENSG00000288082_19 (sequence is synthesized)
ggttccaaatgagggagatgagagaccctggtgtcactcgcagaggcaggaagacaggcaatgaacagaaaggcagccagcggggcgtccccaggacaaacactgcaatgggctagattt

SEQ ID NO: 886412 - DNA, 120 bp, Artificial Sequence
  ENSG00000288082_20 (sequence is synthesized)
cctcaggatgagaaagtcaagggggaacggaaggttttttaagagaagctacaagggcagaaataatcaacaaaaagaaacccacaaaggtgaagaaggactaggtgaaggtgaacacag

SEQ ID NO: 886413 - DNA, 120 bp, Artificial Sequence
  ENSG00000288082_21 (sequence is synthesized)
gatcgctgaatttccataacataaagcctcaaagagccgagggtgcctgtgctgctgagaacggaaaggagaaggccccggtggaagctctcgtcacagccacgttccacgccacaggag

SEQ ID NO: 886414 - DNA, 120 bp, Artificial Sequence
  ENSG00000288082_22 (sequence is synthesized)
ggcgttcccagacaggcccgattttaagtatatgaaccgggaacccttccccagaagactttttagaggtataagcaattctgcccaaagggcagtcaacatttaaaagctgagaataga

SEQ ID NO: 886415 - DNA, 120 bp, Artificial Sequence
  ENSG00000288082_23 (sequence is synthesized)
gaagtcattcgaaaaaaggaccaacaggaagtatcgaaaccatctacctgtggatttctgtctacaaaccggctgtaaacggcgacacggcatgtaaacgctaacaataatgctttatta

SEQ ID NO: 886416 - DNA, 120 bp, Artificial Sequence
  ENSG00000288082_24 (sequence is synthesized)
aggggaattacacttaccagtcacaatgcaggctctgctagaaacaaatccaggatcacatctataagaaccaggtgatattgctgtcagcctaaaaaacccaagtggtaaattgagaac

SEQ ID NO: 886417 - DNA, 120 bp, Artificial Sequence
  ENSG00000288083_0 (sequence is synthesized)
tatgcccaagataaacacatatggagcagacctgatcccaacccacagcctgcagccatgcccagcagagcccagcctggatccgccaagtcgtgcttgacctatggacctgaatgtgga

SEQ ID NO: 886418 - DNA, 120 bp, Artificial Sequence
  ENSG00000288083_1 (sequence is synthesized)
gcgatatggggaggcctggagagggagatgaaagccgatcaaagccaccccttctgctgtcagctagaaggaaattgacaaatcttttactccatcagaaaattcagcttaaaaaaatca

SEQ ID NO: 886419 - DNA, 120 bp, Artificial Sequence
  ENSG00000288083_2 (sequence is synthesized)
atggccatgtcctccaaactggtcttcctgcttccacatttactttttgccatacagaagtcaaagttatcttcttaaaaaacattggtttggtatttttacaatctggcttaaaatgct

SEQ ID NO: 886420 - DNA, 120 bp, Artificial Sequence
  ENSG00000288083_3 (sequence is synthesized)
cccatgagttccgtaagtacttagaacaaaacccattctggttcctgctgtctaccaagcaccacatggcctagaagtcaccacctccctggcctcctcacctgtttccctcttccatgc

SEQ ID NO: 886421 - DNA, 120 bp, Artificial Sequence
  ENSG00000288083_4 (sequence is synthesized)
tctgctgcccagccatgttggttgcttgaggctccttgaacaaatcaagcccattagtattttatggcctttgcctctgctgtttcctctgcctggaatgctggctccacatgcatccac

SEQ ID NO: 886422 - DNA, 120 bp, Artificial Sequence
  ENSG00000288084_0 (sequence is synthesized)
ccagtaggtcccagcctcattttcccaacccctgttcaagatagagtcactctggtttgagtacttctgacaaaaacactcagtatgccaaagtgccatatttttggctatcattttctg

SEQ ID NO: 886423 - DNA, 120 bp, Artificial Sequence
  ENSG00000288084_1 (sequence is synthesized)
tgccccaaccctactaagtaaatttagtatgaactatgtatgacgaatggtgctgtcaggtcctcttacttgaggactagcaattgtttaatcttgaaaacatatatgttatggattgta

SEQ ID NO: 886424 - DNA, 120 bp, Artificial Sequence
  ENSG00000288084_2 (sequence is synthesized)
tctgcttggctatttaaaaggaaaagacttggaggtaaccaagttctgagcaagtgacctttccatttggacaactatggtgaagaaaatggtggtcccattgcagaggctgcacagacc

SEQ ID NO: 886425 - DNA, 120 bp, Artificial Sequence
  ENSG00000288084_3 (sequence is synthesized)
cgcagatatttccatgacagcaagagcggaagtgagatctcctcacctagggaaccacactgaatgctcaccaggctgaggccgagcacaagccacaccagcaagattggcagtgcctag

SEQ ID NO: 886426 - DNA, 120 bp, Artificial Sequence
  ENSG00000288084_4 (sequence is synthesized)
gaagacaaaggatattgcagtggataccagaagaaccaaacatcatatgttctcactcataaatgggagccaaattatgaagatgcaaagccataagaatgatacagtggacttcgggga

SEQ ID NO: 886427 - DNA, 120 bp, Artificial Sequence
  ENSG00000288084_5 (sequence is synthesized)
ataagaatgatacagtggacttcggggactccggggaaagggtggcagaggggtgagggataaaagactacaaatttgattcagtttataccgatcaggtgatgggtgcaccaaaatctc

SEQ ID NO: 886428 - DNA, 120 bp, Artificial Sequence
  ENSG00000288084_6 (sequence is synthesized)
aaccagatagcacttgtttcccaaaaacctatagaaataattttttcaaaaaaagagtctttcacatgtcaacatccttgttcatagagatactatgttgagaaagaaaagaatagaaga

SEQ ID NO: 886429 - DNA, 120 bp, Artificial Sequence
  ENSG00000288084_7 (sequence is synthesized)
gaaaatattttagatcttaagaattatagcaacaatattgtttgaattttggaatcagttactgggttaggctaagtctgtttttctttttccctctcctgtttctgtactatgatggag

SEQ ID NO: 886430 - DNA, 120 bp, Artificial Sequence
  ENSG00000288084_8 (sequence is synthesized)
gctgagaagcagatcagagcagttttggtgaataaagaaagtacattttctcaaatgacatttgacttcattttcattatgaataatttcacagcctttccatactaatcagaaaaagct

SEQ ID NO: 886431 - DNA, 74 bp, Artificial Sequence
  ENSG00000288084_9 (sequence is synthesized)
gaaaaagcttatactgtcattgctaagaatggtgtactcaatttttttttttaagatggaggagtcttgctctg

SEQ ID NO: 886432 - DNA, 120 bp, Artificial Sequence
  ENSG00000288084_10 (sequence is synthesized)
tacaggcgtgagccactgcgccctgccggtgtactcacttttgaaacctgatagtcataaagttagaatgtacttgaagtctagacttatattgtaatttaagaaatcatcatgtgaata

SEQ ID NO: 886433 - DNA, 120 bp, Artificial Sequence
  ENSG00000288084_11 (sequence is synthesized)
tgtaatttaagaaatcatcatgtgaatagcagagcagaaaactatattctctaattctctatttaaaggactcactatcttctgtataattctgaggatattaattacagtttttttaag

SEQ ID NO: 886434 - DNA, 120 bp, Artificial Sequence
  ENSG00000288084_12 (sequence is synthesized)
tggaatatataacaattatagaagcattagaacagaaaacattgttacataattaagatctttccttctcatacaaagaaaagagaaactcatcaattaaagaagaaaaaagactgttag

SEQ ID NO: 886435 - DNA, 120 bp, Artificial Sequence
  ENSG00000288084_13 (sequence is synthesized)
gtcaaaattaagctaaaagattacaaagtaactaaaatatttgaatagaaaattactggcaaaaatacatctgaaaaaaatgcaaataactataaaggctaatttataatcatgcagaca

SEQ ID NO: 886436 - DNA, 120 bp, Artificial Sequence
  ENSG00000288084_14 (sequence is synthesized)
agagttaacaggcctgactactgtcttctgcaacggctgcttaacaaggttggcccttggctggcatttggaagttggattttaagagggctcctgccattcccgataaattgtctcatt

SEQ ID NO: 886437 - DNA, 120 bp, Artificial Sequence
  ENSG00000288084_15 (sequence is synthesized)
ataactaaactgtttgtacaaacaatgtggtttatgctgaatatctgctttccttttgggagtccgagttttggtccatgccaagcagagagtgaactctggactctggaccagaagacc

SEQ ID NO: 886438 - DNA, 120 bp, Artificial Sequence
  ENSG00000288084_16 (sequence is synthesized)
ctgaactctgagtctctaatgagcttccctggttggcaacatttcacatctgttgtcccaatttgttgctaggggaatgaagtgtgtcttgtgtgactctctgtaagcttgtgcctggtt

SEQ ID NO: 886439 - DNA, 120 bp, Artificial Sequence
  ENSG00000288085_0 (sequence is synthesized)
tcactactatggcaagatcaagactggatctaggagatctcggttcaatatggagattatccagagattctactgttggagccagatgctataactgaagagggttaaaactgtctcctt

SEQ ID NO: 886440 - DNA, 120 bp, Artificial Sequence
  ENSG00000288085_1 (sequence is synthesized)
ttgggacaccgaaacatagaagcctgcccgggaagagcagggtagaacttatattctctttgttcagcttcccagaggaataagaaggccagagtgaagccaggaaaaaaattctggtaa

SEQ ID NO: 886441 - DNA, 120 bp, Artificial Sequence
  ENSG00000288085_2 (sequence is synthesized)
tgaacttacttcacaccaaagagacaaggagtagcatcattacctcaagcaatattgccagagaaaatcttgacacagagaagacaagctcagtgcttaatgtgaaaatttatctgcaca

SEQ ID NO: 886442 - DNA, 120 bp, Artificial Sequence
  ENSG00000288085_3 (sequence is synthesized)
tacagaaccagtccataatacagcactgttcaccatggtgaagacatggaatcaaccaaggtgattatcaaaagggaagaggaatggattaaaaaatatatggtagatatagaccatgga

SEQ ID NO: 886443 - DNA, 120 bp, Artificial Sequence
  ENSG00000288085_4 (sequence is synthesized)
atcctatgctgccgtaaaagagaacaaaatcatgtcctttgaggcaacagcatggatgcagctggaagccgttatcctaagtgaattaacagaggaacagtaaaccaaacaccacacggt

SEQ ID NO: 886444 - DNA, 120 bp, Artificial Sequence
  ENSG00000288085_5 (sequence is synthesized)
tactatcctcaccatgtgggacacaggatcatttttaccccaaacctcaacatcatgcaatatacccatgtaacaagcctgtacatgtacctcctgaatctacaaaaaaaatgacttttt

SEQ ID NO: 886445 - DNA, 120 bp, Artificial Sequence
  ENSG00000288085_6 (sequence is synthesized)
ttttaagaatttgctgcaatcttggaaaaattcttcttcaaagtcttctaaaagcattttaactttttatttacatttggaaattcaagccatctaaaatgaaatctagcatatggtctg

SEQ ID NO: 886446 - DNA, 120 bp, Artificial Sequence
  ENSG00000288085_7 (sequence is synthesized)
acataggtgccaacattatttttatatacatatccagttaaggtggcattatttattgagaagatgaagcttcctctatggctctacagtttctcctttgtcatagattagttttctcca

SEQ ID NO: 886447 - DNA, 120 bp, Artificial Sequence
  ENSG00000288085_8 (sequence is synthesized)
tttttgtgggtttgtttgtaaaccctgtattctgttccactggtctatttatcaatccttgtttcaatccacactgtttatagtaaagtgttataagatgatttttagctattagtataa

SEQ ID NO: 886448 - DNA, 120 bp, Artificial Sequence
  ENSG00000288085_9 (sequence is synthesized)
aattgctgatttgcaattattcgagactgactttattatttcctgctttgcatttctacatatcttttagaatcagcttgtcatttcccatccccttcaaaaaacactaccatttttatt

SEQ ID NO: 886449 - DNA, 75 bp, Artificial Sequence
  ENSG00000288086_0 (sequence is synthesized)
gggactacaggtgcatgccaccatacccaactcatttttcatattttagtgagctctggcagtctgactgcctcg

SEQ ID NO: 886450 - DNA, 120 bp, Artificial Sequence
  ENSG00000288086_1 (sequence is synthesized)
ctcggcctcccaaggtgctaggattacagctgtaagccactgcacccggccagatactgattttttttaaccctactatttactgggcacatactacacatcaggcggtgacctcagtat

SEQ ID NO: 886451 - DNA, 120 bp, Artificial Sequence
  ENSG00000288086_2 (sequence is synthesized)
gtattttccattgaaaagatcgtttaatcctcaaaatgatttcataaaactgattaaaatccctaatttataagtaataactgagagagatcaagtactccaagaaagaaggaaaaaggg

SEQ ID NO: 886452 - DNA, 120 bp, Artificial Sequence
  ENSG00000288086_3 (sequence is synthesized)
agagagagaagatccttgtgatgatgaaatcccttagactttgccatctcatctttctcctgcctccacacaaggtcgtagaagaaaacaacatggaccacttgccagcgtctctttgaa

SEQ ID NO: 886453 - DNA, 120 bp, Artificial Sequence
  ENSG00000288086_4 (sequence is synthesized)
cagagaagctactgctgtctaaggcattttgttcccatgagggaagagtctgggagagaagcaacctggtggagagtgggcctaagacacggagagaggatgttgatgccgtgagttccc

SEQ ID NO: 886454 - DNA, 120 bp, Artificial Sequence
  ENSG00000288086_5 (sequence is synthesized)
tctttccttcagccagatcaaggtccttgtcacttacagccaacaccacaactgatacaaaagggaaggacacaaaacaattgtggagaaagccgtctggatggagccagcagcttcgct

SEQ ID NO: 886455 - DNA, 120 bp, Artificial Sequence
  ENSG00000288086_6 (sequence is synthesized)
accatcgagtggcatttccagagagcagatgcacgcggaggggtgtagtttgaaggaagacctggcgggatttgctaatgaattggatagcagcgtagtgaaagagaccctcaggaatga

SEQ ID NO: 886456 - DNA, 120 bp, Artificial Sequence
  ENSG00000288086_7 (sequence is synthesized)
cttccggtttttaggctaaggaattgcaagaatggaaccatgaacggagatgttggtttagaccagtcgccctctggaccaagctgctgtgagcatggatttaacaaaatgtcagcccca

SEQ ID NO: 886457 - DNA, 120 bp, Artificial Sequence
  ENSG00000288086_8 (sequence is synthesized)
ctgggtatgattttcaagtatgaattcaaaacctatggtgagtttctaccagtttaatcaaaagtccttttattttgttctgggtaaacacagctacgtctggggtttgcatgcaaagca

SEQ ID NO: 886458 - DNA, 120 bp, Artificial Sequence
  ENSG00000288086_9 (sequence is synthesized)
gtggctttgactttcttttcgtttttttgtaaagcagtattcatccagttatgagaaaaccacttttgcttattgaccttctaaaatgtcggcattgtaaatcaaatcacttgcaaaaaa

SEQ ID NO: 886459 - DNA, 120 bp, Artificial Sequence
  ENSG00000288087_0 (sequence is synthesized)
gtaaacctcaggctactcatcacagtgcagagtgatttcacctaaaggcacaacagcagctgattgccacaatacaaacaagagccgccacttactgacagcagctacgtgccagctctg

SEQ ID NO: 886460 - DNA, 120 bp, Artificial Sequence
  ENSG00000288087_1 (sequence is synthesized)
tgactttgttgtgttttacatgtcagtaaatggcaccctcctatactttgtaatttcaaccagaaaccaaagaaagattctgacaccttattctcagacacattctacaaggtgagtgca

SEQ ID NO: 886461 - DNA, 90 bp, Artificial Sequence
  ENSG00000288087_2 (sequence is synthesized)
cacttatatatcattttaatgggcatttcttgcattattatatatatattttttttgctaatgacattacttgctgtttattttgtgctt

SEQ ID NO: 886462 - DNA, 120 bp, Artificial Sequence
  ENSG00000288087_3 (sequence is synthesized)
ttttttgctaatgacattacttgctgtttattttgtgcttattttagactatggaaattaggttagacaaaaggcaaattccagcagttttcttattcgagttaaaaatgggtagtaagg

SEQ ID NO: 886463 - DNA, 90 bp, Artificial Sequence
  ENSG00000288087_4 (sequence is synthesized)
atagtcgccggccatcagaagttgacagtgaccaattgagagcaatcatcaaagctgatcttccttttttttttttaaattatactttaa

SEQ ID NO: 886464 - DNA, 75 bp, Artificial Sequence
  ENSG00000288087_5 (sequence is synthesized)
gtacctattaacatcttcttacaactacttgggaagttgccaaataactcaacgttgaccattctacagttattt

SEQ ID NO: 886465 - DNA, 120 bp, Artificial Sequence
  ENSG00000288087_6 (sequence is synthesized)
gttgccaaataactcaacgttgaccattctacagttatttggcatttgaagcaaattggagaggtaaaaaagtttgataagtgggtgcctcgtgagctcagccaaaaaaaaaaaaaaaaa

SEQ ID NO: 886466 - DNA, 120 bp, Artificial Sequence
  ENSG00000288088_0 (sequence is synthesized)
gaatcaaatgtcccgctgatccgacaggaggtgaagctcaggcggtaatggctggcctgttgctcacctcctgctgtgcggccaggctcgccacagacctataggatctgccgcccgggg

SEQ ID NO: 886467 - DNA, 120 bp, Artificial Sequence
  ENSG00000288088_1 (sequence is synthesized)
ctggggacgcctgctctagagcactagcctgcaaactttttatttaatggctgcagctccagcatccatcttggattatgaggtaatcttgagaatggaagccaagcccttggaggattc

SEQ ID NO: 886468 - DNA, 120 bp, Artificial Sequence
  ENSG00000288088_2 (sequence is synthesized)
tcaccatccagaagtcataccagtggtgagaacttgtctggaatttgttgaacagtctctacttaccaagaagccagagaaaagtttggctgacctccaagcaagctgcacaagctcatg

SEQ ID NO: 886469 - DNA, 120 bp, Artificial Sequence
  ENSG00000288088_3 (sequence is synthesized)
ctcattaaaggctcataaagatgctattagggattacaaaggatctggccatggtccccatggttctagctgccactggtttcccatagagccctaggctggatacaatctgtagtgtcc

SEQ ID NO: 886470 - DNA, 120 bp, Artificial Sequence
  ENSG00000288088_4 (sequence is synthesized)
ctggaaaagcacaggtggattctgtatactttgtggtctgaatattcttcacctaatgacaacagatgtggtaggtagaataacactccctcctaccaaaaacaacaacaacaacagcaa

SEQ ID NO: 886471 - DNA, 120 bp, Artificial Sequence
  ENSG00000288088_5 (sequence is synthesized)
caaaaacccatagatgtctaccttctaacctacggaacctggtaatacattaattacagggtaaaatggtattaagattgcagtggaaatgaaagttgctagtcattttaccttaacata

SEQ ID NO: 886472 - DNA, 120 bp, Artificial Sequence
  ENSG00000288088_6 (sequence is synthesized)
gcaaagtaatcccagattatctcagtggacccaatgtaattactaggatccttaaaagtggaagacagaattgaaagagagaactatgcagtatcattaaaacttcttggtctgatgtta

SEQ ID NO: 886473 - DNA, 120 bp, Artificial Sequence
  ENSG00000288088_7 (sequence is synthesized)
ctgactttgaagatggaggaagggggccatgagtgagctaaggaaagaaggtggccctaaacaagctggaaaaggcaagaaaacagttcttgtccaatggagtaaatcccatgacataaa

SEQ ID NO: 886474 - DNA, 120 bp, Artificial Sequence
  ENSG00000288088_8 (sequence is synthesized)
tagcaagcacgagaatagtgttacaaacagtgttggaaatttcctaatccgtatgcttcattttgaggctattattcaccgctgatgttgtttccagtccttgactgctctctgaagctt

SEQ ID NO: 886475 - DNA, 120 bp, Artificial Sequence
  ENSG00000288088_9 (sequence is synthesized)
cacatttgaaaaattattatagctacagtagcacatggtcaatctcatgtttgtttgattaaaatattgtagagaccaacatgcaggagctagcaaagtagtaatcatctattctgaggt

SEQ ID NO: 886476 - DNA, 120 bp, Artificial Sequence
  ENSG00000288088_10 (sequence is synthesized)
caagcaggataactactcttcctaagaatatttcgtcccttgaaagaagttctggcaaggtaggtggttggcaacaaatagtgacccttacatggtgatcctgaaatctgtctctaattt

SEQ ID NO: 886477 - DNA, 120 bp, Artificial Sequence
  ENSG00000288088_11 (sequence is synthesized)
ctgctctcctttattttatcagtgagacaatgatgaaatctcatatttcataagattttaaggatgttgccacttaaaggttttgtgaaactaaatgtattcacaacacagttttagttt

SEQ ID NO: 886478 - DNA, 120 bp, Artificial Sequence
  ENSG00000288088_12 (sequence is synthesized)
atgagtttgaattcacactcttgaacataaaatctaatcctaatgtacagtctttctactcctaaaattggaaggagtataacatgttccaaattacaaataacatacattacaaattac

SEQ ID NO: 886479 - DNA, 120 bp, Artificial Sequence
  ENSG00000288088_13 (sequence is synthesized)
atatattacaaacacaaataatttttcaatttaaatatgtctcaagagcattttttatggtttccttatcttctttcaatataatgtgccttggtaataaaatagagaagtatctacata

SEQ ID NO: 886480 - DNA, 120 bp, Artificial Sequence
  ENSG00000288088_14 (sequence is synthesized)
actataaagggaaatcaatccatatggctatgacaaaatagagaagtatctacataactataaagggaaatcaatccatatggctatgataatatagattattatcataatattttgact

SEQ ID NO: 886481 - DNA, 120 bp, Artificial Sequence
  ENSG00000288088_15 (sequence is synthesized)
gcaaactttttatttaatggctgcagctccagcatccatcttggattatgaggtaatcttgagaatggaagccaagcccttggaggaagaagcccaatctactttagcatgaatgccttc

SEQ ID NO: 886482 - DNA, 120 bp, Artificial Sequence
  ENSG00000288088_16 (sequence is synthesized)
aagtggagttaatattctctatcaaatacgagctttgaatcttaccaggattctcaccatccagaagtcataccaggtaacgaggatgaacatcagctcctttctcatttcctaaccaat

SEQ ID NO: 886483 - DNA, 120 bp, Artificial Sequence
  ENSG00000288088_17 (sequence is synthesized)
gctgaactgcaaatctcaccctccctctgaatatcctttagaaacaatgtgaaaaataaatatcatcctggaacagtcatgttcaaaggccaaggactggttttggtgtgaaactttgcc

SEQ ID NO: 886484 - DNA, 120 bp, Artificial Sequence
  ENSG00000288088_18 (sequence is synthesized)
gaagcacgaatctttagtgatattagggatctgggaagtcatctagatcagtcccttccttttattggaaagaaaaccaaggcccgggcattaaatgtgtcattcaaagtcacagaggct

SEQ ID NO: 886485 - DNA, 120 bp, Artificial Sequence
  ENSG00000288088_19 (sequence is synthesized)
cttcagagaagaagcaagaatggcaatctcagatcaatggatgtgaacactttgggtcacatctgaagagcaaattctcttgctaacctttctccctagtctgtcacccttttttctagc

SEQ ID NO: 886486 - DNA, 120 bp, Artificial Sequence
  ENSG00000288088_20 (sequence is synthesized)
ttacactcctaccgtgtgccaagataaatttaaatacattaatatttaatttacacaaccattttacaaggtagagacagtgggagaacagccttgaagaacaaaaaaaagaggtaaatt

SEQ ID NO: 886487 - DNA, 120 bp, Artificial Sequence
  ENSG00000288089_0 (sequence is synthesized)
gtgagtgtagctaacttaggggcaatatctttgattttaaatgctgcagagtggaaaaacatgtttgagttgatgcagaacccacagctcactattgaacaatcgtggaccggactgact

SEQ ID NO: 886488 - DNA, 120 bp, Artificial Sequence
  ENSG00000288089_1 (sequence is synthesized)
ctggaacctggggaggagctgctggctcctaccgtgcctgataaacagctctcacctgactgacaaagggttgcttggtttgtggatggcagttccaaggtgaatggacaacatcctgtt

SEQ ID NO: 886489 - DNA, 120 bp, Artificial Sequence
  ENSG00000288089_2 (sequence is synthesized)
cagaaggctgctactctgattgtaaagtgtacttttgtgaacagaatttacctttctctctaattgagttctccaaaatgtggaaattacttataaactggaatcatgatatcctgaaga

SEQ ID NO: 886490 - DNA, 120 bp, Artificial Sequence
  ENSG00000288089_3 (sequence is synthesized)
ctaaagatgattcacctaaggcctgtatagctccctaatttgaaatcccactggaccctatctgcttttcattgccaatgctgtgctgctaaaactatccaagcatgctcccagagacta

SEQ ID NO: 886491 - DNA, 120 bp, Artificial Sequence
  ENSG00000288089_4 (sequence is synthesized)
tcaccaaaggggtgggcttgggattgtaagggccagtttctggcttctgaccagaggctgcacttcccagcctgtcagagtgaccaccctgcaggctgcaacgtgcatgagaaatagagc

SEQ ID NO: 886492 - DNA, 120 bp, Artificial Sequence
  ENSG00000288089_5 (sequence is synthesized)
cgttcttcagctgacactacaaatatatgcaaacaacaacaacaacaacaacaaccctgcttcaattgtgaaaaagtaacatatgaggcatcttaggtcgtctgtacttaacttttcttg

SEQ ID NO: 886493 - DNA, 120 bp, Artificial Sequence
  ENSG00000288089_6 (sequence is synthesized)
gaggcatcttaggtcgtctgtacttaacttttcttgaagttcatgttgcttgctaagcatagtgtattaacccattcttctgttgctatgaaggactacctgagactgggtaatttataa

SEQ ID NO: 886494 - DNA, 120 bp, Artificial Sequence
  ENSG00000288089_7 (sequence is synthesized)
tgtacaggaagcatggctggtgaggcctcaggaaacttacaatcatggaaaaagggtaagagaaaggaggtatgtcttacatggcttcagaatgaggaagggagtgaagggggaggttcc

SEQ ID NO: 886495 - DNA, 120 bp, Artificial Sequence
  ENSG00000288089_8 (sequence is synthesized)
acccacttttaaacaaccagatctcgtgagaagtcactcggtatcatgagaacagcaagggagaaatctgcccccatgatccattcacctcccaccaggccgttcctccaacatctagac

SEQ ID NO: 886496 - DNA, 120 bp, Artificial Sequence
  ENSG00000288089_9 (sequence is synthesized)
catttcacatagtgagttagagccacaaagaacagtttaataaatttagagaaaaacaccttttttaagacccctctgagttgctagatcacatcatatacaggcaaggtgaaataaaac

SEQ ID NO: 886497 - DNA, 120 bp, Artificial Sequence
  ENSG00000235262_0 (sequence is synthesized)
ccccactccacatctgcctcatagggcttccttgccttccttcatctggccttattgagggcagcctcttagctcagccatagtcttaggttttgggtctctgtggtgggattaggctgg

SEQ ID NO: 886498 - DNA, 120 bp, Artificial Sequence
  ENSG00000235262_1 (sequence is synthesized)
gcagagctttgggagaaaggagcaggagattcagcctttgcttctgtcctctaagagctcccagaccacctggagaggtaagcatcataattagactatatgtggtgacatataaacaga

SEQ ID NO: 886499 - DNA, 120 bp, Artificial Sequence
  ENSG00000235262_2 (sequence is synthesized)
ggctaaattgtgtgttagaaactctgagatatagaagttcagaggagaggaaaatagctaagggtaataatcagggaaaatgtcagaaatgagacttgaaggataggaatattaagaaaa

SEQ ID NO: 886500 - DNA, 120 bp, Artificial Sequence
  ENSG00000235262_3 (sequence is synthesized)
tttttttttcttttttagaaagtttgaggcatgagccaccatgcccggccctgttttccatctttcaaggtactggaatattcaatgccattttcccagccttacagttctagtctgggc

SEQ ID NO: 886501 - DNA, 81 bp, Artificial Sequence
  ENSG00000235262_4 (sequence is synthesized)
ttcaatgccattttcccagccttacagttctagtctgggcataaaaaaccttctctaagcaccctgcatagaaccacattt

SEQ ID NO: 886502 - DNA, 120 bp, Artificial Sequence
  ENSG00000235263_0 (sequence is synthesized)
cggcccctcatgggacagactgtacggcccaggctcctccgggcctggccagcgtggttatttataagccctggctgcctccagtgtgcctggatcagactggcttgtttgggtcaccgg

SEQ ID NO: 886503 - DNA, 120 bp, Artificial Sequence
  ENSG00000235263_1 (sequence is synthesized)
tgccaagttttttctttctttttctttttttccaataagaatctacgtctgagcatggacggaatcccagaatcaaatcactggatcaatacttggtcaccaaacacattcgagacctca

SEQ ID NO: 886504 - DNA, 120 bp, Artificial Sequence
  ENSG00000235263_2 (sequence is synthesized)
cccatggcttgtcacactctaccagccttattcttaacctctctgcctgatgcctcttgacccacattcgactttgaaaaagttttcgcacttggttcatcggaaaaagccacacacagc

SEQ ID NO: 886505 - DNA, 120 bp, Artificial Sequence
  ENSG00000235263_3 (sequence is synthesized)
tgcccggaggactctgttaatcagtagctggttgcttctggcccagtgggcaacatcagaggcagaaagtacagtacagagagaaccgcaggccagcagttgcatctgaacccacgctct

SEQ ID NO: 886506 - DNA, 120 bp, Artificial Sequence
  ENSG00000235263_4 (sequence is synthesized)
tcctcccagccctttcccttgtcttgactcacaacctagtgtcctcagtatcgcccagcacgtgaggcagccggttcactccagccttgaccagggccatcgcgggatcagagcctcctc

SEQ ID NO: 886507 - DNA, 120 bp, Artificial Sequence
  ENSG00000275645_0 (sequence is synthesized)
agcgcagccaagcaacaacaacaacaaaaaaaggcgaggaggtagacccacttgagatggttctgttgcggagagtctctgaaatcagaaagcgccagtccgcaaaaacgaggaaacccg

SEQ ID NO: 886508 - DNA, 120 bp, Artificial Sequence
  ENSG00000275645_1 (sequence is synthesized)
cactgaaagaactcaaagaagtcctgtgtggctggagtatagctgcgggttagtgctggcaggtgaagacagagaagcaaacccaggtcaggtccggttgggcctcgggagggcctccgt

SEQ ID NO: 886509 - DNA, 120 bp, Artificial Sequence
  ENSG00000275645_2 (sequence is synthesized)
gtggagtctgcacttcattctaagtgtatacctaacccatcgccacgatttcccctccttcacactaccctgctacgtctccttattaggcgtaataaaattatgtggctttgtaagaaa

SEQ ID NO: 886510 - DNA, 120 bp, Artificial Sequence
  ENSG00000268129_0 (sequence is synthesized)
gtaatttcctcagccgcgctcactccgctagttttcctgggagtcacggtgcttggtcgcgttattgggtccgggaattcagagaatcagggccagctgatacttcaccctcttatccca

SEQ ID NO: 886511 - DNA, 120 bp, Artificial Sequence
  ENSG00000268129_1 (sequence is synthesized)
acgccaacccttgatagatgcgaaccagtcgtatttcctttgtgggaaaggagtcgctttttaaagacgtgcactggccatctagggaggagcttttacttcaactcaaaataggactgg

SEQ ID NO: 886512 - DNA, 120 bp, Artificial Sequence
  ENSG00000268129_2 (sequence is synthesized)
aacttgcagtctgctcatcttaagatggtgaatgttgagatagggttgctcccgaaaagccgagaagaggagccgtttgacccaacttgagggtgatccgatagacactctttagggcgt

SEQ ID NO: 886513 - DNA, 120 bp, Artificial Sequence
  ENSG00000268129_3 (sequence is synthesized)
ctgcagagtgggtgcgcgtggagacagtcaataagagaaaatcgtaaatacagatggtattctaaatctagcatgcatgtaaagttgtgtgacattttaaagattacattttacacttta

SEQ ID NO: 886514 - DNA, 120 bp, Artificial Sequence
  ENSG00000231944_0 (sequence is synthesized)
tcctgtgcctcctgtagagcccagacactgcttgtcgaacaaagaatgcagaggaccgtagagagcagtctacagcctgagacccatcattatggcctggcacatgatgattacacagtc

SEQ ID NO: 886515 - DNA, 120 bp, Artificial Sequence
  ENSG00000231944_1 (sequence is synthesized)
ttttaaatttaaaaaaatgaagatgttgaatggcacagatgaattctcttcaattctctgacattatttctcagaaagaaaccaagatgaagactggagctcagattgcctaagtcttgg

SEQ ID NO: 886516 - DNA, 120 bp, Artificial Sequence
  ENSG00000231944_2 (sequence is synthesized)
ttgttttcttaatattattttcttggtcgttgaagaggatgcagctacctttgcgtctcaacagttctataaaggatgctggtttactgaggggaagtgccttaaaagttggcttaaagg

SEQ ID NO: 886517 - DNA, 120 bp, Artificial Sequence
  ENSG00000231944_3 (sequence is synthesized)
catctgctgactctgacctcattttgcccaggagttgggggagggaggaagcaacaggctctgaaacagtggccacagctataaaaatcaacagataaagtctttactgtgtctagtcca

SEQ ID NO: 886518 - DNA, 120 bp, Artificial Sequence
  ENSG00000287308_0 (sequence is synthesized)
aaagctgtagttacggctggtgcaacaggggtcagttactcagcgtccgtgagctgggctttggatgaagagaagtggttggaaggagggaagtggagcatcatgaatggctggacaaat

SEQ ID NO: 886519 - DNA, 120 bp, Artificial Sequence
  ENSG00000287308_1 (sequence is synthesized)
gaacacagcacctgccatgtgccagccctcagattgctgcagagggcacctgaagcatgattttgccttaccttaaaatgtcacctgtaacagatctacgagtcctctgccttatcctct

SEQ ID NO: 886520 - DNA, 120 bp, Artificial Sequence
  ENSG00000287308_2 (sequence is synthesized)
gccaaggactgacagttatgagggcataaaccctgcagctttcctgccccctgatcagacacctgtgggcataagcctcactgtccagagctccccgtgggattgagtgggcataaccct

SEQ ID NO: 886521 - DNA, 120 bp, Artificial Sequence
  ENSG00000287308_3 (sequence is synthesized)
gcctgggtctttgttgatattgcagctggttgggctttcatccctcctcactccccaacagtggggttttcttgtcaatgctctctaagaaactcctttgagatgtcgcctcagggtcca

SEQ ID NO: 886522 - DNA, 120 bp, Artificial Sequence
  ENSG00000287308_4 (sequence is synthesized)
cttctgaggaaacccagactaagacagtgctattttgattcctcataaatattttcaatcctccaattttgattcatgaaactcagaaaatgaatcttaagtaaatgtctgctattgtca

SEQ ID NO: 886523 - DNA, 120 bp, Artificial Sequence
  ENSG00000287309_0 (sequence is synthesized)
gattacaggtgtgagccactgtgcgcagcctgagaccatatctcattgcagttttaataatagctgtgtttaacaacagacttacaaaattcctgagaatattcatgggcaagcaggcgc

SEQ ID NO: 886524 - DNA, 120 bp, Artificial Sequence
  ENSG00000287309_1 (sequence is synthesized)
tccctgcagcacacaactgggaggtggatgcaggctcctcctcacctccatctttgaagtcctgtttttcttcgatcacttgggattttgaagtctttcatcatgccatgccaaccgtcc

SEQ ID NO: 886525 - DNA, 120 bp, Artificial Sequence
  ENSG00000287309_2 (sequence is synthesized)
cttggtggctccactcagtgcttattctgaacactaaattctttattctctgacatataactggcacaatgctatgtcataggcatttacaggtgggaggatgcagtgttttatattaaa

SEQ ID NO: 886526 - DNA, 120 bp, Artificial Sequence
  ENSG00000287309_3 (sequence is synthesized)
taccttccagaactcaaaattgaatattgttatgtggccaccctgaccctgggagttctctctgaccacctatctccatggagcttctctttgactcactgaccactccctcttttttct

SEQ ID NO: 886527 - DNA, 120 bp, Artificial Sequence
  ENSG00000287309_4 (sequence is synthesized)
tcttgtttgttcctgactaaaaaaatcctatttattcattatacaagaaatagcagtcagcacttgcccccaatctccttccaaaacatgtccacataccttgaactttcacatctaaag

SEQ ID NO: 886528 - DNA, 120 bp, Artificial Sequence
  ENSG00000287309_5 (sequence is synthesized)
aagttcattgaggtctttgttttatttgtttgaaaacaaataatgttcagcctaagaggaatctggagctatttggtacattaatattaatattgccaatgcttactatggcagcaagta

SEQ ID NO: 886529 - DNA, 88 bp, Artificial Sequence
  ENSG00000287309_6 (sequence is synthesized)
ttaatattaatattgccaatgcttactatggcagcaagtaaagataatgccatacattggtttcatagaattgctgcctcagcatcca

SEQ ID NO: 886530 - DNA, 120 bp, Artificial Sequence
  ENSG00000287309_7 (sequence is synthesized)
tacaggcgtgagccaccgctcctggccggcatccacttttaggcctgatataagttgtctgaaacccagtggtgtcccatcaccttcggcctggttaagactgtcccgccatgtgtcatg

SEQ ID NO: 886531 - DNA, 120 bp, Artificial Sequence
  ENSG00000287309_8 (sequence is synthesized)
tttgctatacagcccacgtgttcctcatctcactgatgcaaaccccaacacaccccacagctgctggccatgattgaacctaatgatcaacaccagagtcctgtcaataacgtccccctt

SEQ ID NO: 886532 - DNA, 120 bp, Artificial Sequence
  ENSG00000287309_9 (sequence is synthesized)
tgcacgtgtttcctctaaaccaatcaatgcacaacctcccctgagggagcatgcctgagggccctagtaaagccccagttccagaagctctccctctttggcttcgactccctgcttgag

SEQ ID NO: 886533 - DNA, 120 bp, Artificial Sequence
  ENSG00000287309_10 (sequence is synthesized)
atacctgctgcctccagacctcccgtcgacagcaccctggcctccctggaatctatctacaacagagtctgaacattcttcctgcccagttctgctgcttctctcctctatctttcacaa

SEQ ID NO: 886534 - DNA, 120 bp, Artificial Sequence
  ENSG00000287309_11 (sequence is synthesized)
gcattgcccctgaataaactgcttgcactcatgtctccatctcaatctctacttcctgggaaatgcacttgccacaggatatttgagaataattacaagacaaaattcacaggaatgttt

SEQ ID NO: 886535 - DNA, 120 bp, Artificial Sequence
  ENSG00000287309_12 (sequence is synthesized)
gactgggcataaaataaggatgattcaaagacaacactggctttctgcttgaatgttacttcggctcaccaaaacagggtcacaggaaagagaatgagtctggacctgggaggtttggga

SEQ ID NO: 886536 - DNA, 120 bp, Artificial Sequence
  ENSG00000287309_13 (sequence is synthesized)
tgtggtgaaactgattcctgtggggtgtgcaatagactggccctgtaagcaattataaacataggctgagggctcagaagagagctcccaggtctctctatatgtgttaaggaggaatat

SEQ ID NO: 886537 - DNA, 120 bp, Artificial Sequence
  ENSG00000287309_14 (sequence is synthesized)
cttgtagttacaagcatttagctcactagccctgattaatagtggtacaactgtaaactgcaactgttacacaattctaccattaacatgaatatttgtggttactacttgtaattatat

SEQ ID NO: 886538 - DNA, 120 bp, Artificial Sequence
  ENSG00000287302_0 (sequence is synthesized)
ggcattgtaaactgtcacggcgctggtgggagtgtagcagttgaggaggaccacaggtcactctcatggccattttggttttggcctctgacattatgggctgttaatatctgagacaga

SEQ ID NO: 886539 - DNA, 120 bp, Artificial Sequence
  ENSG00000287302_1 (sequence is synthesized)
acaaagacatcaggaatatgatccatacacttcagacagcttcttcattgcatgaaaatggagccaaacaagcaaagatctggtatgacctcagctttgctcctggaatcaccttctgcc

SEQ ID NO: 886540 - DNA, 120 bp, Artificial Sequence
  ENSG00000287302_2 (sequence is synthesized)
cagttcacacattcctggcatgtctttcattctcttggggaagagagcaagtggagttgccaggttactgttgatgaagggcaatttttagaagcagaaagtcagcatcctgtgctggat

SEQ ID NO: 886541 - DNA, 120 bp, Artificial Sequence
  ENSG00000287302_3 (sequence is synthesized)
gattcatcttgccctctggggcatgctctgaatgttaaacagtaactatttgttggtgattaatctgttggattttgctcaacccctaattcgagtgtccatgatggatagatcactttt

SEQ ID NO: 886542 - DNA, 120 bp, Artificial Sequence
  ENSG00000287302_4 (sequence is synthesized)
ttctttacactacttgtcaagtataaaacagatggataacatttcccttccaactgattcagaaaaatatgttttttggtattaaactgtaaaaacaaaatgtatgtttactaaattagg

SEQ ID NO: 886543 - DNA, 120 bp, Artificial Sequence
  ENSG00000287302_5 (sequence is synthesized)
caactttctagatcaaccattacaatatgaaatttgcccctaaaccctgaaagttttggaatatgagaaacgggaccgagaaatgtgtgagtcccatttttcagccttttcctccttttg

SEQ ID NO: 886544 - DNA, 120 bp, Artificial Sequence
  ENSG00000287302_6 (sequence is synthesized)
ctcagcagacactgaatataatccacaggcagtacagacttattcttccaaaggatttattatgtaatcttgtacaagcctcaacttttctcatttataaaatgggaaaaatatcttcct

SEQ ID NO: 886545 - DNA, 120 bp, Artificial Sequence
  ENSG00000287302_7 (sequence is synthesized)
tacccaattgttgagtgaactgtgaaacatccatatgtattattgtgtatcagtacatatatgctatttttgtagtaggcctccagaaaatggaggctatatactgtttcatttcttaaa

SEQ ID NO: 886546 - DNA, 120 bp, Artificial Sequence
  ENSG00000287302_8 (sequence is synthesized)
aggatactttcacttggttcaaagttcaaaagatagttatatattgtatttcttgaaatcttttcacttctgttcccagccacacaatttccctccatgatccatgtttcttttgcatct

SEQ ID NO: 886547 - DNA, 120 bp, Artificial Sequence
  ENSG00000287302_9 (sequence is synthesized)
tgccagatattttatgtacgtctaaaagtaaaaacgtattttccccactttaacaattttacataaaatcacactattgcttgttttgccttttaaaataaaaatacatttttgaaattg

SEQ ID NO: 886548 - DNA, 120 bp, Artificial Sequence
  ENSG00000287303_0 (sequence is synthesized)
agcacttctctgtgggtaacatcagaaaaacatgccccagctctgctcagctgaacgctcacagccacatacttgggaagaatcggccctggaagatgagtgaggacagaggacaaagga

SEQ ID NO: 886549 - DNA, 120 bp, Artificial Sequence
  ENSG00000287303_1 (sequence is synthesized)
gcaagcctctgccacccttgctaggagaacaagctgtgaattactaatgggcaggcgtgcaggcacagtgagtgtattatggccaagtcagaatagtgaatgcaacagccatggggcctg

SEQ ID NO: 886550 - DNA, 120 bp, Artificial Sequence
  ENSG00000287303_2 (sequence is synthesized)
gacccatttgcacccagcacagtgaattcactgcggggaaatccaccaaatctccctcctgccaacgttttcaagactctccctccagatgctggatgacatgatgagcctggctgggag

SEQ ID NO: 886551 - DNA, 120 bp, Artificial Sequence
  ENSG00000287303_3 (sequence is synthesized)
cccactctctgctccatcggcccaccctccctttgtgttgtctgtgggtggagtaagctgttgccaaccgtggccaaatgaaaagcccgatgccctcccttctctctaaaagctatttat

SEQ ID NO: 886552 - DNA, 120 bp, Artificial Sequence
  ENSG00000287303_4 (sequence is synthesized)
tgttttccgaggagccagccatcaaagagatctcctgtgccccacgcactcctcccaactcccagtttttgactgaaaaaatgctaacatccgaccagataccagaaaaacatcctgaaa

SEQ ID NO: 886553 - DNA, 120 bp, Artificial Sequence
  ENSG00000287303_5 (sequence is synthesized)
gacaatgcctggactcttatttcctagggagcaggaccagggcttattaccacatcagcctatcttgtttttactgctgtgatgttgctgacaacatagctgaaatctccaacgtctcct

SEQ ID NO: 886554 - DNA, 120 bp, Artificial Sequence
  ENSG00000287303_6 (sequence is synthesized)
tgttcctaccagcattgattggttatatttaagccttcgtccagacccacttattctccgtttcatctcattttcttccctggctcagcgcggtgccaagaattctctggctttacaccc

SEQ ID NO: 886555 - DNA, 120 bp, Artificial Sequence
  ENSG00000287303_7 (sequence is synthesized)
atgagattcaagaaacaaaatgtgtgcagagaagatgcaaatgggtcacgttgatctcccagcaggggttattcagataatccagaatattcttacacaaagtttttaatattatcaaca

SEQ ID NO: 886556 - DNA, 120 bp, Artificial Sequence
  ENSG00000287303_8 (sequence is synthesized)
aaatgcaagaaaaaatttaaaaaattattgcaaaaaagcatgaggtccaagaacacatctaaagaccccagttggagtgaaatgggtatggggcatggggaggaaggatggaggcaactg

SEQ ID NO: 886557 - DNA, 120 bp, Artificial Sequence
  ENSG00000287303_9 (sequence is synthesized)
acacaggaagagacattgtctttcttctgaaggcaatgaggacggctaaccctcacaatgcggtttatattactcagcatcttctttcagtctctctccctccttccttccctctccctg

SEQ ID NO: 886558 - DNA, 88 bp, Artificial Sequence
  ENSG00000287303_10 (sequence is synthesized)
cttctttcagtctctctccctccttccttccctctccctgtctctctctctcccttctttcattctttctggcgcagtggcatgatct

SEQ ID NO: 886559 - DNA, 120 bp, Artificial Sequence
  ENSG00000287303_11 (sequence is synthesized)
atcctcccacctcagcctcccaggtagctacgactataggcacacgccaccatgctctgctaatttgtgtatcttttttcgtagagatggggtcttgccatgttgcccaagctggtctca

SEQ ID NO: 886560 - DNA, 82 bp, Artificial Sequence
  ENSG00000287303_12 (sequence is synthesized)
cattttctttgtatacatatttagaaaggctttaaatcctcgactcataattgccctaaattttgctctaaattttttttaa

SEQ ID NO: 886561 - DNA, 68 bp, Artificial Sequence
  ENSG00000287303_13 (sequence is synthesized)
ttttctttgtatacatatttagaaaggctttaaatcctcgactcataattgccctaaattttgctcta

SEQ ID NO: 886562 - DNA, 120 bp, Artificial Sequence
  ENSG00000287300_0 (sequence is synthesized)
aaatataaagtaggttctgagtttttaatttctcgctgaaataaaaacgttttgcttcttcctctgacctacttagactttaccaagcagacgctgctggaaaaacaagaactttccttg

SEQ ID NO: 886563 - DNA, 120 bp, Artificial Sequence
  ENSG00000287300_1 (sequence is synthesized)
tctgctgttaagatgccagaaaaatgatgaaaagagcacagtaccgaaaataagaagagagtaaaaccataataagaaagacaaggtgctggagggtgcacggtgattaggaactggcat

SEQ ID NO: 886564 - DNA, 120 bp, Artificial Sequence
  ENSG00000287300_2 (sequence is synthesized)
ggatccccagtgcagcacaactgcttcacagaaaagtgtctgtgtgtctggagttggttccttcccatgggttcattcgtggtctcgctgacttcaagaatggagccgtggaccttcgca

SEQ ID NO: 886565 - DNA, 82 bp, Artificial Sequence
  ENSG00000287300_3 (sequence is synthesized)
ttccacagcatggaaggggacctgagtgggtgccgctgctggctggggtggccagcttgtattcccttatttgtccccgccc

SEQ ID NO: 886566 - DNA, 77 bp, Artificial Sequence
  ENSG00000287300_4 (sequence is synthesized)
gattggtctattttacaaacctctagctagctacagagcgctgattggtgtattttacaatcctaactacagaatgc

SEQ ID NO: 886567 - DNA, 120 bp, Artificial Sequence
  ENSG00000287300_5 (sequence is synthesized)
cctctcatctggactgttcttcacttggtccctgtccctgcttctcctcactgggcagggcctcctgacctgggactcccgcataactactctgccctgcctgggcacttcagtcagcag

SEQ ID NO: 886568 - DNA, 120 bp, Artificial Sequence
  ENSG00000287300_6 (sequence is synthesized)
cagctctgcatttgtctaaggaggaaatcctggagtcaacccacaacccctccaccattgcacctgtagtggtaccaccctaaccaccctcaggctaaggaaggaacaaagggcttagtt

SEQ ID NO: 886569 - DNA, 120 bp, Artificial Sequence
  ENSG00000287300_7 (sequence is synthesized)
cctgtgctagcacctcctgcactgtgtagcccccatacagagtcctgtctctcttctctgtgaacccccaccctcaactcttcaccaggtagggcccctgggtcaggactgcagatcagt

SEQ ID NO: 886570 - DNA, 120 bp, Artificial Sequence
  ENSG00000287300_8 (sequence is synthesized)
cgccccaaccacagctaaggatgcccactgggagtggctctgagtttcccagaggaggggctcccagagggaaccaacacccctctgccatagcaatggttctgcctctgctgccctcca

SEQ ID NO: 886571 - DNA, 120 bp, Artificial Sequence
  ENSG00000287300_9 (sequence is synthesized)
gcactttcagcacaccacagtcaccatcggaagaaaagcccagtctctcctccctgtgagccttccaccccctcttcaccaagtggagtgcccaactcatgccagcagtgcagccaaccc

SEQ ID NO: 886572 - DNA, 120 bp, Artificial Sequence
  ENSG00000287300_10 (sequence is synthesized)
accccctggctgaatactcccattggcagtggttctgcttctctgaggtagaattcccagagataactgaaaggccctttgccactgccgctgctgtggtacttctcttgcttccctcag

SEQ ID NO: 886573 - DNA, 120 bp, Artificial Sequence
  ENSG00000287300_11 (sequence is synthesized)
actaaggaaggagcagagaccctgagtgcttcaaccacacctttggtaagctgaagttgccctaaggagaagaggccagtctgtatccctccaggacccacctgctctccctgctcatca

SEQ ID NO: 886574 - DNA, 120 bp, Artificial Sequence
  ENSG00000287300_12 (sequence is synthesized)
ctaccagggcctccccttgcccttgggtccaaagtgtggtggccccatcctgggctgatcacaccgattgatagtggctccacatcagaaagaggtgtgagcctcttgtcaaaagacaag

SEQ ID NO: 886575 - DNA, 120 bp, Artificial Sequence
  ENSG00000287300_13 (sequence is synthesized)
tgaaagacactctgccacagccactgctaaggtcccttcacctgctgcctccaagcttgagagggtacagaaagtttgaactcaccccagaattgtaatgtgcagcccaggagtgccaag

SEQ ID NO: 886576 - DNA, 120 bp, Artificial Sequence
  ENSG00000287300_14 (sequence is synthesized)
ccgagatatgcagccagcactcaagtgggagaggagaccacccattcacagcactgagagggagcccagctgcaatcctgaggaaatacagagaaatcatgtggctaagcaagagcctac

SEQ ID NO: 886577 - DNA, 120 bp, Artificial Sequence
  ENSG00000287300_15 (sequence is synthesized)
ctaccagccattacacttaagcaccacctattggatgacagtccaaaacttcaacaccaataacacttagctaatataccctcttgtgaaaccagtgacaagaattcagctacaaataaa

SEQ ID NO: 886578 - DNA, 120 bp, Artificial Sequence
  ENSG00000287300_16 (sequence is synthesized)
gaccctgcacaaagacttgggcctctgaaaacatccagaaaagaagtcaattggctgtactcaatatacattgcagttaaaggaacaccagtgcacacagttgagaaagaaccagtgtaa

SEQ ID NO: 886579 - DNA, 120 bp, Artificial Sequence
  ENSG00000287300_17 (sequence is synthesized)
gaactctggcaactcaaaaagccagagtgtcttctttcctccaaatgaatgcactagttctccagcaagcattcttaactaggcttgctgatggaaatgatggaaatagaattcagaata

SEQ ID NO: 886580 - DNA, 120 bp, Artificial Sequence
  ENSG00000287300_18 (sequence is synthesized)
tgaataggaagaaagatcattgagattcaggaaaaagtaaaaacccaatccaagaaatgtaaggattataataaaatgatacaggaactgataggtgaaatggccattataaaaaagaac

SEQ ID NO: 886581 - DNA, 120 bp, Artificial Sequence
  ENSG00000287300_19 (sequence is synthesized)
caaattgatcagatagagctgaaaaacacatgacaagaatttcataatgcaatcacaattattaacagaagactagaccaagctgagaaaagcatctcagtgcttgaagaccagctctct

SEQ ID NO: 886582 - DNA, 120 bp, Artificial Sequence
  ENSG00000287301_0 (sequence is synthesized)
acccatggtgccatgtggttagtataaatagcacagaagctgcagccaaaaggagagcagcgcatatattcacagaaagaatataggtgacttaaaacttccccggcagaacttcactga

SEQ ID NO: 886583 - DNA, 120 bp, Artificial Sequence
  ENSG00000287301_1 (sequence is synthesized)
aacagctctggaaagagcggtgacagttaaccagatttgtagaccttcccacgtacccttatggacagagtcaaacatggagctgttggcaaagcagaaatgtggtctgcagagtttgag

SEQ ID NO: 886584 - DNA, 120 bp, Artificial Sequence
  ENSG00000287301_2 (sequence is synthesized)
ccccagtgtcacaaagcagagtgtaaaagggtaaataacagcttacaagcagaagtcacgaagatcttactgaaaataaccataacataatctttcatctaaagactttcctggctcctc

SEQ ID NO: 886585 - DNA, 120 bp, Artificial Sequence
  ENSG00000287301_3 (sequence is synthesized)
ctgtatagtgctttactttgctgaacttgcatacacaccaggttaatttatagttggagaaaagccttataactcttaaagccccctaactcactctccagcttccaaggacacaggggt

SEQ ID NO: 886586 - DNA, 120 bp, Artificial Sequence
  ENSG00000287301_4 (sequence is synthesized)
tatgtcaacatgctgggatgctatagggacattaaaatgacaaacgtgctaactaatgtcaatatatggacatggtaatacaaaatttaaaaattaaaaaaaaaaatcccagaagacaac

SEQ ID NO: 886587 - DNA, 73 bp, Artificial Sequence
  ENSG00000287306_0 (sequence is synthesized)
taaccatgagcactagtttgtagttctccttgaagaggtctttgacatcccttgtaagttgtattcctaggta

SEQ ID NO: 886588 - DNA, 67 bp, Artificial Sequence
  ENSG00000287306_1 (sequence is synthesized)
tgctgtgtcccagagaccctggtacgttgtgtctttgttctcattgcagggacatggatgaagctgg

SEQ ID NO: 886589 - DNA, 82 bp, Artificial Sequence
  ENSG00000287306_2 (sequence is synthesized)
taaacactgcttttgctgtgtcccagagaccctggtacgttgtgtctttgttctcaggcaaactgacacaggaacagaaaac

SEQ ID NO: 886590 - DNA, 120 bp, Artificial Sequence
  ENSG00000287306_3 (sequence is synthesized)
caaaagaagatgcaaagaggatggaaaattgaaggttcctatgcctcagaaggccatgaggaaggactctggaagatgtctgaatactagaaaccccgagagccagaagaatgcattcgt

SEQ ID NO: 886591 - DNA, 120 bp, Artificial Sequence
  ENSG00000287306_4 (sequence is synthesized)
ctgtggttcaagctaagtatgggtagtgccaagatggtttctgatttggtctccaccacatacagtgattccaaaggggggtaagacatccttcctcctgccccagtgtcagccctttgc

SEQ ID NO: 886592 - DNA, 120 bp, Artificial Sequence
  ENSG00000287306_5 (sequence is synthesized)
agtctatctcggtctgcttttcaagtacccctaatatcttggcacttcctcatggtgaaaagtctccttcctccccttcctgaacccatccatgtgcccaatgcccaaaggacatttgga

SEQ ID NO: 886593 - DNA, 120 bp, Artificial Sequence
  ENSG00000287306_6 (sequence is synthesized)
gggatgcacttaaaatcaaattcgtccactgtctatttgttgagataaggtgtggtgacaacagcagtccaaggggactactagcagcctcagaatccagccacccagccctagccttgt

SEQ ID NO: 886594 - DNA, 120 bp, Artificial Sequence
  ENSG00000287306_7 (sequence is synthesized)
cagggccactcctgggctgggcacacttgtaggtggggagggaagggcagcattgtcagagaagacagaccaagctgcagctgccctactgggaggctgggaggcctgaatagcttcaca

SEQ ID NO: 886595 - DNA, 120 bp, Artificial Sequence
  ENSG00000287306_8 (sequence is synthesized)
gcgctgggccctgcttgctgaatgggggcttggctcctccctggcggtggtccggaatggatgacattttcattgcaagctaacaaggggagaaatccaattacttcacaaagaggctcc

SEQ ID NO: 886596 - DNA, 120 bp, Artificial Sequence
  ENSG00000287306_9 (sequence is synthesized)
ggagaaatccaattacttcacaaagaggctcctgaaggggcctcacagcctggagaaagaaggggaggagaagagggggagagggaaggaagaaggggagtgtgtgtgtgtgtgtgtgtg

SEQ ID NO: 886597 - DNA, 120 bp, Artificial Sequence
  ENSG00000287306_10 (sequence is synthesized)
tgtgtagggaggctcccacccagaccaggaaaggaacaaagccctcaggcctccaggacatggcctcctgcatacaggcagggagattggaactggggggcttttaattgatttccagtg

SEQ ID NO: 886598 - DNA, 120 bp, Artificial Sequence
  ENSG00000287306_11 (sequence is synthesized)
ggtcagagggtctgcctggaaactccaggtccctgagagctccaggcaatcaggcttcctccctgtggaacaacctgagtggtgcagaagaggccccagccctatttctctgccccatca

SEQ ID NO: 886599 - DNA, 120 bp, Artificial Sequence
  ENSG00000287306_12 (sequence is synthesized)
gactacagtttccctgacctgagtcatcaaaggcccattatacacttttttacctttgttgcatccacctaaactattaatccctttttgaaacatttatttaaagtgtattatttaagc

SEQ ID NO: 886600 - DNA, 120 bp, Artificial Sequence
  ENSG00000231948_0 (sequence is synthesized)
tgatgggaagcccttggaagctcttgagcggaggagggacatgctctcctgggcttactcctagctgcataggagagtctgagccgggcagggacagagctgtcggggagtcactacggt

SEQ ID NO: 886601 - DNA, 120 bp, Artificial Sequence
  ENSG00000231948_1 (sequence is synthesized)
gatgcagctcccgtggaggaaggggctggcagcacccaagaacacaagcacagatggaggcgtccctctccagtggctggggcaggctctgattccgcctcctgcatttggagcagctgt

SEQ ID NO: 886602 - DNA, 120 bp, Artificial Sequence
  ENSG00000231948_2 (sequence is synthesized)
aagctatcagggcctggctggctggctccaggcctcccaacgtaaccagcctgccctgctatcctggcctgaggctggcattcctcccatggtctctgcagcactcatcatcggcgctcc

SEQ ID NO: 886603 - DNA, 120 bp, Artificial Sequence
  ENSG00000231948_3 (sequence is synthesized)
tgccacagcatggggacctgggcagcctgatggacaaatattgggcagggaggtagggagatgcagtttcctggattcccttccctttattgaataggaatctttgcacctaaacaagtc

SEQ ID NO: 886604 - DNA, 120 bp, Artificial Sequence
  ENSG00000231948_4 (sequence is synthesized)
tgtgtagagtccagattgtgctctttgtccttggtccaggaggtccatctctttgagcatcagtttcctctaatgccaagtggagacaataaattgccctttccagggtcccaacaagga

SEQ ID NO: 886605 - DNA, 120 bp, Artificial Sequence
  ENSG00000287305_0 (sequence is synthesized)
actgagtccccacatgcccagcgtcggacctgaccctcggacaggcgcggccccagacgccggggacagggcagtcaacagaacagacacaactcctcgccttcctagttggggctctgt

SEQ ID NO: 886606 - DNA, 120 bp, Artificial Sequence
  ENSG00000287305_1 (sequence is synthesized)
tttcctgtgtcttccgtgacactgtcttgagcgtgcttgcttatgaaggtttgacacccgtccccaccatacctgcctgccactgccaggatgactggagtctcaggtggctttgtgcca

SEQ ID NO: 886607 - DNA, 120 bp, Artificial Sequence
  ENSG00000287305_2 (sequence is synthesized)
atggagggaaaaagaaagataacaaggaactagacactgtgggtgaactcctggcctcctgctgcgaggcgcctgaggaccctgggctctccctcctcggtttgggcttcagaggaccct

SEQ ID NO: 886608 - DNA, 120 bp, Artificial Sequence
  ENSG00000287305_3 (sequence is synthesized)
gggctctccctcctcggtttgggcttcagaaggtggctccacttctgggtggcagtgacaggcagacctgctgagagcccagagagaaatactaccctgcagggagataaggtcatcaac

SEQ ID NO: 886609 - DNA, 120 bp, Artificial Sequence
  ENSG00000287305_4 (sequence is synthesized)
tattcccataataatgtccactggtcccagtcgagaggcacccactccttttcctcttgtctaacacaggagtctcgagctgcctaaagaaacccatttttgggaagaggattaaaaaca

SEQ ID NO: 886610 - DNA, 120 bp, Artificial Sequence
  ENSG00000287305_5 (sequence is synthesized)
aacaaacaaacaacaaaactgtgctccaaatgtatataaccctgtagattaatgaaacatttgggccaaagttctgtattctcataggcaaagactctcatagtattaatatattcactg

SEQ ID NO: 886611 - DNA, 120 bp, Artificial Sequence
  ENSG00000287305_6 (sequence is synthesized)
attttaaattatttttaacttaaaggttttgttttaatctgctgtgatgaaatcttggatcactatagctgtaaatgagtagatttatctagatatgttaaatgaacaaatgtaaaatgt

SEQ ID NO: 886612 - DNA, 120 bp, Artificial Sequence
  ENSG00000287305_7 (sequence is synthesized)
tcgatacagcacaggtgcttaataagttggcttcagagccgtgtttttccaacatgttctgatgatccaagtttgatacttaagacaattaaaaacaagaaatttaacttagtttcagca

SEQ ID NO: 886613 - DNA, 120 bp, Artificial Sequence
  ENSG00000254046_0 (sequence is synthesized)
atcctcttcttggtggcagctgccacagatgtccattcccaggttcagctgttgcagcctggggctgaggtgaagaagcctgcgtcctcagtgaaggtctcctgccaggcttccagatac

SEQ ID NO: 886614 - DNA, 120 bp, Artificial Sequence
  ENSG00000254046_1 (sequence is synthesized)
ctacgcacagaagttccggggcagagtcaccattaccagtgacaggtccgtgagcacagcctacatggagctgagcagcctgagatctgaagacatggtcgtgtattcctgtgtgagaga

SEQ ID NO: 886615 - DNA, 120 bp, Artificial Sequence
  ENSG00000254043_0 (sequence is synthesized)
aagtaatttcacaaaaagtaaaatgtgataatgtatttttcagcattcatttgaacattcatattataataataaagtgttggattgtcattgaatacaaaatattgtgattattatttt

SEQ ID NO: 886616 - DNA, 120 bp, Artificial Sequence
  ENSG00000254043_1 (sequence is synthesized)
gcaatgatgcaggcaaaggcagtggtttcatcagtcactatctagcattataagaatgacgataaataacaatgaacggagaggattgttaaaagtggttccctctgtggagcaggactg

SEQ ID NO: 886617 - DNA, 120 bp, Artificial Sequence
  ENSG00000254043_2 (sequence is synthesized)
aaaggatgctgtttctgttattcttagtctgttttaatagaagccttttaataatgcttgtctttttaatgaaatgtctatattactctgataaaaataaaaatttgttttagtaaatct

SEQ ID NO: 886618 - DNA, 120 bp, Artificial Sequence
  ENSG00000254043_3 (sequence is synthesized)
gtggctaactattaaataaatggaacagacagtgcagatgatcagccttgtagaactcagcagccatacagccctgttgtcagaaaatattaatatgttttgcagatgaagaatgatgag

SEQ ID NO: 886619 - DNA, 120 bp, Artificial Sequence
  ENSG00000254043_4 (sequence is synthesized)
aagttttctgtgtgggatccttgggtgttgatggaggagaccagccatcaggcaggtggtgacaggccttcaacatcttgttggagtggtgtggcatgttacctcctcatcatcctggag

SEQ ID NO: 886620 - DNA, 120 bp, Artificial Sequence
  ENSG00000254043_5 (sequence is synthesized)
gatcccacatgggcttttttatgctttttcccattaaaattttaaatgtacatacctttgacttaataatgttacttctataaatcgaacctgtaaataaatatgcattgtacttttcaa

SEQ ID NO: 886621 - DNA, 120 bp, Artificial Sequence
  ENSG00000265749_0 (sequence is synthesized)
agaatctgaaaagaaatggcaatgagcagaggtctcccaccctcacgtggaggacagggtccgcaaagatgagtcacattgtagaacttcactattcagagaaagccccttcacatgcag

SEQ ID NO: 886622 - DNA, 120 bp, Artificial Sequence
  ENSG00000265749_1 (sequence is synthesized)
tggctcatctgatcttgtggcccccatccaggaaccaactcagagcaagaagacagcttcaactccctatgccttcatctctgatacgacctgtcaacacgccccactccctggccccct

SEQ ID NO: 886623 - DNA, 120 bp, Artificial Sequence
  ENSG00000265749_2 (sequence is synthesized)
acctgccaaattatccttaaaaaaactcccatccctaaattttccgggagaatgatttgagtagttaactctggtctctcgttctggctctgcatgaattaaactctttctctattgcaa

SEQ ID NO: 886624 - DNA, 120 bp, Artificial Sequence
  ENSG00000265749_3 (sequence is synthesized)
aatctcgctggtctctcaggacaatcctgtgagagacggggtctcattatgttgcccgaggcttcagtatcttttccaaagcaacatgaaagaaatgtgaccgtaaatcaatcagcttct

SEQ ID NO: 886625 - DNA, 120 bp, Artificial Sequence
  ENSG00000265749_4 (sequence is synthesized)
cttcgccttggctgtttccgactcggaatgtcctcgcattgatcctcccaatcacagccagctgaaaccagcctccttcctgacgtattcagtaactttagctgattgccatctctcctt

SEQ ID NO: 886626 - DNA, 120 bp, Artificial Sequence
  ENSG00000265749_5 (sequence is synthesized)
catctcaacaacctgtaccacactcactggagcacttcgctttgcatctttagtcgaccagttcagatatatacaacctataaggtagggacggaggcttctacctgcctgtaccccctt

SEQ ID NO: 886627 - DNA, 120 bp, Artificial Sequence
  ENSG00000265749_6 (sequence is synthesized)
aggtaaagggggcccatgggtctatcagataacctgaacccgagacctctcaatctggaggaacagcttgaagaagtcatctagaagctataaagtcacagaagcttcttatcctattga

SEQ ID NO: 886628 - DNA, 120 bp, Artificial Sequence
  ENSG00000265749_7 (sequence is synthesized)
tgattgccatctctccttcatctcaacaacctgtaccacactcactggagcacttcgctttgcatctttagtcgaccagttcagatatatacaacctataagaccctgcactgatggatc

SEQ ID NO: 886629 - DNA, 65 bp, Artificial Sequence
  ENSG00000265749_8 (sequence is synthesized)
cggccgcccagtctgggaagtgaggagcctcttcccggccgccatcccgtctgggaagtgaggag

SEQ ID NO: 886630 - DNA, 120 bp, Artificial Sequence
  ENSG00000254042_0 (sequence is synthesized)
attagacaggctgtggggctgtcctgaaactctgcgcttgcccagtgcctttggatgggtgccctgggaaggctggaagctgggcgggccctgcagaagaggatggagccacagctttgc

SEQ ID NO: 886631 - DNA, 120 bp, Artificial Sequence
  ENSG00000254042_1 (sequence is synthesized)
tgattccagtgaagcccaaggaagggctcagctatccaggaaaccctccaggggaaaaggattgggttctggaatcacaaagcccagggtcttaatcacagctctactgcttacaagctt

SEQ ID NO: 886632 - DNA, 120 bp, Artificial Sequence
  ENSG00000254042_2 (sequence is synthesized)
aggaagctctgggcccaggctccattcggacctcccatttttctacccacaaacacccctccccatggaatagtctgtgccaggctaagcagggcacagtgcttgggccaaaggcacaca

SEQ ID NO: 886633 - DNA, 120 bp, Artificial Sequence
  ENSG00000254042_3 (sequence is synthesized)
gaggaagtcccccctggaaaaccttggaagaaagaaatggatggccccagaggacacagcgatgatgctgacaatggacagaaaactgctcagagaaagatctttatgtgtcaatggtaa

SEQ ID NO: 886634 - DNA, 120 bp, Artificial Sequence
  ENSG00000254042_4 (sequence is synthesized)
cttttgaatcatcagtaaaggccaggcactcatctggaccttatgcatttagtctcttctctgatttttataatcagcttatgaaatgacggtgtatgggtctgggactcagtggtaagt

SEQ ID NO: 886635 - DNA, 120 bp, Artificial Sequence
  ENSG00000254042_5 (sequence is synthesized)
ttaagactttggaggtggctggcttcaaagggaatcctttggctctcttgtcccaggcccataggtggcactctgacaccatctgctagaagcacagccatcgtctagaaatacatcagg

SEQ ID NO: 886636 - DNA, 120 bp, Artificial Sequence
  ENSG00000254042_6 (sequence is synthesized)
tagtcccattccccagaatgaggctgcctctaagcctgtcactacgcacacacaatcccactgggggcagagacctggggatgccagctcactctcactccacctgcatcagatgtgtgc

SEQ ID NO: 886637 - DNA, 120 bp, Artificial Sequence
  ENSG00000254042_7 (sequence is synthesized)
cggacattgagttgaactcttgacagtctgaggcccagtctccatatccgtaaaaagggaataatgaggccttcttaggtttgctgggggtgtttgaacaggtgagtaaaatgccaagca

SEQ ID NO: 886638 - DNA, 120 bp, Artificial Sequence
  ENSG00000254042_8 (sequence is synthesized)
cagtacttggcacagtctgtactcggtaggtgctggtgagaggcacatggtcgatatccacaggggtcagcagaggggcatgacaccgtgctctgggtgaaagaaggaaggactgtcttg

SEQ ID NO: 886639 - DNA, 120 bp, Artificial Sequence
  ENSG00000254042_9 (sequence is synthesized)
gaggtagtctgggaggacagaggggagaactgggatctcatcctcttgctggctgatcttagccgatcaaccttttgggtgagtttgcagcccctaggcctttcaatccccaatccctat

SEQ ID NO: 886640 - DNA, 120 bp, Artificial Sequence
  ENSG00000254042_10 (sequence is synthesized)
atttacatcaagctggaaccagcactttcaaggctggttgctctgagggtggggtttggcaggggcatggtggggtggaggttctggaaatccctttagaagggaaattgggagagtggg

SEQ ID NO: 886641 - DNA, 120 bp, Artificial Sequence
  ENSG00000254042_11 (sequence is synthesized)
ctcaagggatgcctctacttggaaacactttttctctgagacttaatttctccatgtttcacaaagaaaatacaaatgttacatttcctctttctctctggacatccttgtcaagaccat

SEQ ID NO: 886642 - DNA, 120 bp, Artificial Sequence
  ENSG00000254042_12 (sequence is synthesized)
atgggggcctctctgactggcagctcccgctagttcagagaacagtgttactggcaaatgctgctttggagtggtgacctgtgcgatggactcatccaggctgtcccttggagaagggag

SEQ ID NO: 886643 - DNA, 120 bp, Artificial Sequence
  ENSG00000254042_13 (sequence is synthesized)
ggtacgcagggcatggtgcccctctctagggccagggctgaaggaggagcctgaggcatgaacacgggggggcagggcctccagcataccttgtagctgtaggggcaggcacagcggtac

SEQ ID NO: 886644 - DNA, 120 bp, Artificial Sequence
  ENSG00000254042_14 (sequence is synthesized)
agctccacagggtcctgggtgcatgtcccgttattcttgcacgggctggagaggcaggcattgcatttggccacaatgttgatgtccactggccctgggcagcaaaaccagagtactgat

SEQ ID NO: 886645 - DNA, 120 bp, Artificial Sequence
  ENSG00000254042_15 (sequence is synthesized)
ggcaggtcctgagtgcgctcactgccatacctcccttcccctctgctctgggccctccctcagccagcgccagccccttcccaactccatgcccagatggcagctggctctcctcagcca

SEQ ID NO: 886646 - DNA, 120 bp, Artificial Sequence
  ENSG00000254042_16 (sequence is synthesized)
tggcagtggagtattatggcttggtgataaagactgcgcattctggaatcagatggacctggaagcctgatgggaaagagatgtgaggtcgttgaaggagccttcaggaacgctggaaat

SEQ ID NO: 886647 - DNA, 120 bp, Artificial Sequence
  ENSG00000254042_17 (sequence is synthesized)
gtcattgccatggagggttctgaagcagagggcacaggtcggaagctgagaaaggaagagacccaagggagttactggagtttcagagatcatatgaagagctgtgcttaagaccggaag

SEQ ID NO: 886648 - DNA, 120 bp, Artificial Sequence
  ENSG00000254042_18 (sequence is synthesized)
ttctggagccaggctgtatgtcaaagtgccaaccctggaccatggttgggaggtcacagtgagtcaccttctggctcagcagaagaattttctgatgctctaatagctggtcaaaagtgg

SEQ ID NO: 886649 - DNA, 120 bp, Artificial Sequence
  ENSG00000254042_19 (sequence is synthesized)
agaagaattttctgatgctctaatagctggtcaaaagtggaatagagttgcctgggtctggctctattgcccaggctggaatgcaatggcgtgctctcagctcactgcaacctctgcctc

SEQ ID NO: 886650 - DNA, 81 bp, Artificial Sequence
  ENSG00000254042_20 (sequence is synthesized)
ccaagtagctgggactacaggcgcatgttaccatgcctggctaattttttgaatagtcttgaagtcctgggctcaagcaat

SEQ ID NO: 886651 - DNA, 120 bp, Artificial Sequence
  ENSG00000254042_21 (sequence is synthesized)
ggattacaggtgtgagccaccatgctggggcaagcctactaattcgtatttcaagaagcaagtgctagcgtgttgtatggttacgtgtaccgctgatgaactcatggcagtagtagtgcc

SEQ ID NO: 886652 - DNA, 120 bp, Artificial Sequence
  ENSG00000254042_22 (sequence is synthesized)
ctcatggcagtagtagtgccagactgggacaaatgatgctgaggaaagagaaaaccctggtcaggctggtggtgttcaccccatcacccccaccaccccaaaagacagacagatggacgg

SEQ ID NO: 886653 - DNA, 120 bp, Artificial Sequence
  ENSG00000254042_23 (sequence is synthesized)
gcaaacattttctctccctcttacatattgagttgccccaaacatcactactctaattatgaacagatgcatgcagattccttaaaattggcaggtcccacctcctggcagtgaacccac

SEQ ID NO: 886654 - DNA, 120 bp, Artificial Sequence
  ENSG00000254042_24 (sequence is synthesized)
acacggaactattagactgggatggaagacaataggttgggattgagggggaatggtaggagaaggaagggggagcaggtccggcttcagccctggccagtgatacgagcccatctcctg

SEQ ID NO: 886655 - DNA, 120 bp, Artificial Sequence
  ENSG00000254042_25 (sequence is synthesized)
ctgtgttcaactggaaacagggaaatggttgtgctgatgtatccattctcaaactccccagagaaggtggataataaataagtgacaataacagattgcacactgtcagcgcgggcactt

SEQ ID NO: 886656 - DNA, 120 bp, Artificial Sequence
  ENSG00000254042_26 (sequence is synthesized)
ctttgcccccagagaattgatttttaataacagcgcagatgacatgtggcgggagttgtcactgacaccggtgttttgtgggcctcaataaatcacatcagcctggaggctctgaaatgg

SEQ ID NO: 886657 - DNA, 120 bp, Artificial Sequence
  ENSG00000254042_27 (sequence is synthesized)
cgtttcagccgtgtgcttgctttagctgcgagcactggagggaggtcagggtccttcccagagctttgcaaagggggctgtgtcctgctgctgcagccagctttgacaatgagccctgga

SEQ ID NO: 886658 - DNA, 120 bp, Artificial Sequence
  ENSG00000254042_28 (sequence is synthesized)
taaacaggccatatttagtgtcaggactataaatgaccttggggttaacagttatcaacttggagatgggctgagatgaacttcagtgagtgactgtttgtggatgagtaaaaagaatgg

SEQ ID NO: 886659 - DNA, 120 bp, Artificial Sequence
  ENSG00000254042_29 (sequence is synthesized)
cctgattgagagctggtaccaggggctcaacccgacttcacattagaagaggaagactatctgtcttggtttgcttggggctgagggggtttgcaggacacagagctttcagtgctaaaa

SEQ ID NO: 886660 - DNA, 120 bp, Artificial Sequence
  ENSG00000254042_30 (sequence is synthesized)
gggggtttgcaggacacagagctttcagtgctaaaaccaagaatggcccagacaaaacccagatgacttagctgccttacactaccagctacagtgttgttttctgtttgtttttttttt

SEQ ID NO: 886661 - DNA, 62 bp, Artificial Sequence
  ENSG00000254042_31 (sequence is synthesized)
tctgttgcccaggctggagtgtggtggtgcaatttcggctcacagcaacctccacctcctgg

SEQ ID NO: 886662 - DNA, 120 bp, Artificial Sequence
  ENSG00000254042_32 (sequence is synthesized)
cctggctgcagtgcttttaaaagtccccacacccaggttgtaccccagaccaatttaatctaaacctagagggtggagccaggcttcagtaattttaaaagctcctgtatgatgtccaaa

SEQ ID NO: 886663 - DNA, 120 bp, Artificial Sequence
  ENSG00000254042_33 (sequence is synthesized)
tgtgcagccaagattgagacctatactgttcttggcctaggtgagcctctttagtatcagatcagatagcttagaagcaggaggaggaaaattaaaattagctttaagccaatggaatgt

SEQ ID NO: 886664 - DNA, 120 bp, Artificial Sequence
  ENSG00000254042_34 (sequence is synthesized)
ttttctgcttgcagcagaagtgtaggacacactaaagtttgagagggtaattaaagtgtatctatatatcaaaataagtattaagcctctcagagatgagcaaaagagattatcaaacaa

SEQ ID NO: 886665 - DNA, 120 bp, Artificial Sequence
  ENSG00000254042_35 (sequence is synthesized)
ctgtgtatacaaatgaaaagtacgtttttgatgaaaaattcaggttccccaataatcaaagacaaaataaaaggagttttttttttttaacctattgaattagcaatgagaaaataagag

SEQ ID NO: 886666 - DNA, 120 bp, Artificial Sequence
  ENSG00000254042_36 (sequence is synthesized)
aaaataatgagagtctaatgaaaaatgcaaccaaaggatgctactgggaatgtaaattggttataaccctttttgaaaatcaatttggcaaaatgtgtgaagaccttaaaaataataatg

SEQ ID NO: 886667 - DNA, 120 bp, Artificial Sequence
  ENSG00000254042_37 (sequence is synthesized)
tactttgattcagtaatttctattctctgagtcttatctgaggacatgatttcaaacagagaaagatctttatgtgtcaatggtaagacaaaaaaatggaaatactcgaaagattcaaaa

SEQ ID NO: 886668 - DNA, 120 bp, Artificial Sequence
  ENSG00000254042_38 (sequence is synthesized)
taatattaaaagttgatcacatagaggtattagagaattaaataagttgttacatgaagaatgagaagaaaatacatgagacagtgcttaccatcattcctgttgcatacaaactcagta

SEQ ID NO: 886669 - DNA, 120 bp, Artificial Sequence
  ENSG00000254042_39 (sequence is synthesized)
gtagtttgttgttataatatgatcaataaaaaaatcacatgtacaaaagtttgctggataaaatgggaaaatgcttatgttttaataatgttggattaaaaaatgcaggttgaagatttt

SEQ ID NO: 886670 - DNA, 82 bp, Artificial Sequence
  ENSG00000254042_40 (sequence is synthesized)
tctcaaggccagggccaaaacaggaggatcgttggagatcaggagtttgagaccagcctgtgcaacatagtgagaccttgtc

SEQ ID NO: 886671 - DNA, 120 bp, Artificial Sequence
  ENSG00000265743_0 (sequence is synthesized)
atacaccattgtcaatctaatattttttggaaaggtgcttttatgttatgtatttgaaatatatatacacacatacatatatgtatacatatatatatacatttttgggtttttttgttt

SEQ ID NO: 886672 - DNA, 79 bp, Artificial Sequence
  ENSG00000265743_1 (sequence is synthesized)
tttttgggtttttttgtttgtttgttttgttttttgagacagggtctttgttgcccaggctgatctcaaactctcagac

SEQ ID NO: 886673 - DNA, 120 bp, Artificial Sequence
  ENSG00000265743_2 (sequence is synthesized)
ttcaagtacatgtgttaacacccatccctgtgacactaggttctaatgctaaattagatttaaaaaatcagagccaggagcaatgcctcatgcttgtaatcccagcattttgagaggccg

SEQ ID NO: 886674 - DNA, 120 bp, Artificial Sequence
  ENSG00000277863_0 (sequence is synthesized)
taattatctaaccatatacgtgaagaaacagagactcagagaagctgagatattgcttaaaccacagcactatttagggcaaaaccaacaagaagtttcatgaccccccagtccattgtc

SEQ ID NO: 886675 - DNA, 120 bp, Artificial Sequence
  ENSG00000277863_1 (sequence is synthesized)
gtctgaactggattatcggctttacttattgcttagtgatgatatatgttccgggggagcttatgatctgaccttcatctgaacacaatagactgcttctgatttttccagccaaagaga

SEQ ID NO: 886676 - DNA, 120 bp, Artificial Sequence
  ENSG00000277863_2 (sequence is synthesized)
aagtatttgggttttgagcatctttttaactgagaacattcctcttcctggctatgaaaaccttcccctgtgtatgtagtaggaagactgctacactaaccagacttcacccattgcttt

SEQ ID NO: 886677 - DNA, 120 bp, Artificial Sequence
  ENSG00000277863_3 (sequence is synthesized)
gtttcacaactgtaaagaataacttattccatgtaagattttgtgttgtgcctaaaacacgaaataatccccctaggatctactagaaaagtatcttatgctataagaacactgatcatt

SEQ ID NO: 886678 - DNA, 120 bp, Artificial Sequence
  ENSG00000277863_4 (sequence is synthesized)
tctgctacaagcaaacatagaggttgtgttctaaagtgttaatcttcctctgggggtggctagagaacagcttaccaagggggagaaatctggctcatgtcgacaaagctctcacagctc

SEQ ID NO: 886679 - DNA, 120 bp, Artificial Sequence
  ENSG00000277863_5 (sequence is synthesized)
ttcagaagagaagtattgtgtaagtgcaaagctattattatataaaagcattcagaggataatattagccataattgtattaaatattaatattaatgcaaatggtggctaagagcttaa

SEQ ID NO: 886680 - DNA, 120 bp, Artificial Sequence
  ENSG00000277863_6 (sequence is synthesized)
agaagagcttataaactgtaacagtcaataacaatggagtaaaggtatataaaatttgtatattgtcaaccatgcacaccagacaaacccaataaactgaaaactaataagttgctaaaa

SEQ ID NO: 886681 - DNA, 120 bp, Artificial Sequence
  ENSG00000270071_0 (sequence is synthesized)
attaacacataaggatagggcaaaggcagaaaaactatttctcctcagctggatggtggttattttgtgtgtgtctgtttgggggctttattttgatccacctcaagcagaagatatgct

SEQ ID NO: 886682 - DNA, 120 bp, Artificial Sequence
  ENSG00000270071_1 (sequence is synthesized)
ggccagaagagactctgaagacatcgagggcataggcggggagggtagaaaataagaaatttaaagtaataaaagttgtgggttttctatactagataatgagaaatgatgaactaaata

SEQ ID NO: 886683 - DNA, 120 bp, Artificial Sequence
  ENSG00000270071_2 (sequence is synthesized)
aatgatgaactaaatatacagtatttctacattctttggcatgcacatgaaataaagtcatactttttttcaacaaatacaacagctgcaaaagctggagtgcaatggtgctatctcagc

SEQ ID NO: 886684 - DNA, 120 bp, Artificial Sequence
  ENSG00000270071_3 (sequence is synthesized)
cagcctcccaaatagctgggatcacagataacccctgtgatgtcctgaggcaatcttctgtgggtccattttctccatccatgagtacgtctccacggtcctgagattgggagcagagat

SEQ ID NO: 886685 - DNA, 120 bp, Artificial Sequence
  ENSG00000270071_4 (sequence is synthesized)
ccacggtcctgagattgggagcagagatacaaagttctctgggatgtttttttctctgttggtttgtctgtctctaactttcttttagaacaattctcaaatcacatttcctccaaatat

SEQ ID NO: 886686 - DNA, 120 bp, Artificial Sequence
  ENSG00000270071_5 (sequence is synthesized)
ctttctctcattgctctgggctacgtagaaaaaaaaatgcccaattctattttgaagttctgaagaggattgatttgtatcacttttttagcattcagaactgacttaaaattcttagtc

SEQ ID NO: 886687 - DNA, 120 bp, Artificial Sequence
  ENSG00000270071_6 (sequence is synthesized)
tgcttaaggtaaaaagtggtcttttgtacactcacgtcactctctactgagcatagtgctcacctaagacaactttgattagtttttgctgataaaagaaaatcagaaaacctatcttcc

SEQ ID NO: 886688 - DNA, 120 bp, Artificial Sequence
  ENSG00000270071_7 (sequence is synthesized)
aaaatatagaaagtttgcaaaatcgtagagttgtttggggactttttcttatatttgtgaagtctggaagcaaaattacaggtactctaatcccacagtttttttttacttgcatttgaa

SEQ ID NO: 886689 - DNA, 120 bp, Artificial Sequence
  ENSG00000270071_8 (sequence is synthesized)
actttgctagataaactgttacttgctaaaataaaaccagacagatcgataaacaaagaggacaagaacagacatctatgctgataagcggcatgctttcttttgctaactagcttgttc

SEQ ID NO: 886690 - DNA, 120 bp, Artificial Sequence
  ENSG00000270071_9 (sequence is synthesized)
ttttgtgatgatattttgcttagttacctttatctgttttgaacgataccaagcattccgttgacttattttactcataagcaatgataattcgcatgaggataaaaaagggacaagacg

SEQ ID NO: 886691 - DNA, 120 bp, Artificial Sequence
  ENSG00000270071_10 (sequence is synthesized)
gcagagtccatttgaaaggagtttcccgccaaccatgttggagactcctgattcctcctcacttgactggaaattcaggtgatagttatctggtgataatcattaggattaatgtataca

SEQ ID NO: 886692 - DNA, 120 bp, Artificial Sequence
  ENSG00000270071_11 (sequence is synthesized)
atttattttgattttataatctgtaatggtcatataagcactaatatgatttcctgaattcactattctactggaaagaaaatgttttgatcagctaacaaatatatacatccttcattt

SEQ ID NO: 886693 - DNA, 120 bp, Artificial Sequence
  ENSG00000270071_12 (sequence is synthesized)
acacaacaaggaagtttctcaccaaaccttctacctctccgcatgagatctaacaacggaaatgaacatgagatctaaaacacagaaaatcctggggagcacatcaaagagaatcaggtt

SEQ ID NO: 886694 - DNA, 120 bp, Artificial Sequence
  ENSG00000270076_0 (sequence is synthesized)
ggagtggcagggtagatggggatactacattttaggacacagcttttcatgagtatatatgccagtgtgaaatctctgaagactttagaaaaattactaatagtgaatttttactcccat

SEQ ID NO: 886695 - DNA, 120 bp, Artificial Sequence
  ENSG00000270076_1 (sequence is synthesized)
acattgggaagaggggagtgattccaaaatcaacttttagaaaccagccatataactgtatccatgtatttcatgctatgatttaagcctcatactccctatggtatgtaaaactcatac

SEQ ID NO: 886696 - DNA, 120 bp, Artificial Sequence
  ENSG00000270076_2 (sequence is synthesized)
taacaccttacatggcataaatatagagtaggattgcccaggtatgaaccccaatttcactaaaatagtaacatgaataatgtgagcaagattacctcttcaaatctcagttttcacctt

SEQ ID NO: 886697 - DNA, 120 bp, Artificial Sequence
  ENSG00000270076_3 (sequence is synthesized)
gatataatagaaataacaacagtgacttttctgaaaagttgctgggcagagtaaaggtggtaatcctttcaaggatctcaatatgatacctgataggcagctaagcactagagagtaact

SEQ ID NO: 886698 - DNA, 120 bp, Artificial Sequence
  ENSG00000270076_4 (sequence is synthesized)
gctattattattactgttgttattattatgtttgcataatactgacatgtttctacttaaattctatcgctgagtgtatttggtatctctaataaaagaaagcattttgaaatacttcta

SEQ ID NO: 886699 - DNA, 120 bp, Artificial Sequence
  ENSG00000270077_0 (sequence is synthesized)
aggggaatttcagcagagctggaaaccataaaatggagtcaaatacaaatgttaaaaaatgcaatgtcagagatataaaatttttttgtcagactcatcagccaattggacaaggctgca

SEQ ID NO: 886700 - DNA, 120 bp, Artificial Sequence
  ENSG00000270077_1 (sequence is synthesized)
gagagcattagtggacttgtatgtaggccaatggaaattatccaaaaagagaagaaagagtaaaaaaaaaaaaaatgccagagtgaatcatccaagaattgtgatacaatatcaagttgt

SEQ ID NO: 886701 - DNA, 120 bp, Artificial Sequence
  ENSG00000270077_2 (sequence is synthesized)
aaagagtgggatctttcatttctgacgaagtagcacaccagtactctgacccttacactgaagatgactaaaaatgctagataatatttgagaaacatcttattaaatatatgaatgaac

SEQ ID NO: 886702 - DNA, 120 bp, Artificial Sequence
  ENSG00000270077_3 (sequence is synthesized)
atcttattaaatatatgaatgaactgattaacaagaatattagacaaaagactaagtatcgaaagactatataccaagagatacatagaatattttttgcttttaaaaggtttttaaact

SEQ ID NO: 886703 - DNA, 72 bp, Artificial Sequence
  ENSG00000270074_0 (sequence is synthesized)
aaggcccggtgtcagacatccggaaagaagagggatgaatgtttcacctctgaagtacatcccaaatgtggg

SEQ ID NO: 886704 - DNA, 90 bp, Artificial Sequence
  ENSG00000270074_1 (sequence is synthesized)
agttaacttcagctttgctggggtctacttggccagcgaaactctgcctggttcagccgtcgcaaccggaaccacacacttggcatcggc

SEQ ID NO: 886705 - DNA, 69 bp, Artificial Sequence
  ENSG00000270074_2 (sequence is synthesized)
taacgatttggattgctaacaagtcaagaaatgttcaagtccttggatgtagggaaaagaaagagagat

SEQ ID NO: 886706 - DNA, 75 bp, Artificial Sequence
  ENSG00000270074_3 (sequence is synthesized)
ttcaagtccttggcgaaagggaagacataagagactctattttgaaaaggacctgtactttaaacaattgctttg

SEQ ID NO: 886707 - DNA, 78 bp, Artificial Sequence
  ENSG00000270074_4 (sequence is synthesized)
tgcaggacgtgccttgttaaccaaatgtttacaagcagtatacttcacaatgcaccgtggaaagccgcagggacctct

SEQ ID NO: 886708 - DNA, 71 bp, Artificial Sequence
  ENSG00000270074_5 (sequence is synthesized)
agtctcaataaaccagggacacaatgcaccgtttctccccatgcgatagtctgaaatatggcctcgtggga

SEQ ID NO: 886709 - DNA, 120 bp, Artificial Sequence
  ENSG00000270075_0 (sequence is synthesized)
ttgcaagatttaattcttcctttaatataaataaggcagcatgaaacaccaagagccccactgctttctgctttagaagcagctttgtgagaagtgtagctgaaaaagtggctaattgtg

SEQ ID NO: 886710 - DNA, 120 bp, Artificial Sequence
  ENSG00000270075_1 (sequence is synthesized)
tctatgccaccaagtacccatttccgtgtgacagagacgttagtcatttgggcctcgaatttatacaaggtcttttctccaaatagtataaaaaagtggcagccatggtgggaccactat

SEQ ID NO: 886711 - DNA, 120 bp, Artificial Sequence
  ENSG00000269989_0 (sequence is synthesized)
tacccaatctcccattcctcatttctcatctaccattagagaaaggccagcgaaagagaacttccgggtagtgggtctgttcctcagtaattcctcaagctcttctcagtatatgcaact

SEQ ID NO: 886712 - DNA, 120 bp, Artificial Sequence
  ENSG00000269989_1 (sequence is synthesized)
taggcatgagagttatgcactgtctgggaccagcatttgaccctgcaatgctgaggctatgtaattcattgggacaatgtgccggtttggcagcgttcgttatctgggttgtggaatcac

SEQ ID NO: 886713 - DNA, 120 bp, Artificial Sequence
  ENSG00000269989_2 (sequence is synthesized)
agcatggccattatgagttatggagcgaggagggtgtcatcttatgctgacattacatgttgtggtgttgcaaggcagaaaagatgctggactattggttggaacaataaaaaaaaaaaa

SEQ ID NO: 886714 - DNA, 120 bp, Artificial Sequence
  ENSG00000269980_0 (sequence is synthesized)
agctgtccttccacgacactgttggatgaaagacatgtctccacccaaattcttttgcttgacccactatggagatttttctctggcttcttcagtctgaattctagacagggcttgacc

SEQ ID NO: 886715 - DNA, 120 bp, Artificial Sequence
  ENSG00000269980_1 (sequence is synthesized)
actgcagctaccttctgcccgatgaatcttccccagtcttttgtctctgtggtttggtgcttaccttttttttctttctgcctctactgaacttcatgaaatatgatcttttaatagaca

SEQ ID NO: 886716 - DNA, 61 bp, Artificial Sequence
  ENSG00000269982_0 (sequence is synthesized)
ccttgtggctactatgaatattcatgtatacataattgtgtagacaggcccagtcggtagc

SEQ ID NO: 886717 - DNA, 65 bp, Artificial Sequence
  ENSG00000269982_1 (sequence is synthesized)
cactgcaacctctggctcgctcgatccacctgccttggtctcctaaagtgctggaattacaggca

SEQ ID NO: 886718 - DNA, 87 bp, Artificial Sequence
  ENSG00000269982_2 (sequence is synthesized)
agctgggactacaggaggctcgatccacctgccttggtacgcacctgatctggacatatgttttcttttcttttttttttgagatgg

SEQ ID NO: 886719 - DNA, 120 bp, Artificial Sequence
  ENSG00000269982_3 (sequence is synthesized)
cagtatgttttcacttctcttgggtatatatctatttaggagtggaactgctgagtcatatggaaattttacattaaaacttttgaggacctgccagacttttccaaagtagccttgtga

SEQ ID NO: 886720 - DNA, 120 bp, Artificial Sequence
  ENSG00000269982_4 (sequence is synthesized)
ctggtggggagactgaggcccaaagagggaaactgtcttctgcaaagcaacacagtgagtgtgagaaagcaggagctaatcatggacatgacttcaatgctgcgccttctcctctgaccg

SEQ ID NO: 886721 - DNA, 120 bp, Artificial Sequence
  ENSG00000269982_5 (sequence is synthesized)
cattaccatctcactctcactccagtgctctccatacccacttctgcccctccattccattccttgcccagcagcaaatcccttcacaccagtccctacaaaggcttcctgctgccatca

SEQ ID NO: 886722 - DNA, 120 bp, Artificial Sequence
  ENSG00000269982_6 (sequence is synthesized)
tcaggatgaagttccgcctctgagggatgacttataagctcctctgccatctggccctagtgctgcctcctcatcttgtcttctgaagcagttttagtgagctataattcgcaccccacc

SEQ ID NO: 886723 - DNA, 120 bp, Artificial Sequence
  ENSG00000269982_7 (sequence is synthesized)
ccattcacccgttttaagtgtacaatccaaatgtttatcagtcctttcatactctacactgcagggtcatgcaggtcttgtttcagttccatgaaaacaccaacatctttgcttctgaga

SEQ ID NO: 886724 - DNA, 120 bp, Artificial Sequence
  ENSG00000269982_8 (sequence is synthesized)
ctttgtgcacaccgttacctctgtttagaacagtctgtatatttttttctggcaagttcctcatgatctttcacatcttagttgagatgtttctgctgggaagccttccctgagcattcg

SEQ ID NO: 886725 - DNA, 120 bp, Artificial Sequence
  ENSG00000269982_9 (sequence is synthesized)
ggttgactggatgacctgcaggatgttcccatggcctccctaggatcgtccctgtcacagcatgtactatagtagtctgaggttttttggtttttgttttttttttgagatggagtctca

SEQ ID NO: 886726 - DNA, 90 bp, Artificial Sequence
  ENSG00000269982_10 (sequence is synthesized)
agcagtctgagtttttaaggtctgtgactgtgtcttgttcatatgcagtgcctggcaacactcaattcactattggttgaatgaacagaa

SEQ ID NO: 886727 - DNA, 120 bp, Artificial Sequence
  ENSG00000269982_11 (sequence is synthesized)
cctggcaacactcaattcactattggttgaatgaacagaaagatctgaaaatatctagcatggccctgagcacactgtagaaatcctgcaaatgtttgcagaccgcaattacttccaagg

SEQ ID NO: 886728 - DNA, 120 bp, Artificial Sequence
  ENSG00000269982_12 (sequence is synthesized)
agcatcccagttttcctttggggaatcactcttattataccttcagttcttatagtttatgagaagctaagcagttcctggaatttgcagttgacttaaggcagatgagttaagatgcaa

SEQ ID NO: 886729 - DNA, 120 bp, Artificial Sequence
  ENSG00000269982_13 (sequence is synthesized)
ccctaacttttcctagattttttaaaaaggggtgctttcttttcactaggattactaatctcgtgcctctataagaaaactaactgtctaagaagcagacttgagaaagcaactgagtcc

SEQ ID NO: 886730 - DNA, 120 bp, Artificial Sequence
  ENSG00000269982_14 (sequence is synthesized)
tgatgatatcatgagaggccctggacccagctgtgcctgaagccaaccaccagacattttagttattgagtcaatttccattcctttttaattgcttgagttcagcttgtcacctgcaac

SEQ ID NO: 886731 - DNA, 120 bp, Artificial Sequence
  ENSG00000269982_15 (sequence is synthesized)
tgcaatattcctaatccagttagtaaccctctttcacatacacacatacccatcacacaccttacagaccaaacagaggaatcgagctgacttttgtccctaagcacgggtttacctact

SEQ ID NO: 886732 - DNA, 120 bp, Artificial Sequence
  ENSG00000269982_16 (sequence is synthesized)
cacctcaaatctaaattgtatttttctgagttgtgttgtgcagttgactgtcaatatttagctttccttgtacggtactttctataccaagcttgtctggcctgtaggctgcatgccgcc

SEQ ID NO: 886733 - DNA, 84 bp, Artificial Sequence
  ENSG00000269982_17 (sequence is synthesized)
cgcccaggacagcttggtatgggttttttgtttgttttgtagcttatcagctatcgtcagtgttagtgtattttatgtgtggcc

SEQ ID NO: 886734 - DNA, 120 bp, Artificial Sequence
  ENSG00000269982_18 (sequence is synthesized)
acaattcttattccagtgtggcccagggaggccaaaggattggacacccctgttctattccatgatcagcaagtagacatttgcggtgtcctaagtagtatcaggtgataagtcaaggtg

SEQ ID NO: 886735 - DNA, 120 bp, Artificial Sequence
  ENSG00000269982_19 (sequence is synthesized)
gatggaagagatgcaattctcatttatagcctggcccaaattgaactccaagaaacacacacaataagcactgctccctaagcctgtgcgctgttctggaaagagcctactaaaacaacc

SEQ ID NO: 886736 - DNA, 120 bp, Artificial Sequence
  ENSG00000269982_20 (sequence is synthesized)
ttggcttttctttttgactcgctgatgccaaggacaggtctgtgcatttactaccagtacaatgggacaggaaagtctcacacacatttttttattctttgagatggagtttcactcttg

SEQ ID NO: 886737 - DNA, 120 bp, Artificial Sequence
  ENSG00000269982_21 (sequence is synthesized)
ggggtctcaccatgttggccaggctggtcacacacattttaaccacccatctttgctacaagggaaaaaggccaaaccttgtgtgggtgaagaggcagactcaaatgctcccgatgcaga

SEQ ID NO: 886738 - DNA, 120 bp, Artificial Sequence
  ENSG00000269982_22 (sequence is synthesized)
gaagaggcagactcaaatgctcccgatgcagaggaacgaggcggctaccactcaatcaccaattaccatttgcatgctacccaacctggacctttccagggcatactggaccactcccca

SEQ ID NO: 886739 - DNA, 120 bp, Artificial Sequence
  ENSG00000269982_23 (sequence is synthesized)
cttccttggggtgcaatgaattgcagacagtttaatccatgggcttttgctgattctgttttctctgcttggaatgcccttctacacagaggaagtctttcaagacccaggtcaaaggtt

SEQ ID NO: 886740 - DNA, 120 bp, Artificial Sequence
  ENSG00000269982_24 (sequence is synthesized)
agctctcctgtgaacacttgttccttttctatctggtataagcagccattttaactatcgttaaaggtcagggtttcttaacttgggtctgcgggtcattatgaataagttttagaggga

SEQ ID NO: 886741 - DNA, 120 bp, Artificial Sequence
  ENSG00000269982_25 (sequence is synthesized)
gggacatgtctgtatctatgtccacatatgttactctggaggccagggtcagagattccagattctcagattcggtgacctcaaaaaaaggtctcttttggccaggcacagtggctcatg

SEQ ID NO: 886742 - DNA, 120 bp, Artificial Sequence
  ENSG00000269983_0 (sequence is synthesized)
ctcaggagtcatactccatgagcctggacccagtggttctttatgtggaaacaaatttcacctataggtaacctggtaactgctattttcttctgtgtgctctgtcaacaaaggtatcag

SEQ ID NO: 886743 - DNA, 120 bp, Artificial Sequence
  ENSG00000269983_1 (sequence is synthesized)
tggcttgcaggagatgcctttaatactcagagcattctatctccccctatctggtttagaaggaaggccttcattagttaccttttgagaagttactagaactctctattagagacttac

SEQ ID NO: 886744 - DNA, 120 bp, Artificial Sequence
  ENSG00000269983_2 (sequence is synthesized)
ttttttcacaattacagagaaaattttggtttgttgaagattgcagaaacagcaatggtaatgtaagacagttttggcctttaatttttttcttgaaactctacagtatactacaatagt

SEQ ID NO: 886745 - DNA, 120 bp, Artificial Sequence
  ENSG00000269983_3 (sequence is synthesized)
gaaggaaactattatcatgagagatccttctgaataggatgtctttctgagttccactattcagttacaaaactccttaatgcttaaaattcattatgaaaattagatttattttaaata

SEQ ID NO: 886746 - DNA, 120 bp, Artificial Sequence
  ENSG00000223812_0 (sequence is synthesized)
ggttttaaaaatgggagcttccctgcagacgctttcttctcgtctgtcgccatgtgagatgtacctttcactttcctccatgattgtgaggcctccttagccacatggaactgaaatgct

SEQ ID NO: 886747 - DNA, 120 bp, Artificial Sequence
  ENSG00000223812_1 (sequence is synthesized)
ggagtccttcatccgaatggtaaatggcacttgtgacaaaaatcaaagtaactaaaaaagaatctggttgaaacctcagtaacagttggcctgtctactgcctcacactaacaaggggga

SEQ ID NO: 886748 - DNA, 120 bp, Artificial Sequence
  ENSG00000223812_2 (sequence is synthesized)
gctaataaaaccgaggttagaacacacaatgtggaaatgaaaaccttattcttgtcaatggatggagggtggtgacccccacctttacaagtgtctgtaattctcactagcagtatatta

SEQ ID NO: 886749 - DNA, 120 bp, Artificial Sequence
  ENSG00000223812_3 (sequence is synthesized)
gagggcaaaagatttgaacagacacatcagaaaagaagacatacaaatggccgctaagcacttgaaaggattctgaacaccattagtcatcagtgaaatgcaaattaaagccataatgaa

SEQ ID NO: 886750 - DNA, 120 bp, Artificial Sequence
  ENSG00000223812_4 (sequence is synthesized)
tggcgctatacattttcagaatggcaaggattgaagaccgaaaaaaatcaagcgttgaggagagtgacaaatggggagacagccgtggtgcatgatcgccgaataaataccatgtgagga

SEQ ID NO: 886751 - DNA, 120 bp, Artificial Sequence
  ENSG00000223812_5 (sequence is synthesized)
tacagcaagaaggtggccatctacaagccaaggagacaggcctcagaagaaaccaacccttcttacaccctggactcagacttctaatctccagaacttgttaatgcacaaggtcttgtg

SEQ ID NO: 886752 - DNA, 120 bp, Artificial Sequence
  ENSG00000223812_6 (sequence is synthesized)
atatacaaggacaactgcctgagagtcaccagggctatcaagaagtttgcagaaacaagaaataaacttttactgttttaaacttttgtgaattttgggttttgtttatcaccaaataaa

SEQ ID NO: 886753 - DNA, 120 bp, Artificial Sequence
  ENSG00000223812_7 (sequence is synthesized)
cctagtctattctgattgttataagtggttaatttgggaagtcagatatatttaaaattggcttactgctgtaacatatacagtccaaattacataatggctcaaatgcaatagaagtct

SEQ ID NO: 886754 - DNA, 120 bp, Artificial Sequence
  ENSG00000223812_8 (sequence is synthesized)
tttttttttttgctcacatatcacttcactgagattctgcattaattgtaatgatgagggtgagggtgtcttatatcatacagttgttcagcaacccaggatgaccaactttgtaatatt

SEQ ID NO: 886755 - DNA, 120 bp, Artificial Sequence
  ENSG00000223812_9 (sequence is synthesized)
ttttcccactggcttctaaagttctcatagatagtaaaattcatttggaagaaggagaaacagcatggaggattgcagatggagatttttatgggaaggcttggaggtttggaggttaca

SEQ ID NO: 886756 - DNA, 120 bp, Artificial Sequence
  ENSG00000223812_10 (sequence is synthesized)
cattactacttttacttgttggctaggaaactatcacgtggtcacacctaagtgccagtgagtctgacaatgtggcaatttggttgcgggccaggggtaagaggcaataaattttgctca

SEQ ID NO: 886757 - DNA, 120 bp, Artificial Sequence
  ENSG00000223812_11 (sequence is synthesized)
ataattatcagtttttgccacagatggagggacttttcattgtataactagttgttactgtttgaatttaaaacaggaaaatatcattttcaaataaaaacacaaaagtggcacaaaaaa

SEQ ID NO: 886758 - DNA, 120 bp, Artificial Sequence
  ENSG00000223812_12 (sequence is synthesized)
tttcttctcgtctgtcgccatgtgagatgtacctttcactttcctccatgattgtgaggcctccttagccacatggaactgccctggcaatcactattccagtctctgcttctatgagtt

SEQ ID NO: 886759 - DNA, 120 bp, Artificial Sequence
  ENSG00000223812_13 (sequence is synthesized)
ctatcacctcgaaagagaatatttctgggaatattaagaaggggtcacaaggcagactcaggggttgggttttgtgtgtaaccatggtatggaatccacacgcagtccatgttgctagct

SEQ ID NO: 886760 - DNA, 120 bp, Artificial Sequence
  ENSG00000223812_14 (sequence is synthesized)
ccggttttggaggctgagaggtgactaagtcaggcgttcaacctagattcttcaacctagtccttcacttaagcacttggctgaaagattggcttcagaagacagtactccagctgggat

SEQ ID NO: 886761 - DNA, 120 bp, Artificial Sequence
  ENSG00000223812_15 (sequence is synthesized)
gttgcacatggaacagattgatcttgaaatctggtcctgaagtcaacttcacagcaggaatttcacacatgcaggcacaaaccagcacttgtgaaaatctccatgaaatagctgctaata

SEQ ID NO: 886762 - DNA, 120 bp, Artificial Sequence
  ENSG00000223812_16 (sequence is synthesized)
ttgtctaaactggctttcagctcggtagccagtcttccagataaatgtcaaattaactggataattatacctcaatatgaactcaatgtccaacattagctttttgggagatttattttt

SEQ ID NO: 886763 - DNA, 120 bp, Artificial Sequence
  ENSG00000223812_17 (sequence is synthesized)
ctttaaactgtgctggcttcgtaatcttatagaaacattgtttatctcagattctgagaagtattcaaataagtaaaagagtaaatgaaatggattatcattttcctctttcctcttccc

SEQ ID NO: 886764 - DNA, 120 bp, Artificial Sequence
  ENSG00000223812_18 (sequence is synthesized)
tccctcccttcctccttctttccctgtacctagtgtgtgtgcaaagaactatgctgggtgttgtggaataaaacaagttaacatataacctttcagtaatcaactagcaacctcatgggg

SEQ ID NO: 886765 - DNA, 120 bp, Artificial Sequence
  ENSG00000223812_19 (sequence is synthesized)
gctactgcttttaactatgttggttagcaagatgatgacacatagtaggtgttcaaaagatagaacagggaatgtactttctaattttgtgaaaaagatgagtagcaaagaaatgaaaac

SEQ ID NO: 886766 - DNA, 120 bp, Artificial Sequence
  ENSG00000223812_20 (sequence is synthesized)
aaagattatatttgagctgggatataaaggaatttcttttttcttaacctgttttaattttgttgtttttgttttgtgaaaaaaaaacactggatgcttcaaacactttctctttctaca

SEQ ID NO: 886767 - DNA, 120 bp, Artificial Sequence
  ENSG00000223812_21 (sequence is synthesized)
cttctcgtctgtcgccatgtgagatgtacctttcactttcctccatgattgtgaggcctccttagccacatggaactgaaatgctggagtccttcatccgaatgtgacccccacctttac

SEQ ID NO: 886768 - DNA, 120 bp, Artificial Sequence
  ENSG00000223812_22 (sequence is synthesized)
tcttctcgtctgtcgccatgtgagatgtacctttcactttcctccatgattgtgaggcctccttagccacatggaacttatttaagtcaacagatggaagagtgtcatggaagcgtgcct

SEQ ID NO: 886769 - DNA, 120 bp, Artificial Sequence
  ENSG00000223812_23 (sequence is synthesized)
tttaagtcaacagatggaagagtgtcatggaagcgtgcctgtgaggaagaaactggagcaaaaaagatggaaaccccagcaaggacgatgagtcccagcaattctcctgcctcagcctcc

SEQ ID NO: 886770 - DNA, 120 bp, Artificial Sequence
  ENSG00000223812_24 (sequence is synthesized)
agccactgcgcccggcctgcaattgtggaaattttattatgtcccaggccctggcaatcactattccagtctctgcttctatgagtttgactatttcagattccacatgtaggaaatgct

SEQ ID NO: 886771 - DNA, 120 bp, Artificial Sequence
  ENSG00000223812_25 (sequence is synthesized)
tattaaagtaaataattctctttatagaaaatgtagaaaataacaaaaaataaataagcagaaagtcatccaataacccccatgatcccagcataataatcttttttaaggtaactgaaa

SEQ ID NO: 886772 - DNA, 120 bp, Artificial Sequence
  ENSG00000223812_26 (sequence is synthesized)
tgaccatccttcttttacaattgcaaacgctaacacccagggattttaagaaatttgtcaactctagtaagtggtagagcacagagaaaagaaaagccagggaagcttttacagagcagg

SEQ ID NO: 886773 - DNA, 120 bp, Artificial Sequence
  ENSG00000223812_27 (sequence is synthesized)
agacaaggatagaaaaggacttatgaatggggaaacacaattgacaaattattttaaaatattgcaggtttaatcgcatggagagagagagcatagaacacgagaaatataccaaaacaa

SEQ ID NO: 886774 - DNA, 120 bp, Artificial Sequence
  ENSG00000223812_28 (sequence is synthesized)
cttctcgtctgtcgccatgtgagatgtacctttcactttcctccatgattgtgaggcctccttagccacatggaacttatttaagtcaacagatggaagagtgtcatggaaggaaatgct

SEQ ID NO: 886775 - DNA, 120 bp, Artificial Sequence
  ENSG00000223812_29 (sequence is synthesized)
tttcttctcgtctgtcgccatgtgagatgtacctttcactttcctccatgattgtgaggcctccttagccacatggaactcctgtacaagaaacatggtgccagcatctgcttctggtga

SEQ ID NO: 886776 - DNA, 120 bp, Artificial Sequence
  ENSG00000223812_30 (sequence is synthesized)
ggactgcaggaagcttccaatcatggtccaaaaaatgcggagcctgcgtgtcacgtgataagagatggagcgtgagaaagaggcaggaggagaaagtgacccccacctttacaagtgtct

SEQ ID NO: 886777 - DNA, 120 bp, Artificial Sequence
  ENSG00000223812_31 (sequence is synthesized)
agagaatatttctgggaatattaagaaggggtcacaaggcagactcaggggttgggttttgtgtgtaaccatgtgacccccacctttacaagtgtctgtaattctcactagcagtatatt

SEQ ID NO: 886778 - DNA, 120 bp, Artificial Sequence
  ENSG00000223812_32 (sequence is synthesized)
ggtctctgtaataacttcacacaacctatcccatctgtccttttatttccatcccgtgttctagttcaggccctcgttatttcatgtttttttttctttttttgcagaaaattcctatat

SEQ ID NO: 886779 - DNA, 120 bp, Artificial Sequence
  ENSG00000223812_33 (sequence is synthesized)
gaactcgataactggattttttgtttcactaaagtatctcataaataatggttccaaagaaatgttttaaatagcagatttaatcaggcaggtggactggagtaaacctggaacccaaaa

SEQ ID NO: 886780 - DNA, 120 bp, Artificial Sequence
  ENSG00000223812_34 (sequence is synthesized)
gtcctttgtagggacatggatgaagctgtttttaaactatttcttgtactttcaagctgttttaccttttcatcttatttatcttttttgaaaatctgtttcctcaattttacaatctta

SEQ ID NO: 886781 - DNA, 120 bp, Artificial Sequence
  ENSG00000223812_35 (sequence is synthesized)
aatctgtttcctcaattttacaatcttattctctgacttattgcaaggtttaagcaaggttatgcatattacattttagcatgatgcctgatagtaaacaaacattttaagatcgctgtt

SEQ ID NO: 886782 - DNA, 120 bp, Artificial Sequence
  ENSG00000223812_36 (sequence is synthesized)
taatgtttctcccccaagcaaaaccataaatagcttcccatcaccaagagaataaattccaaaagtttaccaatggcattcaaatcatgccacaaactggaaccaacatgttcattcagt

SEQ ID NO: 886783 - DNA, 120 bp, Artificial Sequence
  ENSG00000223812_37 (sequence is synthesized)
gaacttgcccctaatgtattcagtcctttagaaagttggacattgtttctgtacatgccttgcattctcatccctttatgtcattttttgcagattctgttatgtggaatgcctttatac

SEQ ID NO: 886784 - DNA, 120 bp, Artificial Sequence
  ENSG00000223812_38 (sequence is synthesized)
atctttgtctactggttgggatgctgctcatttcccttttcctgaaagctttccagacactcaaggtgccataaggcaaaatataatagtttatatttctgtgtcctcaaacatcgtaaa

SEQ ID NO: 886785 - DNA, 120 bp, Artificial Sequence
  ENSG00000223812_39 (sequence is synthesized)
cagtcaatgtgtcggatgaacttttctccaattcattataaccagacaataggttctttgaaggctatgaccaaatcgtgagcccattttccttccttaacatactgcacccaaatgagc

SEQ ID NO: 886786 - DNA, 120 bp, Artificial Sequence
  ENSG00000223812_40 (sequence is synthesized)
agaacctagtggagatcttgcggcttagagcttgctgaatttggtaaagacaaaaattcttgtgttatgtgtggtggttgcatgtgcatgtgtgttagtgtaggtgctgtgtgtgtgtgt

SEQ ID NO: 886787 - DNA, 120 bp, Artificial Sequence
  ENSG00000223812_41 (sequence is synthesized)
gtgtgtgtgtgtgtgtgtttgcatggggcaatatggagatagtgatggagtacaagaaggagcttgactttcatgagctcctgagaaaactcatctatccatcaatcccccatgcaatta

SEQ ID NO: 886788 - DNA, 120 bp, Artificial Sequence
  ENSG00000223812_42 (sequence is synthesized)
ctaagtgcttaatccatgccaggcactgttagaaggcaccaggaagacaaagttcctgccatcgacacttacatactagaggaggaaataggaaataaacaggtaaggaaatacatgcaa

SEQ ID NO: 886789 - DNA, 120 bp, Artificial Sequence
  ENSG00000223812_43 (sequence is synthesized)
atagaaagtgacaggggttgcaattttggaatagatgattagagaagtcctaccagcaaagtgacatttgttgagcaggaacataaaagaggtgaggtattaagctaggtacgtatctaa

SEQ ID NO: 886790 - DNA, 120 bp, Artificial Sequence
  ENSG00000223812_44 (sequence is synthesized)
aaaaaaatgtatttccaggcagaggaaacagtaatggcaaaggttttagagaaaaaaaaaagtataacccaggttaacctctcttgcagaactagtttagcctgtcccttttactggtga

SEQ ID NO: 886791 - DNA, 120 bp, Artificial Sequence
  ENSG00000223812_45 (sequence is synthesized)
aatcactgttaatgtttctgtagtaaaggtagtgttttaaatgatttatataatacaataaaatttgtaatctcattcaagctcctttcttcatctttaaaatgaagttaaactcgggaa

SEQ ID NO: 886792 - DNA, 120 bp, Artificial Sequence
  ENSG00000223812_46 (sequence is synthesized)
aaaaggattgttctagctctgaattgctgcactactgtgacttaagtgctcctctgctctcctagcagcacttttatcttacgaatttatatttatatatatatgattagaacattataa

SEQ ID NO: 886793 - DNA, 120 bp, Artificial Sequence
  ENSG00000223812_47 (sequence is synthesized)
agtagaaaaaattatggttgttatttttattagtagtagtattttgtctgtattttgtgatttctgaagctgtggctacctggttctttctgtttcaattatgactttaattgtgaggca

SEQ ID NO: 886794 - DNA, 120 bp, Artificial Sequence
  ENSG00000223812_48 (sequence is synthesized)
acactgtaaagcactcaaatatcagtggtcaggaatgtgctgcaagcagatcctctctctcttattaattccagaacaccaaatgtcttagtccattttgccttaccataaaggaatacc

SEQ ID NO: 886795 - DNA, 120 bp, Artificial Sequence
  ENSG00000223812_49 (sequence is synthesized)
ttcttctcgtctgtcgccatgtgagatgtacctttcactttcctccatgattgtgaggcctccttagccacatggaactgaaatgctggagtccttcatccgaatgaatggcaaggattg

SEQ ID NO: 886796 - DNA, 120 bp, Artificial Sequence
  ENSG00000223812_50 (sequence is synthesized)
cagattccagcccctcgatctttgattttccagcctccaaaaacatgagccagtaaatttctgtttgtttgttataaattacccagtctgtggtgttctgttatagcagcacaaaatgga

SEQ ID NO: 886797 - DNA, 120 bp, Artificial Sequence
  ENSG00000223812_51 (sequence is synthesized)
gacaaatggtcaggtaacactgaaagatgctcatgcttcctaggaaataggatcatttatattttataaaataatacatcaacaatatgatacaaaaattaaacacctggcaataatatg

SEQ ID NO: 886798 - DNA, 120 bp, Artificial Sequence
  ENSG00000223812_52 (sequence is synthesized)
tacagttagaatgaaaccactaatgattattctttgatggagcagataatagtaaatacaattagatcaatttgataatatccagtaaatttaaagatgtgaaaacaattttcagagaaa

SEQ ID NO: 886799 - DNA, 120 bp, Artificial Sequence
  ENSG00000223812_53 (sequence is synthesized)
catgcatgtgattaaaaagacataaacagaagagaacattgctatattatgatagaagaaaatctgaatgttcattaagtgaatagatgaataaattataatatacccataatgcgatat

SEQ ID NO: 886800 - DNA, 120 bp, Artificial Sequence
  ENSG00000223812_54 (sequence is synthesized)
actacagggtacttcaaatgaatcaactatatttacacatatcaacaaagataaatattaaagaatgtaagatcatggcaaaaagcaagttgcagaaaactacgtataggatgtagcact

SEQ ID NO: 886801 - DNA, 120 bp, Artificial Sequence
  ENSG00000223812_55 (sequence is synthesized)
tatgtaaagtctaaatcatacaaaataataatgttccaactcaataaaggcaaatataggacgtaaatatatgcaaccatgaatggtattgaaaaatgcaaaattaagcatatttagtat

SEQ ID NO: 886802 - DNA, 120 bp, Artificial Sequence
  ENSG00000223812_56 (sequence is synthesized)
cttttctgatgggtcatggaatgcaagatgagcatgagaggcttcaaccccacctatttattatttatcacttaaaaattattttttgataacaaaatgataaagtggctgaatttcaag

SEQ ID NO: 886803 - DNA, 120 bp, Artificial Sequence
  ENSG00000223812_57 (sequence is synthesized)
agagacagtgtctacataggtgtttgttgtaatattccttctacaattaaaattcactgggatcaaacatccccaggtctctagccagaaccaataattactacgttttgagtcattttt

SEQ ID NO: 886804 - DNA, 120 bp, Artificial Sequence
  ENSG00000223812_58 (sequence is synthesized)
tagtctttcttctgcaggtaattctgattttcattaaaaataaggaaggcatgttttgtgcttaagctgagacaggtttaagtgacattatttttcaatccaattaggtgccctgattcc

SEQ ID NO: 886805 - DNA, 120 bp, Artificial Sequence
  ENSG00000223812_59 (sequence is synthesized)
atttattcagaaggagatttatatctatatatgccacttgcaaatatgactgccattttctaattaagaagaaattttatcttgactagatctatttcacctatagatgaatgcttgatt

SEQ ID NO: 886806 - DNA, 120 bp, Artificial Sequence
  ENSG00000223812_60 (sequence is synthesized)
taacatttacataattaattgggtgtgtctgcttgctactacattctcatgaaactttgcagcttctcaactacatccaaacctattaccttttaagaacctaagtattttcccagtata

SEQ ID NO: 886807 - DNA, 120 bp, Artificial Sequence
  ENSG00000223812_61 (sequence is synthesized)
aacagttttccatcgtatgagctttaaataatattttaacataaaatatacagtttacacagggatatctaaagtgatgtctatacaaatcctaatgtgaatgtttttgtaaagtgaaat

SEQ ID NO: 886808 - DNA, 120 bp, Artificial Sequence
  ENSG00000223812_62 (sequence is synthesized)
gtgaatgttaactcattttgtcagcagaatatttttcaaagttatttattatctataaaatatatttgcttaaggtttagcattttggggaaattatataacagctatcaaatgagggtc

SEQ ID NO: 886809 - DNA, 120 bp, Artificial Sequence
  ENSG00000223812_63 (sequence is synthesized)
ggtcttctgtaagtgcttataaaatcaataatctaatgatataaatagatctataaagagatgataaaattaaagaacaattactaacattctaactagtctaacattttatgccaatca

SEQ ID NO: 886810 - DNA, 120 bp, Artificial Sequence
  ENSG00000223812_64 (sequence is synthesized)
agaacatatacctgtttaagatattcagagtatactttatgctttattattaaacagtataaataatatttcagaattttttagaataccaagtatattgtacatgaacatggcatcaaa

SEQ ID NO: 886811 - DNA, 120 bp, Artificial Sequence
  ENSG00000223812_65 (sequence is synthesized)
gtgtcatgggaaagaatctttagctataattatgtagtactggtgcaatacgtaatttgttttagcgtgacagacccccaggtcttcagtaagctccaaactgccagggaaaacagatga

SEQ ID NO: 886812 - DNA, 120 bp, Artificial Sequence
  ENSG00000223812_66 (sequence is synthesized)
atgagtaagaaactggacagagaagcgcaatttttaaaatgaagaacttgatctaaatattttagagtgtttcccatttaaaaaaaaacagaaattgattatatatatatatatatatat

SEQ ID NO: 886813 - DNA, 120 bp, Artificial Sequence
  ENSG00000223812_67 (sequence is synthesized)
atatatatatatataattgtgtcagttctccagattgtttcacatggaatttacatctttgcaaccctgaaaccctgtttcagtcctgtctttttcactgagtgttccaaaatctctttc

SEQ ID NO: 886814 - DNA, 120 bp, Artificial Sequence
  ENSG00000223812_68 (sequence is synthesized)
ccatagttgctgcataatttcttaaattgcttagaagctttcaaggggaaaggagctaagtgagtagattaacgaggggctgtttgtgaaattcttaagagttcgtcaatggcaggtgtg

SEQ ID NO: 886815 - DNA, 120 bp, Artificial Sequence
  ENSG00000223812_69 (sequence is synthesized)
ataaattacaacattgttatgatgatgatcgtgtagcaaaccattattagtgcttaaggtggactatctcattacacaaacaccacttgaatttgaacatacgtcagcagaaaatgtaaa

SEQ ID NO: 886816 - DNA, 120 bp, Artificial Sequence
  ENSG00000223812_70 (sequence is synthesized)
cggttcacacaattccaaccaaacaggcatttctctagttgaaattaggcttggaagtattggccatgtttactatcaaatggttcagttacattttactaatgtacaggaaaacctaaa

SEQ ID NO: 886817 - DNA, 120 bp, Artificial Sequence
  ENSG00000223812_71 (sequence is synthesized)
ctcatgtacatcgaaaattaactcttaaacatttctttgcgtaattatctatttttcttgaaatttttgtatgtgacacgttccttaaataaaacctctgctaaaataacataattcaat

SEQ ID NO: 886818 - DNA, 120 bp, Artificial Sequence
  ENSG00000223812_72 (sequence is synthesized)
gagtttaagagcagataaatgacacagtaagatattcagaagttttataaaaaataaatcatgtgaataaacaattgtgtttggtataaatggaatattgtcagtgtccttttatgaatt

SEQ ID NO: 886819 - DNA, 90 bp, Artificial Sequence
  ENSG00000223812_73 (sequence is synthesized)
ttggtataaatggaatattgtcagtgtccttttatgaattaaaatggctttattcctacaaataatataaaaattagctgggcgtggtgg

SEQ ID NO: 886820 - DNA, 120 bp, Artificial Sequence
  ENSG00000223812_74 (sequence is synthesized)
actgcactccaggctgggcgacagagtaagaccctgtctcaaaaaattaaattaaatggcttaatagcctggttctaaaaaccaatgtgtaccaaatagagaaattccagtttttagctt

SEQ ID NO: 886821 - DNA, 120 bp, Artificial Sequence
  ENSG00000223812_75 (sequence is synthesized)
accaatgtgtaccaaatagagaaattccagtttttagcttcattcatttaatcattgttaaaaatatcaccgattattcttcacgatttaaaaaataaattctacacaacgtagactaat

SEQ ID NO: 886822 - DNA, 120 bp, Artificial Sequence
  ENSG00000223812_76 (sequence is synthesized)
tgaatgtaaattcagtgacataaactccgtgctcatttatacccaaatctgttattcttctactctgtatcccagctatgaacactttctatcatctccaatgctccggcccaagatttc

SEQ ID NO: 886823 - DNA, 120 bp, Artificial Sequence
  ENSG00000223812_77 (sequence is synthesized)
aattgtttcttatctggaattgttaaagttgtttaactgatgtccttgcttcaatccctgaactcctactttcatcatctagagacatcagtgtaaactttttaaaatgtaaattggatc

SEQ ID NO: 886824 - DNA, 120 bp, Artificial Sequence
  ENSG00000223812_78 (sequence is synthesized)
aaatgaaaaccttattcttgtcaatggatggagggtgggcactgttagaaggcaccaggaagacaaagttcctgccatcgacacttacatactagaggaggaaataggaaataaacagcc

SEQ ID NO: 886825 - DNA, 120 bp, Artificial Sequence
  ENSG00000223812_79 (sequence is synthesized)
aatgaaaaccttattcttgtcaatggatggagggtgggtaagtgcctgggtaatagcctgattcttcctatcatatctgctcctattgtggcagacaagagagcttgtccaggggaactt

SEQ ID NO: 886826 - DNA, 78 bp, Artificial Sequence
  ENSG00000223812_80 (sequence is synthesized)
ccaggggaacttccagaaaacattatggggaaaaccgcccccatgattcagttatctccacctggtcctgcccttgac

SEQ ID NO: 886827 - DNA, 120 bp, Artificial Sequence
  ENSG00000223812_81 (sequence is synthesized)
cttctcgtctgtcgccatgtgagatgtacctttcactttcctccatgattgtgaggcctccttagccacatggaactaagtgggaacagaggcctatggtagtagtttacttgtccaaag

SEQ ID NO: 886828 - DNA, 120 bp, Artificial Sequence
  ENSG00000223812_82 (sequence is synthesized)
ttcttctcgtctgtcgccatgtgagatgtacctttcactttcctccatgattgtgaggcctccttagccacatggaacttgacccccacctttacaagtgtctgtaattctcactagcag

SEQ ID NO: 886829 - DNA, 120 bp, Artificial Sequence
  ENSG00000269985_0 (sequence is synthesized)
ctcgcaggagagggctgggcagaggaaccacgacggccatgcggaagccacacaagagcgatccaatgtctcatctccgccctcaatcatggcctccgctgatgccaaagtaaacccatt

SEQ ID NO: 886830 - DNA, 120 bp, Artificial Sequence
  ENSG00000269985_1 (sequence is synthesized)
ctatcttccagtccagaagtgaaggttttgtgccaaaatgcattcacccatccaaacattcaataaatatctactaagtacccactaaaggttaggtgtgcgtgaagccctggtggcaaa

SEQ ID NO: 886831 - DNA, 120 bp, Artificial Sequence
  ENSG00000269985_2 (sequence is synthesized)
gaaataaacagacccgacctcttccctcaaacagctagtgaacagtgcaaaccatggcatggtttgaaaaatgagcatgaggactgcccagggtccctttgggaaatgctgaacagagtg

SEQ ID NO: 886832 - DNA, 120 bp, Artificial Sequence
  ENSG00000269985_3 (sequence is synthesized)
gacggatctgtgtgttacagtagaggatcacgggcatttgaaatgacacaactggaagctaaatccaacagcaggggagacccttaccaaggcgaggtatgatgctccacttggtctcac

SEQ ID NO: 886833 - DNA, 120 bp, Artificial Sequence
  ENSG00000269985_4 (sequence is synthesized)
tgcgtcctggtgtagcccccaagctacatttctgatccattctcaactcctagtactgtgctacacccatctacacctcactcctcaaagactcgaagtaaactcatgctcttggcctga

SEQ ID NO: 886834 - DNA, 120 bp, Artificial Sequence
  ENSG00000269985_5 (sequence is synthesized)
ttcaaataattcccttaggccactctggaccccaaaccgtctcctccacatctcggcctgctgaaaccggacttaccgtttcttcagtataatactgcagccactaaccagtaggaatta

SEQ ID NO: 886835 - DNA, 120 bp, Artificial Sequence
  ENSG00000269985_6 (sequence is synthesized)
agcatggtcctaccttcaaggaggttagactcttgtggaagaaaaggataagtttagttaactatcgtgtaactataaaagacatggtgatgatatgtgataggtgtttccaaaaaatca

SEQ ID NO: 886836 - DNA, 120 bp, Artificial Sequence
  ENSG00000269985_7 (sequence is synthesized)
cttcactgtagtaacaatacagtgggaaatgagttgtcggactttgcaaggaatgtttcaagaataaaagcatttaaactgatccttgccagttaaatagggtccaaccaatcacaacag

SEQ ID NO: 886837 - DNA, 120 bp, Artificial Sequence
  ENSG00000269985_8 (sequence is synthesized)
acactaataccagctgattgttacctttccatctcttgctgtacctcgttaacaatagaatctcaaaaaatgcctgctgaataaaccatacatatgcataataaactccaaaagaaagta

SEQ ID NO: 886838 - DNA, 120 bp, Artificial Sequence
  ENSG00000269986_0 (sequence is synthesized)
ctaaagggttaagcattcttaacacactcaagtgttttttttttctgcatgagacaaacaaacaaaatccttaagagtgtttttcttgggttacaaagttatgttaaataaaaataaaaa

SEQ ID NO: 886839 - DNA, 120 bp, Artificial Sequence
  ENSG00000269986_1 (sequence is synthesized)
ttgtaagcatgactcagcacatgcagacaatcatctattacctacgtaacctgctctgatcatcctaaaaggaaagatactgtaaaataaccaatgagaatcaagatgtatgaacttctt

SEQ ID NO: 886840 - DNA, 120 bp, Artificial Sequence
  ENSG00000269986_2 (sequence is synthesized)
tttttccgttttttaaaccttaactataacctttaggagatgagcttcttgccattttctattttggagtctctgttctggaatagtgtgttctcaataaaatattcatgtcaagtaaaa

SEQ ID NO: 886841 - DNA, 120 bp, Artificial Sequence
  ENSG00000269987_0 (sequence is synthesized)
aacttaagcaaaaaagggtatttattggttcacataactgaaaagtccaggggatattctagcttcaggcacggttggatccaggggcacaaacgctgtcatcaggattcaagtctctcc

SEQ ID NO: 886842 - DNA, 120 bp, Artificial Sequence
  ENSG00000269987_1 (sequence is synthesized)
atattttggctagtcaaccagattttatttgttgagggcgagcagtctacagcaaccagacctaggccttgtttgacgagatgtagagtcgagtcatgtaatcacaattggcctagagag

SEQ ID NO: 886843 - DNA, 120 bp, Artificial Sequence
  ENSG00000269987_2 (sequence is synthesized)
gctggcctttaaattgactgggaagtaaagaatgagttttctcatgacacacatcaaagtctccttgttcaacatgatctggtctgagagttcataaactgaatccttcctgctgaaaca

SEQ ID NO: 886844 - DNA, 120 bp, Artificial Sequence
  ENSG00000269987_3 (sequence is synthesized)
gataagttgtctttatgtctgttacaatgcctgccttaaatatatatcatggcaaggaatgaagtcagctgctctgagtcagtgtaaaatgacagtattgagactgatgtggttccacta

SEQ ID NO: 886845 - DNA, 120 bp, Artificial Sequence
  ENSG00000234136_0 (sequence is synthesized)
cgagaaaaacgacagaattagccaggaagttattcctcttgagcacatgaatactctttactaaggtccttgtctctacccatcagccgaaagtcctacttgttttctcaccatctagca

SEQ ID NO: 886846 - DNA, 120 bp, Artificial Sequence
  ENSG00000234136_1 (sequence is synthesized)
ggcggaaatccacgtgacagaaagccggtgttataacacacggaacataaaaaacacttacttcattccctgaccatctcttatcaccactgtccacactattgaagcctgaatcaaggg

SEQ ID NO: 886847 - DNA, 120 bp, Artificial Sequence
  ENSG00000234136_2 (sequence is synthesized)
ctccataagggcgacttgagtacagttcttcatggctgccgaaaagagactctgttactgcaaagtttgttattttaacaattaaaatttgaaattaaacagatcaattttctaaaaaac

SEQ ID NO: 886848 - DNA, 120 bp, Artificial Sequence
  ENSG00000234134_0 (sequence is synthesized)
acgtgaattagtgagaggttcaaacttcttccccaggcttcagtgtcacatcttttcacacgggcaccccgagggcccggactggaaaggttcccaggaaacgatgccagcgctttgagt

SEQ ID NO: 886849 - DNA, 120 bp, Artificial Sequence
  ENSG00000234134_1 (sequence is synthesized)
tcacactcctcagtgtcatctcaaactgtcaaacgcagccacatccgttatacaatacatgttttgtagtaaaagtgttttgttgtgccgtaagatacagaaagtgtttttaaaaattaa

SEQ ID NO: 886850 - DNA, 120 bp, Artificial Sequence
  ENSG00000234132_0 (sequence is synthesized)
tattacttcaagcaaagctgatgcagagagatgagccaattgagcaggagacaatgtaagcagctgtgggggtgtcgagtactccctcctgcctgtgggagctgcaccgtggagtctagc

SEQ ID NO: 886851 - DNA, 120 bp, Artificial Sequence
  ENSG00000234132_1 (sequence is synthesized)
ttgtcaccctccggaggcagagcccctcctccctgcctcctcttggtctagatggacagccatggcagcggaggctgcagagctgagcaggcccagctgcagcctcccagcctttggaac

SEQ ID NO: 886852 - DNA, 120 bp, Artificial Sequence
  ENSG00000234132_2 (sequence is synthesized)
gatcacctgaggagctcaaagtctacagcccaaggttggtgagatgggaaccacccagcacagcgggatctccttggaacctaaatccagtgatggaatcttattgtccacagtcttttg

SEQ ID NO: 886853 - DNA, 120 bp, Artificial Sequence
  ENSG00000234132_3 (sequence is synthesized)
tggtatgtgctaccaccgaagatcctctcctaacctatcatgtgttcaatacgtctcagctcctagacttgctgaagccgacggaataaaagaacctctcaacactggggccaatactga

SEQ ID NO: 886854 - DNA, 120 bp, Artificial Sequence
  ENSG00000234132_4 (sequence is synthesized)
aaaaatcgaggggaagaggagagggcttggaggcagcatgtggggagaggtcaacctctaaagtgccagctctccagaaatgcagccggaatgaaggctttatttgaggagcctggcagt

SEQ ID NO: 886855 - DNA, 120 bp, Artificial Sequence
  ENSG00000234132_5 (sequence is synthesized)
gcaatctctgctgaaaagtgctcagccctggagagagaactgtgaacaacgtggacacagctcctgctttgtggagcttggtgtctgactggggtaaaaataaacaagcagttacaacac

SEQ ID NO: 886856 - DNA, 120 bp, Artificial Sequence
  ENSG00000234139_0 (sequence is synthesized)
gagacccgaaggaggcgaggggatgagccatgcttggagatgtctgtaggggaacagcttatgcacaggccacaaagccgaagcatgtgggccaggcctgttccaggaacagcaaagagg

SEQ ID NO: 886857 - DNA, 120 bp, Artificial Sequence
  ENSG00000234139_1 (sequence is synthesized)
ctggggaagagaggagagaaatgggaccatgggagggagttgaactgcagtgcgggagagctgaagtggaggcaggggcagaagcagggagacctgataactgactgttgcaatcaagca

SEQ ID NO: 886858 - DNA, 120 bp, Artificial Sequence
  ENSG00000234139_2 (sequence is synthesized)
tctgagacctccccagccatgtggaaatttgaaggcctgaataaaacagaaagactggcctccctaagcaagatggaattctccggcaggctgccttcaaactgcaccattggctctcct

SEQ ID NO: 886859 - DNA, 120 bp, Artificial Sequence
  ENSG00000234139_3 (sequence is synthesized)
tcaaactgcaccattggctctcctgggtcatcagcctgcaggcccacactgtgggattcgggcttgccagccttcataattaggtcagtggattcaaaacgatgaaagtggattcaaaac

SEQ ID NO: 886860 - DNA, 120 bp, Artificial Sequence
  ENSG00000234139_4 (sequence is synthesized)
caagtctcttttattctcttagggctgcaacctcttcacctgggaaatgaatggtcctgtgatttacaagagcagggtccaggctgaaggtgcaggccctatccaagacacaacatttcc

SEQ ID NO: 886861 - DNA, 120 bp, Artificial Sequence
  ENSG00000234139_5 (sequence is synthesized)
agtggcagagataaaaaagtaagatttcagactcaaacatgcaatggcactccaagtttctgcttcgaactggcatgtatctctctagctcacatttcattggccaaaggaagtcatgtg

SEQ ID NO: 886862 - DNA, 120 bp, Artificial Sequence
  ENSG00000234139_6 (sequence is synthesized)
gttaagcttgacaatgggctggggaagtgcactccttcctctggaaggtacacaagtcacatggcaactggctaggatggataattctcttactggccaagggaagggcaaataatggag

SEQ ID NO: 886863 - DNA, 120 bp, Artificial Sequence
  ENSG00000234139_7 (sequence is synthesized)
aaaaataatacgtcaaccacaggggttgagtaactttcccaagatcaaaccactgggaagggacagaggcagattcaaactcagacagtctccaaagccatagtgaactccatggctccc

SEQ ID NO: 886864 - DNA, 120 bp, Artificial Sequence
  ENSG00000234139_8 (sequence is synthesized)
tactgcctgttagatggaatccaaatatatttaagctttagggcattcctgcagcctggagggcccttctacctaatttgtgtgctgaattcactctttaaggctccactccaatctcaa

SEQ ID NO: 886865 - DNA, 120 bp, Artificial Sequence
  ENSG00000234139_9 (sequence is synthesized)
gcgacccgactggttctgtccgagcccgacgggccgcgctgacccagcgactgtgcctgactgaccacaggaaagccctgggtgaggatgccactgagcccgcctggagccaggagctgg

SEQ ID NO: 886866 - DNA, 120 bp, Artificial Sequence
  ENSG00000234139_10 (sequence is synthesized)
tctgcagaaactgctgggcctgtttctactctgatgtttacttggcctggaggcccagtgtgatgaaacccggccctgttgccgagcaccttgggaagcctccctccagggtccctctgt

SEQ ID NO: 886867 - DNA, 120 bp, Artificial Sequence
  ENSG00000234139_11 (sequence is synthesized)
gctcagacagtggccctttgtagagtggaggagcagactgaaagcggagctgctggaaaccgtttcctcccctctgcctcgagcaacctcctcccgcagccacagaccatcctgtgcctg

SEQ ID NO: 886868 - DNA, 120 bp, Artificial Sequence
  ENSG00000234139_12 (sequence is synthesized)
gtggcctctgctttaagtctgcagctggcgggggaggagactgtgcacaatcatggagggcagtggcaagtctggtggagagggaaggaggtcaggaaataaacgagagaggaaaattaa

SEQ ID NO: 886869 - DNA, 120 bp, Artificial Sequence
  ENSG00000234139_13 (sequence is synthesized)
gagagtgggtatcaggcagatttctgggtgaggcccagaggagcatttttattcatccatccattcaacaagggactatgtcttatccaacttgtatccctagagtataacacaacatct

SEQ ID NO: 886870 - DNA, 120 bp, Artificial Sequence
  ENSG00000234139_14 (sequence is synthesized)
ggaaaagaaaccatgggagaaaaccagagcctgggcaaacgaacatgcaagtggagacatagtgttttctaggacaacaaaacactttagtttggctagagctaagagtgtggtaggtag

SEQ ID NO: 886871 - DNA, 120 bp, Artificial Sequence
  ENSG00000234139_15 (sequence is synthesized)
ggggaggcaggcccagccgggacgaggccctgcctccagccaacgctccgcccagaacgaagccccgccccggaacgaagccccgcctccagcaactctctgcccggagagaggcccgac

SEQ ID NO: 886872 - DNA, 120 bp, Artificial Sequence
  ENSG00000234139_16 (sequence is synthesized)
agggctgcaacctcttcacctgggaaatgaatggtcctgtgatttacaagagcagagacagagtttcaccatgttgttcaggctggtctccaactcccgacctcaagtgatctgcctgcc

SEQ ID NO: 886873 - DNA, 120 bp, Artificial Sequence
  ENSG00000274515_0 (sequence is synthesized)
ggcagggtatagggagatcacaagggttagtgcagtttcctgagactgctaacatggcctgtttcccctaggactgaagaaggtccctggaggggagggaatgggaagatacaggttctg

SEQ ID NO: 886874 - DNA, 120 bp, Artificial Sequence
  ENSG00000274515_1 (sequence is synthesized)
agagttacaaaaaaacccgtctagaacacatgtgggagtaaatccaaaatggctggtctgtaaatgtgtgactgagtgtttgggaaccaactaaagtctgtcaagggtggtggctgagga

SEQ ID NO: 886875 - DNA, 120 bp, Artificial Sequence
  ENSG00000274515_2 (sequence is synthesized)
cgcctcggggaggttgggctggagggggaccctattgggtgaacagaaatcccaattgtattaagtaaactaataaaggtaaagcgtttactgtagtgtccatcactcagcaagcactaa

SEQ ID NO: 886876 - DNA, 120 bp, Artificial Sequence
  ENSG00000259343_0 (sequence is synthesized)
cttcatgtcccgctgtgggaggggctctggagcgccgggactgtgagatggccaatgacggtctgacccgttgggccgggccaggtcgcggacaacgtcgaccgtttgtttaagaagcgt

SEQ ID NO: 886877 - DNA, 120 bp, Artificial Sequence
  ENSG00000259343_1 (sequence is synthesized)
ggactcttgtcctgagtgcaccgaggctttcagcctgcgggacagtggtgcgatttgcattagagaaagggagatgccatgtgctggcccagcactccaacaggggcctgacctctagga

SEQ ID NO: 886878 - DNA, 120 bp, Artificial Sequence
  ENSG00000259343_2 (sequence is synthesized)
acgggacactggaggaagcctagacatctgaacaaatcaagtcatccagatccacggtcagctcctgccccgacttggccttcctcctgctgggctggcccacggacctcgggaacctgc

SEQ ID NO: 886879 - DNA, 120 bp, Artificial Sequence
  ENSG00000259343_3 (sequence is synthesized)
cctggctgtgggtgacctgcagcctatctcccaggactatggaagccccatgcaggaacatggttctgacactttggggattataccctaagcttaaaggactggaaaagcccctgaagt

SEQ ID NO: 886880 - DNA, 120 bp, Artificial Sequence
  ENSG00000259343_4 (sequence is synthesized)
cccgagaccacaaccctccaccttctaaagataagacaagtcactgaaggtctcagaactgtggcccattcaccccttccctcaagacaagagtgtggccaagcatcaatctcaccccca

SEQ ID NO: 886881 - DNA, 120 bp, Artificial Sequence
  ENSG00000259343_5 (sequence is synthesized)
gagaccagacggtgtccaggtcttgggcagacgaaacctgctccttggggatggtcttcctggctgtgcttccaaagggctggcctgcaatcagctggttttcacttgatcctttcgggg

SEQ ID NO: 886882 - DNA, 120 bp, Artificial Sequence
  ENSG00000259343_6 (sequence is synthesized)
tttgcattatatctgactgaaggaatgaactgggagagaacagcagagccgcagcggaatgtggaaaggcccacgtccagactgttcccattctgatttaaaagcctgatgaaggaacag

SEQ ID NO: 886883 - DNA, 120 bp, Artificial Sequence
  ENSG00000259343_7 (sequence is synthesized)
ctgaactcagagaaacagcagaggaaaggtcctgtgagggtacagtgagaagatggccatctaccagccaggaggaaaggcctaacaagaaaccaactctgctggcaccttgatcgtgaa

SEQ ID NO: 886884 - DNA, 120 bp, Artificial Sequence
  ENSG00000259343_8 (sequence is synthesized)
ctcccgccctctagaactgtgagaaaataaacgtctgtttaagccacctggtctgtggtattttgttatggaagcccgagcagaccaatatgcctactaagctctgtgacctagaaggct

SEQ ID NO: 886885 - DNA, 120 bp, Artificial Sequence
  ENSG00000259343_9 (sequence is synthesized)
atctggcaaagtgggagccagagaggctaggccactaaaagcctgtgtgcgaaatgatctgtacacagcgaattgactccacctttcacacattactacttaaatcatgaaaggagcatt

SEQ ID NO: 886886 - DNA, 120 bp, Artificial Sequence
  ENSG00000259343_10 (sequence is synthesized)
gcaaggaggaagtattttaacagcagaagaaaacatgcctccaatgtcaagaaatttcagcacaattttgtgcagccaggaccagatgaagggaaaggccaagcaatatgttttgaggac

SEQ ID NO: 886887 - DNA, 120 bp, Artificial Sequence
  ENSG00000259343_11 (sequence is synthesized)
tgaatatctatgcttccccaaattcatatgttgaaatcctaacttccgatgtgaagatatttgtaggtggggctttaagagataattaggtcacaagggcagagcccccatgagtgggat

SEQ ID NO: 886888 - DNA, 120 bp, Artificial Sequence
  ENSG00000259343_12 (sequence is synthesized)
tagtgctcttagaaaagggacccaagagggctgtctctcttgccctctttccgccatatgagaatccaatgagatggcatcatctgcaaatcaggaagaggatgctcaccagacaccaga

SEQ ID NO: 886889 - DNA, 120 bp, Artificial Sequence
  ENSG00000259343_13 (sequence is synthesized)
tctgccagcaccttgatcttggactcctcagcctctagaactgtaagaaataacgtttgttgtttaagcaacccagtctatggcaacttgttatagcagcctgaactaagataatctata

SEQ ID NO: 886890 - DNA, 120 bp, Artificial Sequence
  ENSG00000259343_14 (sequence is synthesized)
aggtaaggcaaataagaaaaaaatccaaacccaaaatgactttaagcgactcctagaggaaccctgccaacatcactaagttcagagaggtaaaatcaggcaacaagcagaattatcttc

SEQ ID NO: 886891 - DNA, 120 bp, Artificial Sequence
  ENSG00000259343_15 (sequence is synthesized)
gggggtccataaaaatttccaggtctggtcgcaactgtcatatcttgacacaaaggggcacatattggatcccagaaagttctatggacttcttagggcttgcaaaagttgtataatttt

SEQ ID NO: 886892 - DNA, 120 bp, Artificial Sequence
  ENSG00000259343_16 (sequence is synthesized)
attgattatataagtaatacatgttcattgttgagattttggaaataataatctatcatctgacctctctgagaaaaccattattaaccttttaactttctactttctgttatttgcatt

SEQ ID NO: 886893 - DNA, 120 bp, Artificial Sequence
  ENSG00000259343_17 (sequence is synthesized)
catacatgtttatccattatccatgtagcattttttatcatgcttttgaactccattttatttacatcatgatgacttgatagtgacaaaaaagattccaaaatatgattttaatgacag

SEQ ID NO: 886894 - DNA, 120 bp, Artificial Sequence
  ENSG00000259343_18 (sequence is synthesized)
atcgtggggagaagcaacgcaagaccccggaagcatgccaacgtgtaaaaccccaagtcaaaggtcaaacagtgcactggatctctcaagtcgcctgcttggccctctactaaaaaggga

SEQ ID NO: 886895 - DNA, 120 bp, Artificial Sequence
  ENSG00000259343_19 (sequence is synthesized)
gtgaaaagtccaagtcaaggaatagaagtagtcagttcgtggtggagttgcattgatgattccagagcggttcctgctcctcctctttaagccagtgtgttttaccaaagattttcggga

SEQ ID NO: 886896 - DNA, 120 bp, Artificial Sequence
  ENSG00000259343_20 (sequence is synthesized)
caaagaaaaagccaggcagtaggtgccaaatacagtgactcatcagatgaccctgctgtttatctccaacattttcatgaacagctttcaaggaatgaaggaaggaaatgttctgtgtcc

SEQ ID NO: 886897 - DNA, 120 bp, Artificial Sequence
  ENSG00000259343_21 (sequence is synthesized)
ataaagtaggattggaaacagttgacttgtatgaacatggccaacacaaaatagtccagggggatgtggaatatttgaggagaacaacattagactgagaaattatgacagtcaggaaaa

SEQ ID NO: 886898 - DNA, 120 bp, Artificial Sequence
  ENSG00000259343_22 (sequence is synthesized)
gaaaaattgtaccaaatatcaaagaacgtgagtttttttcaacagaaaactaaagcgatagatggaacctgtgagttcacttctaaaggagcattaaaaaaaaaatgaaacctaggaaaa

SEQ ID NO: 886899 - DNA, 120 bp, Artificial Sequence
  ENSG00000259343_23 (sequence is synthesized)
tgggtgaacagacttccctacttcctgcctccccaagggtggggagcagtctaggggatggctgtactcctgggcccagtgtctaagtgaaaattaggaggaaatggagggagggtggcg

SEQ ID NO: 886900 - DNA, 120 bp, Artificial Sequence
  ENSG00000259343_24 (sequence is synthesized)
agcgaggacagactggccaaggtcccccgcagccactcctgaagtcctcacgagggagaagcagcctctccttccagccttccccaagtcctccctaagagtgtattctactggtttctg

SEQ ID NO: 886901 - DNA, 120 bp, Artificial Sequence
  ENSG00000259343_25 (sequence is synthesized)
tgcagatttttttcggctgcgaccaatagtagcttaaacatggattattttctttttaatttcttcctgcaaaattcttaggaaaccattaataaaagtaatatacatgtgaaataataa

SEQ ID NO: 886902 - DNA, 120 bp, Artificial Sequence
  ENSG00000259343_26 (sequence is synthesized)
tgtcttcagaactcatgcccttacataaacaggctctacaggcagatcacctgaggttgaaaggtgaagccacctggacttctgggtccagtagagacttggagaacttttctgtcttac

SEQ ID NO: 886903 - DNA, 64 bp, Artificial Sequence
  ENSG00000259343_27 (sequence is synthesized)
tctgggtccagtagagacttggagaacttttctgtcttacaagtgttctgtagctagctagagg

SEQ ID NO: 886904 - DNA, 79 bp, Artificial Sequence
  ENSG00000259343_28 (sequence is synthesized)
tagctagccagaggttcagtgctccgtagctagctagaggtttgtaaaatgaaccaatcagcactctgtaaaatggacc

SEQ ID NO: 886905 - DNA, 120 bp, Artificial Sequence
  ENSG00000259343_29 (sequence is synthesized)
aatcagcactctgtaaaatggaccaatccactctgtaaaatggaccaaatgggaggggacaactcagggaataaaagctggccaccccagccctcagcggtaacctgcttaagtcccctt

SEQ ID NO: 886906 - DNA, 120 bp, Artificial Sequence
  ENSG00000259343_30 (sequence is synthesized)
ttaagtccccttccaggctgtgggaggtttgttctttcgttctccacaataaatcttgctgctgctcagtcttggggtccgcatcacctgtaagagctgtaacactcactgtgaaggtca

SEQ ID NO: 886907 - DNA, 120 bp, Artificial Sequence
  ENSG00000259343_31 (sequence is synthesized)
agagctgtaacactcactgtgaaggtcacgcttcattcctgaaatcagcgagaccatgaacccactggaaggaacaaactccggacacaagggcaggagtttgagaccagcctgaccaac

SEQ ID NO: 886908 - DNA, 120 bp, Artificial Sequence
  ENSG00000259343_32 (sequence is synthesized)
caagtgttttctttatgtcatctcctcgacaaattaaatatttcaatgtccacattctcagaaagaaaaggagtcagtgttttaatggatcctgtttaatctttacttccctgtatcctt

SEQ ID NO: 886909 - DNA, 120 bp, Artificial Sequence
  ENSG00000259343_33 (sequence is synthesized)
atttccgtgaatgtgacttcacaaatggagtcatcctatatcctactcccaaggcacaatctgctaaaagcaagaaaaaggctttgcgctgctaattcacccttttctgctcagcatttg

SEQ ID NO: 886910 - DNA, 120 bp, Artificial Sequence
  ENSG00000259343_34 (sequence is synthesized)
gctctaaactgtaacctgagaccctgaaattgctgaggcccttaacctctccttactcctttgactcagaatgatctcagcgggacagttcctggagtttccgttcatgtttcagaacat

SEQ ID NO: 886911 - DNA, 120 bp, Artificial Sequence
  ENSG00000259343_35 (sequence is synthesized)
gacggagaccaagaaaataaaacgttgattcccgatgccatgtggctcagggtttagacaatgtattctggtcacagaaaattgagaccaaatctgttttcttgcatctgttccattgcc

SEQ ID NO: 886912 - DNA, 120 bp, Artificial Sequence
  ENSG00000259343_36 (sequence is synthesized)
ctctgtgacattaattctcaacagcagattcaacgtgctggaactaaccaatgttagagtgcttaagaagtcaggttcaactgagctcgggtcactgtgctagaactatggttaccaaaa

SEQ ID NO: 886913 - DNA, 120 bp, Artificial Sequence
  ENSG00000259343_37 (sequence is synthesized)
ctgaagtatgtatttactcttcaattcctatttcagctgtgaaactgtgagttttaattagagagtaaagagtttgtctccttagcttcatgttagaaagcaaaatgaaaaaaattgtct

SEQ ID NO: 886914 - DNA, 120 bp, Artificial Sequence
  ENSG00000259343_38 (sequence is synthesized)
aaaacccttaaaaaatagtccaaacctgggataattcttctccgctattcatgaaaatatatgacctattttaggcaggtaaaacagaggcaaaattaaattgagacatttgaaaccatg

SEQ ID NO: 886915 - DNA, 120 bp, Artificial Sequence
  ENSG00000259343_39 (sequence is synthesized)
gaataatctaacaacacgctttttttaattcattcacaaatgacatgtcaagttcctaatatttataatgaactgctttaggcatgagacaatgaaatagtgtataaagtattgcaaata

SEQ ID NO: 886916 - DNA, 120 bp, Artificial Sequence
  ENSG00000259343_40 (sequence is synthesized)
aactcatatatgtaaaattgttttaaaaattttagtgttatggaaatatagcactgttgtattaaataataacctattctataatctatttttcttggctttagaaagaaacagctctta

SEQ ID NO: 886917 - DNA, 120 bp, Artificial Sequence
  ENSG00000259343_41 (sequence is synthesized)
gtgttgctgacaagagaggagcaggctgagagaaaacgccctgtttgtcacaaagttacatctgcgagctccttcaaggaagggagtgcccctggagagtggagagggtggttctcttgg

SEQ ID NO: 886918 - DNA, 120 bp, Artificial Sequence
  ENSG00000259343_42 (sequence is synthesized)
ctgtctctggaacaaatttgggtaagtgctcaaagatgtgttactacagaatgtacttgtgaagttcttgttgcagtgcagtcagataagcaaagatatctgctagaaaataaagaaaaa

SEQ ID NO: 886919 - DNA, 120 bp, Artificial Sequence
  ENSG00000259343_43 (sequence is synthesized)
gtctgtcataaagctacagaaaaagaccatattgaaaactgacgatagcagttgattatttgtgaaaagcctgagagatgattcagtaaatacaaggtgaatttcattgcatcttcatgc

SEQ ID NO: 886920 - DNA, 120 bp, Artificial Sequence
  ENSG00000259343_44 (sequence is synthesized)
aatcagagacttgcatacactttttatcccctaaacagatgaacgaatggcatgggccagctagcagggagttggcaggataaagttctaaccaacaattgccacttgccttcctttctt

SEQ ID NO: 886921 - DNA, 120 bp, Artificial Sequence
  ENSG00000259343_45 (sequence is synthesized)
ccatcagcttctagcttacctttcagagacaggttctatcaaaggaaacctaaagggaaccttcctccctggccctgccccatctagcgtccacaaggatactacactccagtgaagact

SEQ ID NO: 886922 - DNA, 120 bp, Artificial Sequence
  ENSG00000259343_46 (sequence is synthesized)
caattcatcctaaaatcaagaccaaggtagaattctcgaacttggcctattctgaaaaaaatggacatggctgggacagagagcttgtgtgaatattcccaattgtgaacatggaagcta

SEQ ID NO: 886923 - DNA, 120 bp, Artificial Sequence
  ENSG00000259343_47 (sequence is synthesized)
taaattgaggtgtcagaaccacaagatggaagtacgttggatttctgagtcaccacctggaggagagcttccctgcagcattgctggaatctgatgtgaactagatattcatcttgatcg

SEQ ID NO: 886924 - DNA, 120 bp, Artificial Sequence
  ENSG00000259343_48 (sequence is synthesized)
tgttgacttgaacctaattcaggcctaagacataatatatactgcataatatatgccgtataatgataatatatttatgcagcctttattgatatgagtagtggtttatctcagttttat

SEQ ID NO: 886925 - DNA, 120 bp, Artificial Sequence
  ENSG00000259343_49 (sequence is synthesized)
aataaaaatctctcaaagaacattgactccaaggaataacaatcacaaaaggattacagctttgtttaacactttctgcaaatccttgaagctgatctttcctgttgtttctaatcccaa

SEQ ID NO: 886926 - DNA, 120 bp, Artificial Sequence
  ENSG00000259343_50 (sequence is synthesized)
tagccagcctaaaccttttggtgtaatctcatgtattctgacctctgttatttcctgctgcttaatgatctttctataaattgtatgggaaatgaagcaaatgtaattacagtgtctgcc

SEQ ID NO: 886927 - DNA, 120 bp, Artificial Sequence
  ENSG00000259343_51 (sequence is synthesized)
agccctgatgcagataaataggtgggagtctggccaagtgtctccccaagctagcctttggtgtctttcactcacagcagaaagaaataggtcataaattacagcactgatttgttccaa

SEQ ID NO: 886928 - DNA, 120 bp, Artificial Sequence
  ENSG00000259343_52 (sequence is synthesized)
tgatatcattagctcctggaaaacaaggatcatgaaaaacccatttcaaatgaacatatgagtcaataccaaccaagcatcttttggaaaagagcccttataaattcatactagaattct

SEQ ID NO: 886929 - DNA, 120 bp, Artificial Sequence
  ENSG00000259343_53 (sequence is synthesized)
gactcctaagtgaatatctctggatcttcagaacatagaagacttagctccagcccatgcatcagtcccttcagaccatagagtcataaccaggcctattgaaagagctggttacatgag

SEQ ID NO: 886930 - DNA, 120 bp, Artificial Sequence
  ENSG00000259343_54 (sequence is synthesized)
acagtcagagatttacctaggtgagaaaataaagattagatggtttgaagcagagttctagcccttccaaatcagacctccaacccctttcttaattctatagtttgtagttttcaaagg

SEQ ID NO: 886931 - DNA, 120 bp, Artificial Sequence
  ENSG00000259343_55 (sequence is synthesized)
atggtttttgtttgataatatgaggataaaagcatacccttttttgacctatcccaggataaaatgcaggtggagaaaaggttttccgtattgtctttagccttgacacaacaaaatagg

SEQ ID NO: 886932 - DNA, 120 bp, Artificial Sequence
  ENSG00000259343_56 (sequence is synthesized)
aaaagatattttccgatctgggttgagtagatgcaaagaagtgttttaaggtacatctgtagagcacactcagcacttggggactcaggtgcctcaagagaagctagagacctaatgtag

SEQ ID NO: 886933 - DNA, 120 bp, Artificial Sequence
  ENSG00000259343_57 (sequence is synthesized)
ggatatagaggccaggaggacacactggaacacagaagatgacagcttttgaaagagctcaagattctaatttcttgaaccagaggacagattctcctctatgtccgttcacactttcag

SEQ ID NO: 886934 - DNA, 120 bp, Artificial Sequence
  ENSG00000259343_58 (sequence is synthesized)
actttactctgcattagccctctgttccccacacctgcttctggacccctgggtggttacacactctgacttcatcaacccttatccttattgtagggatatgaaatttaaaattggcat

SEQ ID NO: 886935 - DNA, 120 bp, Artificial Sequence
  ENSG00000259343_59 (sequence is synthesized)
cttccacagccaattctggtcactattcttgttactttaactgatatgcaataaagaatatgcctgactttgtccctggttcctgggaagtagcatcaaaacctttagaatttcttaagt

SEQ ID NO: 886936 - DNA, 120 bp, Artificial Sequence
  ENSG00000259343_60 (sequence is synthesized)
ggtaggagtgtctattattcatggtgaactcctgggatcaaacttgatagtctgtgctaaagagatgactcaggacaggagctggctgctcctgccagaaagaccaaccatgtgattaga

SEQ ID NO: 886937 - DNA, 120 bp, Artificial Sequence
  ENSG00000259343_61 (sequence is synthesized)
gggtggggctttgagccaggtgatatcagctcagtctccagggagccaaggggagctagagattgaattcaactgcaaggccaaagattccatcagtcatgattgtgtaatgatacctca

SEQ ID NO: 886938 - DNA, 120 bp, Artificial Sequence
  ENSG00000259343_62 (sequence is synthesized)
ataaaaactctgggcagcaaagctcagttgagcttcacaggttgttaatattctgataatgtcacacattgatatgccaggaaggtaatgcatccttactctttggggatagaacaacag

SEQ ID NO: 886939 - DNA, 120 bp, Artificial Sequence
  ENSG00000259343_63 (sequence is synthesized)
aagctttgtgttgaactcccctagacctcattatatgtgtatctctttccctttggctggttctgatgtgtatccttttgctgtaataagactacaactgtaatttataggactttcttg

SEQ ID NO: 886940 - DNA, 120 bp, Artificial Sequence
  ENSG00000259343_64 (sequence is synthesized)
agttccatgagtcattttagtgaattattaatcctgagggggttatgggaaccaccaaatttgtagcaagctggtcaggagtaagagtggcctgtgagcctttgaacttgtgtctgatgt

SEQ ID NO: 886941 - DNA, 120 bp, Artificial Sequence
  ENSG00000259343_65 (sequence is synthesized)
ctttagtttgtgtagtcttgtggaaaactgtgtccctaacctgtaaagtaactggtgtcaaaagtcagtgaaactaggcataattagaactcatggacattcacacccattccacttcag

SEQ ID NO: 886942 - DNA, 120 bp, Artificial Sequence
  ENSG00000259343_66 (sequence is synthesized)
tcacatgcttccgaggcctcactgagttccttttacacatctatcttctctactttggttcttattccgtatgatggcaaaaagaaatacaactggactctaagatgatggtgactcatg

SEQ ID NO: 886943 - DNA, 120 bp, Artificial Sequence
  ENSG00000259343_67 (sequence is synthesized)
gcctgacgctccttgttaatgccggttgctgttacagacttgcaattgtgcaactctgtgatgtaaacaggcaggctttgtatttttgcagtgcccctggagagtggagagggtggttct

SEQ ID NO: 886944 - DNA, 120 bp, Artificial Sequence
  ENSG00000259343_68 (sequence is synthesized)
taaggagtggaaatatagttttcctgaagcattagatgcaaccaatgatgctataatgcatgcttgtttaagggttctggtaaaacagtatggttgttaaaagataagctccagaatttg

SEQ ID NO: 886945 - DNA, 120 bp, Artificial Sequence
  ENSG00000259343_69 (sequence is synthesized)
cagcatagatgacaagttacagagaaacatcttgaataaaacagcggaagttgttcatgggtaggatttatggtagatccttggagacagggaggacccttctgaattcaagaaagccaa

SEQ ID NO: 886946 - DNA, 120 bp, Artificial Sequence
  ENSG00000259343_70 (sequence is synthesized)
cattaattaccaagaaaaagaggagttacagattagaaaatttgactctggtgataggaaaagtcacagaaacttgatatgaaataagataataaaccagatggagaaatacgactgatg

SEQ ID NO: 886947 - DNA, 120 bp, Artificial Sequence
  ENSG00000259343_71 (sequence is synthesized)
gagctataagaagtctcaactgtgtaattaaaataaactcattttgctaatgagttagatatttttaagtctacacatttgaaaagggaacggagaagaaaagaaaaacttcattgtatt

SEQ ID NO: 886948 - DNA, 120 bp, Artificial Sequence
  ENSG00000259343_72 (sequence is synthesized)
tcaggagcaatctgtctcacctgctacacaaggaatattgctatgtgaaaacaaaggtttactcagcaatcatgcagtgacggcgttccaaattttcagttatttatttccttgcgttgg

SEQ ID NO: 886949 - DNA, 120 bp, Artificial Sequence
  ENSG00000259343_73 (sequence is synthesized)
agtaaataagagtaaataacaaatatagtactgatcaatcatgcttatccagctggagctggtgagacagcagattgcagaaatatcattcatttatccaacaaacaatggtagaaaatt

SEQ ID NO: 886950 - DNA, 120 bp, Artificial Sequence
  ENSG00000259343_74 (sequence is synthesized)
tatgtgccaaatcctgtgttggacactagaaattcaaagatcagtaagacattgcacctcgatgagtttaccatgtgggagagatacataatgccataattactatctaatgtgataata

SEQ ID NO: 886951 - DNA, 120 bp, Artificial Sequence
  ENSG00000259343_75 (sequence is synthesized)
gagccctcctcaccagtctatggagacaaagatagacacttaatgcagcccgaaagagagaagtgaccagtcaagccttccttggttagagagatcccagccatgtttagagtgacagca

SEQ ID NO: 886952 - DNA, 120 bp, Artificial Sequence
  ENSG00000259343_76 (sequence is synthesized)
aagatttcagtgatttgggaaagaagagagatgcttcacattttaagcacaagatagttttcagggtgcagagaagagtaatttttctaaggacccagaggatccagtagacctctgtgg

SEQ ID NO: 886953 - DNA, 120 bp, Artificial Sequence
  ENSG00000259343_77 (sequence is synthesized)
atcaggacacctgggagagtcccagacatcagggcgactggaaggctcttccccaaccagggcatattccaaggctccaaggctccagctctcagaaagctttggggaatgttctaacag

SEQ ID NO: 886954 - DNA, 120 bp, Artificial Sequence
  ENSG00000259343_78 (sequence is synthesized)
aaggacaactgtttgtctctcttttcacagctgagcaaaggaaaatcctctgggaaggaggcaaataatggataactactatttggggccagctcctggttttgcttgtctatgatgagg

SEQ ID NO: 886955 - DNA, 120 bp, Artificial Sequence
  ENSG00000259343_79 (sequence is synthesized)
actgtgctaataaattactgcctttcaggtttaatcaacatattttgggcacctagttttgctggatatggcattaagcatcctcacacatttcagtttgtttactcttctgcaatagtg

SEQ ID NO: 886956 - DNA, 120 bp, Artificial Sequence
  ENSG00000259343_80 (sequence is synthesized)
agaggagaggtaaatatccagttgatagacaacaagggcagatatggggaaaccaaagacatgttgctaaggctgactctatatcatccaaacctgggagatttggggaatgaaagaact

SEQ ID NO: 886957 - DNA, 120 bp, Artificial Sequence
  ENSG00000259343_81 (sequence is synthesized)
gagcccacagacaagaaccagatcatcccagggaagctgggacttatggtcaccctgaaaagaaatggcagctaggcgacaaaacccatgtcttcagacttaagtctaaatcagtttata

SEQ ID NO: 886958 - DNA, 120 bp, Artificial Sequence
  ENSG00000259343_82 (sequence is synthesized)
tgtttcctaagtaaaatgtttctaacaagaaatgttcagttatcattatctgttggatgttaggcaagacactaagcttctctgcacttcagttttctcatctttaaaaaggggaaaata

SEQ ID NO: 886959 - DNA, 120 bp, Artificial Sequence
  ENSG00000259343_83 (sequence is synthesized)
atagcagttacttcatgggtttactataaggattaaatcagttactacaggtagaaaagtacttgatatctagcactattaaataaatgtcacctattatttttaatactgtatttgtaa

SEQ ID NO: 886960 - DNA, 120 bp, Artificial Sequence
  ENSG00000259343_84 (sequence is synthesized)
agatattttgcaaaatacagtggctctaagaatttgacaggaggcgtattactttgtacctctcaattgccatgtattttactgaatgattatgaagagaatgttttctggatgtatgga

SEQ ID NO: 886961 - DNA, 120 bp, Artificial Sequence
  ENSG00000259343_85 (sequence is synthesized)
atatcccaagttcttgttttttgttcgtttgtttgcttgtgttttaacaaatagcactattctggtccaacaggtaaaatcagctcctcagtgtctccaaggacaggaatgccatgggct

SEQ ID NO: 886962 - DNA, 120 bp, Artificial Sequence
  ENSG00000259343_86 (sequence is synthesized)
agaaactttgatacctaccaaatcattccttggttgtagactaaatgtagcacattctcagctattttgaattctccatattcaggctacaagagaaaataaacttgtgcattaaacaag

SEQ ID NO: 886963 - DNA, 120 bp, Artificial Sequence
  ENSG00000259343_87 (sequence is synthesized)
actctcgattttctttatcctcatttcccagggaatgaagatgaccacaaagttacaggcgagacgagcaaatttccgccagagctagacaagaggggtcaggattagagaggtcacgta

SEQ ID NO: 886964 - DNA, 120 bp, Artificial Sequence
  ENSG00000259343_88 (sequence is synthesized)
catgaagatggcaatggctgtgcagtactaggcacctaaatggagtataccagacactccctctggtacctttaattatgattatggcttcataggcctttaagctgcactagaaccaaa

SEQ ID NO: 886965 - DNA, 120 bp, Artificial Sequence
  ENSG00000259343_89 (sequence is synthesized)
gtagctcccttgtctgtgctcctaaccaggtgaatggacaccagctttggaggaataatgcaagctgcagccccatataatatgcacctcaatacagacaccacccgagccgtgatgcct

SEQ ID NO: 886966 - DNA, 120 bp, Artificial Sequence
  ENSG00000259343_90 (sequence is synthesized)
gtattgaagtggatattctatagggttgcagtttgcattagccatcccattcctgatgaggggtatctcttgctctttgagaaaaaaaaatctttttaacttttggcaattacatcttaa

SEQ ID NO: 886967 - DNA, 120 bp, Artificial Sequence
  ENSG00000259343_91 (sequence is synthesized)
aaccacaagacacagtacaaattactcgaggaatgatatctaaataaatccacttgatcctgtcataaacctaaggggattctgagagtgtgccccaggaatccagatgcctaacagact

SEQ ID NO: 886968 - DNA, 120 bp, Artificial Sequence
  ENSG00000259343_92 (sequence is synthesized)
ccccaggtgattacaagtgcatccctgtttaaggaccaagagtctagagcctaccctgaaaatgagccccaccctaatgtgtgactcgcctcctgctacagcctctttcctggatagagc

SEQ ID NO: 886969 - DNA, 120 bp, Artificial Sequence
  ENSG00000259343_93 (sequence is synthesized)
atccaagtgccagcaaaaccacttgggtggtcgcaaaatggagtgaggaggatcatgagggctgtgtttctgaagaacccacagggggaggcagcagggatgaactgcaaaaaagtggca

SEQ ID NO: 886970 - DNA, 120 bp, Artificial Sequence
  ENSG00000259343_94 (sequence is synthesized)
gtctatgctgcacacatcagccccacaaaagaataacaaaatccaggagcagagagctgagctaccgtaactgagaatggctccgcagtggggatggtttgagaaccgtgacctgggtct

SEQ ID NO: 886971 - DNA, 120 bp, Artificial Sequence
  ENSG00000259343_95 (sequence is synthesized)
agatggcccctcttggagctcactgggaccctgcatacattccctgcctattgacctcacacagcagtggcttagctcggctgagaggagaactgtctgttcctctttgttggtttaacc

SEQ ID NO: 886972 - DNA, 120 bp, Artificial Sequence
  ENSG00000259343_96 (sequence is synthesized)
gcatgctaactgcattatcatttttttctgcacaaaggaagcttagcaagaaaacaattatgggatggacttcaaatgatctccaaatggccataaaatagagatgtagtcaacagagag

SEQ ID NO: 886973 - DNA, 120 bp, Artificial Sequence
  ENSG00000259343_97 (sequence is synthesized)
gcaggagaaaaaaaaattaacaaggttttgtttgctaaaatctaggattcatttgattttaaagctgtgtgacccacttccattctttctcccttccatcagctttctgcacaaaccttt

SEQ ID NO: 886974 - DNA, 120 bp, Artificial Sequence
  ENSG00000259343_98 (sequence is synthesized)
gaccctatgcacttccttagggaatggaataaaaaaaaatacatgatcttctccttaaagcaacttgatgcttgatagaatgacagacaaagcaagaattgaaacagagtgaggtgactg

SEQ ID NO: 886975 - DNA, 120 bp, Artificial Sequence
  ENSG00000259343_99 (sequence is synthesized)
ctgtgatgggtgaatgcttagagctagggaggggtagaagaggagagagaaggagtattgcttagtttgggtcttgaaagataagttactgttcttaaactacagtagtatactgttgag

SEQ ID NO: 886976 - DNA, 120 bp, Artificial Sequence
  ENSG00000259343_100 (sequence is synthesized)
gggcacagatggaccattcaagacagaaagctgcaatggcctgtggggacaggcggaaactgccaccctcctccagtcactcaggccctaaaccatagctgtgacagtctatcaacttac

SEQ ID NO: 886977 - DNA, 120 bp, Artificial Sequence
  ENSG00000259343_101 (sequence is synthesized)
attccaacctcacctgcaggacacaagggagagagttgccaaagaggtggctgtaggtaatggggtatatacatttggatactggacacagagaagacacagatccaaagtctcattggg

SEQ ID NO: 886978 - DNA, 120 bp, Artificial Sequence
  ENSG00000259343_102 (sequence is synthesized)
ataaggaagttaggagagcttgagtttccttgttcttattaaaatatatgaacactccttcattgattatcaataccatcctgtctgaatgcagacatctggtagtggtctcatgtcttc

SEQ ID NO: 886979 - DNA, 120 bp, Artificial Sequence
  ENSG00000259343_103 (sequence is synthesized)
agcaggaactcccttcttttctatcctagcctcctgtccacatcccaataggcttagtgagtcttttgggtagaaaaaaatcttagagccttttattccaaatccctcctgataagtgaa

SEQ ID NO: 886980 - DNA, 68 bp, Artificial Sequence
  ENSG00000259343_104 (sequence is synthesized)
tcttagagccttttattccaaatccctcctgataagtgaaagaagccagtcttaaacagctacatact

SEQ ID NO: 886981 - DNA, 120 bp, Artificial Sequence
  ENSG00000259343_105 (sequence is synthesized)
attctaatatctcctgactgtaccaaattgggagcctatagttaattgtgtagttaattgtattccaaaatactcatttggaagtcatttggtaagaaattcacacataaaaaaaggtta

SEQ ID NO: 886982 - DNA, 120 bp, Artificial Sequence
  ENSG00000259343_106 (sequence is synthesized)
tgctagcaaataacagatgaaatgtaaaagcaattatctttgcaatgtagcatgcatttatagtcattgttaagtaattctgtgtcttagattacaaacttgaaattgcagaagagcaaa

SEQ ID NO: 886983 - DNA, 120 bp, Artificial Sequence
  ENSG00000259343_107 (sequence is synthesized)
atgccacatatgtgatgcccggatcgtatccattccacaaacacaattcaacctgcttgtttttatacacacacatggaaaatgtattccactagcataaattatgtatgcagatgaaaa

SEQ ID NO: 886984 - DNA, 120 bp, Artificial Sequence
  ENSG00000259342_0 (sequence is synthesized)
agtctggtggtgaatcgtccatagtctgggacaggcaggggagcccagcggcatgctggatatgaatgtatcttcagccttcaagttaccattggccagagggaagagtggccccaaact

SEQ ID NO: 886985 - DNA, 120 bp, Artificial Sequence
  ENSG00000259342_1 (sequence is synthesized)
cagagggaagagtggccccaaactctgaagagcgctggcaaggctccccatcttcctctccctagcctccacaggaacatcacagtatggcttggcattttttttttttttttgagacgg

SEQ ID NO: 886986 - DNA, 120 bp, Artificial Sequence
  ENSG00000259342_2 (sequence is synthesized)
tggcttggcatctttagggcagatctcagtatgccttgcattccaattcatctccagaatcctacacttcctccaaggagttggaaaaagctcatgatgacttcagcgaagaattgccaa

SEQ ID NO: 886987 - DNA, 120 bp, Artificial Sequence
  ENSG00000259342_3 (sequence is synthesized)
atctagaaattaaaaatccaaagtattgatcgcctggtgggcgccaaaccgtccaccgcgctccgcaggccaactgcgggccggcgcgtccgcgtctctgcagatgggagactcacctgg

SEQ ID NO: 886988 - DNA, 120 bp, Artificial Sequence
  ENSG00000284650_0 (sequence is synthesized)
gctgcgagcaacagggagcaagccagagaggccgatggaggaaaagtcagagacaaagagatgttgctgccaaatccctttcatctccagcagagagagagagagtctgaaactccacga

SEQ ID NO: 886989 - DNA, 120 bp, Artificial Sequence
  ENSG00000284650_1 (sequence is synthesized)
tgaggaactgagacccagagagtgaaagtcactggaccctgggcacacagagtcaaaatgcactgtctattctgccaggcctttggtccagctggactgatgggaaaaggtgcaggggag

SEQ ID NO: 886990 - DNA, 120 bp, Artificial Sequence
  ENSG00000284650_2 (sequence is synthesized)
gaaggcctcaggcgtcgtttggagaagtttaaaatggatgctgtggccagtggagagagatcagtctaagctctgaatcgaacactctggtgatttctgcaaaaggtggatggaaggagt

SEQ ID NO: 886991 - DNA, 120 bp, Artificial Sequence
  ENSG00000284650_3 (sequence is synthesized)
cgaggctggaggcagggatcatgagggaggcagcttccacaggcattttttttttttgcaactttttaaatttatttttctaattgatgcataacaattgtacttatggggtacagagtg

SEQ ID NO: 886992 - DNA, 120 bp, Artificial Sequence
  ENSG00000284650_4 (sequence is synthesized)
tgtgttgggaacatttgatatcctccttctagctattggaaactgtacgttattgttaactatagtcatcctacagtgctatagagcactagaacttactctaccgcctagctgtaattt

SEQ ID NO: 886993 - DNA, 120 bp, Artificial Sequence
  ENSG00000284650_5 (sequence is synthesized)
tgtgtccttgaaaaaatctctccctatccttcctccccactcctcttcccagcctccaataacctctgttctgctttttacttctatgagatcaactttcttttagcttccgcatatgag

SEQ ID NO: 886994 - DNA, 120 bp, Artificial Sequence
  ENSG00000284650_6 (sequence is synthesized)
tgagaatgttcggtgtttaactttctgttcctagcttatcttatctaacataatgtcctccagttccacccaagttgctgcatatggaaggacttccttcttttttatggctgaataata

SEQ ID NO: 886995 - DNA, 89 bp, Artificial Sequence
  ENSG00000284650_7 (sequence is synthesized)
tggaaggacttcctgtatatgtaccacactttctttacccacccatctgttgttgggcacttgggttgattccatatcttggctattgt

SEQ ID NO: 886996 - DNA, 120 bp, Artificial Sequence
  ENSG00000284653_0 (sequence is synthesized)
ggaaaataaaaggagaaagaaagaaaccctcaccaattccctgggaagcatttgcaaacaacatctcattgaacaaggaatgcatgcaaggttcacgcgggtggcaggcagggtagtaag

SEQ ID NO: 886997 - DNA, 120 bp, Artificial Sequence
  ENSG00000284653_1 (sequence is synthesized)
tgacctcatttctgttgctgacacgggcccacctgctgccaggcgtggcagagcaagccgctacacgggcctcgccaagcgggagcttctgcccagcaagatatttcttcctggaaggaa

SEQ ID NO: 886998 - DNA, 120 bp, Artificial Sequence
  ENSG00000284653_2 (sequence is synthesized)
gcactgaggctcagccagacctgcagggatctgaagagcattgttctttcctgttttaacatcccaggtcaacagccattccccagtgactgctgagtccagggctctgagcttccagct

SEQ ID NO: 886999 - DNA, 120 bp, Artificial Sequence
  ENSG00000284653_3 (sequence is synthesized)
gagaaagcagatgaaaaagccacaaacctgccttgagaggctggtggtctggaaggggagaggacacagagaacagacaatggaatcagtgcaggagtgatgagggaaaaaggaaggacc

SEQ ID NO: 887000 - DNA, 120 bp, Artificial Sequence
  ENSG00000284653_4 (sequence is synthesized)
acctgaggctgacaagccctggaaccccaaccctccatttaccgagaagtgcctaaaggtcatgggtggcatcctgggtggtgaagcacctgttacttggaagtactaatgctccatggt

SEQ ID NO: 887001 - DNA, 120 bp, Artificial Sequence
  ENSG00000284653_5 (sequence is synthesized)
cgtcatcaccttgccaagcctagctcctcctaggtccatggttggatctgcatgtcccaggaaatatttactctgctctaattacgtgatgggtgccgtgggagtacagcggtgaacttc

SEQ ID NO: 887002 - DNA, 120 bp, Artificial Sequence
  ENSG00000284653_6 (sequence is synthesized)
aaaagacagtttctgccttcaaggatcctccactggggacacagataataaggctgtctcctgaatgctggagcattttctcgtgggtaaccatgcatcaaacagcaatgagagaaggac

SEQ ID NO: 887003 - DNA, 120 bp, Artificial Sequence
  ENSG00000284653_7 (sequence is synthesized)
ctgaattcatgctgattttcacttgccttaatgtaaaacaggattgcctgcatttcagattttgctagtttatcttgcacggccaaagccccagttatctctgcttcactaagtcttgag

SEQ ID NO: 887004 - DNA, 120 bp, Artificial Sequence
  ENSG00000284653_8 (sequence is synthesized)
atcatccctctctgtctctcccaagaactgggaactagaagctcctcgcctggatgatccatttccctggatttatttatcttgctctgggccccagaagcattaggcttcgcctagcag

SEQ ID NO: 887005 - DNA, 120 bp, Artificial Sequence
  ENSG00000284653_9 (sequence is synthesized)
atccagcctctcttcgctgctgcacatccaaatcctacttcagacacccactgtagcaaaactacagccctggatgaaggagcaatgccagtcagcatcatccaaggagaaggtgaatgt

SEQ ID NO: 887006 - DNA, 120 bp, Artificial Sequence
  ENSG00000284653_10 (sequence is synthesized)
aatgactgattaacgaacgaagactccaccttctcttcctctcgtggatcccagcgaacttccagggcatgggttggcataggtttgaagaaggtttctcggcctctgcactgtctacat

SEQ ID NO: 887007 - DNA, 120 bp, Artificial Sequence
  ENSG00000284653_11 (sequence is synthesized)
tttgggcccgctgagtctttgtagttggggctggcctgtgcattgtaggatgtttagcagtttccctggtgtccacctaccagatgccagttgcacctaccaagttctgacacccaaaat

SEQ ID NO: 887008 - DNA, 120 bp, Artificial Sequence
  ENSG00000284653_12 (sequence is synthesized)
gtcttcagacatcgccaaatgtcccctgggggacaaaaatcacccctggttgagaaccactgggttggaatacaagcctgaaaaaccgctcccagtctgccaggtaagtgacccacactt

SEQ ID NO: 887009 - DNA, 120 bp, Artificial Sequence
  ENSG00000284653_13 (sequence is synthesized)
gctttacaaaaccccatgcacggagcaacagaaccttgggacctgggactaagcttgtagctccgtgttgaaagcctgcagcgtcacttgcattttaaatcaaggctcggtggagattcc

SEQ ID NO: 887010 - DNA, 120 bp, Artificial Sequence
  ENSG00000284653_14 (sequence is synthesized)
agttacagcctgcaactgcatctgccttgggcttcctcctaattttaaccagcagctggatttgcataggacatttgcatctgaaattacccatgattctttgggagccatagtctacag

SEQ ID NO: 887011 - DNA, 120 bp, Artificial Sequence
  ENSG00000284653_15 (sequence is synthesized)
cagatgatggcaaaaaatatatataattccatttcagcttgcaaagtaggggggaggaaggagatgaagacttcagggagggagggtactttaagaaaatttcagtgctttatataattg

SEQ ID NO: 887012 - DNA, 120 bp, Artificial Sequence
  ENSG00000284652_0 (sequence is synthesized)
cggatgtctcctagagagaaagggatgggagagtcctctgtggagtggcttctgttccctacatcccagagaggctcagcttttctggccgatggagtgcagttttatttgtttgagaat

SEQ ID NO: 887013 - DNA, 120 bp, Artificial Sequence
  ENSG00000284652_1 (sequence is synthesized)
atgttttgttttcttcctttttctcgttcttgcttaccctcaaaacatgggaagaaaagctgtctgactcaaacagccagcagtctggtccgggccccctaagatggagaggcgccattt

SEQ ID NO: 887014 - DNA, 120 bp, Artificial Sequence
  ENSG00000284652_2 (sequence is synthesized)
cccagcaggccaagaaatgccccgggagctccaagggttctgtgggtcccgggatgagaggctgacacagccaagaagacccagggtgaggctgagcggaggctgaggcggcatgcctgg

SEQ ID NO: 887015 - DNA, 120 bp, Artificial Sequence
  ENSG00000284652_3 (sequence is synthesized)
ccgcccacactgccatccgtcctagcgctctgtgcagagcacggctgaaaactccccaggtatctttggaaatgaagaacactgggttggcacccggcaatttgggacagcagcttttct

SEQ ID NO: 887016 - DNA, 120 bp, Artificial Sequence
  ENSG00000284652_4 (sequence is synthesized)
ggagcgcacagcttgggaataagcctgaagaaatctttcattcctagagcgttggtggataaatggtacttatttgtttaacctcaaatcaagccgcagcccccatttctggggctgctt

SEQ ID NO: 887017 - DNA, 120 bp, Artificial Sequence
  ENSG00000284652_5 (sequence is synthesized)
tgcgagggttgttttaaaatagctgaacaagctgaaaatcacgggtctaggttgctggaatggctttgcagagagcagccgggcttaggaagttctttaattttccatagaatgtgactg

SEQ ID NO: 887018 - DNA, 120 bp, Artificial Sequence
  ENSG00000284652_6 (sequence is synthesized)
gcagtggttgggggttggggtcgggggtagggggagggaggtgagctgtcggagaggaacaaagcctgggcccttcttctagaagggtccgtattggctgaacaatctctgcagtggatt

SEQ ID NO: 887019 - DNA, 120 bp, Artificial Sequence
  ENSG00000284652_7 (sequence is synthesized)
attcagcagagtgaagttcctcggttattcctgtctgactggggtcaatttcctcttttattaacggaacagctctttcctcaggagaacctatttcatggatttaggtaggactgactc

SEQ ID NO: 887020 - DNA, 120 bp, Artificial Sequence
  ENSG00000284652_8 (sequence is synthesized)
ggtagtgtacataactgtttaatggccagctgggggcaggcagaggggacagggaggaaagccttgatttgtagcatttgccaatttccatggtgtaaatactcccccactaccagcttc

SEQ ID NO: 887021 - DNA, 120 bp, Artificial Sequence
  ENSG00000284652_9 (sequence is synthesized)
aagctacagacataacatcactgagacgtcactgaccttggactcgggaacagatgagcacacccagctctcacaaacacatccccggtgctgattttaccccatccagggctgggcaca

SEQ ID NO: 887022 - DNA, 120 bp, Artificial Sequence
  ENSG00000284652_10 (sequence is synthesized)
tgacccaaagctgccctatgggagttcctcagggccatcagaggagactgctccttttcttaggcattgctaaatagaatgttagttggggactgccagcagccatcttgccagctctag

SEQ ID NO: 887023 - DNA, 120 bp, Artificial Sequence
  ENSG00000284652_11 (sequence is synthesized)
agagagaatttggttgagagggggagaaagggcacccatgacatcctctgaacccctgaagccagccatacctgaagctggtgtattcctggactttccaactacacacatctctagccc

SEQ ID NO: 887024 - DNA, 120 bp, Artificial Sequence
  ENSG00000284652_12 (sequence is synthesized)
ctcttctttgcctaagtagtgtgggctgagtttctgccacctgccaataaaatgccaagaataaaaaaaatgggtcacccattcaaggaagccaatctaatagatctggctttatcttga

SEQ ID NO: 887025 - DNA, 120 bp, Artificial Sequence
  ENSG00000284652_13 (sequence is synthesized)
ttgtggtggtttcccaggcatatgcaactggtaacattcactaagttgtacactttccgttactgcagcttcttgtaagtaaattctagctcaataaaactgttaaacatataaaaaaca

SEQ ID NO: 887026 - DNA, 120 bp, Artificial Sequence
  ENSG00000284657_0 (sequence is synthesized)
tatgtaattacatgtatgtaagtgctgcaaagaagaaaatgtaaaaatgtatgaagagctgtaacagaggaaactgacttttaaagtggtgagctggcttccctaaagaaaggcatttaa

SEQ ID NO: 887027 - DNA, 120 bp, Artificial Sequence
  ENSG00000284657_1 (sequence is synthesized)
ggaaatctgaggaaggagagggatagtctgccttcagagttttgtttttgagataggtctcactgtcacccaggctgagaggctgagatcatagctcacttcgtcctcgcgtctccagca

SEQ ID NO: 887028 - DNA, 120 bp, Artificial Sequence
  ENSG00000284657_2 (sequence is synthesized)
caggtccgggtttctccacccaatgcgcctgcgcacaggcctagcccagtcggacgcagcccaggactgccaggggtggggattgcctgggtcccccaggaagggccgggttacgtccgg

SEQ ID NO: 887029 - DNA, 120 bp, Artificial Sequence
  ENSG00000284657_3 (sequence is synthesized)
tggagggaagcgttgccaggggagggcggagactgtggctgacaagatgggtggcaggcccttccctgggggtatcgaggtagggacgtttgtggctacgtctgtcctagaggaggagac

SEQ ID NO: 887030 - DNA, 120 bp, Artificial Sequence
  ENSG00000284657_4 (sequence is synthesized)
gatgccaggggagagggagacgcagacactgggactgggtcgccagcagagggcctcggaagccaagccaccccgtctgaagacgcttctccttacggagcccagaagcgcgaacggaga

SEQ ID NO: 887031 - DNA, 120 bp, Artificial Sequence
  ENSG00000284657_5 (sequence is synthesized)
ctgcgcagatcccgtgcgctgcgccggaaacggatgcatagtctcggacaccagctcagacctgccgcctggccaggtccgtgcgcgtttgtagtttgtaaagaaatgttctaatgtgta

SEQ ID NO: 887032 - DNA, 120 bp, Artificial Sequence
  ENSG00000284656_0 (sequence is synthesized)
agttccggcagagacccgggtgggacgcgctgaccatgggcctgcggaggggctgggggttcaggacctcccgcagcctctgccctgcaggctccaggtgccctcgctgtggctcccctc

SEQ ID NO: 887033 - DNA, 120 bp, Artificial Sequence
  ENSG00000284656_1 (sequence is synthesized)
gcgggcccaggcctgaagaagccgcgaacctctcttccctaccccacctccgtgactgatggcagctcctctctcagcccagaccccgccggcctccatgtctcccggcccagccctgcg

SEQ ID NO: 887034 - DNA, 120 bp, Artificial Sequence
  ENSG00000284656_2 (sequence is synthesized)
gggcctaaactaagcccctgccgagctgctaggatgcagcgcatttgagtggctgcgggcgtggggggccgggaagcatggtgaccgccccaactcgcagcggaggccgttagggtgtgg

SEQ ID NO: 887035 - DNA, 120 bp, Artificial Sequence
  ENSG00000284656_3 (sequence is synthesized)
agggcgcgggaaggtgggtcgcctgccaccggggcgcgggcagatcggaccgctctgtcccaactggtcgagaccgacctagtcctgacgacaggaacaacggcattaacaacggccgga

SEQ ID NO: 887036 - DNA, 120 bp, Artificial Sequence
  ENSG00000284656_4 (sequence is synthesized)
aggtgagcagtgtcccagacaacgacggatagcggccacctggccactggtcttccttctctaccagacctggatgtgggaagagagaagtggtggaacaggccacatttggcgtattgg

SEQ ID NO: 887037 - DNA, 120 bp, Artificial Sequence
  ENSG00000284656_5 (sequence is synthesized)
agatgcccactaccctttgggaagatttaattaccaccgtttatagaaggccctgcgtgtgtaaagtgagaaagcggctctcaactgcccccgccccaacttttaaatagaaaacatttg

SEQ ID NO: 887038 - DNA, 120 bp, Artificial Sequence
  ENSG00000284656_6 (sequence is synthesized)
ccacatttagcccttctagatggaaagaggttgtgatgtatgataaagttagaaaatcacacatcttataaattctcatttgttcaaaaagaaatgatagaaaatagatgtcttctggaa

SEQ ID NO: 887039 - DNA, 120 bp, Artificial Sequence
  ENSG00000284656_7 (sequence is synthesized)
atggcttttcgcaatggaattgttggaccacttctggaagccataccaggaacgacagacacaaccacatttgttcagtgggttagagggcatgaagaagaagacctgagaaggaaaaga

SEQ ID NO: 887040 - DNA, 120 bp, Artificial Sequence
  ENSG00000284656_8 (sequence is synthesized)
agaaggttctgtgccagactagtcatattcagaagacattctcatattctttccattgttttgtgtgcattttattccctactactgtatagatcattgacaatgctacacttttttgaa

SEQ ID NO: 887041 - DNA, 120 bp, Artificial Sequence
  ENSG00000284656_9 (sequence is synthesized)
atgtctagtgtttctagatgttctgaggtgcctgatatatgtttaaactagaagtagtaaaataacacattttgtaagtatctttttgttaaaattcgaatgaaacattgttttaggggg

SEQ ID NO: 887042 - DNA, 120 bp, Artificial Sequence
  ENSG00000284656_10 (sequence is synthesized)
aatggccaaaccacaagttgagtaatatgcattgtattatgcgccagttcaggagaggaggaggaggaggctgtgcagagagctctgtgccaccagtgtgcttacagtgaggcaagatta

SEQ ID NO: 887043 - DNA, 120 bp, Artificial Sequence
  ENSG00000284656_11 (sequence is synthesized)
accattatatcttatgtttgtgcattttcttttacttatctatgtataaagtgtatatagaggaaaacaagtcctaatttacatctagtctttctagatgttatggaggttgccagtgaa

SEQ ID NO: 887044 - DNA, 120 bp, Artificial Sequence
  ENSG00000284656_12 (sequence is synthesized)
ttacaaaagtagagttagtaaactaatatttttgtacattttgtttttaaattcctagggaagattgtcttctgaaaacttgagcattcttgcccactgggttgatggagatggaaagat

SEQ ID NO: 887045 - DNA, 120 bp, Artificial Sequence
  ENSG00000284656_13 (sequence is synthesized)
ttttaggccagaatgttcacatttggaagactccttcaaattataactattgttacatgtatgcagtttattcaaggctgcagtgtacatagtggacagattaacttcttacctgaaacc

SEQ ID NO: 887046 - DNA, 120 bp, Artificial Sequence
  ENSG00000284656_14 (sequence is synthesized)
gctagtctatttagatgtttagaagggcctgatgtatgttaaatgtagaggtagcaaaatttcactttgtaaatgtctttttgctgaaattcataggaaatactgtgttttggaaattga

SEQ ID NO: 887047 - DNA, 120 bp, Artificial Sequence
  ENSG00000284656_15 (sequence is synthesized)
agccatctttgtgagtggtatagtactgtctatacttgctcagtagtttagaggagctgggacggatgaaactgcaaaaggtaacatgctagtgtgctcatacttgcacattttcaggca

SEQ ID NO: 887048 - DNA, 120 bp, Artificial Sequence
  ENSG00000284656_16 (sequence is synthesized)
ccatttttctgtatgttttgtgcattgtgttttgctctgtatatagcgcatataatgaacaaatgagtcctaattttgcaacatctagtctctagatgttaaagaggctggcagtgtatg

SEQ ID NO: 887049 - DNA, 120 bp, Artificial Sequence
  ENSG00000284656_17 (sequence is synthesized)
acaaagtacttagtaaaattagcactttttgtaagctttgtgttgaaattcataggaaaccttgtcttctgtaaataacttttggatctaaatttgttcaaccatttctaaagtatgaca

SEQ ID NO: 887050 - DNA, 120 bp, Artificial Sequence
  ENSG00000284656_18 (sequence is synthesized)
catgcctatacttgtctactgaaataaaggcagagagaagaaaggaaggactacttcaaggccaaaatggtcatgtttagaagatacctcagattataactgttgttatgtgtgtgcaat

SEQ ID NO: 887051 - DNA, 120 bp, Artificial Sequence
  ENSG00000284656_19 (sequence is synthesized)
tttatttaacagtgccatgtacatggtggacaagttatatgaaatatttaatctttctagatatttggaagtgcttggtgtatttaaaaatagaagtagtagaataacactttctgtaaa

SEQ ID NO: 887052 - DNA, 120 bp, Artificial Sequence
  ENSG00000284656_20 (sequence is synthesized)
tatcttttaaaagtaatgagaaatactttttggaactggcattgttgaaccacctctgtgaacagcgtcctctctgtacatgttcattgggttgagggagattggaaggaagatattgca

SEQ ID NO: 887053 - DNA, 69 bp, Artificial Sequence
  ENSG00000284656_21 (sequence is synthesized)
tgttcattgggttgagggagattggaaggaagatattgcaaaaagtgtccaaacaccgcatattctcac

SEQ ID NO: 887054 - DNA, 83 bp, Artificial Sequence
  ENSG00000284656_22 (sequence is synthesized)
taaaaagtgttttgctaatgtttactagaaaatttcagcttaatccattacctatatgttacatgcattgcatttaactttgc

SEQ ID NO: 887055 - DNA, 120 bp, Artificial Sequence
  ENSG00000284656_23 (sequence is synthesized)
tccattacctatatgttacatgcattgcatttaactttgctatactgtatatattgtgtgtatactggatgaagtagtcttaattttataatatctagtctagtctctagatattaaaga

SEQ ID NO: 887056 - DNA, 120 bp, Artificial Sequence
  ENSG00000284656_24 (sequence is synthesized)
ggttgccaatttataacaatttatgagagttagtttactaactctatttttgtacactttgttgaaattcatagaaaggctatcttctgaaaaggacttttggaagtgaaatgataacat

SEQ ID NO: 887057 - DNA, 120 bp, Artificial Sequence
  ENSG00000284656_25 (sequence is synthesized)
cagttctaaatgacacatatgcctatatccactaggttggtggtagagaggagttagaaggaatgaaagattttagaccagaatgttcctatttagaagacactttcagatataaccatt

SEQ ID NO: 887058 - DNA, 120 bp, Artificial Sequence
  ENSG00000284656_26 (sequence is synthesized)
gttacctgtgtatatagtggacaaatttaagtccttatttgaaacatctagtctttctagaagtgcacaaagtatgttaaaagtagagggagtaaataacactttgtagatatccttttg

SEQ ID NO: 887059 - DNA, 120 bp, Artificial Sequence
  ENSG00000284656_27 (sequence is synthesized)
attcatatgaaatattgtctttgggaaatggatcaaaccacttatctgagcagtacacattactatatgtgtgttggctcagggaggaaagaggagcagaaagggcaaaaggtaattcaa

SEQ ID NO: 887060 - DNA, 120 bp, Artificial Sequence
  ENSG00000284656_28 (sequence is synthesized)
ataccagtgtgtttatggtgaggcacactttaccattgtcccttatgtctgcattttcttttactgtgctgtgtatatagtgcatataagtggacaaattagtcctaattttcaacatct

SEQ ID NO: 887061 - DNA, 120 bp, Artificial Sequence
  ENSG00000284656_29 (sequence is synthesized)
agtctttgtagatattaagatgtttctagtgtatgacaaaagtagagttagtaaactactgtactgagtacactttttggtaaaattcatagggaagactgttcttaaaaacacaaaagg

SEQ ID NO: 887062 - DNA, 72 bp, Artificial Sequence
  ENSG00000271851_0 (sequence is synthesized)
ttgtatttttagtagtttcagatgggcaggactgtttcctctgctttcggtactaagcactgggaagtctac

SEQ ID NO: 887063 - DNA, 120 bp, Artificial Sequence
  ENSG00000271851_1 (sequence is synthesized)
tgtttcctctgctttcggtactaagcactgggaagtctacacatggcaaggtgtgtaaattcatgttagtgttacctaaaacacatatattagaaaggtaactacatattgtttcatgat

SEQ ID NO: 887064 - DNA, 120 bp, Artificial Sequence
  ENSG00000271851_2 (sequence is synthesized)
ataatatgcatttgcttccattaaggtaacattattagtcaccttatttatgtgctaaccctatagggcaagaaaaatatacaaattaagagcttttacttttttctattaataataatt

SEQ ID NO: 887065 - DNA, 120 bp, Artificial Sequence
  ENSG00000271851_3 (sequence is synthesized)
tctgctagttattagagagtactaagaataccacagttataattgactttgttctcctaaatgcttacagtctgaccatctgttgaaatcttgcagatttttggttttgtggtcgtccca

SEQ ID NO: 887066 - DNA, 120 bp, Artificial Sequence
  ENSG00000271851_4 (sequence is synthesized)
gaattacttcccaaattactgaattaagcagtaagcatcaaaaacactgaacaagagttatttaaaacattacaaaaatatttaggggtcttaatgtggataatttagaatttaccagga

SEQ ID NO: 887067 - DNA, 120 bp, Artificial Sequence
  ENSG00000271851_5 (sequence is synthesized)
gacatcaaaaattcaactggaatacaacaactttctttaaaattctatttattttttcaaataattgatctatttctactgtaacaacctgcagccagtactagggatggcatttagcta

SEQ ID NO: 887068 - DNA, 87 bp, Artificial Sequence
  ENSG00000271851_6 (sequence is synthesized)
gtaacaacctgcagccagtactagggatggcatttagctaatccaccccatgagggcgctcataaacctgtttattttcagggaggc

SEQ ID NO: 887069 - DNA, 120 bp, Artificial Sequence
  ENSG00000271851_7 (sequence is synthesized)
cctccttcttcttcccaaacatttaaaataattctctggcagttatcttccagatttaagatagatagcaatctatgagtcctaataatctcatattattagatttttttggtgcttcct

SEQ ID NO: 887070 - DNA, 120 bp, Artificial Sequence
  ENSG00000271851_8 (sequence is synthesized)
tctcttctttacaaagaaagatactgaggccaagttaaactttacaccgaaagtcactgatgaagttggagagataacccggaattccagcagaggaggtttgttggtttgtttgttttt

SEQ ID NO: 887071 - DNA, 82 bp, Artificial Sequence
  ENSG00000271851_9 (sequence is synthesized)
ggaattccagcagaggaggtttgttggtttgtttgttttttgtttttgtttgtttgtttgtcagtggcacaatctcggctca

SEQ ID NO: 887072 - DNA, 120 bp, Artificial Sequence
  ENSG00000271851_10 (sequence is synthesized)
tacaggcatgagccactgtgcccggccccagcagaggagttttctacactgaggagaggattcttggagagctttagtcattacccaggaccccacaactaggaaatggaagagccaggt

SEQ ID NO: 887073 - DNA, 120 bp, Artificial Sequence
  ENSG00000271851_11 (sequence is synthesized)
ccaggaccccacaactaggaaatggaagagccaggttcaaacacaggctgtgtggccccaacgtgaattgtttaaaagctgaattatactttagtagaaataatacagtcagctgtcacc

SEQ ID NO: 887074 - DNA, 120 bp, Artificial Sequence
  ENSG00000271851_12 (sequence is synthesized)
tggcatgtcttcaactagaattctctatgaattgttgtgttactggactgccaagacaaatcttgtttataatacaaatcttcaagaaccgtcttaaccatccgaagattaaacagtgtt

SEQ ID NO: 887075 - DNA, 120 bp, Artificial Sequence
  ENSG00000271851_13 (sequence is synthesized)
cattgtggtttattaggtatactttatgatgttgagaaaaatgtttgttcataaatcaccaatggagtgactttttaatcctttttttgaggcataattaatgtttggtgacttttttaa

SEQ ID NO: 887076 - DNA, 120 bp, Artificial Sequence
  ENSG00000271851_14 (sequence is synthesized)
tgtgaatatttgaataccacatttccttactgtgctggatagttgagaatttatgatacttaataaattgatgcctttctacacttgtgaacttgtccaaagaacactaggagttgccag

SEQ ID NO: 887077 - DNA, 120 bp, Artificial Sequence
  ENSG00000271851_15 (sequence is synthesized)
aaaagtcctgtgcaaatgctttctaaacaatgaaattcatggaattaaggcatgagatgttatgctctctcctgaaaaagtatttttctcctggcaagaataaaagtcaagttaaaatgg

SEQ ID NO: 887078 - DNA, 120 bp, Artificial Sequence
  ENSG00000271850_0 (sequence is synthesized)
acttgagtaaccggtttccgaggagaacatatatcctgaatcagttcctggacatttgtttgaggtcttgtaagggaaactgaagggaattgtgtattgaacaggatggcttagacctgc

SEQ ID NO: 887079 - DNA, 120 bp, Artificial Sequence
  ENSG00000271850_1 (sequence is synthesized)
tcaacttctgagaattgaggcaaagtgggcaatccagatgtatcacttgactttctgactactggaagaatttcccttcattattgcacaccaggggtatcccacagctttctcctcacc

SEQ ID NO: 887080 - DNA, 120 bp, Artificial Sequence
  ENSG00000271850_2 (sequence is synthesized)
aactcttcaaagatccagttgatacaaaatgcacatgctaaaatatgattccccagtcctgtccaagctgatgtggtcttctccaagcccccagtcctgaccaagctgaatctcctttgt

SEQ ID NO: 887081 - DNA, 120 bp, Artificial Sequence
  ENSG00000271850_3 (sequence is synthesized)
cactcatggggcaacagggacttacctgccagtgcaggagaaaggagagatcctttagaacaggagctaagatgccaggagctcacgcaaaatgcttgaagaaaggggcttagccagaaa

SEQ ID NO: 887082 - DNA, 120 bp, Artificial Sequence
  ENSG00000271850_4 (sequence is synthesized)
ccgaactgggagttgatgcccagtttaggaagagttcaaatcgaggagtcagaagcagcaaattctacatcagatccacaaattcttaactagaagaataaaaacaagtcaaatcaagtt

SEQ ID NO: 887083 - DNA, 120 bp, Artificial Sequence
  ENSG00000271850_5 (sequence is synthesized)
gggctcaaaaggaatataggggcagaagaggtgatgtgcagatgggtgtgcctggccaaatggtgggggtaggcacaggcagcacacaccattgatttctttgcttccttttttaaagat

SEQ ID NO: 887084 - DNA, 120 bp, Artificial Sequence
  ENSG00000271850_6 (sequence is synthesized)
tttatttttaagagcagtttcaggttcaaagcaaagttagaagtaccaagattttttccatatacccctgtccctacatatgcatagccccctcattatcaaaatcccctatcagagtgt

SEQ ID NO: 887085 - DNA, 120 bp, Artificial Sequence
  ENSG00000271850_7 (sequence is synthesized)
aataaatgacaatgaacctacgttggacgcatcataatcacgtaaagtcctggtgtacattagctttcactcttggtgttgtacattctatgaattcggacaaatgtgtaatggcatgtg

SEQ ID NO: 887086 - DNA, 120 bp, Artificial Sequence
  ENSG00000271850_8 (sequence is synthesized)
tccactgttatggtatcatacagagcactttcactgccacaaaaattttctgctctctgcctatagttggggatcagaaaccaataccccaaaatatggcattttgacatgctgaactga

SEQ ID NO: 887087 - DNA, 120 bp, Artificial Sequence
  ENSG00000271850_9 (sequence is synthesized)
agaagctttaatgtctctctgaccttccttcttctgccccaccttctttcccaaaacctaggattatcttgttcccttatctgcttaaagtccgaacctgccaaagaagaaaacaatgac

SEQ ID NO: 887088 - DNA, 120 bp, Artificial Sequence
  ENSG00000271850_10 (sequence is synthesized)
ccctgagtttccattaactgaacctagattccaggaagaaagattgaagtctgtcaacacacctggacagacttttatcacaaaccattgtccactctgctaacccaacagattttgtcc

SEQ ID NO: 887089 - DNA, 120 bp, Artificial Sequence
  ENSG00000271850_11 (sequence is synthesized)
cagacaactgtattctcttcaagcccattgaattctccctaggaatcatgcattgcccctcaacagaattcctcttgtccctactcacatagtttgctttgccgggatcctaagatttct

SEQ ID NO: 887090 - DNA, 120 bp, Artificial Sequence
  ENSG00000271850_12 (sequence is synthesized)
tggaaaaccttaggaccaggaggtattcttgtggactcattctgtttttctgtaacctcaagatggtgtataagcttctgccccctaatcgggggttggagtaatcactgtgtctcctgt

SEQ ID NO: 887091 - DNA, 120 bp, Artificial Sequence
  ENSG00000271850_13 (sequence is synthesized)
gtgaaagtaaacacatttgtatgcccttttcccaattaatctaccttctgtgagttgattttttagcgaaacttcagagggctctttgactcctacactatttatccctccccctccctt

SEQ ID NO: 887092 - DNA, 120 bp, Artificial Sequence
  ENSG00000271850_14 (sequence is synthesized)
cagcccctaacaaccactgatcttcttactgcctccacagttttaccttttccagaaggtcatatagttgaaatattacagtccgttaccttttcagattagcttctgtcacttagtaat

SEQ ID NO: 887093 - DNA, 120 bp, Artificial Sequence
  ENSG00000271850_15 (sequence is synthesized)
atatatttaagattcctccatgtcttttcatggcttgatagttcatttcttttcagtattaaatgatattccattgtttgatgtaccacaatttatcccttacctactgaaggaatacct

SEQ ID NO: 887094 - DNA, 120 bp, Artificial Sequence
  ENSG00000271850_16 (sequence is synthesized)
ggttgtttccaagatttacctggccacctatggaatactgtagtttccaaaactggccataagatatttcctactattcttgcatattgcagttgcataagaattgcgtcctaagatttt

SEQ ID NO: 887095 - DNA, 120 bp, Artificial Sequence
  ENSG00000271850_17 (sequence is synthesized)
ccagaaatttggcacttctccatcaagacatggattctacttcctcttcccttaagtctaggcagatttgtgactggtaaccacagagcatggtagaaattacacggagtgatttctgag

SEQ ID NO: 887096 - DNA, 120 bp, Artificial Sequence
  ENSG00000271850_18 (sequence is synthesized)
gttataaatgatgaagctcatctacctcacaggaacataggcattgagtcctgagccaccaagcaagtgtccaactactctgaaactgccatgtggtgaggaagcccaaacttgatgtga

SEQ ID NO: 887097 - DNA, 120 bp, Artificial Sequence
  ENSG00000271850_19 (sequence is synthesized)
tttcacctcttctgcccctattccttttgtgcccaacttgatttgacttgcttttatttttctagttaagtgaaaagatagcaaggggaagcactgaagctgcatcgtgagcgagagatg

SEQ ID NO: 887098 - DNA, 120 bp, Artificial Sequence
  ENSG00000271850_20 (sequence is synthesized)
cccagccaccaggcagctgctccacccacctcaccctcagcctactttcctccaccctcaaccttgtacttttgttgctccaaccactgtctggttacaatcagaggagagattccaaga

SEQ ID NO: 887099 - DNA, 120 bp, Artificial Sequence
  ENSG00000271857_0 (sequence is synthesized)
acgctcagattcctcccgcggcggctgccagcccggctccccggctaggctccttcctttcccttcttttcttctcgccctctcacagccacctctttgcatccactccctcctgcaatt

SEQ ID NO: 887100 - DNA, 120 bp, Artificial Sequence
  ENSG00000271857_1 (sequence is synthesized)
tgcaaagctcccctgtctctcgcgcttcaaggtgccaagaggtaagtcgtgggcagcggatctcggggcaacgaatctcgagcctgcgaatcgcagccgctgccgccgccagccggccgc

SEQ ID NO: 887101 - DNA, 120 bp, Artificial Sequence
  ENSG00000271857_2 (sequence is synthesized)
gagaaggagccccccgcgcgccgtgtgcagtttccgaagcctagaggcggccccagactaggggcaatctcgccaggtcgcgtcctcttgctctccccacccctaggacaaggaaccccc

SEQ ID NO: 887102 - DNA, 120 bp, Artificial Sequence
  ENSG00000271857_3 (sequence is synthesized)
gaggaaagaaaattcttgagcctctgtgctgacttctcagcactcttcaccctcccacctctacccccacctctgtctgagcgactcccaagggaaaaagattttgcagggtttgggtgt

SEQ ID NO: 887103 - DNA, 120 bp, Artificial Sequence
  ENSG00000271857_4 (sequence is synthesized)
tttttgttttaagtgacacaaaaaaaatgaggagggggggtggagggagatctagtcaaaatagtttttaggaactcaagtgcatagctggacatttcttttttcttatatattcaatct

SEQ ID NO: 887104 - DNA, 120 bp, Artificial Sequence
  ENSG00000271857_5 (sequence is synthesized)
tgtcattcctagagaacaagaatgaggtgtttgtttgtttgtttttgttttaaggactgaaaaactgtcagctttgtgattaaaataagttgcaaaacccttgctggggaaaagcaccag

SEQ ID NO: 887105 - DNA, 120 bp, Artificial Sequence
  ENSG00000271857_6 (sequence is synthesized)
ccgttttccatgaatttaaatattttattaagtctattctacatctaagactaagtttcgtgtctgtcttccccagcgctcacggggaaaaattaaaaatacgaactaaaaaattcaaaa

SEQ ID NO: 887106 - DNA, 120 bp, Artificial Sequence
  ENSG00000271856_0 (sequence is synthesized)
gtgccaccaccagtctccaccactattctgaggcagaatgcacctattggctcacaatgctgtgaaagaaaacaagaaagtcgtgatgataacaatgcagtgtcttcattcataatggat

SEQ ID NO: 887107 - DNA, 120 bp, Artificial Sequence
  ENSG00000271856_1 (sequence is synthesized)
tgcagttccccactcaggaagaggacattttttttaaaactacatgatacaactgagagcttggaagctatccatgcataagttttaaaacccagcagcttcatggtttcctccttctgt

SEQ ID NO: 887108 - DNA, 120 bp, Artificial Sequence
  ENSG00000271856_2 (sequence is synthesized)
tggcctggccagtggacacagtggtcacgttcctggcatggagatgtcattcatggtctctcagacccaagtgttaccagtgaagggtgtccaggttcttggcgctttgaacaaagaatt

SEQ ID NO: 887109 - DNA, 120 bp, Artificial Sequence
  ENSG00000271856_3 (sequence is synthesized)
ggacaaaactcacaaacaaagcaagaaaagaaagaagcaacaaaagcagagatgtattgaaaatgaaaacacactccacagggtgggagcaggccgagcaagcagctcaagggcccagtt

SEQ ID NO: 887110 - DNA, 120 bp, Artificial Sequence
  ENSG00000271856_4 (sequence is synthesized)
acagaactttctggggtttaaataccctttagaagtttccattggttacttggtgtacaccctatgtatatgaagtagtggcctgtgatcagtctgattggttggaagggaccaatcaga

SEQ ID NO: 887111 - DNA, 120 bp, Artificial Sequence
  ENSG00000271856_5 (sequence is synthesized)
atgcaaacgtctgattagttgtggaaagtgaccaattagaggctgaagtgaagttacaaagtaatactcccacgcaaatgaagacttggcccacaaccaacctgattggttgtgagaggg

SEQ ID NO: 887112 - DNA, 120 bp, Artificial Sequence
  ENSG00000271856_6 (sequence is synthesized)
acaaccaacctgattggttgtgagaggggaccaatcagagggactttcagtttttcacctgcaatgcagaaaaagggtggcaggtgaggggtgttgcaaagggagtagcctctggtcctt

SEQ ID NO: 887113 - DNA, 86 bp, Artificial Sequence
  ENSG00000271856_7 (sequence is synthesized)
tgaattggccttacaaagtgctcctaggagctgtacatgcctgtctttgtccccatgtagtcagctcgttacaggtgggtcctgct

SEQ ID NO: 887114 - DNA, 120 bp, Artificial Sequence
  ENSG00000271856_8 (sequence is synthesized)
ttgtccccatgtagtcagctcgttacaggtgggtcctgctgggtctttcgttcttgcttctctgcttcaagatggctaataagtcctggtccagtgagtccccagtgcagacatagagca

SEQ ID NO: 887115 - DNA, 120 bp, Artificial Sequence
  ENSG00000271856_9 (sequence is synthesized)
gaagggaagtgggtccagttgcatttcctgcagtttaataaagaaccctgtgctctctggcccattacctaaagctgatattgtgcttggaacgtgtagtgttatccaatccagctttac

SEQ ID NO: 887116 - DNA, 120 bp, Artificial Sequence
  ENSG00000271856_10 (sequence is synthesized)
ggaaggtgagggctggatgattgatttttcaccctgcccccaaactccaacaaccgaaaccaagggttcttgaagagagaggggcagggcagcaacagggagactgaaacttggggtggg

SEQ ID NO: 887117 - DNA, 120 bp, Artificial Sequence
  ENSG00000271856_11 (sequence is synthesized)
gggggggcggggggaggggggcggacggaatgtttttgaagtgtgtgtttgcctaaggtgtgtgtagaaaggtagctacttttcagtctctgcctgcctttaatccattacaatgtccta

SEQ ID NO: 887118 - DNA, 120 bp, Artificial Sequence
  ENSG00000271856_12 (sequence is synthesized)
attaaaaacatttaaaaagctacattggaaaatgatccctgaggctagaatgctgttggcacagtgaaaaagacgcaatcaataagtaaacaggcaatgtcagcccggagagctttcaga

SEQ ID NO: 887119 - DNA, 120 bp, Artificial Sequence
  ENSG00000271856_13 (sequence is synthesized)
acaacatgcctactcgggggaaaaaaaattacaagtcgctttagcctatttaaatattttccaagatctttgttaaatttcaggtaataatatttcttcctttgaacaagcgttgtatgt

SEQ ID NO: 887120 - DNA, 120 bp, Artificial Sequence
  ENSG00000271856_14 (sequence is synthesized)
ttgcctttgactgagaatggcctaggctagagaccatttggtattcaacttgtgactattttagtatggggctggaccccaaaaattcatgctcaatgaaatgattttcacttactgaga

SEQ ID NO: 887121 - DNA, 120 bp, Artificial Sequence
  ENSG00000271856_15 (sequence is synthesized)
tgaatttactttttgcttccttcagcaattcatcaatctaatggaagaaagagtagctatcatcataatgagaatagacttctacgagtatgagtcaatgtcaatactttatttaataat

SEQ ID NO: 887122 - DNA, 120 bp, Artificial Sequence
  ENSG00000271856_16 (sequence is synthesized)
gcaaattctattactatatatttggtctcaatccaaatttgctttaaattgagtttccttgccattgcacactcctatctttctgaacacacaccaccccacacacacaccatacacact

SEQ ID NO: 887123 - DNA, 120 bp, Artificial Sequence
  ENSG00000271856_17 (sequence is synthesized)
tgtttcattgcgcttcattttattgcacttctcgaagaatgtgttttttacaaattgaagatttgtggcaacttttcatcgagtgagtctattggcatcatttttgcaagagcatatgct

SEQ ID NO: 887124 - DNA, 120 bp, Artificial Sequence
  ENSG00000271856_18 (sequence is synthesized)
cacttcctgcctctgtgacagcattttttagcaataacatatttttaatgaaggtatgtacattgttttttagacataatgctattgcacacttgactaaaatgtagcctaagtataatt

SEQ ID NO: 887125 - DNA, 120 bp, Artificial Sequence
  ENSG00000271856_19 (sequence is synthesized)
tttatatgccatgggaaactaaaaaaagtgacttactttattgtaatatttgctttattactttggtctggaactgcctcacactatctctgaagtatgcatgtatagcttttcataaca

SEQ ID NO: 887126 - DNA, 120 bp, Artificial Sequence
  ENSG00000271856_20 (sequence is synthesized)
cagatatcacatttgaccagatcctattgttactgaacaatgttgatgctaacattgatgatatcaatcactattactggaatcattatcaacatatcaataaatatttttagaacattt

SEQ ID NO: 887127 - DNA, 120 bp, Artificial Sequence
  ENSG00000271855_0 (sequence is synthesized)
ccccacgccggtgcgccgcgggcctctggtccgctgccgtgttcggccccgcccgtcacgtctagctggggctcgcccggcgccttcctggacgcagacgtatgagtcccaactccaccc

SEQ ID NO: 887128 - DNA, 120 bp, Artificial Sequence
  ENSG00000271855_1 (sequence is synthesized)
agtccggcctggcctctgtccccgggtgaccgcggaatgggggggcgggagctagcgagcaggccctcaagcgcgtctggccgcctcctttgtcttgatgcccacgtctggttaggaccc

SEQ ID NO: 887129 - DNA, 120 bp, Artificial Sequence
  ENSG00000271855_2 (sequence is synthesized)
ctgctgtccattttattaaaggagctgtagaaagcggcctggggcccagcgacctgcccagggcggacgaggaggcgcgactggcccgatgccgcaggctctctgcccagtgtgctcagg

SEQ ID NO: 887130 - DNA, 120 bp, Artificial Sequence
  ENSG00000271855_3 (sequence is synthesized)
ggaccccccgccccccccggccccgggccccgagccccgagccccgagcccggccaccgaagcccgtgccactcgccagctcctgcgagacgagcctttcgagcgcagctcaggcatttg

SEQ ID NO: 887131 - DNA, 120 bp, Artificial Sequence
  ENSG00000271855_4 (sequence is synthesized)
ggcatttggttcagggtcctactgccggagtcgtctgaggcctccatccgtctgtcgtcacgaaaaaggttttggggggactaataagcacttcctgaatgcacatttgctccacgcccc

SEQ ID NO: 887132 - DNA, 120 bp, Artificial Sequence
  ENSG00000271855_5 (sequence is synthesized)
tgctgtagggagagggtctgcagacacttcaacaaatagaatcctaggaccttacctgtgagtacaagagctggaatcttcccaccaacttcttaaaattcaatcctatacttggtccat

SEQ ID NO: 887133 - DNA, 120 bp, Artificial Sequence
  ENSG00000271855_6 (sequence is synthesized)
ttagcttagactggaaatttcccaaggcagtttgttttgcaatcttttgcatgattttagctctgtatagtttagtgaatgtttatggtactgaataaaacagtctaaaaacgttgggta

SEQ ID NO: 887134 - DNA, 120 bp, Artificial Sequence
  ENSG00000271858_0 (sequence is synthesized)
gttgtaggaggcgtttaccgagccgaagtagtactgggtctgtttcatgacgcagctgctctcgcgcgtctcggggctcccctcggcctccgcggggtctgcgagggcccagagcgcctc

SEQ ID NO: 887135 - DNA, 120 bp, Artificial Sequence
  ENSG00000271858_1 (sequence is synthesized)
agctccgcccacagaccctggcaaggtctccggcctccctcagtcgtagaccccaccctccccatggagtcgtcttagctcagattggggacccggacttgaggaggcgcctccaaagcc

SEQ ID NO: 887136 - DNA, 120 bp, Artificial Sequence
  ENSG00000271858_2 (sequence is synthesized)
ctacctacctgcttggaaccagctgtggtagatgaggccgtagagaagctgctggaacagggacctgcagcgcacggggagccgagtgcaggtggtcagcagaggacgatgccatgccct

SEQ ID NO: 887137 - DNA, 120 bp, Artificial Sequence
  ENSG00000271858_3 (sequence is synthesized)
ggcagcagaggtccaccaggccaggttaaggaaatctgcaacgcaccaggaatcctccatcatcaatgaggacacagagctgggtgatgcctacgtgttgagatcctggtccctccacac

SEQ ID NO: 887138 - DNA, 120 bp, Artificial Sequence
  ENSG00000271858_4 (sequence is synthesized)
acgctctaccagctgctgcgtgatgcccgtgtccaagatcaggttgtgcagaaggaagttgttgcctggaacaggaggggaggggtgggggtgggggcatcttcttgcagctccttgccc

SEQ ID NO: 887139 - DNA, 120 bp, Artificial Sequence
  ENSG00000271858_5 (sequence is synthesized)
accctcacccccacccttaaggctccaccaggagcctcctccatgacctggccctggcccaggcccagcccttagcttgtgcctgcttatttccacacctgcccggcctctgggttcctc

SEQ ID NO: 887140 - DNA, 120 bp, Artificial Sequence
  ENSG00000271858_6 (sequence is synthesized)
tgggctggccccatgctgcctgggcactgcccagagccagctgccctgccaggcactcacactgcttggagtctggagtcactttctccatgagctcaataaagtttttcaggaactcgg

SEQ ID NO: 887141 - DNA, 120 bp, Artificial Sequence
  ENSG00000271858_7 (sequence is synthesized)
actcaccaggcggcagcagaggtccaccaggccagcaccaggaatcctccatcatcaatgaggacacagagctgggtgatgcctacgtgttgagatcctggtccctccacacacgctcta

SEQ ID NO: 887142 - DNA, 120 bp, Artificial Sequence
  ENSG00000245164_0 (sequence is synthesized)
actcatcccttctctgacttaggatttgagcatctttctgttatgctgttgccccactcctattgcaatactccccttcttaagaaagtttttctagactaatgtctagattaaacttct

SEQ ID NO: 887143 - DNA, 120 bp, Artificial Sequence
  ENSG00000245164_1 (sequence is synthesized)
tttctttgacaataatgatgccatgacttggacaaaatgcccattgcctctgggtcctgctttcttcacccagtgctgccttattggactccttgtgcctctccttggctggggaaatca

SEQ ID NO: 887144 - DNA, 120 bp, Artificial Sequence
  ENSG00000245164_2 (sequence is synthesized)
gaatacacagtggtatcccacttctaagatgcctgatctgaaggacagtaaaacaactgacctttgccagcatgtaaaacacatggtttaactagtcctccaggaacaacactgagcaat

SEQ ID NO: 887145 - DNA, 120 bp, Artificial Sequence
  ENSG00000245164_3 (sequence is synthesized)
agtggaggaccgatagggcgattaaactgtccttgacacaactttagagcttcaactgagaatctagaagagagtagatggaaaaatatttttccctcccctccaaatgcaaggataatc

SEQ ID NO: 887146 - DNA, 120 bp, Artificial Sequence
  ENSG00000245164_4 (sequence is synthesized)
ttacacgagtccaggaggaaggtaagtaacattaaagatacaagaagatgaatggcttcagattttgccttttagactttcagaagacaaaggtttagatgaaaatcaacacaaatctag

SEQ ID NO: 887147 - DNA, 120 bp, Artificial Sequence
  ENSG00000245164_5 (sequence is synthesized)
gataaacaaagcaatttcaaggagtggtaagtcctagatatgctaattttggtctctgcaggtcatagaaaacagaattaagacatagggactgaaaaagattgttacctaagtccttca

SEQ ID NO: 887148 - DNA, 120 bp, Artificial Sequence
  ENSG00000245164_6 (sequence is synthesized)
cctttaaaaatgagaagtaataaataatttaaaattcaaactaagtggaacataattttaaaaaatgaacactgtgacgaaaaaatcaagagcagtaaagcatcggaaaaaaagaaaaaa

SEQ ID NO: 887149 - DNA, 120 bp, Artificial Sequence
  ENSG00000245164_7 (sequence is synthesized)
ctcattccacactaagtgttctgaatcaaaaagatgaacaaaatacagtgccattcttcaaggacttcacagtctacaggaaagggatatagttaaacaaataactgcagaattggaaat

SEQ ID NO: 887150 - DNA, 120 bp, Artificial Sequence
  ENSG00000245164_8 (sequence is synthesized)
tggagctgatgtgcttagaagtgttttgaacaaggggcatgactgtgactctctctgcttttgcaagcttcaggaaaacctttactcacagttgaaaatacagagcctcagggtgaagcc

SEQ ID NO: 887151 - DNA, 120 bp, Artificial Sequence
  ENSG00000245164_9 (sequence is synthesized)
ctaacttcccacagcagatggggtctatgaggaggaagaagtagacgcatggaccagtcctgttatgaagacaagtttcatggtgctactctgtctccatgagctcctatggcccagaag

SEQ ID NO: 887152 - DNA, 120 bp, Artificial Sequence
  ENSG00000245164_10 (sequence is synthesized)
ctggcatcctgtgagtgggaaatgtcctctcttggtcaaagagagctgctctgtctaatgctacacccttctcctggggacagtctgaaaggcttcaaagtcttggcattccttcttcaa

SEQ ID NO: 887153 - DNA, 120 bp, Artificial Sequence
  ENSG00000245164_11 (sequence is synthesized)
ttcagccctccagaaatgcctgggaagtcacctgtaaccagtctgacccagtcttgcttctctgaccccctgacaggtcctggtccagaaaacacccccaataaactttacacaaataaa

SEQ ID NO: 887154 - DNA, 120 bp, Artificial Sequence
  ENSG00000245164_12 (sequence is synthesized)
aaaagcaagtcacatccatgctgaggttttaagagaagcaaaccaggagtgctttgatggaatgacaactcacttttggaagtggacagactagaagggaggtgaacttggctgagtcag

SEQ ID NO: 887155 - DNA, 120 bp, Artificial Sequence
  ENSG00000245164_13 (sequence is synthesized)
tcccaggaggtgaggatgcaaatccttttttaaaaggggatctgagcattggagagtccaccaaacatgggatgaagaaatgctaaaatgaaaagcggaattacaagaaagatgtatctg

SEQ ID NO: 887156 - DNA, 120 bp, Artificial Sequence
  ENSG00000245164_14 (sequence is synthesized)
tgtctttcattcctggaacactgggggaatgtaaaagaaggtgcattaatggaagagcatcatcccagattcttgcacttctccatagatgcatctaatccagcctgttctaggagtctt

SEQ ID NO: 887157 - DNA, 120 bp, Artificial Sequence
  ENSG00000245164_15 (sequence is synthesized)
tctaggaaatcatcaaacctgagtgtggtcttggagaccctaacacagataaggaattcgtctcgtcaagttggatgttcataatgtcttctcacatttcaatcaggttccacacccatg

SEQ ID NO: 887158 - DNA, 120 bp, Artificial Sequence
  ENSG00000245164_16 (sequence is synthesized)
aaactggccctgcgtgtaccattcatactcccgtcaagaaaaatttgccattcagttcaagaaatgcagttaattgacagtcttcggttgcagcctgtttaggattcatttcagcttttg

SEQ ID NO: 887159 - DNA, 120 bp, Artificial Sequence
  ENSG00000245164_17 (sequence is synthesized)
agccaacgccaagcttgtcccagccaggtctcagccaacgatgaagtgtatgtagtgggaatcctatgactgggccatttctgcccttccaggtctcttctgttgagcagtctttgctcc

SEQ ID NO: 887160 - DNA, 120 bp, Artificial Sequence
  ENSG00000245164_18 (sequence is synthesized)
agagtgccctgttgatttgactgagccatagtcagatcggcatcctggtctgaagttctccttgcctaatcccgcttccatctacctttccattcttggacgtcttctctgtttgacact

SEQ ID NO: 887161 - DNA, 120 bp, Artificial Sequence
  ENSG00000245164_19 (sequence is synthesized)
ctgaaggctttcctagcccaatcctgtttccactccctccatggttcacggcattaccctccaataaacctcgtgtatccccaactccatctcagtgtctacttcccagaggacccaaca

SEQ ID NO: 887162 - DNA, 120 bp, Artificial Sequence
  ENSG00000245164_20 (sequence is synthesized)
gacacagcatcttgattttacattgtataagataatgcaattcaccttcttatatcaccttctaactgtcttccttccctaagcccctgccatcactttctgatttctgattctttctac

SEQ ID NO: 887163 - DNA, 120 bp, Artificial Sequence
  ENSG00000245164_21 (sequence is synthesized)
tataccatgatttctatattgccagtccgtattaatgtttatctccaaaatgtatatttaaatgttatgctttgattgtgtaaatatacataatatgcatgttctaaaaactgaaaaaca

SEQ ID NO: 887164 - DNA, 120 bp, Artificial Sequence
  ENSG00000245164_22 (sequence is synthesized)
catggcactggcaggagcgtctttaattatgaacagtgtgggcaccagaagtcacttttgtcaccatctgctggttttggcaggtttctttacagcatcctgtttttgatcagcaaggtc

SEQ ID NO: 887165 - DNA, 120 bp, Artificial Sequence
  ENSG00000245164_23 (sequence is synthesized)
attaccagtgctcagaaaacaagttctactgatctctccacttcaaaactagaaaagaagcatgaaaaagacttcctcacagcctgcagaaggaatcaaccctgtcaatatctttatttc

SEQ ID NO: 887166 - DNA, 120 bp, Artificial Sequence
  ENSG00000245164_24 (sequence is synthesized)
tgcagaaaaccaccactccacatatccttggacactgaagcaacccatctgcaatcattggactaggtattagcacaatcaaaatagacatttccttcctgaataaacctgattaatggc

SEQ ID NO: 887167 - DNA, 120 bp, Artificial Sequence
  ENSG00000245164_25 (sequence is synthesized)
gtggaggaccgatagggcgattaaactgtccttgacacaactttaggttggtttgcctaaactactaggttctcaatctatatgaacctcctccagcattctaatttgtttgctctgtct

SEQ ID NO: 887168 - DNA, 120 bp, Artificial Sequence
  ENSG00000245164_26 (sequence is synthesized)
tagacccagaatcccaccccatgtgcctaaccatagaccaatcttcctgccttaacttctctgctaccaattttgatgtagcccagtaagtttcagcatcatccctcaccaccccacagt

SEQ ID NO: 887169 - DNA, 120 bp, Artificial Sequence
  ENSG00000245164_27 (sequence is synthesized)
ccctcaccctgcccccacccccaccacacacacacataccagctcttagcatcaaatccccttccattttccataagcatctcttcccaggtctctgcatataaaagctatgtttgctca

SEQ ID NO: 887170 - DNA, 120 bp, Artificial Sequence
  ENSG00000245164_28 (sequence is synthesized)
ccccatgcctgagactttcctggcttagatcttgagcatctttctattataagattctcccttagtaatgatttcctcacttaacttcagatttgtacatttttttttcattgacagtgc

SEQ ID NO: 887171 - DNA, 120 bp, Artificial Sequence
  ENSG00000245164_29 (sequence is synthesized)
aaaagataccatttaggatttgattttcagaaggtaaaatataaaacattgtcaggaaattcgaatacttaattaagtaggataatggattactgagaaatagtacttggttatctattt

SEQ ID NO: 887172 - DNA, 120 bp, Artificial Sequence
  ENSG00000245164_30 (sequence is synthesized)
aatcaaatgatgtaaaataattttagagtagatataggaggtaacataattgcaaagaacttcatctcttttatatgaagactgttctcttaaataatcaaggactcgaaaaagtcagca

SEQ ID NO: 887173 - DNA, 120 bp, Artificial Sequence
  ENSG00000245164_31 (sequence is synthesized)
caaagcatggaaaattattctgatgagattctgaatgtttatcttctaagaagattactcagaaggtaaagaaaaatattttacaagctcttactaagagaatacactaatccaaaaaaa

SEQ ID NO: 887174 - DNA, 120 bp, Artificial Sequence
  ENSG00000245164_32 (sequence is synthesized)
ttattttaatagagaataaaacaaattctagttttgcatctgcatatttgatactaatgcttatattaaacattttgtaaacaaacccattaaacttcagccagctgtgactacaagaaa

SEQ ID NO: 887175 - DNA, 120 bp, Artificial Sequence
  ENSG00000245164_33 (sequence is synthesized)
taaaatttcctatccatgaaccttctacagctttctctatctagttagggttttgtagggttttgccctacactttcccctttctcatcctggaataactactcattttacttcagaaaa

SEQ ID NO: 887176 - DNA, 120 bp, Artificial Sequence
  ENSG00000245164_34 (sequence is synthesized)
aaattactcttgttttccttaacaaaaaaatatcctgcataccttgcactcaaaatgttcctttctgccacagtcacttctactagagtctcattcatcttattgacatatattgattat

SEQ ID NO: 887177 - DNA, 90 bp, Artificial Sequence
  ENSG00000245164_35 (sequence is synthesized)
agagtctcattcatcttattgacatatattgattataacatcacccaggctgagtgcagtggtgtaattttggctcactgcaacctccgc

SEQ ID NO: 887178 - DNA, 61 bp, Artificial Sequence
  ENSG00000245164_36 (sequence is synthesized)
ttcaagcattactttttttatttttagtagaggcggggtttcaccattttggtcaggctgg

SEQ ID NO: 887179 - DNA, 120 bp, Artificial Sequence
  ENSG00000245164_37 (sequence is synthesized)
gattacaggtgttagccaccgtgcccggccttgattatttttaactacggtaactcctattgcatagagaaactttggaggtagtataaaagaaaagttactggatatgtattaaaacag

SEQ ID NO: 887180 - DNA, 120 bp, Artificial Sequence
  ENSG00000245164_38 (sequence is synthesized)
gttactggatatgtattaaaacagccagatagatcttattcaaactgctgcagtaggagagagaggtttctgtatggaactgagctcaacttctaatacagcaaagacagttgtggattt

SEQ ID NO: 887181 - DNA, 120 bp, Artificial Sequence
  ENSG00000245164_39 (sequence is synthesized)
atagccaaggagtagagcaaggtggtaagcagatggaaatttactaagaacttacctagatatcaaaggtagagggattcttgctaaactggcttaataaaattattttaaataataaaa

SEQ ID NO: 887182 - DNA, 120 bp, Artificial Sequence
  ENSG00000245164_40 (sequence is synthesized)
ctgttaattaataaaactattaataataaaactactttctaaaactaagatatccagagtggagagtgagaaacttgatcaaatatccagtagtctaatatcaagaattagtaaattctt

SEQ ID NO: 887183 - DNA, 120 bp, Artificial Sequence
  ENSG00000245164_41 (sequence is synthesized)
gataaattcgctaagcaggaatctttactaaaactcggctgggcaggccaaggtcaaagtctacttaggaagaatgctccaaggagcctaactcaagtttggtcaagggaagagtctttt

SEQ ID NO: 887184 - DNA, 120 bp, Artificial Sequence
  ENSG00000245164_42 (sequence is synthesized)
tcagtggataattgtgaactattttcatacacactatttcgtagcagactaatagatcttatgaatatacatctcattatttttgcagtaataaacatccctataataaaactcactgta

SEQ ID NO: 887185 - DNA, 120 bp, Artificial Sequence
  ENSG00000245164_43 (sequence is synthesized)
attatataaaaaataagcagcaaaaagtctacaagcagaaaattatacttagtaattaatgcttcagtattttattatagttagataatctaggtatctaatgaatgcccattaattaac

SEQ ID NO: 887186 - DNA, 120 bp, Artificial Sequence
  ENSG00000245164_44 (sequence is synthesized)
caaatttagcatcagtctaaagttttatgttatcaaaagatcttggtcttgagccaggatgacacactataaaatgtaattagttacttttgaattaacatttgtcaaaacagtgattca

SEQ ID NO: 887187 - DNA, 120 bp, Artificial Sequence
  ENSG00000245164_45 (sequence is synthesized)
gtgattcaatttaactaaatgcaaatttatatttttataattataaacatatagtaactaaaatgatagattattaaaccaagaaagctgtataagctgaggaagaatgtgcataagtag

SEQ ID NO: 887188 - DNA, 120 bp, Artificial Sequence
  ENSG00000245164_46 (sequence is synthesized)
gtatgcttgtgtaatacctaatactgagaactcagaagacataactgttttaattaaaccaacaaaataaagctagtctcatttgccaaaatttacctaaattatgtaacttaaattctt

SEQ ID NO: 887189 - DNA, 120 bp, Artificial Sequence
  ENSG00000245164_47 (sequence is synthesized)
aatagtacctttaaaaattttgataatctaatttagtaataccatctggaggcaggaaaatattacatacccacagacacataaatatacatacagatctagagaacttatcattttaat

SEQ ID NO: 887190 - DNA, 120 bp, Artificial Sequence
  ENSG00000245164_48 (sequence is synthesized)
tctaaaatctcagccatagaccaggcataacacagaaatacataactcacttgttcctataaaaagggctcttttcgttccactgggtagaaattcttgattgagttcaaaatagagaaa

SEQ ID NO: 887191 - DNA, 120 bp, Artificial Sequence
  ENSG00000245164_49 (sequence is synthesized)
aaaatagacgaacaaaaataacaaacccaattttctggcatctttctgacgtaacagagacacaatatctgcaaaccatttaattcatttacagagattaccaagtgaccacatacacac

SEQ ID NO: 887192 - DNA, 120 bp, Artificial Sequence
  ENSG00000245164_50 (sequence is synthesized)
acacacacacacacaaatccagcactagagatcaactgcatactcaatgaaaattaaattcctaccatgctaccaacagacaagagtctggaacattgaattaggaatagggctcacctt

SEQ ID NO: 887193 - DNA, 120 bp, Artificial Sequence
  ENSG00000245164_51 (sequence is synthesized)
taggtccctgtattgccagtcacaaatggagcatgaaggctccaagtgtccttattacctgggtggagcagatggagatctgaaggcatggtcccattttgagtcatggcagcaatcctg

SEQ ID NO: 887194 - DNA, 120 bp, Artificial Sequence
  ENSG00000245164_52 (sequence is synthesized)
tcaaagaaacagacaagttaaaagattgcttttatttgggctattgcaatagggaaaccacccttatctgaagatgatgggaatggctcagcctcttaggcagtttggcttttataggga

SEQ ID NO: 887195 - DNA, 120 bp, Artificial Sequence
  ENSG00000245164_53 (sequence is synthesized)
ggggtaaacaaatgcaaatgatgtggtttaacactgtggtcagttgcaaactgcagatgtcacagtttgttaactttccaaaacatttggagatgtttttctcagtagtggttgtggttt

SEQ ID NO: 887196 - DNA, 120 bp, Artificial Sequence
  ENSG00000245164_54 (sequence is synthesized)
ttcttagtaagcttcggagagcagagattatctcagctaatcagctatgagacaaagaacaggatgtagatttttttgctttgtcagcaggttttgtcagcagatgaaaggggacagttt

SEQ ID NO: 887197 - DNA, 120 bp, Artificial Sequence
  ENSG00000245164_55 (sequence is synthesized)
gtggtaggtcttgtcacacttgaccaaagatcttctagaatagtttcacacagagataacatcaaacagaaaaaccagaaacaggaagggggctgcggtcattcccacccccacccccca

SEQ ID NO: 887198 - DNA, 120 bp, Artificial Sequence
  ENSG00000245164_56 (sequence is synthesized)
ccccaagtaaagctaagaggctgaggcatacctccttgcagcctagctcacttacttgcatgtgatgcacttccttcccatgcctgcctgtcccaaccccaccccaccttcttacacata

SEQ ID NO: 887199 - DNA, 120 bp, Artificial Sequence
  ENSG00000245164_57 (sequence is synthesized)
gcctttcttgccctgtgaatacccatttctacacctctctatttgcactgatgctgactcaatcagtgtgtcacctcatccctccaaggctactgtactaccttccaaaatggctgcctt

SEQ ID NO: 887200 - DNA, 120 bp, Artificial Sequence
  ENSG00000245164_58 (sequence is synthesized)
cgttccactcttttttctcacaatttagtttccacagagaagccagaatgaacaaaagtgaaaatctgattttgttaccaacctgttcaaaatttttctgtctctccctattgcccttca

SEQ ID NO: 887201 - DNA, 120 bp, Artificial Sequence
  ENSG00000245164_59 (sequence is synthesized)
aggaaagcctatgctacatagcacaacattcaaacccttcatgttccaagtcaccccctttttttgccagcccttagccaactctacattccagctgtgcagaagctccagctgctttcc

SEQ ID NO: 887202 - DNA, 120 bp, Artificial Sequence
  ENSG00000245164_60 (sequence is synthesized)
tacaccccctgcaattctctatgtctaggactttgcttgtgcctttccttcaccccctgcaattctccatgtctaggaatttgcttgtgcctttccttccacctccaatgtcctccctcc

SEQ ID NO: 887203 - DNA, 120 bp, Artificial Sequence
  ENSG00000245164_61 (sequence is synthesized)
aactggctaagtcccaatgtatgtatataagaatttagaggatacctcttctggatttatcccaggccccaacttcagcccccagccttccccatcaccttgaagctgagtctggctgaa

SEQ ID NO: 887204 - DNA, 120 bp, Artificial Sequence
  ENSG00000245164_62 (sequence is synthesized)
attcctctattccctaccctttccagtcacaacacctaccacactgtttagcaagttcctccttctttttctgtctcagcagctagaccaggagctccctgcaggtcaagaccatgtgtt

SEQ ID NO: 887205 - DNA, 120 bp, Artificial Sequence
  ENSG00000245164_63 (sequence is synthesized)
ctctgatgctttctcatggcaaggggagacatagggttgcagtagtgagtgggcatctgttctcagaaggcagtgcctggagcactataagtacttaataaactcttgtgaaattaaaaa

SEQ ID NO: 887206 - DNA, 120 bp, Artificial Sequence
  ENSG00000245164_64 (sequence is synthesized)
gaaggcttttgacctcaaatatataaaaccaatggggggagaaggaagctatgcctctttccacaaagccaagcttgttatattataacatgatccacagcttttgatttcaacttaatg

SEQ ID NO: 887207 - DNA, 120 bp, Artificial Sequence
  ENSG00000245164_65 (sequence is synthesized)
tatgagatctggaattatttcagaagtatgattgattttgatcaggtgaagatattttaaaagaagtgaattatctcttatgttacttaatttaatccacattaaagatttatgacaaaa

SEQ ID NO: 887208 - DNA, 120 bp, Artificial Sequence
  ENSG00000245164_66 (sequence is synthesized)
cgcctcggtcccctaaagtgctgggattacaggcatacactcttaagtaacctggtggggacccatcaaactacaaagggttatagctactcttacagaagacataagaagatatatacg

SEQ ID NO: 887209 - DNA, 120 bp, Artificial Sequence
  ENSG00000245164_67 (sequence is synthesized)
cagagaagacatcataagacctgaagatgaaaaacttctgatcacagaagaaagatatacaacagccttgaagcattctgagaacccagtgaaggcaataatgtctcttcccagagaaat

SEQ ID NO: 887210 - DNA, 120 bp, Artificial Sequence
  ENSG00000215403_0 (sequence is synthesized)
gacctctcagacacaacaccagcaccatggccactcctagagccttaaaagtctctccatttttatgcctcccaccacactctgctttctccttcccgctctgactttcccttctctgtt

SEQ ID NO: 887211 - DNA, 120 bp, Artificial Sequence
  ENSG00000215403_1 (sequence is synthesized)
cccctcctggcctcccgagcacctcagccaggcccttaggcaccagtgtcctcaggggtctccagggctcctcttctcatcccggtctacgtgctctgctttcaagtttgcaggctctct

SEQ ID NO: 887212 - DNA, 64 bp, Artificial Sequence
  ENSG00000215403_2 (sequence is synthesized)
cccggtctacgtgctctgctttcaagtttgcaggctctctcaggttttacctaaaggttttcct

SEQ ID NO: 887213 - DNA, 120 bp, Artificial Sequence
  ENSG00000215403_3 (sequence is synthesized)
catcccgagtagctgggattacaggcacaatccagacaagacatcccagcactgcttccagacctctgcttgaaggtgggattcttcaatctcctggacattcttagagtctggctttac

SEQ ID NO: 887214 - DNA, 120 bp, Artificial Sequence
  ENSG00000215403_4 (sequence is synthesized)
cagtatctgcccatgtgcaagagagcctctgcaacagcccaatggagaaatggaggagtttccaggcccacgtgacactgaatcacaattgtcttttaccgcttgggatgatgatgccat

SEQ ID NO: 887215 - DNA, 81 bp, Artificial Sequence
  ENSG00000215403_5 (sequence is synthesized)
aatcacaattgtcttttaccgcttgggatgatgatgccatcacttttctctaatttttttttttttttttgaggcagcctc

SEQ ID NO: 887216 - DNA, 76 bp, Artificial Sequence
  ENSG00000215403_6 (sequence is synthesized)
gcctccccggttccaggttcaagatagtctgctttaaaaataataataataataataaaagacaacagtgaagaag

SEQ ID NO: 887217 - DNA, 120 bp, Artificial Sequence
  ENSG00000226320_0 (sequence is synthesized)
aagactcagcaacagtgtgttgtgtgttcctctatatttcccagacccctttgccattaggtcggctccgtatgactgagttctagccagtgaggtatgggcagaagtgatgtgtaccaa

SEQ ID NO: 887218 - DNA, 120 bp, Artificial Sequence
  ENSG00000226320_1 (sequence is synthesized)
ttgcgagctcgacttttgaaatcatcccacgtgatcctcctgccatctaccagccatcctttttgatcttgaaggtcttatgcctcagattgtgtaactacaggatgaaggaaggccact

SEQ ID NO: 887219 - DNA, 120 bp, Artificial Sequence
  ENSG00000226320_2 (sequence is synthesized)
ctttaagaagaccaccagaaacagcagagtgagtgaatgattatacttcattgcaaaggggtatggacacacagagagatggagaatgggagctattttgcagtttgctgtacaagccac

SEQ ID NO: 887220 - DNA, 120 bp, Artificial Sequence
  ENSG00000226320_3 (sequence is synthesized)
ggcagactgcacatggatagttgcaccactgcacgccctagtgtatgatacaacagaggcacagacaggcttactcagatcacattgccagtgaataatggatccaggattcaagttggc

SEQ ID NO: 887221 - DNA, 120 bp, Artificial Sequence
  ENSG00000226320_4 (sequence is synthesized)
attttgacccaaatctgcagccttaaccatgatgacacactgtccctgtatgtattatttctaatgctgcctgacgcacatattctagctaccacataataaacattcattgattattac

SEQ ID NO: 887222 - DNA, 120 bp, Artificial Sequence
  ENSG00000226320_5 (sequence is synthesized)
ggaggttgaatagggttagaaagacggcatgactatatctctaatgtagacctaaagtgcttcctagagctagggaccaggattctaaatgagacctgagggaatggagctgttgttgac

SEQ ID NO: 887223 - DNA, 120 bp, Artificial Sequence
  ENSG00000226320_6 (sequence is synthesized)
aagagctgttagacaaacaggacatggaggaggagaggtcaaaagtccgtctgactcacctgtgctgagtgacttgaatgccatctaatctaacttcaagatcatcaggatacttgccaa

SEQ ID NO: 887224 - DNA, 120 bp, Artificial Sequence
  ENSG00000226320_7 (sequence is synthesized)
caaggtcacagtggactccatggagcaactgccctcaggaggcaacaggtcacagtgtttggacaccgcatgaacatgccaatttcctgtgttgtaatatttttatgcactttaagaaga

SEQ ID NO: 887225 - DNA, 120 bp, Artificial Sequence
  ENSG00000226320_8 (sequence is synthesized)
ccaccagaaacagcagactgaggcgcatattggacaaaaatcacttatccaagaccacgttactacaaccccagggcacagaagctaagtcttcctattgtactgaactcagttgactgg

SEQ ID NO: 887226 - DNA, 120 bp, Artificial Sequence
  ENSG00000226320_9 (sequence is synthesized)
aatttgttcaggaaagcatgaagtcaaatggaagctagtccgtgactggattcatcttttgaacagccacaggatgtctaggagccagcagaggggccagatatgctgcagtttatgctg

SEQ ID NO: 887227 - DNA, 120 bp, Artificial Sequence
  ENSG00000226320_10 (sequence is synthesized)
cagatgaggaaacatgatgttcagaaaggtatatgacttgatcaagaacccacaaccaggcaatgagaggaatatgaggcaaaatccaatctacttgattccacagagctctgagtatag

SEQ ID NO: 887228 - DNA, 120 bp, Artificial Sequence
  ENSG00000226320_11 (sequence is synthesized)
atgaggcaaacttcacatggaaaagaagccatattttgaaaaaactacacggaatcaaagagaactaactcaaagaagcaaaattttggagataaaacaagcaccattcagaatctggac

SEQ ID NO: 887229 - DNA, 120 bp, Artificial Sequence
  ENSG00000226320_12 (sequence is synthesized)
atataatatgtttatggcatttaacctagtcagacagtagatattgctctaagtcatggcctacacctgtgagcctacttatatcagcatttgccaaatgtacttgtagctgtggtactg

SEQ ID NO: 887230 - DNA, 120 bp, Artificial Sequence
  ENSG00000226320_13 (sequence is synthesized)
acctcagagaacttagccaaagagcaaagactgcctaattcaagaagtactgagaagatgttccaggattacttcatgctgtccaggtcctagacatggaatcgtttgcttcttcaaaag

SEQ ID NO: 887231 - DNA, 120 bp, Artificial Sequence
  ENSG00000226320_14 (sequence is synthesized)
tctggatccctttaagatacgaaatgtatttagaaaccaaagtatggatgctaggtgtgctcatggccattggagtgtgtttctagacccaggaataagcaaacaatggcctgtaaacta

SEQ ID NO: 887232 - DNA, 120 bp, Artificial Sequence
  ENSG00000226320_15 (sequence is synthesized)
agagatgttgagagatcaaccaggagactgtgggaggatgtgagctctctgaggtgaggacagtctgttctgaaggtctacacattaatgcttcctattgggaattcaaatcggcaattt

SEQ ID NO: 887233 - DNA, 120 bp, Artificial Sequence
  ENSG00000226320_16 (sequence is synthesized)
gttcttcttctggttgtttgaatcttcaaaatagagggaagacacctggatgaaacattttcacagactctgcaattcccttaagaggatcccagagcccttaagcttctcttagattcc

SEQ ID NO: 887234 - DNA, 120 bp, Artificial Sequence
  ENSG00000226320_17 (sequence is synthesized)
tctgatttttttcagcccaaggactgttaccacatgtcttccatcttgcccacaattttagcagatcatcaggatacttgccaacaaggtcacagtggactccatggagcaactgccctc

SEQ ID NO: 887235 - DNA, 120 bp, Artificial Sequence
  ENSG00000226320_18 (sequence is synthesized)
aggaggcaacagatggcttcacttgcttattggctgaaggtctgcaaggactcaattcacatatctgatcatacctggagtccagactttctcctgatgcctgacccctttgccattagg

SEQ ID NO: 887236 - DNA, 120 bp, Artificial Sequence
  ENSG00000226320_19 (sequence is synthesized)
atatcctggaggttcttgcttaaccctgtccctaataagacctaactttatgagtcttctccttagaggcagtcctagggtaagagtgattattcctgtgagccttgtaggtactttcga

SEQ ID NO: 887237 - DNA, 120 bp, Artificial Sequence
  ENSG00000226320_20 (sequence is synthesized)
atcaaggaaattagtagttgattgctaattaattcagtatttaatgaatttaagtacctaggcaatgaggccacaatagcaaataagacacagacctgttttcaaaaagtagcctgtaaa

SEQ ID NO: 887238 - DNA, 120 bp, Artificial Sequence
  ENSG00000226320_21 (sequence is synthesized)
taagatatttttttctgccatggtggcaaaggcatgactatggtgatgaacattcataggctcaccttctagctctgttgtatgttaactgtgtgaacttgggtcaagttatgaaaactc

SEQ ID NO: 887239 - DNA, 120 bp, Artificial Sequence
  ENSG00000226320_22 (sequence is synthesized)
taagaactctcaaaactcctgatctgttttaacatgaaagtaaagatatctaattgaattgttgtgaaacttaaatgtaatgtgacatccaaagaatgtagcccaaagttggatttcagt

SEQ ID NO: 887240 - DNA, 120 bp, Artificial Sequence
  ENSG00000226320_23 (sequence is synthesized)
aagtgataaatagaagtatttaaacatgggtatggtatgttctgtaacagaagaatgtctatgtgctggggatacctagagacagtgaaaattctgtctggcctgcgaattataataaaa

SEQ ID NO: 887241 - DNA, 120 bp, Artificial Sequence
  ENSG00000226320_24 (sequence is synthesized)
tggcaagagtcaggagaggtttaactgaatatagaaggagaagaagtatttacattagaagtctgattcacaggtcggggcaaagtgaaaaacatctgcacttttaaaagagaggtcaaa

SEQ ID NO: 887242 - DNA, 120 bp, Artificial Sequence
  ENSG00000226320_25 (sequence is synthesized)
gttggtgcaagtgttctgtttctgatgtatggctcacttgaccaggactgtcacctttcccatactaacagttgtcaggaaattgcacctgccaaacaaagtcttaaacagggaacacac

SEQ ID NO: 887243 - DNA, 120 bp, Artificial Sequence
  ENSG00000226320_26 (sequence is synthesized)
ttcctaggttatcaagactagtttgagaagtgtcttagaccagtggaattggagtttctgatcaaactctgtatgaattctaagctttccaaacaagagcagctcactcactgaggaccc

SEQ ID NO: 887244 - DNA, 120 bp, Artificial Sequence
  ENSG00000226320_27 (sequence is synthesized)
agcccacaataatctatgattgtggtcattattggtgttcgggcttccagccgcaggtttctccctggagtctgcttttaagatagcaaaagctctagcgggcatttggtaccagccact

SEQ ID NO: 887245 - DNA, 120 bp, Artificial Sequence
  ENSG00000226320_28 (sequence is synthesized)
gcccgcagactggcactctgtgtaaatcccttagtcctgctggatccctcgaacaaagctaatctgccatctgacacctgggcttgtcacctttaattccaggcttctgagctgctctct

SEQ ID NO: 887246 - DNA, 120 bp, Artificial Sequence
  ENSG00000226320_29 (sequence is synthesized)
cttgctccaggacacaactgacacacagccttgcttggtgtaaagattacggcacagagacggagagccagccatcaaacacttagtctgattgcaagctgaaaatggcacagtggaaga

SEQ ID NO: 887247 - DNA, 120 bp, Artificial Sequence
  ENSG00000226320_30 (sequence is synthesized)
caattttgctgttcccctcttggagagaggaaaaaacccaggagatcttaaagtcgagtaattatttccatcagcaggaaatcagaactctgtgtttgaactaaacagagaggtcaaaag

SEQ ID NO: 887248 - DNA, 120 bp, Artificial Sequence
  ENSG00000226320_31 (sequence is synthesized)
caggttctttttgaggggagtctctctgatgcttggaatgaatcctgctgaatcaatgctgatgcttggagatcttcaagtcttttccctttttcccattgctcatgatgtctatataac

SEQ ID NO: 887249 - DNA, 120 bp, Artificial Sequence
  ENSG00000226320_32 (sequence is synthesized)
ctccaaacatgcatcccactcctctgccgaaagaccatttttttatatcttcagtgatggtctaggccaggttaattgacttttcttttttcttaagccaactaaagtcctcaccacaaa

SEQ ID NO: 887250 - DNA, 120 bp, Artificial Sequence
  ENSG00000226320_33 (sequence is synthesized)
ggctgtggttcaattctttcaatcaaagatctgcctaatcctgttttcccatagctaatgttgacagggttcaccacgccatcttcatctccgcccccacttctcatcttcagcccaaac

SEQ ID NO: 887251 - DNA, 120 bp, Artificial Sequence
  ENSG00000226320_34 (sequence is synthesized)
caatcttcatctctatcttcatctttacttccatccacacagcaatcttcaactccatctaccaataccagtcttaagctcctgtgccccaccatcctcagtcatagcagtgctcgatgt

SEQ ID NO: 887252 - DNA, 120 bp, Artificial Sequence
  ENSG00000226320_35 (sequence is synthesized)
gataacctaatcaaaaatttcaaaccaaactgcccagcattcatggttgtaaaggacatgtagaatcagtcaactgatagatacaaagtaacactgaaactgattgagcaataatcagaa

SEQ ID NO: 887253 - DNA, 120 bp, Artificial Sequence
  ENSG00000226320_36 (sequence is synthesized)
agttggcgctgcaatagcttcctcagttgtacctctctgtccaccgcccagctctttcctgttgcttccagttcctctcacttgtacttctttattaactatttgttaacataactttct

SEQ ID NO: 887254 - DNA, 120 bp, Artificial Sequence
  ENSG00000226320_37 (sequence is synthesized)
atggttttctttcacctaagacccaaacctcttctcctggcttgcatttccacgactccctgcccaagcctgaggttgcacaagaaacatatctctaattaatgtcccctgttccaggaa

SEQ ID NO: 887255 - DNA, 120 bp, Artificial Sequence
  ENSG00000226320_38 (sequence is synthesized)
tttgactcattgggcctgcaaaagattttcgtgacaaatgaaatatttttctaaaccaaggacttggggataacttcagggtcaaagacatcttatcatatttaagaacagccacaggat

SEQ ID NO: 887256 - DNA, 120 bp, Artificial Sequence
  ENSG00000226320_39 (sequence is synthesized)
atgatggagaaggtgagctcaacctgtaggccataaaaagtggaagggaggctgcccaagaaagataagaaagataaatacttgttaataaagatgatgagctgaactcactttcaaaaa

SEQ ID NO: 887257 - DNA, 120 bp, Artificial Sequence
  ENSG00000226320_40 (sequence is synthesized)
catcctaagaactaaaaattattttaaaaattgtaaatgggaaaaagtcaacaacaacaaacaaatcaacaaataaccccacaaataaacagtttcttaaagaccagaatgaccaagaaa

SEQ ID NO: 887258 - DNA, 120 bp, Artificial Sequence
  ENSG00000226320_41 (sequence is synthesized)
gaggcttttgggccgcttgctggagcctgctcctactctgtgaattgtacttttgcttcttcaaagaatctgtgtctttgttactctgttcttttgttacattgtttgtctttcgttgct

SEQ ID NO: 887259 - DNA, 120 bp, Artificial Sequence
  ENSG00000226320_42 (sequence is synthesized)
ttgctcttccgttgctttgtttgtgtgttttgttcgattttttgtgcaacacgccaagaatctggaaaactcacagtcaagaccttctagctgacatattttggtgagccagccaggaga

SEQ ID NO: 887260 - DNA, 120 bp, Artificial Sequence
  ENSG00000226320_43 (sequence is synthesized)
tgggggaggctgagcaagatggccaaatagaagcctctattgatcatcccccctgcaggaacaccaaatttaacaactatctgcataaaaaagcactttcataagaaccaaaactcaggt

SEQ ID NO: 887261 - DNA, 120 bp, Artificial Sequence
  ENSG00000226320_44 (sequence is synthesized)
accagctcagccacagcggggtagagcaccaagctcttggtgtgcccagttccaggccttgattcttggatggcctttctggacctgccctgggccacaggggagcacactttcctgaag

SEQ ID NO: 887262 - DNA, 120 bp, Artificial Sequence
  ENSG00000226320_45 (sequence is synthesized)
gtgtgatttgctgctcttaccattaagaggtgaaatctctttcctcgctatttgaatatgactgtgcctggtgagtgacactgaacgaaagaatgcagcagaagtgatggtgtgccaatt

SEQ ID NO: 887263 - DNA, 120 bp, Artificial Sequence
  ENSG00000226320_46 (sequence is synthesized)
ctgaccaacagccagccaatcattagacaggagtgaggacatcctaggccagccactgacctgatgactgcagatccatgagtgagctctgctcagatcagctaaatatggctggcacca

SEQ ID NO: 887264 - DNA, 120 bp, Artificial Sequence
  ENSG00000226320_47 (sequence is synthesized)
aaagaatgactcagctgacccacagattcatgagttaaatatgtcccttttgttttaaatcactaagtgacttaatgagtgataaatggcatagggtttaaactatcttgttatgaagaa

SEQ ID NO: 887265 - DNA, 120 bp, Artificial Sequence
  ENSG00000226320_48 (sequence is synthesized)
gaatagttgaaccacttgctctgagtagaagtcaatgtaagtcacattttcaataaaaaatacaggtttgttgttatataacttaaggtaaatgtgctggcctaaattatctttccactc

SEQ ID NO: 887266 - DNA, 120 bp, Artificial Sequence
  ENSG00000226320_49 (sequence is synthesized)
tactcaagagaaattacagtctgtatttcaaggtcattctgatcaaattctcaaagccaataatgtctcaaaagtacttgcaaatattaatatatttttatttgattttattagtcatat

SEQ ID NO: 887267 - DNA, 120 bp, Artificial Sequence
  ENSG00000226320_50 (sequence is synthesized)
tttcagcccaaggactgttaccacatgtcttccatcttgcccacaattttagcaggtgtgtgtaggtggagctcaaagttaaaaataactccagtaaactcacatatcttttttcacaaa

SEQ ID NO: 887268 - DNA, 120 bp, Artificial Sequence
  ENSG00000226320_51 (sequence is synthesized)
atccactggaggagtcctgcatacgactgaaatgtccaagtcctagaacttggacataggttctatgtccatagctgggggctgccctggaagagtacagccttccttgaaaccgaggtg

SEQ ID NO: 887269 - DNA, 120 bp, Artificial Sequence
  ENSG00000226320_52 (sequence is synthesized)
acaattttagcaggagaaaagatgtcctagaaaggatctgctctatcagcatggattctgggatttaaaaaaagatataaagagacctacagctgtagaacagagtttcagcctacctgc

SEQ ID NO: 887270 - DNA, 120 bp, Artificial Sequence
  ENSG00000226320_53 (sequence is synthesized)
tgccaacacataatgtgactgagataaactcttgttgattaaatcaactgagcagttagttacctgtttcagcagtataacaaagaaaaaactgactaataaaagttcctaggatgttcc

SEQ ID NO: 887271 - DNA, 120 bp, Artificial Sequence
  ENSG00000226320_54 (sequence is synthesized)
agagaaaatgatgttcactggaactctccagagaaagtgaaaggtgtctctgaaggaaaggatttttatgagtttagagtggtactatgctctcccttttcctttgccccaaggaattag

SEQ ID NO: 887272 - DNA, 120 bp, Artificial Sequence
  ENSG00000226320_55 (sequence is synthesized)
ggtatattctaaatcgatttcatctgggtgatacaagagattctgttggttgttcagagatgttgagagatcaaccaggagactgtgggaggatgtgagctctctgagaaggagaagaag

SEQ ID NO: 887273 - DNA, 120 bp, Artificial Sequence
  ENSG00000226320_56 (sequence is synthesized)
catgaacatgccaatttcctgtgttgtaatatttttatgcactttaagaagaccaccagaaacagcagaccacaggatgtctaggagccagcagaggggccagatatgctgcagtttatg

SEQ ID NO: 887274 - DNA, 120 bp, Artificial Sequence
  ENSG00000226320_57 (sequence is synthesized)
agaagaccaccagaaacagcagaagctctgagtatagatgaggcaaacttcacatggaaaagaagccatattttgaaaaaactacacggaatcaaagagaactaactcaaagaagcaaaa

SEQ ID NO: 887275 - DNA, 120 bp, Artificial Sequence
  ENSG00000226320_58 (sequence is synthesized)
ttttggagataaaacaagagaagatgttccaggattacttcatgctgtccaggtcctagacatggaatcgtttgcttcttcaaaagtctggatccctttaagatacgaaatgtatttaga

SEQ ID NO: 887276 - DNA, 120 bp, Artificial Sequence
  ENSG00000226320_59 (sequence is synthesized)
agagatgttgagagatcaaccaggagactgtgggaggatgtgagctctctgagagtggtcatgcatacctcaatgggacaaagtatctcctctgagacttcagaaaatccttttcttctg

SEQ ID NO: 887277 - DNA, 120 bp, Artificial Sequence
  ENSG00000226320_60 (sequence is synthesized)
gagccactctgttctggattaccctgagattttaatgagataaagtctagagatgtatataacttttctgcatcattttggaattttaatgagatgaaacgagacccagagacacctgtt

SEQ ID NO: 887278 - DNA, 120 bp, Artificial Sequence
  ENSG00000226320_61 (sequence is synthesized)
ctagaccactttgggatcttaatgaggatgcaaacaggttgaagacaagagctctctttaatggaacctgaacagtgcctaactcctgtagatattcactgaatgttaaataacaacagt

SEQ ID NO: 887279 - DNA, 120 bp, Artificial Sequence
  ENSG00000226320_62 (sequence is synthesized)
ccaaatagcttggaattttcctgttactgccagcatggcctgagagcatcctgagatcatcaggatacttgccaacaaggtcacagtggactccatggagcaactgccctcaggaggcaa

SEQ ID NO: 887280 - DNA, 120 bp, Artificial Sequence
  ENSG00000226320_63 (sequence is synthesized)
cttcaagtgtaagaattctggacccttatttgaagtctctcctgctttgttgggcaaaagtaatgagaaactccacttggcttcagaatgcagtgtcaactccacatgaatcaaagcaat

SEQ ID NO: 887281 - DNA, 120 bp, Artificial Sequence
  ENSG00000259457_0 (sequence is synthesized)
aacaggatgctgaacagcggaacacagcggacttgagccagcctaagtgggtttctgctccttgcaacaagaggcctgaatagaagccccttcttcaggggagtgggcatcagctcagaa

SEQ ID NO: 887282 - DNA, 120 bp, Artificial Sequence
  ENSG00000259457_1 (sequence is synthesized)
agaggatcccatgggaactgactttgctggtgaccaaggccctaccaccagggcaccctgcccatgtatcccaagcagagggagcagaaccagcggtgtaactactgtgcttgacaccca

SEQ ID NO: 887283 - DNA, 120 bp, Artificial Sequence
  ENSG00000259457_2 (sequence is synthesized)
gggcaggtctttttttaactcaccgatcttccatgcaacaaaattgttttctgtgaaaagcaggaaatgaataacaacagcgtaggtactccacttcaaatttcccaagaaattcagaag

SEQ ID NO: 887284 - DNA, 120 bp, Artificial Sequence
  ENSG00000259457_3 (sequence is synthesized)
ttccaagttcctacaggacaacgatgcacaattatttacttacttatgtttaaatatacctatcagtttgactttcatcctttggtgacattctaataatttatgtaaataattattcag

SEQ ID NO: 887285 - DNA, 120 bp, Artificial Sequence
  ENSG00000259457_4 (sequence is synthesized)
agaccaatgagaggattttaataagtgcaaaatgttagcagacggtacaacattgataaatctatggtctgtattttgttctgccatttcaaaataattaaaaagtaagtttcaatttaa

SEQ ID NO: 887286 - DNA, 120 bp, Artificial Sequence
  ENSG00000259457_5 (sequence is synthesized)
aaacattattgaaattcagtaaaatatttcaagcatgaactaaaatatacacttactaaacacaaatattacacctcacatttcatactctgtttcattgttttaaattttaaacagaaa

SEQ ID NO: 887287 - DNA, 120 bp, Artificial Sequence
  ENSG00000259457_6 (sequence is synthesized)
taactccaccggccacctagaatgatcaaatcaggcaactcaagttactttgtttcatcttcacaatcactgtgctatcattgttcattttgaatctactttttaaaagcaagaatattt

SEQ ID NO: 887288 - DNA, 120 bp, Artificial Sequence
  ENSG00000259453_0 (sequence is synthesized)
tattttggaaaaccagtgaaatagtggattggctactggttctgtgctaatagtgtttataagtggaatgggactttttttaatatgaagtcacccaaggaatttgctttttctggaggc

SEQ ID NO: 887289 - DNA, 120 bp, Artificial Sequence
  ENSG00000259453_1 (sequence is synthesized)
acccaaggaatttgctttttctggaggctgaggcaggagaactgctcgaacccgggaggcggaggttacagtcagccaaagatcgcgccattgcacttcagcctgggtgacagagcaaga

SEQ ID NO: 887290 - DNA, 120 bp, Artificial Sequence
  ENSG00000259453_2 (sequence is synthesized)
cacacaaaaggagtgaaaaggattgaaagcaacaaaatagtatgtagtcatcttctcaaaggaaccaaagtaatgggctgattatcttcagcttcctgaagaagctgaatgtttgtatgt

SEQ ID NO: 887291 - DNA, 120 bp, Artificial Sequence
  ENSG00000259453_3 (sequence is synthesized)
ggaagtagaaaatatgagtaatttggggacgcagaatctttcgtcacttccctccatcgcgtctcatgtccaggatcttcccaggagtcgtaggaaatgtagcatccatgcagttagtcg

SEQ ID NO: 887292 - DNA, 120 bp, Artificial Sequence
  ENSG00000259453_4 (sequence is synthesized)
tttacctcctaggaaacctttgtgctcttaggagacagtggcttcccattgtggttaagtgtaaccctgtttggctgacccctggatagagcttcataccctcagcactgcatagtcacc

SEQ ID NO: 887293 - DNA, 120 bp, Artificial Sequence
  ENSG00000259453_5 (sequence is synthesized)
tttgacttgtggttagaaagatcagccatatagtccatcatgatgatatgttatgatggtttatacaagaaactgggactttttatctcagccaaaacgctactcttgctttaggattag

SEQ ID NO: 887294 - DNA, 120 bp, Artificial Sequence
  ENSG00000259459_0 (sequence is synthesized)
agagcaggtagtcagccaaggcttcatagttctcacccacggcaattcagctagcaaactagagacacttccccaagaagacacagcgtggcaagactgctgagacgcataaagaaatct

SEQ ID NO: 887295 - DNA, 120 bp, Artificial Sequence
  ENSG00000259459_1 (sequence is synthesized)
tagctggaatgccttctcagaatcttgattttcaaagtgatggattgggagatcccaagccatgaataaagggtgctcatcacagatggaacaatggcgagagcacacctggacagggga

SEQ ID NO: 887296 - DNA, 120 bp, Artificial Sequence
  ENSG00000259459_2 (sequence is synthesized)
gcaactgagttttctaaacagatcttcttcttgacatccttgctgaacgagagcaaaggagacagctgggagcagatgggcaaatcccagtttgcccaaagaaatgtctattttccaagg

SEQ ID NO: 887297 - DNA, 120 bp, Artificial Sequence
  ENSG00000259459_3 (sequence is synthesized)
ggcatgaagaatttaggaataaagcagatctgatttctaattctgactttgctactggcaaattgtgtggactcaggaaagtgaccggccctctttaagactcagtgtgcttacctctga

SEQ ID NO: 887298 - DNA, 120 bp, Artificial Sequence
  ENSG00000259459_4 (sequence is synthesized)
aatggagctgtcaatcacatctgcctcacaggcttgttctgaggatgaagtgagaaaatgcccacgaggtgctggttgcagcagctggtgcatagagcttaaaaaggatgcagtcccaaa

SEQ ID NO: 887299 - DNA, 120 bp, Artificial Sequence
  ENSG00000259459_5 (sequence is synthesized)
acctggaactctccctcctccctggatgaggaccttccccagaattgcagggcacccacacaagaccaagcaagttcagagaaaattgaaacctgactttagagcctctgggatgttcac

SEQ ID NO: 887300 - DNA, 120 bp, Artificial Sequence
  ENSG00000259459_6 (sequence is synthesized)
tacacctcattgaacctgtttggttcacagagctccaactaccgtctacttcctgcaactggcctgctgccaactccccagatctcttgtggagctgccggaagagacagcctgccacag

SEQ ID NO: 887301 - DNA, 120 bp, Artificial Sequence
  ENSG00000259459_7 (sequence is synthesized)
aagaaagcagccctcctctttcatggcctcccacatcttgaaacaaacacaagcaaacaaaacaaaagcttgagtcccagcctgattcaccaggtttggttcccaattgttgaaattccc

SEQ ID NO: 887302 - DNA, 120 bp, Artificial Sequence
  ENSG00000259459_8 (sequence is synthesized)
ttcccagggctctcagaaccagggttggctggaggggtgaaagaggctggccctgagcccagtaataggacaccaagggggagctaaaagctgggatctggggtgaagatggggtcttcc

SEQ ID NO: 887303 - DNA, 120 bp, Artificial Sequence
  ENSG00000259459_9 (sequence is synthesized)
ggcaagagtataaacagaggccacggaccacatgcctcagtatttaaacttataaatcaagctaacataacatgaaatcaaatatgttctatcctcctagcttgacaaatactttcataa

SEQ ID NO: 887304 - DNA, 120 bp, Artificial Sequence
  ENSG00000259459_10 (sequence is synthesized)
cgagatggaatgccaggttcagatttagaattttcacactccttaaagttccaagtcaaaatacagcattaggggagggcccccaacctcgaggtctcccctcccccattttctttcact

SEQ ID NO: 887305 - DNA, 120 bp, Artificial Sequence
  ENSG00000259459_11 (sequence is synthesized)
cccagctctgtctcacaccacgagggatcttgggtgaatgcccctcgataccccagccccccacaaacagctgccctttccccccttggccaagggtaagcacagcagcagggcagtctg

SEQ ID NO: 887306 - DNA, 120 bp, Artificial Sequence
  ENSG00000259459_12 (sequence is synthesized)
cccttggctggagagatggaaggagaggccacacgggccctgaaaatgcatttggggactcttgggcaggaaacttgggagtttctggagcctcaaggagggtctagtgggacagagcca

SEQ ID NO: 887307 - DNA, 120 bp, Artificial Sequence
  ENSG00000259459_13 (sequence is synthesized)
cttgggcccatgagatccttgacccatggagaagggtagggctagaggagggccagggcaggccctatgaacagaagaacctagagtaactgccctgtccccagatcctgtcaccgagca

SEQ ID NO: 887308 - DNA, 120 bp, Artificial Sequence
  ENSG00000259459_14 (sequence is synthesized)
ggtatacttgggagggtattggagggtggaacccaagggagcttgcccaaggcactaggaaagaaaagtgtaaaccttgttagagaatgctaaggatagctgttaaagcctcagagattt

SEQ ID NO: 887309 - DNA, 120 bp, Artificial Sequence
  ENSG00000259459_15 (sequence is synthesized)
tactcatttttggctgtttctaaaaatcttcccccaaaggaagatcttgctctcattgaggatctgagaaagaattctctccaagtagtttcaaaacattctgatgtaaaaactctggtg

SEQ ID NO: 887310 - DNA, 120 bp, Artificial Sequence
  ENSG00000259459_16 (sequence is synthesized)
tgttagtcaaaaataaattttgttgcttgatggcttcaccattcacaaaatattctatccatccaatttaaaaataagagcagggtatttaaaactctttcaataaacacaaattaaaac

SEQ ID NO: 887311 - DNA, 120 bp, Artificial Sequence
  ENSG00000259458_0 (sequence is synthesized)
taacccagcaactccccgattgggggaaataaaatttaaactctagagataaatggactaatttgctgtgatgcagatcattccgtgggctagtctgtctcctggggctggcaacaattg

SEQ ID NO: 887312 - DNA, 120 bp, Artificial Sequence
  ENSG00000259458_1 (sequence is synthesized)
ctaaaatccataagcatgactggtggtaagagtcagtgaggaaagccacaaagctccatgctgtcatggatgctgtttatgggatgcaacggtgaggatgggatggttaatatcgtctgt

SEQ ID NO: 887313 - DNA, 120 bp, Artificial Sequence
  ENSG00000259458_2 (sequence is synthesized)
tccctcggaaaacgaagtgttgtaagcgttgctgcgtgaagtctgcccttcccaggctaaaaactgagctttctgaaaggcaaatgaatggtccccctaaccatgcagagagagattcca

SEQ ID NO: 887314 - DNA, 120 bp, Artificial Sequence
  ENSG00000259458_3 (sequence is synthesized)
ctgaagccaagagagagccatgacatggacccgagagccaaatgtaacagcaggacctaacactggagctcagaaggaagcagaagacacacagaggagcaaggagaaagcaccaaaagg

SEQ ID NO: 887315 - DNA, 120 bp, Artificial Sequence
  ENSG00000259458_4 (sequence is synthesized)
ggcagcagaatcaaaggagggagccctgcagggcacagcaagacgcctggggctgcggggtccgcaaggtgcacaggagagaggctcagagagctgggaagcagacaggaaggagagaag

SEQ ID NO: 887316 - DNA, 120 bp, Artificial Sequence
  ENSG00000259458_5 (sequence is synthesized)
cagaaacaggaggacatgaaggaaaacctctgtcaagaaaggctgctggggacaaagatttggaggaatgattcagctctctcaaagaaacaccaaagaaagagcttccccttctccact

SEQ ID NO: 887317 - DNA, 120 bp, Artificial Sequence
  ENSG00000259458_6 (sequence is synthesized)
ccctacctgtcttctacaagagaggaagagaagtagctcctctgcaggtgaagaaactaaaaccttgaagtcaagagaccttcccaaagttcacactgctagaaaagcacaaccagacct

SEQ ID NO: 887318 - DNA, 120 bp, Artificial Sequence
  ENSG00000259458_7 (sequence is synthesized)
cctaccctcccattgccaggtagttcttggcactggcacctggaattccatcattaagtatattgttggtcataaagatttgtccccagttaaactttgctataaaaatggatatgtgca

SEQ ID NO: 887319 - DNA, 120 bp, Artificial Sequence
  ENSG00000259458_8 (sequence is synthesized)
tttgctgcctatcactgtcatagaaatggtaagtttcagaaccctccgggcaactgagctgagtgctgccctttattaaagatgatgcctaattaagaggaaattctgctgaggaagggg

SEQ ID NO: 887320 - DNA, 120 bp, Artificial Sequence
  ENSG00000259458_9 (sequence is synthesized)
tagtgcactacagaacacactagaactctggcacagtggagaaagggcagtaagcaggggagtaagaaaaaaggaccgcctgaaagagaggggagccgacgcctatgttctcacagcttt

SEQ ID NO: 887321 - DNA, 120 bp, Artificial Sequence
  ENSG00000259458_10 (sequence is synthesized)
atgattttgcctagagctgatctttaatggacacatagcattttgaaatgtatggaaaatcaggttcaagctgcttagcccaaagattaaggcccccacccaccgcccaggctcatctac

SEQ ID NO: 887322 - DNA, 120 bp, Artificial Sequence
  ENSG00000259458_11 (sequence is synthesized)
cccgcttcctgtctcctaggcacatcataagaatcctcgatactaatgaaatggatgatttttcaatccctgcaaaactgcttcaattatttcagcctgtgtgtctgaaatgttaccacc

SEQ ID NO: 887323 - DNA, 120 bp, Artificial Sequence
  ENSG00000259458_12 (sequence is synthesized)
ctctgctccaggtcctccgttacccgtcagcccagcatccggctttgcttccataaactagtctttaaaccctgccccaacaagcaaggatccatctgctcccctcaactctcagagcac

SEQ ID NO: 887324 - DNA, 120 bp, Artificial Sequence
  ENSG00000259458_13 (sequence is synthesized)
tcagctgtgaccctgctccaacaccagcccgcctggcctgagtcaccagtgaaacaaacaggagatgctatcacctgatgaccactcagcaatgaagtgctccagggcgcttccatgtat

SEQ ID NO: 887325 - DNA, 120 bp, Artificial Sequence
  ENSG00000259458_14 (sequence is synthesized)
aggacatgaaggaaaacctctgtcaagaaaggctgctggggacaaagatttggagccactcactctccaccgtgacctcctgggaaggcctctgtgcccaattttggatggctgtacttg

SEQ ID NO: 887326 - DNA, 120 bp, Artificial Sequence
  ENSG00000259458_15 (sequence is synthesized)
gaattcctggcctgtatgtggaagatactgtcgttttttgtcgaaccgtaagaaggctgtgtcagctctcgagcaatctcactattcccctgtggttgccaagacagctgaataaatcat

SEQ ID NO: 887327 - DNA, 120 bp, Artificial Sequence
  ENSG00000259458_16 (sequence is synthesized)
ccatacatttcagtcctcttggagtctacctttcagtcctgctattttcctcctcttgttacaagcttcagaaagaaggtggctctaaactgaactctgactttgaattcttttatacat

SEQ ID NO: 887328 - DNA, 120 bp, Artificial Sequence
  ENSG00000259458_17 (sequence is synthesized)
taacttattcaaatgattgaaagtagattgtttacaaaaatggatacaatagaaatgtaaaaggtcagctccaagaaaaaaatagaagaaaaataaaagtgaaggtcaagaccaggtgaa

SEQ ID NO: 887329 - DNA, 120 bp, Artificial Sequence
  ENSG00000258325_0 (sequence is synthesized)
cctgagaatcttactaatcttcgtaataactgataattgcatggttttgaaaagtgtttttaaaaaactacccattaggagtgaaaacaatgtagtgagttgcaatcagcatataaaaaa

SEQ ID NO: 887330 - DNA, 120 bp, Artificial Sequence
  ENSG00000258325_1 (sequence is synthesized)
acttgccaaaggaacctcatgggagagtctggattagttcagagacctcacctttccatttaacttctgagtcttggttttcttatctgtaaatagggttattaaagttataccttcttt

SEQ ID NO: 887331 - DNA, 120 bp, Artificial Sequence
  ENSG00000258325_2 (sequence is synthesized)
tccctgcacagatccaggctgtctcttgcggtgcgcatgcacctaccgtatcgttatcaacgtctccgaggcagattgcgtgcgggaagaggctcccgctgaactccagcgccacgcgct

SEQ ID NO: 887332 - DNA, 120 bp, Artificial Sequence
  ENSG00000258325_3 (sequence is synthesized)
ggcccagtaaatattccctgaacccccgtcgcgacagccgccagagcggaaggccacctaaggcagcaagttacgtcactgcctgaacctccaatctctgcctcttcctcctttaacctt

SEQ ID NO: 887333 - DNA, 120 bp, Artificial Sequence
  ENSG00000258325_4 (sequence is synthesized)
acagaggaggcgggtcttccgggcttggaggcgggcttcccaactctgatgtgcagcaagacttggtttgaaaaaggagacaaaaggctgagagatctgagttcaagtttccgctgtatg

SEQ ID NO: 887334 - DNA, 74 bp, Artificial Sequence
  ENSG00000258323_0 (sequence is synthesized)
ccaggctggactctaatgactataggtgtgtgccactgcacccagcttcagtatatgtaattttttgatacaaa

SEQ ID NO: 887335 - DNA, 120 bp, Artificial Sequence
  ENSG00000258323_1 (sequence is synthesized)
actgcacccagcttcagtatatgtaattttttgatacaaataaaaaaaaattaaaacaaaatcctactcatcctgcagtttaacatctgtaatgaatttgcttcaatttacctataattc

SEQ ID NO: 887336 - DNA, 70 bp, Artificial Sequence
  ENSG00000258323_2 (sequence is synthesized)
caactagaatcattttattgtttagctaaaaccccaaagcaaatgaaacaaaagattagaacatcaccca

SEQ ID NO: 887337 - DNA, 120 bp, Artificial Sequence
  ENSG00000234699_0 (sequence is synthesized)
atagtcagctaactccccgggacctgcttcggatccctggagggctgaggattgaattcaggagcctagggattctccgggtcctgcaggcagagctccaactggtgggtgaaagttaca

SEQ ID NO: 887338 - DNA, 120 bp, Artificial Sequence
  ENSG00000234699_1 (sequence is synthesized)
aggaggcaggtttctgaaggaagccctgtgtaataatcagagctgcccagcctgtatctaaaagtggtcaagatgcgggctgaagcgtcacgggtcaggaatgctgcacaggagagtcta

SEQ ID NO: 887339 - DNA, 120 bp, Artificial Sequence
  ENSG00000234699_2 (sequence is synthesized)
ctgcagtgctcgtggttccgtcatggtggagctgccgagtgacccgctggcctccctgagctgggcttgaccatatgtacgaaggaaagaaaaggcatcccatggatgtctcctagttcc

SEQ ID NO: 887340 - DNA, 120 bp, Artificial Sequence
  ENSG00000234699_3 (sequence is synthesized)
ctcactgtggcccagtgttgtatatcaacgtcatcatggatacacctcctgtgggaggtgattaggccatgagggtggagccctcgtgaatggaattggtgcccttatagaagggaccct

SEQ ID NO: 887341 - DNA, 120 bp, Artificial Sequence
  ENSG00000234699_4 (sequence is synthesized)
ggaccctggacctccactctgcaaggatacagtgagaaggcagaacccagcctcaggtacactcatctcagacttgcagcctcctgaactgtgagaaataaatgtttgttgtctgtggta

SEQ ID NO: 887342 - DNA, 120 bp, Artificial Sequence
  ENSG00000237166_0 (sequence is synthesized)
agacaaactcaaaatgggagacattggacaagataactggccaaactcttccgaagtgtcaaagtcatgatgtcaaagagagaggggagacctgattcctgctccaggacacctcagaga

SEQ ID NO: 887343 - DNA, 120 bp, Artificial Sequence
  ENSG00000237166_1 (sequence is synthesized)
caggacaactaaatgaaaactagtgtctactatggactcactgtggatcttgtgaagtttggcattttcgtccaccaggttagagataaacatgtgcaaaatgcttgataagacaattca

SEQ ID NO: 887344 - DNA, 120 bp, Artificial Sequence
  ENSG00000237166_2 (sequence is synthesized)
caagcaagaatttgatccaaaggaactgataagatgctggagaaatgtatgaaaaactcttcatactacagcaggaaaaaaactgtagaacaatttaacccgtggaattattggaaggaa

SEQ ID NO: 887345 - DNA, 120 bp, Artificial Sequence
  ENSG00000237166_3 (sequence is synthesized)
agaggaactgtcattatacccaagaaaatctcagttggatatccaaagatgttttatcatcagcccagctacagcagatcagcaagagaatcaggctgtctggtttggaaaataaatttt

SEQ ID NO: 887346 - DNA, 120 bp, Artificial Sequence
  ENSG00000237166_4 (sequence is synthesized)
gacactgctctgtcctccctgtcctgtaacaggccaacctcccgaagatgcataaagacacctttgccgttgaccaggcagaccctgcatccacaggacatagagagaaaggtgctccct

SEQ ID NO: 887347 - DNA, 120 bp, Artificial Sequence
  ENSG00000237166_5 (sequence is synthesized)
gaacactgatctggataagcattgctgggtcagtgcagaggcgtccatttccccagtctgccgagctggcctaaagctgaggacctcttagtgggagctgaggacatgtgcctgaagagg

SEQ ID NO: 887348 - DNA, 120 bp, Artificial Sequence
  ENSG00000237166_6 (sequence is synthesized)
caagcccttgactgatggaaattggagtctgagttccatgtgggggactgggaagcacagcaaggtctgaaatgggagacccagggaagggcagagaggaccaaaggaggaagggggtct

SEQ ID NO: 887349 - DNA, 120 bp, Artificial Sequence
  ENSG00000237166_7 (sequence is synthesized)
acagtgtgggaaacagcctggacgcaacagccgggggaggaggcctgctctggccccagtggccccttgtaagcaggaaaggcagctggctagacctcttctgtgttattcactctgatt

SEQ ID NO: 887350 - DNA, 120 bp, Artificial Sequence
  ENSG00000237166_8 (sequence is synthesized)
ttatcctttatcttcccctcccaacctcacctcctttctaaccccaaagccatgcagctaatatgactaagattgctgggcgtttgcttggaaatgcaaatgagaatttctggtagtttc

SEQ ID NO: 887351 - DNA, 120 bp, Artificial Sequence
  ENSG00000237166_9 (sequence is synthesized)
ctagtttccttgatctcctttgtcaagtttattgaggggaaaggactctcggttaaaaaaaaaaaaaaaagaaaatccagattttgaacaccagctctctttaatgccaacttcctgagg

SEQ ID NO: 887352 - DNA, 120 bp, Artificial Sequence
  ENSG00000237166_10 (sequence is synthesized)
cttggctctgacgggcggcacagcaagaagccttgctcgcgtgtgggacgtgcccgttctggcctggagagagggcccagagacaccacctcgccaccgccacctgattactcattgtca

SEQ ID NO: 887353 - DNA, 120 bp, Artificial Sequence
  ENSG00000237166_11 (sequence is synthesized)
ccaatgagatgacaagaactgatgacgcatttcccttttgctgcactctgacacctcagagaccacagcagagaaaaagctgcttttgtaaaactggaacatgaactacgcggacgcccc

SEQ ID NO: 887354 - DNA, 120 bp, Artificial Sequence
  ENSG00000237166_12 (sequence is synthesized)
agaggaggtctctgctgccctctgttgctggcttcttagtaaccctaaccatttttaagaatacagtatttggtttcagtaactttattacatgaaaagtatgctcggaggaaaaaatgt

SEQ ID NO: 887355 - DNA, 120 bp, Artificial Sequence
  ENSG00000237166_13 (sequence is synthesized)
gtcaaatttaatcagtcgtgggtactatcaacattttaaattgttgccaatctaatagaggaaaatggtatctcattgctgttttaattttcattttaaaaattctaagtgaggctcaaa

SEQ ID NO: 887356 - DNA, 120 bp, Artificial Sequence
  ENSG00000237166_14 (sequence is synthesized)
tctttttttgtttttttaatctttttttattgatttagaaaagtttttgctgtaaatgcgtttctttttatactaatgcttttctctgttatatagtcaaatttatcagtcttttcttta

SEQ ID NO: 887357 - DNA, 120 bp, Artificial Sequence
  ENSG00000237166_15 (sequence is synthesized)
tttctctgttatatagtcaaatttatcagtcttttctttataacttccggctttcatgttccttaggctatggatttttttaaatgcatgcatatatttagtatagtttttagtatttaa

SEQ ID NO: 887358 - DNA, 120 bp, Artificial Sequence
  ENSG00000237166_16 (sequence is synthesized)
aactttaatcaatctggaatttatttttattgtaaagtgggaaatagaagtacagctttatgtttctttgtttttaaaatggcttgcaagttgtaccaatattcttccttaaatgctcca

SEQ ID NO: 887359 - DNA, 120 bp, Artificial Sequence
  ENSG00000237166_17 (sequence is synthesized)
ttttatggcttacttgaagtgcatttttgcttctaatgagacctgactttctggcctatttcaggactttacattgttctgttggtctgtttttctcctcctgtatcagtacctataatg

SEQ ID NO: 887360 - DNA, 120 bp, Artificial Sequence
  ENSG00000237166_18 (sequence is synthesized)
tgtaactactagacatgtattaatgtaatagaatacatttcaatattatatagggctagtttcccctcttgactattcttattatacattttttatctttctagataaactttaaaatca

SEQ ID NO: 887361 - DNA, 120 bp, Artificial Sequence
  ENSG00000237166_19 (sequence is synthesized)
agtttttaaaagacactgttgatgttttgattgggaatgtgttatatttaatttataagagaaaattgatactgttatattttgtgtccttgtagctaaggcttatgtctttccctttta

SEQ ID NO: 887362 - DNA, 120 bp, Artificial Sequence
  ENSG00000237166_20 (sequence is synthesized)
aaatttgtctttttttaaagttcaccaatagattttaaaagttcttttcatgttggccctgcacatatttttgttgattttatccctagagttattttttggttgttactataaacggga

SEQ ID NO: 887363 - DNA, 120 bp, Artificial Sequence
  ENSG00000237166_21 (sequence is synthesized)
atcctttcctaaaagctgacactatgacagcagttggaaattaaaaaggaaagccatggcaaaagacagtcacagctccacttggctgttctgttctttcagaaaacgtagtgacctcgt

SEQ ID NO: 887364 - DNA, 120 bp, Artificial Sequence
  ENSG00000237166_22 (sequence is synthesized)
atgagtacatcccctgaggtagggtcaaaagaaagtctgttaggacacctaagagtttcttggagatgtcaggatatccaccggggttctgaagtaaagatgctgtcattattttaatat

SEQ ID NO: 887365 - DNA, 120 bp, Artificial Sequence
  ENSG00000237166_23 (sequence is synthesized)
aaatgatcaattatgaagatatagttgattggtataaaaccatttttaaaatctatattgctgcatagtcttcagacttttattttcattgccgtggggaagtttgtatgaattagagga

SEQ ID NO: 887366 - DNA, 120 bp, Artificial Sequence
  ENSG00000237166_24 (sequence is synthesized)
gctccatggttttcatcctataagggacttcagaaaaatagcatgaaagcaaaactgtggtagggtcaacacacggtgctcctttatttggtttgaggtgtaagttaataaatcaccttc

SEQ ID NO: 887367 - DNA, 120 bp, Artificial Sequence
  ENSG00000237166_25 (sequence is synthesized)
gtcccttgaagatatctcccagtgatcctggggatgaacaccaggcagctttccaaataatagggttttgttttttttttttctgccatcttgtaaaccttcttggaccaacaaccagcc

SEQ ID NO: 887368 - DNA, 120 bp, Artificial Sequence
  ENSG00000145063_0 (sequence is synthesized)
cacagttccttccacgcagcttctctgtgggtccattcagctggcgcgctgcttcctatctttgtaagggaagagctaagtgcagacaaagccctgacgaatagaggcctgcgcagagtg

SEQ ID NO: 887369 - DNA, 120 bp, Artificial Sequence
  ENSG00000145063_1 (sequence is synthesized)
cccggggtgcagggcagcagggcagccagtgaaccactgagctcgcactgtagccagtcctgtgtgcccctgctggattctgcttctatgagggaggcagcaaggagttgggacttcaca

SEQ ID NO: 887370 - DNA, 88 bp, Artificial Sequence
  ENSG00000145063_2 (sequence is synthesized)
gacttgccagggtcttacttgtagctcattgcagcctccacctccctgggctcaggagatccatctcagcctcctgagtagctgggac

SEQ ID NO: 887371 - DNA, 120 bp, Artificial Sequence
  ENSG00000145063_3 (sequence is synthesized)
gctgggaccacaggttttgttcaggtttagcacaagctgtgatgaatatcttcaagcctctgcttcctgctgtggaattgttgccaaaggacacattcccagatgggattactgagtcag

SEQ ID NO: 887372 - DNA, 120 bp, Artificial Sequence
  ENSG00000145063_4 (sequence is synthesized)
aggaagtggacattgagtggctctcaacagacaggctgtgttgctctcacagtgcccaggtaccaccagcaatgtatacacatacaggaagcgccggcttccctgttgtcttgttgctgt

SEQ ID NO: 887373 - DNA, 120 bp, Artificial Sequence
  ENSG00000145063_5 (sequence is synthesized)
ggcgtgttggggtctctaagaccaccctgggtttgttgattggctaggagaactcgcagaactcagcatacagtgatactcgaggctatgatgtattacgacaactggaaatgaagcaaa

SEQ ID NO: 887374 - DNA, 120 bp, Artificial Sequence
  ENSG00000145063_6 (sequence is synthesized)
ttcagcaaaggaaaaaggcacatgggtcaagtccagaggaaatggagtgtgagggtccaagaccctctcacatgctggacgcgcccacttcccccagaagtgtgttgggacaacacgtgt

SEQ ID NO: 887375 - DNA, 120 bp, Artificial Sequence
  ENSG00000145063_7 (sequence is synthesized)
cctctgcctagcatgtaccaaaattctggactcccagtacgaagacataaaccacagtgtttacacagtttaggggcagtgagccattcatatcagggaagggcgggaaccctccccaaa

SEQ ID NO: 887376 - DNA, 120 bp, Artificial Sequence
  ENSG00000145063_8 (sequence is synthesized)
tccaatttcccagatacgaaccaagggccaaccttgcaagcagtccttgctaaagataacattgctataatttgtatttctttcatttttcttttgagagtaaatcatttcgatataaaa

SEQ ID NO: 887377 - DNA, 120 bp, Artificial Sequence
  ENSG00000145063_9 (sequence is synthesized)
taatgagatgggacctggccatccgaaggttcattcactctcaaggctggaggttgatgccagctgtcggctgtgacctcaggtgggtctggcggccagctgcggcccctccatgtggct

SEQ ID NO: 887378 - DNA, 120 bp, Artificial Sequence
  ENSG00000145063_10 (sequence is synthesized)
tgggcttctctccagtgtgaagtggctgtgtttcaaggatgaggaactgacaaagagggaaccaggtggaagcagtgtcaccttttctatcctaaccacagaagccaccctgtgccactt

SEQ ID NO: 887379 - DNA, 120 bp, Artificial Sequence
  ENSG00000145063_11 (sequence is synthesized)
ctaccacattgtttattagaaacaagtatgaatactggcccatattcaaagggaggagaattaaactccacttttgatgggaggaggatcaaataatttatagaggttatttaaaaccat

SEQ ID NO: 887380 - DNA, 120 bp, Artificial Sequence
  ENSG00000145063_12 (sequence is synthesized)
cacaaacatattagatttgccatgtttaggcatttattctgcaaaaaaacatacaaatgtgcaaagttacttgaggctattttctgcagtgttatttgtgttagttaaaaaaaaaaagga

SEQ ID NO: 887381 - DNA, 65 bp, Artificial Sequence
  ENSG00000145063_13 (sequence is synthesized)
tttctgcagtgttatttgtgttagttaaaaaaaaaaaggaaacaatctaaatgtccatcaagggt

SEQ ID NO: 887382 - DNA, 120 bp, Artificial Sequence
  ENSG00000145063_14 (sequence is synthesized)
gacaggctgtgttgctctcacagtgcccagcttcccatgggtggccagccgaatgcattatgggagaaagcaggtctcgtggataatatttctgaagatcggagcaggttgccaggtcca

SEQ ID NO: 887383 - DNA, 120 bp, Artificial Sequence
  ENSG00000145063_15 (sequence is synthesized)
cctccttcaggcccgcggcatctcccctggctccaccatccccaggtgtctcaggcctgtttcctcctcatgagaggtggagcggtggttcccaaacacgatgtgggaagtgtgttaaaa

SEQ ID NO: 887384 - DNA, 120 bp, Artificial Sequence
  ENSG00000145063_16 (sequence is synthesized)
tgcagatcctgggctcgaccctgaagctcttccggcatccaccttcccaggtgaccagactctggggaaggcatcacctcaagactcctgcacccttcctccagagtcctgggattcagc

SEQ ID NO: 887385 - DNA, 120 bp, Artificial Sequence
  ENSG00000145063_17 (sequence is synthesized)
taaatcctgggaaggtgcctgcctccctgctgcgcctggccacgtggaaacccctgtagctccctggctgtgcaggagcagccacagtgtgcccctcccaggaccaccatccccctcact

SEQ ID NO: 887386 - DNA, 120 bp, Artificial Sequence
  ENSG00000145063_18 (sequence is synthesized)
gtctctgaggcacctgcgtggaccgggtctggattgagtctcatttctctggattcccacggcagccggcggctgcctctcccacacccgtcactctgtgtcatggaaagctgtgtgttt

SEQ ID NO: 887387 - DNA, 120 bp, Artificial Sequence
  ENSG00000145063_19 (sequence is synthesized)
gtcttcattcccaccgagtctgagccactcgaggtcagggccatgaccgtgagctacacgtccttggcgcccagtgtgagccgtgtacagtagaggctgactgacgtcttggaggcagaa

SEQ ID NO: 887388 - DNA, 120 bp, Artificial Sequence
  ENSG00000145063_20 (sequence is synthesized)
ggattggatgagttgatccacgcaaggctcctggcacagtgcctggcatatggttaaatagacttgaagttataattaccaggcctgtttcctcctcatgagaggtggagcggtggttcc

SEQ ID NO: 887389 - DNA, 120 bp, Artificial Sequence
  ENSG00000145063_21 (sequence is synthesized)
accacgtccccagaaagctccgggttcgtcagaacagcaacattaaaggaaggcccaatttatctatggaaaaatccgctccggccttcctcttgtagccccaaccgttttcacttctaa

SEQ ID NO: 887390 - DNA, 120 bp, Artificial Sequence
  ENSG00000145063_22 (sequence is synthesized)
gtagccgctttgggtcttacttgttggttgtacagttgctgtcaatgtgcctaccattttgtacccagcttaaaattgtttatttatttatttatttatttagaggcagagtctcgttct

SEQ ID NO: 887391 - DNA, 80 bp, Artificial Sequence
  ENSG00000145063_23 (sequence is synthesized)
tatttatttatttatttatttagaggcagagtctcgttctatcacccaggctggagtgcagcggggcgatctctgttcat

SEQ ID NO: 887392 - DNA, 88 bp, Artificial Sequence
  ENSG00000145063_24 (sequence is synthesized)
cagcctcctgagtagctgggattatagaggtgtgccaccgtgctcgactaatatttgtatttttaatgtcctgaactcctgactcaag

SEQ ID NO: 887393 - DNA, 120 bp, Artificial Sequence
  ENSG00000145063_25 (sequence is synthesized)
gctcgcaagaaatggtggccctgagggcgctttgggaattgtggatcaggcatcagtgtgaagcttcctgcttgtttgggaacgatggcggaagtcatgagcttatgttgggcgaggaaa

SEQ ID NO: 887394 - DNA, 120 bp, Artificial Sequence
  ENSG00000145063_26 (sequence is synthesized)
atgagtgcaatgcactaggaacatccactctgtctgcaaacccagagcgttcacacagcactctgctttatctgagacctcccagccatgcctttccaacgccattctacagatgaggaa

SEQ ID NO: 887395 - DNA, 120 bp, Artificial Sequence
  ENSG00000145063_27 (sequence is synthesized)
actgaggcccttaccggcaagattaagtgaccgcccacggtcacacagtcagtcaccagctgaaaggaacagtgagaatctgagggcttatggtccgagccctcagccctgtttctgctc

SEQ ID NO: 887396 - DNA, 120 bp, Artificial Sequence
  ENSG00000145063_28 (sequence is synthesized)
taactgggtacaaccaggctccctccgtggcagcctctcctggtctggctcagctgagctccatggacgcccgctgctctcatcacttctgcctcctgcactctctgcttccggttctct

SEQ ID NO: 887397 - DNA, 120 bp, Artificial Sequence
  ENSG00000145063_29 (sequence is synthesized)
gacgcacggtagttcgctatggccatttctgattaaagacagaacaaatggattgtccggatacggtgtctgtgaaaggaacccagctgtgagcctcggcaggcaggtgcgacattctaa

SEQ ID NO: 887398 - DNA, 120 bp, Artificial Sequence
  ENSG00000145063_30 (sequence is synthesized)
atccacagggagggcccagaagggacgcaagaggtcacctgccgtgcagggtgcggggggtcttggaggtgggcagcagctgttcacccgtgagcgacgaggagcatcagcgcttgaaca

SEQ ID NO: 887399 - DNA, 120 bp, Artificial Sequence
  ENSG00000145063_31 (sequence is synthesized)
gcggaagcagcatttacaggtgaacaccagcccgagagggccggggggcccaaagctatggtgtccagagcctcccagctcccactctggcctccagtggccatggaattgctaactatg

SEQ ID NO: 887400 - DNA, 120 bp, Artificial Sequence
  ENSG00000272009_0 (sequence is synthesized)
gttcccaacgccgaagctggttctacctttctccgggattcctctgagggccaaggtctggtcacccagaggctgctaatttcaaaggcaatatgagagggactggatgtttggaggggg

SEQ ID NO: 887401 - DNA, 120 bp, Artificial Sequence
  ENSG00000272009_1 (sequence is synthesized)
acacggggctggacatctggatccccaaacccggactcacctctcggacagggctgattccgatcggacacttccggtggaaggactgagcggcgctacacttcaagaattccgtccaca

SEQ ID NO: 887402 - DNA, 120 bp, Artificial Sequence
  ENSG00000272009_2 (sequence is synthesized)
tcgccaaagtcctgaagatctcagggcttgaaggagggggcatcttttttctccattgtagtagtgtgtcttgctaaataacagaagggactcctgaaaagaaaatgacgttggccgggc

SEQ ID NO: 887403 - DNA, 120 bp, Artificial Sequence
  ENSG00000272009_3 (sequence is synthesized)
gggaggccgagacgggcggatcacgaggtggtgaaattgaagcccacgcagcagggttgcaactgaaacttcatctcctctgcaaaaccttcctgcattcccagacaacttttcttctga

SEQ ID NO: 887404 - DNA, 120 bp, Artificial Sequence
  ENSG00000272009_4 (sequence is synthesized)
cttcctgcattcccagacaacttttcttctgaggccttgtttgattcatccccttaccccagtggaactcagatattcaaaatggtattaattaaaaccactggctgtcattggtccatg

SEQ ID NO: 887405 - DNA, 120 bp, Artificial Sequence
  ENSG00000272008_0 (sequence is synthesized)
gacgggaaaaagcctagggaggggcgaccctctccggcgtcccgatcccggcgtggctttccccagtccacgaagtcttctacggacatatcctcctgttccccaagaggatggcacagg

SEQ ID NO: 887406 - DNA, 120 bp, Artificial Sequence
  ENSG00000272008_1 (sequence is synthesized)
gagagttctgagtggtctcgggcaatggctgcatttgctgttggcctgtaagcaggccagaagcagaggaagagagagaaggtaaaacccgcccatggaccgcaagcgtgagagccaagg

SEQ ID NO: 887407 - DNA, 120 bp, Artificial Sequence
  ENSG00000272008_2 (sequence is synthesized)
caggactatgaactgtcaaaattgtctctgacttctcaccaggccggagaggagggatctagtgcgtgaggtaccagatctcgtctcacttgactctcctcctcttcagcaccaagaacg

SEQ ID NO: 887408 - DNA, 120 bp, Artificial Sequence
  ENSG00000272008_3 (sequence is synthesized)
cctgtcccctggaaacacattctctagggggtggaggcaacaaaggaaaagaacaattgggtcagagcagaatgaggttcaatcctcagtctggagaacggagcaaattcatgaaaagca

SEQ ID NO: 887409 - DNA, 120 bp, Artificial Sequence
  ENSG00000272008_4 (sequence is synthesized)
tagtttaaaagaagtcagaatatgaacagaccagatgacttttaaaccacgaaaacatttctagaataagtgataactaactactctgtttcaccgtgatttagactctactacactcta

SEQ ID NO: 887410 - DNA, 120 bp, Artificial Sequence
  ENSG00000272008_5 (sequence is synthesized)
cagaaatcaccaacaatgacaacaggctatatatgaaagctattgaaaagaaagtaggtcaaggaaaaaaaaaacaccaataaggactccattaaaaatcataacggaggagaggaaatt

SEQ ID NO: 887411 - DNA, 120 bp, Artificial Sequence
  ENSG00000272008_6 (sequence is synthesized)
gatgctaaaataaaacaatattgtcgagaattattataaatatctacagcatttttttttcctaatgctacaaatagaggtagcattctgaaccacattttacttacaagctgaaaagaa

SEQ ID NO: 887412 - DNA, 120 bp, Artificial Sequence
  ENSG00000272008_7 (sequence is synthesized)
ttaatacttggcacttgaacaaaagagtagaagaggtgctacaaaaatccaagagcttaaccctaaagttcttaataaaactaatattttttttaccgttagagcattagacaaaagacc

SEQ ID NO: 887413 - DNA, 120 bp, Artificial Sequence
  ENSG00000272008_8 (sequence is synthesized)
tatctctcttgcaactgaatagtctacagaaatttagaaacaatgatattgatgaggcacccagtcttttcatttactctgagtgaagtatatttttttagtacaaggatctaaaataaa

SEQ ID NO: 887414 - DNA, 120 bp, Artificial Sequence
  ENSG00000272008_9 (sequence is synthesized)
aatacttcccattgtgggcagcgtcctcttcaaaagatttctagtaattaatggaaagtgttctacatactatgttgtccagaataaatgttttataacgcatcagtgatggtgatgttt

SEQ ID NO: 887415 - DNA, 120 bp, Artificial Sequence
  ENSG00000272008_10 (sequence is synthesized)
ttaaagcggcattatataaggtgaccaggcacagttaaaccccttatgaaaaacagtatcagttaatattacatattaacaaggtagaatcttcaaatgtttaatcttcaaatgtttact

SEQ ID NO: 887416 - DNA, 120 bp, Artificial Sequence
  ENSG00000272008_11 (sequence is synthesized)
catggaagagactgggaagtacattcaaaggctgagaagagaggatataatagtatcactgagttgaaaaaggaacaattaaggcagctaatgatttttaatattttcagttcactttcc

SEQ ID NO: 887417 - DNA, 120 bp, Artificial Sequence
  ENSG00000272008_12 (sequence is synthesized)
caagttaagtattttagatacccaaaccaggtttcaccagtttatgttatcttaggattccagtgaaaaaatgcaaaaagggaaatatgaggttagccaaatgtacccgtaaatccaagg

SEQ ID NO: 887418 - DNA, 120 bp, Artificial Sequence
  ENSG00000272008_13 (sequence is synthesized)
taaggtatcacaggttagcaagctcatttccacttcaagtataatggtttacaccacacctaatctatagaaagaaagaaaaaatgggggttgaggggtgggagacatatatatccagat

SEQ ID NO: 887419 - DNA, 120 bp, Artificial Sequence
  ENSG00000272008_14 (sequence is synthesized)
attgatttttaagagaattgcctgataatgtaggtcattcctacctcttgcacataacaaccctaaaactatggagacttgattagcaaattgattctgagcaccattactatctggtaa

SEQ ID NO: 887420 - DNA, 120 bp, Artificial Sequence
  ENSG00000272008_15 (sequence is synthesized)
atgtccatcagcatggatggccatgtctttatgtttatttagtatctgtgaaccctatgtccacattcctccatttcttctcctttgcacacacatagaaatatttagagcctacaggaa

SEQ ID NO: 887421 - DNA, 120 bp, Artificial Sequence
  ENSG00000272008_16 (sequence is synthesized)
atgtaaggattgggggtgagtggtgtaattaacactcatttattgtgtacttgatatttgcaggcactacttggtttgggacaagtcagaggcgaataaaagctcttcctgccttgaaga

SEQ ID NO: 887422 - DNA, 120 bp, Artificial Sequence
  ENSG00000272008_17 (sequence is synthesized)
tatgacaaatgttctattatgaaaatgcatgcctgtattcaacttagaacatcaaagtaatctcagatactaacaagaatgtccaacgaatctctacataagtgcaggcttttttttttt

SEQ ID NO: 887423 - DNA, 120 bp, Artificial Sequence
  ENSG00000272008_18 (sequence is synthesized)
tttttttttttaatgagaaggattgaaaatactatcccgtgacaggtcaaccttgtcttggaaatctcagaaatctcaatcttatccatagaaaagtcatgacttctgtgcttatgtcca

SEQ ID NO: 887424 - DNA, 120 bp, Artificial Sequence
  ENSG00000272008_19 (sequence is synthesized)
tttgttctttaaataccaaactgtcagctcataggaaccatttacacacacacactgacacacacacaaacacgcacacccctacttactgagatgttcctggggagattcgaagacctg

SEQ ID NO: 887425 - DNA, 120 bp, Artificial Sequence
  ENSG00000272008_20 (sequence is synthesized)
ttccattgagaaaacaagaataagcccctggggcaaaagactccgcgtctctggggaactcagtatccgcgccgcgagcacccatgcccattttgaacacaacgcgactgctaaggacgt

SEQ ID NO: 887426 - DNA, 120 bp, Artificial Sequence
  ENSG00000272008_21 (sequence is synthesized)
ggtgtaatcatatggaccttcactcccaagagactcgatttcagagaaaatctgggagacaaatttagatccctacccgcacccacgcgatcaataaagctggggagacctttgggggag

SEQ ID NO: 887427 - DNA, 120 bp, Artificial Sequence
  ENSG00000272008_22 (sequence is synthesized)
gggacagatgtgcttgcatccgggccgtgcgtgcctgcttcacgggttttccgggcagcaccggcccgcacacgccggtgcactctttttctggaattcttgaaatagccgggcctgagg

SEQ ID NO: 887428 - DNA, 120 bp, Artificial Sequence
  ENSG00000272008_23 (sequence is synthesized)
acagtaagggagctgagttgtgtctgctacagacaagcggcgcagagcctgggggccaagccagggatgcagggagcgcggcgttagcggatgacggatagctcagggctaaggcctggc

SEQ ID NO: 887429 - DNA, 120 bp, Artificial Sequence
  ENSG00000272008_24 (sequence is synthesized)
aggtccttcctacccccgacccagtacaccccgcagccccgccctcgccccagcacgcgaggtgaaagcgcgaggcccggggatggcggagagcgtgcgccactatcggggcgctgtctc

SEQ ID NO: 887430 - DNA, 120 bp, Artificial Sequence
  ENSG00000272008_25 (sequence is synthesized)
ttgccccgctctcgccctgggccggagaacggagaaggtccgcaggcctcgggccacggagggcaccagatcggtccgctctgctccgctaacccagcctgcgcccctccaccccgccaa

SEQ ID NO: 887431 - DNA, 120 bp, Artificial Sequence
  ENSG00000272008_26 (sequence is synthesized)
ggccctgctgggcgctgcgccggttgctcgcgtcctctgttgtcgcggagccgccgccgccgccgcccgcgaaccagcaacgccgacacccagcagttgcaggcccggcgtttgccgccg

SEQ ID NO: 887432 - DNA, 120 bp, Artificial Sequence
  ENSG00000272008_27 (sequence is synthesized)
cggtttttccacccagcactgaggatcaagcccgctgtagcctggctgcgactccccgcttgggagcagaggccgccaggggcctccaggccgagagattctggagcctttccagggcgc

SEQ ID NO: 887433 - DNA, 120 bp, Artificial Sequence
  ENSG00000272008_28 (sequence is synthesized)
ggcggggagcggggcctccggaaacccaccccggggatgctggagtctgtcctgcagaggccgtggcgcgggcactgctgcctgatttcgaagaggctccatcaacctactctcttccaa

SEQ ID NO: 887434 - DNA, 120 bp, Artificial Sequence
  ENSG00000272008_29 (sequence is synthesized)
agggctgggcagcccagccacagacaggcagcctctggatctcagaagtgagggacggagtctatcctgggtttggtccagtagaaaccccccacccccacccccagagtctgggaacca

SEQ ID NO: 887435 - DNA, 120 bp, Artificial Sequence
  ENSG00000272008_30 (sequence is synthesized)
gtgctgtgcccacagatgcaaagagaaagagcatgggttaaagcgctattgggatcggttagacaccacacttttccaaggaagacattttcttcgagaggaacagcaaaaggagtcaat

SEQ ID NO: 887436 - DNA, 120 bp, Artificial Sequence
  ENSG00000272008_31 (sequence is synthesized)
ataatgttaaaaatattaaggcaggtgctgtgccacatgttgaagtgattccaaaagcagagaaaacatgggactcacatttaagaggattaattgtagcctttgagtttttcccagaaa

SEQ ID NO: 887437 - DNA, 120 bp, Artificial Sequence
  ENSG00000272008_32 (sequence is synthesized)
aaaaaaaaaggctagcatatatattttcatatatttatatgaacaggtaattaaataaggagggattttaaaaaattgtctatttggatatcgttttcctttccatttgaggaaaagcca

SEQ ID NO: 887438 - DNA, 120 bp, Artificial Sequence
  ENSG00000272008_33 (sequence is synthesized)
aatgcaaataaggagaataatatttaaagaacatgcttttaatagagcctcaattatccttctaatttaaccaagatgaaaataattgtgaaataaagcaaaataaaatcttggaagcat

SEQ ID NO: 887439 - DNA, 120 bp, Artificial Sequence
  ENSG00000272002_0 (sequence is synthesized)
tgttggcattcctgaaagagaaggagataaagtaaacaacctgaaaaaagtagttgaggcaataattcaagaaaattttcctaatcttgctagacaggtaaacatccagatataagaagt

SEQ ID NO: 887440 - DNA, 120 bp, Artificial Sequence
  ENSG00000272002_1 (sequence is synthesized)
tcagagaacatctctgagatacttatacaaaattaatatctccaaggcatatagtcaccagactgtccaaggtcaatggtaaagaaaaaatttcaaaggtagctagagaaaaaggtcaga

SEQ ID NO: 887441 - DNA, 120 bp, Artificial Sequence
  ENSG00000272002_2 (sequence is synthesized)
ggagttctcagcagagactgagactactagggcttgtatgctgccttctccaggctgtagagttagtgggaggggacagagaagggcaaggattttaaaactaactattgggtactatgc

SEQ ID NO: 887442 - DNA, 120 bp, Artificial Sequence
  ENSG00000272002_3 (sequence is synthesized)
tcagtacctggtgatgggatcactgataccccaaacctcagcatcatgccatatacctaggtaacaaacctgtatatgtaccctctgaatctaaaagttaaaaagcgaacaaacaaacaa

SEQ ID NO: 887443 - DNA, 120 bp, Artificial Sequence
  ENSG00000272002_4 (sequence is synthesized)
aatataacctgataaatggttttctaaagtttcctccagagaggaaacttgcaccagagctctgttatctattctgttattcattattttaaaataaaagccactttcttttagtatcaa

SEQ ID NO: 887444 - DNA, 120 bp, Artificial Sequence
  ENSG00000272004_0 (sequence is synthesized)
aaggcttgcgagcagaatgccttcgcgatggacgcccgcattccacccccttgaccgctgggacccctagtggcgggtgggtggagcgcgctccatttacctgctggttacctcgtgagg

SEQ ID NO: 887445 - DNA, 120 bp, Artificial Sequence
  ENSG00000272004_1 (sequence is synthesized)
tttggacacatgtaaaaagctgtcttgttggcctgttattcccactgacccgtctgagtgatcacccaggagcgcggcggcagcaagcagagctcaccggatttgggacaaggattttaa

SEQ ID NO: 887446 - DNA, 120 bp, Artificial Sequence
  ENSG00000272004_2 (sequence is synthesized)
aggcagctacaaagctgagctctatttgctgatgatagtctctgttcagctgtttaaaatgactgtctgactcaccatggtaatttttcacaaattaaagacacattttgggttgtgcaa

SEQ ID NO: 887447 - DNA, 120 bp, Artificial Sequence
  ENSG00000260057_0 (sequence is synthesized)
agattggtgaggaagacctgctcctgaggcaactggcctgcctcccggcttctttctccaaggtaatgaaaaagccaagctgggaaggcaggctggtgacaagtatggtccctgcgcatt

SEQ ID NO: 887448 - DNA, 120 bp, Artificial Sequence
  ENSG00000260057_1 (sequence is synthesized)
cctcgggctgacggccatttcaatttaagaaaacaaaagatgatcctgtgaacactgtatcaggcatcattactggactgaaaaaaggatcacttgatggacatgcctggcgttttgttt

SEQ ID NO: 887449 - DNA, 120 bp, Artificial Sequence
  ENSG00000260057_2 (sequence is synthesized)
agaagtatttcttctctggccttagaagattagttttcaaagcgatggtaaaatcattgatgtatgtcttttcaagaaaaagaaaaaaaaaagactcctaaatgccaaacatttgctctt

SEQ ID NO: 887450 - DNA, 120 bp, Artificial Sequence
  ENSG00000260057_3 (sequence is synthesized)
tggagcatagcaagaagaaagggagaggaccagacggccacatcctaagaacagagtattgtccaggtgaaatggagggtctggtctgtttatgcctacttacacctgacaacatgatta

SEQ ID NO: 887451 - DNA, 120 bp, Artificial Sequence
  ENSG00000260057_4 (sequence is synthesized)
tcctctccaaccatcctcttggctgttgaaagtcagctgttatcaggattcatatgtgatttctcttctttgcaacaatcacttgaagctggtcctgaaataattgccaataataaatgt

SEQ ID NO: 887452 - DNA, 120 bp, Artificial Sequence
  ENSG00000260057_5 (sequence is synthesized)
gaaataagccccagagagttctatgttatgattgtcaggacgcggattattgagaaaggaattagaatcaactctggcagaggaaatttgagaggctgaggggattcttgggcaatgagg

SEQ ID NO: 887453 - DNA, 120 bp, Artificial Sequence
  ENSG00000260057_6 (sequence is synthesized)
acttttatggtgaatggtttgggttgcagctttagctcttttgctctgcttcactgttggagttatggactttagatttttatcaagagtaattcatgcactactaaaaaactgcacagc

SEQ ID NO: 887454 - DNA, 120 bp, Artificial Sequence
  ENSG00000260057_7 (sequence is synthesized)
tgagttcttcatctatgagaaaacattggcaattaaaaaatttgaagcacctagattcagtttatcttgagcaatctaggaatacccccaaagcactgaatttgaagtcaacagaccttg

SEQ ID NO: 887455 - DNA, 120 bp, Artificial Sequence
  ENSG00000260057_8 (sequence is synthesized)
gttcaaatccatcactgttgccttgtacatattgaccagtgctgtccaatatggcagtcactagtcacagggtccttttaaaatttaaatttaagttagttataattaaatacaattaca

SEQ ID NO: 887456 - DNA, 120 bp, Artificial Sequence
  ENSG00000260057_9 (sequence is synthesized)
aattcaattttgaggtacaccacccatatttcaagtgctcagtggcccccgtgtcttggtgctaccatgtggacacccaagctctaaactgaagacaaataagttttccaagccccagtt

SEQ ID NO: 887457 - DNA, 120 bp, Artificial Sequence
  ENSG00000260057_10 (sequence is synthesized)
tcctcttctgttaaacaaagaaagaaaatgaaaactgtcctatttactaagtgctgtataagataatgaataccaaagcacctaaaaattattaaatattttataaaagatgaactgtaa

SEQ ID NO: 887458 - DNA, 120 bp, Artificial Sequence
  ENSG00000260057_11 (sequence is synthesized)
gcggatggctctgaaatccacacggcttggtgcctccaccttcgtcccccggggcttctcgctgctggggagtcctgactgtactaaaaaaagaaagagagaaggagattgtgccggaga

SEQ ID NO: 887459 - DNA, 120 bp, Artificial Sequence
  ENSG00000260057_12 (sequence is synthesized)
gaaaaaacagtgctggagaaaccgtttccaaagatctatttaacatgtaaacggaggaagattaatatctctggaacagtccccaaacgtcttgccaagggcacaggttttcagctttaa

SEQ ID NO: 887460 - DNA, 120 bp, Artificial Sequence
  ENSG00000260057_13 (sequence is synthesized)
acggccacatcctaagaacagagtattgtccaggtagctgtcgccccaaatgggatctctttccaggtctttttgttaaagcttttctttcctaaataaaacttaattttctctcgctaa

SEQ ID NO: 887461 - DNA, 120 bp, Artificial Sequence
  ENSG00000260057_14 (sequence is synthesized)
gaagaaagggagaggaccagacggccacatcctaagaacagagtattgtccagtgggtgtctgccgcttcctcatgccttgctataagaaagctcgtaaaaaggaagaaatctaaaacta

SEQ ID NO: 887462 - DNA, 120 bp, Artificial Sequence
  ENSG00000260057_15 (sequence is synthesized)
gatgattttgaagaagagcactcccctttgtccagagccatagaaagataatttaattacacttatcattacaccctccccaaattagactacaaatggatcttgatttctcatgatttt

SEQ ID NO: 887463 - DNA, 120 bp, Artificial Sequence
  ENSG00000260057_16 (sequence is synthesized)
ttcactttacaaaataatcttaaagtttaggaggaagaaaagatgcttaagaataatcaagaatgcttggaaaagaggaagaaaaagggaaatttctcctactgaaccggtagtgctggg

SEQ ID NO: 887464 - DNA, 120 bp, Artificial Sequence
  ENSG00000260057_17 (sequence is synthesized)
aagggaagagcgtggtccctttaaatgacagggaagtggggcagggaagtgctgggtagagaaaggcgaggtctctgtctagggctccacccccagggacctaggtgaggacaggcactt

SEQ ID NO: 887465 - DNA, 120 bp, Artificial Sequence
  ENSG00000260051_0 (sequence is synthesized)
tggtgggctgcaggcacaaacctggtgtcgccgtgagaggccgtgtaccctgtgcctggccagcatcaggcgcgaaaccacacgatcctgccattgggtcagggccacggtcacagaggg

SEQ ID NO: 887466 - DNA, 120 bp, Artificial Sequence
  ENSG00000260051_1 (sequence is synthesized)
caaggaggacacacaaggcccaagccatggtcacggagggaaaggaggacacacacggcctaggctctccctgttctggatgtttcatgttaatggggctacgtcgcgtgacctcacgtg

SEQ ID NO: 887467 - DNA, 120 bp, Artificial Sequence
  ENSG00000260051_2 (sequence is synthesized)
ggtccagttgtggacggaggtttgcatttctcctgggtccacatctatggtgcccccatagggcgcctgaggctcgccccgtcaggctgccattctgggaagaggactggggggagcctc

SEQ ID NO: 887468 - DNA, 120 bp, Artificial Sequence
  ENSG00000260051_3 (sequence is synthesized)
tggcccccataccaccgcccattcccctggcacctcagcagacacctggcctcctctgagatctgggtggacaggactaaccctctttgagacacgccagcccatgcgcttctggaactc

SEQ ID NO: 887469 - DNA, 120 bp, Artificial Sequence
  ENSG00000260052_0 (sequence is synthesized)
acacataacagatccagctcagactcctgtgctccttgataggcacatttcctcctggtcagcagatctttctgggaggtgcagccaggtggaccatcctcatggccggtggcatcccct

SEQ ID NO: 887470 - DNA, 120 bp, Artificial Sequence
  ENSG00000260052_1 (sequence is synthesized)
gagcctccagctgtactctaagcctgattcttccaaccatggccctcatattgaattcaccatcctctctcatcctgcatttaagccctgcaacgggctagcttgtgtcttcccaaaatc

SEQ ID NO: 887471 - DNA, 120 bp, Artificial Sequence
  ENSG00000260052_2 (sequence is synthesized)
ctttaaggaggtgatcaaggcaaatgaggtcatatgggtgagccctaatacgatatgactgctgttcccataagaagagattaggacgccgacaagcacagaggaaagaccacatgagga

SEQ ID NO: 887472 - DNA, 120 bp, Artificial Sequence
  ENSG00000260052_3 (sequence is synthesized)
cgtggggagaagacggcatctacaagccaaggagagaggcctcagaagaaactggtcctgctgattttggccttccagcccccagaactggaggaaaataaatttctgttgcttaagtca

SEQ ID NO: 887473 - DNA, 120 bp, Artificial Sequence
  ENSG00000285080_0 (sequence is synthesized)
gaaaagctgagcccaggaaccaaattacttgctttacctcattgtgtaagacaagcgtcaaaaacagcttcaacctatcttgaacaagagaacttacctccaaaggcttatcatctgtct

SEQ ID NO: 887474 - DNA, 120 bp, Artificial Sequence
  ENSG00000285080_1 (sequence is synthesized)
tgctgccatcttatccgcttctgcctgttctgagtaaatgtatacacaccctggaaaccaccattctactttctgtgtctatgaatttgactactctagctggatcccgagctttttttg

SEQ ID NO: 887475 - DNA, 120 bp, Artificial Sequence
  ENSG00000285080_2 (sequence is synthesized)
tacacatgtgcaagtgcccacggggtagaatcctaaaaatagaagatgtatgcaacagttcccagcaccaaacccagatatacaaccattcagctaccaagagctacgcctgataaatta

SEQ ID NO: 887476 - DNA, 120 bp, Artificial Sequence
  ENSG00000260059_0 (sequence is synthesized)
ggtagatggcactggggatttcagactccagaactgaaaacaagctgagcatctggtggagccatccgctgatccaaaaggctgctctctacagatgaatgggtgttaagacagctgtcc

SEQ ID NO: 887477 - DNA, 120 bp, Artificial Sequence
  ENSG00000260059_1 (sequence is synthesized)
ttcctagaccatgagcagctgctggccagggttgctgcctgccaaaagggtggagttgggagaaaccaggagtcaaccacagctaccacagtctaatgagttagtttgataccagggaca

SEQ ID NO: 887478 - DNA, 120 bp, Artificial Sequence
  ENSG00000260059_2 (sequence is synthesized)
tattaggaggacttgctgctgccacgagcttgcacatgactcttctcaactgcagaggaaaaccagtatgatgccaggctagaagcagcagcatcaccatcagcctggtcacattctact

SEQ ID NO: 887479 - DNA, 120 bp, Artificial Sequence
  ENSG00000260059_3 (sequence is synthesized)
tatagcccactccatctgacagcataaagctagacctgccctgggctgctggtagcataaagccagacctgccctgggctgccaaaaaagtcttcctgaaagccatgaatgacatgcaaa

SEQ ID NO: 887480 - DNA, 120 bp, Artificial Sequence
  ENSG00000260059_4 (sequence is synthesized)
ggagaaatatgaaacatctaagtgaatatagaggagagggcatttctgatagacactcatgagtcaggcccacaggcttaaaacacagtgatacttgtactggtttcttacagctgctgt

SEQ ID NO: 887481 - DNA, 120 bp, Artificial Sequence
  ENSG00000260059_5 (sequence is synthesized)
gacttaaaacaacagacattttttctctcatgattctggaggctgaaagtctgaaatcaatgtgttttcagggccatgctctctctgaagtctgtaaggaagaatcctccttttcctctt

SEQ ID NO: 887482 - DNA, 120 bp, Artificial Sequence
  ENSG00000260059_6 (sequence is synthesized)
ccagcttttggtggtttctggcattccttggtttgtgggaacctaaattcagtctctgcctccatcttcattcacatggcctcttccctgggtctctgtgtgtttctcacagtcttctta

SEQ ID NO: 887483 - DNA, 120 bp, Artificial Sequence
  ENSG00000260059_7 (sequence is synthesized)
tgatgtcaccaattattggattttggacccaccccactctagtatgacctcatcttaacttgattagatctgcaaagtccgtatctccaaataagatcacatttactggcacagggagtt

SEQ ID NO: 887484 - DNA, 120 bp, Artificial Sequence
  ENSG00000260059_8 (sequence is synthesized)
agaattttaacatatctttttagggaacacaattcacaccacaacactggcacatgaagagggaataggaagtgtctggatgaatgtgggggagagggtattttcctcctctatagtcac

SEQ ID NO: 887485 - DNA, 120 bp, Artificial Sequence
  ENSG00000260059_9 (sequence is synthesized)
ttagacagaaagaatgtcatgaatcaagcccaagggcttgaaatgctccagtgcttctgtagaaaaccagcaatgcctcactcctcactccagcaggatgctttactttccctgtggtaa

SEQ ID NO: 887486 - DNA, 120 bp, Artificial Sequence
  ENSG00000260059_10 (sequence is synthesized)
gaccagcaacacttatgattatttgctccttgtatgggtagaagggtcacctgtgtaagtataacacatcagcccacccctaaaattttcagggctccggataagaacataaatggagac

SEQ ID NO: 887487 - DNA, 120 bp, Artificial Sequence
  ENSG00000260059_11 (sequence is synthesized)
gaagcatatgtccaattatttcaaagttatatttcatgctacaaattgttaagccaaatatgttctgttctcctattttgacaaatacaccttcattactacaaaatttttataggtatt

SEQ ID NO: 887488 - DNA, 120 bp, Artificial Sequence
  ENSG00000260059_12 (sequence is synthesized)
agaaagctgtggtttttatttaactgaaagttggcaaaatatcagatggtctgtctgggtattctgttgaaaggctgatgatgttaggatgagtaataaagacatacaaaattcataaat

SEQ ID NO: 887489 - DNA, 120 bp, Artificial Sequence
  ENSG00000260059_13 (sequence is synthesized)
aaattcataaattattatatatttatttcacagaatttactgtctttcctttatttcagaaaatgtactaattatgttgttgttgctgggggcgatggctcacgcctgtaatcccaggac

SEQ ID NO: 887490 - DNA, 69 bp, Artificial Sequence
  ENSG00000260059_14 (sequence is synthesized)
tcaggattatttgcacatattatttgtttctccttagagtcatttttgtttccaacttcaaattttctt

SEQ ID NO: 887491 - DNA, 120 bp, Artificial Sequence
  ENSG00000260059_15 (sequence is synthesized)
ctccttagagtcatttttgtttccaacttcaaattttcttatattttattgatatgtcatttttattgggtaactcacatgtagtttctattacttataaaaatacatttcataattaaa

SEQ ID NO: 887492 - DNA, 120 bp, Artificial Sequence
  ENSG00000260059_16 (sequence is synthesized)
atactatgatatgttatatacatataatatgtgtgtgtgttaaatcttttaaaagtaaaagaagactagatttgtttagggttttgtaaactttttctagcattattaatagcacccatc

SEQ ID NO: 887493 - DNA, 120 bp, Artificial Sequence
  ENSG00000260059_17 (sequence is synthesized)
catttataccaaataactgtgcacaaattatactaattataaaatttattctaattataaattactttgattttctgtgatgactacaattttctttttgagcatcttttgcttaactct

SEQ ID NO: 887494 - DNA, 120 bp, Artificial Sequence
  ENSG00000260059_18 (sequence is synthesized)
cttggtgcaacttgtatttctttatgtgtccaagagatgctgtaaggtttaatcaaaacatttcatattttaaaagaaccagaaaatattacatataatctatgtactattcccaataat

SEQ ID NO: 887495 - DNA, 120 bp, Artificial Sequence
  ENSG00000260059_19 (sequence is synthesized)
gtcatggataagggcacagtaaaggccatgcctcctagtaataagcacaaaggaattacacaaaagagtgccaagtacaaagatagatttggagcaaactcttggcttgtgcaccttttc

SEQ ID NO: 887496 - DNA, 120 bp, Artificial Sequence
  ENSG00000260059_20 (sequence is synthesized)
ctttatcagccatgttagcaccattttcggaggcttgtcattgattaacttttattttgaaagagagatctgttaaagaatacaaaattatagccagataggaaaaataagttctagtgt

SEQ ID NO: 887497 - DNA, 120 bp, Artificial Sequence
  ENSG00000260059_21 (sequence is synthesized)
tctatagtactgtaggatgattatagctaaaaatttatagtttcaaatagctagaaggaaaacatcgaacattcccaacataaagaaatgataaatgattgagatgatgaatatgctaat

SEQ ID NO: 887498 - DNA, 120 bp, Artificial Sequence
  ENSG00000260059_22 (sequence is synthesized)
taattaccctgttctgatcactctgcattacatgtattgaaacatcactacataccccaggaatatgtacaattattatttgtccattaaaaacataaaacatttaaaaagcaaagaaaa

SEQ ID NO: 887499 - DNA, 120 bp, Artificial Sequence
  ENSG00000260058_0 (sequence is synthesized)
tctaacctgagaacctattaccaccacccagtgtcctcagaagtcatgatagtcaccatgatgcagctagagttataaggaccagagtttgactcccagcctttgaaaacgatgttcctt

SEQ ID NO: 887500 - DNA, 120 bp, Artificial Sequence
  ENSG00000260058_1 (sequence is synthesized)
gggggtaggagcatgctctcacccttgtcttctatctctctcatcctttaagactcagttcagaacttgactcttcaggcggaggcttctctgagtcctgaagctggctgcctcactcac

SEQ ID NO: 887501 - DNA, 120 bp, Artificial Sequence
  ENSG00000260058_2 (sequence is synthesized)
gctttctctgcaacgggtgcctccacaattgtgatagagaatgacatgccccagcataatgcctcaacccaagtgtcaacctacccttgacagagaagagaaccccaaatgaatctccca

SEQ ID NO: 887502 - DNA, 120 bp, Artificial Sequence
  ENSG00000260058_3 (sequence is synthesized)
agcaacacaagctgacccaacacagcaaagcgagtcacctttgaagagaaagaatgacgcttattttctcctccaaagacctacttggaaagtagacgtggtttactgcaaatctctccc

SEQ ID NO: 887503 - DNA, 120 bp, Artificial Sequence
  ENSG00000234902_0 (sequence is synthesized)
actcctctccattggatctctagcacctagaatagagctgggtacacatgatgaggtgcttaatacgtatttgtcaaattgaatgtcaagttttaggagtttaaagagtgttttcaaatg

SEQ ID NO: 887504 - DNA, 120 bp, Artificial Sequence
  ENSG00000234902_1 (sequence is synthesized)
gggagaagccgagacacaaatagtctcaggaatgagatgaaattatttaaccaattggagatgaaattcgaaatggaaactatgacatgactcaacatcctcaagccctgaagtaataat

SEQ ID NO: 887505 - DNA, 120 bp, Artificial Sequence
  ENSG00000234902_2 (sequence is synthesized)
tagcacataaagttggtctgttatggactttgtgttgtgctccctgcaaaattggatacagagagaagacagctgtctgcaaaccagaaagagagtcctcactgcacttcatatctgcca

SEQ ID NO: 887506 - DNA, 120 bp, Artificial Sequence
  ENSG00000234902_3 (sequence is synthesized)
tgaggttaaaattcctatgcgaatctgactgacccagcttgggcttcattccaacctcttggctagataagagtgtggaaccttaactgatggtccctttgactgcccgccacaagggaa

SEQ ID NO: 887507 - DNA, 120 bp, Artificial Sequence
  ENSG00000234902_4 (sequence is synthesized)
gatccaaagtgtggcagagagtgaccaggtcccagacaggcaaaatcagcagatgtccattcgcaagccaaaagagctccagaaaatgttctctttgaatagaaaccatgtttgctatac

SEQ ID NO: 887508 - DNA, 120 bp, Artificial Sequence
  ENSG00000234902_5 (sequence is synthesized)
tcatcctggaaagtggccatcctgctggtccttagagcaggctgtgcctgggagccatctttgaatatcctctgagctcagagggagagacatacctctagtgaggatcctggaaacctc

SEQ ID NO: 887509 - DNA, 120 bp, Artificial Sequence
  ENSG00000234902_6 (sequence is synthesized)
atgaggaccctcaacagccctgtgcagaggactatgtggcatgaaagataccttctgccaacaaccagccccaacttgccaagcatgtgaacaagctaaactgaaagcagatcttcagcc

SEQ ID NO: 887510 - DNA, 120 bp, Artificial Sequence
  ENSG00000234902_7 (sequence is synthesized)
ccaatcaagccttcagatgacagtaacctcagccaatatactgactataacctcataaaagaccctgaaccagaaccctctaagccactctcaaactctaccccacataaactgtgaaat

SEQ ID NO: 887511 - DNA, 120 bp, Artificial Sequence
  ENSG00000234900_0 (sequence is synthesized)
aagcagacctcaggcggtaatgctgactggcccgaagctcacctcctgctgtgttgcccggttcctaacaggccatggacctgcaccagtctgtggcccgaaggctggggacccctgatt

SEQ ID NO: 887512 - DNA, 120 bp, Artificial Sequence
  ENSG00000234900_1 (sequence is synthesized)
cctacacgaagaaacctcaaacccaggattcaagccaaaaacaatgattctcaagttcctatgaaatcctggatggatgttgaactgggcaacgtactagctgactcccgtggcagatgc

SEQ ID NO: 887513 - DNA, 120 bp, Artificial Sequence
  ENSG00000234900_2 (sequence is synthesized)
gagcctcaacaaagctccagggctggcacttcaagggagcggaggtgtgtgtttgagtctgagtcacatgcagtaggccatctgctcttatcaacaggatgagaatctttgccaagaaga

SEQ ID NO: 887514 - DNA, 120 bp, Artificial Sequence
  ENSG00000234900_3 (sequence is synthesized)
tagctaccaacatagctgtgccacctgattccatggattggcatctccatcacctaatgaagcagagataacacggaggacctcagtcaatactatctacaaacctcagttgatatcatt

SEQ ID NO: 887515 - DNA, 120 bp, Artificial Sequence
  ENSG00000234900_4 (sequence is synthesized)
tgcaaacctccctgattcagtattaacattcacaatatttaattaggcaccattgaatttcatttaccaaatgtcaagcagatgacaaaattctcccaatttgataaaatttgataaatt

SEQ ID NO: 887516 - DNA, 120 bp, Artificial Sequence
  ENSG00000234900_5 (sequence is synthesized)
ttaatgttgacattaagtcacttttattttagaaaacagcaagacatcttagattttgaaaacggaaaagtcaatatcaccaaagtctgtttgttggtataagataaaaaattgagttaa

SEQ ID NO: 887517 - DNA, 120 bp, Artificial Sequence
  ENSG00000236212_0 (sequence is synthesized)
cttctggggttctttggctgagactgggccagtgagcagctgagactggagatgggtgagagctggaacatctgctgcttcttttggaaagggcaggcttcagaaaaggaagtcagagat

SEQ ID NO: 887518 - DNA, 120 bp, Artificial Sequence
  ENSG00000236212_1 (sequence is synthesized)
acgaagaatgagagggatttgatgcacagtcactagcttgaagattggaggggccatatggcaggtctgcaggtgtcctccaggagttgaaagtatcctcttactgacagtggcatggaa

SEQ ID NO: 887519 - DNA, 120 bp, Artificial Sequence
  ENSG00000236212_2 (sequence is synthesized)
actgaattttgtcaacaacaagaatgggtttataagcagatttttacccaacctccccgccaagacaagaactaagctcagatgacaacttgatttcaacctatgaaaccccaagcagaa

SEQ ID NO: 887520 - DNA, 120 bp, Artificial Sequence
  ENSG00000236212_3 (sequence is synthesized)
aactcagccacactgtgtcattctgacctagaggactaagaacaagttcaccattcaattgaagtaatttgttacatggcaagagcagaccaacatgaataccatctatgtgctgatgac

SEQ ID NO: 887521 - DNA, 120 bp, Artificial Sequence
  ENSG00000236212_4 (sequence is synthesized)
agaactgcctgcagttcctcccagcagccaccttcttccttctgccaatgcgactcttctccttctggggttctttggctgagactgggccagtgagcagctgagactggagatgggtga

SEQ ID NO: 887522 - DNA, 120 bp, Artificial Sequence
  ENSG00000236212_5 (sequence is synthesized)
gagctggaacatctgctgcttcttttggaaaggggtaaagaaaaggtttatatgctgccaaagcaccactgtctactaagtttttgaggaaaccatattgctagagaaactgcaagcctg

SEQ ID NO: 887523 - DNA, 120 bp, Artificial Sequence
  ENSG00000236212_6 (sequence is synthesized)
agcagcctccaattgttgaagacttacatccatcttggacctccaaacattcataagcaggaagcaggcctcaaaaactatggcccccaaatgagggcttgttccccaacccccacttta

SEQ ID NO: 887524 - DNA, 120 bp, Artificial Sequence
  ENSG00000236212_7 (sequence is synthesized)
gacatggagaagaagaataatggacaaggaggctcctcccagaaggatccaaggacccctgaggttggtggacaatggacttccagcacagattggaatcagaacacaatcaaggacact

SEQ ID NO: 887525 - DNA, 120 bp, Artificial Sequence
  ENSG00000236212_8 (sequence is synthesized)
gtctctccaatagaaactcttcctatgtctgcccagagtaattccttaactgtgatggacaaagagctgtggcatcattgctttccattttttgaatgaaagttatggtgcagtaatcct

SEQ ID NO: 887526 - DNA, 120 bp, Artificial Sequence
  ENSG00000236212_9 (sequence is synthesized)
ttccctgctccagcaggtgagggggtggcagagaggggccaataatttgtcattttgttcctagattgccagaccaagaggagctatgtcttggtctgcaaaaaagaaccagacattgcc

SEQ ID NO: 887527 - DNA, 120 bp, Artificial Sequence
  ENSG00000236212_10 (sequence is synthesized)
ttctctgttgtgtcccttggagagggagtgaagacttcttatgcagtgcctctcaacatattctaaccttcctgcctgctaggcttgccatgtgttgtgttccagacagtaaaatttaag

SEQ ID NO: 887528 - DNA, 120 bp, Artificial Sequence
  ENSG00000236212_11 (sequence is synthesized)
cagaagttctgactttcttactgctgggctaaggtagttacgtactagtgtactagtgtgtctccccacaatgaacctcccaccttcttcccacaaagcccaagggataaaattcagggc

SEQ ID NO: 887529 - DNA, 120 bp, Artificial Sequence
  ENSG00000236212_12 (sequence is synthesized)
aaattagaatccaaaagaaggagccacaaagtggaagaaacctggatgcctgagtcactatgtggggaaaacaccaactaaaaagctttatgtgatccacatttgatatgagtgagaaat

SEQ ID NO: 887530 - DNA, 120 bp, Artificial Sequence
  ENSG00000236212_13 (sequence is synthesized)
aaatttttgattgttttaggccattgatattttgagattgcaacaacagctagtataagttagcccaatgctttaggaaaacgtctatttgtttatctaatctatgaagatcactgactc

SEQ ID NO: 887531 - DNA, 120 bp, Artificial Sequence
  ENSG00000236212_14 (sequence is synthesized)
attactctgttttgttttcttaatgaacacaatataccatgtgggtaagagataaggggaaggggtggaggggggatttggagccagaagacaagaagttctctctttgcctattcatgc

SEQ ID NO: 887532 - DNA, 120 bp, Artificial Sequence
  ENSG00000236212_15 (sequence is synthesized)
gtatttagtaaattaacatttccatgctgggtcatgattattttccctgaccctgcccagaagaaagcaatctccaactgtatactcactggcattttgctttcagggataccgttttgt

SEQ ID NO: 887533 - DNA, 120 bp, Artificial Sequence
  ENSG00000236212_16 (sequence is synthesized)
aattgggctcggttcagtcctcatggtctgaagagaaaatgatataccatgctttaataagagatgttctgtctttagtgcaagacccagcccactgtttgtaataaactctgaagtctg

SEQ ID NO: 887534 - DNA, 120 bp, Artificial Sequence
  ENSG00000236213_0 (sequence is synthesized)
acatccttggtgggacggagcaggaaggctggagatttcatcaagctactcacagcagcatgccatttaaaattcatgaattatttatttctggaattttccgtttaatatttttggacc

SEQ ID NO: 887535 - DNA, 120 bp, Artificial Sequence
  ENSG00000236213_1 (sequence is synthesized)
acaattgacctcagattttactttctactcttgtcagtcatatctgcaaggctgacagttaccaggggctgtggccaggcatgagggagaatgtgtcattgctggctgcgttggtcatag

SEQ ID NO: 887536 - DNA, 120 bp, Artificial Sequence
  ENSG00000236213_2 (sequence is synthesized)
caacgtgtctgcctcagaacagatccagcatggatgagcaaacagaaaaatgtgtaagaaggcttgtgactgaaacagaccaaggcagacacttgaagaagcatctttcttgtgatctcc

SEQ ID NO: 887537 - DNA, 120 bp, Artificial Sequence
  ENSG00000236213_3 (sequence is synthesized)
tggctggtaccctgaagtcctgttatgccaatggaccagcaaccctcgcaggtaggaattactgctagaaagactatcctctctgcaggcaaatttctggaaggatactattttatgggg

SEQ ID NO: 887538 - DNA, 120 bp, Artificial Sequence
  ENSG00000236213_4 (sequence is synthesized)
aaaaatgtgaacaactgtaggtaatttcacagtctgtagggcttgtctcctatttgtaatttcttacatgtttactcgtggtggaaatgtggaggtggctaaggaacaagcaggcccgct

SEQ ID NO: 887539 - DNA, 120 bp, Artificial Sequence
  ENSG00000236213_5 (sequence is synthesized)
ccttgtttcttgaaagtacattcccagggattcccttgaagaatgtgagagatcagctggaatgaaactggatgttttagggtcctgagggaaatgtaaatccagcagcttattctcaag

SEQ ID NO: 887540 - DNA, 120 bp, Artificial Sequence
  ENSG00000236213_6 (sequence is synthesized)
atgtggctccagaaccagcagcactgattcttctaaagagttgagagtgcattttagctgtgatatctttgtactcttaagaaatcctcctcaacaagacaaaacttgaccaagagcatt

SEQ ID NO: 887541 - DNA, 120 bp, Artificial Sequence
  ENSG00000236213_7 (sequence is synthesized)
cagttgtcttccagaaggctcccttgaggactgggactcttcctggatgcacccaattaatctattgaaacaaggactcgtgatggcagcccctcacctgacaaactggattttccccag

SEQ ID NO: 887542 - DNA, 120 bp, Artificial Sequence
  ENSG00000236213_8 (sequence is synthesized)
agatcatttgtaatgtttttcctgaatcttatttgtgtttccctattagcaatgttatgtatttctatatcgcaaatcctaagtgccgcctgtagaacctaacctccatttatagcatgg

SEQ ID NO: 887543 - DNA, 120 bp, Artificial Sequence
  ENSG00000236213_9 (sequence is synthesized)
aacacacagcccatcacgtatccttgccctggccttcagcctctgaatattttaataaaaatcactctttcctccttaaggaccatgttctttaaaagcttaacacatagttcttaataa

SEQ ID NO: 887544 - DNA, 69 bp, Artificial Sequence
  ENSG00000236213_10 (sequence is synthesized)
ccttacactttccgggtgaggcaacgccccactctgcttcagctcaccctccatgggctgcactcacct

SEQ ID NO: 887545 - DNA, 87 bp, Artificial Sequence
  ENSG00000236213_11 (sequence is synthesized)
ggtctgagtctgttttagccagatcaagtacttgcagacacttgaagaagcatctttcttgtgatctcctggctggtaccctgaagt

SEQ ID NO: 887546 - DNA, 120 bp, Artificial Sequence
  ENSG00000236213_12 (sequence is synthesized)
cgcaggacttcatttgcggggagccttcagaaaaaacaggtcacttgcagtaatatagaaggactaaactgtgattctggagacccgggtttctctttgctgttcaaccagtgtagtctt

SEQ ID NO: 887547 - DNA, 120 bp, Artificial Sequence
  ENSG00000236213_13 (sequence is synthesized)
ttgtgtgtgctgttaacagtgatttctggctcagtgaaatgtgataatgacttcatatttgtgaagagctaaggcatctctggcaccttggggtcgggaactgtcacatcatttttctca

SEQ ID NO: 887548 - DNA, 120 bp, Artificial Sequence
  ENSG00000228625_0 (sequence is synthesized)
ctgccatccatgtaagatgggacttgctactcctagacttccaccatgattgtgaggcttctccagccacgtggaactaccaatacgccaaccagcaatgacccttctcaatcaaaatgg

SEQ ID NO: 887549 - DNA, 120 bp, Artificial Sequence
  ENSG00000228625_1 (sequence is synthesized)
aatgacccttctcaatcaaaatggcttctaatagggtccttccagtttgaaggcaaagtgtgcaacattgtttaaatggtgatattgtaggaaactataccacaaacagaatcaagtgca

SEQ ID NO: 887550 - DNA, 120 bp, Artificial Sequence
  ENSG00000228625_2 (sequence is synthesized)
tgaagcctgcttccgctttccctgccctgggacatcagactccaggttcaccagcctttggacttgcaccagcagcttcccggggaatctcaggacttcagccacagactgaaggctgcc

SEQ ID NO: 887551 - DNA, 120 bp, Artificial Sequence
  ENSG00000228625_3 (sequence is synthesized)
ttcaccttgtaatcgtgtcagttaattctccctaactgactcccttttatatatacatatatcctactggttctgtctctctggagaagcctagtacatgccattttaaaaatgtacatg

SEQ ID NO: 887552 - DNA, 120 bp, Artificial Sequence
  ENSG00000228625_4 (sequence is synthesized)
tgtgtacatgtatagttctgtgcaattttatcttgtgtatagattcatgtaactaccaccacaatcacaatatataactgttccattatcacaaaagaactccctcacactgactgcctc

SEQ ID NO: 887553 - DNA, 120 bp, Artificial Sequence
  ENSG00000228625_5 (sequence is synthesized)
tttgtatttctacttactcccccattcattttccccaggccctgtcccctggaaattattcatctgttctctatctctgtaattttgtcattcaagtatgttatataaatggaaacatac

SEQ ID NO: 887554 - DNA, 120 bp, Artificial Sequence
  ENSG00000234300_0 (sequence is synthesized)
gaccacctagaactgcctccttccaagcgacactggggctggctccccatctgagccgtctggagaccctgtggctggcaggcgacgccgtccccccgcccagggccaagggggagcagg

SEQ ID NO: 887555 - DNA, 120 bp, Artificial Sequence
  ENSG00000234300_1 (sequence is synthesized)
gctgtggagagcatgacccccttgttaaaccacgtctgcctttatgcctcgatacaccacacagagagatgacgggagataccaccaagatgagatgccaacccgggagaggctctgcag

SEQ ID NO: 887556 - DNA, 120 bp, Artificial Sequence
  ENSG00000234300_2 (sequence is synthesized)
acctggcttgtccccacaggtgggttttctgagacaagggggcttttggacacaggtctgtccccagagccagccagcagctccagagaagagacagcaggtgcccaggacgatgcggct

SEQ ID NO: 887557 - DNA, 120 bp, Artificial Sequence
  ENSG00000234300_3 (sequence is synthesized)
tagttgccaggttgccacgaaacatccaatatttgaaagtgttctatggacctcaaagggcaagagacaccttaaaatgtttgctggatggctgtaggagggtagagccctggtgggcac

SEQ ID NO: 887558 - DNA, 120 bp, Artificial Sequence
  ENSG00000287691_0 (sequence is synthesized)
gggagggggtcccgtgatgggatcagtcagatgcccgcctggctgctccccctgaggggacttaggctcctcttcgcattggcagaccggtataaacccccggctcagatggagctatgc

SEQ ID NO: 887559 - DNA, 120 bp, Artificial Sequence
  ENSG00000287691_1 (sequence is synthesized)
cagatgctgccttaagccgtatgaggtcgccacggaacagtaggtgcagggaaatgtgtgaagtctggctgcagtgcccaagagataagaatcttctaagctggctgttgtccagacttg

SEQ ID NO: 887560 - DNA, 120 bp, Artificial Sequence
  ENSG00000287691_2 (sequence is synthesized)
caatttttcctctgggcccaggactaaggagccggcgcacatgcaggagccaccagtggcacaggagcagttggggtccatttcgagcaaaggagatgctggagctcccaccggtgaggc

SEQ ID NO: 887561 - DNA, 120 bp, Artificial Sequence
  ENSG00000287691_3 (sequence is synthesized)
caacaagcagtcaggcagttggaaagcatgctgcctttttcattcttaagttccagttccacagtgaagctggtctgaccatagtcacagagacaataaaccctaaagacttatgatcag

SEQ ID NO: 887562 - DNA, 120 bp, Artificial Sequence
  ENSG00000224995_0 (sequence is synthesized)
caccaatttctgtgttgtagttggtttttgagtctccagcttcacctctcaactcctgccactttatggaacaccctcagtgcccaggggtctcttgtccttggtcctggttctccctgg

SEQ ID NO: 887563 - DNA, 120 bp, Artificial Sequence
  ENSG00000224995_1 (sequence is synthesized)
gctgccttgagactttgcagtgtgccaataagaggatgtatatgagacccttactcatgtatttttctcttgtgaagctgatcacactggacttttaagtcctttcttcctgacattcag

SEQ ID NO: 887564 - DNA, 120 bp, Artificial Sequence
  ENSG00000224995_2 (sequence is synthesized)
caggaaggtcctgccctttgtttgctcctaaaggttcctttaaagttcaacttgaccaacacaccattgcaagcactccagaggagaagacagccttgctgtgtcaaatccactttagtt

SEQ ID NO: 887565 - DNA, 120 bp, Artificial Sequence
  ENSG00000224995_3 (sequence is synthesized)
tgtaaatttcttgtcagtcacttttatgcccccactgaataggacagtgtgaagcatggattaagtatgcaataaatggttgttgaataaatcagaaaattaaatgcattctgcacagaa

SEQ ID NO: 887566 - DNA, 120 bp, Artificial Sequence
  ENSG00000224992_0 (sequence is synthesized)
cccaggacccaggcaaggggcacgagtgtgacccccccaggccttcccctggttccgtttccctccctagcccggtccccacgatgggtggggacagtgggctgtgacaatggatcgcga

SEQ ID NO: 887567 - DNA, 120 bp, Artificial Sequence
  ENSG00000224992_1 (sequence is synthesized)
ctgctgtttttacctggcggacgatgcgcccgaattcgctttaaccagatgcccctcttcgcctggagccctgggagcagtccccctctccgctcaacaataattagccttcgatctgat

SEQ ID NO: 887568 - DNA, 120 bp, Artificial Sequence
  ENSG00000224992_2 (sequence is synthesized)
tacctaccaggaatggcaagtggcctcgctgaaagtctcggctctttgagaaatgagagatgggagccctcactgccgatgtttcttccacacgctttgctgggttagaggcaagctcat

SEQ ID NO: 887569 - DNA, 120 bp, Artificial Sequence
  ENSG00000224992_3 (sequence is synthesized)
gaccgccttgaaaagccattttagacaaatcttcctttgcattcttgctggagcccttctcttatgcccttccttggacatttgctctttcactccctcccccatgcactcaccccaccc

SEQ ID NO: 887570 - DNA, 120 bp, Artificial Sequence
  ENSG00000224992_4 (sequence is synthesized)
ctcccgggaaagtgttcagagagggttccattctgggagaggcccccactttccccagaggtttcagattcgagtcaaccttgctgctggcaaatgtcagcagagaatttcagagcttga

SEQ ID NO: 887571 - DNA, 120 bp, Artificial Sequence
  ENSG00000224992_5 (sequence is synthesized)
agaatccttagagagcatcagttcgagtctcttacccggaaaaaactggggggcccggagaggctaagggtctggagctcaagatgcccgccaggcagtggcagggcagggtggtgcctg

SEQ ID NO: 887572 - DNA, 120 bp, Artificial Sequence
  ENSG00000224992_6 (sequence is synthesized)
gactgtgcaggacggctctgtctcttcagcctctctgtcatccccgtcaggcccactgtatttggagatttcgacgttgccttgggaacccctgcccctccccacagtgcccgcccagcc

SEQ ID NO: 887573 - DNA, 120 bp, Artificial Sequence
  ENSG00000224992_7 (sequence is synthesized)
ccctcccatttcccctcctagcacttacttgcccctggccctcctcccagcctgtttccccccatgcgggcaggaactgtattgcactcactctaataaatagatgattggaccaattaa

SEQ ID NO: 887574 - DNA, 120 bp, Artificial Sequence
  ENSG00000260943_0 (sequence is synthesized)
attgttgttttattttgtttgctataaagattagcctcttgttcaatggaaaatatgatcaaaaacagtgttcaaaaattatttaagggccccatcactacagcaatcattagtcctact

SEQ ID NO: 887575 - DNA, 120 bp, Artificial Sequence
  ENSG00000260943_1 (sequence is synthesized)
gtgtatgaaatttctaagtatttctaaatgctcaaccctagacatgcccttcactgatatttttaatgtgctttcagtaccttggccatttaataacttatgttcttttttcaaaatctt

SEQ ID NO: 887576 - DNA, 120 bp, Artificial Sequence
  ENSG00000260943_2 (sequence is synthesized)
aggaagaaattgtgttttggaattgggccaacagtatgtgtttctccggtggataagcaaaatttcataagaacaaagatgattcaagcagatgtttatcatgaaactgccataaaaagc

SEQ ID NO: 887577 - DNA, 120 bp, Artificial Sequence
  ENSG00000260943_3 (sequence is synthesized)
acccgaagtcacaaagataaacatcaaatccagtccttggaaatttcccccaccctacctgagcatcttttgaagtagatattcaattattttgaaggatttttaaagaattttctagat

SEQ ID NO: 887578 - DNA, 120 bp, Artificial Sequence
  ENSG00000260943_4 (sequence is synthesized)
ttcatctaaaagacacttttgaaatctgcgttaaaattcatggaaatatatcctagatgaatttggaggaatgtaagcaagtaggtacaaacctttattttatccctcagtgactcactc

SEQ ID NO: 887579 - DNA, 120 bp, Artificial Sequence
  ENSG00000260943_5 (sequence is synthesized)
agttgtgaataggaagggctctctgtgatctggccacagcttatttcttgccacattcctattttcagtcctcttccaatcatgtggaacttccagcatctccttacacatgccatgtta

SEQ ID NO: 887580 - DNA, 120 bp, Artificial Sequence
  ENSG00000260943_6 (sequence is synthesized)
tttcacacttttgtgactttgctcatatttttctctctccctggaaagctccccgacaacctccactgccattacccactaggcaagtacatcctgttttcagaatcagcccaatatcat

SEQ ID NO: 887581 - DNA, 120 bp, Artificial Sequence
  ENSG00000260943_7 (sequence is synthesized)
ctttcctagggaatcttgtcagactgcccttcattaccaacagacaaaataactaccttatctttggttctgtcttcactctagacctatgtagcatgctacttataacactgcattggt

SEQ ID NO: 887582 - DNA, 120 bp, Artificial Sequence
  ENSG00000260943_8 (sequence is synthesized)
cataacttatgtgtagacaaaaattgtattgctcacctttggattactaggacctagcagtgttctgattcagagtatgtactcaataaattcatcttgaaaagtgaatgaatgaataaa

SEQ ID NO: 887583 - DNA, 120 bp, Artificial Sequence
  ENSG00000260943_9 (sequence is synthesized)
tgaacgcctgcatctccatcattgatttactatttaatcagtgaagtttttaaattatattcccccatatcttgagatttgatcttgtgttaaatcagttgcacatattagacattactt

SEQ ID NO: 887584 - DNA, 120 bp, Artificial Sequence
  ENSG00000260943_10 (sequence is synthesized)
tgtccttttcacttctccttagcacatatgggctatataatctttataaaggttaaagaaatatattgtaatatgttataacacaatcaagatacatctgaaacaacatagtgcaggcac

SEQ ID NO: 887585 - DNA, 120 bp, Artificial Sequence
  ENSG00000260943_11 (sequence is synthesized)
tatttccgatgttcaacatcatgctggagtaaaacttagagactcttggaaaaaagaaatacttaaataatgtcaccagtgtaatgtgctacattgtaatggtgttatgcttattacatg

SEQ ID NO: 887586 - DNA, 120 bp, Artificial Sequence
  ENSG00000260943_12 (sequence is synthesized)
tgttatctagtaatgcacaaaaagcctaatggatttgctcatattttcctcatgtgcaaatgaaaacactgagtctcagagagattaaataaattgccaaatgtcatgtcaagcgatttt

SEQ ID NO: 887587 - DNA, 120 bp, Artificial Sequence
  ENSG00000260943_13 (sequence is synthesized)
gcgattttgatcctggtatttctaatataaaagcccatgttttaatttattaactgtttgacatataacaataatagatcattacatgttaatataaataacctatgtatgaagactaat

SEQ ID NO: 887588 - DNA, 120 bp, Artificial Sequence
  ENSG00000260943_14 (sequence is synthesized)
tacttctgcattcaatcaactgcaacatgtcattttggttgatgtgtacagaaaatactcaacatctcgcagatattgggttggaaaacagaggacatttttatatctgtttcagataaa

SEQ ID NO: 887589 - DNA, 120 bp, Artificial Sequence
  ENSG00000260943_15 (sequence is synthesized)
tgtatatatttttctttgatagtacaccaaaatttgacaagtgactatttcttaaagggtagttgcagcatgaaatccaaaataacatcaataaacttttcattctctgttacactaaaa

SEQ ID NO: 887590 - DNA, 120 bp, Artificial Sequence
  ENSG00000260941_0 (sequence is synthesized)
attgttttgaatttctaattaaatactactgtggccatagcatatactctgtatgattttgatccttgtgtatatattgagacttgttttatggtgcagcaaaaggtctgtgttggtgaa

SEQ ID NO: 887591 - DNA, 120 bp, Artificial Sequence
  ENSG00000260941_1 (sequence is synthesized)
catcccataaacacttgaaacgaatgctttctgcagttgttggaagtaatattctacaaatgatttgctttgaaaccccactctaggtcttgccctcctcccatgttgaaaacattcaac

SEQ ID NO: 887592 - DNA, 120 bp, Artificial Sequence
  ENSG00000260941_2 (sequence is synthesized)
tgctacttgggacctgactaccaatgcttcaaacccacttgcctagaaaaggttggccctgtgctgcaagatgtagcagcttgttctccgatagctacaggccctgggtcttgctgagac

SEQ ID NO: 887593 - DNA, 120 bp, Artificial Sequence
  ENSG00000260941_3 (sequence is synthesized)
atgtggagcactatctgaaccacccaggtgcatcacacacctttgcctgctatagcacatgctagagtgcaccttacagatcccatcacctttcggatggggccagacattccctatgct

SEQ ID NO: 887594 - DNA, 120 bp, Artificial Sequence
  ENSG00000260941_4 (sequence is synthesized)
gttgagagttctggaggctgatagatttcagccagtgtctcttggagtctctgagtggaaccgataaataaaagccctaaagaaagtgagaaattaaacaaagggcaagactgatggggg

SEQ ID NO: 887595 - DNA, 120 bp, Artificial Sequence
  ENSG00000260941_5 (sequence is synthesized)
ccacactactaaatttcttttgtttttaaacagctttactgaggtataattgacataacattcgcttgttttaagtgtgcagttaaattattttcagtaaaattttagacttgtgtgacc

SEQ ID NO: 887596 - DNA, 120 bp, Artificial Sequence
  ENSG00000260941_6 (sequence is synthesized)
tcctgttttgcaacatttctatcattcctaagaaatcccctatgttcatcagtcaccaccactttttcccagtccccagctccaggcaacctctaattgactttctgactctacagattt

SEQ ID NO: 887597 - DNA, 120 bp, Artificial Sequence
  ENSG00000260941_7 (sequence is synthesized)
gccttttctggagaccatataaatgaaatcatgcaatatgtggtcttttgtatctgtcttctttcatttactttaatatacttttatggttcatgtatgtggcagcacatatcaatattt

SEQ ID NO: 887598 - DNA, 120 bp, Artificial Sequence
  ENSG00000260941_8 (sequence is synthesized)
taatcctgttaggggacaaatcctattaaattgtatggatagctcccattagtttattcatttatcagttgatacatatttgagtgtttctactttatggacaattatggataaagttgc

SEQ ID NO: 887599 - DNA, 120 bp, Artificial Sequence
  ENSG00000260941_9 (sequence is synthesized)
tatgaatattcacattcatgtgttgtgtggacataggtttttttcttctgggtagatagctagaagtgatagtgctaggtcatatggtaaatatatcttcaacattttaagatactgcca

SEQ ID NO: 887600 - DNA, 120 bp, Artificial Sequence
  ENSG00000260941_10 (sequence is synthesized)
aactggtttccaacgtgactgcatgtcccatcaacaatgcgtgagtgttttagtttttccacgtcattatttcacttcccccaggtgttactgtccttttttattatagcattctagtgg

SEQ ID NO: 887601 - DNA, 120 bp, Artificial Sequence
  ENSG00000260941_11 (sequence is synthesized)
gtaagaagtggtgtctcactgtagttttgatttgcatgtccctgctgactgatgatgctgaccatcttttcatgtattttattgtctattcctacacctttttgatgaaatggttattca

SEQ ID NO: 887602 - DNA, 120 bp, Artificial Sequence
  ENSG00000260941_12 (sequence is synthesized)
aatattttgcctattttaaaattgggttatttatctttttgttgcgtagttgtaagtgtatttcatattctggatatgagtcctgtattaaatatatgatttgaattttttttctcagtc

SEQ ID NO: 887603 - DNA, 120 bp, Artificial Sequence
  ENSG00000260947_0 (sequence is synthesized)
attacatttcaaaatgaattttagaagaaacacattcaaaccacagcacatttctagacaaactttcagacacagatgtagagaaattttaatgaaattgaattttaaccaagtgaagac

SEQ ID NO: 887604 - DNA, 120 bp, Artificial Sequence
  ENSG00000260947_1 (sequence is synthesized)
aacccacagatttgcaaatacccttctaagattcttcaaagatatctcaatggttaatcacgttgtttaggaaaatgagaacagtgacagcaagaccttctcagtggtacaatggcctca

SEQ ID NO: 887605 - DNA, 120 bp, Artificial Sequence
  ENSG00000260947_2 (sequence is synthesized)
gcagcagtaaaagagggtagtaaacattatgcagactttgtgtgggctctggatcacccacagagaagaaagttattttgtatgtatgtgtgtaactgtatgtttaagagaaatgaactg

SEQ ID NO: 887606 - DNA, 120 bp, Artificial Sequence
  ENSG00000260947_3 (sequence is synthesized)
tttatttacagggattattgaggagcagaacctcacttgggtagatgcaggtgtaacttttaagatcaatatccatggctttgaatagataggctagagatacagcagatttacttagtt

SEQ ID NO: 887607 - DNA, 120 bp, Artificial Sequence
  ENSG00000260947_4 (sequence is synthesized)
ccccaaagatgcatgttgggtgatacccacctatattagttttccaattactgcaaattcagtaggttaaagtaacaattgtcttatctcacagttctgtatgtctgaagtccaggaaag

SEQ ID NO: 887608 - DNA, 120 bp, Artificial Sequence
  ENSG00000260947_5 (sequence is synthesized)
tatggctggatttttctcagggtcttataaggtggaaatcaaggggtcagctgtctgcattttcatcaggagattggctactcctcctagattattcctagtactggtagaatttggttc

SEQ ID NO: 887609 - DNA, 120 bp, Artificial Sequence
  ENSG00000260947_6 (sequence is synthesized)
cttgtgacagcaggtctagggtctccattttttattggctgtcagctccttgcagtttctttctggtccccttgatcttcaaatgcacatcaaatctgtctcatgtttaaaatcctgtga

SEQ ID NO: 887610 - DNA, 120 bp, Artificial Sequence
  ENSG00000260947_7 (sequence is synthesized)
tacccacttctgcttcaagacagaaaactctgcatttaaagggctctggtgattaggttaggccaacctgaatagtatttattttgtcaaataatgtaacataatcgctggagtgacata

SEQ ID NO: 887611 - DNA, 120 bp, Artificial Sequence
  ENSG00000260947_8 (sequence is synthesized)
tcatatttttaggttccactcatgctgaaagtgaaggacattatacatgggcatgagtcactggaggtcattcttggaattctgcctaccataccaatggagatcaaatgccaggaaagt

SEQ ID NO: 887612 - DNA, 120 bp, Artificial Sequence
  ENSG00000260947_9 (sequence is synthesized)
caggaatagaaattcagagagcatacaatcaaatatattaaattagaattcaaaactattcaagagatggttcagagttttggccaagcagtggatcaaattttcttactactgcttaat

SEQ ID NO: 887613 - DNA, 120 bp, Artificial Sequence
  ENSG00000260947_10 (sequence is synthesized)
caaggatacagtacagaagtaaaatgaattgatctttattaaaatggagcaaagaccaggtctaggaaggaaaggcaagaaggtggaatagatttgctcttactggaagaacactggaga

SEQ ID NO: 887614 - DNA, 120 bp, Artificial Sequence
  ENSG00000260947_11 (sequence is synthesized)
ttcaagacaagaaacagaattgttttagtccctgagttaacaaataaaagaaagatgagaccagaacagttgtcaatgaaggagcagtgaagtagaaaggaaggatggagtgaatgtgga

SEQ ID NO: 887615 - DNA, 120 bp, Artificial Sequence
  ENSG00000260947_12 (sequence is synthesized)
gagcacttttctgaagagaataaacttagttgtcagatgaaaggagatttataattagctttgtccttacaaattttgaggtaacttaccatggaaatactttttcttatcagttgatta

SEQ ID NO: 887616 - DNA, 120 bp, Artificial Sequence
  ENSG00000260947_13 (sequence is synthesized)
atctggggggaggtagcataatcctttgaaattccagtgcgtagaaaactaggctcgacctcaagatgaagcctcaaaaaagaaatgtctgttagaatccagttaacaggagaacaccta

SEQ ID NO: 887617 - DNA, 120 bp, Artificial Sequence
  ENSG00000260947_14 (sequence is synthesized)
tgtgggatgatacagaaactgattaaagtctcagaacagcaaatagtttctcctcttgtgaattaattcaccttccacaattaaacagagataactcagggtacctcaaatactgatgag

SEQ ID NO: 887618 - DNA, 120 bp, Artificial Sequence
  ENSG00000260947_15 (sequence is synthesized)
cttgacagaaatgaattgccacctaattccattgatggagaaagataagacaatgagcaaagaaaagggactttcagagagaagaattgttgagaaggtagcagtcctttctctttccat

SEQ ID NO: 887619 - DNA, 120 bp, Artificial Sequence
  ENSG00000260947_16 (sequence is synthesized)
gaggtagttgctattcattactctgtgatggggactgggaacacaagaatcaccacttagggattaatgaattcaagatctgtaccttccattttgatccaaatttgaacttaaatttat

SEQ ID NO: 887620 - DNA, 120 bp, Artificial Sequence
  ENSG00000260947_17 (sequence is synthesized)
tcaggacaccaactgaatacttctacctaaaggtaaaactcatatcatatttccctcccaagctgcatttcctctgagttcctgacttgacggagtcatttatttgtacaatatatgaac

SEQ ID NO: 887621 - DNA, 120 bp, Artificial Sequence
  ENSG00000260947_18 (sequence is synthesized)
gctgagagttgtgccacatttctctctcttttgccctggacatccaatttttatgcaacactttcatttctaactcctaaatatcttagtttactatctcaatcactgcaaccactgaca

SEQ ID NO: 887622 - DNA, 120 bp, Artificial Sequence
  ENSG00000260947_19 (sequence is synthesized)
tgtttatgccctttttactagcttgccaaataaatataaaagagctcattaatctctctagttccttattaatcctcatttcatctaatctagtattagtattatacccaagtataatct

SEQ ID NO: 887623 - DNA, 120 bp, Artificial Sequence
  ENSG00000260947_20 (sequence is synthesized)
tccaaattgcaaaaatctgtttctatcactctttctgcagcatccttcactggctcccccatggtctacaatatatacaatctaagttttaaaaagaaaaaaacttatgactatccctta

SEQ ID NO: 887624 - DNA, 120 bp, Artificial Sequence
  ENSG00000260947_21 (sequence is synthesized)
ttttgaaaaaaggaaaattagtcctttactagaaaaatagcactgtattataatgtcaagttcacactagagtctacgatggtgtcaaagagctctatatttttcttcttgagtcacttt

SEQ ID NO: 887625 - DNA, 90 bp, Artificial Sequence
  ENSG00000260947_22 (sequence is synthesized)
ggtgtcaaagagctctatatttttcttcttgagtcactttgatatcctcccacagtaagaccattacagttggtgtattggtctggctgt

SEQ ID NO: 887626 - DNA, 78 bp, Artificial Sequence
  ENSG00000260947_23 (sequence is synthesized)
gtaatttataaagcaaagagggttaattggttcacagttccacataaaagagaggcaggcaccttcttcacagggtgg

SEQ ID NO: 887627 - DNA, 120 bp, Artificial Sequence
  ENSG00000260947_24 (sequence is synthesized)
attatcatgagaacagcatgggggaaactgctcccatgatttaattacctacacctggtgccacccttgacacgtgtggattatagagattataattcaaggtaagatttagatggggac

SEQ ID NO: 887628 - DNA, 120 bp, Artificial Sequence
  ENSG00000260947_25 (sequence is synthesized)
attataattcaaggtaagatttagatggggacacagagccaaaccatatcagttgggtactgagaaggacatactgtattaatcatgccttcttattgtctgtattttctaatgttttga

SEQ ID NO: 887629 - DNA, 120 bp, Artificial Sequence
  ENSG00000260947_26 (sequence is synthesized)
catccatattttctgatgttttgacatctggggacttgctgatcttggagggactgaccctctcagggttaactcattcctaggggtagcaaactgctttccctagagcatgcctttcat

SEQ ID NO: 887630 - DNA, 120 bp, Artificial Sequence
  ENSG00000260947_27 (sequence is synthesized)
atcaaatcaaccaatccaaacctctactccaacccaccttctttattgggctctcatactctgagcccctattctcctaccctaattaccacagggccaggtactaaacaacttgagata

SEQ ID NO: 887631 - DNA, 120 bp, Artificial Sequence
  ENSG00000260947_28 (sequence is synthesized)
atccctacactttgtagcctgctcaaaaatttaaaccagccaatgctaaacctatttagcctgtgtaccctgcctcactcatttgttcagtgaaaaccacaataaagtttcttgccaatg

SEQ ID NO: 887632 - DNA, 120 bp, Artificial Sequence
  ENSG00000260944_0 (sequence is synthesized)
cttgccgggcttcttgtcgtcgcggggcaccttgacgaagcactcgttgagcgagaggttgtggcggatgctgttctgccagccctgcttgttctcccggtagaaggggaagcggtccat

SEQ ID NO: 887633 - DNA, 120 bp, Artificial Sequence
  ENSG00000260944_1 (sequence is synthesized)
aaggatgttgagacaacccaccaggcctcttcgcttcggcctcttcgcttcggggaggcgactagaaggcaatggggcgtgccacttatttccaataaaagaacagaagacgaaaatgta

SEQ ID NO: 887634 - DNA, 120 bp, Artificial Sequence
  ENSG00000260949_0 (sequence is synthesized)
tccagcctgggtgacagagtgagacactgactcacagaaaaaaaaaaaaatctcactctgacatcccaccagaggtcttgccagcctacaggtccatttcccttcttggtcttacgtctc

SEQ ID NO: 887635 - DNA, 120 bp, Artificial Sequence
  ENSG00000260949_1 (sequence is synthesized)
gtcttacgtctcagggtctaagagacaggtaaataaatcattaaaaaatgatgtatctgatagttcaggggccacagtaagataatttttcaggctgagcatggtggctcatgcctgtaa

SEQ ID NO: 887636 - DNA, 120 bp, Artificial Sequence
  ENSG00000260949_2 (sequence is synthesized)
acccccatctctatgaaaaatagagataaaaagaagaaataaaaaagtgtgtccctttcccactgagcaaaagcatcctcctgaggaccccaggtgtgttttgagtgtcaattctggccg

SEQ ID NO: 887637 - DNA, 120 bp, Artificial Sequence
  ENSG00000260949_3 (sequence is synthesized)
ggtgctgtggtgtggccatgatcgacaacacagtccttgtccacaaggaagttaaaatcttaaggaaagcgagactgttgtggtccagctgaacatgcctgtgcattgagacctaaagct

SEQ ID NO: 887638 - DNA, 120 bp, Artificial Sequence
  ENSG00000260949_4 (sequence is synthesized)
catagagatgctcactctaggggaccatcacagtttggcccctgccaccctccaacatcaccaaaaccactgttgttgcaattggggaacactctgacaactgttggacagataccacat

SEQ ID NO: 887639 - DNA, 120 bp, Artificial Sequence
  ENSG00000260949_5 (sequence is synthesized)
gccaagacccagaagagacaaatgcatgtttttagctatgttgtgtattctcaaagagcttacaacctgatcaggagacgagaagtattccaagtagtaaatggtcattggaaatacaaa

SEQ ID NO: 887640 - DNA, 120 bp, Artificial Sequence
  ENSG00000260948_0 (sequence is synthesized)
tatacaaaatataagtaaataggaaaaagtaactatagtaacagttgctattggaattcctctttggatttattagagaaagtaccctaatatctgccttgggtatagatagtgaaagcc

SEQ ID NO: 887641 - DNA, 120 bp, Artificial Sequence
  ENSG00000260948_1 (sequence is synthesized)
caagcattttgggtctggttagaactaaactgtagcaaacaagggaggagtttttcagggactctggaatgggagagaacactgggataactgagaggagccaggagttggtgaagtctt

SEQ ID NO: 887642 - DNA, 120 bp, Artificial Sequence
  ENSG00000260948_2 (sequence is synthesized)
tgcattaggggatgtgacacttcacaggcacccctctcccctatgtttttactaaaaactaccaagaacttgatgtgtaaggatttcttatagaggccagtaaaaaggttaagtcatgca

SEQ ID NO: 887643 - DNA, 120 bp, Artificial Sequence
  ENSG00000260948_3 (sequence is synthesized)
acaggaagctttgcagaaaaacagtctatacccaaggatgcaggagcacagaagtagagaacataaggaggaattcttgagaatttgctggattatcggggacacttcgggctgacacag

SEQ ID NO: 887644 - DNA, 120 bp, Artificial Sequence
  ENSG00000260948_4 (sequence is synthesized)
ggagtggggctgggattataggcagagtgtaatcagaccactgaggggcagagagtctctaacatctaagttacatacttatattttaaatttttgtgattttagtttttgcttgctcca

SEQ ID NO: 887645 - DNA, 120 bp, Artificial Sequence
  ENSG00000260948_5 (sequence is synthesized)
ttagagtagaaaataagtatttgttgaataagttagaaaaatgaatgaatgaatgaattgctttcaggactatgccacagaatgttagagtaggaaaggaccttaaggatctattagtta

SEQ ID NO: 887646 - DNA, 120 bp, Artificial Sequence
  ENSG00000260948_6 (sequence is synthesized)
aacctgttgagcaattagttcaatgttgttaggtattgatctcactccaaagataataaccattagcagcaataacaacagtcactgctatgagtgcctaccatgaatcagacagtttac

SEQ ID NO: 887647 - DNA, 120 bp, Artificial Sequence
  ENSG00000260948_7 (sequence is synthesized)
atttataatctctatttttttaaacctttcaagaaaagtgtcattattgctacttttcaaatatgttgtccaaagtttctcaattagtaacccaaatctgcctgtttctaagccggggtg

SEQ ID NO: 887648 - DNA, 120 bp, Artificial Sequence
  ENSG00000260948_8 (sequence is synthesized)
taaaaagcttgctttgtaatagatgaaacagtttaatttttaaatctagtgttataagggtttaagtagtagcacactgtcaaacttctgttggaatgaaaagaataagaactgacgacc

SEQ ID NO: 887649 - DNA, 120 bp, Artificial Sequence
  ENSG00000260948_9 (sequence is synthesized)
acaaaaaagcaattctgcttaaaccagtgtctctcacccttggcactattaaattatcagtacaggcggtccgtgacttctgatggttcaacctacgatttttcaactctacaacagtgc

SEQ ID NO: 887650 - DNA, 120 bp, Artificial Sequence
  ENSG00000260948_10 (sequence is synthesized)
aaaaacaaaaacaaaaaacaaaacaacaacaacaaaaaaagtgttgtcagtttgttcatcgacttatgatggagttacatcctgataaaatagtggttagttgaaaacattaatattttt

SEQ ID NO: 887651 - DNA, 89 bp, Artificial Sequence
  ENSG00000260948_11 (sequence is synthesized)
ataaaatagtggttagttgaaaacattaatatgtacagaacatgcaggtatgatgcatagatatacatgtgccatggtggtttgctgca

SEQ ID NO: 887652 - DNA, 120 bp, Artificial Sequence
  ENSG00000260948_12 (sequence is synthesized)
tgctctccctccccttgcccccaacccgccgacaggccccagtttgtgatgttcccctccctgtgtccatgggttctcataaacattaatattttcaacttacaatgggtttatcgagat

SEQ ID NO: 887653 - DNA, 120 bp, Artificial Sequence
  ENSG00000260948_13 (sequence is synthesized)
tacaatgggtttatcgagatgtaatcccatcataagtcaaggaccctctgcactgaatatacttcattgtggagggctgtcttgtgcatcaaaggagggttagcagcatccctggcttct

SEQ ID NO: 887654 - DNA, 120 bp, Artificial Sequence
  ENSG00000260948_14 (sequence is synthesized)
acccattaggtgctgtggcataccttcttccactgttgtgacaaccaaagtgtctccagacattgctagatcgggcaaaattgtgcccagttgagaatcactggcttaaaaggaaaaagg

SEQ ID NO: 887655 - DNA, 120 bp, Artificial Sequence
  ENSG00000260948_15 (sequence is synthesized)
ccattgcatggatgtgcaataacacctttagccatttcctaatgatgtcatttaatcagttaggatttttgttttgtttttagtattttgctgttacaaataaagctgcaatgaacattg

SEQ ID NO: 887656 - DNA, 120 bp, Artificial Sequence
  ENSG00000236531_0 (sequence is synthesized)
acaactggaagaaaccactgccttgggaattttctgtcctgcaaccctcagctacccccttctggaatgctgccaccatgactgctagagacacttcgtggaagcccacaggacgtgtca

SEQ ID NO: 887657 - DNA, 120 bp, Artificial Sequence
  ENSG00000236531_1 (sequence is synthesized)
ccttttctcatgggctcattttgtgggccaggcacaagcttctgttcattccacctatggggtttgtaggtcaactctctgcagcacctgtttaatctctagaagaaatgctgataaaac

SEQ ID NO: 887658 - DNA, 120 bp, Artificial Sequence
  ENSG00000236531_2 (sequence is synthesized)
aaacaaattttgcaaaaattatgaccgtgagagaaatatgacatagaaaaattacgacagggaaagaaatctcacctaactcattccatcttgcttctaacctccaagctgcttttgttc

SEQ ID NO: 887659 - DNA, 120 bp, Artificial Sequence
  ENSG00000236531_3 (sequence is synthesized)
aatcctggacatagaccaacctaaccatgggagaaatttaatttatagtttaactctgaatcaaggatgagtgtccctttctaaaacagaccccctccttgtcctgatactgaaaccacc

SEQ ID NO: 887660 - DNA, 120 bp, Artificial Sequence
  ENSG00000236531_4 (sequence is synthesized)
tttgtaagacccaggaaagaccacgaaattgagattataggaagggtctgaattctgctaagatgtaggcatagttaaataataacctgccattgttccatagcttgctttcttataatc

SEQ ID NO: 887661 - DNA, 120 bp, Artificial Sequence
  ENSG00000261098_0 (sequence is synthesized)
ctgttggtttagtctgaaagctactattaaatatagtaaatattgtaattttattttgctgaagtttttcagtcatctcttgttgaatgaagctcattcattagtagatcttcatgagtg

SEQ ID NO: 887662 - DNA, 120 bp, Artificial Sequence
  ENSG00000261098_1 (sequence is synthesized)
gctcaggggtacataattgtctaagttatgtgtttgaagctgtttttctattatagtgttttatactgaaggacagcttgactgaatataaaatcttggttcacactttcagttttttga

SEQ ID NO: 887663 - DNA, 120 bp, Artificial Sequence
  ENSG00000261098_2 (sequence is synthesized)
aaatttattgtcttgctttatatatattttttgagaaatctgataccagtctaattattttgcccttgtaaattatttgatcacgtatccctgaatcctcgaggattaaaaaattttttt

SEQ ID NO: 887664 - DNA, 88 bp, Artificial Sequence
  ENSG00000261098_3 (sequence is synthesized)
ttttttcaagtttaaatagttttactgagatgtgtcttggagttaacattcaaagtttacttttccagttaactggaaatccctttca

SEQ ID NO: 887665 - DNA, 120 bp, Artificial Sequence
  ENSG00000261098_4 (sequence is synthesized)
ttcaaagtttacttttccagttaactggaaatccctttcaaaatgtagattcagatcctttttatttctgataatttttcatggattataatgttaaatattctgttccattgtttttta

SEQ ID NO: 887666 - DNA, 120 bp, Artificial Sequence
  ENSG00000261098_5 (sequence is synthesized)
tttcttcttcaggggttccaattatatgtgagttatttatcttttgttcaactttctctttctgaccatttttccttcttttctgtatcgtatttatttgtttatttttgcatctatcca

SEQ ID NO: 887667 - DNA, 120 bp, Artificial Sequence
  ENSG00000261098_6 (sequence is synthesized)
gtgtctaagttttcattagtctgttttcctttggacaccttgtaatttagtcttcatttataattcccccccttccatttctttcttgaattcaataatctttaaatttactcgtggttt

SEQ ID NO: 887668 - DNA, 120 bp, Artificial Sequence
  ENSG00000261098_7 (sequence is synthesized)
ttttaatctatttctgttttttatattttgaatttccaattcacggtgctttttcatatccccaaatgcttatctgaggattttattcagtttgatatgttgtgttacaattttcttctg

SEQ ID NO: 887669 - DNA, 120 bp, Artificial Sequence
  ENSG00000261098_8 (sequence is synthesized)
atttaatggttgctttttggtagagaattttcatcagccaatgcatgttaattattgtttgctgatttctcatactaccattatatagatttagtccatttccttccattcatttttttg

SEQ ID NO: 887670 - DNA, 120 bp, Artificial Sequence
  ENSG00000261098_9 (sequence is synthesized)
aatttgaggggttataagattcctagttcagaaggactctctctgtcagcatagaaaatacaatttctttagggggtgttttttttaactttatagtagagggagggattatgtatgttc

SEQ ID NO: 887671 - DNA, 120 bp, Artificial Sequence
  ENSG00000261098_10 (sequence is synthesized)
cagttttttgttttttgtttttgtcttgcaggaccctgaatttctcctgttgcttcttttccccttcaccatccagttgccaaaaggcaccttgcctattctttttgctctctccactcc

SEQ ID NO: 887672 - DNA, 120 bp, Artificial Sequence
  ENSG00000261098_11 (sequence is synthesized)
ctgaagctatcctgtaataagtgttgtgatactaagatactttatatttttgcacctaggatagaatttctatctctgctggtgattttagaccaattttaggcctgccactagatccgt

SEQ ID NO: 887673 - DNA, 120 bp, Artificial Sequence
  ENSG00000261098_12 (sequence is synthesized)
ttttctttattctgtatgttcttctttggcctgcccttgcttgctacaaaggcttatggtagaaatgtgaaagatcactcacttggatttggtgcttttaatttttttacttataagtat

SEQ ID NO: 887674 - DNA, 120 bp, Artificial Sequence
  ENSG00000261098_13 (sequence is synthesized)
ttgacatttggctatatttttcttcttgttaggctgagggtgtattttgtatagatttatttattcttcttgttctgtatcgtttatgacggacataggtagctgccattttattttatt

SEQ ID NO: 887675 - DNA, 120 bp, Artificial Sequence
  ENSG00000261098_14 (sequence is synthesized)
accgcgaagtcctcacctattcactcttaaatctacctcattgaagacttcaataactatttgttgttggaagccataatgaaactgttgatcaaattacccaatccaaatcaaattaac

SEQ ID NO: 887676 - DNA, 120 bp, Artificial Sequence
  ENSG00000261098_15 (sequence is synthesized)
cccattatgtgaaattccttttacttctttggtggtcctgtctgttttcttatgcctaattgttgcttacggtatacttgctgtttgtttgtttgtttgtttgtttcttttatacactca

SEQ ID NO: 887677 - DNA, 120 bp, Artificial Sequence
  ENSG00000261098_16 (sequence is synthesized)
ttaagtgagttctccatctaaatatcccataaggcacttcagaatcaacatatccaaaaggaaacatattttactcatctccaaatcttttgtttctccagcaattcaagttttggtgaa

SEQ ID NO: 887678 - DNA, 120 bp, Artificial Sequence
  ENSG00000261098_17 (sequence is synthesized)
tgaagctatgaacaatccagtaatccaaaccagaaacttgagagtcatcttttttacacctcccactttgcatctctcacattgaataagcaatcatgccctgagccatatactttctta

SEQ ID NO: 887679 - DNA, 120 bp, Artificial Sequence
  ENSG00000261098_18 (sequence is synthesized)
gcatctctgccatcctccctatcctctttggtatggcctctcttcagactgcctccttagctctcttctggatcactataacagcctaacaattgtatcaccttcagttttgctctttct

SEQ ID NO: 887680 - DNA, 120 bp, Artificial Sequence
  ENSG00000261098_19 (sequence is synthesized)
tccatatgactatcagaattatttctctggaagatcatgtcaatcactccttctcagtggttcttcattgcctataggaagaaatccaaactccgtagcatgagagaaatgtttttcata

SEQ ID NO: 887681 - DNA, 120 bp, Artificial Sequence
  ENSG00000261098_20 (sequence is synthesized)
atgactttatcctgcctttctattgtttctttcatatcatgcccagctcagccccccattcaatgaaaatcatactaaactactttaattccactaacatgttgtgctagttaagcctct

SEQ ID NO: 887682 - DNA, 120 bp, Artificial Sequence
  ENSG00000261098_21 (sequence is synthesized)
ttacctttgttcatgctgtttttactcagaccactccattccacaacatacacttgggggatacctactaattttgaagacccccttcagccctgatgttaaccttctttgtggaatcat

SEQ ID NO: 887683 - DNA, 120 bp, Artificial Sequence
  ENSG00000261098_22 (sequence is synthesized)
tattgacatgatggatagaattggtcagatgcttccttgttcatcagttgtactaggcacagcattctaatgtagcacctattacacattttaaaatttgtttacatgtctcccctcatg

SEQ ID NO: 887684 - DNA, 120 bp, Artificial Sequence
  ENSG00000261098_23 (sequence is synthesized)
taagtttgtaggactggtacctgaaatatactaggcttaccttactgacattttgaaatataagatagctttccaaggcttgcttttgcctcctgattcaggactctaccattggcatca

SEQ ID NO: 887685 - DNA, 120 bp, Artificial Sequence
  ENSG00000261098_24 (sequence is synthesized)
tcaggaagaatttctaatagtattattgatcagagtcttctggaagtttctgcaggttacacatcaacttacttttccctgacaaaataattctgcatctagaaacacaaacaagtagtc

SEQ ID NO: 887686 - DNA, 120 bp, Artificial Sequence
  ENSG00000261098_25 (sequence is synthesized)
aaagaagttatattggaactaagagatgaattaccaaaggaaaactgaaatcaagaaacatttgatgaaattcaggcaatgtcttcaggtgccagaggacacagaaatgtcccgagaacc

SEQ ID NO: 887687 - DNA, 120 bp, Artificial Sequence
  ENSG00000261098_26 (sequence is synthesized)
attcacatgatcttaaagaaacttctgctggttgtcttgtacctttgaagcaggtgtgattgagatggataccttaatttttttaaagtaaaaattgttcattctcttatgtactttagc

SEQ ID NO: 887688 - DNA, 120 bp, Artificial Sequence
  ENSG00000261098_27 (sequence is synthesized)
atactggtattcttatcaaaatatgaaacagcatcaagtttaatattaattataaaacacatggtatatttatatttctgctctttattttctaaagttaactcagttaactctccatat

SEQ ID NO: 887689 - DNA, 120 bp, Artificial Sequence
  ENSG00000261098_28 (sequence is synthesized)
aggtatttggacatgggctgtaaccactttttagaacaaatactgtgaagattgttttattacatgacattttatgatgtgagattaacacctttgtgttagtaaacatcctagattgtt

SEQ ID NO: 887690 - DNA, 120 bp, Artificial Sequence
  ENSG00000261098_29 (sequence is synthesized)
cacttcaatatagatttttaaaatgtatagttatacttgtgcaggatactagaaaatgaaaatgactgttcacacatgctttattattcagtaattttacaagaaaatattactgtttga

SEQ ID NO: 887691 - DNA, 120 bp, Artificial Sequence
  ENSG00000261098_30 (sequence is synthesized)
aagaaaatcatgcatgcctaaaactgattctgttccagttttataagttagtatactaattttaagacattgtgtatatttccttcacttaatttctattttctactgcatttctaccaa

SEQ ID NO: 887692 - DNA, 120 bp, Artificial Sequence
  ENSG00000261098_31 (sequence is synthesized)
tataaaaaacaaagaattcagttggttcctttctagagggaaaatttgttgtgagtatagtactgggcatcacatgctgcttccctttgtggctttgaataaacccttattttcttgtcc

SEQ ID NO: 887693 - DNA, 120 bp, Artificial Sequence
  ENSG00000261096_0 (sequence is synthesized)
cccaaacagccttctgaggttggtaagggtattcagccatcttcgctttgcatatgagaagacaatctcaaagatttgaagtgtcccagtggtaactggcagaaggagaactcttagatc

SEQ ID NO: 887694 - DNA, 120 bp, Artificial Sequence
  ENSG00000261096_1 (sequence is synthesized)
tcctgacttgcacatcctgtcatctgctgtgttacattctcatctagagtctgctctccacacttgatccttgctacccctctacctgctgctgttcctctgagagttcatcttgccttt

SEQ ID NO: 887695 - DNA, 120 bp, Artificial Sequence
  ENSG00000261096_2 (sequence is synthesized)
attttgagggagggaggggcaagcccagtgttagtgttgattttgccctcaaggaccctggcggggaagcagtagtgttcccattgtagaggccagaaaagctgcccagtgacacagcca

SEQ ID NO: 887696 - DNA, 120 bp, Artificial Sequence
  ENSG00000261096_3 (sequence is synthesized)
ggatcagtcatggagccatgataggccagagcctgagctcccagccactgaggaggggtggcagaggattgtttggccaggtctgtgtgggctgaaggcttggtgaccagggacgacatg

SEQ ID NO: 887697 - DNA, 120 bp, Artificial Sequence
  ENSG00000261096_4 (sequence is synthesized)
atcatctgcaagaccaatgctatcactgccctgaggatgttcttcccccgaaagtttgcctccaatagcacaggcacctgcgtctcagatggtggtgacatctgagtacttggacttcat

SEQ ID NO: 887698 - DNA, 120 bp, Artificial Sequence
  ENSG00000261096_5 (sequence is synthesized)
cagctgcctgtaggaggtgaggtagcaggaggtgagggcaatactcccttcagcttcagcaggtgaaaagtgtggttctcaatgaagttgagctagtgtgtgccaggtctccttctacag

SEQ ID NO: 887699 - DNA, 120 bp, Artificial Sequence
  ENSG00000261096_6 (sequence is synthesized)
tgggtacgcgtcatacaggatcccatcaaagcgaccacctggcaggggagcgccacctccttccacaggactttcaaggggatgaccttgtgtggctgctgctgggtccagtcctggagc

SEQ ID NO: 887700 - DNA, 120 bp, Artificial Sequence
  ENSG00000261096_7 (sequence is synthesized)
agctggaagatgctgtcattgcactccatgatccagtgttcctggatggcgacctcctgcaccttccatattcttgtggccatgccgaagcccacctctaagactcggccccctttggag

SEQ ID NO: 887701 - DNA, 120 bp, Artificial Sequence
  ENSG00000261096_8 (sequence is synthesized)
gtggtgaaggcagcgaagggggttgcagtaggggcgctcttgctgcagatggagccccaacttggaacccgacgtgccagggcccagtccctgcagccatctcacttttcacatacctca

SEQ ID NO: 887702 - DNA, 120 bp, Artificial Sequence
  ENSG00000261096_9 (sequence is synthesized)
tttctgcttgccaaacccacccagccacttaataaggaagcagagagtatgggatagagaaattgtgggaatagtggcccagccagatgttcattgctccactgggactctgataggagg

SEQ ID NO: 887703 - DNA, 120 bp, Artificial Sequence
  ENSG00000261096_10 (sequence is synthesized)
gcctcatcagcagtgagacatcttagggaaggagacaccacagtattaaagagaattacctcaatggcagtgcctgtgagctggcttgagccaccttctttacctctgagctttctgcct

SEQ ID NO: 887704 - DNA, 120 bp, Artificial Sequence
  ENSG00000261096_11 (sequence is synthesized)
tctgaagccctttttgctctttctgttcagatgagaggcattatggttcctatttgggtaacattagggaggtggtcaaagcccccagtatagcccattcctgtagtcctaatccaagat

SEQ ID NO: 887705 - DNA, 120 bp, Artificial Sequence
  ENSG00000261096_12 (sequence is synthesized)
ggtcatcactgatagtaggattctcctctccccatttcagtcacaggaaatggggtggtgaccaaacaagctcaagtgataaactgctggtgatatgtatatatgtttgttgttttctcc

SEQ ID NO: 887706 - DNA, 120 bp, Artificial Sequence
  ENSG00000261096_13 (sequence is synthesized)
acctctgaggtgctgggttgcctgataccaaagtgttccagtttgtgtactaaagttgtttttctggcagcctgagacttcgctttttaaaaaatgcagcaattggttgatttttgttgt

SEQ ID NO: 887707 - DNA, 120 bp, Artificial Sequence
  ENSG00000261096_14 (sequence is synthesized)
tcctgaaggacccatcacactacccacggtatctgagtttcaagtctagcatggcttgggtaatctgtgattgtacctgtttcttcctgggattctgcacatagccaggagcatctcatt

SEQ ID NO: 887708 - DNA, 120 bp, Artificial Sequence
  ENSG00000261096_15 (sequence is synthesized)
gcttcattccgtgttttcttgcagttatgcctgggatatgcagatggaaatgcatattttattgtaaatttcattttatatctagcttatattacccttagggcattaagtgggtctttt

SEQ ID NO: 887709 - DNA, 120 bp, Artificial Sequence
  ENSG00000261096_16 (sequence is synthesized)
aaacttatgtctgttaagtaggttgtctgtgacttgacgtcgggcagtaaaggtagatgctaagcaagtatttattatcaaaaggaaatgttgagtcaacattaagggtgagaactgctc

SEQ ID NO: 887710 - DNA, 120 bp, Artificial Sequence
  ENSG00000261096_17 (sequence is synthesized)
ttcgtggttaaggataaaaccaagaaggaaagaagtgatgggaatgcagagacaggaggcagcccagctcttcttggggttgtttacgcccatccttgcgttggtctgcggcgtttcccc

SEQ ID NO: 887711 - DNA, 120 bp, Artificial Sequence
  ENSG00000261096_18 (sequence is synthesized)
agcagacaccactgtgggctactctaatgacttctctttcctcctcgaacaacttctggagaagtcgcaccgttgcagagtggtgccgctacacattgatcatctaaccttacctgggtc

SEQ ID NO: 887712 - DNA, 120 bp, Artificial Sequence
  ENSG00000261096_19 (sequence is synthesized)
ctcagctatagggccgtctgtctcgagtcagctgtcacttaaaagtttcaccattttctctggtttgacttgctgaaaaaaaaaaaagaaacattaaaaaatttcactattttcttaaaa

SEQ ID NO: 887713 - DNA, 120 bp, Artificial Sequence
  ENSG00000238117_0 (sequence is synthesized)
tagtgtacagaggccgcagaggttagagacgcagcaacgcatggctattcagccacggacgtcaaatgcctgccagacatttagaatccccaaactcaatgaggacacgttttcctcccg

SEQ ID NO: 887714 - DNA, 120 bp, Artificial Sequence
  ENSG00000238117_1 (sequence is synthesized)
agaacagcagaatggtaacaaagaacacatgaaaagaaaatgctttcaaggaccaaaggaattcatctacaaatatggaatttccagcatggaagtcagtgacaaagccctggcataccc

SEQ ID NO: 887715 - DNA, 120 bp, Artificial Sequence
  ENSG00000238117_2 (sequence is synthesized)
agtgggacgaggccagccctgccctgagaagctgagattcccaccccacctggagggagctgagcaccctcacagcaactctgagcccctgactccaaaggagactcttctcctgtggta

SEQ ID NO: 887716 - DNA, 120 bp, Artificial Sequence
  ENSG00000238117_3 (sequence is synthesized)
tcagacgtagagggcgggctcccttaaagtaaaattccacaacagggcagtagaaagatgcaatgaaacatatacgagttattaaatattgtcatcaagatgagtaataaatcagacatt

SEQ ID NO: 887717 - DNA, 120 bp, Artificial Sequence
  ENSG00000261095_0 (sequence is synthesized)
cgcgatgggaaggagcccacccacgactgtggatgtttaaccaaagccttcctgtaggaaagcaggaaagactgggtggcctgagggcaagacgacagtactgctgctcagaaaaggtga

SEQ ID NO: 887718 - DNA, 120 bp, Artificial Sequence
  ENSG00000261095_1 (sequence is synthesized)
ccaaagtggccaacattgcaacctggacctgggactcaaacccaaatctgtctgattcctaaactgcaatcttcccaccagattctgcggcctcccactacctgaaaaatggtttttctc

SEQ ID NO: 887719 - DNA, 120 bp, Artificial Sequence
  ENSG00000261095_2 (sequence is synthesized)
tgtctcctcacctaggaatggaaatatcactgaaactaaagaaaacgaccctccagtccagtgggtgcaaactggggacttcagctggattcacccctcaggtggcttctgtttggccac

SEQ ID NO: 887720 - DNA, 120 bp, Artificial Sequence
  ENSG00000261095_3 (sequence is synthesized)
caccttgtttggtaaagctgacagcagccaagtcatagtccctgaaacatgcagcagatgaagacagcggccctcgttggacaaaaaccacatctgcttccctttaaaagaaatgacaaa

SEQ ID NO: 887721 - DNA, 120 bp, Artificial Sequence
  ENSG00000261095_4 (sequence is synthesized)
cagaatagctgctcaccattcacagcaacagagtctagaacttaagatgctccaagcatcttaacaccttctcaactcaacgcaccaacggaagggtcaccatgtataaagaaaaatgtg

SEQ ID NO: 887722 - DNA, 120 bp, Artificial Sequence
  ENSG00000261095_5 (sequence is synthesized)
ttcttccatttaatgttttccctttcagtaggaccccatcacccttttttaagtaacagctttattaagatataatctacaccatgctaggcatgtttgtggctattatctcatttaatc

SEQ ID NO: 887723 - DNA, 120 bp, Artificial Sequence
  ENSG00000261095_6 (sequence is synthesized)
tcattccattgcactaatttgaaaaccaaagctcagagaagtaaacgttctcagagccacacagttgctccatggtagaggcaggatttgaacctggatcgccccaagtccaatcccaaa

SEQ ID NO: 887724 - DNA, 120 bp, Artificial Sequence
  ENSG00000261095_7 (sequence is synthesized)
gatacttccactactccatgtttctcgtgcagtagatggcagctgccctttatcattttattatggtatgttttagagacagcaagggcctgtacttttgtttggcttacagaaactcaa

SEQ ID NO: 887725 - DNA, 120 bp, Artificial Sequence
  ENSG00000261095_8 (sequence is synthesized)
atgcatgcaatgtatcacttcacccatgcatatccctgggttgaaaatatgcccacatctatggaacacctaagaacaagcattacacaaataaaccgtttccctaaatttccctgtgat

SEQ ID NO: 887726 - DNA, 120 bp, Artificial Sequence
  ENSG00000261095_9 (sequence is synthesized)
tcttggagctactgagacaacactccaatatttctgtaatttttaagcccacaaaggaaagttagtgtataacaaaggccttggtggctttcagctgcatcctaagcctcctctcgttaa

SEQ ID NO: 887727 - DNA, 120 bp, Artificial Sequence
  ENSG00000261095_10 (sequence is synthesized)
atttcttaatagactggcctcatatcagagcccaggaggagatggtccacctaggaataagggttctaatagttaactctgaaactggaagcaagccagtgacaaggagttgaaactaaa

SEQ ID NO: 887728 - DNA, 120 bp, Artificial Sequence
  ENSG00000261095_11 (sequence is synthesized)
gaacacaggagacctccgtaaacgtccttccagcatagacctgaggttctgagcaactgtgggtaacgcacaaaccattattaaaaccaataaaataccattattttacaaaaaattaaa

SEQ ID NO: 887729 - DNA, 120 bp, Artificial Sequence
  ENSG00000235743_0 (sequence is synthesized)
agataatggagagagagaagagaacagcagtagccgttgccagaaatattgagcaaggcggatttattagatgaagatatcaaaatactttccattgaggaaacaggttggaggtgggag

SEQ ID NO: 887730 - DNA, 120 bp, Artificial Sequence
  ENSG00000235743_1 (sequence is synthesized)
tctgacatgcatgaaaatgaaacgacaaattgatacacgcagtgcttggaatggatggagtccttctaatgagtgattacctgtggtataactatattgattgtgtttgtacatgtcaaa

SEQ ID NO: 887731 - DNA, 120 bp, Artificial Sequence
  ENSG00000235743_2 (sequence is synthesized)
tggggctggcgaggatgaacttgaagaaatcaatcttggaacctgctaggacagcagcctcctggtttcacagtactaaatcatgacttcaaaattttgaagtaaaagaaaactgcaaaa

SEQ ID NO: 887732 - DNA, 120 bp, Artificial Sequence
  ENSG00000235743_3 (sequence is synthesized)
gcttgatccaggttccagtccaatatgcaccattcagcctggttgcagcatgttaagcagccctggaggcagcagatgagggatcctatgaagcaactttcagacattcagaaccaagac

SEQ ID NO: 887733 - DNA, 120 bp, Artificial Sequence
  ENSG00000261093_0 (sequence is synthesized)
atgaggaggaggaagcctgaacagaaattcctgaaagggctaagagagactccccaacacagccaagcctttccaaaagccaggaggaggagagaggactccgactccggccacaggccc

SEQ ID NO: 887734 - DNA, 120 bp, Artificial Sequence
  ENSG00000261093_1 (sequence is synthesized)
agggcaacgtgctgggccccggagcgtcctgctccctggggccccagggtaggtgcggcccagctcaccccagctcacggtcacaggctcacatgcagctctcacacagcagcagccaag

SEQ ID NO: 887735 - DNA, 120 bp, Artificial Sequence
  ENSG00000261093_2 (sequence is synthesized)
gcccaggcaggaaccacaggcagggcctggggaacatctctgccccctcccaggccccgtctgtactcgcctagctaaaaagagccactctcgtcattagcagtgtaaaaacgacacctt

SEQ ID NO: 887736 - DNA, 120 bp, Artificial Sequence
  ENSG00000261093_3 (sequence is synthesized)
ccctctcagtttggatctggcctggcacacagggtcactgctgagtcacctgtgacttgggggtagggaccagggagggtggacacagttgagtcagaggcaggtctgtgggcagcaatg

SEQ ID NO: 887737 - DNA, 120 bp, Artificial Sequence
  ENSG00000261093_4 (sequence is synthesized)
tctgcctctcccccaaagggagtgagggctgccctccagggacaacctgggcagggagagaagggcccagacctgccaggccaccaggagcactctctacctggggagtagctaggcaaa

SEQ ID NO: 887738 - DNA, 120 bp, Artificial Sequence
  ENSG00000261093_5 (sequence is synthesized)
ggacaaatgcatctggcctgtctgtgctgcagagcggggcaaggccaccaaagcatcaaagggaaatggccccaaaaccggctctctctagaggaaagccgaccagcaagctggggttga

SEQ ID NO: 887739 - DNA, 120 bp, Artificial Sequence
  ENSG00000261093_6 (sequence is synthesized)
agtgtgctgttctcgcctcctgtgcaacagcaactggcaaagcccactctatgggcccagatgagccggcagcatgagaaggctgtgagatttctgatgcacagatgtagaagctctgag

SEQ ID NO: 887740 - DNA, 120 bp, Artificial Sequence
  ENSG00000261093_7 (sequence is synthesized)
tgtgtgacggtggtgtctgcactccctggcgtggtctgcaggagacagaagcaccctgggtctgctgatgccagggttctctcagaccctacttcagcaactggagaggcgtggacattt

SEQ ID NO: 887741 - DNA, 120 bp, Artificial Sequence
  ENSG00000261093_8 (sequence is synthesized)
aaaccttttaggaggccctcaggcctctctgctccacacggaagtcagcagccctctctgctctggctggcttctccaaggcacctcctggccccacctagggctcggggcaggactctc

SEQ ID NO: 887742 - DNA, 120 bp, Artificial Sequence
  ENSG00000261093_9 (sequence is synthesized)
tcgtgcagtgagccagcggggtactaactgggctcacttctgacagtaccgctcccagcatgcgctcggcttccagccccagagaccaacactgctaagtaggataagggatccggagcc

SEQ ID NO: 887743 - DNA, 120 bp, Artificial Sequence
  ENSG00000261093_10 (sequence is synthesized)
ctcgatggcaccctccactcggcagcctgctcccgcaccactccaacccctcccgctcctcaccacgcaaacctgcctgccaacacagcaggggccacagaaagctgccaccagagccac

SEQ ID NO: 887744 - DNA, 120 bp, Artificial Sequence
  ENSG00000261093_11 (sequence is synthesized)
cacagggatatgtaatgggcccagccaggcctaagggcccatcacagggagacgcaagaaagggagcaggtgacagaagcacggcggctccctccacaaagctgcggcccccgcagggct

SEQ ID NO: 887745 - DNA, 120 bp, Artificial Sequence
  ENSG00000261093_12 (sequence is synthesized)
ccctccctggtgaagagttccaggaccacagcgggaggggcataaagagccaaacacacccggtcccctcggccacagcaggaccagcacacagttggggcagggcgggcgcatggttcg

SEQ ID NO: 887746 - DNA, 120 bp, Artificial Sequence
  ENSG00000261093_13 (sequence is synthesized)
gactgatgctaggaaaaactggtgacaccaggtctgtccactagtctgggcgggactgggttgacgtgcatggagctgggtccccacggcaacgagggcacacggaggcctccacggagc

SEQ ID NO: 887747 - DNA, 120 bp, Artificial Sequence
  ENSG00000261093_14 (sequence is synthesized)
acagagagcaagcaaagcgaccctgaattcctttgtgtttgttactggttttgttctttgtgtggttgggtgttttttttcttcttttcttttaaataaaaatgctgcaaggtttccgcc

SEQ ID NO: 887748 - DNA, 83 bp, Artificial Sequence
  ENSG00000238113_0 (sequence is synthesized)
agagaaagggagagggtgagggagttgtggagcgacagcgacagagccttggagagggaggctctgctcaggatttgtcccca

SEQ ID NO: 887749 - DNA, 120 bp, Artificial Sequence
  ENSG00000238113_1 (sequence is synthesized)
gatgctagtagatgttcttcagtgtctggacattaaaatcttgggcatgcagcaccatatgagaagtttaaaaaataaaatttaaagagagaaaagtggtgggattgctgaatcagacag

SEQ ID NO: 887750 - DNA, 120 bp, Artificial Sequence
  ENSG00000238113_2 (sequence is synthesized)
agctagaaagaaagtgcttagcagggcttgaaaacaccaaaactctgagaccactgaccttcaaaaacttcaacagccctgagtgaaaagtccaaacacatttatctaccattcgaagac

SEQ ID NO: 887751 - DNA, 120 bp, Artificial Sequence
  ENSG00000238113_3 (sequence is synthesized)
gctttattgtctgtcctctgcacatctcagtagtctctttttaccacactgtctatatactgcatgagccatttatatgaaactatctgacactccaaggcatcttgtactatatattca

SEQ ID NO: 887752 - DNA, 120 bp, Artificial Sequence
  ENSG00000238113_4 (sequence is synthesized)
actatgtatccctagtacctagcacagtcctggcatatagtttgctactaaacttttacagaatgaaggaattatcttgtatccaggttccaagttttaaggtgattcttcagtaaaaaa

SEQ ID NO: 887753 - DNA, 120 bp, Artificial Sequence
  ENSG00000238113_5 (sequence is synthesized)
accctcggggtcggtcccgtcccgcccgggttgggtggggctgccgcgagtcggaagaggtgggatgctgctgcctggcggtgctgcagtggcggatcttcaggaggaggatttgtcccc

SEQ ID NO: 887754 - DNA, 120 bp, Artificial Sequence
  ENSG00000238113_6 (sequence is synthesized)
tatctcctaataacattactttcatttactctgatctaaatatactgtcctaagagagcaataagaaagagagttgaagctggagtttgaagaattgtacatggtcctgtgataccctac

SEQ ID NO: 887755 - DNA, 120 bp, Artificial Sequence
  ENSG00000238113_7 (sequence is synthesized)
ttttaacctgagtgactctctcctagcggagagagagccggacagactccattttagtttcttcacgtgcagccccctttaccttccacccttaattgcataactagtgtaaactgactc

SEQ ID NO: 887756 - DNA, 120 bp, Artificial Sequence
  ENSG00000238113_8 (sequence is synthesized)
actcaaagcaggtccaggaatgcacttagtgataagatattgaggcaagctgcaccagctgctcctgggtacgcactcggtgaatgtcacgcaaaacccctgcatttctctctttgtgat

SEQ ID NO: 887757 - DNA, 120 bp, Artificial Sequence
  ENSG00000238113_9 (sequence is synthesized)
cccctgcacctggaactgtttatttgttttgtaactgctattgtaaccaattaatattttaactatttgccagctctgcttctgtaaaacttgtttcagctaaactcccccctcccctat

SEQ ID NO: 887758 - DNA, 120 bp, Artificial Sequence
  ENSG00000238113_10 (sequence is synthesized)
tcccctatttagaccacggtataaaaacaaaaccagccccttcctcggggccaagagaattttgagcattacatgcctctcggttaccggctaataaaggactccttaatttgtctcaaa

SEQ ID NO: 887759 - DNA, 120 bp, Artificial Sequence
  ENSG00000238113_11 (sequence is synthesized)
cctttccgcccacgctccagtccttccgggagctccggagctccggggcttccaccacatctgccggctcaggacgggtcgtgctcatcccttaactttttaactttttgttgtttctat

SEQ ID NO: 887760 - DNA, 120 bp, Artificial Sequence
  ENSG00000238113_12 (sequence is synthesized)
ttatattttattgtgctatgtcttgaaatgttgttgtagctattacttttgattggatattacttagtattcctactttaaataagagtagtttgcacaccacacagctatagtgttata

SEQ ID NO: 887761 - DNA, 120 bp, Artificial Sequence
  ENSG00000238113_13 (sequence is synthesized)
atattctgttttgttttgtatcctattagcagtgaggatttttttttacctttaggtgatcatttattactcattaatgtccttttcttcctgattgaagtactccctttagcattcctt

SEQ ID NO: 887762 - DNA, 120 bp, Artificial Sequence
  ENSG00000238113_14 (sequence is synthesized)
gtcttcagtgaaaaggaattgctgattgagcaagaattaaacttctagagactcctggatccactgaagtttgagacaagctctagtcaggaagtgttagagagttctaaacaggaaata

SEQ ID NO: 887763 - DNA, 120 bp, Artificial Sequence
  ENSG00000238113_15 (sequence is synthesized)
gtttgctgccaccaaccccaacagcaagaattccagtcctgctgctgcaaattgcggttggttggctgctgctgaagtcacctgaaagctcaattaggctaaagagtctaaacgggtcac

SEQ ID NO: 887764 - DNA, 120 bp, Artificial Sequence
  ENSG00000238113_16 (sequence is synthesized)
ttacatggctggcagtgcatattggctgctgagtgtgatgcctatctgacctctccatgttacctggagtgctcacaacgtggtagtttgtcccaagacacacaggcaaatactacaaag

SEQ ID NO: 887765 - DNA, 120 bp, Artificial Sequence
  ENSG00000238113_17 (sequence is synthesized)
cttcttagggcctagccttggaggtcctagaatacgacttctgctgcatcctattggaaaagcaagtcattgtgaccagcacagattcaagaaatgggagattcgactctacctgtcaat

SEQ ID NO: 887766 - DNA, 120 bp, Artificial Sequence
  ENSG00000238113_18 (sequence is synthesized)
gtaaacagcagcatgtgcatgcagggaggaaagaaattgagggcatcatcttgaagactatcatatcacaccattattccaactagtgaacattatgttttagatgggtagtactagcta

SEQ ID NO: 887767 - DNA, 120 bp, Artificial Sequence
  ENSG00000238113_19 (sequence is synthesized)
ctcatctgtcccccagaaacccaagctaagcatggacatattgaagagaatgtcaacaccattaaaaaaactctagaaaaatcacatgtgatgactgaggttaattcagtctgtcaacta

SEQ ID NO: 887768 - DNA, 120 bp, Artificial Sequence
  ENSG00000238113_20 (sequence is synthesized)
catcaatataattgccttcttgtaaccctaagtatggtgaagcagaattgaattctacaaaagtctttcatctgttttcctatggaataattaacaaacccaataaatgtataaatagca

SEQ ID NO: 887769 - DNA, 120 bp, Artificial Sequence
  ENSG00000238113_21 (sequence is synthesized)
taagtgtcactctgattttattgctgctgtgtaacccagttttagactctctggttctcacttaatgttctaaaaaagtattaaagagaaaattttattctggtgatgagcccatccact

SEQ ID NO: 887770 - DNA, 120 bp, Artificial Sequence
  ENSG00000238113_22 (sequence is synthesized)
gcagccatctcaacatcataccaattataagcctatcatttaaaaagaaagctgttagtttaacttatttatccaaatatcagtattacataaacatatttgtcatcagactttggactt

SEQ ID NO: 887771 - DNA, 120 bp, Artificial Sequence
  ENSG00000238113_23 (sequence is synthesized)
ttctaaacaatggttagtatatttttcaaaatgaacattaaaatgtatattttccaaaaacaaaatacagctcccattggtaaatgatgctattgagacacaacagacaacttctcttgg

SEQ ID NO: 887772 - DNA, 120 bp, Artificial Sequence
  ENSG00000238113_24 (sequence is synthesized)
gaaccatttaatcagtgctcacttttgcactctttccagaaatgtcaatggttttgaaatatagaagtatattatacaaataaacttatacttattcagtattgtgcaatatttagtatt

SEQ ID NO: 887773 - DNA, 120 bp, Artificial Sequence
  ENSG00000238113_25 (sequence is synthesized)
tcttctagccatctcttgctgaatagtaagccattccaaaacttacggaattatttattgtttaatattgtttattgttattatttgtttagtaattttaataacgttatttctcatggt

SEQ ID NO: 887774 - DNA, 120 bp, Artificial Sequence
  ENSG00000238113_26 (sequence is synthesized)
ccagatctctggcttacccatctggcaagtgcacctctgtgagcaaagacttcagagccaggtgacaagaatggcccaagcagtccaccaggaaaacctgggcccagtgtacgtcaatgc

SEQ ID NO: 887775 - DNA, 120 bp, Artificial Sequence
  ENSG00000238113_27 (sequence is synthesized)
agagcatcaagcatggtgtaacaggtgcacagttgcctactcctgttcagagatgactgcatcccacataccgtaaaatgaggaaatgcatagaagcagatgtaactgaagaagacagca

SEQ ID NO: 887776 - DNA, 120 bp, Artificial Sequence
  ENSG00000238113_28 (sequence is synthesized)
gaagcaacaaggagggacaaccaggacctaggagggcaccatgccagagacgcctggaccccatgctaggctcagtgcctgttatactcttgggagccagcactttccctctccatcaca

SEQ ID NO: 887777 - DNA, 120 bp, Artificial Sequence
  ENSG00000238113_29 (sequence is synthesized)
tggcatacttgccattatttgttgtgtaaaatattgtccttagttttcacctttcctaggagacacaggcagagcctgtgacactacagcttctggcacacagtaggtaggtgcatcaca

SEQ ID NO: 887778 - DNA, 120 bp, Artificial Sequence
  ENSG00000235740_0 (sequence is synthesized)
agatgaagaagagacaggaggccctccaagcaaaggaaccactcatgtcaagacatggggcaaaaagagaggatgtatttggagaacagagagtaaccgaaggctatcattcaatcagtg

SEQ ID NO: 887779 - DNA, 120 bp, Artificial Sequence
  ENSG00000235740_1 (sequence is synthesized)
atagtcttcatggaggttaatatcaaaggcaacctgaatttcctcagacttcatgagctggcggtgaagggcgctggatccagggcaaaaatgaagacataagggaccttaggtgacaag

SEQ ID NO: 887780 - DNA, 120 bp, Artificial Sequence
  ENSG00000235740_2 (sequence is synthesized)
gaagaagctcccaggcagcatgtgggatggacccaaggagaacgtcagagagaaagagttcagtctggtgtctcctgaagcaggttaaaattaagctcggcaggctcgacgtaaatgtgc

SEQ ID NO: 887781 - DNA, 120 bp, Artificial Sequence
  ENSG00000235740_3 (sequence is synthesized)
agacaaagcaaagcaggaagcctcccacactaaaaagggaagataagaatcacagaagctgggatggtttttattgaagggcatttcaaagcaaatacagacatctacagcatatttgta

SEQ ID NO: 887782 - DNA, 120 bp, Artificial Sequence
  ENSG00000235740_4 (sequence is synthesized)
aatcctccgtatgtgtatggaaacacacaccttcacacatcaaaactggatttgttcctgagtaacaaaacgtcctaagaacaaaatgaaagaaaaccaaatagcagaaaaatacttcca

SEQ ID NO: 887783 - DNA, 120 bp, Artificial Sequence
  ENSG00000235740_5 (sequence is synthesized)
actcaacacaccaagagttaagaaaataatgcaacaggaacaaagggcaaaggatatgtactgggaagaccacagagaaagaaaatgcaaatggctaataatataaaatatttcctaggt

SEQ ID NO: 887784 - DNA, 120 bp, Artificial Sequence
  ENSG00000235740_6 (sequence is synthesized)
tcaatagtaatcagggaaagacaaaattacacttttgacctcttagactggcagtgacaaagattatttgagtgaccaagctttagtcaggctcctggatcttctaggcccatctgggca

SEQ ID NO: 887785 - DNA, 120 bp, Artificial Sequence
  ENSG00000235740_7 (sequence is synthesized)
cttcctcgtaaaatacagttttaacaaaagccctgctaaattggtttaccgagaactcccaccctcaatcgagttccttagcccttcacctttcctcaggtgagggctgatcatcctgtc

SEQ ID NO: 887786 - DNA, 120 bp, Artificial Sequence
  ENSG00000235740_8 (sequence is synthesized)
ctgtcttcagcaagactgctctaacgctgacgtttccttttagtaattttccatccactgacacccacttgtaatttatagccaaggagcaagatacactgctccttggctataagttat

SEQ ID NO: 887787 - DNA, 120 bp, Artificial Sequence
  ENSG00000235740_9 (sequence is synthesized)
tttccctgttacattcagagttgagcccaatcccactccccgactacaaaatcgatagcagtggtccctatacctattgcaatggtcctaaataaaacctgccttaccgtgcttgaacaa

SEQ ID NO: 887788 - DNA, 120 bp, Artificial Sequence
  ENSG00000235740_10 (sequence is synthesized)
acttactggccttctggtactcagcaaagctgtccccatgagtttgggagtctccattcctgtccttccactcccctcaaacgtctttcattcaaggtcacgtggtaacttgactcctct

SEQ ID NO: 887789 - DNA, 120 bp, Artificial Sequence
  ENSG00000235740_11 (sequence is synthesized)
caccactacttctgtgggaatgcagaggccaggccagagcctgtgggtgctgccctccccagagacttcactatgcccagctccagggaggactgactggaggaggggaccaggcatctc

SEQ ID NO: 887790 - DNA, 120 bp, Artificial Sequence
  ENSG00000235740_12 (sequence is synthesized)
ccctgcactctgggcccacagcaaccctgtataccagcccgtattaaccttgcaacgccttcctccaaaaggctgagacttcaaccacaggacctgggtggtgatcaccacaaaatttct

SEQ ID NO: 887791 - DNA, 120 bp, Artificial Sequence
  ENSG00000235740_13 (sequence is synthesized)
tcctgaacgttcttctccaacaacttctcacattcagttattcattcaacaaacattgagcaacaacctaatcttctgggctctggagaccgagttaaaaaggagacagcaggcccctgc

SEQ ID NO: 887792 - DNA, 120 bp, Artificial Sequence
  ENSG00000235740_14 (sequence is synthesized)
ccccgcttcccgacaggtcaccacatcttgagtgctaagactgtcatcacagggtgaggaggggaaatgagctcagaggggcagaaccttctgaaagggcagaatggttcaagcatcccg

SEQ ID NO: 887793 - DNA, 120 bp, Artificial Sequence
  ENSG00000235740_15 (sequence is synthesized)
aggagggtggggtacgcaaggaactggttgcctctaggactcgcgacaagaccttacggagaaagaagtcagccaaggaaaaacgactggagtgtggaagagtctggaagagctggacca

SEQ ID NO: 887794 - DNA, 120 bp, Artificial Sequence
  ENSG00000280303_0 (sequence is synthesized)
agtttttagtaaactgtagctggtatcagggatcagatcagcggacacgcccattccagcagtcaggggcctgctcggaccgtcgtgcacctccgagcgtttctgtccggtccctctggg

SEQ ID NO: 887795 - DNA, 120 bp, Artificial Sequence
  ENSG00000280303_1 (sequence is synthesized)
tccgtctggttttcggaggctttcctggaaaagccagcctgtggctacctcctttctcccctaagtgatggaggattagaaggcagaggttgacccacaatctaaagtgcctggtcgcct

SEQ ID NO: 887796 - DNA, 120 bp, Artificial Sequence
  ENSG00000280303_2 (sequence is synthesized)
tttcccagatttcccggagcattccttcaccccgtggcatcggctgtctgcatatgggtgcaaggccctgttccgggcggagaataaacaggagttctgactgacaggagctccgcagcc

SEQ ID NO: 887797 - DNA, 120 bp, Artificial Sequence
  ENSG00000280303_3 (sequence is synthesized)
agcagggtggtcactagttctctgcagtctcggaggacagccctgaagaagggcaggagaaccagcacttcctccgaaaactcaaaaggacatcagtcttcaccaagttgccgatacaaa

SEQ ID NO: 887798 - DNA, 120 bp, Artificial Sequence
  ENSG00000280303_4 (sequence is synthesized)
acgtgctcctgaaatgtgtagtaatgaacaccaggaaacctgggtaggagtgtgcatggcattcttcatcaccgcttggactgcatggcactgaatacccacggagagcaggatggagaa

SEQ ID NO: 887799 - DNA, 120 bp, Artificial Sequence
  ENSG00000280303_5 (sequence is synthesized)
acagtgtgctcatattcacaggatggaatctagccattcacaaaaattccaaaacaggcaaaattaaactgcattctttagggaagcatcattaagtagtaaataattgacagaagggca

SEQ ID NO: 887800 - DNA, 120 bp, Artificial Sequence
  ENSG00000280303_6 (sequence is synthesized)
agaaggtgcttactctaagtgtcagaatggtggatacagctgggggtgagagggctgtgaccacagcagggcccctgggggatttgggggtgccaggcctgttccttcctgcaatggtgc

SEQ ID NO: 887801 - DNA, 120 bp, Artificial Sequence
  ENSG00000280303_7 (sequence is synthesized)
cctttggcagccatcccttaaactgcacttttactttatatgcttttctgtacctttactgtagtatttcacggaaatttttaaataatcatgaatgttaccactttcctatttatgaac

SEQ ID NO: 887802 - DNA, 120 bp, Artificial Sequence
  ENSG00000280303_8 (sequence is synthesized)
gttttggcccgaaatccctgaggcccaactgccctgctgtcagcgactgcacgcctcagcaaaggcccagaaggctctgtcatcactggctgccctcagcccgccttcagctcctttgag

SEQ ID NO: 887803 - DNA, 120 bp, Artificial Sequence
  ENSG00000280303_9 (sequence is synthesized)
cgctgtgttggggaactttgttgcaaggatttcgttccagaaggcaagataatgtctctgagggcttcattgtgtcacttctctttggatggcggacaccgtggccctctgctggcggag

SEQ ID NO: 887804 - DNA, 120 bp, Artificial Sequence
  ENSG00000280303_10 (sequence is synthesized)
gggtgccattgctgcctgccccatctctatccccagggcccatgcagtcactgggttcgccctctggggcacggggttccctctgctcttttcctagataagcccattctctgcaggtct

SEQ ID NO: 887805 - DNA, 120 bp, Artificial Sequence
  ENSG00000280303_11 (sequence is synthesized)
ctaccctccacacctgtgttcaggaattcagcccgcttcctgcagccccatccctaccctcctcccaacctgcttttcttctggtgtccctcactcagcatggctaacagatccaccacc

SEQ ID NO: 887806 - DNA, 120 bp, Artificial Sequence
  ENSG00000280303_12 (sequence is synthesized)
caacggagctgagaactgcagtcccctctgcctgttacctctcctgccattagtgaacctgcttaactcatctgactgtgcgtctcggtgcttgctgtgacatgtctccagcccttgctg

SEQ ID NO: 887807 - DNA, 120 bp, Artificial Sequence
  ENSG00000280303_13 (sequence is synthesized)
ctctgtcccccagacccacgtcccacacccggatggtgactcagccgactctgggtcttctggacccagtgcttctccctgatacaattccttcctctgtgttttaggatcctgatgctt

SEQ ID NO: 887808 - DNA, 120 bp, Artificial Sequence
  ENSG00000280303_14 (sequence is synthesized)
tgataagaccgtgggctctaatcacagccagggacatttgcagcagcctggcctgcagctctgcacactgggtgcactcagtctaaagcaccagctccccatgagagagaaagaaggggt

SEQ ID NO: 887809 - DNA, 120 bp, Artificial Sequence
  ENSG00000280303_15 (sequence is synthesized)
gaggggaagtacagagaaagctcctgaggccacagggctgacaaagccctcggctttgggggcactttgtttcttcaagactaaaatgcaggcaatggaataaatcatttgttcctaaaa

SEQ ID NO: 887810 - DNA, 120 bp, Artificial Sequence
  ENSG00000226854_0 (sequence is synthesized)
tcacctgggaggaaccatctattgtcctgtcctgaaggagttcctcctaggtctggtcagacctttgtatgatggatttttggaaacacagcagaaggacattcactcattgcccccatt

SEQ ID NO: 887811 - DNA, 120 bp, Artificial Sequence
  ENSG00000226854_1 (sequence is synthesized)
tgccactataggaatatgcacctccctttaattcactcaatttgctttcatcctgatctattatgttgttgtagacccagtttcagttgttaaagtattggattactgggttatcagttc

SEQ ID NO: 887812 - DNA, 120 bp, Artificial Sequence
  ENSG00000226854_2 (sequence is synthesized)
taaggccctggcaagggtggtggggaacaggtcccacataagtgcccatatcgagagctatatgcctaaattgggtgggacaccagggacaagattccctggttttatagcttaggggcc

SEQ ID NO: 887813 - DNA, 120 bp, Artificial Sequence
  ENSG00000226854_3 (sequence is synthesized)
tgaggatgcaacatagagcttccttagatccatttggagatacaacctgctctaatacttgggagaggaagtgaaagtctgaagcactagtatctaggagacagggatcagaggaagtag

SEQ ID NO: 887814 - DNA, 120 bp, Artificial Sequence
  ENSG00000226854_4 (sequence is synthesized)
aagtcatggtcaggacccaggaggtatggttcagagggagaggtacgggtgcacgcatgggcgactgttgagcagagacttctggctgtgctattatctcaactggctaatgcagggagt

SEQ ID NO: 887815 - DNA, 120 bp, Artificial Sequence
  ENSG00000226854_5 (sequence is synthesized)
gggagttcaggatgacagctttctgcctctagttggccctcagcttccctaggaaaattcaaagtggaagctggctccaggaagaccaacgctcccaacccagaagggttggggtttgtt

SEQ ID NO: 887816 - DNA, 120 bp, Artificial Sequence
  ENSG00000226854_6 (sequence is synthesized)
agaaagccctttcccagacagcctcacacctgagtcttaagtcaggcagccatgctaatcatttctaactggctgataggtgcctggtattttcctccaattataaggaaggataggaca

SEQ ID NO: 887817 - DNA, 120 bp, Artificial Sequence
  ENSG00000226854_7 (sequence is synthesized)
gaatagcaagtgaaagtggtccaatattactcactgctttggaggtccctttgtggttgccaaaatgttactggcgggggggcggttcttgttcttagagctcccaagatggtgcagacc

SEQ ID NO: 887818 - DNA, 84 bp, Artificial Sequence
  ENSG00000226854_8 (sequence is synthesized)
ggcggttcttgttcttagagctcccaagatggtgcagaccacttccaaaatggtggcaagcttcttgttctctgacccgttggg

SEQ ID NO: 887819 - DNA, 120 bp, Artificial Sequence
  ENSG00000226854_9 (sequence is synthesized)
catggaagagaaccgtggaacccagcgagtagtgttcagctcaattaagatgaacccaggcacttagccaagcaggaacaatggtgagcctttagcccaatcaggagtggcaatgggcac

SEQ ID NO: 887820 - DNA, 120 bp, Artificial Sequence
  ENSG00000253408_0 (sequence is synthesized)
tccaactcctgggctcaagtgattctcctgactacaggaagtcccagccggaaacacagaaaggatatggagaaaattattattctgcccctacagtttcggtgacccagatgggatctc

SEQ ID NO: 887821 - DNA, 120 bp, Artificial Sequence
  ENSG00000253408_1 (sequence is synthesized)
cctgcctgctctacaattgggatccctggaaaagtgacagaatctggcaacagatgagtaagaaaggtcacttcctggcagacctcaggtatattggggacatcaagaaaagaataattc

SEQ ID NO: 887822 - DNA, 120 bp, Artificial Sequence
  ENSG00000253408_2 (sequence is synthesized)
atcaaagtctacagatattgcaggcaaagttgaaacaagccagacaagttctctttgtattcttgagagacttggaaagtctaacctgagattccttattaaaagttccagcaaaacaga

SEQ ID NO: 887823 - DNA, 120 bp, Artificial Sequence
  ENSG00000253408_3 (sequence is synthesized)
tcccgcgcccccgctgggatgatttagggactgttggctagaactgcccttgcctaccgccctactgcgggcgctcccctgtctggggggtgcttggctgggtgtggagaaggatcaatc

SEQ ID NO: 887824 - DNA, 120 bp, Artificial Sequence
  ENSG00000253408_4 (sequence is synthesized)
acagctgactcctcagaggtgacagcccctgcccccttaaaaacaagaaaagacctagcagtgtgaagccaaactgcacccccagccccggtgacatgaggaaaccgtgaggcgctcagc

SEQ ID NO: 887825 - DNA, 120 bp, Artificial Sequence
  ENSG00000253408_5 (sequence is synthesized)
ctgaggttcatcgttcatctccttcctgcttggaatcagaatgtcctcactgctgagtttctccgttttatgggattacattagtggacaaaggagtgaagcaaagcagcactgagctcc

SEQ ID NO: 887826 - DNA, 120 bp, Artificial Sequence
  ENSG00000253408_6 (sequence is synthesized)
tccaagtaaagaaagaattgttttctgtacaacctggagctgaatcatagaaggagaagacagcttgaaagataagaggccgtaaggcagaccacagaggatggggaggatttccccagc

SEQ ID NO: 887827 - DNA, 120 bp, Artificial Sequence
  ENSG00000253408_7 (sequence is synthesized)
accccagcccccatagtcagctctggttcagcgatttcagcaactctttcatgacccatctgattttgttttatcccagccctgcagagaaaggactctgcaggtcaggacttgcttctt

SEQ ID NO: 887828 - DNA, 120 bp, Artificial Sequence
  ENSG00000253408_8 (sequence is synthesized)
caacagacaaaaactcctctgccagaaaagttggagaaactagtttagaaagtcggaggatgtgaagaagtctgcctttgttctggggaccttggtgggagatgagggtgggctggtgga

SEQ ID NO: 887829 - DNA, 120 bp, Artificial Sequence
  ENSG00000253408_9 (sequence is synthesized)
accttgccgcagaccctttgggctccatgcagagctggctgcagaagaggaaggaaaggaaattggccagctgctgtctctgtgactggacctgggccaatcaagaaactgagaggagca

SEQ ID NO: 887830 - DNA, 120 bp, Artificial Sequence
  ENSG00000253408_10 (sequence is synthesized)
gggccagccggctgttgtgcctcaaacttaggcagaaacaagcaaaggcaaggatttggggctctgagtcaccctctctggaggaacaagagcttagaggaggaaatcactttttaagct

SEQ ID NO: 887831 - DNA, 120 bp, Artificial Sequence
  ENSG00000253408_11 (sequence is synthesized)
ccctttacttttacacacacgtttttattccagtaaattcaaactaaagaggaagaagtcatgaaagggcagctgccacctcaggccatggtggcggagacaaaggctatgggccggtgt

SEQ ID NO: 887832 - DNA, 120 bp, Artificial Sequence
  ENSG00000253408_12 (sequence is synthesized)
accctgcctgctctacaattgggatccctggaaaagtgacagaatctggcaacagcccccacctaggaactgactcagagcaagaagacagctccgactccctgtgatttcatccctgac

SEQ ID NO: 887833 - DNA, 120 bp, Artificial Sequence
  ENSG00000253408_13 (sequence is synthesized)
caatcagctcttctagctcactggcttcccccaacccacgaagttgtccttaaaaactctgctcccgactgctgggagagactgatttgagtaataataaaactggtctcctgcacagcc

SEQ ID NO: 887834 - DNA, 120 bp, Artificial Sequence
  ENSG00000253408_14 (sequence is synthesized)
ggcagaccaggtccggatgctgcgagtgctgcgcctgtcccgggaccctcgaccgggcgactcccccggggcgggggtggcgtgtggtctctagacaactgagggaaagtagacagaccg

SEQ ID NO: 887835 - DNA, 120 bp, Artificial Sequence
  ENSG00000253408_15 (sequence is synthesized)
tgctcaccgatttaaaagaacagccctgaaatgacccccgttacaccctgttctctttagacaagttacttccacctggagcggtttctgggcccgggtatggggatttcttcacccggc

SEQ ID NO: 887836 - DNA, 81 bp, Artificial Sequence
  ENSG00000253408_16 (sequence is synthesized)
gacccagatgggatctctgggacaccctgcctgctctacaattgggatccctggaaaagtgacagaatctggcaacagggg

SEQ ID NO: 887837 - DNA, 120 bp, Artificial Sequence
  ENSG00000253408_17 (sequence is synthesized)
gctcatgcaaccctcccacctcggcctctcaagaaactgggaccacaggcacgtgccatcatacctggccaatttttcagtttttttgtagagatggggtcccctgtattgctcaggctg

SEQ ID NO: 887838 - DNA, 120 bp, Artificial Sequence
  ENSG00000251221_0 (sequence is synthesized)
ctagaaaagcaatgactaagggtcaggacaagaacaaatacatattccaggcagagggaaagccatgaagaaacttcatctccagattctaaaacccaggacaagcccttagcaaggctt

SEQ ID NO: 887839 - DNA, 120 bp, Artificial Sequence
  ENSG00000251221_1 (sequence is synthesized)
acagccagcaagaaacagaagacctcaatcttatagatgcaaagacctgaattatgcctataatgtgagtgagcttagaagttattttttcccccagtcaagcatctgatgagaccacag

SEQ ID NO: 887840 - DNA, 120 bp, Artificial Sequence
  ENSG00000251221_2 (sequence is synthesized)
ccctggctggcatcttgtacagtcttgtgaaaccttaagaacaggatccagctaaaccatagccagcatcttgagccacagaagttgtgagataataaatatatgttgttttaagctgct

SEQ ID NO: 887841 - DNA, 69 bp, Artificial Sequence
  ENSG00000251226_0 (sequence is synthesized)
ctggggttcagtgacggagaactggggttcgtgagcagagtggtgagcgacgcagagctggggttcatg

SEQ ID NO: 887842 - DNA, 77 bp, Artificial Sequence
  ENSG00000251226_1 (sequence is synthesized)
ggttcgtgggcagagtggtgagtgacggagaactggggttcgtgagcagagtggtgagcgacgcagagctggggttc

SEQ ID NO: 887843 - DNA, 69 bp, Artificial Sequence
  ENSG00000251226_2 (sequence is synthesized)
agcgacgcagagctggggttcagcgacgcagagctggggttcatgggcagagtggtgagcgacggagaa

SEQ ID NO: 887844 - DNA, 120 bp, Artificial Sequence
  ENSG00000251226_3 (sequence is synthesized)
agaactggggttcgtgggcagagtggttggctgccccactgtcagcctgttctgaaagtaggaatgaccctcagctgagctgagatgttgctggtggagactctaagactgtggattctg

SEQ ID NO: 887845 - DNA, 120 bp, Artificial Sequence
  ENSG00000251226_4 (sequence is synthesized)
actccctgggctcaggaaggacggtgctgggaacaaggtgcagacaaggcacgacgaagctggagtgcctcataccacccccatgaaagcgacgaaggactcccagaaccattcctgggg

SEQ ID NO: 887846 - DNA, 120 bp, Artificial Sequence
  ENSG00000251226_5 (sequence is synthesized)
gcccgtgggaacgaggactttgggggcacaaggacgagctgaagaagtcttcctgattgtggttgtcagagggaggacatggcatcgtggtgggccagagtatcggcctcaacaccaccc

SEQ ID NO: 887847 - DNA, 120 bp, Artificial Sequence
  ENSG00000251226_6 (sequence is synthesized)
acttttcaggctgcagtctccaccgtggccgctgtgtgcattggagggcacttggcagcatccccagcctccccactagaaaaccagatgccaggagcatatgcgcccctcctcaaggtg

SEQ ID NO: 887848 - DNA, 120 bp, Artificial Sequence
  ENSG00000251226_7 (sequence is synthesized)
caaccaccagaaacgacgccagacattgccaaatgtcccttgagggtggggacaaatgcccctcatcccccttgaggactgcagctggaactcaatgaagagcagcgaaaggggccacaa

SEQ ID NO: 887849 - DNA, 120 bp, Artificial Sequence
  ENSG00000251226_8 (sequence is synthesized)
gccaaggcctctgccgcagcatctaacagctggaaaaggcaaagatacgggatctcctggagcctcgaacaggagccagctctgcagacaccttgattgcagcccagcaaggcccatgtc

SEQ ID NO: 887850 - DNA, 120 bp, Artificial Sequence
  ENSG00000251226_9 (sequence is synthesized)
aggcctctggcctccataacttgataataaagttgtgttttagttctttgttacaggagcaatatggagagggactaatgaactgccattgtattaaaccactggcaatcagagttgttt

SEQ ID NO: 887851 - DNA, 120 bp, Artificial Sequence
  ENSG00000251226_10 (sequence is synthesized)
gataaagcagtcaagtcaacctaagtaaaacacttaaggaccaagaaataaagtcctcacttgaggatagtgagatctgagagcagtaaagccacttccttctcgtgagaccgacccctc

SEQ ID NO: 887852 - DNA, 120 bp, Artificial Sequence
  ENSG00000251226_11 (sequence is synthesized)
ttgcagacctgcctctggcctggccccatggagtggcaggccccggtcctccgctcttcgggtcacaggtggcccagcaggctctgcgcacagcatttcggcagcacagcaatgcctaac

SEQ ID NO: 887853 - DNA, 120 bp, Artificial Sequence
  ENSG00000251226_12 (sequence is synthesized)
ttaatactcactccgggaacaagccagctgcaagctgtcaacgctaagtccccctaatgctttaattggtacttactctagtaagttcatttaaaagtccccacctctgccagatgcaca

SEQ ID NO: 887854 - DNA, 120 bp, Artificial Sequence
  ENSG00000251226_13 (sequence is synthesized)
gtgaagctgacccgacaagagggcctgacggtggcagagcaatgtgataattaatgcgtcctgctttcctctgcttgaattaatgttttcatgtcacttagacatcactcctggaaacct

SEQ ID NO: 887855 - DNA, 120 bp, Artificial Sequence
  ENSG00000251226_14 (sequence is synthesized)
ttctggttttcagtaatcagcagttctccatcccagaacccagtagatgatcaataagtggttgccgagtgaacgaatggctgagtcagagatctcgaagggtcagatttcacttggttc

SEQ ID NO: 887856 - DNA, 120 bp, Artificial Sequence
  ENSG00000251226_15 (sequence is synthesized)
gaaggttgtgtaaagaggaatacaaagcagcctgggcatcccaaatgctgccacagacgtgtcagagtggctaggagccatggcctgcacccaggcaggggccactccccagctgtggga

SEQ ID NO: 887857 - DNA, 120 bp, Artificial Sequence
  ENSG00000251226_16 (sequence is synthesized)
gcagaaggggcccagcacagccggccgcggagcccgcaggagccccggtactcgggaggagccggacgccgactccagcagcgcagacgccgccggggaggcccgttgaggagcgcgcag

SEQ ID NO: 887858 - DNA, 120 bp, Artificial Sequence
  ENSG00000251226_17 (sequence is synthesized)
ctgagtcccggtagaggaggcgccggcctggagaggctgggggcggatccgctggaccaggcggggtagcgaagggtggagttgcacagagcggcctcgagtccggactggggaaggctc

SEQ ID NO: 887859 - DNA, 120 bp, Artificial Sequence
  ENSG00000251226_18 (sequence is synthesized)
agacagggggtggaacaaaggccagaaaggaggcgggggtcagaccggggctggatcatgaaggcggcagagagctcggagggagcccaacaaggccgtgctgcggcccggttttccttc

SEQ ID NO: 887860 - DNA, 120 bp, Artificial Sequence
  ENSG00000251226_19 (sequence is synthesized)
cggtgctgaggatggcggcggcctggttttccttccggtgctgaggatggcggcggcctggttttccttccggtgctgaggatggcggcagccgcgggacggtgctgaggatggcggcgg

SEQ ID NO: 887861 - DNA, 120 bp, Artificial Sequence
  ENSG00000251226_20 (sequence is synthesized)
ccatggaaggtgctccctgcttctgcgcggatccaggccttcgggatctcgccctctgcagtgcggagaactcactggacggagacgagagaggcggcggcggctgcacagctggtgcgt

SEQ ID NO: 887862 - DNA, 120 bp, Artificial Sequence
  ENSG00000251226_21 (sequence is synthesized)
ggggactggggggcgggtgagcgctgtccttggctggggaggaagcgcagcccccggaagcccgcctggggctgcagggagaaaggagggcgccccagagccaaggctgcccgctggtcc

SEQ ID NO: 887863 - DNA, 120 bp, Artificial Sequence
  ENSG00000251226_22 (sequence is synthesized)
ctgcgaccggggcccggagaaagtgcgggaaggagagagaaggctggtggccgcctgcctccagggcgggcctccgagcagtgccctgtcccagccacagccttgcttcttttgatcctc

SEQ ID NO: 887864 - DNA, 120 bp, Artificial Sequence
  ENSG00000251226_23 (sequence is synthesized)
atcacgaccgctctccgggccaggccgtgggtgaggcccccaggccttcaggggagaagccggggtctccagagagaggtaacagagtgagaacggccgtgggtagcgcgcccctcggcc

SEQ ID NO: 887865 - DNA, 120 bp, Artificial Sequence
  ENSG00000251226_24 (sequence is synthesized)
ccgcagctctccacaggcctctggcgagctcagctgacctgccccatcagtgaggtctctgctcagctaccacctgctctgagaagccttctctgccagggtgactcattaccctgattt

SEQ ID NO: 887866 - DNA, 120 bp, Artificial Sequence
  ENSG00000251226_25 (sequence is synthesized)
gccaggactgagtgggttcctggagcggcctgggagccggcggcggtggtggctttcctgagccctgtttgtctaatgtaggcccggttcgcactgttcattcactctgctcctcagtta

SEQ ID NO: 887867 - DNA, 120 bp, Artificial Sequence
  ENSG00000251226_26 (sequence is synthesized)
ctttacggcaattaacaccaatctgttctcaaaacgtgaggtcctcttgctcagggctgtgttcctagcacgcggcccttgcctgacacacggctgacattcagcgcacatttaaacgag

SEQ ID NO: 887868 - DNA, 120 bp, Artificial Sequence
  ENSG00000251226_27 (sequence is synthesized)
tagatcaactgctccatcttcccccagaagctctgtctgtccctccacaacttggctcatgccatctcttccataagcgccgtgtgctcttctctctcagaaaaaaactatttgtttctt

SEQ ID NO: 887869 - DNA, 120 bp, Artificial Sequence
  ENSG00000251226_28 (sequence is synthesized)
gacagctcagctcaaatatcagcttctctcgaccccaggcacgagcgtgggtcccgaaaccctggtgccctccacagtgtgtgttcagtaaatgactctacgtttatccctgtagctgcc

SEQ ID NO: 887870 - DNA, 120 bp, Artificial Sequence
  ENSG00000251226_29 (sequence is synthesized)
agtgttatcaactttggcctatgttttctgaattatttttgaatctttattttgtaatccaatctattagtgacccataacaggccgtgtcatccacaattaaataaatgtgcactctct

SEQ ID NO: 887871 - DNA, 120 bp, Artificial Sequence
  ENSG00000251224_0 (sequence is synthesized)
gaaggtggagctggaatgaatttatctccatcatggcttttactgctaaaatagaggccatgaaaactgatccaaatggctagatacgaagatgcaacagatgaaaacaaactggcccac

SEQ ID NO: 887872 - DNA, 120 bp, Artificial Sequence
  ENSG00000251224_1 (sequence is synthesized)
aaatattgggactatttttgtttagcagatcttttcccatatttatacactgcccaggtaaatataagccttgcctctgccaagtctgaaataatatgtaccagatattcaggacaaaat

SEQ ID NO: 887873 - DNA, 120 bp, Artificial Sequence
  ENSG00000251224_2 (sequence is synthesized)
gtcctccttagcataaacaagttaatttttttaaatccaaaatgaatttatttctgaaggtacaaactactttgttcagcatacctcctgtcctgactaaataaaacaaattttatggaa

SEQ ID NO: 887874 - DNA, 120 bp, Artificial Sequence
  ENSG00000253407_0 (sequence is synthesized)
tgtgcattgtgacataatgtgtgttgaagatcaccttgtcctcgccattaactctccagtatcatctactgtgctgtcgttctctcacatggcctttggtcattggttcagacaggctaa

SEQ ID NO: 887875 - DNA, 120 bp, Artificial Sequence
  ENSG00000253407_1 (sequence is synthesized)
gaagacaaatggagatttgcagaagaaaatgtcatatgggttatcctggtagtctccagagaattaactgagtcatccacattatttagctccatctccatccttcatgtgataggaaac

SEQ ID NO: 887876 - DNA, 120 bp, Artificial Sequence
  ENSG00000253407_2 (sequence is synthesized)
agagttttgaagtcgaggacataaggcagcatcaccaaatgctctccaggagagttgctacctctgccaaaggcaaaaaggagatagggaagctgccatagcatctgttggttccaggaa

SEQ ID NO: 887877 - DNA, 120 bp, Artificial Sequence
  ENSG00000253407_3 (sequence is synthesized)
gaaaccaccttgcctgtggcctggggatagaaggatgacacctcatctagttactttatgcatggcagttctgcactagcaaaaactcagaggccaacccccagactggagcctgaaatg

SEQ ID NO: 887878 - DNA, 120 bp, Artificial Sequence
  ENSG00000253407_4 (sequence is synthesized)
agtgcaaatgctggcagaaactcaatttaaccagaaccctacttgtaagggagtctgggaaatgtaatttttagattactagttttacaaatataaatgtatatggaaggaggttggaat

SEQ ID NO: 887879 - DNA, 120 bp, Artificial Sequence
  ENSG00000253407_5 (sequence is synthesized)
ggaggttgagtgctgatctgccatatccacatcatatctcctttagactctgacacaagaggtggcctttccctgaaccctatgttttagaagatcctgaataccacagatgcaatatga

SEQ ID NO: 887880 - DNA, 120 bp, Artificial Sequence
  ENSG00000253407_6 (sequence is synthesized)
gtaaatttataaaaacacatttgtgctcctatctcttgggaacctatattcaacaatggcacagcacaactcataaaccaaagcattagctcacagacattgttcgggcctcagagaagt

SEQ ID NO: 887881 - DNA, 120 bp, Artificial Sequence
  ENSG00000253407_7 (sequence is synthesized)
gtttctcaaggtcacttaccatatattcttgaaaggaaagatggccaagtccaaattccatgtaagtttgtgaatggagccacttcagactttgggggtggacacaactttgcacagaag

SEQ ID NO: 887882 - DNA, 120 bp, Artificial Sequence
  ENSG00000253407_8 (sequence is synthesized)
acctgaaaagtgaaaatatttgggaaagagaaaagataaaattactaccttgtgaattttttcctctcatgaataattttttggcattattaaagcaccagatttccaggaatctcaaac

SEQ ID NO: 887883 - DNA, 120 bp, Artificial Sequence
  ENSG00000266473_0 (sequence is synthesized)
acctcccgcaggctcccgggccaggcgtgcaaggccccctctcctgccagggcccaggacgctgcgggccccagcggaggggaaggggactaagtaggggaagaagctgtaaacagcccc

SEQ ID NO: 887884 - DNA, 120 bp, Artificial Sequence
  ENSG00000266473_1 (sequence is synthesized)
actaagtaggggaagaagctgtaaacagccccagcgtccgggcctcgcctcgaagagccgcgcttcccaggcccagccgcgggccgcccaggcccccagcctgccccggggccgccgcgc

SEQ ID NO: 887885 - DNA, 120 bp, Artificial Sequence
  ENSG00000266473_2 (sequence is synthesized)
ccatcttggatccacttgtcaacgtccccacaaagcattatggacgccccgcgtctgcattgaatcaacccgaggtttccttgccgcccgcggcgcggcgcggagctgctcgcggattta

SEQ ID NO: 887886 - DNA, 120 bp, Artificial Sequence
  ENSG00000266473_3 (sequence is synthesized)
tttgtgcgcgtggatgtgagcgtttctgctcctgcggccgcgcttccaggaagcccgcgagcggccggggtcgccttcagaggccgcgcagaccagctccgcacccgccgcccggagagg

SEQ ID NO: 887887 - DNA, 120 bp, Artificial Sequence
  ENSG00000266473_4 (sequence is synthesized)
tgcctctgccctgggaaaccgccccggggccgttgggctccgggaactgggaggacgccgtgtccccgagtccaccagcgtcgaagcacgatttaaaaaaaaaaattgagccaaatgcaa

SEQ ID NO: 887888 - DNA, 120 bp, Artificial Sequence
  ENSG00000228192_0 (sequence is synthesized)
acggtgggatttctttccgtgctcgcgcgttcagccccaagtctcagggccactcgtctgggaagttgtagaatctgtatagccaacctacacaacctccaaggggaacagccagtgtct

SEQ ID NO: 887889 - DNA, 120 bp, Artificial Sequence
  ENSG00000228192_1 (sequence is synthesized)
gccagatacacgccacgcttgcaccagcttggaggaaatgtaaggagggaagagaggagacgctgacatcattgaatctggagtcatctgagccagtgacttgtcttcccagatagactt

SEQ ID NO: 887890 - DNA, 120 bp, Artificial Sequence
  ENSG00000228192_2 (sequence is synthesized)
cagtaaatgtcaaattaatgaagacaaaatggcaataaggaaaaggagttccaggcactgtgacagatttttttttaaggttgcctgttttaacactgaaaacaatcagcatggtctgaa

SEQ ID NO: 887891 - DNA, 120 bp, Artificial Sequence
  ENSG00000228192_3 (sequence is synthesized)
agaagattgtctagaggaagaaaggaaaagataatgagattttttgccactgccttgaggatccctgattcctattgattttacctgcccttggacctgtccacctctatcttcacctcc

SEQ ID NO: 887892 - DNA, 120 bp, Artificial Sequence
  ENSG00000228192_4 (sequence is synthesized)
acctccctgatccggtctctaatcaactctcacctggacaacagaaatggcagcccaaattgtctcccacatcctgtcttaatccctctggtctctactaaactctgcagcctgagagaa

SEQ ID NO: 887893 - DNA, 120 bp, Artificial Sequence
  ENSG00000228192_5 (sequence is synthesized)
gtagactcagagaaaacttgcgaagtttaggatggagctgaagagactgggttccgtcctacgataaggcaaaggcacaccatgatgagaagtaccaggacaggcaggatcacagccaga

SEQ ID NO: 887894 - DNA, 120 bp, Artificial Sequence
  ENSG00000228192_6 (sequence is synthesized)
gccactgctgagggggagagactccccacagatggggctgaaacagaaaccaccaacgactgacctcagggagatgtctaagagcttctggcatgcctcagatggcaggcggctccagca

SEQ ID NO: 887895 - DNA, 120 bp, Artificial Sequence
  ENSG00000228192_7 (sequence is synthesized)
ccatcacctctagggagagagctccggccaagaggctctttgcttctctgataactcaagccctggatagcattaaagataactgaggctgggaacggtggctcacgcctgtaataccag

SEQ ID NO: 887896 - DNA, 73 bp, Artificial Sequence
  ENSG00000228192_8 (sequence is synthesized)
cactttgggaggcagaggcaggaggatcatctgagatcaggagttcaagaccagctggccaatgtggggaaac

SEQ ID NO: 887897 - DNA, 120 bp, Artificial Sequence
  ENSG00000228192_9 (sequence is synthesized)
agagaaaacttgcgaagtttaggatggagctgaagagactgggttccgtcctacggtgggatttctttccgtgctcgcgcgttcagccccaagtctcagggccactcgtctgggaagttg

SEQ ID NO: 887898 - DNA, 120 bp, Artificial Sequence
  ENSG00000228192_10 (sequence is synthesized)
tagaatctgtatagccaacctacacaacctccaaggggcctttggacaggaccatcagctttttccttgccttcggacttgaattaaacatcatctcttccttggcgtcaagcctgctgc

SEQ ID NO: 887899 - DNA, 120 bp, Artificial Sequence
  ENSG00000228192_11 (sequence is synthesized)
catcagactggaactaaaccatcagctctcatgggactccatcttgctgacttatcctgcagatcttgggatttaaccgcctccataatcacgaatcctccctccaggtcactgggagct

SEQ ID NO: 887900 - DNA, 120 bp, Artificial Sequence
  ENSG00000228192_12 (sequence is synthesized)
tcaattccttagaagaaagaaagagatgactcctgcttcatagtccaggaaaatccccacacaccgtggaggctctttaaggcggaaggaggtctgcggggatgtgagagcttcatactc

SEQ ID NO: 887901 - DNA, 120 bp, Artificial Sequence
  ENSG00000228192_13 (sequence is synthesized)
acaaacaaacaaacaaacaaacaaaaactgagatgttcctctctcgggaatggtttggatggtcctgcctcaagatgatgacttaaacaaacttcttgaccacaatctcatcctgcccta

SEQ ID NO: 887902 - DNA, 120 bp, Artificial Sequence
  ENSG00000228192_14 (sequence is synthesized)
cctataattcaatggaaaaataagcccgggacttcagaggactgaaggcactctcctcactacacacctccagtcttcccaggagcacctgcctgtttacccctgtcaatcctcactctg

SEQ ID NO: 887903 - DNA, 120 bp, Artificial Sequence
  ENSG00000228192_15 (sequence is synthesized)
ctctagaagagcaggcagcaacctctttgccctgagcactgtccacgggggcaaagcaatttctatgatgccgcagcagtaggcctgaagcctaggcaggagagaaaggggaaaagaaag

SEQ ID NO: 887904 - DNA, 120 bp, Artificial Sequence
  ENSG00000228192_16 (sequence is synthesized)
aggaaatagaggagaggaaacgagcagaagcgggctatgggtagaagtagttaagagcctaagctgggagtatgtccttgctcaatgctgtgtgacccaaagcaggagactgagcacctc

SEQ ID NO: 887905 - DNA, 120 bp, Artificial Sequence
  ENSG00000228192_17 (sequence is synthesized)
tccctcatctgtaaaatgtgtgcatgacaggactccttatctctttgaggtttggagagatttaaagaggtcagtcatataaagcattcagtctcctaagtagccgggattacaggcaca

SEQ ID NO: 887906 - DNA, 78 bp, Artificial Sequence
  ENSG00000228192_18 (sequence is synthesized)
tggctagtttttgtatttttttgttcgtttcaaggatcattaaaaggttcaggccaggtgtggtgactcacacctgta

SEQ ID NO: 887907 - DNA, 120 bp, Artificial Sequence
  ENSG00000228192_19 (sequence is synthesized)
tagcactttgggaggctgaagcaggagtatcactacagctcaggagtttcagaccagcctgggcagcatggtgagagctcatctttattataaataaaaaagaaaaaataagtaaaaggt

SEQ ID NO: 887908 - DNA, 120 bp, Artificial Sequence
  ENSG00000228192_20 (sequence is synthesized)
aaaataagtaaaaggtttgaacccttggacccattaattctactgccagaagtacattattaaaaaaaaaatcaaaatcactttccaaaatacgttcaaagatgttcattgcacccttca

SEQ ID NO: 887909 - DNA, 120 bp, Artificial Sequence
  ENSG00000228192_21 (sequence is synthesized)
ttataatatgaggaaaatttggaaagcatccagatgcccagaaacagggctttgattaattttattattctatagccacatggcaaaatactatgcagcccttaaaatcatattacttag

SEQ ID NO: 887910 - DNA, 120 bp, Artificial Sequence
  ENSG00000228192_22 (sequence is synthesized)
ggacatgggcaaagaaaacaaatgctcatgatatcataagtggaaaaatatcctgggcacaagaatacacatgtgtaaacatacatgctcagagatacatatatacaaaaaagtcttgca

SEQ ID NO: 887911 - DNA, 120 bp, Artificial Sequence
  ENSG00000228192_23 (sequence is synthesized)
agaaagatacaaaaatgttagcagcagttctctctaatttaagctattataggccatttttcagtttcctttaaatattttggatttttttcaaattttctacaatatatatgctttatt

SEQ ID NO: 887912 - DNA, 120 bp, Artificial Sequence
  ENSG00000228192_24 (sequence is synthesized)
cttagaatttaaaaaaattgaaaattcctcaaaaagttcctgctagggtaggaatttcctcaggaaccaccagcgccttcaaacctgtttccaccccagcttttacttgttatgaccaca

SEQ ID NO: 887913 - DNA, 120 bp, Artificial Sequence
  ENSG00000228192_25 (sequence is synthesized)
gctgtggtcttctcttggccaagggccatgttgtggatggttcaggacacattccccagtgtgctgtccctgactctgctagacactgctatttggaagagcccagctttttccagagag

SEQ ID NO: 887914 - DNA, 120 bp, Artificial Sequence
  ENSG00000228192_26 (sequence is synthesized)
tgggcctctgacagggatggaagtaccctgccttgaggttctctccacttggcccagggctctgggaaccatcccacctatctgcacaccagcagggcctctgccagggtatggtcctgg

SEQ ID NO: 887915 - DNA, 120 bp, Artificial Sequence
  ENSG00000228192_27 (sequence is synthesized)
ccatggccctcttcccccatagcctcctgtgatgaacaggggcagctgttaatggaacttgtcctctctccactctctccccacgctcctcctaatgggataagccagtctctagcttta

SEQ ID NO: 887916 - DNA, 120 bp, Artificial Sequence
  ENSG00000228192_28 (sequence is synthesized)
ttctcagacatttaaaaattcacccatagcaataactgtatcacatgattcagattcctgtgggcacctcggtccccttttaaaaattacttttcagctgggcatggtggctcatgcctg

SEQ ID NO: 887917 - DNA, 120 bp, Artificial Sequence
  ENSG00000228192_29 (sequence is synthesized)
gcagaagcaactatcaccatactatgaagtagcacaagcccttcaccagatacagtcgcccaatcttggaccatccagccccaagaaccatgagctaaataaacctttttccttgataaa

SEQ ID NO: 887918 - DNA, 120 bp, Artificial Sequence
  ENSG00000225112_0 (sequence is synthesized)
cgaacaaaaccatctggactctgctgcatggccccgtctgtggctgctgtagctgcccgtgggaaggccctgcctccagcttctgcccttggctgcgaaccatggagtcccggctcccag

SEQ ID NO: 887919 - DNA, 120 bp, Artificial Sequence
  ENSG00000225112_1 (sequence is synthesized)
atgatgcactagacatttttgtggcagggtgcagaacaatggattccccctgatgcttgctttaagcatgaatttttgttttgcaaatgcaatcctgggaaggaagggagtccaccaatt

SEQ ID NO: 887920 - DNA, 120 bp, Artificial Sequence
  ENSG00000225112_2 (sequence is synthesized)
agtgggaacagctcttactgactaatggatggttaactttacaagtggaatgatttttacaaatgagctacaatatgactgtaagtagaaagtaaaaaagcaaatctttttcatcctgca

SEQ ID NO: 887921 - DNA, 120 bp, Artificial Sequence
  ENSG00000225111_0 (sequence is synthesized)
ccaatgctgaccatcttgaccagaatagaagagggaggcaaaatgtgtgtatccctgagctggaagttcaaccaggcagatttcatgggcttctttcacacaagaaggcaataccagaag

SEQ ID NO: 887922 - DNA, 120 bp, Artificial Sequence
  ENSG00000225111_1 (sequence is synthesized)
acagatgaacaacttgatgtcttcctttaaaaaaaaaatgacatgtggccttcatagcttttttccttccccttgatgtaaatctcaagtgtttaaaaggaggaatgagtctaaatcata

SEQ ID NO: 887923 - DNA, 120 bp, Artificial Sequence
  ENSG00000225111_2 (sequence is synthesized)
gaaaatctctatttagattgggataagctaattagctattatttattgatcccttgctgtaagtcagaaactatattcgatgctttcaatgtattaaatctgatccttctctcaaccctg

SEQ ID NO: 887924 - DNA, 120 bp, Artificial Sequence
  ENSG00000283458_0 (sequence is synthesized)
cccattacttccacctcccatgaggactgcacctgcggcagcgattttatgtgaacttggattactgtatggaaatggaggagtgagaaagtgtgggaatcataaaagaaggcagaacca

SEQ ID NO: 887925 - DNA, 120 bp, Artificial Sequence
  ENSG00000283458_1 (sequence is synthesized)
aaagacagagggatcttgggccatgagtcacagcaaggaaagcctcccaccaaacatctgcactggactcctacaggaacaagaaatgaactatcgtgttcagcccctgagacttgggct

SEQ ID NO: 887926 - DNA, 120 bp, Artificial Sequence
  ENSG00000283458_2 (sequence is synthesized)
attgtctaccctacctaatagagcagagatgtaaatattattcttattttagaggtgtgatgcctcagctgcaatgggtgagaactactcctcatttattctcttccaaggcaataaaag

SEQ ID NO: 887927 - DNA, 120 bp, Artificial Sequence
  ENSG00000283458_3 (sequence is synthesized)
agaatggaccaaagacagtctgtcatcacatctagtcaaaagagctaatgtcgcagtacaactcttcaaaagaaaaagaaaaaacaagaaaaaagtaataaacagatgtgttctgcttga

SEQ ID NO: 887928 - DNA, 120 bp, Artificial Sequence
  ENSG00000283458_4 (sequence is synthesized)
attttatgtgaacttggattactgtatggaaatggagaattataatgtagcaccttcaacagaaagacaatcaaaggtatacatcctgacaggttcagacccctgaaggatctgttagac

SEQ ID NO: 887929 - DNA, 120 bp, Artificial Sequence
  ENSG00000283459_0 (sequence is synthesized)
ttgctcacaaatttgtaatttagcagggatcagcagagatggcatattctgttccatgcagtgtcagatggaatagttccagtgaggatagagtattcatttacaagacggctcattcac

SEQ ID NO: 887930 - DNA, 120 bp, Artificial Sequence
  ENSG00000283459_1 (sequence is synthesized)
atggcaaaactgtcatgtcagcctgggaccttgattcccctccatgtggactttgtcatgaggttgcttggacttcttcccagcatggctgctgattcccagaacaagtgttccaagggg

SEQ ID NO: 887931 - DNA, 120 bp, Artificial Sequence
  ENSG00000283459_2 (sequence is synthesized)
ccctgggagaagctgaaaagttcttatgacctaggcttgaaagttctagaatagcactcccaccacattctactggctgagcaagttgctagagccagacaggttcaagaagaagaaaat

SEQ ID NO: 887932 - DNA, 120 bp, Artificial Sequence
  ENSG00000283459_3 (sequence is synthesized)
tagactccacctctcagaatgaggaagaatagagaattcgtgacagtcttcaatctgccatatctctcccaggaaaggccaggagacagacatctactctggatagcttggaagacagtg

SEQ ID NO: 887933 - DNA, 120 bp, Artificial Sequence
  ENSG00000283459_4 (sequence is synthesized)
gatacattggagtttatggaacgcctaagaaccaagtgtccttaggccctaggttgaaaattcctgggttaaactgtcatcctactgaagataaaaaatggactcctgcacccacctcct

SEQ ID NO: 887934 - DNA, 120 bp, Artificial Sequence
  ENSG00000283459_5 (sequence is synthesized)
cctacaagctagactaaactaggcatgccattttatgctatatgtctcctctttcctgcagctcctgttgcaattcaataatcatttgtgaaattatatatttaattgacagcacactag

SEQ ID NO: 887935 - DNA, 120 bp, Artificial Sequence
  ENSG00000283459_6 (sequence is synthesized)
actaagctcctcatgaaagcaaaggccaagcttgtcttacccaccctcaaatccccaacatcaagcccccctttgctgcatagtatgccctcaatacatattagttgaattaattacatg

SEQ ID NO: 887936 - DNA, 120 bp, Artificial Sequence
  ENSG00000283459_7 (sequence is synthesized)
atcattcgatggaatttccagttgtgggtttccaagctcctactccagccatctgaccagaattaagaacaggaacttgatcccaggcagaggtttccagacagcaagacatctaggcat

SEQ ID NO: 887937 - DNA, 120 bp, Artificial Sequence
  ENSG00000283459_8 (sequence is synthesized)
aaaacccacacagccaacgctttgctccctggcctcgctctgggtcccacagattgcacgtgttttgcatatggaacctcattgacatcactgggaatttcacagatggaacaaatgaga

SEQ ID NO: 887938 - DNA, 120 bp, Artificial Sequence
  ENSG00000283459_9 (sequence is synthesized)
aggtggcaatagaagtttgcagcatgaagctgtcaagaagaggtgctttgtgactaggagaacagagagcatgtgccctgatgaatgagaggcaagtggcgtgctgacgggggacagtca

SEQ ID NO: 887939 - DNA, 120 bp, Artificial Sequence
  ENSG00000283459_10 (sequence is synthesized)
ttggctgccctttgaacacattggggtcaaggccctgtccagctcacttggtccccaacattggaagcttgggctcgttccataatagcagcctggcccgactttccatcccgcatcccc

SEQ ID NO: 887940 - DNA, 120 bp, Artificial Sequence
  ENSG00000283459_11 (sequence is synthesized)
ctcctcacccctggctcctgctctctgcttccctcccaccagtccccagacaaaaacaaaaggcccattacgaagttattagcttcgtctcgcatatcccacggagtaagacaactgcca

SEQ ID NO: 887941 - DNA, 120 bp, Artificial Sequence
  ENSG00000283459_12 (sequence is synthesized)
tgcccacatctaatttctgtcactgtgtttacagtacaaggaacccagagaagaaagcagtggagaaaagtagtagggttggggttgtggggggacagtggaggaggcaaaaaataaatg

SEQ ID NO: 887942 - DNA, 120 bp, Artificial Sequence
  ENSG00000283459_13 (sequence is synthesized)
ccaaactccttcaaagggcgacattcctccttgcggtttgcaaacacttcctctttccccagccatcctgtaatcaggctccagtgctcaccagaggagtgtttacatccaacaccatta

SEQ ID NO: 887943 - DNA, 120 bp, Artificial Sequence
  ENSG00000283459_14 (sequence is synthesized)
ccggcaggggagacaggcgaaattaaggcctctggtctctgttctctgaggccccattatcttttccctcccctttaccccctttcatcaaacgcctccaatatatgaaggggtaaaagc

SEQ ID NO: 887944 - DNA, 120 bp, Artificial Sequence
  ENSG00000283459_15 (sequence is synthesized)
ctttaatgggattttgaagatcttaaaagccaggcggtttgtttaaaaaggaaaaagaccaagagtggagcatagcctgggatccctgggtccatttcttgaaaaagggagcaaactttg

SEQ ID NO: 887945 - DNA, 120 bp, Artificial Sequence
  ENSG00000283459_16 (sequence is synthesized)
ttccattttttcccatctgccaaatcaagtgttgggtttgaggtttgtcttggatggacaagcagaccacacagaactgccagtgcacagccccctttccagggatgctgagaactcagt

SEQ ID NO: 887946 - DNA, 120 bp, Artificial Sequence
  ENSG00000283459_17 (sequence is synthesized)
ccacggcactctccaggcctggcatcttcccccccatctctccattggagccatccccaagacccaaattggcatcaacatccccgaccacagttagctgagcctaatggtggccaaggg

SEQ ID NO: 887947 - DNA, 120 bp, Artificial Sequence
  ENSG00000283459_18 (sequence is synthesized)
aacaggagagaagggagacagcagtcaaggtcaaaggaaatattgcatgttggcaaatccaatgggacggatgttgggaaagccccagtcatacacaacctcaaagtttggttaagagag

SEQ ID NO: 887948 - DNA, 120 bp, Artificial Sequence
  ENSG00000283459_19 (sequence is synthesized)
aaactgggttttccaaagcaatggtgctatttggtattctctttccacttatttgggctagttaggcattgctgaatcagcgttagattggcttgggatgtgttgcgccacagttgtctg

SEQ ID NO: 887949 - DNA, 120 bp, Artificial Sequence
  ENSG00000283459_20 (sequence is synthesized)
gaggagccatactgggttgaagagtgatttcttaagaacattgcttctgcatggtgcattgcattgagccgtgctgtattgaagatgttgttgaatttatggtcaaaatttgagtagaat

SEQ ID NO: 887950 - DNA, 120 bp, Artificial Sequence
  ENSG00000283459_21 (sequence is synthesized)
attggcatgtaattttgtattgccatagtattattttgatctctggtgccacgtaggctgtagtattatttcagaagacatgttgagatgcaatactgtgtttgttcaggactgttgttg

SEQ ID NO: 887951 - DNA, 120 bp, Artificial Sequence
  ENSG00000283459_22 (sequence is synthesized)
agttgcactataatgtcacattggcgtgtggtattgtgtgggtaagcggtgtggtaacaccatcaagcactggttctgttcatcagaggaactgactctcctagcaataaaacccaatct

SEQ ID NO: 887952 - DNA, 120 bp, Artificial Sequence
  ENSG00000283459_23 (sequence is synthesized)
cccctcccactgttgccacgtggtccctctgcacagaagctgatggctttcaggagacaggagacagaaccgtgtctctgggaataccaagggagaccttgaggtcatcagagctcaatt

SEQ ID NO: 887953 - DNA, 120 bp, Artificial Sequence
  ENSG00000283459_24 (sequence is synthesized)
actcagactgatgattggctgaacagcaagtcaaaatccctgggactcttctacaaagtgcaatgggtcttgaattactgcactctctggtttccctcatggcaacagcctcccctcaaa

SEQ ID NO: 887954 - DNA, 120 bp, Artificial Sequence
  ENSG00000257614_0 (sequence is synthesized)
gtataaggatttgctacaattagatgcttgtgtactattggccagtatgacacagatagtttcttttcttaaactaaaaagaaataaaagagaagaaaagacactggtgaatgtggaaaa

SEQ ID NO: 887955 - DNA, 120 bp, Artificial Sequence
  ENSG00000257614_1 (sequence is synthesized)
agccaacaggcactttggcaaccaaagaaaaattttgagattgcaaaagtccttcagggcagcgaccacatcttctacttttgaggcagtgtgatacaatgaagaaaccatggaagtgga

SEQ ID NO: 887956 - DNA, 120 bp, Artificial Sequence
  ENSG00000257614_2 (sequence is synthesized)
taacttcactgagcctctgtttccatatgataagattcatgcccataaatgtgtaataattggattattttatactgtctattaaacctgtggtatgtatttactattttttttttattt

SEQ ID NO: 887957 - DNA, 120 bp, Artificial Sequence
  ENSG00000283546_0 (sequence is synthesized)
cagcagtaagaatcaccatttgagttgtctccttttacaagagggttagagttggtgatgcggttaccaagttgactcttctccaatcatgctgacatgaggtcctcaacttgggtcctg

SEQ ID NO: 887958 - DNA, 120 bp, Artificial Sequence
  ENSG00000283546_1 (sequence is synthesized)
ccttctttctgcccaccttgcccttaaagtccttgagttctgattcagtgctttggattcatcagctaagtagtgtccttgaggaagcaaatgacccaggatttttctgaagaaaatgat

SEQ ID NO: 887959 - DNA, 120 bp, Artificial Sequence
  ENSG00000283546_2 (sequence is synthesized)
agattagagtcaaagtcactgtatcttctactattttcttcttgatttgcatccagaattgtctctgtactaactagattttaattaaaaggaagtggaatagtaagatataaatttcca

SEQ ID NO: 887960 - DNA, 120 bp, Artificial Sequence
  ENSG00000283546_3 (sequence is synthesized)
cttataaaattagcatataggtgggagtattacagttttcatgaaaagcaatttgagagactgttaagaacttaaaagatgaacatagatacctatcctaaggaaataattagagagacc

SEQ ID NO: 887961 - DNA, 120 bp, Artificial Sequence
  ENSG00000283546_4 (sequence is synthesized)
aattaacatatcgacagggctatttattattctgaataattgaaaaactaaatgtacaatgtccaatattagatgaatgaataaattatagcatactaatataattacagtatactcaga

SEQ ID NO: 887962 - DNA, 120 bp, Artificial Sequence
  ENSG00000250643_0 (sequence is synthesized)
gtagagacaaaaataaactgtgttgctcaggccagtctcaaactcctgagcttaagtgatccttctgcctcgacttcccaaagtgttgggattacagaacagagggaatttcctggaagg

SEQ ID NO: 887963 - DNA, 120 bp, Artificial Sequence
  ENSG00000250643_1 (sequence is synthesized)
tgtccccattggggaagtgacccaaagtctcatgtgtctctgggagataaatcaagatcaaggctagggccttgggactcagcctagccctgtgaacaatatctcacctggactttcaaa

SEQ ID NO: 887964 - DNA, 120 bp, Artificial Sequence
  ENSG00000250643_2 (sequence is synthesized)
agatggggtgaaggtggaccacaccgggtgttctcagtggcttcccagggcagctgcctcaattagaggatttgctagtacgtagcagagtgtgcaataaatcttattgtttcattagga

SEQ ID NO: 887965 - DNA, 120 bp, Artificial Sequence
  ENSG00000250579_0 (sequence is synthesized)
ggggactcggcgggactccagctactgcagtggctccgcgggctcccacctccgggccgcaccggcgccgccagaggccgggacacctgcagcccgcggagtgcggtctggccgcgcctc

SEQ ID NO: 887966 - DNA, 120 bp, Artificial Sequence
  ENSG00000250579_1 (sequence is synthesized)
tgtgcccgggcacagctgtggggacactgggtgcggaaaaccgggcgccaggacgtgggagagccgcggacctgcctttaaaggcgcgtgcctcgctctggagtttgcggagcgatcgga

SEQ ID NO: 887967 - DNA, 120 bp, Artificial Sequence
  ENSG00000250579_2 (sequence is synthesized)
gacggggaggctgaggaggaaactcttcccccgcgccatttgccccgagatgtggcggcgctcctggccccgcggtcacggccaccctcaactggccaggccgcggaggccggtgactgg

SEQ ID NO: 887968 - DNA, 120 bp, Artificial Sequence
  ENSG00000250579_3 (sequence is synthesized)
ctgctgggtgcaatccctagggaggtctcagggctgcggatgggcctgggtctcggccgccacgggggtcgatcgggctactgtgtggacagggtggccaaggaggcagcaggtgtgcgg

SEQ ID NO: 887969 - DNA, 120 bp, Artificial Sequence
  ENSG00000250579_4 (sequence is synthesized)
tcaacagcctggccagaattctgctgtagctggatggggtgtgtgagcgcgcgggtgtacatgtgcctgggtgtgcgcgggtgtacatccacacctgactgcgtgtgcgcgagtacacgc

SEQ ID NO: 887970 - DNA, 62 bp, Artificial Sequence
  ENSG00000250579_5 (sequence is synthesized)
gtgtacatccacacctgactgcgtgtgcgcgagtacacgctgtgagccctaccctcgcggtg

SEQ ID NO: 887971 - DNA, 120 bp, Artificial Sequence
  ENSG00000250579_6 (sequence is synthesized)
gtgggttcgtggtctcgctggctcaggattgaagctgcagacctaggcggccagcctgggcttgttttcccggtagtactgggttctgagagagagtaactgcatggaaggccttgaaga

SEQ ID NO: 887972 - DNA, 120 bp, Artificial Sequence
  ENSG00000250579_7 (sequence is synthesized)
gggttctgagagagagtaactgcatggaaggccttgaagactgggcttgggcctgctgtacccacatgactgcttctgccacgttctactggccaagctctatgggcagctcagacacaa

SEQ ID NO: 887973 - DNA, 120 bp, Artificial Sequence
  ENSG00000250579_8 (sequence is synthesized)
gggaagagactctgctgcttcctgggagaagctgcaagaccacattgcgaaggaacatgttgttgctgctcccatgttaccttcgtcagtgacctgagatgcagactggatctagggaat

SEQ ID NO: 887974 - DNA, 120 bp, Artificial Sequence
  ENSG00000250579_9 (sequence is synthesized)
ggcgcctccacgagggtcttcagaggaaaggcatgtgtgtggtctgtggcctgccagcaggagagctgggggaggccggcatcttgaggctgttggcagcaagtgcaggcagaggcctcg

SEQ ID NO: 887975 - DNA, 120 bp, Artificial Sequence
  ENSG00000250579_10 (sequence is synthesized)
ggccagaggggaggtggcagggctcaggtgccctgtgcttcctcggagaaggcacttgggatgaaggcttagtcctgcctggtaaacctggaggcctgtgaacactggggttagccccaa

SEQ ID NO: 887976 - DNA, 120 bp, Artificial Sequence
  ENSG00000250579_11 (sequence is synthesized)
caagggaggaggttcccgctgcctcactaagaacagcctgctgctacactcaccctgacagctgctccgctcccagtgaaccccaccccgagaaggctcatcggggccacggacctccct

SEQ ID NO: 887977 - DNA, 120 bp, Artificial Sequence
  ENSG00000250579_12 (sequence is synthesized)
cagcgctgcattcagaatccctcaggagttgtaaacttcctgatttctggacccatcaccagagcccaacgtcacgggtaagggttagggcctggatgtcaggattcaatttggagaatt

SEQ ID NO: 887978 - DNA, 120 bp, Artificial Sequence
  ENSG00000250579_13 (sequence is synthesized)
ccccggggcaattccaccattgcagacactgaaacggagctggggcagaagaatcacaccaggtggctcgagctgagcggctgggagtgtggcagtgaagacactgagtgtccgtcaggg

SEQ ID NO: 887979 - DNA, 120 bp, Artificial Sequence
  ENSG00000250579_14 (sequence is synthesized)
aagatggctctgggtacaacagcgtgcccagccccttagatattctctgcacggaagtggccccaccctgaagcgcgtgtgcagtgactgttcatgcttctgtgtgtgtgcaggagtagt

SEQ ID NO: 887980 - DNA, 120 bp, Artificial Sequence
  ENSG00000250579_15 (sequence is synthesized)
ttggttggagtgtgcatatgcgaatgtgtgtgtatggaagtctatctatctgtaatgtaaagcagttgcgtaatgcaaatgtgtgtgtatggacatctatctgtaatgcaaagcagttgc

SEQ ID NO: 887981 - DNA, 120 bp, Artificial Sequence
  ENSG00000250579_16 (sequence is synthesized)
gtaatgcaaatgtgtgtgtatggatgtctatctatctgtaatgtaaagttcccaagtattgtgtatatcattgtttgagtttttaaattctaagataatttctagagaaaaagatgtacg

SEQ ID NO: 887982 - DNA, 120 bp, Artificial Sequence
  ENSG00000250579_17 (sequence is synthesized)
ggtgattcctggtgaaaagcagggaccgtgggcctcatattgagacacatttcacgctgtttagattgtaatggcaattatgtatgacttttgtacgttttttaaaaagccaataaaata

SEQ ID NO: 887983 - DNA, 120 bp, Artificial Sequence
  ENSG00000250579_18 (sequence is synthesized)
agagggaaggcgggagacagcgggcagcgccagaggaggaggacgcgggaagatggagctgcccacggcctgcagtccgtgcctctctgcccgcgcggggaccacacagttggagaggct

SEQ ID NO: 887984 - DNA, 66 bp, Artificial Sequence
  ENSG00000250579_19 (sequence is synthesized)
cccagctggcttcacctagtggatccccgcaccggggcgcaggtggagctgcctgccagtcctgcg

SEQ ID NO: 887985 - DNA, 65 bp, Artificial Sequence
  ENSG00000250579_20 (sequence is synthesized)
atgggactgggcgctgtggagcagggggtggcgctccttggggaggctcgggccgcacaggagcc

SEQ ID NO: 887986 - DNA, 70 bp, Artificial Sequence
  ENSG00000250579_21 (sequence is synthesized)
tgaagggctcctcaaatgccgccaaagtcggagcccaggcaggggaggtgccaggactgcgcgcgtggga

SEQ ID NO: 887987 - DNA, 120 bp, Artificial Sequence
  ENSG00000250579_22 (sequence is synthesized)
tgtcacctctcagtaggactgcgcgcgtgggagtgcatgtttgcacacgtgtgtgtgtgtggcgctccccatccgtggctgctttcccatcacacaccttatgtggatcctgggccttca

SEQ ID NO: 887988 - DNA, 120 bp, Artificial Sequence
  ENSG00000250579_23 (sequence is synthesized)
gctgccctttgtttggttccagtgtccttcacagccagcttagcttgacgttgcctcttttgcacactttggagagggggatgaatgggggaaatggtgtcttgggctctggctttcttt

SEQ ID NO: 887989 - DNA, 120 bp, Artificial Sequence
  ENSG00000250579_24 (sequence is synthesized)
gcccagcctgtcgcgagtctgtgggtacccagggagagctcccagcaggcgccctgctagggctgtcctgaagccccagaccccaggtaggggcagtagaaccgcctggctgtgtatggg

SEQ ID NO: 887990 - DNA, 120 bp, Artificial Sequence
  ENSG00000250579_25 (sequence is synthesized)
catcctcattccatagcaacacacactccctctcttattcatttatttgaaaccattcctcaaagtgcaaatattttttacataaagcctggcattgggagggaccttaaaacacctgcc

SEQ ID NO: 887991 - DNA, 120 bp, Artificial Sequence
  ENSG00000250579_26 (sequence is synthesized)
acccttcctctctgccaatgcctaacaagcgtctgcctcagctcacacctcagggagcttacacttaccttgaagggggggttcggcagtgcctggaagtctccagaatctgccggcaga

SEQ ID NO: 887992 - DNA, 120 bp, Artificial Sequence
  ENSG00000250579_27 (sequence is synthesized)
atttcccttgtcctgagtacattgcacgcttgataaatggggatctctacgtacttctaattgtgtccagtgtaacatgaaagggagtgagattttttccagtctatcacatggagatac

SEQ ID NO: 887993 - DNA, 120 bp, Artificial Sequence
  ENSG00000250579_28 (sequence is synthesized)
ctaggggccctcttctgtaagttcaaacagatggaaaaaaagaagaatggctgatataaaaggattcactcttacggtatgcttaagaacagtaagaccagagcagtgctaaatgagtct

SEQ ID NO: 887994 - DNA, 120 bp, Artificial Sequence
  ENSG00000250579_29 (sequence is synthesized)
cttttcattgtgaagaaagaaacaacattctttaaaatgactagtgtttcccagttcctctagcggtgcacggatttcagcgctcatcctgcagtatgaatgtctccaggtaacaaagag

SEQ ID NO: 887995 - DNA, 120 bp, Artificial Sequence
  ENSG00000250579_30 (sequence is synthesized)
gggtggttgagtccaggctatagaggccagagtgggagctgagatgcaaaacacacgagtggaccgagtttaagactggccatctaacatggtggcagtaactcgcagctgcctgtccgt

SEQ ID NO: 887996 - DNA, 120 bp, Artificial Sequence
  ENSG00000250579_31 (sequence is synthesized)
ctcagggagggatggagagggaggggcaaactggagcacacgtgtctgccttaaaagggactcctggcactgagtggccagcgcatgggttggtgccatacagtattggggaccagacct

SEQ ID NO: 887997 - DNA, 120 bp, Artificial Sequence
  ENSG00000250579_32 (sequence is synthesized)
gcctaatttttaaaggtaaaatggaaatctaaatatgtatatggagtcccttcagtttaaaggtgtcccagcaaagtaaccctgagaacaaatattggaagagtcaaaacaaaccgccag

SEQ ID NO: 887998 - DNA, 120 bp, Artificial Sequence
  ENSG00000250579_33 (sequence is synthesized)
cctcaaactacttcactttgcagcccttcaagaacttagcactcttaactttgaggtcaaagtttaggaaagcagttttgtcatcatttgtttacatccagggtcagaaaactctctact

SEQ ID NO: 887999 - DNA, 120 bp, Artificial Sequence
  ENSG00000250579_34 (sequence is synthesized)
gcctaagatcaaatctggccagctgactcattttgtaaataaagttttatttgtttgcagatcgtctgtgaatgctttcacaatggcagagttaagtcactgcaacagagactgtgtgcc

SEQ ID NO: 888000 - DNA, 120 bp, Artificial Sequence
  ENSG00000250579_35 (sequence is synthesized)
ctgcaaagcctaaactatttaccatctggcccttcacagaaaaatgttgctgtaaattatttagaccattcacagttagcacttgtttcctttcagacagaggttctgattacttaggtc

SEQ ID NO: 888001 - DNA, 120 bp, Artificial Sequence
  ENSG00000250579_36 (sequence is synthesized)
attttgaatatcaagtagacgtttcaatagagaataaaaattaaattaaaaataaaaacaaagtgcttagcaaaggatctgagagagagtttcttctaacggctgcatgctctcccatgc

SEQ ID NO: 888002 - DNA, 120 bp, Artificial Sequence
  ENSG00000250579_37 (sequence is synthesized)
ccagtgccctttcacaatgaaaggagccagggccctttctcatgtggaaacaaatggcattttagattaaaaggaccaaactttgtcataacccttttctaaattgcataaactttaaac

SEQ ID NO: 888003 - DNA, 120 bp, Artificial Sequence
  ENSG00000250579_38 (sequence is synthesized)
taaagcagtgcaagtgggcacattaccttgtatgtaaaaccaccatccatacaaccgaaacagagaagaattggatgtgtttgtgccctacaaagattctgtttagtctgtaattttgtt

SEQ ID NO: 888004 - DNA, 120 bp, Artificial Sequence
  ENSG00000250579_39 (sequence is synthesized)
caatgattgtgtgcaaaatttttgtagttcatattcttttctgaaagattagagtcgttctttattactttatacaaattatgagaacacagtgtcattaaaacacagacacaatgatgt

SEQ ID NO: 888005 - DNA, 120 bp, Artificial Sequence
  ENSG00000250579_40 (sequence is synthesized)
caaataactttccagcttggaggcctatgggtggctctagtccctctttgcaggttacagttgagaaaaccaagccccaggaaggtccagcaggtctgcggacccaccgtaggggcacag

SEQ ID NO: 888006 - DNA, 120 bp, Artificial Sequence
  ENSG00000250579_41 (sequence is synthesized)
cgctcaggcctcatatacttactcttccccagccctgctcttggcccctccgcaataagatgatttataggccaaaagtagtgaggcaccgcactgtctcccagtgctcacagcaccccg

SEQ ID NO: 888007 - DNA, 120 bp, Artificial Sequence
  ENSG00000250579_42 (sequence is synthesized)
acaatgtgagaaggtcacatagtaaaacacaagaaaaagatattttgaagaagaaatattaaatgaattatataaaatgtagaactcactatgaatttggactcagtataactttagaaa

SEQ ID NO: 888008 - DNA, 120 bp, Artificial Sequence
  ENSG00000250579_43 (sequence is synthesized)
tcagagggctctggaagaactgtgcctccggagtggttggcaacacttgtcccagccccctgtgtttccacaagatcctttggccaagttctaactgaacctgagcatctcagctcctcg

SEQ ID NO: 888009 - DNA, 120 bp, Artificial Sequence
  ENSG00000250579_44 (sequence is synthesized)
gtgctaataggattagcgtccttccctccacaggccaaacacgtccttcaaatgcctaggcagtaaccagatcacgtcagcccacggtttacacgaagatcctgttcatgactgcactct

SEQ ID NO: 888010 - DNA, 120 bp, Artificial Sequence
  ENSG00000250579_45 (sequence is synthesized)
tgtttctgtcgtcctcccttactttgagacttgactgtttttagtaaaaagaagaaaagaaaattgcaaaccaatgacaatcacaatatggcatttataagctcctttccttttattact

SEQ ID NO: 888011 - DNA, 120 bp, Artificial Sequence
  ENSG00000250579_46 (sequence is synthesized)
aataatgtatctaattatacaataattatcttttttctaataataataagttaaatatttgttattattttattattattgctattggtattccatagcatctcttgcggtgagacccct

SEQ ID NO: 888012 - DNA, 120 bp, Artificial Sequence
  ENSG00000250579_47 (sequence is synthesized)
ccatagcatctcttgcggtgagacccctcactcttccccagtgctgaagatgcacatagaagatcagtcactcagacacctcaggaaataagtctcagcacttttccctgaagacttctg

SEQ ID NO: 888013 - DNA, 120 bp, Artificial Sequence
  ENSG00000250579_48 (sequence is synthesized)
gtccatactaacactggcttctgccaaacatactttcttccaatgggtacaaaggcggcataattgtcggagcttggtgtatcagttagctattgctgcgtaagaaaataccccgaaacc

SEQ ID NO: 888014 - DNA, 120 bp, Artificial Sequence
  ENSG00000250579_49 (sequence is synthesized)
tgaaacaaaagccagttctttttgcctgtgcatctgcgtcctggctggttatctggtggtcatgatgggccctgtcgatcttggctgggttcacgcaggtgtgctgtccacggggttggg

SEQ ID NO: 888015 - DNA, 120 bp, Artificial Sequence
  ENSG00000250579_50 (sequence is synthesized)
ttgttggctgagtagaattgggcttgctcacattaatggaacaagtggtcagatccagctgtatttcttacagtttctcaccctcctgcaggccagcctgggcttgttttcccggtagta

SEQ ID NO: 888016 - DNA, 120 bp, Artificial Sequence
  ENSG00000250572_0 (sequence is synthesized)
agatcatctgaaaggaaggagaatggtgaaggcagagagaagcatgaggaatcaggacattggacaaagccttcacatgattttagaggattaaactgcttcggcatctagtaaactcct

SEQ ID NO: 888017 - DNA, 120 bp, Artificial Sequence
  ENSG00000250572_1 (sequence is synthesized)
agacatgcttttccctaaatactacttcagagcccataataaaggtgcatattgaacaagtggatcttcatcaagaatgaaagctgtctgcttcaaagtaaaatctgtcacagtgtcatc

SEQ ID NO: 888018 - DNA, 120 bp, Artificial Sequence
  ENSG00000228444_0 (sequence is synthesized)
tacaggtgtgagccaccgcaactggcctccttttacattcttaatgactgcacaatatctcactatggaggaaccataatttactccatcatctctattgttgggggttttggtagcttt

SEQ ID NO: 888019 - DNA, 120 bp, Artificial Sequence
  ENSG00000228444_1 (sequence is synthesized)
attgttgggggttttggtagctttgggattctcattcttaacatgtcatgcttgatgccatcacaggttgagtctttagaagctgacagaaatggcattggaggtataagatattaacta

SEQ ID NO: 888020 - DNA, 120 bp, Artificial Sequence
  ENSG00000228444_2 (sequence is synthesized)
gggctggatccctgtgaaaggaagagggaagaagcaggggtgggtgagggaggtgaactgtggtacagtcctgcagcctcagcagaccccagggtctactgtaaaggcctatcagtgttg

SEQ ID NO: 888021 - DNA, 120 bp, Artificial Sequence
  ENSG00000228444_3 (sequence is synthesized)
ttttataatcttaagtcattcactgaccagatgagggctgtcctgggaggggaaggacctcacgtgaggctgcactctgcagctgaggccaactttgaaggagctgatagctgggggtat

SEQ ID NO: 888022 - DNA, 120 bp, Artificial Sequence
  ENSG00000228444_4 (sequence is synthesized)
ctgttgaccacactctccaaggctgggcagcaagtagcaagtcctcctgtgaagcaagtcctcatatgacactcctatggggcatctctgtgtctaccgccgttactcattctgtgcata

SEQ ID NO: 888023 - DNA, 120 bp, Artificial Sequence
  ENSG00000228444_5 (sequence is synthesized)
tatgtttgcttaggtccttggtataaattccaagaagtggaattgctgggacagagtgtgggcatttgaaaaactttttatatttattgcccagtgacctcccagaaagattgtacccct

SEQ ID NO: 888024 - DNA, 120 bp, Artificial Sequence
  ENSG00000228444_6 (sequence is synthesized)
ttctcccatcaagagttcatcagtaatgcatcaatacatgacaattgtactgttttacatttttaaatattgaaaggtatctcaaattcctttgaaaaataaatacaaattttgatgttt

SEQ ID NO: 888025 - DNA, 120 bp, Artificial Sequence
  ENSG00000250576_0 (sequence is synthesized)
gcccatcagaacagagctgggccttcactagtctggacgatcagctgctcagagccttgcatacagtgggaggctgaggaatgttctttctagaagaataggtgctccaggctgactcca

SEQ ID NO: 888026 - DNA, 120 bp, Artificial Sequence
  ENSG00000250576_1 (sequence is synthesized)
tggagagatgtttgtttttctcccacttgtttactgttgctggtgttagatcaagtctggcctttactattccattaaaaaatgaccatttgtgattagatatttacaaaaatatattca

SEQ ID NO: 888027 - DNA, 120 bp, Artificial Sequence
  ENSG00000185847_0 (sequence is synthesized)
cttctctctctgtctctcctgccaccatgtgaagaaggtgcttgtttcccctttgccttccgccatgagtgtaagtttcctgaggtctcccagtcatactgctggttaagcctgcagaac

SEQ ID NO: 888028 - DNA, 120 bp, Artificial Sequence
  ENSG00000185847_1 (sequence is synthesized)
ggctggtcttgaactcccagcctcaagccatcctcccgccttggcctttcaaagtgctggattacaagcgtgagccaccgtgcacagccaagacacaattttaaatcgagcggtcaggaa

SEQ ID NO: 888029 - DNA, 120 bp, Artificial Sequence
  ENSG00000185847_2 (sequence is synthesized)
gcctcctggagaaaatgacgtttgaacaaagacatgaagaaagtggagaatatttggagaaaagcatttcaggcagaggaaagtgccagggcagaggccccgaggtgctgctgacagcca

SEQ ID NO: 888030 - DNA, 120 bp, Artificial Sequence
  ENSG00000185847_3 (sequence is synthesized)
tcgtgtgctgcggaggaagattgcctgagaatggagccattcaggaggaaatggggcagagaaataaagagaaatcaaatcccatcttttcagtcccgcttccctcactccctcatccat

SEQ ID NO: 888031 - DNA, 120 bp, Artificial Sequence
  ENSG00000185847_4 (sequence is synthesized)
tcttcctggcagactattcagttgtgctttttaagatttattctgtttttgtttttcacctaagacggtttagcttgtttgtttttctcttgtttgcaaccagtgtgttctagcggttat

SEQ ID NO: 888032 - DNA, 120 bp, Artificial Sequence
  ENSG00000185847_5 (sequence is synthesized)
tcacctcagtctccaccctggatctccgattttgtccctgaaacttcaaattcttttccttcaattatacaatgcagcagctctcctttcagtagtgctactttgtaccctaccctgggg

SEQ ID NO: 888033 - DNA, 120 bp, Artificial Sequence
  ENSG00000185847_6 (sequence is synthesized)
aagaggtagctcatattcgaacctgagctcttggcaaggtctttttccagatctaaggcagttcccttcctaagggagagtcagatgccactgaggagagagaaaggtagtcggagggaa

SEQ ID NO: 888034 - DNA, 120 bp, Artificial Sequence
  ENSG00000185847_7 (sequence is synthesized)
tgttatggcagacactgtggttgctcactaatgtaacatcccttctcttcttccttgctgtaaggactctaatcttgttccgggatttaaggaaggtgggttcagcctctggcttagagg

SEQ ID NO: 888035 - DNA, 120 bp, Artificial Sequence
  ENSG00000185847_8 (sequence is synthesized)
atgggcatgtaacccagtctgaccagcaaggtataaaggtcaatttatgggcagtctgggaaagtttttcttccccgataagaggaaaacataaggggatctctctgctctaagcctcca

SEQ ID NO: 888036 - DNA, 120 bp, Artificial Sequence
  ENSG00000185847_9 (sequence is synthesized)
attacttccttctccaaaagcagttatgtgaggatgtgatgcctggagctgtggaagccattttgtgaccatgaggagaaagccaagagaataacagagacactatcccaatgtcctgag

SEQ ID NO: 888037 - DNA, 120 bp, Artificial Sequence
  ENSG00000185847_10 (sequence is synthesized)
tattgttcagctatgaaactaaccctggaaactccttgggccacatagtagatattttaagttttgccagccatatgtctctgtcatgactactaaactcttcatttatatcgtgacagc

SEQ ID NO: 888038 - DNA, 120 bp, Artificial Sequence
  ENSG00000185847_11 (sequence is synthesized)
ccttgtggacataaaatggctgctgcagctccaggccacacatgcaccttccaggtagaaagaactcactaggaaaggcaagaagaaaactgttctcccttaacaagaacctccccagtt

SEQ ID NO: 888039 - DNA, 120 bp, Artificial Sequence
  ENSG00000185847_12 (sequence is synthesized)
acatcttttgatcatgtctgctcaatgtcaccatcttaaggcaggaggaagcaacagaaaacagggaagcaggtgtcccaggaggagcccaatgccatggaaagatgggaaaagaggtgg

SEQ ID NO: 888040 - DNA, 120 bp, Artificial Sequence
  ENSG00000185847_13 (sequence is synthesized)
tggatgagatcctggattcttataaactttatctactccacttgcacagatgatggaggatttgaggagtgtcagtgaatgctctgtgtggactgaacttggagcagactggggctggaa

SEQ ID NO: 888041 - DNA, 120 bp, Artificial Sequence
  ENSG00000185847_14 (sequence is synthesized)
ctctccagggagggcaactttgaccgagacatcttagggtttgccaagtcctcagcagatgttttttgatgtgccttgagatcctcaaatgagaagggcagtgggattcttccctctcca

SEQ ID NO: 888042 - DNA, 120 bp, Artificial Sequence
  ENSG00000185847_15 (sequence is synthesized)
gccaggaccacatctgtgcttttctgtaattgtgtaaaaaaaaaaaaaaaaaaaaaaaggtcttctaaaattttctgatggaatatatgctcatagccccgaaaaagaaaaaaaaagaaa

SEQ ID NO: 888043 - DNA, 120 bp, Artificial Sequence
  ENSG00000185847_16 (sequence is synthesized)
agtttttagttttaaaaagtgcaaaataatatccatttactgtgggaaaattagacattaaaaaaatcacttcctgtccctctacccagaaataactggtaacatggtggtgtatatttt

SEQ ID NO: 888044 - DNA, 120 bp, Artificial Sequence
  ENSG00000185847_17 (sequence is synthesized)
tgtgttctatttttaagcatacacacatacatacgtgtgtgtgtatattatatgtattttttttacaaaaattggggtcataccatcatacggtttcataaccacttatttgcctaataa

SEQ ID NO: 888045 - DNA, 120 bp, Artificial Sequence
  ENSG00000185847_18 (sequence is synthesized)
catttaggtgatcttcccaattataaatagcgatgcagccaccattcttgtaaaatttctacactgtctgagtatccaattatttccttcggatgtgcttctagagtgggaatgttggag

SEQ ID NO: 888046 - DNA, 120 bp, Artificial Sequence
  ENSG00000185847_19 (sequence is synthesized)
caaaggttgtgcactttgctcaacagtctgtgaggcctgcgtgtttctcaagagggtttgggagggtttcagggggaccctatagcagcctgagaatgtttcatttggcaggaaatcacc

SEQ ID NO: 888047 - DNA, 120 bp, Artificial Sequence
  ENSG00000185847_20 (sequence is synthesized)
ttttctgaagagaaatgagtaccctaccacattgccagggcttgcctctgtagggctggtcgtttgggtaattttaattttcttctttattcatttctatattgtattttcggtattgga

SEQ ID NO: 888048 - DNA, 120 bp, Artificial Sequence
  ENSG00000185847_21 (sequence is synthesized)
catgcattgctttttgtattaatttttctaatgaaagcaatttttcttgttataaaaaccaaacacaagagaagtacgtacagtagaaagaaaaggcccacatctccccagaagttgccc

SEQ ID NO: 888049 - DNA, 120 bp, Artificial Sequence
  ENSG00000185847_22 (sequence is synthesized)
gggttcattttgtgtgttcacctgctagacatggttcagctcctgcataagttttgttatgggaattttccctcagtaggaagaaaatactgtcataaaaataaaaaaatttaaataaaa

SEQ ID NO: 888050 - DNA, 120 bp, Artificial Sequence
  ENSG00000185847_23 (sequence is synthesized)
atcgctgagcgtccgcgctgcatttctccaaactgcccagcagggggcggtgctacctcggctccgcgcagccacggcttcccgctggcgaaccaagggcgcggaatctggagagggcga

SEQ ID NO: 888051 - DNA, 120 bp, Artificial Sequence
  ENSG00000185847_24 (sequence is synthesized)
ggaacatctttcctcccacctgtcccccgccaagcctgccagacccgtctcatccgtgctgctgcttctgaaaatcagaagagtgaggatgaaataaagtcttcataaaggaaaaccatt

SEQ ID NO: 888052 - DNA, 120 bp, Artificial Sequence
  ENSG00000185847_25 (sequence is synthesized)
ggacaggaaaatgagacccacagaagttcaagtcaccaggccagttattgttgggctagcacttgaagccaggtctgcctgaatttagggcctcagctctttcccacgcatttttagccc

SEQ ID NO: 888053 - DNA, 120 bp, Artificial Sequence
  ENSG00000185847_26 (sequence is synthesized)
agaaccaagctgttcataaaaggtgtgcctgcaaataggaaactagagagcatgggccctcagagagagctctgaaccccatcttcgacctcgaacctgtccttggactgaacctgtctt

SEQ ID NO: 888054 - DNA, 120 bp, Artificial Sequence
  ENSG00000185847_27 (sequence is synthesized)
taggaggtctgcccatacggatgaatctggagcagaggccgggctcagcaggagagcttcacaaaactgagattcgatgaagcagagccccgttttaagggctgcacaaatccacccgga

SEQ ID NO: 888055 - DNA, 65 bp, Artificial Sequence
  ENSG00000185847_28 (sequence is synthesized)
tttcctttctttcacttttttttttttttgagatggtcttactctgtcacccaggctagagttac

SEQ ID NO: 888056 - DNA, 77 bp, Artificial Sequence
  ENSG00000185847_29 (sequence is synthesized)
cggccctttcagggctggtcttgaactcctgggttcaagcatcctcccaccttggtcccccaaagcactggaattac

SEQ ID NO: 888057 - DNA, 90 bp, Artificial Sequence
  ENSG00000185847_30 (sequence is synthesized)
tcactatgttgcccgggctggtcttgaactcctgggttcaagcatcctcccaccttggtcccccaaagcactggacccctcccctttatc

SEQ ID NO: 888058 - DNA, 120 bp, Artificial Sequence
  ENSG00000185847_31 (sequence is synthesized)
ccgtgttctctctctctccaacagcctccctatgaggagcaactgtagggaccgagagacaatagcaggctgggccatggggagggatttttttcccgggatctcagtggagatggggag

SEQ ID NO: 888059 - DNA, 120 bp, Artificial Sequence
  ENSG00000185847_32 (sequence is synthesized)
gtagagtgagggaaggaagcagccaggcagagaggcgcggggctttattaattaattgagggagagacgtaatggagggtggaatccacagagggaaagcgggctccatctcgagtttat

SEQ ID NO: 888060 - DNA, 120 bp, Artificial Sequence
  ENSG00000185847_33 (sequence is synthesized)
ctcggtctgtcgcctcctgacaagcactaggggccctcaaggcaagtgggatgtaccccacttctggcctgcaatagaaagaactcccttcccggattccaggcgcgctggctttggcca

SEQ ID NO: 888061 - DNA, 120 bp, Artificial Sequence
  ENSG00000185847_34 (sequence is synthesized)
cgtggaatggtcatggtgggctgcactgggaaccacattgcaggttcgaatcccaactgcactgtgtaggagctgcgtgaccttgagtgaattggttgacccttctgtgcctcaatcacc

SEQ ID NO: 888062 - DNA, 120 bp, Artificial Sequence
  ENSG00000185847_35 (sequence is synthesized)
tcccctgtgaagtgggaacaacagtaccttcctcgtagagttgggacgaggattaaatgcttgaaatgatgccagtcccacagtaaagctttcggcaaaggatgggattattggacctgg

SEQ ID NO: 888063 - DNA, 120 bp, Artificial Sequence
  ENSG00000185847_36 (sequence is synthesized)
gaaggagaagacaggtgcctcagtttaccacggattccacatgtgacccaaatgccagcatgggggaaaggagacgtctccttaccccttaggcctggacagtaagtggactccatcaat

SEQ ID NO: 888064 - DNA, 120 bp, Artificial Sequence
  ENSG00000185847_37 (sequence is synthesized)
tccacagcctgccaatttctggtaaattcctgtgttcttttctcctccacggcctccttcatccaccatctctgctcctccatgggtacctacgcagaccccagagacatcccagggtcc

SEQ ID NO: 888065 - DNA, 120 bp, Artificial Sequence
  ENSG00000185847_38 (sequence is synthesized)
ctcggacactcgcagcttcagtttcccagcattgattgcactgctctggggaacagtgcccgtccctccccaagggcccgagggcttctgggaagtgacatcctcttccaggggtggggc

SEQ ID NO: 888066 - DNA, 120 bp, Artificial Sequence
  ENSG00000185847_39 (sequence is synthesized)
ctgtggctgaggtctgagccaatcaggataatccctaccccttggctacagtgattggcccaaggatgggcatgtgacctgagcttgttcatcggaataaagatgaatgttttctacaaa

SEQ ID NO: 888067 - DNA, 120 bp, Artificial Sequence
  ENSG00000185847_40 (sequence is synthesized)
aaaggacaaaaatagatgagagagaagaaagacaaagagggatggctcatggaatcctctctggaatgaaggtgtgtggccagcaagggcctcggagaaggtgcttgtttcccctttgcc

SEQ ID NO: 888068 - DNA, 120 bp, Artificial Sequence
  ENSG00000286072_0 (sequence is synthesized)
agtttctctgtgttttcatggcaaattgcagattgacctcaaatttaggctcataggagctacttaaacgaatgaatggatgaactcagagagtcttggtctgttccccgggctggaatg

SEQ ID NO: 888069 - DNA, 120 bp, Artificial Sequence
  ENSG00000286072_1 (sequence is synthesized)
gactcaagcaatcctcccaccttggcctacagagtacctgggactacagcatgccactctgggggagctggaaaggagacaactttcaggggacatcaaatttgacaactatctacacca

SEQ ID NO: 888070 - DNA, 120 bp, Artificial Sequence
  ENSG00000286072_2 (sequence is synthesized)
aactttcaggggacatcaaatttgacaactatctacaccataaagcatcttcataagaaccaaaaatcagatgttttttgcacaaggtagaagatgggtgcatctggttttcagcttcct

SEQ ID NO: 888071 - DNA, 77 bp, Artificial Sequence
  ENSG00000286072_3 (sequence is synthesized)
atcctcctttagctcggagaagtttgtcattagtccgtccaactttgtttcgttgctggtgaggagctgcgatcctt

SEQ ID NO: 888072 - DNA, 61 bp, Artificial Sequence
  ENSG00000286072_4 (sequence is synthesized)
tattgcattctgtatgaggggtcagtcggcccatactgggaggtgtctcccagtcaggcta

SEQ ID NO: 888073 - DNA, 120 bp, Artificial Sequence
  ENSG00000286072_5 (sequence is synthesized)
gctgtcagacagggacatttaagactgcagaagtttttgttgccttttgttcagctatgctctgcccccaaaggtggagtcagcagaggcaacaggccttgctgagctgtggtgggcgcc

SEQ ID NO: 888074 - DNA, 120 bp, Artificial Sequence
  ENSG00000286071_0 (sequence is synthesized)
attttaggatgagggaacaaaccctgaaggtgtgaacaagctcggtgcatctagacatgtaaggaaggttccagcatgtgaaggagcgaggacggagaagggtccggtgaggtcttacag

SEQ ID NO: 888075 - DNA, 120 bp, Artificial Sequence
  ENSG00000286071_1 (sequence is synthesized)
caacagagggtccagccacatgaggctgagcagccaagctgggaaagcggaaatctggagaactaaaatatcttgctgaagatcacaatgcagtaaagcatagggctgtgcttatgaagt

SEQ ID NO: 888076 - DNA, 120 bp, Artificial Sequence
  ENSG00000286071_2 (sequence is synthesized)
cccaacatgtcttctgggctgtgttttcaaccaagagagttaataaaaagtgggatgggcaccaactatgcctccagagacatcaggcagaatatgccacagcgtgccatgtcctcctgc

SEQ ID NO: 888077 - DNA, 120 bp, Artificial Sequence
  ENSG00000286071_3 (sequence is synthesized)
aaacagtcagaaagaaaagatctctaaaagcagattggaagagactatatatacagagcgagtgccggtacagaagttttgctgcaaatacaccctctaatcccttgcaacccactgcaa

SEQ ID NO: 888078 - DNA, 120 bp, Artificial Sequence
  ENSG00000286071_4 (sequence is synthesized)
gtgataaaagtgaacattttaaaagagcagagtgagtgtgaattcccaaagagaccattcatatcaagacccaagccatgagaaaatgctacaatgcccttgatcaatactttataggca

SEQ ID NO: 888079 - DNA, 120 bp, Artificial Sequence
  ENSG00000286071_5 (sequence is synthesized)
ttttgacctcagatctaatcccatgaggcttagaccaagaccttgcttgatgcagacctctctgactgctgaaattggtcaggagctcagtgatgaaaatttggaaagtcaatgctgata

SEQ ID NO: 888080 - DNA, 120 bp, Artificial Sequence
  ENSG00000286071_6 (sequence is synthesized)
cctgaagaaagtcccatcagagatctgtgacctgaatcttcataactttcacaggccctttctaaatgccaaggaggatgtgtgtggagaagaatatgccacctatggcatcccaatatg

SEQ ID NO: 888081 - DNA, 120 bp, Artificial Sequence
  ENSG00000286071_7 (sequence is synthesized)
cctgtgcccgcctgctcttcaacaagggaatgaaacctgggtattctcataggttttttaaagcacttgtccacatattttattccgcaaataacacaatttaaaattcagctagaattt

SEQ ID NO: 888082 - DNA, 120 bp, Artificial Sequence
  ENSG00000286071_8 (sequence is synthesized)
gccattttctgtcagggttgtgcatttcttccagtcaccatgacttcctgagatagccaaaacacaaaatttaaattgtgtttaaattaaataaacacaatttatgctgaagctgacttt

SEQ ID NO: 888083 - DNA, 120 bp, Artificial Sequence
  ENSG00000286071_9 (sequence is synthesized)
tccagccacatgaggctgagcagccaagctccattttacagatgaagaaacaagacctgaaaaggttaaacaacttgcccaagatcatccagccaagtcatgataaagctgcacttgaac

SEQ ID NO: 888084 - DNA, 120 bp, Artificial Sequence
  ENSG00000286071_10 (sequence is synthesized)
acacacttctcagattccaaagcccaagtttctctctactaactgtatggcccctgcactcaaaaactgagaaatctctctgccctgtgacctggatggggcaaattcagataacacgaa

SEQ ID NO: 888085 - DNA, 120 bp, Artificial Sequence
  ENSG00000286071_11 (sequence is synthesized)
tactctatgaccagatcagagatgggaagcctccagcctaagccaggatttgaacttgggtgttgaagacctatgctcttcccatgaagtcacgttgcttctaatcaatgtgtcctcatc

SEQ ID NO: 888086 - DNA, 120 bp, Artificial Sequence
  ENSG00000286071_12 (sequence is synthesized)
gctccccactcatgcttcacagctccaggctcaagcaggcatggaccctgtttcaagattccctgcctctggggtgccctgtcaacttccagagctctggctttaactcagtgctgcacc

SEQ ID NO: 888087 - DNA, 120 bp, Artificial Sequence
  ENSG00000286071_13 (sequence is synthesized)
atgattcttagccaacttgcatcctctgttctgggccaaccttgggcttccaagcagccggctaatcattccagatgtgcctgccttgctcagtccggacttacaactctgtctcttaac

SEQ ID NO: 888088 - DNA, 120 bp, Artificial Sequence
  ENSG00000286071_14 (sequence is synthesized)
aactgcagctcacagtctaccatgataggaatttccataaaggattttcacagcacagatgtctttctgcctttcaaaggaagcttctaaaggtcaaaatgataagaagtggcaaattgg

SEQ ID NO: 888089 - DNA, 120 bp, Artificial Sequence
  ENSG00000286071_15 (sequence is synthesized)
cctggcagacaagaaaagcatattcaaaaggtaatgaggaatatcgaaaacaggcacaaatgctgctgagctttcaaccctcgtttgtaatgagattcctacaagccttctagtcattcc

SEQ ID NO: 888090 - DNA, 120 bp, Artificial Sequence
  ENSG00000286071_16 (sequence is synthesized)
caccatctctcctttttgtactccccggcttgacagccaaggctctaattgctacactcaaggaaagcaaagacccacttggctgcatttggcttaaatggataagaaaaatgccagctt

SEQ ID NO: 888091 - DNA, 72 bp, Artificial Sequence
  ENSG00000286071_17 (sequence is synthesized)
aggaggattctttgagcccaggagttcaagagcagcctgagcaacatactaagacctgatatctactaaaaa

SEQ ID NO: 888092 - DNA, 120 bp, Artificial Sequence
  ENSG00000286071_18 (sequence is synthesized)
tgaggccctcaccagaagcagatgttggcactatgcttcttagacagcctgcaaaactctgggaaagcggaaatctggagaactaaaatatcttgctgaagatcacaatgcagtaaagca

SEQ ID NO: 888093 - DNA, 120 bp, Artificial Sequence
  ENSG00000286071_19 (sequence is synthesized)
tagggcaagtttccaactcgaacatcaccccagaacacttccttttaaacataaattatgttgctaacttttttattgttacttagcaggcagatttcaaactgatacaaatgttgaaaa

SEQ ID NO: 888094 - DNA, 120 bp, Artificial Sequence
  ENSG00000286071_20 (sequence is synthesized)
tgatacaaaatgttttcccaccttaaaggcattctgaaacctagcacataacatctgtcactgaagtccatagtttccaatgccatgattggataaagaccctattgagactcatgtgtt

SEQ ID NO: 888095 - DNA, 120 bp, Artificial Sequence
  ENSG00000286071_21 (sequence is synthesized)
tgtctctcactgcttaaaacactcatgtgttttaagcaacatgacaagcacaaaagagaacaagtactgctcctgctctccaggaagttaccataaaataaaggggataaggtgccttcc

SEQ ID NO: 888096 - DNA, 120 bp, Artificial Sequence
  ENSG00000286071_22 (sequence is synthesized)
aaagaaaaaacaaatactaggagaggtcagaggagaagagagattattccagaaggagagactgaggcagatttcaggagggaagaatataagagtcccaaaagaagaaacaggaaccca

SEQ ID NO: 888097 - DNA, 120 bp, Artificial Sequence
  ENSG00000286071_23 (sequence is synthesized)
ggttagagagcaatgggcaaggggtaggaggtgagactaaactcacaaggaagttgcttcaaaacaatagtgccccaaatgccaagctgatgggttggacccatttaggaaaaacccaca

SEQ ID NO: 888098 - DNA, 120 bp, Artificial Sequence
  ENSG00000286071_24 (sequence is synthesized)
aagtccacaggagagcagactgcacttccatgagcttcaagctgtaaacagtaacctcaaataaaacttttcccggatcggtaatttccatcctgaacaatggccaagtcaaggaagctg

SEQ ID NO: 888099 - DNA, 120 bp, Artificial Sequence
  ENSG00000286071_25 (sequence is synthesized)
catgccacaaagaacctcaagggaccccatgctctggggagctcgcaggaggaccagcacagaggtgtgactgcgttggggcagggtggccacatgtacaatgttgtaccttccaatgtt

SEQ ID NO: 888100 - DNA, 120 bp, Artificial Sequence
  ENSG00000286071_26 (sequence is synthesized)
tggatggatggatggatggatggatagaaatgcaacttcaagatctggttctacagtattacatatgaagcaactgagactcagataaaattcagtgagttgctgaagactattcactca

SEQ ID NO: 888101 - DNA, 120 bp, Artificial Sequence
  ENSG00000286071_27 (sequence is synthesized)
ataaaattcagtgagttgctgaagactattcactcattgagcctcacattctgatgctatatatatcaggtgctatgcagatgattagggaagggcaggactgagattaaactgacaccc

SEQ ID NO: 888102 - DNA, 120 bp, Artificial Sequence
  ENSG00000286071_28 (sequence is synthesized)
cctacatcctaatccaggctttttccactgtatggcgatgcctcccaaaagaattatcacagcgacttaataaaggagggagaaagttagctgcaaatttcaagcttagaaattcacagg

SEQ ID NO: 888103 - DNA, 120 bp, Artificial Sequence
  ENSG00000286071_29 (sequence is synthesized)
caaaaatggctgaagggaaataatcacactaatagtgatgcaaggatgtaactggaaaggaaaaaatggagagaaattaaaaacacaaacagatttagtcagggtcctgataaagtgata

SEQ ID NO: 888104 - DNA, 120 bp, Artificial Sequence
  ENSG00000286071_30 (sequence is synthesized)
atgtaatcaataaggcaaatcaaagataaatgattagagatttaaaacctcagcctatcagaaaaacctgagggaaaagattttgaattttttttatttcttccaaaagatcctatttga

SEQ ID NO: 888105 - DNA, 120 bp, Artificial Sequence
  ENSG00000286071_31 (sequence is synthesized)
catttttttttaaatctaaatgaccaaagatttcgaatttggaaaggcagacacatatctatttcccatataaacatctacatttcttgccacatagcaccgcaacactcatctggttcc

SEQ ID NO: 888106 - DNA, 120 bp, Artificial Sequence
  ENSG00000286071_32 (sequence is synthesized)
aaagcagacggcttggccctctgttatcaagagcactatcaccgttctggcccggagagctaagttttcttatacataggtcgtagccaaagctcagaggaaagaagtgacatttggtga

SEQ ID NO: 888107 - DNA, 120 bp, Artificial Sequence
  ENSG00000286071_33 (sequence is synthesized)
gtgtacaggatatgttctccagccactttttaggtgctaagttacatcttgaaataatgtcagaaattggaagatgccgtatttaaacttcactagcccaagccctaattcacctcgaca

SEQ ID NO: 888108 - DNA, 120 bp, Artificial Sequence
  ENSG00000286071_34 (sequence is synthesized)
gtttaatatcttaatgtttcttaaaatttgaggactcttagaatgacccctttaaaaatctgctgaaaaactggatctttttgtgggaaaaactgtccatacctacatatctaaaatgtg

SEQ ID NO: 888109 - DNA, 120 bp, Artificial Sequence
  ENSG00000286071_35 (sequence is synthesized)
tatgtggtttcagtctctcctgtgcacagtccctcctgctttgaagggatccccaacatgtttttttcctagaggtagttggtcacaaccatcggataacatgcttatcacctgggtgat

SEQ ID NO: 888110 - DNA, 120 bp, Artificial Sequence
  ENSG00000286071_36 (sequence is synthesized)
aaaatattctggacaccaaaccccgatgacatgcaatttacctatataaagaacctgcacatgtattcctgaacctaaaataaaaagttgtaaaaaataataatacaagtaaaagagctt

SEQ ID NO: 888111 - DNA, 120 bp, Artificial Sequence
  ENSG00000286071_37 (sequence is synthesized)
tctgcatgtgttataaatctgttcaggaggactttccactatgctttcaagagaagtgtcttgaagaatttagcatcactctgaattcccaaaaagctctgtgcttttcaaggtgctttt

SEQ ID NO: 888112 - DNA, 120 bp, Artificial Sequence
  ENSG00000286071_38 (sequence is synthesized)
gaggaagaaggatgatgcttcaactgtcttctttgctgtgacttctaggaagttcattatcacatcatattctcaaccaaataattaacacttgacattggcattttcttctgtctttgt

SEQ ID NO: 888113 - DNA, 120 bp, Artificial Sequence
  ENSG00000286071_39 (sequence is synthesized)
ttttaaattttattgttgtttgctaattttattgtttttatctttgttgtatgtattgtcccggctctccatttcctccctctccctgccaataaaagagacccatagattttattcttt

SEQ ID NO: 888114 - DNA, 120 bp, Artificial Sequence
  ENSG00000286071_40 (sequence is synthesized)
tgttctactttttcatcagtttcttctacatatatctgacatatatggaaaaaagaattactgcctatatatgcagaacttgtaactcacaggatttctaaactaaaagacttttcttaa

SEQ ID NO: 888115 - DNA, 120 bp, Artificial Sequence
  ENSG00000286071_41 (sequence is synthesized)
taggtgtgaagtgaaattctgcaagtagctgcatctgggaacttcagagttaaaccgatatctcagtataatctgtcactgctatagtttcttttctttgacctccaaaccttatgttga

SEQ ID NO: 888116 - DNA, 120 bp, Artificial Sequence
  ENSG00000286071_42 (sequence is synthesized)
aatttgacccccaatgttgaaggtagagcctaatgggaggtgtctgggtctgggggcagatccctcaagaatagcttggtcatcaatgagtgagttctcactctattagtttctgggaga

SEQ ID NO: 888117 - DNA, 120 bp, Artificial Sequence
  ENSG00000286071_43 (sequence is synthesized)
gagagctggttgttaaaaagagtgtgtcatgtcccttctctctctttttgcttcctctctcaccagtgatctgcctaggccagctccccttcatcttctgccatgagtggaagcagcctg

SEQ ID NO: 888118 - DNA, 120 bp, Artificial Sequence
  ENSG00000286071_44 (sequence is synthesized)
cctcaccagaagcagatgttggcactatgcttcttagacagcctgcaaaactgtgagccaaagaattcccttttctttataaatgacccagcctcaggtattcctctatagcaacgcaga

SEQ ID NO: 888119 - DNA, 120 bp, Artificial Sequence
  ENSG00000286071_45 (sequence is synthesized)
tggactaagacactcatgcttcctttcattagctatttcaagctcaaaaattgtgagactgtgccaagaattagggcaggatcttgtcattgcgaacttacaacttttctatctaaagca

SEQ ID NO: 888120 - DNA, 120 bp, Artificial Sequence
  ENSG00000286071_46 (sequence is synthesized)
aaaggtcctaatcccaaaccataattggaaaggtgcctctactccaacctcattgcccttcaactgccccttctctgcctcccattcccctcttactcaccgaaagacaaatgagtttag

SEQ ID NO: 888121 - DNA, 120 bp, Artificial Sequence
  ENSG00000286071_47 (sequence is synthesized)
gctgggcacagttagccatcgttctcagaaaaacaaaatcttgctgcttggtattctcacttagaatcccttcacttagcttatggatcaccctacacagattcctgacagctcactggg

SEQ ID NO: 888122 - DNA, 120 bp, Artificial Sequence
  ENSG00000286071_48 (sequence is synthesized)
ccagggaaccagccagatttttgagctacatctgcagtatcttttctactcaggcagctggcataaggtgggaaaattcattaacatgctaatgatgtcctatttaaaattctagtcctg

SEQ ID NO: 888123 - DNA, 120 bp, Artificial Sequence
  ENSG00000286071_49 (sequence is synthesized)
attattctgtgattaaatctctccccttgacgtcggtttcctttatagctgagttacagtgcgaaatcaacaatattaataaagtacaatacagattaccaatttatacacaagggatgg

SEQ ID NO: 888124 - DNA, 120 bp, Artificial Sequence
  ENSG00000286071_50 (sequence is synthesized)
aaagtacaatacagattaccaatttatacacaagggatggtgaaaaactgctgcgtaaatctgagggctgtccttttaacttgaaaagcagttgtaggccgggcgcggtggctcacgctt

SEQ ID NO: 888125 - DNA, 120 bp, Artificial Sequence
  ENSG00000286071_51 (sequence is synthesized)
aaaagttgctgatttttttcattccacccttctttaaataaacacacacattggaatccacaataattaaatgtttatagttaatttccataaatattcaaggcttggaagatagattta

SEQ ID NO: 888126 - DNA, 120 bp, Artificial Sequence
  ENSG00000286071_52 (sequence is synthesized)
gcttttccttctatttcactgcacttaacattgctccgaattcaaatgtgttatcctgaagtctcaagaacagctgacaggagttaaagcacacttctttatcatctctttatagagatt

SEQ ID NO: 888127 - DNA, 120 bp, Artificial Sequence
  ENSG00000286071_53 (sequence is synthesized)
gtgtcttggcaacaaaagccaatggattcggtgatgaggtctgtctccctttgcccttgagtaccttggcatatttcagttccttttctatcaccgtattgttctattactgacactcca

SEQ ID NO: 888128 - DNA, 120 bp, Artificial Sequence
  ENSG00000286071_54 (sequence is synthesized)
aactgaatatccaactcagacaactcaagcaccttccaagaaagacaaacttatcactaccctcattaatttggaaaatgaataaagaagcagaagattcaaggtccagatctgcaatct

SEQ ID NO: 888129 - DNA, 120 bp, Artificial Sequence
  ENSG00000286071_55 (sequence is synthesized)
aaaatgcaggaagagaggactcattcatgtgtcattttaacatctggccccagtaaatgaacaaatattgatggtatagtatatttactattttaaaagacatcatgctggacaccaaag

SEQ ID NO: 888130 - DNA, 120 bp, Artificial Sequence
  ENSG00000286071_56 (sequence is synthesized)
cagtacagtgaaacctaagaacaatgttctgacctcggtggactcacaatctagccagagacacaagatacaatgatattttaagtgatgcatgcagcaaattcatctcaggtgcatcat

SEQ ID NO: 888131 - DNA, 120 bp, Artificial Sequence
  ENSG00000286071_57 (sequence is synthesized)
tagagatacacttcacatcattaaaaggtctctgtacgagagacactgctaattgttccctaagactgcaaatctccccttttgctatggaaacagaattcatcactttagtggggcaca

SEQ ID NO: 888132 - DNA, 120 bp, Artificial Sequence
  ENSG00000286071_58 (sequence is synthesized)
ttgctgcccagggtaaggacagctcccagcccctcttgcaagtagctgttaccatataacaaggttaaggtcacagggatgtggccgtagcagagatgtgtgcagatttctaaaagcgta

SEQ ID NO: 888133 - DNA, 120 bp, Artificial Sequence
  ENSG00000286071_59 (sequence is synthesized)
cttaaaggggatagatgagctctcttccttctttgttttttttctgactggacttggacatgcatgtggctgggtcagccaggttggactgaatggcacatgttgtggggcagagaagaa

SEQ ID NO: 888134 - DNA, 120 bp, Artificial Sequence
  ENSG00000286071_60 (sequence is synthesized)
caagatagaagagtctgggttcctgacaagcagggtggcttgatcatccatgagttgcctttttcccctgaacgctgcattccacaactattgttggaaatcaaaatctttttttaagaa

SEQ ID NO: 888135 - DNA, 120 bp, Artificial Sequence
  ENSG00000286071_61 (sequence is synthesized)
tactacatattgctcatttcttaaatggtttcattctctaaggctaaaaagagtcatggtacatgcatgcatatgtgtatgtgcataagtacactctcctttgtactttctctacattta

SEQ ID NO: 888136 - DNA, 120 bp, Artificial Sequence
  ENSG00000286071_62 (sequence is synthesized)
aacttgaacacagagctccctctgaatttttaaccctcaaaacacaaaaaaagctgaatatggactttgccccagttttatcacattttaataaataaaagcttcaatgtattcaggaat

SEQ ID NO: 888137 - DNA, 120 bp, Artificial Sequence
  ENSG00000286071_63 (sequence is synthesized)
tcattatttatttgtttcccacactctcaaccctagattattaatttggttcacctaaagccaactcacctcaaattggttaaaaaaaattaagcacgtgtaaatcaatgtatagggaaa

SEQ ID NO: 888138 - DNA, 120 bp, Artificial Sequence
  ENSG00000286071_64 (sequence is synthesized)
gggtggctgatccagcaaaatccaagtgtaaaaacataaagagaggcttcacaacagtaatgagccatctgcaatttagaatcatccatggtaacaatctctcattccatttgtttatgt

SEQ ID NO: 888139 - DNA, 120 bp, Artificial Sequence
  ENSG00000286071_65 (sequence is synthesized)
tttattcatcattgtgaaaatacttagtgaagtgacgatgatgagattcaaaaatactgcatggttctttttttaaaaagagatattaatggctttcaggggctcaactattcaaatgaa

SEQ ID NO: 888140 - DNA, 120 bp, Artificial Sequence
  ENSG00000286071_66 (sequence is synthesized)
aatattgctggactaaatttgctcaaatttgttcacttcctcttcattcttggatataatatattcttcattttatgacaaaaaactatgtggtgaaaacatgagaaattccgtagtttc

SEQ ID NO: 888141 - DNA, 120 bp, Artificial Sequence
  ENSG00000286071_67 (sequence is synthesized)
catcgtttatacatttaaaaaatcaatagcagaaacctatttcaaatgtacaatcctcattcctatcatgacagagtaaaccaggctgcggtgtcttgggtgagcgtgttgtcattccct

SEQ ID NO: 888142 - DNA, 120 bp, Artificial Sequence
  ENSG00000286071_68 (sequence is synthesized)
agtactacagttatttagcctcaaacgtactgtctctagttacatatacggcaaaaacaaggcttgacctttaagaatgaaaagaaaaaaagataagtactgagctgttaagccaactta

SEQ ID NO: 888143 - DNA, 120 bp, Artificial Sequence
  ENSG00000286071_69 (sequence is synthesized)
agggtattcattacaaagaagacagaataactactgaacatactctttgattctaatatctctatgaagaaacctctctctacacaaattgatagacattttaaaagaaaatttattcat

SEQ ID NO: 888144 - DNA, 120 bp, Artificial Sequence
  ENSG00000286071_70 (sequence is synthesized)
cccaaattgatgcacttaacttcagctagctgattttatatttctcaatctagcttataaatactactcttcatttacttcaatttacggagtatttacaaaagccctatttcaaatctg

SEQ ID NO: 888145 - DNA, 120 bp, Artificial Sequence
  ENSG00000286071_71 (sequence is synthesized)
gttcctatcagccccgttttttcttatttcttcttaaataagcatactttgtaaaatatagccatttattcatatatatatttctttcatttgttttagtaaatgacatttatttaggaa

SEQ ID NO: 888146 - DNA, 120 bp, Artificial Sequence
  ENSG00000286071_72 (sequence is synthesized)
ccattttttaagaaataagtttttaccatctcaatttgcactgaaccagcgtcttctgagaccatccctctgggtgcaaatctcagagtaagctcagttactcctaacgactggaaaagg

SEQ ID NO: 888147 - DNA, 120 bp, Artificial Sequence
  ENSG00000286071_73 (sequence is synthesized)
aaagaacacaggaacacttgaactcctctgacaagcagacactttggctaaggcggcattcacatcttctacatcatccttcctggggaaagaagctctcagaaaagtccacacatagaa

SEQ ID NO: 888148 - DNA, 120 bp, Artificial Sequence
  ENSG00000286071_74 (sequence is synthesized)
gagccactttatggtcttccctcaattttctcagatcagcctgatttagtctatgattgtgcagacaaggagacggagccaagggacaaaaggaagataattgtcacacaaagaaaatgc

SEQ ID NO: 888149 - DNA, 120 bp, Artificial Sequence
  ENSG00000286071_75 (sequence is synthesized)
tcaagaccttgccaagggagagactgctctaaataataacaaggctattagcaaacacaggttgagacagggaacagaaaaagaaaagatgtcacatgtgaatatgaaaacaaaagctga

SEQ ID NO: 888150 - DNA, 120 bp, Artificial Sequence
  ENSG00000286071_76 (sequence is synthesized)
caagtaattccattcggtttgccaaggcacctgccaaaaatgtccccaaggaaaagggccatgtgctccatgacgctcttcacagtgacgttcacataaggcacagaacattctgcctgg

SEQ ID NO: 888151 - DNA, 120 bp, Artificial Sequence
  ENSG00000286071_77 (sequence is synthesized)
ccacaaaacacaacaaatatcatcaatatcttgccggggaacagttgtgcactacctaccataggcagtctcctggtgctccacttctcttctcagtctgttgtaatcttctttaacact

SEQ ID NO: 888152 - DNA, 120 bp, Artificial Sequence
  ENSG00000286071_78 (sequence is synthesized)
tcccagctttttgacattcctggaactcaacaccaacagcttgctgaggagtccctccagcccttctctctctgatgttaatgatctaatctcctcggtgaggtctttagccgtccagaa

SEQ ID NO: 888153 - DNA, 120 bp, Artificial Sequence
  ENSG00000286071_79 (sequence is synthesized)
atggtttcctacagcacgttgtgggagagaagaagggaaaacaagctttacagcatccacacacatggaagatctagcagcagctaatgtacattcacagcatgggcaaagaaactgcac

SEQ ID NO: 888154 - DNA, 120 bp, Artificial Sequence
  ENSG00000286071_80 (sequence is synthesized)
tttgagattatgtacaatttccttagcagtcctctggggaaagaacctggaaaaatattgctctccttaaactggaaaaatcaccgtcttttttatcaccttattcttgttatgtccatt

SEQ ID NO: 888155 - DNA, 120 bp, Artificial Sequence
  ENSG00000286071_81 (sequence is synthesized)
ttaggagttccattggtgaagccatctcccgtaaagtatgatgacccaaaaatgtcccagtggaatccagagaaaccacaatgtgtcactccattccaataatatacaaatgtcaaagag

SEQ ID NO: 888156 - DNA, 120 bp, Artificial Sequence
  ENSG00000286071_82 (sequence is synthesized)
atgacatattatagcagtgtggaaggggactgggccatataatcagagttgacctaaattaaattcctcccctgttactcaaactgtgtgacctggagcaagaaaattagcacatctggg

SEQ ID NO: 888157 - DNA, 120 bp, Artificial Sequence
  ENSG00000286071_83 (sequence is synthesized)
gcaaatttcttataaaatataattgcaataacacctgactcataggtagttacaagaataaacaagaaattctgtaaagcactgagaaaaatatatgataaattaaatgtagcaagattg

SEQ ID NO: 888158 - DNA, 120 bp, Artificial Sequence
  ENSG00000286071_84 (sequence is synthesized)
caggatacaaggtcaatgtacaaacatcaatcttatgtctaaataacaaaaaactagaagatgattttttaaaaaatacaatttacaaaatattttaaatctcataatactgagggatac

SEQ ID NO: 888159 - DNA, 120 bp, Artificial Sequence
  ENSG00000286071_85 (sequence is synthesized)
tttctttaaatatgtgcaagagctctacagtgaaaactatttttcaaaaactgctgagacaaattaaagacaaataatttaaaagatacactgtatacatacactggaagttcaatattg

SEQ ID NO: 888160 - DNA, 65 bp, Artificial Sequence
  ENSG00000286071_86 (sequence is synthesized)
tagaaatttatgtgcttattctaaaacgtctaagagtgtgggtcccttgaggtcaggtgttcaag

SEQ ID NO: 888161 - DNA, 70 bp, Artificial Sequence
  ENSG00000286071_87 (sequence is synthesized)
tgtaggttgcagcgagctgagatcctgccactgcactccagcttgagcaacagagtgagacttcatatct

SEQ ID NO: 888162 - DNA, 120 bp, Artificial Sequence
  ENSG00000286071_88 (sequence is synthesized)
ctgcactccagcttgagcaacagagtgagacttcatatctaaacaaataaaatctagaagaatgagcccatgagtttgaggctgtagtgcactatgattgcacttttgaacaggcactac

SEQ ID NO: 888163 - DNA, 120 bp, Artificial Sequence
  ENSG00000286071_89 (sequence is synthesized)
actcttgtctgggcaacatagcaagtccccacctcaaagaaggagagggagaaagaagaagaaggaggaggaggaggtgaaagagggagggagggaaggaaggagaagacgaagaagaat

SEQ ID NO: 888164 - DNA, 120 bp, Artificial Sequence
  ENSG00000286071_90 (sequence is synthesized)
gaagaagaataggaagaaagaagaagaaggaagaggaggaggaggatgaccaaagcaatccttaaaaagtgagtcttggtttcaagactaatgctaaagccactataaatcaaggtaata

SEQ ID NO: 888165 - DNA, 120 bp, Artificial Sequence
  ENSG00000286071_91 (sequence is synthesized)
tggcattgaatatacatagacaaacagatcgatggaatagaataaacagtccaggagtggattaacacatatacagccaaccaaagtgccaaagcaagtcaatgaggaaaagaaagtatt

SEQ ID NO: 888166 - DNA, 120 bp, Artificial Sequence
  ENSG00000286071_92 (sequence is synthesized)
ttcaataaatggtgctggaacaactagctatctacatggaaaaaatattaaccttgattcatacctcaaaccacacaaaaatttaattaaaggtggatcacaggcctacatgtaaaagtt

SEQ ID NO: 888167 - DNA, 120 bp, Artificial Sequence
  ENSG00000286071_93 (sequence is synthesized)
aaaactataaagcttctacaaaaaaaaaatgaatatttgattgactttggagtaggcaagaacttcagataagatacagaaaacactattttaaaaaggataaatgggctttatcaaaat

SEQ ID NO: 888168 - DNA, 120 bp, Artificial Sequence
  ENSG00000286071_94 (sequence is synthesized)
taaaaacttctcatcaaaagacacaactaaaaaatgagacgacaagtcacagacttggagaaaatcattgcattatgtttaactgacaaggaattgaatactacaacttgacaattaaaa

SEQ ID NO: 888169 - DNA, 120 bp, Artificial Sequence
  ENSG00000286071_95 (sequence is synthesized)
cacaaatggtgccattgaaaaatggtcaaatgacttaacaggcattttacaaagtagacgcacaaatggctaataagcatatgaaaaaacatttgacatcattaatcattaagaaaagaa

SEQ ID NO: 888170 - DNA, 120 bp, Artificial Sequence
  ENSG00000286071_96 (sequence is synthesized)
aaattaaaaccataaatattccactacaagcccactcaaatgtttcaaattaactcaactaaaaatgtcaacattcacaagggtatggagcaactggaactctcacgcatgtaaaatggt

SEQ ID NO: 888171 - DNA, 120 bp, Artificial Sequence
  ENSG00000286071_97 (sequence is synthesized)
cccttcaagaaaagttctgccagtttctcataaagttcaatgtatacctaccctttaatccaacaattctacttccaggcatttacacaaaagaaatgaaaacatgtcatcaaaaatatt

SEQ ID NO: 888172 - DNA, 120 bp, Artificial Sequence
  ENSG00000286071_98 (sequence is synthesized)
tgcactcaaataaatggtcacagtgtcttatgcctgagagccagccccatactggaagcaacctaaatatccatcagcaggaagatgcaaaaataatactatagctatgcaatgaaagac

SEQ ID NO: 888173 - DNA, 120 bp, Artificial Sequence
  ENSG00000286071_99 (sequence is synthesized)
gaagatgcaaaaataatactatagctatgcaatgaaagactactcagcaataaaaagaaacaaactcgtcatacatgcagcaacatgtatgtgtctttttctttctttcttttttttttt

SEQ ID NO: 888174 - DNA, 120 bp, Artificial Sequence
  ENSG00000286071_100 (sequence is synthesized)
cagccaacatgtacatgtctttagaaaagatgcaaaagagtagtgccacatgattccattaagttctagaacagccaaaattaatccatggtagaagatatcagaacagaggagggacga

SEQ ID NO: 888175 - DNA, 120 bp, Artificial Sequence
  ENSG00000286071_101 (sequence is synthesized)
tgatgactgggacaagatagggtgttgtttcttgagtgatgagactgttctatctcttggtagggctgttcgtaacacaggtgtcaaaattcaagaactgtaaacacttaagacctgtgc

SEQ ID NO: 888176 - DNA, 120 bp, Artificial Sequence
  ENSG00000286071_102 (sequence is synthesized)
attccactgaatataaaccatacctcaattaaaaagaggaaaaattaagaaatttttaagcatgaacattgaacaataaataaatatataacattaatgagtgtcccataaattagttag

SEQ ID NO: 888177 - DNA, 120 bp, Artificial Sequence
  ENSG00000286071_103 (sequence is synthesized)
tgttaattagaaaaccccactgtgttttctcagaatttatagtaaccataatcacaataatagctacaaactttctcacctttaaatgtcatcacaactttaggaaacaggttatatctt

SEQ ID NO: 888178 - DNA, 120 bp, Artificial Sequence
  ENSG00000286071_104 (sequence is synthesized)
attattattattattattattattttacattttaacatctctgaaacagggatgtgtcctacaatcaccatcagccaggaagtggtcaggatgcagtggttataactggattattttccc

SEQ ID NO: 888179 - DNA, 120 bp, Artificial Sequence
  ENSG00000286071_105 (sequence is synthesized)
tataactggattattttccctggcctggctgaccatctgcaaccccctggtgtttcaatgtacaaactattttaggaccatctgcgtactggctgttgcctgaaaatcttgtgttgatgt

SEQ ID NO: 888180 - DNA, 120 bp, Artificial Sequence
  ENSG00000286071_106 (sequence is synthesized)
ggatttgtaagactgggaaagcaccagcattcaaaacttgaagaaaggtgttagcagtttggcagacaatcctacagaaaactctttattcttgggggagaaaaagttgcctcccatcaa

SEQ ID NO: 888181 - DNA, 120 bp, Artificial Sequence
  ENSG00000286071_107 (sequence is synthesized)
cttcaatggttcacaggatgatgacgtgtggggaaacacaaacctcgacaacattgagtccaaatgtgtttcggaagactcagaatgaagaagaagatgccaaggaaaaccttaaccaat

SEQ ID NO: 888182 - DNA, 120 bp, Artificial Sequence
  ENSG00000286071_108 (sequence is synthesized)
ttattttcctttttaatgagtgatatgtgatttttcaaaagcctaaatacatctaaaagagctatatcagttaagtataagataaaaattctaaaccatagaaagcactgttactgctta

SEQ ID NO: 888183 - DNA, 120 bp, Artificial Sequence
  ENSG00000286071_109 (sequence is synthesized)
attgacagcaatttttctttctttgcaatgtataaaataatgggtgctttttatgttcactgaaattcatattgttgtctccttttacagctgggaaagcggaaatctggagaactaaaa

SEQ ID NO: 888184 - DNA, 120 bp, Artificial Sequence
  ENSG00000286071_110 (sequence is synthesized)
ctcagcatctctgaattcaaatatcagccaggtgtggtggctcatacctgtaagcccagcactttggcaagccaagatgggaaggttgcttgaggagttggagaccagcctgggcaacat

SEQ ID NO: 888185 - DNA, 120 bp, Artificial Sequence
  ENSG00000286071_111 (sequence is synthesized)
tagccaggcatggtggtatgcacctttagtcctagctacttgggaggctgaggtgagaagatcacttgagcccaggagcttgaggtggcagtgagtcatgatcataccactgcactgtag

SEQ ID NO: 888186 - DNA, 120 bp, Artificial Sequence
  ENSG00000286071_112 (sequence is synthesized)
cctgagcaacagagcaagaccccatcccttaaaaaaaatacctgccctctgtacttcatagcacctggggcattttgaacagttcttccttcacctgaggtcattatttgagaatccaat

SEQ ID NO: 888187 - DNA, 120 bp, Artificial Sequence
  ENSG00000286071_113 (sequence is synthesized)
tttagagactacaatgctctcattacttggattgtatcatttaatcttcccaacaatccaggaaggggagtctcttaatgattgtccttgatttccagttaaaaaatctagacccagagg

SEQ ID NO: 888188 - DNA, 120 bp, Artificial Sequence
  ENSG00000286071_114 (sequence is synthesized)
taaccttgtgaaggtcacagagtttcagagttctaagatcccatgcgagattgctgaacttgaacttgtttcttctgatctcatgtcaataagtgacttagtcaacacctgggtagaaat

SEQ ID NO: 888189 - DNA, 120 bp, Artificial Sequence
  ENSG00000286071_115 (sequence is synthesized)
catcactaaagtgagaaagcacatggtgagggggatgaatcctgtgcccacatggtccctttcacctgcccaatcctcaggcctctcacctggggtacccctcacacacatggcactttc

SEQ ID NO: 888190 - DNA, 120 bp, Artificial Sequence
  ENSG00000286071_116 (sequence is synthesized)
ctgaactcatggacatttcagtttgtaacgatcctcctaagattatctactttcacctatccacatttgaactatacttctttagtggaaaaaaagaaataaagccagtgctgagaatga

SEQ ID NO: 888191 - DNA, 120 bp, Artificial Sequence
  ENSG00000286071_117 (sequence is synthesized)
tcaaactccagaaatagtagactgctgtataatttgtcttgcgtgacaccagatctttcaaggaactgcaagctcaagtgcacagttaagcaagatcaagatctacctttgtctttcaga

SEQ ID NO: 888192 - DNA, 120 bp, Artificial Sequence
  ENSG00000286071_118 (sequence is synthesized)
gccttcccttggcgaggtcaaggatatctgctgtgagcctgggctggctgaaccaaagggcaatggaggcggccaagaagccccagccaactgctcccctccccaacccccttctccctg

SEQ ID NO: 888193 - DNA, 120 bp, Artificial Sequence
  ENSG00000286071_119 (sequence is synthesized)
gaggtcccttcagctagaatttgccattttctgtcagggttgtgcatttcttccagtcaccatgacttcctgagatagccaaaagcatttgctgtgagcagagccccatggctggctttg

SEQ ID NO: 888194 - DNA, 120 bp, Artificial Sequence
  ENSG00000286071_120 (sequence is synthesized)
cacatcaaacatttcagacagccatatatttcatagaatacaaggggaagataacactggacacacagaactttccaacagcttgagaaaatgtggtgcctggtgactgactaaatatac

SEQ ID NO: 888195 - DNA, 120 bp, Artificial Sequence
  ENSG00000286071_121 (sequence is synthesized)
aatcggacaacagccaggccatagcaaaagatggaactctgatccacaaggtgcagcaactttcccagaaaacaatacccttacccacaaaaagcaaccccggaagctggcctgctctaa

SEQ ID NO: 888196 - DNA, 120 bp, Artificial Sequence
  ENSG00000286071_122 (sequence is synthesized)
atcagacctgctggaagccaaattgctctctagtaactatccaggaagctaaataataacttctgtaacaattgactcaaaatgttcaggactggattaataactgatggcttccctaat

SEQ ID NO: 888197 - DNA, 120 bp, Artificial Sequence
  ENSG00000286071_123 (sequence is synthesized)
ttttgtccccgattccaacttaggacccaccagagaaagccaaatatggtcccctgaccaagcacacaggatgttcgcttctagtgagccgcctccagcttccccgcattgataacctcc

SEQ ID NO: 888198 - DNA, 120 bp, Artificial Sequence
  ENSG00000286071_124 (sequence is synthesized)
aatcagggcacacctgaagccttcgcctttttccactataaagctctcccactcgtctgcccacctttgagtctctgccaaattgcaaatgatggtgtctgactcccttgctgtagcaag

SEQ ID NO: 888199 - DNA, 120 bp, Artificial Sequence
  ENSG00000286071_125 (sequence is synthesized)
ctctgcataatagcttgtgcttattctctttgggtaggtcttcatttcttttcacaccagataggcatcatctttgaaaacatctttactgggtctcttgtctccctcctgcagccactg

SEQ ID NO: 888200 - DNA, 120 bp, Artificial Sequence
  ENSG00000286071_126 (sequence is synthesized)
atctaaatcacagacttttttagaaagagggaaaatagtaaagaaagaaagcgattgagttgatgctcccagccactgtctgtaccctgaattttgtttttctgccatatgtcaggtggc

SEQ ID NO: 888201 - DNA, 120 bp, Artificial Sequence
  ENSG00000286071_127 (sequence is synthesized)
ctctcctggaccatcgtcactgtttctcctgcttccctgcagctgcagacacaggagcactgtgtaggtctggccttgagcacccacccacccagtacagagccagcccctgctgttctg

SEQ ID NO: 888202 - DNA, 120 bp, Artificial Sequence
  ENSG00000286071_128 (sequence is synthesized)
aatcagtgcagtgaccacttagaacacagtgcccatgcctctgtgatctgaactgctctttccagttccatacaatgttaagaacccacttaagaatgttttaatcattcagtagttttt

SEQ ID NO: 888203 - DNA, 120 bp, Artificial Sequence
  ENSG00000286071_129 (sequence is synthesized)
cccacttaagaatgttttaatcattcagtagtttttcgtggtatataataaaaaagtgatttaaatacaatctattttattttagattatatcattaggggttattttacaaagttacct

SEQ ID NO: 888204 - DNA, 120 bp, Artificial Sequence
  ENSG00000286071_130 (sequence is synthesized)
tagacagcctgcaaaacttaagaaggtccttgccagatgcaagcccctcaaccttggacttccaagcctccagaagtatccatgctgcagcccatcagcttggaaaagacatatcttcct

SEQ ID NO: 888205 - DNA, 120 bp, Artificial Sequence
  ENSG00000286071_131 (sequence is synthesized)
tctcaaatggaaagcccaaatattgatgacgggtttctctagttgatggttacggcagggagcagtctgatgcctcacctccctacggtggaagaaaggaagctgaccaatcaaagtgtg

SEQ ID NO: 888206 - DNA, 120 bp, Artificial Sequence
  ENSG00000286077_0 (sequence is synthesized)
ctgctccaggccattctcacaacaaagcccaccccccaatcccagctggaggaatatagaaatgacacaccccgagccctcctggagagagtcctgaaatggattaaaagacaaaaatca

SEQ ID NO: 888207 - DNA, 120 bp, Artificial Sequence
  ENSG00000286077_1 (sequence is synthesized)
gctttcttctttgtgctcacagggcctagaggagcctccaggctcctgaagggggccaagtacttccagcctggagtttgtgggtggaagaaagaagatggccatgtgggacaggaactg

SEQ ID NO: 888208 - DNA, 120 bp, Artificial Sequence
  ENSG00000286077_2 (sequence is synthesized)
ctttaccccctcactctgctgagtctggaggttggtgcttgctcaccacttggggcaggtcatcttccctctctgggcctcagtttctacataagtaacagggtggaatgtaggttgggc

SEQ ID NO: 888209 - DNA, 120 bp, Artificial Sequence
  ENSG00000286077_3 (sequence is synthesized)
tagattccctctaagggcctttttagctctaaatttctctgaatctatttgcatccacaggaagttacataaacacatacactcatacatggatcaaagtctttgtttacctccagggtt

SEQ ID NO: 888210 - DNA, 120 bp, Artificial Sequence
  ENSG00000286077_4 (sequence is synthesized)
cctagctctttcctgttcagcaaaagaaatttggctcaggatggatgaagggggaaataggcaaatactacttctccaggtaaccagtagccgagcagcctccgccagctgtcttttgtg

SEQ ID NO: 888211 - DNA, 120 bp, Artificial Sequence
  ENSG00000286077_5 (sequence is synthesized)
ggctgttgaagcccaagtaactggcagagactcctgccatgccattctccttcaaacctctgtcatctgcttgcccacaaatgtcctcgtcccattctccatgcaagcattggtcctctg

SEQ ID NO: 888212 - DNA, 120 bp, Artificial Sequence
  ENSG00000286077_6 (sequence is synthesized)
gcaaattcacaccaacataattccaaactgcacatctatttccacattctctcatcagtaaattgctttgtcactttgccaatgacttagcagcaatagggctccccagctacctattgc

SEQ ID NO: 888213 - DNA, 120 bp, Artificial Sequence
  ENSG00000286077_7 (sequence is synthesized)
ttccctcatcatccctcgccctctagagttcctttggagggttcagaatgaatcaagggtccagtggagatcctatttcctttatcatcccctccatgtctggagaatagaatggtatca

SEQ ID NO: 888214 - DNA, 120 bp, Artificial Sequence
  ENSG00000286077_8 (sequence is synthesized)
ggatgctctttaggggcacaattaggaagacttttcctcctctctcctcacacctttctggcctcagaaccagtcctctctttcaggtcttccctccatccctgagagaccctggtagta

SEQ ID NO: 888215 - DNA, 120 bp, Artificial Sequence
  ENSG00000286077_9 (sequence is synthesized)
tcaaagtctctaaggtatggtggaaagagataaggagtcacactagtagttgtgggaagcaggctggctcctgtaagctgtctgtagggtaatgaaaggaggactttgcccacagtaggg

SEQ ID NO: 888216 - DNA, 120 bp, Artificial Sequence
  ENSG00000286077_10 (sequence is synthesized)
gctctacacatgatggttggctggttcctaggatgggtgaaagaacataaaggccacaagttctgtgggtcccagaggcctgctgctccaacattgtgccaggaagattcttctgaacac

SEQ ID NO: 888217 - DNA, 120 bp, Artificial Sequence
  ENSG00000286076_0 (sequence is synthesized)
agagcctctcttaacactgtcctgtagctcagcaactccaaattagcacagctccacacatccaaagcctggaaagggtggaagatgaatatgaacggacagatccctcatgctcaccct

SEQ ID NO: 888218 - DNA, 120 bp, Artificial Sequence
  ENSG00000286076_1 (sequence is synthesized)
tggtggtgaattgagtcatcagctgagtatggaaaggagtggggaacaagctcacaggctctttgtctccttcgacttttgtttcacatttgccaggaggattagctttccttgttgcct

SEQ ID NO: 888219 - DNA, 120 bp, Artificial Sequence
  ENSG00000286076_2 (sequence is synthesized)
aagagatccggggccacagagtaggagccggagaaaacccagagaagctgctgacaaccatgccagtcccctgcccactctgcctcttgcctaggtctgacaaaactggagaaattaaat

SEQ ID NO: 888220 - DNA, 120 bp, Artificial Sequence
  ENSG00000286076_3 (sequence is synthesized)
tctttttcagctttcattttcttcatccccacaacagacaccagtgtggtaagcacaaagtcagcaggtctgacttacaagaggctgaacaccctgttttacaaatgtttgtgaaaccaa

SEQ ID NO: 888221 - DNA, 120 bp, Artificial Sequence
  ENSG00000286074_0 (sequence is synthesized)
acttccggtgggcttcacatgctgtggggtgtcactgttaaggtgagatgagagaattgaggtttggagttgttaagcagcttgcccaaagtcaccttgcagggcattcaagtgtgcact

SEQ ID NO: 888222 - DNA, 120 bp, Artificial Sequence
  ENSG00000286074_1 (sequence is synthesized)
cccaggagcttgctcggcaaaggaaggcctgagaaactaacaaataataacctcagcctcaagaccgcggactgtctggcacaggaagttattcattccgccagatacaacgagctagtg

SEQ ID NO: 888223 - DNA, 120 bp, Artificial Sequence
  ENSG00000286074_2 (sequence is synthesized)
tccccctcaaaggcgccctttgccagtctgaacagaaagccatggcttgggaacaactgatcttcctcaccgagggttctgctgtggtgatgacagccaccagacaaaccttgtaatcag

SEQ ID NO: 888224 - DNA, 120 bp, Artificial Sequence
  ENSG00000286074_3 (sequence is synthesized)
ggcactgtggagtcacaatataactgttgcttattagttttaaccaagacgaacataatgaatttttccacgcacaatactgtggcactaccactaaaacaaaatactggaaaattatca

SEQ ID NO: 888225 - DNA, 120 bp, Artificial Sequence
  ENSG00000286074_4 (sequence is synthesized)
agttctatggtgaattcacagtgtcaacagctaaattaataattggactaaaaaacatacttttcagttaatcacccaatatgtacctactgagagctttctatgtgcccggactatgcc

SEQ ID NO: 888226 - DNA, 120 bp, Artificial Sequence
  ENSG00000286074_5 (sequence is synthesized)
ctgcaaacaggcataggccctgtctgtaagaagaaatttagctaaggacacaaaaccaacatgcatgtaacagggagtgaaaaattatgtgcaagactcagtaattcagcctaacaaaca

SEQ ID NO: 888227 - DNA, 120 bp, Artificial Sequence
  ENSG00000286078_0 (sequence is synthesized)
gcaggtggatcacccagcctgggcaacaagagggaaacttcatctcaaaataacaacaacaacaaaaaagaaaacagagggatcccaggtacccgccttcactcagtttccccaatggta

SEQ ID NO: 888228 - DNA, 120 bp, Artificial Sequence
  ENSG00000286078_1 (sequence is synthesized)
acatctcgcagaactactgggcgccatcacagccggggtctgactgctcttgctcaggtttccccggttttccgtatcctcacgtgtgtgtatttacttctgtgcaattttatcgcaggc

SEQ ID NO: 888229 - DNA, 120 bp, Artificial Sequence
  ENSG00000286078_2 (sequence is synthesized)
caaggcaggcgtgagccactgcacctggccccatctttctacaactgggaaaattctgagttctggaaccatctgcccagggatttggggtcagagatggtgggcctttctgatcctggt

SEQ ID NO: 888230 - DNA, 120 bp, Artificial Sequence
  ENSG00000286078_3 (sequence is synthesized)
agcacaacattgcacggtctaaagacactacattagggtgaaattttgttcttctatcttccccccttgcatggagaggaccctcattcctgcccccaccctcgcttcactgtgccaggc

SEQ ID NO: 888231 - DNA, 120 bp, Artificial Sequence
  ENSG00000286078_4 (sequence is synthesized)
acaggcagagcccaggtgctgcctctgcttgtctgcagttgccgacgaggcctgcgctgagcattttggcaagtctggagaattgaaggcccaggcccttggccctatcaccgcaatgca

SEQ ID NO: 888232 - DNA, 120 bp, Artificial Sequence
  ENSG00000286078_5 (sequence is synthesized)
ggcccagaggtggcaggcgggagctcaccgatggatctgccagtgtcagtcccagagcggaccccagaagtgttcaggcgtggactcgcactgtctgacatttccatcgatggcctgcat

SEQ ID NO: 888233 - DNA, 120 bp, Artificial Sequence
  ENSG00000286078_6 (sequence is synthesized)
gaggaatgggcggtgagcatcctccttccatctccagctgggggtggagggtgtgagcctgcccgccgagaggaagccagttacagaatcaaaatgactcaggctgggctctgtggtgcg

SEQ ID NO: 888234 - DNA, 120 bp, Artificial Sequence
  ENSG00000267709_0 (sequence is synthesized)
tgtttggtggtctcttcacacggacgcatgagacatttggtgccgaagacccgggtcagcgggactccttcgggacagcagtcccctgtcctcaccttcactccctgaagagatccacct

SEQ ID NO: 888235 - DNA, 120 bp, Artificial Sequence
  ENSG00000267709_1 (sequence is synthesized)
acctacaacctcaggtccgcagaccaaccagcccaaggaacatctcactgattttaaattggactctcttcacacgggcgagtgtgacatttggtgccgaagacccaggacaggaggact

SEQ ID NO: 888236 - DNA, 120 bp, Artificial Sequence
  ENSG00000267709_2 (sequence is synthesized)
cctttgggagaccggtctcctgtcctcgccctcactccgtgaggagatccacctgcaacctcaggtcctcagaccaaccagccgaaggaacatctcaccaatttcaaatgggcttagcgg

SEQ ID NO: 888237 - DNA, 120 bp, Artificial Sequence
  ENSG00000267709_3 (sequence is synthesized)
cgacgtgcgtgacacaatgtttgcagaatatgaaggtggctgtcacgtggtctgggcttcctggaggtttgagctgggagctgaagccccgtaggagttctgtaagtcaaaagggaagag

SEQ ID NO: 888238 - DNA, 120 bp, Artificial Sequence
  ENSG00000267709_4 (sequence is synthesized)
aagagcattccacgtagagaaaagaatctgtgctccaggcgcggtggctcacgattgtaatctcagcacttggtgtcaggcctctgagcccaggctaagccattgtatatcccccgtgac

SEQ ID NO: 888239 - DNA, 84 bp, Artificial Sequence
  ENSG00000267709_5 (sequence is synthesized)
ccacaagtcattccaccattgtgatttgttcctgtcccacctttactgatcaattaactttgtgacatttcttctcctggacaa

SEQ ID NO: 888240 - DNA, 120 bp, Artificial Sequence
  ENSG00000267709_6 (sequence is synthesized)
actgatcaattaactttgtgacatttcttctcctggacaatgagtctcatgatctccctacccagcaccttgtgacccctgcccctgcccgcaagagataaccatctttaactgtaactt

SEQ ID NO: 888241 - DNA, 85 bp, Artificial Sequence
  ENSG00000267709_7 (sequence is synthesized)
gcccctgcccgcaagagataaccatctttaactgtaactttccactacctacctaaatcctgtaaaaactgacccaccccctatc

SEQ ID NO: 888242 - DNA, 120 bp, Artificial Sequence
  ENSG00000267705_0 (sequence is synthesized)
tttagaggcagaatcagctttactaattttgtaacagaataagcactctgtaatgacactgtacttttaaactgaagactccttacgaaaagttaaaaatgtgttcttaaatgtattgaa

SEQ ID NO: 888243 - DNA, 120 bp, Artificial Sequence
  ENSG00000267705_1 (sequence is synthesized)
gctgagcatatttacattacacaattgtgcatatctgtattttaaaattatacagtcattgttcactgtgtaaaatctgcaagacacaggtaaacaagcaaagaaaaattatcccaccag

SEQ ID NO: 888244 - DNA, 120 bp, Artificial Sequence
  ENSG00000267705_2 (sequence is synthesized)
aaatcacctttagagctgttttgcgggatagatacataacacaaactggtggcattaaatctgcatgctttttgaaaagtgattctggagtgaacaaaaattgcaactttagaagatata

SEQ ID NO: 888245 - DNA, 120 bp, Artificial Sequence
  ENSG00000267705_3 (sequence is synthesized)
cactgccggccgggcatgttgacagataaaagtaatgacagtatataagcgtcaggtgaatgttcaaggaataggaaacaacattgtcaggacgtctgtttggaaaaaaacccttaaaag

SEQ ID NO: 888246 - DNA, 120 bp, Artificial Sequence
  ENSG00000267705_4 (sequence is synthesized)
taaaattacatacatcagattttatctagatattaaactgatgctgctgaggcaggaggatcacttgaagacaggtgtttgagaccagcatgggcaacaaaatgagatcccacttctaat

SEQ ID NO: 888247 - DNA, 120 bp, Artificial Sequence
  ENSG00000267707_0 (sequence is synthesized)
ctagttgttttaagatgaaagttcccagttctcccttgcccggaaagtctctggagcaagcgtggaaggcgagtgaagcggaagagaagcataaaaaaacgctgaacaagaaaaaccaaa

SEQ ID NO: 888248 - DNA, 120 bp, Artificial Sequence
  ENSG00000267707_1 (sequence is synthesized)
caacagaaagtaaaaccactgcaagcaccaagaacgaaacgaaaatgagcacagcaaaaaagattgtggcagcacaaaagtcaagaaaatgcacgtgtgatcatgactggccaatcatca

SEQ ID NO: 888249 - DNA, 120 bp, Artificial Sequence
  ENSG00000267707_2 (sequence is synthesized)
tcatgtcacactgtgaactttgagttgatttgaacttacggatgggggacttttctccactctcatgtgattacgtgaactttattcctagctcagcgcgagactgtggtggatttgact

SEQ ID NO: 888250 - DNA, 120 bp, Artificial Sequence
  ENSG00000267707_3 (sequence is synthesized)
ggccctggttgggttgttggaatttgattgaatgacaaaagaagaaaagatttatatatatatttatatatgtagagagagagagagagaggacaagagagtgtgggtgggggaaggaag

SEQ ID NO: 888251 - DNA, 120 bp, Artificial Sequence
  ENSG00000267707_4 (sequence is synthesized)
aggtggggcagggcaggtggggttggggagtgtgggagggcagggagggctgggatttgggtgaaggagggcaaggaagaagttaaaacaaaattaaaaagaaaatatatttatacagca

SEQ ID NO: 888252 - DNA, 120 bp, Artificial Sequence
  ENSG00000267702_0 (sequence is synthesized)
aagggaatctggtgatatgtagcagaagccaccagggcctgctccaccagggagaacgcggagcagcagagtcagcggaaggagtgccagtgcgtacacctcctctctgtttacaaagca

SEQ ID NO: 888253 - DNA, 120 bp, Artificial Sequence
  ENSG00000267702_1 (sequence is synthesized)
aagctgcttgtaagaagtgcgcttgaggaaagagtgcattttacatttcatcacttcatcactctgtttattaaaatctttgttgacttgatatatacattcagaaaagtgcatgtatca

SEQ ID NO: 888254 - DNA, 120 bp, Artificial Sequence
  ENSG00000267702_2 (sequence is synthesized)
aaagctcactgatttttttatacactggaaacacttgtgtgaaataccactgaaggattcactttaaaatggttgtgtattaatgcaaatttcacctcaacaaacaaaaaaagccccaga

SEQ ID NO: 888255 - DNA, 120 bp, Artificial Sequence
  ENSG00000267702_3 (sequence is synthesized)
actcaagcagccccgcagagcccccttgagctgcattttgttggaagtgtcggggtggaatcaccagggtcaacggtttcccatttccactcccgctggcacgtccgcagacccctgccg

SEQ ID NO: 888256 - DNA, 120 bp, Artificial Sequence
  ENSG00000267702_4 (sequence is synthesized)
gtcccacacgcaccccaacgcttgctgtcttctcatttctgctgggtgggtggtagtatgatattgtggctttactttgcatttccttgatgtttaatgaacctgagcaccttttcatat

SEQ ID NO: 888257 - DNA, 120 bp, Artificial Sequence
  ENSG00000267702_5 (sequence is synthesized)
gcttctcaggcatttgaagttttataatagttttaaataggggtcttttttccttacatgaaactttgatgagagtgatcatttcttttttattccccaaccatgatccagttcagaaaa

SEQ ID NO: 888258 - DNA, 120 bp, Artificial Sequence
  ENSG00000267702_6 (sequence is synthesized)
catcaaggaccttgctgcctctccaggaagtgtagcaaaaggcacctgcctgctgtgctggggaagagcagtgggccaggttagccccctgtccctggtgtgctacacttacaggtgggc

SEQ ID NO: 888259 - DNA, 120 bp, Artificial Sequence
  ENSG00000267702_7 (sequence is synthesized)
attgggctgaaggactctctggcccttgctgttgggtcggggatgcagtcagaaaggagcatgaagggcatctgtcccggcagggccatgtggccagaccaggaagggctgctcaaagaa

SEQ ID NO: 888260 - DNA, 120 bp, Artificial Sequence
  ENSG00000267702_8 (sequence is synthesized)
gaacaaaggcttctctgccctgatggagatgctgacaccttcagaaagacgtgtttgtggcatcggcgtcatttctttctgtggctaccaaggccgagaacttctctgtgctccacctca

SEQ ID NO: 888261 - DNA, 120 bp, Artificial Sequence
  ENSG00000267702_9 (sequence is synthesized)
tggccagggttcttacagccgcaggccttctgtgtgcattagctagctaacttgtttcttctttcattcatccaataagtatgactaaactcctgcagtatcttcagcatcggcaattcc

SEQ ID NO: 888262 - DNA, 120 bp, Artificial Sequence
  ENSG00000267702_10 (sequence is synthesized)
acactaaataagtaaaacccttgccttcacagagatcgaaaacaaacaggaaaactgtaatgtcatgttgggtgtctggagctgtggagagaaatgaagggggccctggagagccatggc

SEQ ID NO: 888263 - DNA, 120 bp, Artificial Sequence
  ENSG00000267702_11 (sequence is synthesized)
tgtgccaaggccagggtggcgtcctggagaacctgccttggagtggagtgctggatctggggaggggggagtgctgctgggcatttcatggacacataggcaggaggtgggcaggagcac

SEQ ID NO: 888264 - DNA, 120 bp, Artificial Sequence
  ENSG00000267702_12 (sequence is synthesized)
tgagagcaagggggagatgggagagggcaggggcctggtcagggtctcagggccctgggcgaggaatttgaattgcagtccaggtgagagggatgggaaggacaaggctttcagtgagct

SEQ ID NO: 888265 - DNA, 120 bp, Artificial Sequence
  ENSG00000267702_13 (sequence is synthesized)
gcctgggctcttagagagtgaccctggctccctcatggaaaagcagccatctggcccttgagttcagcacctctccaagctccttcctgtccctagactggcagggacttccagggacag

SEQ ID NO: 888266 - DNA, 120 bp, Artificial Sequence
  ENSG00000267702_14 (sequence is synthesized)
ccttggccccctttccgctctgccttgccatctcccatcgcttgtcatcgcttctgtgttgggtttgccctctggtcctgttccctagagccatgctctggtcatgagtgttacagggcc

SEQ ID NO: 888267 - DNA, 120 bp, Artificial Sequence
  ENSG00000267702_15 (sequence is synthesized)
agggcagggcctgtcaggggaacagagtgcagaccccctctgtgggcccctctgggccctcgcatcccactgccttggagaggagagagcaagatagaaacaggtcctgagatgaggtgg

SEQ ID NO: 888268 - DNA, 120 bp, Artificial Sequence
  ENSG00000267702_16 (sequence is synthesized)
cggcatacaagctatctcacacttctgcacccttccaggtgcgtttctgaaatgcatcaatgctgtgagatctacactgacttcagggatgtggcaaaccccctatttcttgtaaccagc

SEQ ID NO: 888269 - DNA, 120 bp, Artificial Sequence
  ENSG00000267702_17 (sequence is synthesized)
tggagccctgcctgtgccccaggcagccctgtgcactaagaaagccaggcctgggagacactgacttgtcgtttgcctccaggcgtttttagttgtaacagactagttcttgtttcccat

SEQ ID NO: 888270 - DNA, 120 bp, Artificial Sequence
  ENSG00000267702_18 (sequence is synthesized)
cacctagaatctgttgatctgtctggatcttagttcctgagcctcctgctctgcaagacgcaccctgcacatgcacgctcacgtggggcacacacacccaggtgcccatcatgccagcag

SEQ ID NO: 888271 - DNA, 120 bp, Artificial Sequence
  ENSG00000267702_19 (sequence is synthesized)
gtgcacagttggagaaatcgactccccagaccagactccccagagcgcggggagcggccaagtgtcctcgcacaaactggggtggaattgatacaggggccagggaggtccctaaacact

SEQ ID NO: 888272 - DNA, 120 bp, Artificial Sequence
  ENSG00000267702_20 (sequence is synthesized)
agtgggaccctgaccctagccagcatccaggctcttgacactgttgtgagaaggatttcaaggatgagtcagaaaacagtgaaagtacaaagatttattgcagagtgaagagtacactct

SEQ ID NO: 888273 - DNA, 120 bp, Artificial Sequence
  ENSG00000267702_21 (sequence is synthesized)
tgcaaaaagaaagtgtgggggcagactcaagagagccacagaatggggtttggggctgctatctttatgggtttctttaaccgaggggtggaatattcatgaaaattcctggaaaaaggt

SEQ ID NO: 888274 - DNA, 80 bp, Artificial Sequence
  ENSG00000267702_22 (sequence is synthesized)
ccgaggggtggaatattcatgaaaattcctggaaaaaggtggagatttattggaattgtggtgctacccattctttcttt

SEQ ID NO: 888275 - DNA, 64 bp, Artificial Sequence
  ENSG00000267702_23 (sequence is synthesized)
cagtgtcacccattcttacaccaaataagggtgtcctggaactgtcatggtgttggtggtgtgt

SEQ ID NO: 888276 - DNA, 120 bp, Artificial Sequence
  ENSG00000267702_24 (sequence is synthesized)
ataagggtgtcctggaactgtcatggtgttggtggtgtgtgattgagtgcgtcagtgagcagataatgaggtccgaggtgagacctagctcaaatccagctctgcactgggtccggtcag

SEQ ID NO: 888277 - DNA, 120 bp, Artificial Sequence
  ENSG00000267702_25 (sequence is synthesized)
tcttagccagcttggtccacaccctgtttttcagggtcagggcctagtcaccctatagcctccagttatatgaaactgttgcctggaatgtgtattcttctgtgaccacctgtattattc

SEQ ID NO: 888278 - DNA, 120 bp, Artificial Sequence
  ENSG00000267702_26 (sequence is synthesized)
ctgtcacagaatcgtgacacagcagcagccctttcccagtgtgtggggcacagttacattcctaggtgtggaaggaagacctttgctgcattaaattatccccagcatctgtttgctgct

SEQ ID NO: 888279 - DNA, 120 bp, Artificial Sequence
  ENSG00000267702_27 (sequence is synthesized)
tttaacacgagtgacttaaagggacatgggttagaagaaggagggaggagatttgtgccagggatgaaagaaaatggctaaaagatgaatgaaagttgcatatatctctttttcttctgt

SEQ ID NO: 888280 - DNA, 120 bp, Artificial Sequence
  ENSG00000267702_28 (sequence is synthesized)
aaataactcatgataaaagggaataaaatttaggttttccccacttggaagagacatggccaaacggagtgtgtgcttttcctaaaccaccgtgaaggtagcatgaaaaccaggcttgct

SEQ ID NO: 888281 - DNA, 120 bp, Artificial Sequence
  ENSG00000267702_29 (sequence is synthesized)
cttcagagactaggaggctcctgttttgggcactccatctgccctgctgccgtgaaagctctcggacccaaatggcttcctgtgatccactgtggtctgcttattatattcccttcagct

SEQ ID NO: 888282 - DNA, 120 bp, Artificial Sequence
  ENSG00000267702_30 (sequence is synthesized)
atgtttataactctgtcaacagccacagcgtgagtaccccaatcggataacaataacctaaaattttaaatgctcaaaagtcagaaacattttaagtgacaatatgatgctcaaaggaaa

SEQ ID NO: 888283 - DNA, 120 bp, Artificial Sequence
  ENSG00000267702_31 (sequence is synthesized)
tgtccattggagcattttagattcagatttttggattaggaaggtggatgtataatagaataactggtaagtataatgcaagttttcaagatccaaaaaagttcaaaattcgaaacactt

SEQ ID NO: 888284 - DNA, 120 bp, Artificial Sequence
  ENSG00000267702_32 (sequence is synthesized)
ctgactccaggcattttggataagggatacccaacctatattatgaagtggtagcaagaaaattacattgaaatggaacattttttcagtttatgtatccttttgtgaggtttttatttc

SEQ ID NO: 888285 - DNA, 120 bp, Artificial Sequence
  ENSG00000267702_33 (sequence is synthesized)
aaaatatcacagtccaagccaaaaaatatacgtgggtgtttcagtttatgaaaactgtaagttatgtttacttttctatatgtatatatttttttacctcaataaaatgatagccccaaa

SEQ ID NO: 888286 - DNA, 120 bp, Artificial Sequence
  ENSG00000267703_0 (sequence is synthesized)
cgatcactgtccacgtgttaacaaaaaccagagccgccaccaccccatcactggccttgcggggcaggagtgactgtccccaggttgtcctgcagatgaagaagccaattcagagcaggt

SEQ ID NO: 888287 - DNA, 120 bp, Artificial Sequence
  ENSG00000267703_1 (sequence is synthesized)
agggcccagaggacatccaggtgcactcagctcccaagccaatggtgtttatgacacccttcttcccccaactaaagtccgcaagtggccaagcgcggtggttcacgcctgtaatcccag

SEQ ID NO: 888288 - DNA, 62 bp, Artificial Sequence
  ENSG00000267703_2 (sequence is synthesized)
gccaacatgacaaagcgagacaccatctctacaacaaatacaaaaattagccaggcgtggtg

SEQ ID NO: 888289 - DNA, 120 bp, Artificial Sequence
  ENSG00000263635_0 (sequence is synthesized)
agtttccttgcacaagctctcctcttttttgcttgctgccatccacgtaagatgtgacttgatcctccttgccttccaccataattgtgaggcttccccagtcacgtggaactatccttc

SEQ ID NO: 888290 - DNA, 120 bp, Artificial Sequence
  ENSG00000263635_1 (sequence is synthesized)
aactctggacaccacctttatgaactgtaacactgtaacactcacctggaaggtctgcagtttcagtcctgaggccagcgagaccaggaacccaccggaaggaacgaacaactccagatg

SEQ ID NO: 888291 - DNA, 85 bp, Artificial Sequence
  ENSG00000263635_2 (sequence is synthesized)
agaccaggaacccaccggaaggaacgaacaactccagatgtgccgcctttaagagctgtaacactcaccgttaaggcgcccacca

SEQ ID NO: 888292 - DNA, 120 bp, Artificial Sequence
  ENSG00000263637_0 (sequence is synthesized)
gcaatctgcccacctcagcctcccaaatctccaggattacagctactggagatatctaagttttcataagagatcatcagaagaaaatgaagatccaggctctctttcagctgagaaaac

SEQ ID NO: 888293 - DNA, 120 bp, Artificial Sequence
  ENSG00000263637_1 (sequence is synthesized)
tacctggtgagattaaagaaaatgtttctcaagcacgaaaagtgtaagaattgacatagtaaatatgcaggcactcattgatcacttaagaaataaaaattgaaaaataatgccatgaaa

SEQ ID NO: 888294 - DNA, 120 bp, Artificial Sequence
  ENSG00000245281_0 (sequence is synthesized)
ggcagggggactcgcttggctttcgtgccatccgtggacacagtcgcgcgggaggagaagatgacagtgttctccctaaggatgaagtttgacttttgaaacatatcacatgcttaaagc

SEQ ID NO: 888295 - DNA, 120 bp, Artificial Sequence
  ENSG00000245281_1 (sequence is synthesized)
acatttgagctcctgcatgaacagtaagctagcagatggtagaaatattctttattaattcaaaaaatatttactgcggacctacaatgtgccaagcatgtctcctgacactggggataa

SEQ ID NO: 888296 - DNA, 120 bp, Artificial Sequence
  ENSG00000245281_2 (sequence is synthesized)
gcagtgaacaacaacaaaaagacaaacttcttccaccctgaggcgtatgttctcggtctttgtgggaagaaacaaatcacaaaagcaattaagagagctcaaacaatggggtttatgcca

SEQ ID NO: 888297 - DNA, 120 bp, Artificial Sequence
  ENSG00000245281_3 (sequence is synthesized)
ttatagtaagtggttgtatgacgccaatactgactcaaaccaacctttggatagaaaagtgtttcaggagtgaggtaaagaatgacacttccccttcataccaatcagtgttcattaagc

SEQ ID NO: 888298 - DNA, 120 bp, Artificial Sequence
  ENSG00000245281_4 (sequence is synthesized)
agatcgcttatttaaaatgttaacactcatcacattttacatatgttgaatgaaagtggttctgggtgatagtcatttatatctggtccacaaatagctcatacaatgtagtacaccatt

SEQ ID NO: 888299 - DNA, 120 bp, Artificial Sequence
  ENSG00000245281_5 (sequence is synthesized)
caactgaatggagttaaaactgctcagaatggttttctaactagcaaatgtaagtatgcctggttaagagatcttccctttgtaggaatgttacactgggatgcatagtgatgctgtcac

SEQ ID NO: 888300 - DNA, 120 bp, Artificial Sequence
  ENSG00000245281_6 (sequence is synthesized)
gcaaagctgccaaatcccagaattgaggcctcggtgaaaagcgcgctgagacttgggtaggaggcccggtgggacccgcgagctttctctcccagcccgatgcagcagttcattaagcgg

SEQ ID NO: 888301 - DNA, 120 bp, Artificial Sequence
  ENSG00000245281_7 (sequence is synthesized)
aggtggggccgggagcttcacccgtggcgcctcgatggggcgcctctagcaggcgggtgcagcctgtcccgcgtacccaggcgtcctcggtacccacgaaacggatccaaagagtctcaa

SEQ ID NO: 888302 - DNA, 120 bp, Artificial Sequence
  ENSG00000245281_8 (sequence is synthesized)
cactaatgtaacatcccaccctgacccatctttgccctctgagaaaagcggcccgaaatgagttgagttattcatccccaccgcggagtcagggacaaggagcagttgagtggccgagga

SEQ ID NO: 888303 - DNA, 120 bp, Artificial Sequence
  ENSG00000245281_9 (sequence is synthesized)
aacaatgggttactctcatctggattattgtagtcaccttgtcactggtatctctgctttctcctaacccccatctaatctccaaaaaatcagagcatgtcactcctggcccccaaatcc

SEQ ID NO: 888304 - DNA, 90 bp, Artificial Sequence
  ENSG00000245281_10 (sequence is synthesized)
tccaaaaaatcagagcatgtcactcctggcccccaaatccccccagtgactccgccctccccaccctgctcagaattaaagtcaatgatc

SEQ ID NO: 888305 - DNA, 63 bp, Artificial Sequence
  ENSG00000245281_11 (sequence is synthesized)
gcacaatgcctggctaatttttatattgttaatagagttggggtttcaccatgttggccaagc

SEQ ID NO: 888306 - DNA, 73 bp, Artificial Sequence
  ENSG00000245281_12 (sequence is synthesized)
acctcaggtgatccacccaccttggcctctcaattatctcaccacagaccacaaggctactttgatccaacca

SEQ ID NO: 888307 - DNA, 120 bp, Artificial Sequence
  ENSG00000245281_13 (sequence is synthesized)
ttatctcaccacagaccacaaggctactttgatccaaccagcccatcttatatactaccactttcctgttttctcacagtgctccaatcacactggccttctttctggacttcaaacatg

SEQ ID NO: 888308 - DNA, 120 bp, Artificial Sequence
  ENSG00000245281_14 (sequence is synthesized)
tccttgagggacatagcacttactgctacctttgtttggaatgttctttcccagatacccatgtggcacacccaaatgcttgagtggccccttattagtgaggccttcctatagcattat

SEQ ID NO: 888309 - DNA, 120 bp, Artificial Sequence
  ENSG00000245281_15 (sequence is synthesized)
atataagatggatataaggtaggactcagaacatactccctatcctccttactctacttcacctgactccaaacactgtcaccacctgacgtagtacatattttattttttatttgttta

SEQ ID NO: 888310 - DNA, 120 bp, Artificial Sequence
  ENSG00000245281_16 (sequence is synthesized)
gcatctgtctgcctctaactagaatgcaagctccatgaggacagagatttttgttttgtttaccgccatattgtcagcagctagagcaatgtctggcatgtagtagcactcaatgaatat

SEQ ID NO: 888311 - DNA, 120 bp, Artificial Sequence
  ENSG00000245281_17 (sequence is synthesized)
taattgaataaatgagctacctaaaaaataactgcattgatatcataacccaagtagtgtctgaaataatgtaatgaattaccagaatgcaaatgaattattttccagatgtctttaagt

SEQ ID NO: 888312 - DNA, 120 bp, Artificial Sequence
  ENSG00000245281_18 (sequence is synthesized)
tgggtgttggaaagtcaatatgcatttttcctacaaatataaagtaagtgctgttattatccccatcttatggataagacatctgatatttagcttatgcaactatgcctgttttctgat

SEQ ID NO: 888313 - DNA, 120 bp, Artificial Sequence
  ENSG00000245281_19 (sequence is synthesized)
tttgaggcatgtacctcaccacttatactaaatttccaggtcagatcataaaaccttacgtaagccataaaattcagatataaagtagtctaaaaaaaggaaggaccagaatggaagata

SEQ ID NO: 888314 - DNA, 120 bp, Artificial Sequence
  ENSG00000245281_20 (sequence is synthesized)
cctatcttacacacaaacagctgtatctagagtataggcttcttagctttctagatgtttcacccagttatagctgttctttgatagtgatacagtgatagaggcaggaggcagagaaat

SEQ ID NO: 888315 - DNA, 120 bp, Artificial Sequence
  ENSG00000245281_21 (sequence is synthesized)
tctaggcagatgggaagatccctggcaaagcaccaccctaaagctgaaaagcttgaaaccactgcctaaagtgagaacttatattcccgttttcctgcttgaatgttgtcttttcctaaa

SEQ ID NO: 888316 - DNA, 120 bp, Artificial Sequence
  ENSG00000245281_22 (sequence is synthesized)
ctacccatagcctgccccaccctatcttgtgcctataaagaccccagactcagccagcagaggggagaaacagctggacatcagagagaagcagccggacttcagagggacagcttgatg

SEQ ID NO: 888317 - DNA, 120 bp, Artificial Sequence
  ENSG00000245281_23 (sequence is synthesized)
acataactttggagaagaatgcagccagagatgggtggactccagggaaagattacctgccgccccaccctcttttcagctccccttcctgctgagagccactttcatcggcaataaaat

SEQ ID NO: 888318 - DNA, 73 bp, Artificial Sequence
  ENSG00000245281_24 (sequence is synthesized)
agtttataacatcagatatccggaataaattccatcacattaccaccagtaaacttattttataagatcattc

SEQ ID NO: 888319 - DNA, 120 bp, Artificial Sequence
  ENSG00000245281_25 (sequence is synthesized)
tgagccactgtgcctggcctcacttttccaattctaaagaatgtgtgtaagcctttccctcaacaacttattgaaaggcgaaaaaaggtttggaaataaaaggatctgatgtttgaaaaa

SEQ ID NO: 888320 - DNA, 120 bp, Artificial Sequence
  ENSG00000245281_26 (sequence is synthesized)
attgttttaatgctttgatgaagctcagcacgctgccgaaatctcggcagtattttttcttttctttttgcatgtgagagaaaggacaacaaattgcagttttatccatttgtattattt

SEQ ID NO: 888321 - DNA, 120 bp, Artificial Sequence
  ENSG00000245281_27 (sequence is synthesized)
cagggggactcgcttggctttcgtgccatccgtggacacagtcgcgcgggtaggtgaccgggttggatttcaaagtccagcaggaaatcctgccctctgggttgcacttcctggatgagc

SEQ ID NO: 888322 - DNA, 120 bp, Artificial Sequence
  ENSG00000245281_28 (sequence is synthesized)
ctttttgttggaggtggggaaatgagaaggtgatgttttgttttgctttttttcctattttttttttttaaaggaggagaagatgacagtgttctccctaaggatgaagtttgacttttg

SEQ ID NO: 888323 - DNA, 120 bp, Artificial Sequence
  ENSG00000253170_0 (sequence is synthesized)
gacacatttcttcttactggtggaaactttctgcacagtcctgaggcagcacagggcaacacacggacttctggttgctgctgctatttcaaacactgtcaaggacctccattataatca

SEQ ID NO: 888324 - DNA, 120 bp, Artificial Sequence
  ENSG00000253170_1 (sequence is synthesized)
gccacctcctgctgaggacttctcccctcaaaccagcactcaattcatccagacaagacttttagctgagacatctgtggtctacaatggaatgaaaccagaatcaacaatctggttaaa

SEQ ID NO: 888325 - DNA, 120 bp, Artificial Sequence
  ENSG00000253170_2 (sequence is synthesized)
tgagctttctttgatttgcaaagtgaaaatgccaactttttgattattaatatatttcaattattttataataagaagaaattatgtatgtgctatttatgggctaataaaaatctcagc

SEQ ID NO: 888326 - DNA, 120 bp, Artificial Sequence
  ENSG00000253170_3 (sequence is synthesized)
tgaggtgaaaagatgagcaactggacagattaaactgaaactttctttttaaaaagtttaattgtatgtatttaagatgtacaacatgatatacatcgagataataaaatggttactgca

SEQ ID NO: 888327 - DNA, 120 bp, Artificial Sequence
  ENSG00000253171_0 (sequence is synthesized)
tcagtgtgtcagtcacaccgggattcattcactgagttccgggagcaaggcagcttttcaaggctgggcactaaacagggggagctttgtgagtgcctagactcctctgccggccacctg

SEQ ID NO: 888328 - DNA, 120 bp, Artificial Sequence
  ENSG00000253171_1 (sequence is synthesized)
ctcttcctctccttggcttccacgaagaaagctgcatgagagcagggaattgctttgtccaatgctaatcactaaagcttagaatactgcttgttacatgggccagaagtcaagaatagg

SEQ ID NO: 888329 - DNA, 120 bp, Artificial Sequence
  ENSG00000253171_2 (sequence is synthesized)
ggtggaaacatcattgatgcaggatttttctttgtctccttaccagttggggacctctggctggtgatgttacctgccacaggatgtgccctgcccaatcagcttgccaagtctagcttg

SEQ ID NO: 888330 - DNA, 120 bp, Artificial Sequence
  ENSG00000253171_3 (sequence is synthesized)
tgcactggttcctgagttcttgtcctgtgcccaagaagaatgaggatgtgctgaccattgaaggagtcttgttctgttgaccaggctggaatgctgtggtgtgatctcgcctcatttcaa

SEQ ID NO: 888331 - DNA, 120 bp, Artificial Sequence
  ENSG00000253172_0 (sequence is synthesized)
ggggcggggctagctgcctcccggacgctaccagaggatgctgaagcagcgtcagagggcggggccaagcagggtgacagatccggacgtggacgtcttggggagccgccatgttgggga

SEQ ID NO: 888332 - DNA, 120 bp, Artificial Sequence
  ENSG00000253172_1 (sequence is synthesized)
cgccggctacgggcagcggcaggacccaagttcaaacgcgttttcgcaccaccttctttccctccccacccagtctcggggcagcgccccctagagaccggcgaaaatggcaagcgaggg

SEQ ID NO: 888333 - DNA, 120 bp, Artificial Sequence
  ENSG00000253172_2 (sequence is synthesized)
ggactttccctgacacgtgtagggaaatcagcctctcctcttggtatggccctaataacatggagaggaagggaagagggaatatcaagaacgcttcacagtggtctctttccatcttcc

SEQ ID NO: 888334 - DNA, 120 bp, Artificial Sequence
  ENSG00000253172_3 (sequence is synthesized)
ttctgtcaggcattctaataactatatattttttacatagaaaaaaaaagactggaagaaaagtatcaattgagatgtctctggaaagtaccagtaataattttttgtttcttcaaactt

SEQ ID NO: 888335 - DNA, 120 bp, Artificial Sequence
  ENSG00000258433_0 (sequence is synthesized)
ccaatcagcaggatgtgggcggggcccaataagggattaaaagctggccacttgagccagcagcagcaacatgctctggtaaccttccatggtgtggaagctttgttcttttgctcttca

SEQ ID NO: 888336 - DNA, 120 bp, Artificial Sequence
  ENSG00000258433_1 (sequence is synthesized)
gttcttttgctcttcacagtaagtcttgctgctgctcactctttgggtcctcactacctctatgacctgtaacactcactgcaaagttctgctgcttcactcctgaagtcagtgagacca

SEQ ID NO: 888337 - DNA, 61 bp, Artificial Sequence
  ENSG00000258433_2 (sequence is synthesized)
aaggaagaaactctgaacacatctgaggctattttcattcttgaagtcagcgagaccaaga

SEQ ID NO: 888338 - DNA, 120 bp, Artificial Sequence
  ENSG00000258433_3 (sequence is synthesized)
acaggaaggaataaattccggacacaaggaatgttcctcagttatcatgtgtgaaattttgtttcctgattttctgcaatagatccatgtgaatttcagtcatctgtctgtttttatgga

SEQ ID NO: 888339 - DNA, 120 bp, Artificial Sequence
  ENSG00000258433_4 (sequence is synthesized)
ttaaatgtcagctgaaggttgaatcgggcaaaaactgaaagaagacaacagtttgaaggcttccctttccatttccaaacataataccaaatgacttaaaatgaatgaagatgctttaga

SEQ ID NO: 888340 - DNA, 120 bp, Artificial Sequence
  ENSG00000258433_5 (sequence is synthesized)
attcactttgacccacatattgtcctttctaagatgtttcaaaatgggaaaatcctctgtgtcattttatttgaaaaaaaaaatcaggaagcaccattgcatgcatgtgagccgagcaga

SEQ ID NO: 888341 - DNA, 120 bp, Artificial Sequence
  ENSG00000258433_6 (sequence is synthesized)
tgtgcatacaaacatgcgtgtgtgtacatgaagcacaaccagcatttggaatatcctccctcaggcaaagcaaggacctagaggctgactcctgcgtattgtatcaccctggctacctgg

SEQ ID NO: 888342 - DNA, 120 bp, Artificial Sequence
  ENSG00000258433_7 (sequence is synthesized)
ccaactggcttcaaattgggcttgaccactgggaggtcctgagagaagactggaggacaacaagaggcagagactgtggtatttctttcttcctactgtgggccggattgctggcactgg

SEQ ID NO: 888343 - DNA, 120 bp, Artificial Sequence
  ENSG00000258433_8 (sequence is synthesized)
ctgtgtccttccaggaacacagctcccaaagagaggcccatctgcatggccccagctctcactgttctttgctaacacaacttccattcgtgcctctttaggcttggaagtggcaaagcc

SEQ ID NO: 888344 - DNA, 120 bp, Artificial Sequence
  ENSG00000258433_9 (sequence is synthesized)
tgtccactcttgctagtctctgagtgcctcatatccctgatttttcccttttgctctatccacaactcaggaagtaatttcttcattagagtcccctgtaccacatggactggattcaac

SEQ ID NO: 888345 - DNA, 120 bp, Artificial Sequence
  ENSG00000258433_10 (sequence is synthesized)
tttctgctattttcagtattaaattagttaatatttgtagaatgcttacaatagtgcctgacacataataagcatgctttatgtttgttaaatcaataaaaataaacacatataatataa

SEQ ID NO: 888346 - DNA, 120 bp, Artificial Sequence
  ENSG00000253174_0 (sequence is synthesized)
cctgttccacttggttttgaaattcaacttctcctttatttaaaaatgacatcaaaaccagtcttctcttgaagaggtaatttaggaaatggagcaatttactgtggttttagaggatgt

SEQ ID NO: 888347 - DNA, 120 bp, Artificial Sequence
  ENSG00000253174_1 (sequence is synthesized)
aaagtgctccgtgcagttggacatgtacagggcagcagctggaggcatgaggacgtagagccgtcattcaatgtggtccccgggccagcagcaactgcacaacatgggagctccttagaa

SEQ ID NO: 888348 - DNA, 120 bp, Artificial Sequence
  ENSG00000253174_2 (sequence is synthesized)
tcaataaaatgaccaaacaggtttgttcttgaaacattttcaattgaatgggaattaaatgcttttgaaaagtgacaaaatgatcatacagtgaagttgtctctttctttatataacaag

SEQ ID NO: 888349 - DNA, 120 bp, Artificial Sequence
  ENSG00000253174_3 (sequence is synthesized)
cataaatcaagtactaactcttgattttactctgaattaaccatgacatactaaatgaacttgggcttcaggcagaacctacatcttaaggcgagccctgtgcattctgggacctgtgac

SEQ ID NO: 888350 - DNA, 120 bp, Artificial Sequence
  ENSG00000253174_4 (sequence is synthesized)
cactaaatatctgctgtttcccacagccctgcccgcttctcaggactgtgggggaccaaatgggatccttattaacaaggtcctgtaagatctgggtccagcctgcctcagaccttatca

SEQ ID NO: 888351 - DNA, 120 bp, Artificial Sequence
  ENSG00000253174_5 (sequence is synthesized)
tgtaatactttctattttgagttgggctttctaaccaggctgacctcaagtagagtttgtttctgcctcagggcctttgcacaggctgttttctctgcctggaacaccctcccttttgac

SEQ ID NO: 888352 - DNA, 120 bp, Artificial Sequence
  ENSG00000253174_6 (sequence is synthesized)
ctctgcactgcagctgcctcctgttaatcagatctcagcctaaatgttgtctctccagtgagaccctccagggactgcacgagtatcaaatacctttgtcaagaaataaaacctccccag

SEQ ID NO: 888353 - DNA, 75 bp, Artificial Sequence
  ENSG00000253174_7 (sequence is synthesized)
gccgttcaccatgcctggctgtttatgcctagttttaaattagctggacagctccagatgcaaccagaggtgcaa

SEQ ID NO: 888354 - DNA, 72 bp, Artificial Sequence
  ENSG00000259152_0 (sequence is synthesized)
tgggtgttctagtcaagcagtcctcccgcattggcctccaaaagcgctgggattacaggcatgagacactgc

SEQ ID NO: 888355 - DNA, 120 bp, Artificial Sequence
  ENSG00000259152_1 (sequence is synthesized)
cccttaaaatgtgagttttaggatggtgggtagggcttcaatttgaaaactgttaccagggaatgtgattataacatgcacagttcccactaagtgtgaaaatatagctgagaagcatga

SEQ ID NO: 888356 - DNA, 120 bp, Artificial Sequence
  ENSG00000253177_0 (sequence is synthesized)
gagatcagacataaccttgccataagcagcaaagggcttggtgaaccctcaaaaaggctgtcaaacacccagaggccttggggatcaggaaggagctatcatgtggtctttcatcccatg

SEQ ID NO: 888357 - DNA, 120 bp, Artificial Sequence
  ENSG00000253177_1 (sequence is synthesized)
aggatggagaaaaagaagaaattgatgacagattctatcatcacaaaaggatgtgatttggaagttgcatgcatccattcagagcttcttggccaaaacagtcatattaacaaaactagc

SEQ ID NO: 888358 - DNA, 120 bp, Artificial Sequence
  ENSG00000253177_2 (sequence is synthesized)
tgccaacatactacaaaatgagctaagagagaattgtcctgcctgatgggcttcaaaccaccagaacatcagttcttcctggttctgcagtagtctccaaccttcagactcaaacttcag

SEQ ID NO: 888359 - DNA, 120 bp, Artificial Sequence
  ENSG00000253177_3 (sequence is synthesized)
cacctgttcttcagattttggacttgcagcctctataatcacatgagccaattccttatataaatttatttatacatgctgacagttggttctgtttctctggataaccctgactgttag

SEQ ID NO: 888360 - DNA, 120 bp, Artificial Sequence
  ENSG00000253177_4 (sequence is synthesized)
agctgttacctcaaatttgttttcttatatttggtgtctgttttggagtacttacaagtgcttaaaatgttctttttcaattaggtcctgtagaacatagctgcgcctggaattgaatga

SEQ ID NO: 888361 - DNA, 120 bp, Artificial Sequence
  ENSG00000253177_5 (sequence is synthesized)
tcgtgttttccgtgcagagctatctgcctttggacaggaggagaactctcagcaccattccctttccacgggagcttcttttttctcattctttttcttgcctccctcaactcccatcct

SEQ ID NO: 888362 - DNA, 120 bp, Artificial Sequence
  ENSG00000253177_6 (sequence is synthesized)
ctgttctgggagaaggtgaagctggcctgacaggcctgagggaagccggacggaggcacacttgccagcttttagttgagggaggcaccgcagcaaggctctccagtccctccttccctg

SEQ ID NO: 888363 - DNA, 120 bp, Artificial Sequence
  ENSG00000253177_7 (sequence is synthesized)
ggagcaccagctctgattctagtgggcagctgcagctaagacgaagacaaatgaatccagagacttctctcgagctatgagcctgagccaaaggcacagcccagctgtccagagagcttt

SEQ ID NO: 888364 - DNA, 120 bp, Artificial Sequence
  ENSG00000253177_8 (sequence is synthesized)
gcacttttaaatttagcacttgtcctcgccctttcggttcacgatttcttggaagtttcatttggaaaaagaggtgagggacagaagtagaagttgggaattctagatcccttgattcta

SEQ ID NO: 888365 - DNA, 120 bp, Artificial Sequence
  ENSG00000253177_9 (sequence is synthesized)
gaatattctaagatcttccaaactaaccctgattcctaaaaacagaataggacaatcttgttttcggtattgagaatagcaaatatagaaatcccttaattctttgacttagcttagcag

SEQ ID NO: 888366 - DNA, 120 bp, Artificial Sequence
  ENSG00000253177_10 (sequence is synthesized)
gtgcaattagttctatccctaagccttcttaccagaaaattttctagtgtaaaatgattggatgggataccaattgggatgggtgtggtaatagtaaaaccatattctttaataactttt

SEQ ID NO: 888367 - DNA, 120 bp, Artificial Sequence
  ENSG00000253177_11 (sequence is synthesized)
tcttatttgttttcctggaattttggttggcattttttaatgaattacatgcttatttttaaaaattattatgatggagaatttttgttaggcagaatttcaaatctgtcatctgctgtt

SEQ ID NO: 888368 - DNA, 120 bp, Artificial Sequence
  ENSG00000253177_12 (sequence is synthesized)
gactcttactttcactacaaatttacgaaggtagagagacccagttcttacttaagttatatctaacataaaaatacaattctgtcccaatctgttcatttaaagggtaaatttatagca

SEQ ID NO: 888369 - DNA, 120 bp, Artificial Sequence
  ENSG00000253177_13 (sequence is synthesized)
tctgttcaactttatatgctatctcaaaattgtcaacattttaagcaaggtgctacctaattttaatgggtgcacaagagggaaaagtgggtcattgacttcaaaggcgaaactataagc

SEQ ID NO: 888370 - DNA, 120 bp, Artificial Sequence
  ENSG00000253177_14 (sequence is synthesized)
tattaatgggctacgttgtgctgaattacaatctcttttcttgtttcaagttaaaatttttaagtggccacatgtttggcattgtaattgataccacaatgctgctgttccttgactcat

SEQ ID NO: 888371 - DNA, 120 bp, Artificial Sequence
  ENSG00000253177_15 (sequence is synthesized)
tcattctcaaatgtatatatatatatattcttagttcacaaatttctatttcttttacacaagttgctatttcttgtagtgttcatgaactgggtatgctgtcctttgtaatgaaagact

SEQ ID NO: 888372 - DNA, 120 bp, Artificial Sequence
  ENSG00000253177_16 (sequence is synthesized)
acagactgccatgaatagtaccttggcttctttttttacagtgtggaatgagagcatttattattgttgcattattgtatttttgaataaaaatccctattcccactgtaccaaatcaaa

SEQ ID NO: 888373 - DNA, 120 bp, Artificial Sequence
  ENSG00000253177_17 (sequence is synthesized)
caccaccaatttggatctgagatcagacataaccttgccataagcagcaaagggcttggtgaaccctcaaaaaggctgtcaaacacccagaggccttggggatcaggaaggagctatcat

SEQ ID NO: 888374 - DNA, 120 bp, Artificial Sequence
  ENSG00000253177_18 (sequence is synthesized)
gggatcactatatttgttctcaccatggaagtgaaaccaggacaagtggtaatcctgttttcctgtttatgaaatatctcacttccttagattctttttgagttttatggctatctatag

SEQ ID NO: 888375 - DNA, 120 bp, Artificial Sequence
  ENSG00000253177_19 (sequence is synthesized)
gtctcagtctctaagataatttttttattgttctattttatagattacatgttaatgtcaattaagctataaacattttattgctgatacattatcaaaatgcttttcaaacagccattt

SEQ ID NO: 888376 - DNA, 120 bp, Artificial Sequence
  ENSG00000253177_20 (sequence is synthesized)
ccaacagtctattctttggcaaaaaaacaatgccattctcttgccatggccaaatgtgagtgctactaacaggtaaactcttaatttgtaagtgaggctgaaatcttaaaatgccttcct

SEQ ID NO: 888377 - DNA, 120 bp, Artificial Sequence
  ENSG00000253177_21 (sequence is synthesized)
gaaacttatacatgattgattttgtttatttgtgtaatttctttgttctatggtttcagcttcaattgctgagaaaatgtcaagattatttcctgagaatttcctttgtggctaagacaa

SEQ ID NO: 888378 - DNA, 120 bp, Artificial Sequence
  ENSG00000253177_22 (sequence is synthesized)
aggagaagttttaattttactagaaactgtgaaacgaggcttttaaaaagtttcattaaaaaaaaaattagggaagaataggcatattcagaaaacctactttcatttaggctggattgg

SEQ ID NO: 888379 - DNA, 120 bp, Artificial Sequence
  ENSG00000280890_0 (sequence is synthesized)
aacagagggccgttacactcacagtgtaagaacagactgacaattccagggcgctggcttttatgaaaataggaaacgccacgatgcactctaacgtggagatggggcgccgttcacact

SEQ ID NO: 888380 - DNA, 120 bp, Artificial Sequence
  ENSG00000280890_1 (sequence is synthesized)
gagatgagacaggtggaaaagagagctcgcccttcttgcattgtcacacggagcggccctctccctgtgcagcgtggagtcccctgggcgcgggcgaggctcaggcgggacgcggcggag

SEQ ID NO: 888381 - DNA, 120 bp, Artificial Sequence
  ENSG00000280890_2 (sequence is synthesized)
accgagcttgtccctgtgtggacccgggcaactgccggtgggcgaggcctggatggtggccaggccgcagccacccggacgtttgcgagcgccgaaggtgtgtaaaaatcgctccagtgg

SEQ ID NO: 888382 - DNA, 120 bp, Artificial Sequence
  ENSG00000280890_3 (sequence is synthesized)
tgaattggaaactcgcagtgccaggaagtgcttccacaggcttaatgcatctctgctcctcttttttcataaaaattcaaagtgtttagacgggggatgctgagagagaagccggtttgc

SEQ ID NO: 888383 - DNA, 120 bp, Artificial Sequence
  ENSG00000280890_4 (sequence is synthesized)
tgggaggtgcgagcccagagcacacgctccacctagactgcgggcagtgccccaccatgaggagctcagcagtttcttcacgtggtgttttccaccatgcaaaaacatccaagatctatt

SEQ ID NO: 888384 - DNA, 120 bp, Artificial Sequence
  ENSG00000280890_5 (sequence is synthesized)
gtttatgtagcttgtactttgggtcaggccccggttcaattcctaacagtgacattttgtatttgtgtgactaatacacgtgttattaagaaagttactactgtctttaagatgcagttt

SEQ ID NO: 888385 - DNA, 120 bp, Artificial Sequence
  ENSG00000280890_6 (sequence is synthesized)
cctcatctgtgaaatggaatatttgtgtattccatatgttatataatattactgtctgcttaaccttggcatagtgtttgaaggacacaaagcctgagtccagcacagagcaggtgcttg

SEQ ID NO: 888386 - DNA, 120 bp, Artificial Sequence
  ENSG00000280890_7 (sequence is synthesized)
atgaatatcccagacacggaggaaggcagcatctcgattccaagttcttttcctgtatatacatttatatctctctgaataggcatctgcatttgtttcttttattatagacaggttgtc

SEQ ID NO: 888387 - DNA, 120 bp, Artificial Sequence
  ENSG00000280890_8 (sequence is synthesized)
tgatctcaatccgttagagatggggtagccttagggaccctctggtcccacatctcactgtacaggggatgcaggatttgccaaggtcctacccattagtgagtagcagagcctggatga

SEQ ID NO: 888388 - DNA, 120 bp, Artificial Sequence
  ENSG00000280890_9 (sequence is synthesized)
gttcctcggatcaggaggaggtggtgtgctcctgtcctcctgtgagatgaagccattcttaatcagagcctcggatcaggaggaggggctgtgcgcctgtcctcctgtgagatgaagcca

SEQ ID NO: 888389 - DNA, 120 bp, Artificial Sequence
  ENSG00000280890_10 (sequence is synthesized)
ttcttaatcagagcctcggatcaggaggaggggctgtgcgcctgtcctcctgtgagatgaagctgtgctcaaccccggcctcagatcaggaggaggggctgtgctcctgtcctcctgtga

SEQ ID NO: 888390 - DNA, 120 bp, Artificial Sequence
  ENSG00000280890_11 (sequence is synthesized)
gatgaggccatgctcaatcccaggacaggtgcaggcgattgctttcaccttctaactttagaatctggagagtccgcatagctcctactttcgaagctgcctcagagagtctttgttatt

SEQ ID NO: 888391 - DNA, 120 bp, Artificial Sequence
  ENSG00000280890_12 (sequence is synthesized)
ggaaaactgaagttccatcacctgccagttagtcttggtctacctccaacccaaacttgggctcagtgaagcagattaataaagcaatggggcatctctggctgctgcgagcaccatgaa

SEQ ID NO: 888392 - DNA, 120 bp, Artificial Sequence
  ENSG00000280890_13 (sequence is synthesized)
tatgcatgcagtgcaggccaccggctggaacgcttttcccaccctggaattcgccagtcacgtttctactctctgggtttctttctaagttgaaagattctggaattgtggagctggaag

SEQ ID NO: 888393 - DNA, 120 bp, Artificial Sequence
  ENSG00000280890_14 (sequence is synthesized)
ggatattagtgaagaccatctggtccagtgtcctcattttacagatgagctaactgaggccagaggggaagggccactccagggcacactgcgaatggctcacaaacccaggaccaggcc

SEQ ID NO: 888394 - DNA, 120 bp, Artificial Sequence
  ENSG00000280890_15 (sequence is synthesized)
agatctcgcagctcttgctccagaggatgcttagtgcctgcagtgcttagggcactcatttttttgctgaattttgtttattgagaccatatggaaagcgagttgaggctgaagttacat

SEQ ID NO: 888395 - DNA, 120 bp, Artificial Sequence
  ENSG00000280890_16 (sequence is synthesized)
gcattcaggaccaagagaaatgcaattgatcacaagatccttctgtgttgggccgctgagcaaatcgtggggtcaccctctctcttagcagtacaggctatgtcgatatgatgatatcac

SEQ ID NO: 888396 - DNA, 120 bp, Artificial Sequence
  ENSG00000280890_17 (sequence is synthesized)
cttagagctaatgaaatgcattcctgagaaataaaatgatcgtttctgttttctgcagagcaattccaaatgagagaagcaataacactttttatgacctattaaaatcactctcatttc

SEQ ID NO: 888397 - DNA, 120 bp, Artificial Sequence
  ENSG00000280890_18 (sequence is synthesized)
actaaacaaccttcacacctgtggcagtccttgcttccctcgcaggggaaataccctgatgtcggaaaaaactatccttgagtgaggcctgacactgtgcctgtgatgatgtgagccatc

SEQ ID NO: 888398 - DNA, 120 bp, Artificial Sequence
  ENSG00000280890_19 (sequence is synthesized)
tgcaaaattcaccgtggaggacagaatgccacttaggctaaagcaggaggaaggggcttataattctcgtcatcttttgtttgaatgcaaacgaaactacagcccaggaaataaattcaa

SEQ ID NO: 888399 - DNA, 120 bp, Artificial Sequence
  ENSG00000280890_20 (sequence is synthesized)
tgtactttgacaaaacatgggtaatcttaccagcatagtctcaagtggagaaaggtgaccacctaaactaagaatcaacaaaaatcaaacaaaatgaaacatgttgcttagaaatgcatt

SEQ ID NO: 888400 - DNA, 120 bp, Artificial Sequence
  ENSG00000280890_21 (sequence is synthesized)
catttgtgataaaactgtttttaaaaagcaagaacatgatagacacccaatttgggacagtggccatgtttagagggctgcaggggggatgctgtgtaggagaggcacagaaaattggtg

SEQ ID NO: 888401 - DNA, 120 bp, Artificial Sequence
  ENSG00000280890_22 (sequence is synthesized)
ttgtttgtaaattcgggggtgagttaaaaaagtagggaagaaggaagataccaaaccaacttctggacagaacttctgactttgtagcagccttgcagtctttattaagcaagatgcgtt

SEQ ID NO: 888402 - DNA, 120 bp, Artificial Sequence
  ENSG00000280890_23 (sequence is synthesized)
atgccaatgatttcagataatttactagcaagaggatactcaattctatcttgtttacgaatgaaaactccaaaataaatgaggctctgtgccgcggcacctcgttatttcttgttctgc

SEQ ID NO: 888403 - DNA, 120 bp, Artificial Sequence
  ENSG00000225807_0 (sequence is synthesized)
cacattgcaagacagaacccaattgtctcctttatctcctctaccagactttgtgctccatcagttgaagagtaggatgaagaaaaaaaaaaaaggttacatgaagatgatggaattata

SEQ ID NO: 888404 - DNA, 120 bp, Artificial Sequence
  ENSG00000225807_1 (sequence is synthesized)
atcaggccttgaagaacggagacaattccagccattgttgtagatgtggaggctgaaggacattccaatttgaaggaacagaagatgggatctcactctgctgcccaggctggtctcctc

SEQ ID NO: 888405 - DNA, 120 bp, Artificial Sequence
  ENSG00000225807_2 (sequence is synthesized)
cagagttcctgaagaggaggatgggaaccttggaggctgtttctccaggctgtgatggagtcttgttgtgttgcccagcctggcgtctaacccctggcctcaagcgatcttcctgccttg

SEQ ID NO: 888406 - DNA, 120 bp, Artificial Sequence
  ENSG00000225807_3 (sequence is synthesized)
gctggaagtataggcatgagtcaccacgcccagccaaatttgtgtcttatttttaataaatttggacgtggtcgtaatttaaagagttaaatacttccaaagacatgttagaaaaaagag

SEQ ID NO: 888407 - DNA, 120 bp, Artificial Sequence
  ENSG00000225807_4 (sequence is synthesized)
aagatccttttcaactctcctccattttcagctcctcagaagtaagcattttttcagttcttatagctgatcttttgttatttggtttatatttatatgtctaaataatacagttatgtc

SEQ ID NO: 888408 - DNA, 120 bp, Artificial Sequence
  ENSG00000225807_5 (sequence is synthesized)
gggcctcagctggaagaccggaagactggagggctgacgttacctgcaggcttcatggaggctggaggcttggtttcccagatggctcactcacacggcagactttgtgctccatcagtt

SEQ ID NO: 888409 - DNA, 74 bp, Artificial Sequence
  ENSG00000225807_6 (sequence is synthesized)
ctttgtgctccatcagttgaagagtaggatgaagaaaaaaaaaaaaggttacatgaagatgatggaattataat

SEQ ID NO: 888410 - DNA, 120 bp, Artificial Sequence
  ENSG00000225807_7 (sequence is synthesized)
agtgtgagccactgtgcctggccctgaataagtttcttgacccagagttcctgaagaggaggatgggaaccttggaggctgtttctccaggctgatggagtttcgctcttgttgcccagg

SEQ ID NO: 888411 - DNA, 120 bp, Artificial Sequence
  ENSG00000225806_0 (sequence is synthesized)
acacacaacttggatatcaacagggagcagaaaacaaacccactagcaggaccaaaaggcagacccatcagcagaacacaggcggcagcttccacaagtaactccaaaactgaaagtcaa

SEQ ID NO: 888412 - DNA, 120 bp, Artificial Sequence
  ENSG00000225806_1 (sequence is synthesized)
atccaggagaagactgaggaagctccattttctttgagcacttaattgtaaattaagatttgctgatgatgatgggctaatttaagctaccgtggaaagagggaagaaatggaagctgct

SEQ ID NO: 888413 - DNA, 120 bp, Artificial Sequence
  ENSG00000225806_2 (sequence is synthesized)
gatcgtaggaagcagtacctgtactgcgcagggttgcagtgacctaacaccaagaaataaaaactctggaaaactagcccttcacatatggaaggtatgattacccccgggtatgggagc

SEQ ID NO: 888414 - DNA, 120 bp, Artificial Sequence
  ENSG00000225806_3 (sequence is synthesized)
taacctgaggtgagaaagcagcagtcacccaggaaggtggttgactttcaagagcacttggcaacagtgagggaaggcacatggggagttgcgggatgatgtcagcatgtagtaagaggg

SEQ ID NO: 888415 - DNA, 120 bp, Artificial Sequence
  ENSG00000225806_4 (sequence is synthesized)
gaactctgaaatgtccaaggccagcccaagcaaacggcgctatctccacgtggtgccctggtctggagagggaaggaagaaggctaggctatgttttgccaagccaagacttatcacaga

SEQ ID NO: 888416 - DNA, 120 bp, Artificial Sequence
  ENSG00000225806_5 (sequence is synthesized)
ggaagctttcctcaatcccttccactggtagcaaaggccctggatccctgtcttctgccaagatggtgccaaatagctcaaccatacaaaggaaatggatataaaacttaattgggaccc

SEQ ID NO: 888417 - DNA, 120 bp, Artificial Sequence
  ENSG00000225806_6 (sequence is synthesized)
agagacatctaatctctaagttaaagcaccactccttttactcataaccattggaggcatcccaaagtctagaaaagccgaaatgaccctcaattcatattctggtgttatttaacccac

SEQ ID NO: 888418 - DNA, 120 bp, Artificial Sequence
  ENSG00000225806_7 (sequence is synthesized)
tccattttctttgaggtacatcaacatcaataacagatcaatggacccacttaatggagctcttaattgagtagaaaaaaatatttaagagttttgccgctctacggcaggaaagctaat

SEQ ID NO: 888419 - DNA, 120 bp, Artificial Sequence
  ENSG00000225806_8 (sequence is synthesized)
cttgaagatggaaactcatccaggatggagaataatgtagggagactagttaaaaatagacatggaccagtttactttcctgcttatttacaagatgccttatttaaatgacactttgat

SEQ ID NO: 888420 - DNA, 120 bp, Artificial Sequence
  ENSG00000225806_9 (sequence is synthesized)
ccaacatcttactaaacaagtgacaacaggaaaaaataagaggcagttggtgcacctggagatgtgatattgagcccagtcaggaggcctgaggttctaataaaatttccttagataaaa

SEQ ID NO: 888421 - DNA, 120 bp, Artificial Sequence
  ENSG00000225806_10 (sequence is synthesized)
tcagatcagacctatggtagaagacagcaaggagtaaacgctgtttcctgttttcatttttttcaactggaccaccagctactacaaccctagaaaaatggaggcacagatatgtgggtc

SEQ ID NO: 888422 - DNA, 120 bp, Artificial Sequence
  ENSG00000225806_11 (sequence is synthesized)
ttctctttcctttggaagggtcctgtccatggcccttcttgggttctggactgtcctacaatgcctgactttagtttctgtggatcatgataagcattattcattttttccccctcaaat

SEQ ID NO: 888423 - DNA, 120 bp, Artificial Sequence
  ENSG00000225806_12 (sequence is synthesized)
atcccacagcttcaaacttacctgaatgcaggttccctgtaaaaataccatcatgtaatttgcacattagcaatcagtttgatgaatggcaaaatcgttcaaatggaaaagaggagagag

SEQ ID NO: 888424 - DNA, 120 bp, Artificial Sequence
  ENSG00000225806_13 (sequence is synthesized)
atagtgtggtcttttgatggagggggagaggcaagagccagataaatcagaagagagaggcgaggctcttgcagcccaagtcttaatttccttgtaagaatcgatgctcactcagtggtg

SEQ ID NO: 888425 - DNA, 120 bp, Artificial Sequence
  ENSG00000225806_14 (sequence is synthesized)
acactgagcttgtgaaagctcaactgtgacactctttagaaagtagtacagagatttttttccttcccattatcaactcattaaaggaagttaaaagtacttactctgtcccacacacag

SEQ ID NO: 888426 - DNA, 120 bp, Artificial Sequence; identical to SEQ ID NO: 806692
  ENSG00000229311_0 (sequence is synthesized)

SEQ ID NO: 888427 - DNA, 120 bp, Artificial Sequence; identical to SEQ ID NO: 806693
  ENSG00000229311_1 (sequence is synthesized)

SEQ ID NO: 888428 - DNA, 120 bp, Artificial Sequence; identical to SEQ ID NO: 806694
  ENSG00000229311_2 (sequence is synthesized)

SEQ ID NO: 888429 - DNA, 120 bp, Artificial Sequence; identical to SEQ ID NO: 806695
  ENSG00000229311_3 (sequence is synthesized)

SEQ ID NO: 888430 - DNA, 120 bp, Artificial Sequence; identical to SEQ ID NO: 806696
  ENSG00000229311_4 (sequence is synthesized)

SEQ ID NO: 888431 - DNA, 120 bp, Artificial Sequence; identical to SEQ ID NO: 806697
  ENSG00000229311_5 (sequence is synthesized)

SEQ ID NO: 888432 - DNA, 84 bp, Artificial Sequence; identical to SEQ ID NO: 806698
  ENSG00000229311_6 (sequence is synthesized)

SEQ ID NO: 888433 - DNA, 120 bp, Artificial Sequence; identical to SEQ ID NO: 806699
  ENSG00000229311_7 (sequence is synthesized)

SEQ ID NO: 888434 - DNA, 120 bp, Artificial Sequence; identical to SEQ ID NO: 806700
  ENSG00000229311_8 (sequence is synthesized)

SEQ ID NO: 888435 - DNA, 120 bp, Artificial Sequence; identical to SEQ ID NO: 806701
  ENSG00000229311_9 (sequence is synthesized)

SEQ ID NO: 888436 - DNA, 120 bp, Artificial Sequence; identical to SEQ ID NO: 806702
  ENSG00000229311_10 (sequence is synthesized)

SEQ ID NO: 888437 - DNA, 120 bp, Artificial Sequence
  ENSG00000229311_11 (sequence is synthesized)
gggaaccactgatttttttttctatttctatagtattaccttttccagaaggtcataaagttggaagtgacatatgtggcctttttagattggcttctttcattctgcagtatgcatgta

SEQ ID NO: 888438 - DNA, 120 bp, Artificial Sequence
  ENSG00000229311_12 (sequence is synthesized)
agcttccactgtgtcttttcatggcttgacagccatttattttatcattgaatggtattcagttgtctggatgtaatacagtttgtttaattattcacctactgaaggtaatcttgcttg

SEQ ID NO: 888439 - DNA, 72 bp, Artificial Sequence
  ENSG00000229311_13 (sequence is synthesized)
tatataccaagaaacaagattgcggggtcgtataataagagtagatttagttttctaagatgccacaaaact

SEQ ID NO: 888440 - DNA, 120 bp, Artificial Sequence
  ENSG00000229311_14 (sequence is synthesized)
agattgcggggtcgtataataagagtagatttagttttctaagatgccacaaaactattctccattttgtatttccatcagcactgaatgagagttcctgttgcttcacatcctcatcag

SEQ ID NO: 888441 - DNA, 120 bp, Artificial Sequence
  ENSG00000229311_15 (sequence is synthesized)
gccattctaatatgcatgcagtagtatctcattgcagtgctgtgtttgagaatgtgagtagctgcagttcattcactcttagtgctgcgaggtactctattattggaatatatgatcatt

SEQ ID NO: 888442 - DNA, 120 bp, Artificial Sequence
  ENSG00000229311_16 (sequence is synthesized)
tagttacctattccacaatctacccatattgagagataactggattgtttccaggtttttaaaattgtgaacattctcatatatccctaggtaaacaaatgcaagaatttttctggggcc

SEQ ID NO: 888443 - DNA, 120 bp, Artificial Sequence
  ENSG00000229311_17 (sequence is synthesized)
tgtaacaggctgactagattgcactaggttgtagtgaagccgctgggtcagagggtacatgcatgatcagctgtatgagctaacatccgttttccaaatggctgtccttctacttgcatg

SEQ ID NO: 888444 - DNA, 120 bp, Artificial Sequence
  ENSG00000229311_18 (sequence is synthesized)
ggatgaatgcttccacggttctttatccttgccaatactacacctttcagaacttccaaaaaattttgtcaatatgtgtgaaagggtatctaattgttaattttcattttcatgattatt

SEQ ID NO: 888445 - DNA, 120 bp, Artificial Sequence
  ENSG00000229311_19 (sequence is synthesized)
attaggttgagcactttttcacatgcttatgggctatttatgctaacttcttgaggtgttatttttcacttattaatttataggagagctttatatattctggatactaaacctgtctag

SEQ ID NO: 888446 - DNA, 120 bp, Artificial Sequence
  ENSG00000229311_20 (sequence is synthesized)
gtaacatgtgttgcaaatatctctgccaagttttgcatatttttttctcattgcggtatccaataaacagaagtcttaaatttttatgtgatcaagttagtttttactcttgccgtttgt

SEQ ID NO: 888447 - DNA, 120 bp, Artificial Sequence
  ENSG00000229311_21 (sequence is synthesized)
tcttcttccctatgtaaagataaaagagatgctccacagtttttttctaagaatgttgagaaggtatctttatccattaaaatatatttttaggtttggtctatgggattaagtttcaat

SEQ ID NO: 888448 - DNA, 120 bp, Artificial Sequence
  ENSG00000229311_22 (sequence is synthesized)
ttccttttttcccccttatggagaccagtggtcccagtgttgcttattgtaaaatttactatcttcacttaaccacaataaaagctgtgttacaaaatatgtttccaagtatgtgtgaaa

SEQ ID NO: 888449 - DNA, 120 bp, Artificial Sequence
  ENSG00000229311_23 (sequence is synthesized)
aatatatttatctttatgattctactcagattaattagctctcaggactgctgtgtccagagttgattccttctggtgggttcgtggtgttgctgacttgaagaatgaagccgccgacct

SEQ ID NO: 888450 - DNA, 120 bp, Artificial Sequence
  ENSG00000229311_24 (sequence is synthesized)
tcacgagcgctgattggtgtgttttacagagcatggattggtgcgttttacagagcgctgattggtacatttcacagaactcgtgagacagtcgcaggtggcatgatttgatttgtgtga

SEQ ID NO: 888451 - DNA, 120 bp, Artificial Sequence
  ENSG00000229311_25 (sequence is synthesized)
aggcaatgaaatgatacacagatacaccgaagcctcccaaaagaatcctggttccaagattcaagaagatggattaatgtttttccattaattgttggaatttatgccatttttttacta

SEQ ID NO: 888452 - DNA, 120 bp, Artificial Sequence
  ENSG00000229311_26 (sequence is synthesized)
tgtgccatcaattttaaagcacttctgaaaagagataacaatctacaatagctggcattttaaattcataaaaatatagtattttcttctatttttatacatttatgatgcattatttct

SEQ ID NO: 888453 - DNA, 120 bp, Artificial Sequence
  ENSG00000229311_27 (sequence is synthesized)
tatttcccaggaattttactacctttgttttgaatgattaaaaaggaaacatagcaccttttttcaacacatcaccaagatagcctagttaatattcttctctttctgaagtagttgaat

SEQ ID NO: 888454 - DNA, 120 bp, Artificial Sequence
  ENSG00000229311_28 (sequence is synthesized)
tgggagagacagcttgccaggcctgctgccacttgtcagcatcgcatccctacattcaaccacacttgcatctaacgaccgtctctttcattaaatttcttttgcaccttttcttcctga

SEQ ID NO: 888455 - DNA, 120 bp, Artificial Sequence
  ENSG00000229311_29 (sequence is synthesized)
atgagtgcatgatagttaattttcctgtgcacttgcatgtctcaagaaggttttaattctttttgtattgcattaatatttaagttaagtttataattgcaaaatgatttatactcacaa

SEQ ID NO: 888456 - DNA, 120 bp, Artificial Sequence
  ENSG00000229313_0 (sequence is synthesized)
cgggacactcacggttgagctggcgcctccggatcctgtccctccatggcctgtttctgatccagtgtaatcgcgaaggatggaggaggaagcaattgaagggagataaagaaaggaaca

SEQ ID NO: 888457 - DNA, 120 bp, Artificial Sequence
  ENSG00000229313_1 (sequence is synthesized)
ataaggggtcttttctccttgacatctctgccaaggcaccttgactcatgagagtgtccagcctacttgaggaaaattgtccaagaagtctaaaggtttcttccttatgagctggcttga

SEQ ID NO: 888458 - DNA, 120 bp, Artificial Sequence
  ENSG00000229313_2 (sequence is synthesized)
agagcctcagagaggggagaaagccttaatggagacttcacactctaaggtgtggtccagagtgtgcctacgacccaaggcaccaagacaagacctatcaccaggaactacctcgcgaac

SEQ ID NO: 888459 - DNA, 120 bp, Artificial Sequence
  ENSG00000229313_3 (sequence is synthesized)
taagcaaaatctcaacagaacaatgtacacccacatccgaaagaaaatatgctggcgtgtaaaaaaggaagaaaaactaccaagaaaaattaaacatttcagttaactggccaacgtatt

SEQ ID NO: 888460 - DNA, 120 bp, Artificial Sequence
  ENSG00000229312_0 (sequence is synthesized)
aaaaattcacccctgcttccaccagtagtagaatttgtagctagtgtgtctggaccagggtgatacaagcatcacaggagagtggagagctagtgttaaagacaagtccctaaaatgggc

SEQ ID NO: 888461 - DNA, 120 bp, Artificial Sequence
  ENSG00000229312_1 (sequence is synthesized)
tctacaatctcaggcaaagccctcctgttcccagccccaagtcggttaaacccatgttaaatctataggttgaagacctggatcattcgaagcccagagccttgcacagcagcgatctgc

SEQ ID NO: 888462 - DNA, 120 bp, Artificial Sequence
  ENSG00000229312_2 (sequence is synthesized)
tccaacagagggtgatgtcatcatccgaggccacacaaataatgcatttctcaccatcaaaaagcttctgaagccatgttctcaaaggcaaaaaataaataaataaataaccaattaact

SEQ ID NO: 888463 - DNA, 120 bp, Artificial Sequence
  ENSG00000229315_0 (sequence is synthesized)
gggggaggagtgcgagggtctctgagacaggttgggagccagccccacctccatttccaaagcgggggtccaggcacaggaacagccaaacgcccgaaccagcggggttacctttgccac

SEQ ID NO: 888464 - DNA, 120 bp, Artificial Sequence
  ENSG00000229315_1 (sequence is synthesized)
cagagattgacaaagcaacccaaagcagcagctgccaacggccgctgtgcccacctcatcagcagctaaagagtataattttaaaaaaagtcacagaagaatgtggagacacttagcaaa

SEQ ID NO: 888465 - DNA, 120 bp, Artificial Sequence
  ENSG00000229315_2 (sequence is synthesized)
acggactctcataagaaattgacaccacattgatcacatctgagctctggaaaaataacaaagaaccagtcctttatctccaggggtgctgctgttaaacagtaactattccctatctga

SEQ ID NO: 888466 - DNA, 120 bp, Artificial Sequence
  ENSG00000229315_3 (sequence is synthesized)
ttttaaaaaaagtcacagaagaatgtggagacacttagcaaaacggactctcataagagtgttcgatggtgctgctactaatgaaagatttgaggaaactcctaaggtccctccagtgta

SEQ ID NO: 888467 - DNA, 120 bp, Artificial Sequence
  ENSG00000229315_4 (sequence is synthesized)
tttactcatgagctggtcctgtccagaaaacagccaatgctcattcccgacactttcttgtcactgctcttttctgttccctattttgtcagtaaggaagtaaacaaccgctaaaacaac

SEQ ID NO: 888468 - DNA, 120 bp, Artificial Sequence
  ENSG00000229315_5 (sequence is synthesized)
cctctaacaacagaagaccctcatgagaacaccaggcagcagaagcttctttagcagtaaaagatatctggatattcatattttgttccatgatcttcaacattaaataaataaacttaa

SEQ ID NO: 888469 - DNA, 120 bp, Artificial Sequence
  ENSG00000229315_6 (sequence is synthesized)
caacagctaatgggagacgaagaggaaaaattggggtacctattcccctagattactccctgctgattgctgcagaggggcttcatccttgccctggtttctggaaaacactctttcatt

SEQ ID NO: 888470 - DNA, 120 bp, Artificial Sequence
  ENSG00000229315_7 (sequence is synthesized)
gcccatgcaggcctaggagtgatgatgcctcactggatggcaaagtctcttattggtttccctaaatcttactcacaacttgtagatactccctctattaaatccttttcagttacccag

SEQ ID NO: 888471 - DNA, 120 bp, Artificial Sequence
  ENSG00000229315_8 (sequence is synthesized)
tcgcgtcctccccgcgcggcggacagcccgggcgcccttcctctctgcgggactgcagctgacaagtttatttaatccctgaacctggatccaaggcatctccctgtagaaaacatcaga

SEQ ID NO: 888472 - DNA, 120 bp, Artificial Sequence
  ENSG00000229315_9 (sequence is synthesized)
tttgtgggcagagctccggctgacctggtgttgtcctgctatggctacagacttctgactatgcttatcagaaaaactttcatttggttcaaggatttttgctgacaagtttatttaatc

SEQ ID NO: 888473 - DNA, 120 bp, Artificial Sequence
  ENSG00000229315_10 (sequence is synthesized)
acctgggtgctcgcgtcctccccgcgcggcggacagcccgggcgcccttcctctctgcgggactgcaggtctatccgctaagcgcgcgtgaccaaaaacggctctcagcgggtcccagct

SEQ ID NO: 888474 - DNA, 120 bp, Artificial Sequence
  ENSG00000230794_0 (sequence is synthesized)
tcaggtatcagcactttgcttatttccggccgaagcccaggaaggggagaattaaagttgcagatggaagttgtcataggggccctcataagtggaagaagaaggtcagtgttagagaga

SEQ ID NO: 888475 - DNA, 120 bp, Artificial Sequence
  ENSG00000230794_1 (sequence is synthesized)
cctaaagcctccagaaaggaatgcagccctgatgacaatatgattttagcccagtgagacccatttcagacttctgggtgctgaaactatactacaataaatttgtattgttttaagtaa

SEQ ID NO: 888476 - DNA, 120 bp, Artificial Sequence
  ENSG00000278060_0 (sequence is synthesized)
gcccgtgtcattaagagagagacttttattattcccatagggaagggggacactggggatcactaaactacagtggtgcctggaaaataaattaaaacagaaatgcatcaaaacaaaagg

SEQ ID NO: 888477 - DNA, 120 bp, Artificial Sequence
  ENSG00000278060_1 (sequence is synthesized)
gcttgtccctctgtcaatggcggccccgggcttcaagccctgtggggccatgactccaggcctccccaaagcctggccagggagctttcttagcaacctcatgtagctctctcccacccc

SEQ ID NO: 888478 - DNA, 120 bp, Artificial Sequence
  ENSG00000278060_2 (sequence is synthesized)
tcatcagaggctggagctgggcaggtggggggccttgtccctcaggtgccagctcctcagggtagtccgaaatccaccagtgagacctcattctccttggacagacaaggacagggagga

SEQ ID NO: 888479 - DNA, 120 bp, Artificial Sequence
  ENSG00000227403_0 (sequence is synthesized)
agagtgccccggcgtctttctagcctccgcctccaggcgggtgaggaggtgacacctgagaattcctccctctcacccctgaccctgccggaaagcgaaactgagatgcgggcattgggc

SEQ ID NO: 888480 - DNA, 120 bp, Artificial Sequence
  ENSG00000227403_1 (sequence is synthesized)
cctgggaagcgtggggaaggggaaaggagaaagccagaaaatggagaaattaagtcctttccatggatcattccttctgtaaacagagatcacaaagcaagagcttcagcatcctcgtga

SEQ ID NO: 888481 - DNA, 120 bp, Artificial Sequence
  ENSG00000227403_2 (sequence is synthesized)
aaaagacattttgttctgggtgtcatcatctccttccactacagcttgcaattggaacaagcttcacatcctgggggtgctgcctatctctgtcttgatttctgtctgtctattcctccc

SEQ ID NO: 888482 - DNA, 120 bp, Artificial Sequence
  ENSG00000227403_3 (sequence is synthesized)
attgacaggaatgtcgtttgtatcctccacgcagcagtttgcagaaatccagcaaggtttatggtttatgttgcccagcatgtataaacacaacgctctcaaatgctttttaaaaatcta

SEQ ID NO: 888483 - DNA, 120 bp, Artificial Sequence
  ENSG00000227403_4 (sequence is synthesized)
tgaatttgttagatgtcttcacatcctggtcctcctaccccaattctcaaacacaaagtactctgttgccctattatagtcctgcgatagttctggctaggattaggttgacggtctaag

SEQ ID NO: 888484 - DNA, 120 bp, Artificial Sequence
  ENSG00000227403_5 (sequence is synthesized)
ccccaagaaaggcctggcattttcatagcaggctttccccagtgctttgagtcttcctctctcactccctttttctttttccctcggaggagggggtgttgggggtgggaggtgattagt

SEQ ID NO: 888485 - DNA, 120 bp, Artificial Sequence
  ENSG00000227403_6 (sequence is synthesized)
aaatgtttcaggtaatctgtgaattcttaatagtcatatttccgtggtggaagatctccctatttctctgatgtgacaggttacagaaaccttggtgttgggggttttacagatatttac

SEQ ID NO: 888486 - DNA, 120 bp, Artificial Sequence
  ENSG00000227403_7 (sequence is synthesized)
aagttctaggagtttgaactttgggtcaagatgttgattccttttaatgtgcgagggtgaaggaggttttattttgctttattcttttggatattatgagatgagattgtatccagtctt

SEQ ID NO: 888487 - DNA, 120 bp, Artificial Sequence
  ENSG00000227403_8 (sequence is synthesized)
ggctgtaacctataccataaatgcagagctgcaaccattatttctgtctctttctccttttatcacctacacttctagagatattactttcagttttattgcaaatcatctgtgtcttta

SEQ ID NO: 888488 - DNA, 120 bp, Artificial Sequence
  ENSG00000227403_9 (sequence is synthesized)
aaattttagattattaatgttccacctaaaaggatactgtacacttttcattgccaatatgggctttgaagcttaaatatcaacatttttataggaaatttacccatgtcaaatttaaat

SEQ ID NO: 888489 - DNA, 120 bp, Artificial Sequence
  ENSG00000227403_10 (sequence is synthesized)
atatttgcttatatttcttggaaaaaagattttggataactatcaattaagcagccaattccatttggggtgcagaaaattttgagccccttgataagaaggaacaaaatttttcctcta

SEQ ID NO: 888490 - DNA, 120 bp, Artificial Sequence
  ENSG00000227403_11 (sequence is synthesized)
aataaccaactctggatcagaaaaactgaacttttctaaatatttattattaacaaaacttttttttgtctgattccactagaagcattctatgttgtgaacactataaagttatcctat

SEQ ID NO: 888491 - DNA, 120 bp, Artificial Sequence
  ENSG00000227403_12 (sequence is synthesized)
gttgtgaacaccataaagttatgagggaaaaaatgtcaaatctaaattttatttagaagtaacatattgtttttctggacttgcaatccaattcgaatgcatcgttagacttttctgttt

SEQ ID NO: 888492 - DNA, 120 bp, Artificial Sequence
  ENSG00000227403_13 (sequence is synthesized)
tcttatgattaaacaacaatggcttaaaatgatagcaagtcaactgaaaagttgctttggaataaaacaaaagtgggaatgccaactttcttttcttctctataacttcattaacatggt

SEQ ID NO: 888493 - DNA, 120 bp, Artificial Sequence
  ENSG00000227403_14 (sequence is synthesized)
tgtatagacatttgcatgtaaaatgtagctaacaaaaattacacagaagtaaatttagtcctctagtgcctacctctatggtgaaatcagaccatttggcatagtttgaagtcttccaag

SEQ ID NO: 888494 - DNA, 120 bp, Artificial Sequence
  ENSG00000227403_15 (sequence is synthesized)
aagcctggtttccacctggaaaataaattactaaatttgaatgtgttacttatactatggtgagttgtctatctgttacattttattttagtgcatatactagaaattgtatttagggtg

SEQ ID NO: 888495 - DNA, 120 bp, Artificial Sequence
  ENSG00000227403_16 (sequence is synthesized)
ttctaaaattgtcatctgtcaaggtagagaattataataatataattatactcagaaagcgttctgattttagattattttggcactgttacaaatatgatgaattttaaaaaaatgcag

SEQ ID NO: 888496 - DNA, 120 bp, Artificial Sequence
  ENSG00000227403_17 (sequence is synthesized)
aatgtttattacaaattcatatgtttaattgtcaaattctgagattaatttagataagctataaccaaagtttattttctttgcatttattggtacatagttaatgcttatacacaggct

SEQ ID NO: 888497 - DNA, 120 bp, Artificial Sequence
  ENSG00000227403_18 (sequence is synthesized)
tcagtgtaacacctatacactattacaatatttagctgtacttatttgctttatctttaaatggtactttgtcccaaaattttctgagtttgataaattattaaacatttatcaaatcac

SEQ ID NO: 888498 - DNA, 120 bp, Artificial Sequence
  ENSG00000227403_19 (sequence is synthesized)
gaaggggaaaggagaaagccaggttaactacgtcaggattaatgtgttccacttctgctgcctgagatcaagtctttgttgtcttgctgagttttgtctgtttcatggaacacaacaata

SEQ ID NO: 888499 - DNA, 120 bp, Artificial Sequence
  ENSG00000227400_0 (sequence is synthesized)
acttacccttccaccttctgtcatgtgaggacactgtttctcccctctggaggatgtagcaacaaggcactatttgaaagcatagagcagcccttacaagacaactgaatctgctgccac

SEQ ID NO: 888500 - DNA, 120 bp, Artificial Sequence
  ENSG00000227400_1 (sequence is synthesized)
atcttggacttccagcctccagaactgaactccacacaatgatgaatagaagaaggcattgaggccttgttctcgatttaaagccactacgtgtgagtgcatcttcatccaccttggcga

SEQ ID NO: 888501 - DNA, 120 bp, Artificial Sequence
  ENSG00000227400_2 (sequence is synthesized)
aatgccaagtgacaagaccactgggtaaggagataattgattctacgcctcttcagtgagcaggcaagtttgtgtccagggcagtgtttataaacctggaacccatagtcactgatgaag

SEQ ID NO: 888502 - DNA, 120 bp, Artificial Sequence
  ENSG00000227400_3 (sequence is synthesized)
tttgcactggcacctaccaccagctcttccaccctgagcagctcatcacagacaaggaagacgctgcccataactatgcctgggggcatcacgacattggcaagatcattggcctttgga

SEQ ID NO: 888503 - DNA, 120 bp, Artificial Sequence
  ENSG00000227400_4 (sequence is synthesized)
actctgctctcacgcaaaccgcaaaccgaagggctggtctcactctcactgggtacccccaacagccccaagtctgtttacagatggtgagcgagatgggcttgagaacttgcctcaggc

SEQ ID NO: 888504 - DNA, 120 bp, Artificial Sequence
  ENSG00000227400_5 (sequence is synthesized)
tacccacctcccagctgcaaaagaaaagggctgtgaagtctgcacactgggatttgccccctcccccgagttctggccatgaggtttctcaccctgttctcacccagttcaaattgttac

SEQ ID NO: 888505 - DNA, 120 bp, Artificial Sequence
  ENSG00000227400_6 (sequence is synthesized)
ggacccagcgagttcccagggcctttctgctgcttcttctacccctgtatttcacccggctctctaaattgactcatctcaagccactacgtgtgagtgcatcttcatccaccttggcga

SEQ ID NO: 888506 - DNA, 120 bp, Artificial Sequence
  ENSG00000227407_0 (sequence is synthesized)
gtcgtcccaagaaatcagcagaaacggccttcaccgagtgctaagcacctgcacagcagtctcctccaaggacagcagaggcttctgcggggcgaggaggggtcgttttcccacgaactc

SEQ ID NO: 888507 - DNA, 120 bp, Artificial Sequence
  ENSG00000227407_1 (sequence is synthesized)
actcttcaggcccgcccatcgccctggccccgccctgcgtccccgcccacaacccaaggccccgcctagctctgcagccccgcctacgccccacagctccatcccgccccgtccgccttc

SEQ ID NO: 888508 - DNA, 120 bp, Artificial Sequence
  ENSG00000227407_2 (sequence is synthesized)
gaactgaggcacagcttctcgctccaggcccagcagctgggagtggatgttggccagagctcgctgggacagagtcagcctctgcagaaagagaaagggagggaggaggacccaggagta

SEQ ID NO: 888509 - DNA, 120 bp, Artificial Sequence
  ENSG00000227407_3 (sequence is synthesized)
tacgcccccggccctctctcctctcctccggacacagcactcgggcccctggcctgcatcctccccggaacccaggagtccaggccccagccccagccccgccccctcccttcagagtcc

SEQ ID NO: 888510 - DNA, 120 bp, Artificial Sequence
  ENSG00000242880_0 (sequence is synthesized)
gaaaaggtcaatcgtatctcgttgttcagtgatccgggaggtggaaggctattggttcagggagcccgtcagaccggactggagtgagccatgattggtcgacacaggcgcaatcagagt

SEQ ID NO: 888511 - DNA, 120 bp, Artificial Sequence
  ENSG00000242880_1 (sequence is synthesized)
caagaaaactttgcttttgacttatttacagctagtcacaattgagtgaagtatactcctgtaaacaaatttggatttctctctctcaatctgatttctccagaatgtggaaactattta

SEQ ID NO: 888512 - DNA, 120 bp, Artificial Sequence
  ENSG00000242880_2 (sequence is synthesized)
aacagactgcagattgaattcctacataggctattccagaattcttacgagacttgcattaggacatcagcaacaggtatcatctagtgaactgttcagatgcaactgaattgaaaagga

SEQ ID NO: 888513 - DNA, 120 bp, Artificial Sequence
  ENSG00000242880_3 (sequence is synthesized)
aaaagtaaaatggattttatcatacttgaaaaatcaacaattgcagtctggattcatacatcactgtctgatgcacccaacttgagtcaaaaagatgtttcaaatcccactaggctggag

SEQ ID NO: 888514 - DNA, 120 bp, Artificial Sequence
  ENSG00000242880_4 (sequence is synthesized)
gcaaaaatactcaagagtttaagagcgtctcttgacagtgtacagaataagatagcttctcagctttcagctttacttcacggttttaactatcaaaagaagcaagccatctgaagattt

SEQ ID NO: 888515 - DNA, 120 bp, Artificial Sequence
  ENSG00000242880_5 (sequence is synthesized)
gcctgagactgaaggatccacttctgcgacgactccctcaggacttataatgcagatggaaccagattgagaaaaaccagccaaccaaccaaccaacatgatggctgaaccagacaagag

SEQ ID NO: 888516 - DNA, 120 bp, Artificial Sequence
  ENSG00000242880_6 (sequence is synthesized)
aagtcccgaagtaaaatacccaccaattaccagaatctgtgcctgccatacatcgaaggagaagatggcatcagttcaacttctagatgtgcaaataaatgactggagttgaatttgtaa

SEQ ID NO: 888517 - DNA, 120 bp, Artificial Sequence
  ENSG00000242880_7 (sequence is synthesized)
gttgttcagtgatccgggaggtggaaggctattggttcagggagcccgtcagaccggactggagtgagccatgattggtcgacacaggcgcaatcaggtatcatctagtgaactgttcag

SEQ ID NO: 888518 - DNA, 120 bp, Artificial Sequence
  ENSG00000242880_8 (sequence is synthesized)
gctggtgtgggcaggtcgcaagccactggtattggctgcaatggatactgaacttgaccaaatcttttcattctaatccttctaaatgcattatacaaagaaatcaacctaatagaagaa

SEQ ID NO: 888519 - DNA, 83 bp, Artificial Sequence
  ENSG00000242880_9 (sequence is synthesized)
gacaagagaagtcccgaagtaaaatacccaccaattaccagaatctgtgcctgccatacatcgaagaatcttgctctgtcgct

SEQ ID NO: 888520 - DNA, 120 bp, Artificial Sequence
  ENSG00000242880_10 (sequence is synthesized)
aagcgattcttccacctcagcatcctgagcagctgggactacaggtacacaccactgcacctggctaatctttatatttttagtagaagtgggatatcaccatgttggccaggctggtct

SEQ ID NO: 888521 - DNA, 120 bp, Artificial Sequence
  ENSG00000242880_11 (sequence is synthesized)
atctgcctgtcttggcctcccatactgctgggattacaagtgtgaaccaccatgctggcctgtgacattttaatctagtcaatcagtcttggaaaataaagccttgctttctgtggcacc

SEQ ID NO: 888522 - DNA, 120 bp, Artificial Sequence
  ENSG00000242880_12 (sequence is synthesized)
tcattttcttctaaaatgatttctccaaaggattttaaaaagaaaaaggttaaaatgtgaaaggaaaataaatcttgggaccccccaaatctctaagctaaagggaaaagtcaagatggg

SEQ ID NO: 888523 - DNA, 90 bp, Artificial Sequence
  ENSG00000242880_13 (sequence is synthesized)
gcttagggcaaacctgcctcccattcttttcaaagtcatccctctgctcactaagataaatgcatatcttactgtaagaatgaaaccatt

SEQ ID NO: 888524 - DNA, 120 bp, Artificial Sequence
  ENSG00000242880_14 (sequence is synthesized)
catttggtttttcttttatctacctatcacctggaagcacccttcccacttcaagttgtcctgcctttctggactaaaccaatgtacatcttacgtacattgattgatatctcatgtctc

SEQ ID NO: 888525 - DNA, 120 bp, Artificial Sequence
  ENSG00000242880_15 (sequence is synthesized)
cataaaatgtataaaaccaagctgtgcccccacccccttgggcacatgttgtcaggaccaggaccttgtgaggctgcatcatgggcacgtgtccctgactttggcaaaataaactttctg

SEQ ID NO: 888526 - DNA, 120 bp, Artificial Sequence
  ENSG00000242880_16 (sequence is synthesized)
gtgtccctgactttggcaaaataaactttctgaattgactgagacccgtcttagatatttggggttcatacccgcttggtactgtgtagtgaatgagttctcacaagatctggttgttta

SEQ ID NO: 888527 - DNA, 90 bp, Artificial Sequence
  ENSG00000242880_17 (sequence is synthesized)
caccatgactgtaagtttcctgaggcctctccagaagccaagcagatgccagaatcatgcttcctgcttcttttatttataaattaccca

SEQ ID NO: 888528 - DNA, 120 bp, Artificial Sequence
  ENSG00000242880_18 (sequence is synthesized)
attacccagcctcaggtattgctttatagcagtgcaagaatagactaatataagtgttacagatattgagtaggtaaaaatcaataggatttagcagttggacctagagacgcaggaact

SEQ ID NO: 888529 - DNA, 120 bp, Artificial Sequence
  ENSG00000242880_19 (sequence is synthesized)
ggggagatttttttaaagaggtgattagaagaataatattgtcatcatggaaattagaaagttaggtttattggtgaaaagttggtgaataatcttctagatattttgagtttaatgtac

SEQ ID NO: 888530 - DNA, 120 bp, Artificial Sequence
  ENSG00000242880_20 (sequence is synthesized)
taatgaggaacaagtggagatctccatcatgcacttggaaatttaggactggagctgggagacaagtggggccagaaataaaggtatgctccttctgctctcaacccaccatggccgttt

SEQ ID NO: 888531 - DNA, 120 bp, Artificial Sequence
  ENSG00000242880_21 (sequence is synthesized)
agtgggatcagtagaatccctgcaagtaagtgtctggatttagcaaaatagcatggaagaacaaactgatgccagaacctacgaactgacagcatttaaggggtgggagggaaaaagaaa

SEQ ID NO: 888532 - DNA, 120 bp, Artificial Sequence
  ENSG00000242880_22 (sequence is synthesized)
aaagcagatgtgaaaagagatcaggaaacttaggcaagtcaaataagagaaaattatttcaagtgtgaacttccgtatataacgtctatgatttaggcccagtttatatcaagaacttaa

SEQ ID NO: 888533 - DNA, 120 bp, Artificial Sequence
  ENSG00000242880_23 (sequence is synthesized)
ttaagaaagaaaattggaaaaataaatagggctttatgtatttttaggacttatgatgatgattatgatatagaatgaaataaagtgtgggtcaggagcagtggctcacgcctgtaatcc

SEQ ID NO: 888534 - DNA, 120 bp, Artificial Sequence
  ENSG00000242880_24 (sequence is synthesized)
ggttttatgtttgtgtgaaatgcccctttactaaactggaagatgtgtaagatggaagaagaggttctgctggatatggagaaattggaacccttgtacatgtggaaatgtaaaatggtg

SEQ ID NO: 888535 - DNA, 120 bp, Artificial Sequence
  ENSG00000242880_25 (sequence is synthesized)
cattaggaaaacagtttcaacggtcctcaaagtggtaaacatagagttaccatatgactgagaaattttactcccaggtatatacccaagataaataaaaacatgttcatataaaactca

SEQ ID NO: 888536 - DNA, 120 bp, Artificial Sequence
  ENSG00000242880_26 (sequence is synthesized)
gcagagcacggatctaacaatgtcaactgtgctgacatcatcctagctgtgcagggctgatgggaattcagaatatcaaacatcatatcaagggcagtgagcaggtatcatctagtgaac

SEQ ID NO: 888537 - DNA, 120 bp, Artificial Sequence
  ENSG00000242880_27 (sequence is synthesized)
ctgaacttatattctcctgaaaccagaacggatgaaactcattagatgctccagcctgggggattaatgtttaccttgatttaatgtctcatcagaagcatgacatccacagcactctgg

SEQ ID NO: 888538 - DNA, 120 bp, Artificial Sequence
  ENSG00000242880_28 (sequence is synthesized)
ctgcagcaggattaaatgaagcatggccgtttcttcaagagagacttaaacttcaagcctttagccctagagggaatgggcaggagatgaagagagagtaaaaatctattgaactaccaa

SEQ ID NO: 888539 - DNA, 120 bp, Artificial Sequence
  ENSG00000242880_29 (sequence is synthesized)
cagccattctgagatagcatccagaaatcaatgaaacatcagaataggaagtatttgtgtatgtagactaatgtggcacattccatcttggaagatgtaatccttaaaggaaggaagaaa

SEQ ID NO: 888540 - DNA, 120 bp, Artificial Sequence
  ENSG00000242880_30 (sequence is synthesized)
gaatcttggtagcagtatatgctgggaatatactcagccatttcccatgtattttctagatttagggaatcagaaatcaagagaggaatgtgggaggtgctggcaccttagtggagggaa

SEQ ID NO: 888541 - DNA, 120 bp, Artificial Sequence
  ENSG00000242880_31 (sequence is synthesized)
gttgtctcaagtaaacagctacacagaaatgaggaattgggctttttagccatgagttacggctgtcagtccaaattgtctaaaatcagaaaaatatattaaaaagtatcaactcccact

SEQ ID NO: 888542 - DNA, 120 bp, Artificial Sequence
  ENSG00000242880_32 (sequence is synthesized)
gagcctatgctttgcaaaagtatattttattttcatctcttttgattcctgaaataatcctaaactagatatggtggatgttgtcctacaaatgaggatgctaaggcccgagggggttaa

SEQ ID NO: 888543 - DNA, 120 bp, Artificial Sequence
  ENSG00000242880_33 (sequence is synthesized)
tgtcttgcttagtttgtaagaaaagaatggaaatcatatgttcttactaaaggccagttatctttccatgatgttttaaactgacagaccaataacaacaaaggtgaacaaagggttaaa

SEQ ID NO: 888544 - DNA, 120 bp, Artificial Sequence
  ENSG00000242880_34 (sequence is synthesized)
ctcaaacccaccagaaatatttggagtccaaaacagagtgaatggtggtggatgctatcttgtaattataatctgtatgtcaaaataagacaatcctgttgaaagaattaactcgaaagt

SEQ ID NO: 888545 - DNA, 120 bp, Artificial Sequence
  ENSG00000242880_35 (sequence is synthesized)
ggaaagcatgggcaaaatgaggaagttgtaaaagatagtgctgtacaatagcttttgttgttgttgtcactagtagtggcattccttgttttttaacttttcaaaatatatgggtaacat

SEQ ID NO: 888546 - DNA, 120 bp, Artificial Sequence
  ENSG00000227409_0 (sequence is synthesized)
gaaaactccagaaacaaccaatactcattggcatacattaacggtctgcagtcagctctcttagtctctgtgatggctattgcaaacttctgctggattcctttagccttgactatcatc

SEQ ID NO: 888547 - DNA, 120 bp, Artificial Sequence
  ENSG00000227409_1 (sequence is synthesized)
caaaaaataatcatcttcatccagcaatgaattttcagatcctgtttgattcggcattccataagacatgctgtcaagggtaggagttaagttgtggtctatatcttcagacatttctgt

SEQ ID NO: 888548 - DNA, 120 bp, Artificial Sequence
  ENSG00000227409_2 (sequence is synthesized)
atccatgataccaccaccttaaaaagtaaaatactgtttagacaaatgatagtgctaaagatgaccacaatgataaggtcagtctggtatttaaccaaataaatattttttcaaacaaaa

SEQ ID NO: 888549 - DNA, 120 bp, Artificial Sequence
  ENSG00000230790_0 (sequence is synthesized)
gggggacatgatggtggctcagattacaggggctactcagcaagaagcggaaggacttcagagagatttggaggcaaaacccacaggcttactgatgaatggaaccggtggaggtgtgtg

SEQ ID NO: 888550 - DNA, 120 bp, Artificial Sequence
  ENSG00000230790_1 (sequence is synthesized)
atgcgatactcaaaggcaacctggtcaggtgcacgaagtctagggttcagaatccaacaggctcaaattcaagtccagctcagccacgtggctgagtgctgtctgaacctcagcgtcctc

SEQ ID NO: 888551 - DNA, 120 bp, Artificial Sequence
  ENSG00000230790_2 (sequence is synthesized)
ggacacagctggggcaggactcccgggctcctggtcagtccctctatggggatgctaagcctcagggctgacatctcttagctctgccttccagggagaatttcacagggcctcccattt

SEQ ID NO: 888552 - DNA, 120 bp, Artificial Sequence
  ENSG00000230790_3 (sequence is synthesized)
gtgctgctgtgaaggccgtcctgctccttgtcaagcctgtcttctccgtggcttgaggaagatctctttcgtgcccaaattgtgaataagtaaactggatgcagcatctctgattgctct

SEQ ID NO: 888553 - DNA, 120 bp, Artificial Sequence
  ENSG00000244733_0 (sequence is synthesized)
caaaaccacattcctgctgctgtcagttatgatgcactgagaaaacttcagagacctaaactttttccagagaagagaagctttactggtgttccagccctaagaaacctttgttcaaca

SEQ ID NO: 888554 - DNA, 120 bp, Artificial Sequence
  ENSG00000244733_1 (sequence is synthesized)
aaactgcagatgctctgttgaatccactggagattgttctgatactaaggacaagtatcaaacatctttcctgtgaaaaattccctctcctagtactttagttctgtggatccaaaattt

SEQ ID NO: 888555 - DNA, 120 bp, Artificial Sequence
  ENSG00000244733_2 (sequence is synthesized)
atagcattcttctaccaccacaggggctcatatgacattaacagacaagacacttttcagaaagacaggttgttcttttgggccacatctaagaaatctttgtctagccaaaagccacaa

SEQ ID NO: 888556 - DNA, 120 bp, Artificial Sequence
  ENSG00000244733_3 (sequence is synthesized)
ataatttctcattttttggcttctggaagatgtacagttaaatgttatatttgggactgttatctaatttggttaaattgcactctacaatatggtatttgaattgatgaaaaattagta

SEQ ID NO: 888557 - DNA, 120 bp, Artificial Sequence
  ENSG00000244733_4 (sequence is synthesized)
aatgttaatattttttaaagtagccaaatcttgcaatttatatataatagagaagactagaaaatcccccatatttatttcctcttacttcgtactactaaaatttgtatttaggcattt

SEQ ID NO: 888558 - DNA, 120 bp, Artificial Sequence
  ENSG00000244733_5 (sequence is synthesized)
ggtttctcagataaacattacattccccagtatatggttctatctggcttggtgacgacatgttgaacattaagatgtgagcagaagtaatacatacacactctttttcatgtctttaat

SEQ ID NO: 888559 - DNA, 120 bp, Artificial Sequence
  ENSG00000244733_6 (sequence is synthesized)
tgaatgggatattggcccattttttcttccagtttattacactgaatattgacatgttattttccaatattgagacaatcaatgacaagactttaagagtaacaatgtaaaaatacagaa

SEQ ID NO: 888560 - DNA, 120 bp, Artificial Sequence
  ENSG00000244733_7 (sequence is synthesized)
acaatcccctggattagaaccccctaccagttctaggtcatctaatatatagacattgtgttcagtagaaataaatatatatattttttattatgctttaagttctaggatacatgtgca

SEQ ID NO: 888561 - DNA, 120 bp, Artificial Sequence
  ENSG00000244733_8 (sequence is synthesized)
gttctcattgctcaattcccacctatgggaatacatttttaaatcatttttaaaggtgttattacattctgattgaacattttcagaaagaataaataatttaatacaagaagtgggcca

SEQ ID NO: 888562 - DNA, 120 bp, Artificial Sequence
  ENSG00000244733_9 (sequence is synthesized)
ttaatacaagaagtgggccacttcatgtaacaaaacaaaccaccactacagcaacaacaacaaaaaacactaatgaatgtgactttagctttgcaacatcgtgacagactagcaagttaa

SEQ ID NO: 888563 - DNA, 120 bp, Artificial Sequence
  ENSG00000244733_10 (sequence is synthesized)
tgacatttgttatgccatagaaaatatttgttgaattgccactctaatgactttatatcagccaactcattatcaacactagaaaagatgattaaaaaatacttcagtacgttcacgtgt

SEQ ID NO: 888564 - DNA, 120 bp, Artificial Sequence
  ENSG00000244733_11 (sequence is synthesized)
tggcttgttaacatttttaagagtctataagagaaaaatgcatccaatcttgacaaaaatatttttcaagtatcttgtaggtacgtacaactaactaccttgtgaacaaaagtcactata

SEQ ID NO: 888565 - DNA, 120 bp, Artificial Sequence
  ENSG00000244733_12 (sequence is synthesized)
accttgtgaacaaaagtcactatataattatataatttctgacacttaaaaaagtttattgtgctaaagaagatatatgttctaataccaaatccacatataaaataattgacttaaata

SEQ ID NO: 888566 - DNA, 120 bp, Artificial Sequence
  ENSG00000244733_13 (sequence is synthesized)
tatattaaaaactttacagagaataaaaaaagcattatacaggctacttatggtttttgatgtttggatctacaatacatgtatcaaagattgtggaaataaatcaaacaatatattcaa

SEQ ID NO: 888567 - DNA, 120 bp, Artificial Sequence
  ENSG00000282793_0 (sequence is synthesized)
gtccctgagtgactctttggctcaaactgttctggtttgtggaagacacgcctgttttcttccctgggctaactgtgaagctcagaagaggaagaagggcccggatggcagatgaaccgc

SEQ ID NO: 888568 - DNA, 120 bp, Artificial Sequence
  ENSG00000282793_1 (sequence is synthesized)
acctggaacaccatggctgctgggagttggggctgtgcgggaggcttctgtctctgtgtggcgtttggtcataaccactggactttggaacatcctgcttaaaaccacaactttggctgg

SEQ ID NO: 888569 - DNA, 120 bp, Artificial Sequence
  ENSG00000244738_0 (sequence is synthesized)
cagaccagatgtggtttgcagaactttctggagctttaaacagttggaggctatctgtcccttccgggggcaccctgctcagtcaggatacagacttcagacagggagcctccctcacca

SEQ ID NO: 888570 - DNA, 120 bp, Artificial Sequence
  ENSG00000244738_1 (sequence is synthesized)
cagcctgatggctcatcttccaaagggcttccgtgctttcattctttgctaacaaacacaactgaaatcaggagatctggatgcatcctggacaagggagacacaacacaaatccctcta

SEQ ID NO: 888571 - DNA, 120 bp, Artificial Sequence
  ENSG00000244738_2 (sequence is synthesized)
acagattatggacatggtgagctagacatggagacaggcccagagcacagagagagctgggatgaagaatgcctaccacaacccaggggaggcctgggtttcaggaacaggtaaccccag

SEQ ID NO: 888572 - DNA, 120 bp, Artificial Sequence
  ENSG00000244738_3 (sequence is synthesized)
ggccgagccttgaggggtcattggtgtgccagggatttctggtaatgatcactcttcagtggaggagaacaagaaataaacaatcactgtggctcctctctccagaacttatggagaaaa

SEQ ID NO: 888573 - DNA, 120 bp, Artificial Sequence
  ENSG00000244738_4 (sequence is synthesized)
gccccgaccacctggccttctcttcgcttcttgacaaagttactgatttcacctttgttcttcagtgatcgctgttctccaggagaaaaagctatttgtttaatgagactcctatgtcct

SEQ ID NO: 888574 - DNA, 120 bp, Artificial Sequence
  ENSG00000244738_5 (sequence is synthesized)
gctggaaaagtgaatattgagaaggggggccttaggaagctctggtgaaaacccagggcttctaattaagccaggtcttctgctcacccaaagacccagcctggacttcagaacaaatca

SEQ ID NO: 888575 - DNA, 120 bp, Artificial Sequence
  ENSG00000244738_6 (sequence is synthesized)
cctgaagcctgcatatttcaataatttaataggacagatttcccaggcgtgttttgagggcaggaggtcattttcaagtaagaattttcccagaagtaacaagcatatctttacactggg

SEQ ID NO: 888576 - DNA, 120 bp, Artificial Sequence
  ENSG00000244738_7 (sequence is synthesized)
cctttcttagttgaagttcattatggaaacagcaattcttctaaaatattatctacccaaggactggcatgcaaagtcttccaggatctagtcccggcctaccttccagatgaaaccatt

SEQ ID NO: 888577 - DNA, 120 bp, Artificial Sequence
  ENSG00000244738_8 (sequence is synthesized)
gtctactgaaccttctatgctctagccatgtgtattagtctccttgggctgccataacaaaatacatagactgggtggcttaagcaacagaagtttattttctcacagttccggatgcta

SEQ ID NO: 888578 - DNA, 120 bp, Artificial Sequence
  ENSG00000244738_9 (sequence is synthesized)
aaagcccgagatgaaagtgccagttttttgtgagggctccgtttttcgcttgtaggcagccacactgtgtcctcacatggcctctcctttattacagctctctggtgtctcttctcattt

SEQ ID NO: 888579 - DNA, 120 bp, Artificial Sequence
  ENSG00000244738_10 (sequence is synthesized)
ggacaataatcccattaaatcagggccccacctttatgacctcatttagtcttaattacttccttccttactcttattacagccacaaatggaggagttagtttttcaacatatgaatac

SEQ ID NO: 888580 - DNA, 120 bp, Artificial Sequence
  ENSG00000244738_11 (sequence is synthesized)
ttgggaggacacaacattcagtccataacaccaagctgcggatcctcacacaggacttgggctcttctactgccagggcttggctccacccatttccttgacctggaatggcttttgccc

SEQ ID NO: 888581 - DNA, 120 bp, Artificial Sequence
  ENSG00000244738_12 (sequence is synthesized)
agttctcctggcttttttcaggtttacataggatttcttttctctatttctctccttgtattcttgtcctggcccactatctaggctgtggctttcacttctggctgtgcagagttattt

SEQ ID NO: 888582 - DNA, 120 bp, Artificial Sequence
  ENSG00000244738_13 (sequence is synthesized)
tagagattttaaaagttccaatgctaagcccaattccagacctcctgaagaagaatctctgatgatggggcccaggatcacatgtcttaaggatgggaccgtattaatatgtggcaatga

SEQ ID NO: 888583 - DNA, 120 bp, Artificial Sequence
  ENSG00000244738_14 (sequence is synthesized)
gggagtgaaagcaactgcactagcagcaaactctgtgggaatgtcatccttgcagagacaacatggtgcctttctgtgcttggtattatttcttagctctttgctgacatcttctttagt

SEQ ID NO: 888584 - DNA, 120 bp, Artificial Sequence
  ENSG00000244738_15 (sequence is synthesized)
ggtacatttcctagaccacctgtccaccagggttctgggtgcaagtttggctctgccaatgagatgcactgtgtgctcatctcaattttgtggaccctgggggacagcagacaaacttag

SEQ ID NO: 888585 - DNA, 120 bp, Artificial Sequence
  ENSG00000244738_16 (sequence is synthesized)
caataggtcatcaaagagaaagaagaaatcctatttattgaactccagtgaagtgctggaagttgtgctagatgctttacaatactttattttgttggggtggtaaaatatacataacat

SEQ ID NO: 888586 - DNA, 120 bp, Artificial Sequence
  ENSG00000244738_17 (sequence is synthesized)
aaaattcaccattttaacaactctaaattgtacaattaagtggcatttaggacgttgacaatgtcgtacatttattaccactatctagttcaaaaacatttgcttcatctcaaaagcaaa

SEQ ID NO: 888587 - DNA, 120 bp, Artificial Sequence
  ENSG00000244738_18 (sequence is synthesized)
tccggttcctattaagaagtcacttccctctactccgagcccctggcagccactaatctgctttctgtcttgatggatttgcctattcttgtcattttatataaatagtgatatacacta

SEQ ID NO: 888588 - DNA, 120 bp, Artificial Sequence
  ENSG00000244738_19 (sequence is synthesized)
tgtagtattttatgtctggcttctctcacttaacatattgttttcaaggttcacccatgttgtagcatgagccggcacttcattcctttttataatgaaataatattccattttatggat

SEQ ID NO: 888589 - DNA, 120 bp, Artificial Sequence
  ENSG00000244738_20 (sequence is synthesized)
acaccacattttgttaattcatttactggttgatagacatttgggttgtttccacctattggctattgtgaatggtgctgctatgagtatttatgtgtaagtttttgtttgaatatcttt

SEQ ID NO: 888590 - DNA, 120 bp, Artificial Sequence
  ENSG00000244738_21 (sequence is synthesized)
ttctcaattcttttttttacatacttttaaaagcagatcttatttgacaaataaagaaattacatcttgctgatgaatggatgaagaaaatgtgttacatatacaccatggaatactact

SEQ ID NO: 888591 - DNA, 120 bp, Artificial Sequence
  ENSG00000244738_22 (sequence is synthesized)
cagttataaaaagaaatgaaataatgtctcttgcagcaacttggatggagctagaggccattattgtaagtgaagcaactcaggaatggaaaagcaaatattgtatgttctcactcataa

SEQ ID NO: 888592 - DNA, 120 bp, Artificial Sequence
  ENSG00000244738_23 (sequence is synthesized)
taagctatgaggacacaaaggcataagagtgatataatggactttggggactcaggaagggaggcttggagggggttgagggataaaagactacatattgggtatagtgtacactgcttg

SEQ ID NO: 888593 - DNA, 120 bp, Artificial Sequence
  ENSG00000244738_24 (sequence is synthesized)
actgcttgggtgacaggtgcactaatatctcagacacagacatcaccactaaaaaatcttatccccataaccaaaaaccacctgtaccccaaaaagtattgaaataaataaaagaaatta

SEQ ID NO: 888594 - DNA, 120 bp, Artificial Sequence
  ENSG00000232964_0 (sequence is synthesized)
aacacttctaagacatgtcagcatgtgccttgctgaaacaggtgacatttaagtcaaatctcgaaaaaggagcaagctgaggttcatttcatgacatgacactgcctctcaagtgagaag

SEQ ID NO: 888595 - DNA, 120 bp, Artificial Sequence
  ENSG00000232964_1 (sequence is synthesized)
aatgaccttagtaagcaatgtggagtggagccaagtggaagagctgaatagctgtgaagctctcctggttctcaggcttttagaattggaatggaatctacaccaccaggtctctggctt

SEQ ID NO: 888596 - DNA, 120 bp, Artificial Sequence
  ENSG00000232964_2 (sequence is synthesized)
tcaggccttcaaaccacacaactggctttcctgggtctccagcttgcagacagcagatcatgggacttctcagtctccataattgcatgagccaatatgttataaaaaactctttttata

SEQ ID NO: 888597 - DNA, 120 bp, Artificial Sequence
  ENSG00000257084_0 (sequence is synthesized)
agagcggaggccagggcgggctctaggccgtggaatctggggccttaaagccccttcgtctccccagcacccactctctgggggcaggtgggcccggtgacagtaaccttcagggagccc

SEQ ID NO: 888598 - DNA, 120 bp, Artificial Sequence
  ENSG00000257084_1 (sequence is synthesized)
ttacagctgcagcaagatgtggaaacactggttccctaggcacctccattgtcttcccgccttgggagcatgaaataaataaagtgtgaaggggaacatgaggaagactgatccaagtca

SEQ ID NO: 888599 - DNA, 120 bp, Artificial Sequence
  ENSG00000232969_0 (sequence is synthesized)
ttggctctgctcctgctcatgcgcggcctggggcgcccttctctgacgcgattctaacgcgaccccggaagcgcgcagcgagcagaggaccctgcattcagatgcagcagatgacaccac

SEQ ID NO: 888600 - DNA, 120 bp, Artificial Sequence
  ENSG00000257083_0 (sequence is synthesized)
attgttgatttcttctcttaagccggagctcggcttcaggagtacttttcaaaatatcatgtattttgctaactctatataactccatgtgtcatttcatccagaaaacttgtttctaat

SEQ ID NO: 888601 - DNA, 120 bp, Artificial Sequence
  ENSG00000257083_1 (sequence is synthesized)
gcttttttctctggactctaagctggttgatgccaccaggccttgggaaaaagcctgccttctgataggattgctattgagtagcaaaaattcttggattctgataacatctttcatgca

SEQ ID NO: 888602 - DNA, 120 bp, Artificial Sequence
  ENSG00000257083_2 (sequence is synthesized)
gaaactcaaagcatctcccaaattataagcccattcttttacactgttctacactctcacactctaggaacaactcatttcaatcttgggacattgaccagaattcagggaaactagcat

SEQ ID NO: 888603 - DNA, 120 bp, Artificial Sequence
  ENSG00000257083_3 (sequence is synthesized)
gatggcgagctgggaagaaataaaaccaggatttgagccagcaatgtatgcagaatttgaaatgctttagttgagaaagcattttgaaacaatgccctgcaggcacttcaagaattggct

SEQ ID NO: 888604 - DNA, 120 bp, Artificial Sequence
  ENSG00000257083_4 (sequence is synthesized)
tctgattctccaaaggaagattacattatcctcatatcattgctaacctctccactccatggaatcacattttcctgcaaacgcatcatgagcacttatttaaatacctaatcattggca

SEQ ID NO: 888605 - DNA, 120 bp, Artificial Sequence
  ENSG00000257083_5 (sequence is synthesized)
gaaatgcagctgtgttcatcattgtcaattctgatttgtatgatgttcccatccaaacatacctcagggtacatttgcacatctaattacaacattaaaactaataatagcctgataaaa

SEQ ID NO: 888606 - DNA, 120 bp, Artificial Sequence
  ENSG00000257083_6 (sequence is synthesized)
ccctctgaaatcaggaaatttgccagaagatggcgagctgggaagaaataaaaccaggatttgagccagagacagggtttctctatgttgcccaggcttgtgttgaactcctggcctcaa

SEQ ID NO: 888607 - DNA, 79 bp, Artificial Sequence
  ENSG00000257083_7 (sequence is synthesized)
gtgatcttcccacctcagcttctgcatgaaatcttctgaggtattattttgagaacataaataaagaattccacaatca

SEQ ID NO: 888608 - DNA, 120 bp, Artificial Sequence
  ENSG00000257083_8 (sequence is synthesized)
gcttcaagctgacctcaccccacctgcaagtcttaatacacttggacatgccatgaaatgacaagaaatattcagattttagatatgtaaaaatattaaaactatgcctcttagaatctg

SEQ ID NO: 888609 - DNA, 120 bp, Artificial Sequence
  ENSG00000257083_9 (sequence is synthesized)
tgggaagaaataaaaccaggatttgagccaggtgagtttgcctccggagtccaagactttcccactggctcttccctcttctttcttctgtgtcatattggctctcttctgctgctgcct

SEQ ID NO: 888610 - DNA, 120 bp, Artificial Sequence
  ENSG00000257083_10 (sequence is synthesized)
catatgccaagtcagctcaatgagctgggaggcagagtgtgcaatggaaaagcaacaggtcttcaacactaagcaacatacaaattccatctccactattactgagtggtttctactgcc

SEQ ID NO: 888611 - DNA, 120 bp, Artificial Sequence
  ENSG00000257083_11 (sequence is synthesized)
aggatcggtgtggttgcatgtgacatcagactcctaggagaccacatcatctatggattacagcctctccactaaatcactacctttctccaaagtgtatgttcctgactcctggtctac

SEQ ID NO: 888612 - DNA, 120 bp, Artificial Sequence
  ENSG00000257083_12 (sequence is synthesized)
actccaagtctatcttagagctgaacccttttctgcaaccaaggctggttatcagatggccctgaccctcttctccgagtcctgatgggcctgagaagtcttcatggtagcatctgacca

SEQ ID NO: 888613 - DNA, 120 bp, Artificial Sequence
  ENSG00000257083_13 (sequence is synthesized)
ccaatctacttcgttttcatttttggtcaagattagaactgtgctttccatgtcttgaacttcctgatttagactgcagattattcttagtttcctccaaccttgctcctatagcagtag

SEQ ID NO: 888614 - DNA, 120 bp, Artificial Sequence
  ENSG00000257083_14 (sequence is synthesized)
cttactccagtctagcaagaaactaccagcctgtgacatggctgtggctccaagatcatttcacaggtagccctagggcacttgctagcttcactgggcattaaaaggggcttgaactca

SEQ ID NO: 888615 - DNA, 120 bp, Artificial Sequence
  ENSG00000257083_15 (sequence is synthesized)
atggcgagctgggaagaaataaaaccaggatttgagccagaaaaatcactttggcagcactgcgggaaacatttggaatgtggcctcaagcaggactgttaggagattgttgcaatagtc

SEQ ID NO: 888616 - DNA, 120 bp, Artificial Sequence
  ENSG00000257083_16 (sequence is synthesized)
ccgctgaagttgacggtggaggtgtagatgagaagactcagctaacggatggcagatttgagctggttgatcttttgttgcaacacatcatagcactttcttcagaagcagcttttatcc

SEQ ID NO: 888617 - DNA, 120 bp, Artificial Sequence
  ENSG00000257083_17 (sequence is synthesized)
tataggatgaatataatgaccaacctacacattggccactgtctcaaatatatagaaatgaatgaccatgtactttttaatattcaacagttttttcttaataaatgtaataaaattgaa

SEQ ID NO: 888618 - DNA, 120 bp, Artificial Sequence
  ENSG00000242770_0 (sequence is synthesized)
accaaatgatagacactaatctccatttcttagaaatgaggaaataaaaccacaaaatgtacaaagtcagatctaaaacccctacctttgggtccagacttttcttctaaagttctgcag

SEQ ID NO: 888619 - DNA, 120 bp, Artificial Sequence
  ENSG00000242770_1 (sequence is synthesized)
ggacaaatgtgtccagaacaagcagttgtaactattgtgaggccccatctggaacagaaggagaagagacattctagggaggaacacaccaatgtgtgcatgaggagcatttggaaacag

SEQ ID NO: 888620 - DNA, 120 bp, Artificial Sequence
  ENSG00000242770_2 (sequence is synthesized)
ctattgtgaggccccatctggaacagaaggtgattcaatctcttcctttgattggaatctttcatactttatttttcagcattctgagctaggaaacatgtgaatactgaatttcaacag

SEQ ID NO: 888621 - DNA, 120 bp, Artificial Sequence
  ENSG00000242770_3 (sequence is synthesized)
aggaggctgcccatgcttcaacatcctctggattttgagccagaatgaaaacaagaagaaaacaacacttgaagttctgacttagtctgggcccacagtctcagatcctttgagttacac

SEQ ID NO: 888622 - DNA, 120 bp, Artificial Sequence
  ENSG00000242770_4 (sequence is synthesized)
agcaggaaggaaagagtcccctatggggtcatgaaccacatcgtctgattgaataattggtgcttatttctgggtcctcaacttggccatctaacagcttgcatgtgctccatttatagt

SEQ ID NO: 888623 - DNA, 120 bp, Artificial Sequence
  ENSG00000242771_0 (sequence is synthesized)
aggctggaatcacccaagctccaagacacctgatcaaaacaagagaccagcaagtgacactgagatgctcccctgcctctgggcataactgtgtgtcctggtacctacgaactccaagtc

SEQ ID NO: 888624 - DNA, 120 bp, Artificial Sequence
  ENSG00000242771_1 (sequence is synthesized)
ggttacaaagagcaaaaggaaacttgcctaattgattctcagctcaccacgtccataactattactgagtcaaacacggagctaggggactcagccctgtatctctgtgccagcaacttg

SEQ ID NO: 888625 - DNA, 120 bp, Artificial Sequence
  ENSG00000242775_0 (sequence is synthesized)
ggcctaggaagctaccagtggctggtttggtggttgcatttatagatgatctatgtgtagcagcatcagaaaagggacaggttgtcgttcccttcaccactcctgccttggactacaaaa

SEQ ID NO: 888626 - DNA, 120 bp, Artificial Sequence
  ENSG00000242775_1 (sequence is synthesized)
gtctcctggacatagaacagttttcaactactgtccccaaatctattcttgccctcctggaccctctactgtgctgcagctagtatgatcagaaaagacagggaagagttaccagtcccc

SEQ ID NO: 888627 - DNA, 120 bp, Artificial Sequence
  ENSG00000242775_2 (sequence is synthesized)
aggaaaagctgtggctgtaggaaagggctctctgccaggagcccctgagtggaatcaatgaaggagtaggcctgcagtagaatgaatgaatgaatgaatgaataaagaataaataccgca

SEQ ID NO: 888628 - DNA, 120 bp, Artificial Sequence
  ENSG00000287672_0 (sequence is synthesized)
gccccctcgtggcggtacttcagcccttcgcagcccgacgctaggggcctggcagggggcagcaagagaccgcggattacctgaagctgagtaatttataaagaaaagaagttcaattgg

SEQ ID NO: 888629 - DNA, 120 bp, Artificial Sequence
  ENSG00000287672_1 (sequence is synthesized)
tctgcaggctgtacaggaagcatggcactgacatcttctcagcttctggtgagggcctcaggaagtttacaatcatggtggaaggcaaagggggagcaagcgtctcatgtggcaagaggg

SEQ ID NO: 888630 - DNA, 120 bp, Artificial Sequence
  ENSG00000287672_2 (sequence is synthesized)
caagagggaacaaacaggagacaggaggtgccacacacttttaaacaacaggatctcacaagagcttactcttacaaggacagcaccaagaatatgaggaatctgcccgcatgacccaaa

SEQ ID NO: 888631 - DNA, 120 bp, Artificial Sequence
  ENSG00000287672_3 (sequence is synthesized)
ttgcttctacgcagagcctcaggctgcttctactcacagtaaaaggcaaaagggcatgcaaagatcatgtggcaagagaagaagtgagggatgggggatgccatgctctttttaacaacc

SEQ ID NO: 888632 - DNA, 120 bp, Artificial Sequence
  ENSG00000287672_4 (sequence is synthesized)
agctctcatgggaaccaagagggacaactcactcattatagcaccaagcctgtatccctcccattatgccctacctccaacatcgaggatcaaatttcaacatgaggtttggaggctcaa

SEQ ID NO: 888633 - DNA, 120 bp, Artificial Sequence
  ENSG00000287672_5 (sequence is synthesized)
atatccaaacaatggcattatgtcaggatcataaagctaatgtttgtgaaaccaggatctgaacccaagctattgcttctagaacctgtactcttaagcccttgcttatactgcatttga

SEQ ID NO: 888634 - DNA, 120 bp, Artificial Sequence
  ENSG00000287672_6 (sequence is synthesized)
aattatgcttcattgtataaaaagtccttttcacctcaagcttatagagaagtcaccttgttcttaaaaagtcctttacacttcaagttcataaagctcaggcacatatattttcttcca

SEQ ID NO: 888635 - DNA, 120 bp, Artificial Sequence
  ENSG00000287673_0 (sequence is synthesized)
atgccgggcttcgcccttcctgggtgtcccggagtccgttccggagaaaccctggcattgccagaactgggtccccgcactcactcctccataattcgcggcggatcagcgggaggaggg

SEQ ID NO: 888636 - DNA, 120 bp, Artificial Sequence
  ENSG00000287673_1 (sequence is synthesized)
cagagggcgggggcgaggcagcttcctggcgggtgtggcgcaaagtgtgcggggtgtggcgcaaagtgcgcggacccgggtcctggaccgaagatttagcccagggtttcgtgtgtgttg

SEQ ID NO: 888637 - DNA, 120 bp, Artificial Sequence
  ENSG00000287673_2 (sequence is synthesized)
ctccctgttgctttctacggggtctgcgctggcctcctcctcgggcgactgggccctgaggcaacagcgccttctcgagccccgaggattgaccgccccgagcctgcttggagcagggcc

SEQ ID NO: 888638 - DNA, 120 bp, Artificial Sequence
  ENSG00000287673_3 (sequence is synthesized)
atgctcccatctaaaacaaccactggccattagaaatggtgttaccatgcctgtcttggaccaatcacatttgatcctctgaggatagagacatgttgccacctgaacaactgtggggtg

SEQ ID NO: 888639 - DNA, 120 bp, Artificial Sequence
  ENSG00000287673_4 (sequence is synthesized)
ctgtactcctggcaagcagggagaatggctgtggctaggcaactgacagcatctaccacaaatatgttactcagaagaagaatcgaggatggccataatttttatttaaagatttctatt

SEQ ID NO: 888640 - DNA, 120 bp, Artificial Sequence
  ENSG00000287673_5 (sequence is synthesized)
ttacagaggcatatctgattaagggacatttaaacttccctgttaaacttatcaagacaaaaagacaaggcatcttgccacatttcttaaatattctctgcagtctctcttgaccttttc

SEQ ID NO: 888641 - DNA, 120 bp, Artificial Sequence
  ENSG00000287673_6 (sequence is synthesized)
ccagctgtgctgtaaacataaagataataacatatctgaataacattttatggtgcacagataattttcacatacattatccatttgaccctcaccataactgtgtggggtaggtaaggt

SEQ ID NO: 888642 - DNA, 120 bp, Artificial Sequence
  ENSG00000287670_0 (sequence is synthesized)
gcccgggaggcgtggccaccaaggggccgggccctgcacagcgccctggggaagctggtttgaaagctctggagcgaccccaatgccggatatttacgtaatttcgaagcagctcttcac

SEQ ID NO: 888643 - DNA, 120 bp, Artificial Sequence
  ENSG00000287670_1 (sequence is synthesized)
aaaatattcatcagttacagaaggaagtcacttcacagtggaaaaatctggcaggtgccaccttaatcaagtaaccaaaatgaacatcatcagtaataggacaaattgcaatcgtgtgcc

SEQ ID NO: 888644 - DNA, 120 bp, Artificial Sequence
  ENSG00000287670_2 (sequence is synthesized)
tcctgatagtctagcaagaagaacacagcatcacttctatgatgctcctgccaataatatataattggaatctaatcctaaagcaacaaattcaaattaaggaaaattctacaaaataat

SEQ ID NO: 888645 - DNA, 120 bp, Artificial Sequence
  ENSG00000287670_3 (sequence is synthesized)
tgtaatagaagtgttaaaggtcatgaaagttaaggaaagactgaagaactgttccagactgaagatgaaagagatgtgagaaataagtgcagtggtgattctgaactggatcctgacttg

SEQ ID NO: 888646 - DNA, 120 bp, Artificial Sequence
  ENSG00000287670_4 (sequence is synthesized)
gcaaaacttgaataggtctgttggttggatggtagaaatatagtaatgttgatttcctgatttttgctagctatattacaattttattggattcagtccttgtttacagaagacacacag

SEQ ID NO: 888647 - DNA, 120 bp, Artificial Sequence
  ENSG00000287670_5 (sequence is synthesized)
tatgtaggggttataagaagtcagctcaggaactttcaaatcatttagcaaaacaaaagttcttcgtactttaattccaagacttctataaatttgagattatttttaaaatacttaaaa

SEQ ID NO: 888648 - DNA, 120 bp, Artificial Sequence
  ENSG00000287670_6 (sequence is synthesized)
aaaactcctttaaagtctctcaacatgctgtcctattaataatagatttctaaattttttatttttatcaacgttttgtgtgcccatagtttgaagtattaaattgtttttatttattaa

SEQ ID NO: 888649 - DNA, 120 bp, Artificial Sequence
  ENSG00000287670_7 (sequence is synthesized)
cacagcgccctggggaagctggtttgaaagctctggagcgaccccaatgccggctactgcctggggtctaggaatccagaacattccacacattgcctaagtcaacaacctgttgcacac

SEQ ID NO: 888650 - DNA, 120 bp, Artificial Sequence
  ENSG00000287670_8 (sequence is synthesized)
agggcggccttgtaacgccctcggtgttggaagggaagaccgtacagcgcgatggggaccagggcggcgggccgcagccagggtgtgggtgggcgacggtcaaggtgccttgaagcggat

SEQ ID NO: 888651 - DNA, 120 bp, Artificial Sequence
  ENSG00000287670_9 (sequence is synthesized)
tctgtcctcgggagctgcggttcttcctcctccgccctcaccggcgggcgaccttaggcagggcgtgaaatgcaacgggagccctggagggagggtgaagccgcgcgtgcaggaggaacc

SEQ ID NO: 888652 - DNA, 120 bp, Artificial Sequence
  ENSG00000287677_0 (sequence is synthesized)
cagcgctgaggagggcacaggggacatgcctgactccgtctgggtgccaggcccagagccgggcatttcccatagtcatcggccccctgcccgcccccagcatgtcgaggaagggaggag

SEQ ID NO: 888653 - DNA, 120 bp, Artificial Sequence
  ENSG00000287677_1 (sequence is synthesized)
tatttttagttccatcttgaagacgggcacaggaacggagaataactgcctgaaagcactgtccctggtctgagcggcccttggaaaggctcagcctggcccaggccttgctgcttccca

SEQ ID NO: 888654 - DNA, 120 bp, Artificial Sequence
  ENSG00000287677_2 (sequence is synthesized)
taacagttacaagcactggctctgccatcggagatgaaagggtacacgtggggttctccgaccttccagccgtgtgacctcggactgtgagtggacctctgggccttggtttctgagtct

SEQ ID NO: 888655 - DNA, 120 bp, Artificial Sequence
  ENSG00000287677_3 (sequence is synthesized)
tagctacctcataagggggtggttgggatgaaatgagttaatccatagaaagtgctcaaccagggcccagtcaatgctggccatgctgttgtgctctgggccccaagatgggggtgggct

SEQ ID NO: 888656 - DNA, 120 bp, Artificial Sequence
  ENSG00000287677_4 (sequence is synthesized)
gagggcaaaggccgccttcctgccagcacctggacactcagcccccgactgccagcaggcgcccaggctctttcttggctgagctgagcagctatcttaggtcgtaatccagctgcattt

SEQ ID NO: 888657 - DNA, 120 bp, Artificial Sequence
  ENSG00000287677_5 (sequence is synthesized)
gactcctgttctctttttgtctaacttcccgcggggagcagagacctctgtttgcttagctccctccacttgccttcctcgaatgtgggaaccccggactctgtcttggaaaagacctgg

SEQ ID NO: 888658 - DNA, 120 bp, Artificial Sequence
  ENSG00000287677_6 (sequence is synthesized)
cctctccttctctgggttgggtccatccgtgggctcccgcagaggcctgtggttgcagagaccggaagctgcagcttcaggagggtaagtgactgtgcccaggagccgcactgagcagca

SEQ ID NO: 888659 - DNA, 120 bp, Artificial Sequence
  ENSG00000287677_7 (sequence is synthesized)
gcgggctccgcagggcctccaggctcccccgggcatcagtgcgtgctgccacctcccccttctctgtgagctggcactgtgaggctgaggggcacaggctggggcaggaatctcggttct

SEQ ID NO: 888660 - DNA, 120 bp, Artificial Sequence
  ENSG00000287677_8 (sequence is synthesized)
tcccagctctgtgagaactgggagatgctcgagaactatcccatccccggatctcagttcccccattgtaacggggcagctggactcagggatgtccagtccccatgctggatcccacct

SEQ ID NO: 888661 - DNA, 120 bp, Artificial Sequence
  ENSG00000287677_9 (sequence is synthesized)
tcatctccctgtgtgagatgggggtggtgtcctgtgccccatccctatccctgggcctgaattcccagctgctgtactggtgcccgggtccctgggtccctcccaccctgagccgcctcc

SEQ ID NO: 888662 - DNA, 120 bp, Artificial Sequence
  ENSG00000287677_10 (sequence is synthesized)
agaccaagctattgtctcggatccaagcagccaggctggctgggcctggagcgggacgggaggactgcgggattgctgagccaggaggggaacagagcacctgcttccctgtgactgcct

SEQ ID NO: 888663 - DNA, 120 bp, Artificial Sequence
  ENSG00000287677_11 (sequence is synthesized)
cttggagcgctaatcatggagttgtcccagagcagggctcctcactgagcccttcaatatctgatctgtcatggaagaaaaatgttgcgttttgtgtctgagacctttccttgatcccat

SEQ ID NO: 888664 - DNA, 120 bp, Artificial Sequence
  ENSG00000287677_12 (sequence is synthesized)
cttgcaaaagagaaagaaagaaaaaagaaacaacaaaggctgccgggagagtgagagatttgagaggagcatttctgagggagccgtgagtgtcgggaagggtgggcctggggtcacgga

SEQ ID NO: 888665 - DNA, 120 bp, Artificial Sequence
  ENSG00000287677_13 (sequence is synthesized)
gcagcagcgtgaacaagcgtcccgccatttagtggctcaaaacaacaaggtgccgtggtttctcccgagcctcgggtgggtctaatccacctgcgaggcttgctggcaagtctgtggtta

SEQ ID NO: 888666 - DNA, 120 bp, Artificial Sequence
  ENSG00000287677_14 (sequence is synthesized)
gcaacgggctggccgggaggctctgctggtctggcctgggccttctcacatgcctgggacagtggggctgggtgggctcgctcccctgcgggcttctcatggcaggggctgggtctgggg

SEQ ID NO: 888667 - DNA, 120 bp, Artificial Sequence
  ENSG00000287677_15 (sequence is synthesized)
aggcaggggggtagaagctcatgccgtgtcttgaggcccaggctcggggtcatctcttctgccgtattctgtaggccaaagccagttctgggccagtcctgcttccagagatggaaagtg

SEQ ID NO: 888668 - DNA, 120 bp, Artificial Sequence
  ENSG00000287677_16 (sequence is synthesized)
ggcttggcagcagagcggctttaaatggtgcaaaggatggaatgtttgtgtcccccaaactcacacattgaaatcctagccccgaaggtgatggtatgaggcggtggggcctatgggagg

SEQ ID NO: 888669 - DNA, 120 bp, Artificial Sequence
  ENSG00000287677_17 (sequence is synthesized)
ggaggggggcgtgagaatgttgtcctcatgaatggtaccacgccctgataaaagggaccccagggaggtgcctggtcccgtgtgaggactgagtgagaaggtggggttgaaacctggaaa

SEQ ID NO: 888670 - DNA, 120 bp, Artificial Sequence
  ENSG00000287677_18 (sequence is synthesized)
tgtccctccccagacactgccagtgccctgatctcagcctccagcctccagaatggcaagaaatagatctctgttgtttgtaggtcatgcagtctgtggagcttgggtgtagtagcccaa

SEQ ID NO: 888671 - DNA, 120 bp, Artificial Sequence
  ENSG00000287677_19 (sequence is synthesized)
acggactgagacaatgacaatgggagaggaaaataaatctcaggaccccaaatcactaagctagagggaaaaggcaagctgggaactgcgtgaggcaaacctgtctccgatttattccta

SEQ ID NO: 888672 - DNA, 120 bp, Artificial Sequence
  ENSG00000287677_20 (sequence is synthesized)
aataggacagctacgaagataaaaaagctacacagctccctcaccacttgcccacagggtattccctgtggacctcaagatctttactatgaagcagttctgttgaattttaccaatgta

SEQ ID NO: 888673 - DNA, 120 bp, Artificial Sequence
  ENSG00000287677_21 (sequence is synthesized)
tttaccaatgtaaactgatagcttatcttcacaggcatgggacagaaagtcatccctccgctcacctgagacaaatacttatctgattgttttctgatatgatttggctctgtgtcccca

SEQ ID NO: 888674 - DNA, 71 bp, Artificial Sequence
  ENSG00000287677_22 (sequence is synthesized)
aatctcatcttgaattataatccccacgtgatgaaggaggggcctggagggagatgactggagcatggggg

SEQ ID NO: 888675 - DNA, 120 bp, Artificial Sequence
  ENSG00000287677_23 (sequence is synthesized)
tttcgagtgtggcacttcccctgctccccgcctcctgccaccatgtaagatgtgcctgcctccacttccaccatgatgattcactgagctacactaaggactcagggaaaggctaatcag

SEQ ID NO: 888676 - DNA, 120 bp, Artificial Sequence
  ENSG00000287677_24 (sequence is synthesized)
agactcagaagaatgcaactgcttgtctcttatctacctgcgacctggaagcctcttacttcgagttgctctgcctgactggactgaaccaatgttcatcttacatatattgactgatgt

SEQ ID NO: 888677 - DNA, 120 bp, Artificial Sequence
  ENSG00000287677_25 (sequence is synthesized)
cttacgtatccctaaaatgtataaaacccagctgtgtcctgaacaccttgggcacatgttatcaggacctcctgaggctgtgtcacaggtgtgtccttaatcttggcaaaataaactttc

SEQ ID NO: 888678 - DNA, 120 bp, Artificial Sequence
  ENSG00000287674_0 (sequence is synthesized)
accgagtgtcagttaacggatagcagacctctcgggcaattattagtagtagtactatcggtactgttagtgccacacaatatttctaaaacccatcaagcgtggacgagaaggaagagc

SEQ ID NO: 888679 - DNA, 120 bp, Artificial Sequence
  ENSG00000287674_1 (sequence is synthesized)
tgtgaggagagaagggtaaaggaataaataaaaatatattcctgccgtcaacggcctggataatctgtattggactaggagacttcaattttcgtgaccgcctttcccctccacgtttcc

SEQ ID NO: 888680 - DNA, 120 bp, Artificial Sequence
  ENSG00000287674_2 (sequence is synthesized)
gcgcactgggcccactcccggccttgctcgctgccaggagccttctgtacaaacgcgaccttctcccaggactcagcaatgagcgttcagctcggttcgaaatgagctcccagcaggcga

SEQ ID NO: 888681 - DNA, 120 bp, Artificial Sequence
  ENSG00000287674_3 (sequence is synthesized)
ccatcctgagtgaaggaagggaacccgaccatttctggaatcagcgtagtgttcacgccgtttgcgagatttctcggaaataagaaagaaaaagaggaaagggttaaaaagtttagcgac

SEQ ID NO: 888682 - DNA, 120 bp, Artificial Sequence
  ENSG00000287675_0 (sequence is synthesized)
gtgtgaggactggagttccccgggccgcgtcggctcctcctcggcccggcgggccccggcaacacgcctcgggtctgtcacgacgcctgaggaaaatcctccgtgacaggaatggggagg

SEQ ID NO: 888683 - DNA, 120 bp, Artificial Sequence
  ENSG00000287675_1 (sequence is synthesized)
ctggtgacactggggaggggccctttggccaccgcttccatcagagtctaggcaacttgaccggcatttcacccttccgctttacctccccaagagagcctgagatctgcccttggttag

SEQ ID NO: 888684 - DNA, 120 bp, Artificial Sequence
  ENSG00000287675_2 (sequence is synthesized)
ttttagttgggctttggagatctgctgacttgtaagaataccaggaaaaaggctctcattgaaaatttatccacatctacactcgaaaaatataaatgggcatggattagagatccactt

SEQ ID NO: 888685 - DNA, 120 bp, Artificial Sequence
  ENSG00000287675_3 (sequence is synthesized)
taatttgcatatatcatcagcaattcattgtgcatggttggcatgacttgttagatgctctccttggccgtggtggagaacgcgcgtttattttctattaaaacttcctgttacaccttg

SEQ ID NO: 888686 - DNA, 120 bp, Artificial Sequence
  ENSG00000287678_0 (sequence is synthesized)
agaggcggcgtcgcatgccgctcgccggtcaccatggctgcccgcctaggtaccggaaacagggcccagccgcgtagcagccaatccgcctagcaggctctattggaggcctgccgccga

SEQ ID NO: 888687 - DNA, 120 bp, Artificial Sequence
  ENSG00000287678_1 (sequence is synthesized)
tcaatccgcgcaggcttccttgggacaacgccaatcggaagcgacttcagtcgccgccccaccaccttcccacattcttagcggggcctacttccccggggagaaggggctggaggtgcg

SEQ ID NO: 888688 - DNA, 120 bp, Artificial Sequence
  ENSG00000287678_2 (sequence is synthesized)
gcggtctgcgctttcaaaggagcaaagctgtcttttctactggaaacgggggaggcgaagacgctcctacgataaagccgttggtgtgagataaatatcgagaggtctttccctcatacc

SEQ ID NO: 888689 - DNA, 120 bp, Artificial Sequence
  ENSG00000287678_3 (sequence is synthesized)
ctcagaaagttgatacggggtctctatatgacttggcatgaaatattaggaaactggcatcttataagcctcaaagacaagttagcagcatcaaagacatgcaactgactttgccattcc

SEQ ID NO: 888690 - DNA, 120 bp, Artificial Sequence
  ENSG00000287678_4 (sequence is synthesized)
tactggagatcctaacacaaacagcaccagacatgaggagaggagaagttcatgcagtgctcacagagaatcagagagggtaccactacctggagggtctggacttgctggcctgaggcg

SEQ ID NO: 888691 - DNA, 120 bp, Artificial Sequence
  ENSG00000287678_5 (sequence is synthesized)
gatgccacctgggcctcagtctgcaactgcacagcagtgacaccaccctgctgctgagaacaggaacaggaagagcttgaaatatgtcaggaaggaaatgtgtagttcaagacacagatc

SEQ ID NO: 888692 - DNA, 120 bp, Artificial Sequence
  ENSG00000287678_6 (sequence is synthesized)
accttacctcttggaggagagagacggaagcctgaaggactttcaaaatgtacagactccctatattgaagctgttttgttgaaggtagtaggattaaagatattagccctttgtctcca

SEQ ID NO: 888693 - DNA, 120 bp, Artificial Sequence
  ENSG00000287679_0 (sequence is synthesized)
tggcttgaaattctcgctgccagcacagaagcagtctgagatggacctgggatgctcgagcttggtggcggtgtggagcggggtgggcatttgccattgctgaggcttgagtaggtggtt

SEQ ID NO: 888694 - DNA, 120 bp, Artificial Sequence
  ENSG00000287679_1 (sequence is synthesized)
atttgccattgctgaggcttgagtaggtggttttactctcacagtgttaacagccactgggaagttcgaacgggacggagcccacgcagctcagtaaggctgctgtggccagactacctt

SEQ ID NO: 888695 - DNA, 90 bp, Artificial Sequence
  ENSG00000287679_2 (sequence is synthesized)
ttcattcagggacttatagataaaacacccatctgcctgggacagagcacctgggggaaggagcggctgtgggtgcagcttcagcagact

SEQ ID NO: 888696 - DNA, 89 bp, Artificial Sequence
  ENSG00000287679_3 (sequence is synthesized)
gggaaggagcctccctgcctgacagctctgaagagggcagtggacctcccagcatagtgtcagactgcctcctcaagtgggtctctgac

SEQ ID NO: 888697 - DNA, 120 bp, Artificial Sequence
  ENSG00000287679_4 (sequence is synthesized)
tcctcaagtgggtctctgacccccatgtatcctgactaggagacacctcccaggagaggctgatagacacctcgtacaggagatctctggcgggcatctggcaggtgcccctctgggacg

SEQ ID NO: 888698 - DNA, 88 bp, Artificial Sequence
  ENSG00000287679_5 (sequence is synthesized)
gtgcagcagaggggcctgactattagaagaaaaactaacaaacagaaagaaatagcacatccactcagagaccccaaccaaaagtcac

SEQ ID NO: 888699 - DNA, 88 bp, Artificial Sequence
  ENSG00000287679_6 (sequence is synthesized)
gaggggcctgactattagaagaaaaactaacaaacagaaagaaatagcacatccactcagagaccccaaccaaaatgcacaaagatgt

SEQ ID NO: 888700 - DNA, 82 bp, Artificial Sequence
  ENSG00000287679_7 (sequence is synthesized)
taaatgacctgatggagctgaaaaaccagcatgagaacttcgtcaagcatacacaagtatccatagctggattgatcaaatg

SEQ ID NO: 888701 - DNA, 86 bp, Artificial Sequence
  ENSG00000287679_8 (sequence is synthesized)
attgaagatcaacttaataaaataaagcgtgaagacaagattagagaaaaaacaatgaaaaggaatagagactaaatctatgtttg

SEQ ID NO: 888702 - DNA, 69 bp, Artificial Sequence
  ENSG00000287679_9 (sequence is synthesized)
tccccaacctagcaagacagaataacattgccacaagacacatcatcagattcaccaaggttgaaatga

SEQ ID NO: 888703 - DNA, 82 bp, Artificial Sequence
  ENSG00000287679_10 (sequence is synthesized)
ttgagctaccctcaaagggaaactcatcagactaacagcagatctctcggcagaatctctacaagccagaagagagtggggg

SEQ ID NO: 888704 - DNA, 77 bp, Artificial Sequence
  ENSG00000287679_11 (sequence is synthesized)
taccctcaaagggaaactcatcagactaacagcagatctctcggcagaactaaagaaaagaattttcaactcagaat

SEQ ID NO: 888705 - DNA, 74 bp, Artificial Sequence
  ENSG00000287679_12 (sequence is synthesized)
gcaaatgaagaagcaccgcatgttctcactcataattgggaactgaatcgctttggtatcaggatgatgctggc

SEQ ID NO: 888706 - DNA, 63 bp, Artificial Sequence
  ENSG00000287679_13 (sequence is synthesized)
ggattccctctttttctaattcggctgtgaatctgtctggtcctggactgtttttgggatgca

SEQ ID NO: 888707 - DNA, 120 bp, Artificial Sequence
  ENSG00000287679_14 (sequence is synthesized)
cctctggtaaaattcggctgtgaatctgtctggtcctggactgtttttgggatgcaagactggttcaacataagcaaatcaataaacataacccagcatataaacagaaccaacgacaaa

SEQ ID NO: 888708 - DNA, 120 bp, Artificial Sequence
  ENSG00000254687_0 (sequence is synthesized)
caggagggcaagtggcacccttctgtggaagtaaatttgccttgctgagaaattctttgtttgagtgctcattttccttgcgactccaagctcttatttccaacagggaaatctttgacc

SEQ ID NO: 888709 - DNA, 120 bp, Artificial Sequence
  ENSG00000254687_1 (sequence is synthesized)
tgtttatgtaacaaaggatgagatagaaagacagaaatgctcaaggatggaaagaaaagtgagtgagcaagagagattaagagacagagagtcagagtgtaacttggaaaagtggtgaag

SEQ ID NO: 888710 - DNA, 120 bp, Artificial Sequence
  ENSG00000254687_2 (sequence is synthesized)
aaaatctcaggaaaaaaggagcactccacgactgctgagggttcaagaagaggacagagaattgatgctgtatgtgcctgaacaagacaattgacaaccttgttgagagcagtttcagtg

SEQ ID NO: 888711 - DNA, 120 bp, Artificial Sequence
  ENSG00000254687_3 (sequence is synthesized)
aagcactcaggggtgcccagcaggacagcctccagctcttccaatcagagctgtaacaccatttcctgaaacaccgttttcaactaagctttggagtgacaaaaatacctgttatcacgg

SEQ ID NO: 888712 - DNA, 120 bp, Artificial Sequence
  ENSG00000254687_4 (sequence is synthesized)
acggactaatgcctccaggaaagaaatcctcgtgatatgcatctgtccccaatatggccacagtaaatctgagaggaagaaggcacagacggtgtctggctctgtcgcccaggctggagt

SEQ ID NO: 888713 - DNA, 120 bp, Artificial Sequence
  ENSG00000254686_0 (sequence is synthesized)
ctgccctgtacctagaaggaaggaatgttgcacagaaaggccaagaggaatctagacaggcagaccctgctgtctccccactcagtctgttattgttatcagaaaggggccccaatctag

SEQ ID NO: 888714 - DNA, 120 bp, Artificial Sequence
  ENSG00000254686_1 (sequence is synthesized)
ttgaaaattcccagcttccccagatggcaaatgatgctactgtgaaaaaatggcttccaggcaaggaaaaactccaggacattcccagcaaaacatcatcaaatgatgaagaatggtgct

SEQ ID NO: 888715 - DNA, 120 bp, Artificial Sequence
  ENSG00000254686_2 (sequence is synthesized)
tcaattcatgtttcaaaagcagacacagaaataatttccagagaaatgagctgggggaaaacagaaatgtgtatggaattggaacaaaataaacctgatttttttcaacattgtatagaa

SEQ ID NO: 888716 - DNA, 120 bp, Artificial Sequence
  ENSG00000254682_0 (sequence is synthesized)
gccacgtgggccgcgcggagaacgcgccaggctcatcacctggatcatcgtgcctcagtttccccctcggcaaatggggcttcagcggctcgcgacgcacattgatggagcgtatgtcca

SEQ ID NO: 888717 - DNA, 120 bp, Artificial Sequence
  ENSG00000254682_1 (sequence is synthesized)
ggcgccggtgcaccgcaaggagcaaaacagacacagttcttggtcctagggctcacgtcccggggcgaagaggatcctccataaacgatcagccatagcagctgtgattggacaagagac

SEQ ID NO: 888718 - DNA, 120 bp, Artificial Sequence
  ENSG00000254682_2 (sequence is synthesized)
tgatgcacctgcatgcctttgtgtcctgaaaagacgttttgccataaaggccctaattgtaagatgtgtaaatgttaagtctccaccccaaagtgaacatgggtcatatattacatgctt

SEQ ID NO: 888719 - DNA, 120 bp, Artificial Sequence
  ENSG00000254682_3 (sequence is synthesized)
tgctcaataagagggcatgtgtcaggaccaccttcatgaatattcatagctcctcctgttacctgttgaatatgtatgtttagccaatcccttcagcatagcgctcctgccccaacccct

SEQ ID NO: 888720 - DNA, 120 bp, Artificial Sequence
  ENSG00000254682_4 (sequence is synthesized)
cctccttggacgtgcctgtctctggccttggctggagacagattcccagcctcagacagatggccgccaccttgcaggctacgaccgtttacaagaaataaagccttctctttttccaaa

SEQ ID NO: 888721 - DNA, 120 bp, Artificial Sequence
  ENSG00000254680_0 (sequence is synthesized)
agataagaagagccacagcaaaacccttgggtctacagtgcaggctgcaaccaaggcagcatttgctagaatatttgtgattatgtgttcaacctacagagcatgtgtcaagcttgggat

SEQ ID NO: 888722 - DNA, 120 bp, Artificial Sequence
  ENSG00000254680_1 (sequence is synthesized)
gaggcctgagagtaattaagttttttaaatccctccaaataatcacctatggttttgataaatgacattaacaatctttacattagagccaatttaagaaggcgctggtatgtatgagct

SEQ ID NO: 888723 - DNA, 120 bp, Artificial Sequence
  ENSG00000254680_2 (sequence is synthesized)
tgttcttttcaaaggtgacagaggccccctcatggtattgtttcatgatcaaggtcgaccctcccaagaaagtaggtagcttcgcagacgcaactggagaagcatgcacgcaggcagacc

SEQ ID NO: 888724 - DNA, 120 bp, Artificial Sequence
  ENSG00000254680_3 (sequence is synthesized)
caagggagagaggagaggcggggcatgcacttggggtagaccaggctgccagctccatgggaaatgaacacaggcagcgtggagtagggagagctgaggactcttctagatacccagagt

SEQ ID NO: 888725 - DNA, 120 bp, Artificial Sequence
  ENSG00000254689_0 (sequence is synthesized)
ggaggagcgactggagttgatcggctgggcgctcagctgggatccttgatggacagtgcctaagcatggaggcaactgcaggtttctggccagggccactctctggtgaaactaaaaggt

SEQ ID NO: 888726 - DNA, 120 bp, Artificial Sequence
  ENSG00000254689_1 (sequence is synthesized)
ccatgtggaagcacctgactgccaccacctggttcaggatcaagtctgtgatacctgaagcctcagacctggaacctgaagtttccttcagccactacacctgtgaacctgtggaagacc

SEQ ID NO: 888727 - DNA, 120 bp, Artificial Sequence
  ENSG00000254689_2 (sequence is synthesized)
aaggaaaatctgtggcgagaaggtccatgaagttctactgctaaggtccctgaagttgatctggttcctcccgcttctggacttttccttggactccatgagataatctaatgttctttc

SEQ ID NO: 888728 - DNA, 120 bp, Artificial Sequence
  ENSG00000254689_3 (sequence is synthesized)
aataggttagctttgcttaaatctagctggagttggttcttttgcttaaaaccaaaagtacaactaatgcagccagttggaatgaggcaaactgacaataaatagtagatgctaaggaaa

SEQ ID NO: 888729 - DNA, 88 bp, Artificial Sequence
  ENSG00000254689_4 (sequence is synthesized)
ccgcttctggacttttccttggactccatgagataatctaatgttctttcaataggctggagtgcaatggtgtgatttcagcttactg

SEQ ID NO: 888730 - DNA, 120 bp, Artificial Sequence
  ENSG00000254689_5 (sequence is synthesized)
ctcagcttcccgagtagctggaattacagcttcagatccaaatggtatgctagcattctcttcctagcagtccactgtcaagacttcactgttagaagaagaatcacaccagaattaagg

SEQ ID NO: 888731 - DNA, 120 bp, Artificial Sequence
  ENSG00000254689_6 (sequence is synthesized)
catcaaacatacttttgtgtttctcctcctggcattctttatgaggaacttctttttggagctcactgacttcctgttctaatttggtccagttattttctagaattgctacatgactgt

SEQ ID NO: 888732 - DNA, 120 bp, Artificial Sequence
  ENSG00000254689_7 (sequence is synthesized)
catcctgggacatccttctgttggaatctgggagagcttacaacttttcatatcctctcttcttctttgtgtttttcaccctgaagtgtacaaagtcaaatgaatttcctagaaaaacta

SEQ ID NO: 888733 - DNA, 120 bp, Artificial Sequence
  ENSG00000254689_8 (sequence is synthesized)
ggcatgggcgcccgcccaccggaggagcgactggagttgatcggctgggcgctcagaacctggacaactaccctcaattggtaacatattttggtgagccagccagaaggatcaagtctg

SEQ ID NO: 888734 - DNA, 120 bp, Artificial Sequence
  ENSG00000254689_9 (sequence is synthesized)
tgatacctgaagcctcagacctggaacctgaagtttccttcagccactacacctgtgaacctgtggaagacctgaagtgcctgtttagaagacagccaaaagataatttcactcttgttg

SEQ ID NO: 888735 - DNA, 120 bp, Artificial Sequence
  ENSG00000254689_10 (sequence is synthesized)
cacggcatgggcgcccgcccaccggaggagcgactggagttgatcggctgggcgctcagaacctggacaactaccctcaattggtaacatattttggtgagccagccagaagggccactc

SEQ ID NO: 888736 - DNA, 120 bp, Artificial Sequence
  ENSG00000254689_11 (sequence is synthesized)
gacgcacagtggggtcggcggtggcctgaaggtggctgggcttcctgcggcgcctctccactctcccgcggagccccttgccgcccgccagacatcaaggttgcaggtgtcacccgtacg

SEQ ID NO: 888737 - DNA, 120 bp, Artificial Sequence
  ENSG00000254689_12 (sequence is synthesized)
gggaagtgctgggtagagaagggtggggtccctggtgagggctccactctcaggcctgtgctcatggacctaaatgaggacaggcatttctgttttcatgccccaaatgttgccttttgg

SEQ ID NO: 888738 - DNA, 120 bp, Artificial Sequence
  ENSG00000254689_13 (sequence is synthesized)
cccataaaaacccaagacttgagaaggcacagacacaagtggcgggacgtcaagagagctgaagaacacagcaacagacaccagcagacaacatcaggccatcgatggctgcatgatgtg

SEQ ID NO: 888739 - DNA, 120 bp, Artificial Sequence
  ENSG00000254689_14 (sequence is synthesized)
gaatttggctgggggcagttggaggagagtctggctattgggcgacctgactccaggggaagactaccttcccactccatcccccttggggctcctcatgcatctcacgagagctacctc

SEQ ID NO: 888740 - DNA, 120 bp, Artificial Sequence
  ENSG00000254689_15 (sequence is synthesized)
catgcatctcacgagagctacctccaccactcaataaaaccttgcacgcatcctccaagcccacgtgtgatccgacttcttgggtacactagggcaagaacccgggatacagaaagccct

SEQ ID NO: 888741 - DNA, 120 bp, Artificial Sequence
  ENSG00000254689_16 (sequence is synthesized)
tctagtggagctgattaacacaagccacctgcagaaggcaaagctgaaagagcacaccacaacacatgcccactggggcttcgggagctgcaaacactcaaccctagacactgtcgtggg

SEQ ID NO: 888742 - DNA, 120 bp, Artificial Sequence
  ENSG00000254689_17 (sequence is synthesized)
gtcagagccccaaaacactccccacgacctgctcatctgcatgctcccctcaggagtttgagcagcaggtcaccgaagaagcgagccacacccgttgcatgccgtgtgagggggataagg

SEQ ID NO: 888743 - DNA, 120 bp, Artificial Sequence
  ENSG00000254689_18 (sequence is synthesized)
gaacttctcccatttcatctgaatatctgaaagtatctgtagttgggactcacgttttatttataatttgtctcgatatagaagtaaaggtataatttcctatagaaatttgaaacattg

SEQ ID NO: 888744 - DNA, 120 bp, Artificial Sequence
  ENSG00000254689_19 (sequence is synthesized)
ttcccttgtcacatcttgctgataaaaaaccttatgtcagatgatttttggtctgataatatagaaattttgattaacttactaaataattatatttcaatatgattcatttggtaataa

SEQ ID NO: 888745 - DNA, 120 bp, Artificial Sequence
  ENSG00000254689_20 (sequence is synthesized)
ttttattttatttttattctgtcatgtctatttaagttgtataatactttcagatatagaatttgacaaagttcctatggcaaatatgaagctgcataaaatctgcttcctgacccagag

SEQ ID NO: 888746 - DNA, 120 bp, Artificial Sequence
  ENSG00000254689_21 (sequence is synthesized)
cgctcaggtagcgaagataaatgtaatcttgtggcaggaaatcgacattctctgcactatctttagttttccaactgaacttctgagaaatggaggctacaatacctagtttgccaaaca

SEQ ID NO: 888747 - DNA, 120 bp, Artificial Sequence
  ENSG00000254689_22 (sequence is synthesized)
ggagaagactacaattcccagaaggaactgcgaccaacattggtccgtgctcatactttgcatcatgggacttgtagtcatcaccagcttgcgctgattctaacagtttcactcttgttg

SEQ ID NO: 888748 - DNA, 71 bp, Artificial Sequence
  ENSG00000254689_23 (sequence is synthesized)
catgggcgcccgcccaccggaggagcgactggagttgatcggctgggcggcttactgaaacctccacctcc

SEQ ID NO: 888749 - DNA, 120 bp, Artificial Sequence
  ENSG00000254689_24 (sequence is synthesized)
cagcttcccgagtagctggaattacagtgtggctggtgagaagaacttgggatgatcccttcctgtggggttcaagagcagtctttctccggtgtcatttccaaaagatccagtctccag

SEQ ID NO: 888750 - DNA, 74 bp, Artificial Sequence
  ENSG00000254689_25 (sequence is synthesized)
attacaatttggggacaggaggagagatacaggtgggaagtcacaggaactaaagtcaaactaaaggaaaatct

SEQ ID NO: 888751 - DNA, 120 bp, Artificial Sequence
  ENSG00000254689_26 (sequence is synthesized)
ctggagtgggaccatatgatgcagtgtggatagctgcatacaagcattaagactcttgagaaaatacagtgcaccaggaaaactactatgaaaactatcagagaataatggcaaaagact

SEQ ID NO: 888752 - DNA, 120 bp, Artificial Sequence
  ENSG00000254689_27 (sequence is synthesized)
gaataaagtgcactcctaataggaactctcctgaactgaacaaattaaaatcagacaaatttttaaaataagtcagaagatgaatctacttgttttaaccaagtagcttgtttgttgatt

SEQ ID NO: 888753 - DNA, 120 bp, Artificial Sequence
  ENSG00000254689_28 (sequence is synthesized)
tcttaaaatggagctgctgtcataccagacacatgtatccaagtgcagcaagagatcttagccatcactccccatcttctgccagcctccccacccaccctgccccagttcagccaacag

SEQ ID NO: 888754 - DNA, 120 bp, Artificial Sequence
  ENSG00000254689_29 (sequence is synthesized)
gtagtccaaagcaatgccgttatctaaaacaatcttagcaagaggatttttaaaaggttgctgggcaactaaagcctttgcagttgagtcagatatagtagctaatgtttaagacagaat

SEQ ID NO: 888755 - DNA, 120 bp, Artificial Sequence
  ENSG00000254689_30 (sequence is synthesized)
tttaataataactttacttacatttatgccaatccagggaaggagtattctaccaaaaatgctctctaaatctcaagatctctctacatgagatatttatgactgctgacaaattcctct

SEQ ID NO: 888756 - DNA, 120 bp, Artificial Sequence
  ENSG00000254689_31 (sequence is synthesized)
ttattttatagaacaaattaagaggtgtagaccaatatttagtttccaattggttatggagtgacaatagtactgttagaacttctaatccacattggcctcttattttccacttattga

SEQ ID NO: 888757 - DNA, 120 bp, Artificial Sequence
  ENSG00000254689_32 (sequence is synthesized)
gatataaagttgtccatgcatgcagttgatgattaaatgctccacacataaaatatctcctggaagggcacaataggtagttccctgcgggatgcctgtgtgttagaggttaccagtagg

SEQ ID NO: 888758 - DNA, 120 bp, Artificial Sequence
  ENSG00000254689_33 (sequence is synthesized)
gagtacatatttatgattgttacatgggtacattgcctactagtggggactggccttctagtgtacccattactcaaatagtgggcattgtaacccgcagcttcagatccaaatggtatg

SEQ ID NO: 888759 - DNA, 120 bp, Artificial Sequence
  ENSG00000254689_34 (sequence is synthesized)
gtagctgatgctcttgaaccccttgactgagtctgttttccttctgtggagtatactttcatttaaaataaatctctgctttccatgccttgtttgtgtgttctgtccaattcttcgttc

SEQ ID NO: 888760 - DNA, 120 bp, Artificial Sequence
  ENSG00000254688_0 (sequence is synthesized)
catccaaaggttggtgcattatcagaatgatctgaaggaaaaataaattattcacatcaaggaagcacctgctctctctttcctcctgcatgtcccaactagaaaaagcatctcttgtgc

SEQ ID NO: 888761 - DNA, 120 bp, Artificial Sequence
  ENSG00000254688_1 (sequence is synthesized)
cagatggaaagaaaaagaggccagggtgtctgagaaggtccccagcatgcccacctgtacagcagcctgggaagcctcagtatctgacctgccctgggaaatgacttccaaacgccttca

SEQ ID NO: 888762 - DNA, 120 bp, Artificial Sequence
  ENSG00000254688_2 (sequence is synthesized)
cacttctcacagcttataggagtgcatgaggacacctcccagcctccagccctggaaaaagcactggacctctccagctacatgccttctttgtccttctcccagtcaaggctccacagg

SEQ ID NO: 888763 - DNA, 120 bp, Artificial Sequence
  ENSG00000254688_3 (sequence is synthesized)
caaggcctccaccccccatcttccattgtactcctgcgcagaagctgaggatgggaagcttagaataaattatgtgagccctcgccctggcagaagtgacagggtggacaccacacacta

SEQ ID NO: 888764 - DNA, 120 bp, Artificial Sequence
  ENSG00000257337_0 (sequence is synthesized)
actcacaaagagccgaggggagagagggtgcgcagacggccagccgggccgcgccagggacatactggagacaggaagtggctgagagggggagagagttggagagagacggccgcggag

SEQ ID NO: 888765 - DNA, 120 bp, Artificial Sequence
  ENSG00000257337_1 (sequence is synthesized)
gacacggggacgggaaagtctgagagacggggagagcctgacccggcgggacacaggcagaaagaaacacgcgagccagacagacgcagaagaaacgtgcctggtactggataggaactt

SEQ ID NO: 888766 - DNA, 120 bp, Artificial Sequence
  ENSG00000257337_2 (sequence is synthesized)
catggaatggagctaatgggccgtagggcaggtttgagtcgtgccaccctggagcagaaggtggagggtagggataagggggtggagcacctgattccaatcttgccacagggaagaaga

SEQ ID NO: 888767 - DNA, 120 bp, Artificial Sequence
  ENSG00000257337_3 (sequence is synthesized)
gtctgtgaagaacattccttagggtctttggctgggctctgggatggatgccatgggagtacctttacttaagctctaaagttaccaatggagagactgggactcaaagaggaacttgat

SEQ ID NO: 888768 - DNA, 120 bp, Artificial Sequence
  ENSG00000257337_4 (sequence is synthesized)
tggaccccagagagggtggagagaaactaggagaaaagcacaggatgtagaggtctattcggcataatcttctccctcattttcatcttcaccatcaacagagagagcagcatacttgct

SEQ ID NO: 888769 - DNA, 120 bp, Artificial Sequence
  ENSG00000257337_5 (sequence is synthesized)
tgcagaactgaacttctgtaacacaacgagagtgacaggataatgaaggccctgaattatcacatcaaaacccaagacacaggatactgatcctttggcaatgggggatgacagtcagat

SEQ ID NO: 888770 - DNA, 120 bp, Artificial Sequence
  ENSG00000257337_6 (sequence is synthesized)
gacacccacttgcttgctcatcagcattgtccattggagaggagctagggaagagggtcagaggcacatgcgatcttactatagtctcataccacctctacaccttgcagaagggatgag

SEQ ID NO: 888771 - DNA, 120 bp, Artificial Sequence
  ENSG00000257337_7 (sequence is synthesized)
gaaagaagtccaacggcaaaaagtttagaatactaagaatttttaattcttagtaagaatacttagaattctaagaatttttcttagaatgaaaaattgggagcagccttcaacacttac

SEQ ID NO: 888772 - DNA, 120 bp, Artificial Sequence
  ENSG00000257337_8 (sequence is synthesized)
ggaagctggattttcctcaggtttctttggctcaggtgcagatctggagtcttgatcctttttgccatctttcctgcagagacgtaagcataaaaccatgtctttaggaaaggactcgcc

SEQ ID NO: 888773 - DNA, 120 bp, Artificial Sequence
  ENSG00000257337_9 (sequence is synthesized)
taatacaaacatgtgtatgcatgcagtttcaaggcactgaacaggcacctctagtcaacagtccttgttgtctggatgatgtattacttctagattttcagaatcttaactgtctacgtt

SEQ ID NO: 888774 - DNA, 120 bp, Artificial Sequence
  ENSG00000257337_10 (sequence is synthesized)
ggctgactttagtttgctcacaatgagcgatctggcagtgctctgagaaccaagaacttaatttcttaattacacaaacatgtggatcagaggaaagatgagaaagagaacaagcatacc

SEQ ID NO: 888775 - DNA, 120 bp, Artificial Sequence
  ENSG00000257337_11 (sequence is synthesized)
tatctgactccttccagtggtctctgttccctccgtcgcctggaccacggctagagttcccagtttggccttttggggcattcatcccatctactttattttcatctgcttgggcagtaa

SEQ ID NO: 888776 - DNA, 120 bp, Artificial Sequence
  ENSG00000257337_12 (sequence is synthesized)
tgtaaacaaattaaaggcaagtaaaagtatcaatgtccctctcctaagatttcccttaagctgaagaaaattgtgcccacatgtactgagggaaactaacctcaccccaacccagacttc

SEQ ID NO: 888777 - DNA, 120 bp, Artificial Sequence
  ENSG00000257337_13 (sequence is synthesized)
cttcctgaagcccttctttccacatcctctacagcacacaaaaatacaaaaaacaaacaaaatccactaaaaagttccatgtagggatatgccatcatgaaaagcaagctggaaataaag

SEQ ID NO: 888778 - DNA, 120 bp, Artificial Sequence
  ENSG00000257337_14 (sequence is synthesized)
gtgaaaaagcattaccttgtaggtttccaggcagcctggacaataggggcacctaaacccacattgaaaagccttcacatcatcacagctgagtctcatagccttcaactttaccagttt

SEQ ID NO: 888779 - DNA, 120 bp, Artificial Sequence
  ENSG00000257337_15 (sequence is synthesized)
tggagaacagagataaatgcactggccagaaactagaagagcagctgctccaattggctgggaaatcatttaactggctcctcatcttggctcttaaatccccaaaattgttgactgagg

SEQ ID NO: 888780 - DNA, 120 bp, Artificial Sequence
  ENSG00000257337_16 (sequence is synthesized)
tttcccgggctcctttctatgctccacctccttgtgaccttaaggattctctgccactgtcctaacccctttcccgccttgcaacaatgaccagtctgtccctagctgtttggaaaattc

SEQ ID NO: 888781 - DNA, 120 bp, Artificial Sequence
  ENSG00000257337_17 (sequence is synthesized)
ctcaccaggtacttgtcccggtgcttggattgcagcacatgggccagctcgcgcaggtggccccggtgccgctgttcatcgggccgcgcggggaaggcggcggccaagatgcgctccgtc

SEQ ID NO: 888782 - DNA, 120 bp, Artificial Sequence
  ENSG00000257337_18 (sequence is synthesized)
acgtaggatgagcaatacccacagcactccgttcaaggtcatctcctgggggccctctctggagccaccagacctctggacaccatggccaggttccttgccctccccaccccatcccag

SEQ ID NO: 888783 - DNA, 120 bp, Artificial Sequence
  ENSG00000257337_19 (sequence is synthesized)
agcgcactcaccaactccacgggaggcaaggcctgacaggctgaagtcacctggaaggggaccgatgcctggtactggataggaacttcatggaatggagctaatgggccgtagggcagg

SEQ ID NO: 888784 - DNA, 120 bp, Artificial Sequence
  ENSG00000257337_20 (sequence is synthesized)
agagcagagggactcagtgaagttccagaactggcctgatagcagccactacatgattaagaaaaaaacaagcagctttgttgtaaaaaagattggcttcatggtttttataatcatgaa

SEQ ID NO: 888785 - DNA, 120 bp, Artificial Sequence
  ENSG00000257337_21 (sequence is synthesized)
tttctcctccatgttccaattgtcacctgatttttaatccaagaatatcaaacttgatgtacccctttgtttaactgaaggttgctttctcacttggtatccctttctttcaaaatttaa

SEQ ID NO: 888786 - DNA, 120 bp, Artificial Sequence
  ENSG00000257337_22 (sequence is synthesized)
ctttcaggaaataaaggtaaccagtttgctatgaatgttaacacatagccttctggacacaattagaacctgaagtattacggtctcaatgtgcaaaccagatgaacccggctaaaataa

SEQ ID NO: 888787 - DNA, 120 bp, Artificial Sequence
  ENSG00000257337_23 (sequence is synthesized)
tcaaagttgaccacgaacatggtattttctgtatctctcaagtgacttaatattaatccagctccaaaagtattgtttatgatcaaccagatcacattttgaatccatcctacgcttttt

SEQ ID NO: 888788 - DNA, 71 bp, Artificial Sequence
  ENSG00000257337_24 (sequence is synthesized)
ggactacaggcgcgtgccaccacgccaggctaattttttttttttttttagcctcccaaagtgctgggatt

SEQ ID NO: 888789 - DNA, 84 bp, Artificial Sequence
  ENSG00000257337_25 (sequence is synthesized)
aaattttttgtagaggcaggggtcttgctacactgcccagattggtcttcaactcctggcctcaagtggtccacccgtctcagc

SEQ ID NO: 888790 - DNA, 120 bp, Artificial Sequence
  ENSG00000257337_26 (sequence is synthesized)
gtcttcaactcctggcctcaagtggtccacccgtctcagccttccaaagtgctgggattagatgtgagccactgcacttggccttattccacagctttcaaagaatacggttacagagag

SEQ ID NO: 888791 - DNA, 120 bp, Artificial Sequence
  ENSG00000257337_27 (sequence is synthesized)
ggttacagagaggttgggtctcatagcacttttattgctgcagctcatatgcaaaggtttttttttttttttagagggagtctcactcttgtccaggctggagtgcagtggcgccatctt

SEQ ID NO: 888792 - DNA, 89 bp, Artificial Sequence
  ENSG00000257337_28 (sequence is synthesized)
ccacccacctcggcctcccaaaatgctgccatatgcaaagatctatgggagattttaataagcgaacacgagtaagacatgaggtaaac

SEQ ID NO: 888793 - DNA, 120 bp, Artificial Sequence
  ENSG00000257337_29 (sequence is synthesized)
agattttaataagcgaacacgagtaagacatgaggtaaaccacttacagtgcgtgggcttattttagactttttcatatcatttaattcaaaaatagtgtctgggattaatatgatgcta

SEQ ID NO: 888794 - DNA, 120 bp, Artificial Sequence
  ENSG00000257337_30 (sequence is synthesized)
gctacagatccttaccctcatggggcttaatctagtaccatcagctaatatccaattattaacctgtccttccactgggaggataaaaacagaactggtggtcagtacaataaggtcaag

SEQ ID NO: 888795 - DNA, 120 bp, Artificial Sequence
  ENSG00000257337_31 (sequence is synthesized)
ttcaacaaaagaacattaacaatctgaataaggtatccctttcctctttgttctatatacgtatcttctaccaaaacagcagaatgtggaattaatctgccctttagtccgatttggctt

SEQ ID NO: 888796 - DNA, 120 bp, Artificial Sequence
  ENSG00000257337_32 (sequence is synthesized)
aaatcaactttgtagatcacagtttctcaactctcaccccttgactcctttgacaaacaagtttcttctttaacgttatttgaaatttccaaacaaattaaatatcatgactaaaaaata

SEQ ID NO: 888797 - DNA, 120 bp, Artificial Sequence
  ENSG00000257337_33 (sequence is synthesized)
ttaaaagcacttttaaatcttagaatgtcttttcaaatcacaagtctccccctcctctgattgccacccactcccaggccctctggttaagaaattactgttgggtgtggtggctcacgc

SEQ ID NO: 888798 - DNA, 120 bp, Artificial Sequence
  ENSG00000257337_34 (sequence is synthesized)
acttgtcccggtgcttggattgcagcacatgggccagctcgcgcaggtggccccggtgccgctgttcatcgggccgcgcggggaaggcggcggccaagatgcgctccgtcacgtagggtg

SEQ ID NO: 888799 - DNA, 120 bp, Artificial Sequence
  ENSG00000257337_35 (sequence is synthesized)
gtggttggaagggaggctgggagcccggccgccgcggaggagggtgcctggtactggataggaacttcatggaatggagctaatgggccgtagggcaggtttgagtcgtgccaccctgga

SEQ ID NO: 888800 - DNA, 120 bp, Artificial Sequence
  ENSG00000257337_36 (sequence is synthesized)
gcagaaggtggagggtagggataaggtaggggacatcttcctagaagttctgaacctgttgccattcctacattcccccaacgtcctttagcagtgagcacttcctgaaactttctccct

SEQ ID NO: 888801 - DNA, 120 bp, Artificial Sequence
  ENSG00000257337_37 (sequence is synthesized)
ccttcaccctccctgctggattttccatgatgaaaaggggcggggggaaggaaggttggaattctgagaacccagtgcccagggctcaatgcccagtgcttgcccaaagtagccagtacc

SEQ ID NO: 888802 - DNA, 120 bp, Artificial Sequence
  ENSG00000257337_38 (sequence is synthesized)
actggctctaaggccttctttccctccccgtctcatctcaactgggtcccttgtctttggcaaaggctgagaagtctggttctcatttccagggggtggagcacctgattccaatcttgc

SEQ ID NO: 888803 - DNA, 120 bp, Artificial Sequence
  ENSG00000257337_39 (sequence is synthesized)
cccagaaattggcatttgggaggggtggatatggttgggactggggagccttgatcttactgctcttggttgagttggtgtccaatagacagtttcagaggttagagcagtgggagtcac

SEQ ID NO: 888804 - DNA, 120 bp, Artificial Sequence
  ENSG00000257337_40 (sequence is synthesized)
tggggactggggacaggagaggtgggggtgggggaagccaggcgggaatgagtagggaggcactgggaggaggggagaggcaagagttaggggaataccgaggaaagtggcagggattgg

SEQ ID NO: 888805 - DNA, 120 bp, Artificial Sequence
  ENSG00000257337_41 (sequence is synthesized)
aggctcctggagaaagggcaaggctgaaggttgtcccatgtattttggccagatttgattatgtaatcgagaatcatgagataattaagtgtgttcatgtctctggagccttcaaccagc

SEQ ID NO: 888806 - DNA, 120 bp, Artificial Sequence
  ENSG00000257337_42 (sequence is synthesized)
aagggtcacaagatgggtggccaaactcccagctcaggcttgattcctactctcaatgtggggatagtggagaagggggctgcaggaagggctgagaaaagctgagaatgagaagttata

SEQ ID NO: 888807 - DNA, 120 bp, Artificial Sequence
  ENSG00000257337_43 (sequence is synthesized)
caggaggtagcttggtgggagtgaaacaaaaatgagtggttcatgggccagccaggcatcctgatttccagctcacagcagcaggagcttcagagaggaagaaggagaggaggagaaagc

SEQ ID NO: 888808 - DNA, 120 bp, Artificial Sequence
  ENSG00000257337_44 (sequence is synthesized)
ctgaagatggaaccccctcttccatggtctggggtgaccccatgcctgtaactgaatgtgctcagatccttggggtgcggggactgtagggggaggatttgaaggtgtgggactgtcctg

SEQ ID NO: 888809 - DNA, 120 bp, Artificial Sequence
  ENSG00000257337_45 (sequence is synthesized)
gctggagaccactgggtcaggagaactccagtagagggtttgggtgctgggaaccaggaagagtgggggaaggggcagagccaactccagaggcggatctcctggctgaggacagagggt

SEQ ID NO: 888810 - DNA, 120 bp, Artificial Sequence
  ENSG00000257337_46 (sequence is synthesized)
gtattgtccaagctggaggttgctgtagctgggcggggagcagctcagctcgtctcttccaaatttcttttgggggagggtaagggaaggcaagcccccctttacttgtggccctggggg

SEQ ID NO: 888811 - DNA, 120 bp, Artificial Sequence
  ENSG00000257337_47 (sequence is synthesized)
ctacaatggttgctgagaaacaaggcttatttgacaaataatgcttcccaggagcagatgtgtagctctctcacttcctgagaaaccagatgctgtgagctcgcttagcacttgaggcga

SEQ ID NO: 888812 - DNA, 120 bp, Artificial Sequence
  ENSG00000257337_48 (sequence is synthesized)
cgccctcagcacgaactgggaccctagtgccttgggatccggagtatagtgcttgattctattgagaagaaacgaggctaatgtggactgggagacacacgggacctaatcagcctcaag

SEQ ID NO: 888813 - DNA, 120 bp, Artificial Sequence
  ENSG00000257337_49 (sequence is synthesized)
ttagcccttttgaagtaggttgctgcacctgcactttccccctactcgtccactagttcaagatttacaagacgttgacaatgagggctgaccagtcctgggtccactcctgcagctggg

SEQ ID NO: 888814 - DNA, 60 bp, Artificial Sequence
  ENSG00000257337_50 (sequence is synthesized)
atgagggctgaccagtcctgggtccactcctgcagctggggggcttctcggtggacccac

SEQ ID NO: 888815 - DNA, 120 bp, Artificial Sequence
  ENSG00000257337_51 (sequence is synthesized)
cttcctcccaagtagctgcaactatgggcatacaccaccatacctggataatttttctatttttttgtagagacagggtcttgccatgttgccctgactagtctcaaacttctaggctca

SEQ ID NO: 888816 - DNA, 62 bp, Artificial Sequence
  ENSG00000257337_52 (sequence is synthesized)
ttgccatgttgccctgactagtctcaaacttctaggcattgagacaagagtctcgctctgtc

SEQ ID NO: 888817 - DNA, 73 bp, Artificial Sequence
  ENSG00000257337_53 (sequence is synthesized)
tggcacctggccacacacgtctttttaaatttaaatgaggatgtggccatattacagcccaggttttctctga

SEQ ID NO: 888818 - DNA, 120 bp, Artificial Sequence
  ENSG00000257337_54 (sequence is synthesized)
aatgaggatgtggccatattacagcccaggttttctctgactttagagtaccttttgggacatagggccttcctctctaccctttctgtacacagccatcataaacctctttcaacaagc

SEQ ID NO: 888819 - DNA, 120 bp, Artificial Sequence
  ENSG00000257337_55 (sequence is synthesized)
agggtaggtttcctagaaaagcagtgtagggtggcgatttgggaagacggctccggtcgatattgggttcccgagcagcccgtggagcagtgggaaggatggaacggtcaattggaggcg

SEQ ID NO: 888820 - DNA, 120 bp, Artificial Sequence
  ENSG00000257337_56 (sequence is synthesized)
tgcctggtactggataggaacttcatggaatggagctaatgggccgtagggcaggtttgagtcgtgccaccctggagcagaaggtggagggtagggataagacctcattattgcacagct

SEQ ID NO: 888821 - DNA, 120 bp, Artificial Sequence
  ENSG00000257337_57 (sequence is synthesized)
gcccctcagcttcaggaggaaggtggaggggccttcagtggatgggcacaggctccagctgaggttgcgctatttaagggcacctcccctctggcctcttggtcccccaccccccaggcc

SEQ ID NO: 888822 - DNA, 120 bp, Artificial Sequence
  ENSG00000257337_58 (sequence is synthesized)
ccccacttgttgctcttggcgctcagcccccagcccacacagacccccattcatccagctgtagggcaggagttatatatagagccaagcaggcaggccatggccagggatggacactgg

SEQ ID NO: 888823 - DNA, 120 bp, Artificial Sequence
  ENSG00000257337_59 (sequence is synthesized)
ccggagtatagtgcttgattctattgagaagaaacgaggctaatgtggactgggagacacacgggacctaatcagcctcaagttagcccttttgaaacctcattattgcacagctgagag

SEQ ID NO: 888824 - DNA, 120 bp, Artificial Sequence
  ENSG00000278690_0 (sequence is synthesized)
tcccacaggggatttgaacgtgcagcagccttgcaaatgagccacaccccgtcacaagtcctgtgaggaagtcagggaactctcctctgttagcccaagtggcgccatcaagtaaacccc

SEQ ID NO: 888825 - DNA, 120 bp, Artificial Sequence
  ENSG00000278690_1 (sequence is synthesized)
gaaacttccataggggctcaggccatgaaaagcattttgccaagcagatcccaggccacactgcctgactgcaggaaatggctcccttattacatcctgccaggcagctagccacactgc

SEQ ID NO: 888826 - DNA, 120 bp, Artificial Sequence
  ENSG00000278690_2 (sequence is synthesized)
cccacctcccctgtccagacctataattgccccagtctgtacgcaggacgggggctccagcactcgctggtgttccccttccacaggtttctctgtccaataaacctatgttgctgtcga

SEQ ID NO: 888827 - DNA, 120 bp, Artificial Sequence
  ENSG00000256684_0 (sequence is synthesized)
ctgcaagagaaaagcccaagggcctaggtaaacaatggacagcatcctggatgatgatgcaattttaagcctgaaaagaatatttggtcttcaatcttggcaagcatacctgtaaagtag

SEQ ID NO: 888828 - DNA, 120 bp, Artificial Sequence
  ENSG00000256684_1 (sequence is synthesized)
tgagaaaattgcaccagaggacccacattgggacttttgagttgaacacattacttagcaaatgctaacatgggaacttgaggatatttagtgaacctgctgaagtcaacacattaatgc

SEQ ID NO: 888829 - DNA, 120 bp, Artificial Sequence
  ENSG00000256684_2 (sequence is synthesized)
aactgaaaccaatagagaagaagctatctaaccttggcattttggggtctaaaaaaagcttttacccactattgtgctttgtaacctataaaataaatcaaaataaatcaaaacataaca

SEQ ID NO: 888830 - DNA, 120 bp, Artificial Sequence
  ENSG00000256686_0 (sequence is synthesized)
tgtagagagatcttcctcgtggcacttgccacttgtccagaaataatatgttacgtgttggtggctcccgaaagatggcggccttcaccagtttctggagttacaaatgcacttcaataa

SEQ ID NO: 888831 - DNA, 120 bp, Artificial Sequence
  ENSG00000256686_1 (sequence is synthesized)
tgatcaagtcatgctgcaacaggcacagagaacaaagaaacaactgcaacaagaaactgctgaacttgggtctgaaatcccagcattaacaaaaaaggtcttgaagtgttttctagacca

SEQ ID NO: 888832 - DNA, 120 bp, Artificial Sequence
  ENSG00000256686_2 (sequence is synthesized)
gcccattctgctgtcgacatctctgatgaaaagccccactagatgtctttgcccagacttttccttctttttcacctcatctcatgccctggagaggagtagtgcctagtgaccaggagg

SEQ ID NO: 888833 - DNA, 120 bp, Artificial Sequence
  ENSG00000256686_3 (sequence is synthesized)
attaaacactctggtcctcagttgccaatagccacatttcagatgctcacgctagtggcccctgtattaagcaaaacagatttggaaaattttgaccatcactcaaaactttttttggac

SEQ ID NO: 888834 - DNA, 120 bp, Artificial Sequence
  ENSG00000256686_4 (sequence is synthesized)
ggacagcactgttctagagtcaaatggaataagtgatcactgtattgcccaggctgcagtgcagtggtgccatgtcagctcactgcaatctccacctcctgagttcaagcagttctcctg

SEQ ID NO: 888835 - DNA, 120 bp, Artificial Sequence
  ENSG00000281856_0 (sequence is synthesized)
aatccacaaactgccatctactagtccatttgtgagctggctggtaaattcaccttcctgggcctcagtttcttcatcagtaaaatgggataatgatggtgccttcctagttgggttgtg

SEQ ID NO: 888836 - DNA, 120 bp, Artificial Sequence
  ENSG00000281856_1 (sequence is synthesized)
gtgaaggttaaatgagatgccatgtggaagtgcagaggagaagggctgctataaggggctccaggtgggtgctgctgttatgattgggcacctactgcatgctgtgtccctgcatacagg

SEQ ID NO: 888837 - DNA, 120 bp, Artificial Sequence
  ENSG00000281856_2 (sequence is synthesized)
agtcgacctttgagacctgcttattcatggctgtttcacggatgtcgaagtggaggctcagcagggttggaggttcccggagtctcccagctgaaatggaagtgcttggtgaggtttggt

SEQ ID NO: 888838 - DNA, 120 bp, Artificial Sequence
  ENSG00000281856_3 (sequence is synthesized)
gtgtccgagccgaagagcagccaatgacaggcctggggatcgtctggcacagcccacttgacaaggccttggaaacttggtctctgcagcagcaaccggatttcagcctgggcctcggac

SEQ ID NO: 888839 - DNA, 120 bp, Artificial Sequence
  ENSG00000281856_4 (sequence is synthesized)
ggctctaccccaatctgctgtgtgattttgggcccaggcagggacccctctgggctctgttactggagaaaaggcaaatggctggtacgggtgggtccccagccctccttgcctggaggt

SEQ ID NO: 888840 - DNA, 120 bp, Artificial Sequence
  ENSG00000281856_5 (sequence is synthesized)
ctgcgagttggagggctctggggtaaagccagagccaggcccggggagagcctaggctcatctctggtgaacagggtaccctctagccaaagcaggggcaaggcgaggcacatgcccctc

SEQ ID NO: 888841 - DNA, 120 bp, Artificial Sequence
  ENSG00000281856_6 (sequence is synthesized)
atatgggagctggggctgaccccctctcctagccctgcacaccttgagcacgtggccttggcccatctgccctgtgggtggacactttccagccctgggtcctgaactctaccaatcagc

SEQ ID NO: 888842 - DNA, 120 bp, Artificial Sequence
  ENSG00000281856_7 (sequence is synthesized)
aggaacctagactcctgaggggtgcagcctggatgggaggtcagggaactgggttcctgagcgcatctctgtgccattcatctctccattggtttcccaaatgtggactgagcacacact

SEQ ID NO: 888843 - DNA, 120 bp, Artificial Sequence
  ENSG00000281856_8 (sequence is synthesized)
gtgagtcaggcctgagctaggttctagggatgctactgtcaacaagacagatgaaggttcctgccctcatggaggggagggagacaataagcaaagaaataaatgcatgatgtaatgtca

SEQ ID NO: 888844 - DNA, 120 bp, Artificial Sequence
  ENSG00000281856_9 (sequence is synthesized)
agcctccctcacagcctgatggcccctgcggcagccccaacccggtttcaggggctaagaaaactacagttgcatgaacgggtggaggtgagtgggaggcagaagcggcggggagaacca

SEQ ID NO: 888845 - DNA, 120 bp, Artificial Sequence
  ENSG00000281856_10 (sequence is synthesized)
gtctgttccgagatctctggaccaaccagtggatcctgatggtcagccttgtctagagccccttccagcgtgcaggccagtcctcctggcattcttctaattacaccgagctgtgagtta

SEQ ID NO: 888846 - DNA, 120 bp, Artificial Sequence
  ENSG00000281852_0 (sequence is synthesized)
cttggcgttcactgcaagctataagctctgcaagtggtgaccccgacgtgatcgccttgaagttacgcgtgaaggaggagagctcattacttttcggggaatcctgagaacaggaccagt

SEQ ID NO: 888847 - DNA, 120 bp, Artificial Sequence
  ENSG00000281852_1 (sequence is synthesized)
cgttggagaaccaaccaacaatgatggtgatgactcggaaggcacctgacatcacctggggacagctaaagaaattgaatcaacaagcatctatccagcttgccgccgtggaagcccctg

SEQ ID NO: 888848 - DNA, 120 bp, Artificial Sequence
  ENSG00000281852_2 (sequence is synthesized)
caactgcagacaatcggtttcttacatatctggtggcaattggggaaacttctgagaaagtaagacagacatggatgttggggtggcaggcacttgcagatggctctgtgctgccacccg

SEQ ID NO: 888849 - DNA, 120 bp, Artificial Sequence
  ENSG00000281852_3 (sequence is synthesized)
acgcatctatgaccagggaagaatcatggaagcttaccttgcattggatgaccagcacgctataagaattaaagaaggggggaatatggcggggtgcacgacagcatattcaagcttatg

SEQ ID NO: 888850 - DNA, 120 bp, Artificial Sequence
  ENSG00000281852_4 (sequence is synthesized)
tacaaggcgtttgaggtcggggcatggaaacatactgaggcactgtgtgtatgttatttgtgcatgagaatgaaactccttgaccctgaaaacaggacggggagtggagtgtgtggtgtg

SEQ ID NO: 888851 - DNA, 120 bp, Artificial Sequence
  ENSG00000281852_5 (sequence is synthesized)
ataaggaacgctgaaaacagcctcccgagaatgcggtttgagtgcttttaccaggccacaggtgtctcatgacccgacctcaaaaaggccatctagtggatgtttgtggtctaacaagcc

SEQ ID NO: 888852 - DNA, 120 bp, Artificial Sequence
  ENSG00000281852_6 (sequence is synthesized)
ctttcaatgaatacttggcggacagatgctggggcggagtctcttagaagagctgcccccggcccccctcagctggatttgtctgagaactcattcttggcgttcactgcaagctataag

SEQ ID NO: 888853 - DNA, 120 bp, Artificial Sequence
  ENSG00000281852_7 (sequence is synthesized)
ctctgcgatgggccctgaaaaaaaaaaatcgatactacgatgactctcatatgtatttcttcagcccagatccagacctttgtctactcagcttctccacgtggatacctaataggcatc

SEQ ID NO: 888854 - DNA, 120 bp, Artificial Sequence
  ENSG00000281852_8 (sequence is synthesized)
tcaaatttaaatatccaaaaccaaactcctgacattaaacacaagaagcaagaaatatgaacatattttctgattccactaatataaaagtacataacagtcaacaccaaaccatattat

SEQ ID NO: 888855 - DNA, 120 bp, Artificial Sequence
  ENSG00000281852_9 (sequence is synthesized)
tcttatttcttgaattgaacttttattttaagttcagaggtacatgtacaggtttgttacataggtaaacttgtgtcgtgggggtttcttgtagaaattgtttcgtcacccagtgattaa

SEQ ID NO: 888856 - DNA, 120 bp, Artificial Sequence
  ENSG00000281852_10 (sequence is synthesized)
tttcttgtagaaattgtttcgtcacccagtgattaagcctagtacccattcgttatttttcctgctcctctccatcctcccaccctccaccgtccaataggccccagtgtgtgttgttcc

SEQ ID NO: 888857 - DNA, 87 bp, Artificial Sequence
  ENSG00000281852_11 (sequence is synthesized)
atccaaccatgttcctgcaaaggacctgatctcattcttttttatggccgcatagtatcccgtggtgtatatgtaccacattttctt

SEQ ID NO: 888858 - DNA, 120 bp, Artificial Sequence
  ENSG00000281852_12 (sequence is synthesized)
tgcacgtgtcttgataacagaatgatttattatattcctttgggtatatgctcagcgatgagattgctgggccgaatggtatttctgtctttaggtcttcgaggaatcaccacactgtct

SEQ ID NO: 888859 - DNA, 80 bp, Artificial Sequence
  ENSG00000281852_13 (sequence is synthesized)
tttttctctgcaacctcgccagtatccattattcttttactttgtagtaatagccattctgactggcgtgagatggtatc

SEQ ID NO: 888860 - DNA, 81 bp, Artificial Sequence
  ENSG00000281852_14 (sequence is synthesized)
ctttcacaggattgttggccgcatgtacgtcttgttttgaaaagtgactgttcgtgtcctttgcccactttttaatggggt

SEQ ID NO: 888861 - DNA, 72 bp, Artificial Sequence
  ENSG00000281852_15 (sequence is synthesized)
tgtaaacatagtctgcaaaagttttctcttattctgtaggttgtctgttcactctgctggtagtttccttta

SEQ ID NO: 888862 - DNA, 89 bp, Artificial Sequence
  ENSG00000281852_16 (sequence is synthesized)
cttggtgtcttcgtcatgaaatctttgcccattccttatccagaaaatgattgcctgggttgcctttcagggattttatagcttggggt

SEQ ID NO: 888863 - DNA, 120 bp, Artificial Sequence
  ENSG00000281852_17 (sequence is synthesized)
gggttttacatttaagtctttaatccatgttgagttaacttttgtgtatggtgtgatatagtttggctgtgttcccacccaaatctcctcttgaactgtagctcccataatccccacgtg

SEQ ID NO: 888864 - DNA, 120 bp, Artificial Sequence
  ENSG00000281852_18 (sequence is synthesized)
ctcctcttgaactgtagctcccataatccccacgtgttgtgggagggatccggtgggcggtaattgagtcacgggggtggatttttcctgtgctgttctcatgatagcgaataagtctca

SEQ ID NO: 888865 - DNA, 79 bp, Artificial Sequence
  ENSG00000281852_19 (sequence is synthesized)
atgatagcgaataagtctcatgagatctccctgtcgccatgtaacgcacatcctttgctcctccttcgccttctgccat

SEQ ID NO: 888866 - DNA, 84 bp, Artificial Sequence
  ENSG00000281852_20 (sequence is synthesized)
agagaacggactagtacctggtgtaagaaaggggttcagtttcagtcttccatatatggctagccagttatcccagcaccgttt

SEQ ID NO: 888867 - DNA, 120 bp, Artificial Sequence
  ENSG00000281852_21 (sequence is synthesized)
aaggggttcagtttcagtcttccatatatggctagccagttatcccagcaccgtttgctgaatagggaatcctttccccattgcttgctttcgtcaggtttgtcaaagaccagatagttg

SEQ ID NO: 888868 - DNA, 83 bp, Artificial Sequence
  ENSG00000281852_22 (sequence is synthesized)
ggtttgtcaaagaccagatagttgtaggtgtggggcctcatttctgggttctctattgtgttccattggtctccagtgtaggc

SEQ ID NO: 888869 - DNA, 120 bp, Artificial Sequence
  ENSG00000281852_23 (sequence is synthesized)
ctttgttctttttcacttagaattgccttggccattcagactctttttcagttccatatgaattttaaaataggtttcctcgtactgtgaagaatgccaaaggtaacttaataggaatcg

SEQ ID NO: 888870 - DNA, 120 bp, Artificial Sequence
  ENSG00000281852_24 (sequence is synthesized)
cattgaatctgcaaattgctttgggcagtatggccactttaatgatattgattcttcctattcatgagcagaaatgtttttccatttgtttgtcacgtctctgatttccttgagcagtat

SEQ ID NO: 888871 - DNA, 120 bp, Artificial Sequence
  ENSG00000281852_25 (sequence is synthesized)
tttgtagttcttcttgtagagatctttcacctccctggtgtggtgtattcctgggtatcttggtgtgtgtagcaattatgaatgggactgtgttcccgatttggctctctgcttgactgt

SEQ ID NO: 888872 - DNA, 81 bp, Artificial Sequence
  ENSG00000281852_26 (sequence is synthesized)
aatgggactgtgttcccgatttggctctctgcttgactgttgttggtgtatacgaatgttagcgatttttcacattgattt

SEQ ID NO: 888873 - DNA, 120 bp, Artificial Sequence
  ENSG00000281852_27 (sequence is synthesized)
gaacatgtcgtctgcaggcatactgtagtattaaaagaatgtaatataggacataggacagaaaaacgtagagaaaaaagaggaaagaaggatcacaaatgtaaatgtgttggtttcctc

SEQ ID NO: 888874 - DNA, 120 bp, Artificial Sequence
  ENSG00000281852_28 (sequence is synthesized)
ttgaaggaggaatgaggctgagatcaggcagagacaccccaggagctttggggaatgctggcggtgttctcctctgtgacatgggggtgtttctgtagaggtgcccttgataatcactta

SEQ ID NO: 888875 - DNA, 120 bp, Artificial Sequence
  ENSG00000281852_29 (sequence is synthesized)
ttaaacaacacacacatattgtgaggttctctctatgtatgttacatttcaaaataaagaggggcaaaattgctaataacaaataacacacatttgtagttaaacacttctcacaatcca

SEQ ID NO: 888876 - DNA, 120 bp, Artificial Sequence
  ENSG00000281852_30 (sequence is synthesized)
cagacctggaaatgactgattagttttctgtatgtgtagttttccagttttaagaatgttctacaaatggaatcatacattatgtagagtttcatatttggtgtctttagcacaatgaaa

SEQ ID NO: 888877 - DNA, 120 bp, Artificial Sequence
  ENSG00000281852_31 (sequence is synthesized)
tacatataagacctctagaactgcaatgtactctttcttgacctcagtactcaatacgtgttttcctcacttcacaatagttcattcacagtcgattggttttctaaacttgtatatatg

SEQ ID NO: 888878 - DNA, 120 bp, Artificial Sequence
  ENSG00000281852_32 (sequence is synthesized)
tgtagtatgctttataaatatcatatgatagttaactttatgtaatttgttatatcttggtaatggacttttcttaaaaatggacagtatccctaagaataccccgtacatttccattgc

SEQ ID NO: 888879 - DNA, 80 bp, Artificial Sequence
  ENSG00000231437_0 (sequence is synthesized)
cgcgtcccctccccgcctcgccgctccgctcgcgggctcgcgggctccctcgctctctcccttcccccgccgctgccggc

SEQ ID NO: 888880 - DNA, 120 bp, Artificial Sequence
  ENSG00000231437_1 (sequence is synthesized)
ctgcctctcccgaggtccctttcccgagggggggaggtggtgggggcgcggcgcaggcggggcggggaggagaggagagtccgggggaggcggcaaggctgcgccctcggctcccctccg

SEQ ID NO: 888881 - DNA, 120 bp, Artificial Sequence
  ENSG00000231437_2 (sequence is synthesized)
ggcggcaaggctgcgccctcggctcccctccgatccccgcgggcccagcggccccaggccgggccggagagcgccgagccgccaggcagtggaggaagagaggaggaggacccggagtct

SEQ ID NO: 888882 - DNA, 120 bp, Artificial Sequence
  ENSG00000231437_3 (sequence is synthesized)
cgccgcgggagggtgcccagggcgagggcgtgcgagggggagtgactccgcgcgcgaggggcagcagcacctgcttgagaccaagcccggcgacctggcaaggtggggccccctaccgcg

SEQ ID NO: 888883 - DNA, 120 bp, Artificial Sequence
  ENSG00000231437_4 (sequence is synthesized)
gcccccggctctcagctccgagtgcagaggctgaagaggtacccgggggacacactgcctctaaccccacctatgagccgctctcctctcggaggacgaaggcaccatcagaaggtcgag

SEQ ID NO: 888884 - DNA, 120 bp, Artificial Sequence
  ENSG00000231437_5 (sequence is synthesized)
attcgccctcctctcccgccacgtctacccactacctagaccgggagtctggacttgggagcgtgaactctcacccgagccggtccccttacaactggagcccgcccagcccctcagtcc

SEQ ID NO: 888885 - DNA, 120 bp, Artificial Sequence
  ENSG00000231437_6 (sequence is synthesized)
ctccctgaagcccatgggtccccactgctccgtgcctcgtcgacccaggatggggagtgggaaggtcagcatgtgcccacagggccaggtgtccggcccagattcccaccctcagggcgg

SEQ ID NO: 888886 - DNA, 120 bp, Artificial Sequence
  ENSG00000231437_7 (sequence is synthesized)
cggcgcgcaaagggcgcagtccccgccgctgggcggacccgcggctccggctttcccggtgtctccagcctcggtgcccggaatcctggatctcggcctggcgctccggaagcgaggcag

SEQ ID NO: 888887 - DNA, 120 bp, Artificial Sequence
  ENSG00000231437_8 (sequence is synthesized)
cgagtggaggaatcctagggtgtgcctggaggtggcggagtgtaccgacgcgggtgtgagcgcgtgtgccagcgagggtgggcacgggggtgagcgtggcaagggcagcagcacctgctt

SEQ ID NO: 888888 - DNA, 120 bp, Artificial Sequence
  ENSG00000231437_9 (sequence is synthesized)
gcagggacggggaacgcttggcttgagagatcacatttctgggtgtggagagaatgtcaatcacatatccagaatatcacctccttgggcacagccagggcatggtccattgaaaatgtt

SEQ ID NO: 888889 - DNA, 120 bp, Artificial Sequence
  ENSG00000231437_10 (sequence is synthesized)
cctgattgctggaagctgacggctcaccataaaagccaaaatggggacctgtcaaaaatgttttagccaaactatggcttggctcaggaagatgccaagaccaaaggctgctgaacttta

SEQ ID NO: 888890 - DNA, 120 bp, Artificial Sequence
  ENSG00000231437_11 (sequence is synthesized)
agtataaacttgcatgaaaagcacattgcaggtctgagacagtggaggcttagtggtgagaacatgagctctggatagacctggcttcaagtcttggctctgtcattcaccagctgtgtg

SEQ ID NO: 888891 - DNA, 120 bp, Artificial Sequence
  ENSG00000231437_12 (sequence is synthesized)
aatttgggcaaaccacttttcttctctgatgctcagttccctcacctagcaaaatgggttataatgatggcatcaactcataaggttcatgaggactgagctagataatgcaaacaacat

SEQ ID NO: 888892 - DNA, 120 bp, Artificial Sequence
  ENSG00000231437_13 (sequence is synthesized)
gtttcatatacaataataaataaaaatgttggctgttataatattgtcactgagtctacatgtatctgaaactagctcttttaaatcctgggtacagctttacaagcagtattgtgtagt

SEQ ID NO: 888893 - DNA, 120 bp, Artificial Sequence
  ENSG00000231437_14 (sequence is synthesized)
ttagacagatcacctgagttctttctatgtaattattgtttctactgaaccttggtaaatgtgtgaaatcacagaagtttgtccctagacactcccctcaccccactggctcctctctcc

SEQ ID NO: 888894 - DNA, 120 bp, Artificial Sequence
  ENSG00000231437_15 (sequence is synthesized)
attctgtgcaaccccatttctgcagccttgagcttcagcccatttctctccatttcctcctcattagcaagaactgataaaattatttgaactgatatgtaagtgaccatctcatccaga

SEQ ID NO: 888895 - DNA, 120 bp, Artificial Sequence
  ENSG00000231437_16 (sequence is synthesized)
tcaagcattcatcaaagtaatggggaaagtttggggtcccaggagactcttcccaattccacagagtcctgcccattcataaaactggtactattgatgcattataagcaacaaggtggt

SEQ ID NO: 888896 - DNA, 120 bp, Artificial Sequence
  ENSG00000231437_17 (sequence is synthesized)
ccgtgtttgaattctgcagctggaaaatcaagtctccagcttttgcaaaagtgttgtaatagggaaacttggacactaattttatataccaacctcttcttggtaaagagacatagctca

SEQ ID NO: 888897 - DNA, 120 bp, Artificial Sequence
  ENSG00000231437_18 (sequence is synthesized)
tgagcaccaaggcctttccagcattgcacatctatgatacttatactcaagtgcatttttttcttcagagctcaaggctagagttgggtgtttttgcctcactgggtttgtaggagactc

SEQ ID NO: 888898 - DNA, 120 bp, Artificial Sequence
  ENSG00000231437_19 (sequence is synthesized)
agctacaaagtcattaattgctttggtgaatcaacaagtaaagaaagacagtccagctattgtccccacactgcaaaatcataagaggcttctggacttctccacaaaatcctcattaaa

SEQ ID NO: 888899 - DNA, 120 bp, Artificial Sequence
  ENSG00000231437_20 (sequence is synthesized)
gatgagtcctcatggctcttacagaattctttattatgtcctttgtgctgagactgcaaggtaaagaaagaaaaaagggaaataactaaatttgttatcatggaaaatttcaaacataca

SEQ ID NO: 888900 - DNA, 120 bp, Artificial Sequence
  ENSG00000231437_21 (sequence is synthesized)
aaagatgaaagaattgtataatatacccccatgaacttgtcatttagctttgaaagttaccaactcatggccaatcatttttcatctgtaccctactcacacactcccccaccataattt

SEQ ID NO: 888901 - DNA, 120 bp, Artificial Sequence
  ENSG00000231437_22 (sequence is synthesized)
tgaaacaaattccaaatataatttcatctgtaaatatttctgtgattgcacctttgttatggccaacaaaatccatctttctagaagagaagtcattcttccctccctccatgatgctaa

SEQ ID NO: 888902 - DNA, 120 bp, Artificial Sequence
  ENSG00000231437_23 (sequence is synthesized)
gaacatttggccagtacctgcatccatgcccaggagtggtctctgggttaggcaagcttgagggtttactgaatgttatccaaagtttgtccttttccttgggtagaaaaaggaacccat

SEQ ID NO: 888903 - DNA, 120 bp, Artificial Sequence
  ENSG00000231437_24 (sequence is synthesized)
ttttttttttttttttttttgtcagcagggatgatgctcaatagctgtgatgaggtccaagctgagagaaaagagtcatgatcatgaatcccaactggattcatcattttccacatactt

SEQ ID NO: 888904 - DNA, 120 bp, Artificial Sequence
  ENSG00000231437_25 (sequence is synthesized)
atcatgaatcccaactggattcatcattttccacatactttacttcatttagctttcaccaattctcatgttagttccattttacagataagaaaactaagacctaagctcacccagcta

SEQ ID NO: 888905 - DNA, 120 bp, Artificial Sequence
  ENSG00000231437_26 (sequence is synthesized)
gtagttacttgtggcagagacagactagatgccaatcaaattcagttcctcttttctgtagatacagttagattactttcccaggttctcttgcagttaggtttggtcatctgactaagt

SEQ ID NO: 888906 - DNA, 120 bp, Artificial Sequence
  ENSG00000231437_27 (sequence is synthesized)
tctagccaaagtaatataggccagtcccatgaaaaacatctagggcaatttagcatgttctttctttctccatccactggctgaatggaaaaaatttcaagggcttagaaggggacagag

SEQ ID NO: 888907 - DNA, 120 bp, Artificial Sequence
  ENSG00000231437_28 (sequence is synthesized)
ccacaagaaggaaggaacttgggtccctgggtgactatgtgaagtagaggtccctcccaacttcctttgaactgtgaaatacgcaaaataaataaataaataaatttttattatgtgaaa

SEQ ID NO: 888908 - DNA, 120 bp, Artificial Sequence; identical to SEQ ID NO: 850213
  ENSG00000231439_0 (sequence is synthesized)

SEQ ID NO: 888909 - DNA, 120 bp, Artificial Sequence
  ENSG00000231439_1 (sequence is synthesized)
tgaggactgggagacgctgctgcatctccgggacaccacttggggccgaggccaaggacccacccaggaggggccatggcttcgagacacctgaggacacctggggccacgtccgcgatg

SEQ ID NO: 888910 - DNA, 120 bp, Artificial Sequence
  ENSG00000231439_2 (sequence is synthesized)
aggacatctctgggacacctggggctgcatctccgggacacctggggctgaccctggtacggggaaaggaggaggaacacagagacgccctcgtgaggtcggggaccagcaggcaccaca

SEQ ID NO: 888911 - DNA, 120 bp, Artificial Sequence; identical to SEQ ID NO: 850216
  ENSG00000231439_3 (sequence is synthesized)

SEQ ID NO: 888912 - DNA, 120 bp, Artificial Sequence; identical to SEQ ID NO: 850217
  ENSG00000231439_4 (sequence is synthesized)

SEQ ID NO: 888913 - DNA, 120 bp, Artificial Sequence
  ENSG00000231439_5 (sequence is synthesized)
acagagcgagaccttgtctcaaaaaacaaaaacaaatgaaaacaaaaacaaaccattttgtgtgtctaatggaagtgacctcgtcaacaacagtcttttgttgagaaagtctgtttaatt

SEQ ID NO: 888914 - DNA, 120 bp, Artificial Sequence; identical to SEQ ID NO: 850219
  ENSG00000231439_6 (sequence is synthesized)

SEQ ID NO: 888915 - DNA, 80 bp, Artificial Sequence
  ENSG00000279851_0 (sequence is synthesized)
agcgtgcgcctcggcctgctaggggtaccccaaggcagacagaaggcccatgagggaggcctgatgtctatgttggacct

SEQ ID NO: 888916 - DNA, 70 bp, Artificial Sequence
  ENSG00000279851_1 (sequence is synthesized)
acctggcctgatgcccatctgggtcctgggtgtccacctgcagcatggatgtccactggtactttatgtc

SEQ ID NO: 888917 - DNA, 86 bp, Artificial Sequence
  ENSG00000279851_2 (sequence is synthesized)
acctggtgttcacctggggtctgatgttcagctgaagacaggatgtccacctggagccgaggaatccacccagggactggtgttga

SEQ ID NO: 888918 - DNA, 67 bp, Artificial Sequence
  ENSG00000279851_3 (sequence is synthesized)
ttgtccacattaggcctgatgtccagctggggcctaggtacccactgggggcttcctgttaacctgg

SEQ ID NO: 888919 - DNA, 73 bp, Artificial Sequence
  ENSG00000279851_4 (sequence is synthesized)
tggtgtcattctggggcctaatgaccacctgggttgttggacctggcacccacataggattgggtatcaaact

SEQ ID NO: 888920 - DNA, 120 bp, Artificial Sequence
  ENSG00000279851_5 (sequence is synthesized)
ctaggggcctaggtatccacctggggcccaatgtccacctgagcctgggtgtcaacctggggcctgatgtaaacctctagttcactatccaccttgggcttaatgtcaacctggagcccg

SEQ ID NO: 888921 - DNA, 80 bp, Artificial Sequence
  ENSG00000279851_6 (sequence is synthesized)
tgtttatccacccatggcctgatgttcacctggggctgaatgtccaactgtgacctgttgtgcacctggaacctaggcat

SEQ ID NO: 888922 - DNA, 120 bp, Artificial Sequence
  ENSG00000279851_7 (sequence is synthesized)
cacctggaacctaggcatccacctgcagcctgatgttcagctgggctgggacctggagttcacctgaggcatgatgtccacctgaagcttgatgttcacctgggggctgggtgtccactt

SEQ ID NO: 888923 - DNA, 120 bp, Artificial Sequence
  ENSG00000279851_8 (sequence is synthesized)
ggggcccaatatccacctggagactaggtacccacctgggatctggtgttcactcaagattggtgttcagctgtggcctaatgaccacctgggtcacggtgtctaccttggactgggtgc

SEQ ID NO: 888924 - DNA, 120 bp, Artificial Sequence
  ENSG00000279851_9 (sequence is synthesized)
tcacctggagccagtgttcactgggggcctagtgtgcacctgagactgggggatgcacctggggcctggtgtctacctggtgcctaggtatccacttggggcctaatgttcatctggaat

SEQ ID NO: 888925 - DNA, 120 bp, Artificial Sequence
  ENSG00000279851_10 (sequence is synthesized)
ctgatatccacctggggccttgtaattacctgggttctgggcatccacctagggcttgagtatcctcctggggccttgagttttactagggactcgtgtctgccttggacctgggtgtat

SEQ ID NO: 888926 - DNA, 120 bp, Artificial Sequence
  ENSG00000279851_11 (sequence is synthesized)
atctgttacctaatgtacaccttgagagtgatgtcaacctggggacagatgtcctcttggggtctgagtgtacacctggtgtctgatgtctgcctggggacttgtgttcaccttagacct

SEQ ID NO: 888927 - DNA, 120 bp, Artificial Sequence
  ENSG00000279851_12 (sequence is synthesized)
gatattcacctggggactgggcgtccacgaggggctgatgttcagctggacactggatatccacctggggcttggggatccatccagaaactgatgtcaaactggggcctgatgtctacc

SEQ ID NO: 888928 - DNA, 120 bp, Artificial Sequence
  ENSG00000279851_13 (sequence is synthesized)
tgcggactaggtatccatgtgaggcttgatgttcatccacggccagacgtccatctgatgcttgatgtccaccttactcctgggtgtctactagagacctcatgtccaactagaatttag

SEQ ID NO: 888929 - DNA, 120 bp, Artificial Sequence
  ENSG00000279851_14 (sequence is synthesized)
gaacctactgggggcctcgtgtaaacctggggactggtatgaagctgggtcctaatgatcccctgggtcatattattcacctagggcctcatgtccacttggggcttcagtgtcaaactt

SEQ ID NO: 888930 - DNA, 120 bp, Artificial Sequence
  ENSG00000279855_0 (sequence is synthesized)
cgatggagtaggagacttggccattcagccctaggtccaggtcagaggcgctgacttgtgggatggaggctccgggaaggttgttttcggccacgtggaccacgtaggagacttggtgga

SEQ ID NO: 888931 - DNA, 120 bp, Artificial Sequence
  ENSG00000279855_1 (sequence is synthesized)
ttgtactccgggatccgctcccaatccagggtcccatctgttacaagcttatagtcattattggcggaagattcgattctaaaaggaactctttcgtttatgaggcatgtaacctcccca

SEQ ID NO: 888932 - DNA, 120 bp, Artificial Sequence
  ENSG00000279855_2 (sequence is synthesized)
ttttctctcgaatctttatcatgtgttttgaacagagtgatcaccgtccagggttctgcgtcctcagttacagaactggacactgaagtaaaaaccacgtctggggcattgtcattctca

SEQ ID NO: 888933 - DNA, 120 bp, Artificial Sequence
  ENSG00000255794_0 (sequence is synthesized)
tcaaaagattctcaggatgatggagtgagtgatggaataggttgccaactgtagttactccactcagcacagaatggctgcggggaaatataatcagacatgcccaaagaagtctgctta

SEQ ID NO: 888934 - DNA, 120 bp, Artificial Sequence
  ENSG00000255794_1 (sequence is synthesized)
gggtgaaacaaatacctttgaggtttaaatcaggaaggagagactgtttctacaggtgtcatacaaaaatcaatactgagccaaggattattggatcccatagaaccacggagacttggt

SEQ ID NO: 888935 - DNA, 120 bp, Artificial Sequence
  ENSG00000255794_2 (sequence is synthesized)
agtgaaattcttccaaaggcagatggtgttcctaggtttggaaatataaatcccatgggaagtcagctgaagaccattttatgcatcactcatcctgttagagccctgtgctgttctgtc

SEQ ID NO: 888936 - DNA, 120 bp, Artificial Sequence
  ENSG00000255794_3 (sequence is synthesized)
tctctataagactggctgaaaccaccacggttgtttacaatttatgctctaactttggatcacctagttaatactctaactccgattattaccaaagacaatgttctataaaagatattg

SEQ ID NO: 888937 - DNA, 120 bp, Artificial Sequence
  ENSG00000255794_4 (sequence is synthesized)
tctattagaaggatgcttctgcattattaataaaatcacagggaaaatgcaacattttggatgtcacatctgataagttggcagttaaagaacagaaacagcaataagactgcgtggcta

SEQ ID NO: 888938 - DNA, 120 bp, Artificial Sequence
  ENSG00000255794_5 (sequence is synthesized)
cattttcccagtgccaccaactgggatttaagctgactaacattttgaaagcccagcccatttcattcacagcaggatggcagtgggtgactgatcgtacccgccagctggctaatgtca

SEQ ID NO: 888939 - DNA, 120 bp, Artificial Sequence
  ENSG00000255794_6 (sequence is synthesized)
caaagtttaatcgaaaaatttgccagtgatatgatggccttgtcacagagatcacaagggacacggagttgacttttgctcaaggtggaacgacagagctgtgtaggcaagatgagaaat

SEQ ID NO: 888940 - DNA, 120 bp, Artificial Sequence
  ENSG00000255794_7 (sequence is synthesized)
tgcgaacttgttcggccaaaggaggctaataatgaaggggccgggaaggaggccagtgctaccagggttatctcacaacctcagatgctggataagtcgacggaggcagaatcgctttgg

SEQ ID NO: 888941 - DNA, 120 bp, Artificial Sequence
  ENSG00000255794_8 (sequence is synthesized)
gatgacattcagaaagcctggagtgattacttgcaagagaaaagcctacctattctttccaaggtgcaggaatattcccctgacctgctcatccagtggtccagtaatgaattactggag

SEQ ID NO: 888942 - DNA, 120 bp, Artificial Sequence
  ENSG00000255794_9 (sequence is synthesized)
acctgccttagacaaagaatgcactcggagccccaacacacctaaagccatgctttgaaggatctgccaagctcacttttaatcatgagaaagaaattacccacacggagtcagcagaaa

SEQ ID NO: 888943 - DNA, 120 bp, Artificial Sequence
  ENSG00000255794_10 (sequence is synthesized)
atgagaaagtagagctcgtgctgtgaataattccagcaagtgccaaggggctagttgaggaatggcttcatgagatgttagtctaaaacagcaccttggatctaagcagcacctttgaga

SEQ ID NO: 888944 - DNA, 120 bp, Artificial Sequence
  ENSG00000255794_11 (sequence is synthesized)
aagaaaagactgcttcaagaatgtctagttgcacctcctttccgtatgtggcctaaatgcctaggttggatcaatagtttaatttttttattgaactgtttaatattgactatggactta

SEQ ID NO: 888945 - DNA, 120 bp, Artificial Sequence
  ENSG00000255794_12 (sequence is synthesized)
cattcacttttactgttttctgtatatttacttttgcttgaagtgttttaatattgactatttacctctgctcatttttattgattttctgtattttttcaatgaaaattataataaaaa

SEQ ID NO: 888946 - DNA, 120 bp, Artificial Sequence
  ENSG00000255794_13 (sequence is synthesized)
gcattcaatccttctatgccttctttcgccacctgttgaggtctttcttctgaaacaaagaagaaatagacaaatcagacttgccctcttggaaatgtggtccagatttctctactccca

SEQ ID NO: 888947 - DNA, 120 bp, Artificial Sequence
  ENSG00000255794_14 (sequence is synthesized)
agctccaaaaaaggtatacattggatgggctagatcaactcctcctgagagccataaatccgccaagagttgttttccatgtaagggtgtggtacaatggggaacacctgatgttggagg

SEQ ID NO: 888948 - DNA, 120 bp, Artificial Sequence
  ENSG00000255794_15 (sequence is synthesized)
aaagcaggaggactttagagtggagttgcattctaatctctctgccgcttcaactatgtgacctggggcaaatgatataaactctatgagcctctttccttatctttaaaatgaagagaa

SEQ ID NO: 888949 - DNA, 120 bp, Artificial Sequence
  ENSG00000255794_16 (sequence is synthesized)
gtaatacctaccttgtagggctgttgtgaggattaaatgaagtaatgcatacagtgcctaacaaagtatttaacatcatattttttaaaagctcatgaaatattagtttttcttccttcc

SEQ ID NO: 888950 - DNA, 120 bp, Artificial Sequence
  ENSG00000255794_17 (sequence is synthesized)
gggcagcactagcactctggagaaggtctgccgctgtctgcactttcctggttctatgcaggcagatgagtgtcacagctgtaactgaggcacagagcagtacacacagtggagccgatt

SEQ ID NO: 888951 - DNA, 120 bp, Artificial Sequence
  ENSG00000255794_18 (sequence is synthesized)
ggcagatgtgctgcggctctgctacgggcggctctgtcgccttcagtcgcaggctggttctttgggggaaagttgtatccaatattggtgactcccgggaatagtctgtttgtgtgctac

SEQ ID NO: 888952 - DNA, 120 bp, Artificial Sequence
  ENSG00000255794_19 (sequence is synthesized)
ttaatggtctctaggcttccttgtcttgtagaaccttgttagaaaggagccttggtgattaagaggctatggagtacacagccttgcttagcagatgagcccttatccatttcccgtttc

SEQ ID NO: 888953 - DNA, 120 bp, Artificial Sequence
  ENSG00000255794_20 (sequence is synthesized)
cttaaaaacggctaattgatggatgctgcagaaaacatgcactctgctaataagatgctgatgacaaaataggtatcaggaaaggcatttactgcttatgagcaccatcagctttctttc

SEQ ID NO: 888954 - DNA, 120 bp, Artificial Sequence
  ENSG00000255794_21 (sequence is synthesized)
gagtgagattgtggctttgtagtaaagtttttttttaagtaatatgctaatagttttattctaaatcggccagcgctgaatatcttcaggaaaatgggttccatgagaagtgacatcctc

SEQ ID NO: 888955 - DNA, 120 bp, Artificial Sequence
  ENSG00000255794_22 (sequence is synthesized)
ggcagggataaagggaaactggaagctctcggaatctaaatgtgacagtcgatggctgaggagagggtcagaaggaatagaatctgtgacacgtatgagaaaggaacaaaatttatctgc

SEQ ID NO: 888956 - DNA, 120 bp, Artificial Sequence
  ENSG00000255794_23 (sequence is synthesized)
agaaagcctggagtgattacttgcaagagaaaagcctacctattctttccaaggtaaacagttcatttcatctgtcagtggcatgtttcagtatacaaatatgtttatataaagatatct

SEQ ID NO: 888957 - DNA, 120 bp, Artificial Sequence
  ENSG00000255794_24 (sequence is synthesized)
atgactatcatacatgtatttcctaactaaagagtgctcagagcatttgtcaggttgttgacagatttaatatcagtcttgcccatgttgttatttactatgactaattttacgtttgta

SEQ ID NO: 888958 - DNA, 120 bp, Artificial Sequence
  ENSG00000255794_25 (sequence is synthesized)
aatatgcaaaaatcaatttaggcggaaaggctctcctccgagccaatgactgctactagctgtatgcatttgtgtgtattgctgtgagtgcatgtccagtagtttatgtctctgtgtctg

SEQ ID NO: 888959 - DNA, 120 bp, Artificial Sequence
  ENSG00000255794_26 (sequence is synthesized)
tatgtgcccttgttctgtcttctctctgttgtgaacgcaggttgggagaattagccaaccattgggttctcagatgtggtcccaggctttcatttgatttttggaacgggaaaaaaagaa

SEQ ID NO: 888960 - DNA, 120 bp, Artificial Sequence
  ENSG00000255794_27 (sequence is synthesized)
aaagtagaaaggctgatgcttcttgcctgtttttccaactcttttaatgctataaaatgcaccccaaatttaacccattctctctcctaggatttgatatacccagtttactcccttgaa

SEQ ID NO: 888961 - DNA, 120 bp, Artificial Sequence
  ENSG00000255794_28 (sequence is synthesized)
ggtcctctatctcatcaaagctttagattttaaaagcatgattgtatatttttattttcaaaaagattttgattttggagatattttaaaattggaaattgaactcagataggctttacc

SEQ ID NO: 888962 - DNA, 120 bp, Artificial Sequence
  ENSG00000255794_29 (sequence is synthesized)
atttgtctgttttcttagaagaataaatgctatttgcaatataagagttagctgccagaaacctaagaaagttatgttcaaattatttttacaaatagatgttcacatcacctttaaaca

SEQ ID NO: 888963 - DNA, 120 bp, Artificial Sequence
  ENSG00000255794_30 (sequence is synthesized)
gtagtaatggctcagaaaaaatcaagcaaagttaacatctttaaaaaaatacaaaccacattgctttacaggatgaggttgtgcttaataacgtatgcttaattcattcagaaactacac

SEQ ID NO: 888964 - DNA, 120 bp, Artificial Sequence
  ENSG00000255794_31 (sequence is synthesized)
aaattcttccaaaggtgagtaggggcattgatttcctttcccatgcctgcagaaatatgacacaattaacagaggctaagtttagacaggaaataagtctgatttgaaactgtactgtaa

SEQ ID NO: 888965 - DNA, 120 bp, Artificial Sequence
  ENSG00000255794_32 (sequence is synthesized)
aagaattagtgatacttttttcaaacaaataaatgagaaaatgtaagtagaatttcaacatatacatttctcttatttattttcttagattcttttctttattctcttgggtacttttga

SEQ ID NO: 888966 - DNA, 120 bp, Artificial Sequence
  ENSG00000255794_33 (sequence is synthesized)
aaaataaaccaccaaaaatggactccttgactgacattttatctgtaattcagatcctgtgatttccacgtggaatacttgcattatacgatataaaagagtctctctcttaaacctata

SEQ ID NO: 888967 - DNA, 120 bp, Artificial Sequence
  ENSG00000255794_34 (sequence is synthesized)
accaagaatgcagcaacccgtcagtttccaagaaaaagcatattatctacataatcacaatcacacttacaaatatgagcccatcactaaccttccttatttaagctatgtatttttcca

SEQ ID NO: 888968 - DNA, 120 bp, Artificial Sequence
  ENSG00000255794_35 (sequence is synthesized)
gctaatttgtgctataatttttagacacaaacttgtttgtttacatattttacagttttttctagatttcttaaagctaaaaaactatacataacatactgattgtttgactgcattact

SEQ ID NO: 888969 - DNA, 120 bp, Artificial Sequence
  ENSG00000255794_36 (sequence is synthesized)
gagatgtgtagaaatgaactcttgtcagagtttcaaaggaattaacgttttttggtaaaatgtgctaatgtaaagagtgagaagattagtgatacataatgaaagcaatgcattctttca

SEQ ID NO: 888970 - DNA, 120 bp, Artificial Sequence
  ENSG00000255794_37 (sequence is synthesized)
catggaaatgggaatataataaatgtcctgcaggtgattggggctgtagcaattttattgaagattaaagtttgattgacctttgttagggtgattaacccttctgaaattaaaagccag

SEQ ID NO: 888971 - DNA, 120 bp, Artificial Sequence
  ENSG00000255794_38 (sequence is synthesized)
agctgaattattctgctcaatttaaatgcaaacatcgagcaggtcgtatgtcattcaaataataataagaagaaaatcttcctattttaattttcatttttgcacttctgagtggtatgc

SEQ ID NO: 888972 - DNA, 120 bp, Artificial Sequence
  ENSG00000255794_39 (sequence is synthesized)
tgctttagaaggaccatagctctcgcaaaagcattctggtggcagagaatatacaataacgttacagataattgggagcatataggaagagtcccaagcactactgcctgcattcgaaac

SEQ ID NO: 888973 - DNA, 120 bp, Artificial Sequence
  ENSG00000255794_40 (sequence is synthesized)
atcaaaaccaccatcccaacaaaagcacggagcatgaagccaatctctgtacactgaaaatgcatgctcccaatagaaaaacaacctagggatgtcctgaaggggttaggaataaataac

SEQ ID NO: 888974 - DNA, 120 bp, Artificial Sequence
  ENSG00000255794_41 (sequence is synthesized)
aatgacatctctattctagttcagtgccaaccaccgaaattgcatatcatatccatgttaaatctacatgatgtctcctggaaatgcgtgctttttggtacagttgcttatgaagcagtt

SEQ ID NO: 888975 - DNA, 120 bp, Artificial Sequence
  ENSG00000255794_42 (sequence is synthesized)
tctaaaagttgattatttctgatgtctggaatttcattctccatgatctctggcagtttctgaatatattcagtattttcattaagttcaaaaatgctgtaggagaagctaacgaattat

SEQ ID NO: 888976 - DNA, 120 bp, Artificial Sequence
  ENSG00000255794_43 (sequence is synthesized)
ttgcaatgccatttaatggtttagttttatttttctctgttaaattttctaagccttggtgaaaagttgtgtattcacatttcttcaaaaaactgtttccatttttcatatcatgttaat

SEQ ID NO: 888977 - DNA, 120 bp, Artificial Sequence
  ENSG00000255794_44 (sequence is synthesized)
tttgtttagttctaagtcagtgaatatttttagtcttaggtcccaccacatagtgaatgtgtctgccttttatgtatctgtgaactattaaaatgataataaaggttctcttccttccat

SEQ ID NO: 888978 - DNA, 120 bp, Artificial Sequence
  ENSG00000255794_45 (sequence is synthesized)
caagaaattgagaatgggtttcacagtgttctgttaatttgattactgtgtcctaagtggtaagtataaacctccttatgtattttgtgaagctcacttaatcaagcaaatattataaaa

SEQ ID NO: 888979 - DNA, 120 bp, Artificial Sequence
  ENSG00000255794_46 (sequence is synthesized)
ttgtctgcaagtgataaatggtgccgagcaattcatcagttcttacaagtaaacactgctgtcccactaaaaatatgttttgttctgagttaatggtatggaacaaggcagcctccacaa

SEQ ID NO: 888980 - DNA, 120 bp, Artificial Sequence
  ENSG00000255794_47 (sequence is synthesized)
acagctatcttttattgtggaggggccactgaaacttggagcaaagtggaggagattggcattcattttcttgtacattagcatttcatttgtgattcggatgatgcagctctaggtgga

SEQ ID NO: 888981 - DNA, 120 bp, Artificial Sequence
  ENSG00000255794_48 (sequence is synthesized)
ttgactatgaaaggcgctgaatatcttcaggaaaatgggttccatgagaagtgacatcctcctcgaatcaaaagacttgaggttaacatgggcataatgttctggatgaagctttggaag

SEQ ID NO: 888982 - DNA, 120 bp, Artificial Sequence
  ENSG00000255794_49 (sequence is synthesized)
cccttaaaattcaggcagaattttatcttcatcagccacaagaactacagagctgtaaaaagatcaaacactagctgaattgctggggttgcaaagaggaataaaaccgtcacctgcttg

SEQ ID NO: 888983 - DNA, 120 bp, Artificial Sequence
  ENSG00000255794_50 (sequence is synthesized)
gaggacgtcaaaatctacaaagaagaggagaaatgtgagttactgttcataaagcatactctggggtttgagaaaaagttgcttgcaaaaactaagtaaacagacagctttggaatgttg

SEQ ID NO: 888984 - DNA, 120 bp, Artificial Sequence
  ENSG00000255794_51 (sequence is synthesized)
attaaggacggggaaactaaaccaggatttgttgttggataatcaaattttatattcacaactgatggaggagcagaaatgatgtcaaaggaaatggatttgtctggaaggaaggactaa

SEQ ID NO: 888985 - DNA, 120 bp, Artificial Sequence
  ENSG00000255794_52 (sequence is synthesized)
gaacgactatgctctggagagtcctgtaatttgcagaaaatggaccaagataacatttgagttccatgctaccaaaatcctcttgagaaggacagctagctacccagaatatttaacatt

SEQ ID NO: 888986 - DNA, 120 bp, Artificial Sequence
  ENSG00000255794_53 (sequence is synthesized)
gtgacattgaaatgttggatgaacgattaaaatgaagaatctagtcataggttgtaagaaatcgctaaattattatgtttaatccaaagaagagaaaggaaaagctgttttcattccccc

SEQ ID NO: 888987 - DNA, 120 bp, Artificial Sequence
  ENSG00000255794_54 (sequence is synthesized)
attttatcatgtctcgtaagatgtgatttcatacgattttacttatgactatcctagccccaggaaagttttcatttatccatttgatgtagaaatctatcatataaagcttcatataca

SEQ ID NO: 888988 - DNA, 120 bp, Artificial Sequence
  ENSG00000255794_55 (sequence is synthesized)
attatttaaactgtgacctaaaagccgggctactgaatatcttttgtttatgtgtaagtcacattatttttactgtttttttcatcctttgcagcttagaaaaatataactcagtacacc

SEQ ID NO: 888989 - DNA, 120 bp, Artificial Sequence
  ENSG00000255794_56 (sequence is synthesized)
atacagcatatttaaattaaaatataaattatgtacatcattattcttatggggggggagccgctgggaaaggcatgctattctataaccctggacaaaatttgacttttgatgtgtgaa

SEQ ID NO: 888990 - DNA, 120 bp, Artificial Sequence
  ENSG00000255794_57 (sequence is synthesized)
ttcttaaatgtgcacaaaccaaagacaatggcatatatactttgacacattctgaagttaaaagaggacatgaggattgtgagataagtggcgattgtgtctactattgtaataatataa

SEQ ID NO: 888991 - DNA, 120 bp, Artificial Sequence
  ENSG00000255794_58 (sequence is synthesized)
aataaacagttataggcaatgccttgtttctcaccacgttctctaaaccttttcagtttgtcttttagcattgttgaactgaaaaggtcattgagactttacttcatgtctaaatggttc

SEQ ID NO: 888992 - DNA, 120 bp, Artificial Sequence
  ENSG00000255794_59 (sequence is synthesized)
taaaaattccccagggttccaagacttgctgtggactagaactgcaatcagtagaggtatagaaactgtcagttgctggaacaggatccgtttggaataaggcagataaatgcactaaga

SEQ ID NO: 888993 - DNA, 120 bp, Artificial Sequence
  ENSG00000255794_60 (sequence is synthesized)
gactgctgagaactgattgggcatcaagacactgaactgtagaaaataatggagcctgactgtgagaactgtctgtattcaaacatgttaagagctgaatatttaaaatttgtttggctc

SEQ ID NO: 888994 - DNA, 120 bp, Artificial Sequence
  ENSG00000255794_61 (sequence is synthesized)
accaagcttggctttctgaagacaacagaagtgggatagagagatcaaaaagaaaaaaaaaatcataaaagtattgctaaacaatcaaatgcaaggtattttgtcttctttcactcctta

SEQ ID NO: 888995 - DNA, 120 bp, Artificial Sequence
  ENSG00000255794_62 (sequence is synthesized)
aaagaaaatcaatcaattaatacacaaagataaaagtgagaaacctactgtaatctactaaggtccaggaatttaaagaatcaaatgtaccttctgggtttcggaatccatcggggagaa

SEQ ID NO: 888996 - DNA, 120 bp, Artificial Sequence
  ENSG00000255794_63 (sequence is synthesized)
tgtagagggtgatgagaagactttgcatttgaccaaaaagcactagtaaataaggagttaaaatgaaggcaggctcgctggtttgctgagatctgtcagagtctgactggctggctacat

SEQ ID NO: 888997 - DNA, 120 bp, Artificial Sequence
  ENSG00000255794_64 (sequence is synthesized)
tccgcgatggcgagagggggcaccggaggtgacaacaataacaagactgtccttcggacaagttttagcgctgaatatcttcaggaaaatgggttccatgagaagtgacatcctcctcga

SEQ ID NO: 888998 - DNA, 120 bp, Artificial Sequence
  ENSG00000255794_65 (sequence is synthesized)
gggtgaaaacaccttgctctgtagtttcaggaatccctaaatcatctcatcctcatttttatatcttaggttgcatctaaatacatttatcagtttatctttgcagcactttaagctaaa

SEQ ID NO: 888999 - DNA, 120 bp, Artificial Sequence
  ENSG00000255794_66 (sequence is synthesized)
cagagattttgggccctccatggcaggagtgttctcatgtaaaaataaaatgtattttaggatatgtgtcatgaattattaatatagtgcaccacaactgcagttttcacagagagagat

SEQ ID NO: 889000 - DNA, 120 bp, Artificial Sequence
  ENSG00000255794_67 (sequence is synthesized)
aaaacattttgtgttgtgttcggcagccaaatatacacaattcttaggtaaaattaacttcagaatcaccttttaacttttccctaaatttccccatcccagaaagacctactaatttat

SEQ ID NO: 889001 - DNA, 120 bp, Artificial Sequence
  ENSG00000255794_68 (sequence is synthesized)
tgataaatataactttattactttatgatatagaattctctttcaaattctgctgcgcaaactttattttgttgatactcagacattttcgtggtaattctttggtaaaaattgcatcaa

SEQ ID NO: 889002 - DNA, 120 bp, Artificial Sequence
  ENSG00000255794_69 (sequence is synthesized)
gataacggcttaccatgtagatcaagccctttgctcctccattggatgctacgctctgaaaaatattgttacatcattttgtaggaatgcttctacgcattacctaatatatattgagat

SEQ ID NO: 889003 - DNA, 120 bp, Artificial Sequence
  ENSG00000255794_70 (sequence is synthesized)
ttcagtaaattcatgatgcaagtgttgtgtatatcaatcgatcaatagatacacactaatatatgatttcagtagacagactttttgaaggaaaaatttgtattaaaatgtaattgtatc

SEQ ID NO: 889004 - DNA, 120 bp, Artificial Sequence
  ENSG00000255794_71 (sequence is synthesized)
ttcccccagcttaaatttgtatgttatttttagctgacatgcctaaattagttttctaatgttattatataaaaatatgatttgaacttttagcaaagataagtttcaggaattggaatt

SEQ ID NO: 889005 - DNA, 120 bp, Artificial Sequence
  ENSG00000255794_72 (sequence is synthesized)
tttagagtattcgtcttcatgaaaaagggatagatggagataatttcacaatgtcagaatactgattccacaggttgacttgggctacctcgttgtaaagctggctctgctgggtaacag

SEQ ID NO: 889006 - DNA, 120 bp, Artificial Sequence
  ENSG00000255794_73 (sequence is synthesized)
ttgactcataggcatcaccaacatagcacagaggtagagaagaaaatattaatacaagggcatctgaaaaaggagctgtgatcaattttctaaaactttccttaaatttctaatatcctg

SEQ ID NO: 889007 - DNA, 120 bp, Artificial Sequence
  ENSG00000255794_74 (sequence is synthesized)
cttggttccaaatcaatcttgtcactcctcggaaagcaatgcaagataataagtagtattcacctgattgctttcctgctccgagacagctggtgacgcatgtcttcctgataaccagga

SEQ ID NO: 889008 - DNA, 120 bp, Artificial Sequence
  ENSG00000255794_75 (sequence is synthesized)
gtcctgtcacttttaaccaagatgtcacatatattgtgggaaacacgctgctctgcattttcttttctaggattttactaggaaaagcaaatgtaaaataaagtttttttgtttatttgt

SEQ ID NO: 889009 - DNA, 120 bp, Artificial Sequence
  ENSG00000255794_76 (sequence is synthesized)
ttgcattcattttctataaagtacacggagatgttaagtgatttacctggtattacttcagtgaaaacaggaaagatgaaggtaggagaatatacttggaatccttttccggactgtttg

SEQ ID NO: 889010 - DNA, 120 bp, Artificial Sequence
  ENSG00000255790_0 (sequence is synthesized)
attaaaaccggaaagcatggacacccagacagcttactgtcaatgactgtactattcactgtcttcaacaaaagtcagctattccaggaaactctcgtccagaaagataaaaattgagaa

SEQ ID NO: 889011 - DNA, 120 bp, Artificial Sequence
  ENSG00000255790_1 (sequence is synthesized)
tgagacatcaatcaatatgcggaagatttacatggttcggtctggaagggtgggacaattcgaagggtgaggagagaagaggagcttccgggtcatagaatcaaccactgacctaccaga

SEQ ID NO: 889012 - DNA, 120 bp, Artificial Sequence
  ENSG00000255790_2 (sequence is synthesized)
tcacagcatgtgtcaggttccataaagaacaatttggaattgcatggcatttctatgatacagactcaaaagtcacaaagtatcacttctgatataatctactggtcatggcagtaatga

SEQ ID NO: 889013 - DNA, 120 bp, Artificial Sequence
  ENSG00000255790_3 (sequence is synthesized)
agttctacccaagctccaaggaggatgtttaactgaaagctgaagaatacactctgacattgtgataacagtggtgtgatgaggctacagacacttgaccttaggctgatgaccaatgcc

SEQ ID NO: 889014 - DNA, 120 bp, Artificial Sequence
  ENSG00000255790_4 (sequence is synthesized)
gtcagttcttgcacttttccacggtggaaaatattcttatattgctgccagtgcagaatcaaccactgacctaccagaatccaccatggacctggagtcacccacagatgtgtacctgga

SEQ ID NO: 889015 - DNA, 120 bp, Artificial Sequence
  ENSG00000255790_5 (sequence is synthesized)
gaacacccaggctttccaaaatgaagcaaattctccattagctgtgatgatcactgctatccactactttctaagaagattctatgcttttgagcatgcctaccactacactataggaga

SEQ ID NO: 889016 - DNA, 120 bp, Artificial Sequence
  ENSG00000255790_6 (sequence is synthesized)
tgcccagctgaggcattgatcctggctgggtagggggaattgttcagggatggggaaggggcacttcttagctgtgtctcatcgagtacgggctcaataaataattgaattttgagagtg

SEQ ID NO: 889017 - DNA, 120 bp, Artificial Sequence
  ENSG00000255790_7 (sequence is synthesized)
ctttccacccttctggaagagtaggaacagattcttatgtgtacaacacaggatcctctcatccaactgatcaagtggcctgtctttaggatgtccagtcacatccccacacacaatacc

SEQ ID NO: 889018 - DNA, 120 bp, Artificial Sequence
  ENSG00000255790_8 (sequence is synthesized)
tctaacaaggtcatctgaagttatcactatccttgagaaaaaactgaatgacagtacaagacttattcgaggcctgaaatggatcttgggaagggcctgtgcacatgaaggaccccaaag

SEQ ID NO: 889019 - DNA, 120 bp, Artificial Sequence
  ENSG00000246250_0 (sequence is synthesized)
aatgtttataattccagggaagtgaaaagagcaactttcctctataatgtaattatgtactttctacatctatggtaacaataccttagtttgattataggtatttgtttagcgatagtc

SEQ ID NO: 889020 - DNA, 120 bp, Artificial Sequence
  ENSG00000246250_1 (sequence is synthesized)
agttggccctaggctatagttctagagggtttggaaaatctcccacatcagaggtggaagcagtggaaggaaaacaacaacaaaggatcatgataaaggactctgctgttactcaatgga

SEQ ID NO: 889021 - DNA, 120 bp, Artificial Sequence
  ENSG00000246250_2 (sequence is synthesized)
gaactccaagaccctagaaaatgatgacgcccctagatggaaggagcctcagatcctgaatgacgggtagagaggggagggaaaagtaaacctttatgtgttaagccactgagatttggg

SEQ ID NO: 889022 - DNA, 120 bp, Artificial Sequence
  ENSG00000246250_3 (sequence is synthesized)
agtggcatgtttcagcaggtagcttaccttgactgacacatctagtaactaagttctttaattcaagtagacatagacgttccttttcctaaccaaaagtattgattcataacatccaca

SEQ ID NO: 889023 - DNA, 120 bp, Artificial Sequence
  ENSG00000246250_4 (sequence is synthesized)
tatatttctcactagctcttaagacgtatcaaaatggtaatgtggtgtcaggttcagtcatagcttctgaaaacttcccaccatttctcaacctcagtttaaaatcaacttgatctttcc

SEQ ID NO: 889024 - DNA, 120 bp, Artificial Sequence
  ENSG00000246250_5 (sequence is synthesized)
tttctcaatcaaaatgaagacattcggcatgtactagcagaaccaattcaaactggaacaaagatggggcgagtggacattgccttttcctccaagggttggtttgacatcttataatca

SEQ ID NO: 889025 - DNA, 120 bp, Artificial Sequence
  ENSG00000246250_6 (sequence is synthesized)
ctttatataacagccattctcccagtaaaaagtgaaaaaccagaggaagaggtcttgcttcatccaactccactgattttggctttgagagaatacagctttaagaaggtattcccggga

SEQ ID NO: 889026 - DNA, 120 bp, Artificial Sequence
  ENSG00000246250_7 (sequence is synthesized)
atatcccaggaactctatccgccccctcagaatagtaggcaattgagttagtgatggtgactcaggcaggctttttcatcctgatctaaaggaaccactacaaccctagagagagaaata

SEQ ID NO: 889027 - DNA, 120 bp, Artificial Sequence
  ENSG00000246250_8 (sequence is synthesized)
aaaagggaatcgagtggaaaaggcctccaccaccgatgactcatgctctactgtgactcgcctggtacatcactctgtggctaagacatggaggcttggttcattagtcacttcagtgat

SEQ ID NO: 889028 - DNA, 120 bp, Artificial Sequence
  ENSG00000246250_9 (sequence is synthesized)
tttttcaaagcaaggattctccctctaaataatcatgagctctgcttccacagtgtttgtatgtgagcttgtgactcacctttccaccatgccaggcagtaccaattgtgtcatctgcaa

SEQ ID NO: 889029 - DNA, 120 bp, Artificial Sequence
  ENSG00000246250_10 (sequence is synthesized)
gagagaaagcaaaacattcatgatggccaaggatgcaggcaacagaaaaagagtgaagaaaactcacccacactaaaaagaagggaatcatgaaaccattcaccacttctacagacagca

SEQ ID NO: 889030 - DNA, 120 bp, Artificial Sequence
  ENSG00000246250_11 (sequence is synthesized)
ggttattttctgtacactgtagaatgtgactgtgtcaagagggcataaaaaggaaccagctgaaattactggagagaacacagggaatactttaatgaacctggctaaaattagtcttgc

SEQ ID NO: 889031 - DNA, 120 bp, Artificial Sequence
  ENSG00000246250_12 (sequence is synthesized)
ctgaaatgtaatactggcacagagttcttcaaacaatgaaggatttacagtgaaaatctacatttcccaaaatgcattctcagaaaagaatatatgttatcagaagaaatatcctgccta

SEQ ID NO: 889032 - DNA, 120 bp, Artificial Sequence
  ENSG00000246250_13 (sequence is synthesized)
ccaagatgacttaagctttctaacctcaagagctcacataaacttttccagccaaaaaaagtctttaaaagaatacgataaagtggtaggttggcaaagagtaagtgtaacttcacattc

SEQ ID NO: 889033 - DNA, 120 bp, Artificial Sequence
  ENSG00000246250_14 (sequence is synthesized)
atttctcttgttggtctagttagctgtaagtaaaactcatccttaaagagagttaagatgtgatctctagtaaccaacatgaaaaggtgacatctgcattttttaaggactccataattg

SEQ ID NO: 889034 - DNA, 120 bp, Artificial Sequence
  ENSG00000246250_15 (sequence is synthesized)
ttgactaaatacatataatgagaggggctatttttaaactctgttttgatatattattaaccaagaaaagttcagaagtccaatggtttagtcaaaatcacctcacagttaaataccgag

SEQ ID NO: 889035 - DNA, 120 bp, Artificial Sequence
  ENSG00000246250_16 (sequence is synthesized)
gctgtaacgtgaatttctgactcctggatatcatcaattctctaagaaacagatgctgttttgtaataataaggtttcaatgcatgctaagcatagaaattttgttgtttctatcttgaa

SEQ ID NO: 889036 - DNA, 120 bp, Artificial Sequence
  ENSG00000246250_17 (sequence is synthesized)
taatacttcatattaattaaagtagacagcattctgatgagaagggaattttgttttcctagaaatattctgaagaaataaaatgccagccagatttaacaaggtaaattctgctatgtg

SEQ ID NO: 889037 - DNA, 120 bp, Artificial Sequence
  ENSG00000246250_18 (sequence is synthesized)
aacatccaatccagatgtattatgaacagctttgtatggtagtacagatgtacatcaggcatattaacagtggtgggtattttattgtaaaggatagattatacaaaaccctaacagtat

SEQ ID NO: 889038 - DNA, 120 bp, Artificial Sequence
  ENSG00000246250_19 (sequence is synthesized)
ttgaaaacttttttttttttatttagcacatttcatcagggaccataatgcttagctaaagtattataaagagttcccccagcattttgtgaagggaagctataattcagttctccaaag

SEQ ID NO: 889039 - DNA, 120 bp, Artificial Sequence
  ENSG00000246250_20 (sequence is synthesized)
ttgtattaaggaaatgagatctgttaactataaagcagctaagtggagtccagaaggggtagccactgcctgtttggctctcttaaacagtccctcttctatttccagttggaatattgg

SEQ ID NO: 889040 - DNA, 120 bp, Artificial Sequence
  ENSG00000246250_21 (sequence is synthesized)
gggcagggagatgggggaatatcaggagctattttttcccttataccatatgcatgtcatgtatatattaaatgtctgctttctgaatggcaaaaattatctagaaaatcatgagacaaa

SEQ ID NO: 889041 - DNA, 120 bp, Artificial Sequence
  ENSG00000246250_22 (sequence is synthesized)
acaaaaccccataacataaaaccatacttacaaaattatatcatggcatgctaaacattaaatgtttccttcatcaagaggccttttatgtagggacatgttcaaaatatattctttata

SEQ ID NO: 889042 - DNA, 120 bp, Artificial Sequence
  ENSG00000246250_23 (sequence is synthesized)
tatatgaattaaaactcaagaagttttaataacttgacataaacactgatttcaatgcctggctattaaaggccagaaatatttgctgaatgctcaacgactagaggattcatcagcaaa

SEQ ID NO: 889043 - DNA, 120 bp, Artificial Sequence
  ENSG00000246250_24 (sequence is synthesized)
gacacaagttctcccctgcaaaagttaatttctttctcatagctcatgagctcctccttttacattctgactctaaattctctgtccttgtcataaaatgtaacatctttttttaatctg

SEQ ID NO: 889044 - DNA, 120 bp, Artificial Sequence
  ENSG00000246250_25 (sequence is synthesized)
tcaaataataacaatgaaaagcctgagaaaacttaacctgaaatctgcatgcttttatcaaattgattaatgccttcatctataatgaaattatctttccttctaatcagattataagtc

SEQ ID NO: 889045 - DNA, 120 bp, Artificial Sequence
  ENSG00000246250_26 (sequence is synthesized)
acaataaattgaatttcaagccttctttatatgagtatgtatatacaaatcgttaatattctacgcattagttaagaggcttcgttatattcagatcaaattaaattttctttaacacca

SEQ ID NO: 889046 - DNA, 120 bp, Artificial Sequence
  ENSG00000246250_27 (sequence is synthesized)
aatttttataggatttttagctaagttattagtagagttatctgtaagcatcagctggtatcttgatatttggttatttatatgaatataccaggcatttctgtgaattgtcactatcta

SEQ ID NO: 889047 - DNA, 120 bp, Artificial Sequence
  ENSG00000246250_28 (sequence is synthesized)
tctgaactccatttcacagctcacaggctgtttctggagttaactcaatgctaatattaggccatctgcaggtgataattgctgcaccagaaaaatttttgttcctcttaacacacttct

SEQ ID NO: 889048 - DNA, 120 bp, Artificial Sequence
  ENSG00000246250_29 (sequence is synthesized)
aaaaaaaggttaccataacttgcaagttcagtggttaagaatattagacaagtagtagtaaacatgatttccagacccattttcttccccattgggactgtttccaaaagtgtatagcga

SEQ ID NO: 889049 - DNA, 69 bp, Artificial Sequence
  ENSG00000246250_30 (sequence is synthesized)
tttcttccccattgggactgtttccaaaagtgtatagcgaacaattttaattctttcctaagaagtaga

SEQ ID NO: 889050 - DNA, 120 bp, Artificial Sequence
  ENSG00000246250_31 (sequence is synthesized)
gtgcttctacaacagtgagagtgtgaaatccttgtccttgcagggaaagtgtttcctctttatatacatatatattttcagtgacagtatcattaatcctcaccacaagaaaatcctaga

SEQ ID NO: 889051 - DNA, 120 bp, Artificial Sequence
  ENSG00000246250_32 (sequence is synthesized)
tgcctagaatctaaaggggatagtttaatatatatgttatatcacacttaaggtattgttatcactttatatgcaagctagccaaaaagtatacaaatatatgaggaaaaatgaatgtct

SEQ ID NO: 889052 - DNA, 120 bp, Artificial Sequence
  ENSG00000246250_33 (sequence is synthesized)
tgatgacagctaaatttagaatttgattcaatgtcaagagtaaaatatttactagtatttactggtatagcaatgtatattctggctgggaaataaataagaggcttatttcgcttatac

SEQ ID NO: 889053 - DNA, 120 bp, Artificial Sequence
  ENSG00000246250_34 (sequence is synthesized)
aaaatcaaaatcagtactattagattaagattatttagatgattagattattcagcaaaaatgcattggctggcctagaaaatccttgaaaatgttatattaaaatgtaaccatctgcag

SEQ ID NO: 889054 - DNA, 120 bp, Artificial Sequence
  ENSG00000246250_35 (sequence is synthesized)
ttacgactaaaagtgacttaatttcttcttagtgtttgtatatatttctcatacttttggcaacaatcttgcattgtttttacaattagaaaagcctccacaatcttatttctaaaagaa

SEQ ID NO: 889055 - DNA, 120 bp, Artificial Sequence
  ENSG00000246250_36 (sequence is synthesized)
gggtagtcccacatcccccgcgcctggagggcctaatcaccgaaggtgctgatgaggggatatgtgttgcagcggacagggattgagagtgcaggggagcggtgtgaaggggtcggggtt

SEQ ID NO: 889056 - DNA, 120 bp, Artificial Sequence
  ENSG00000246250_37 (sequence is synthesized)
tggcaaaggtggaagtgaaggcgtgtctcctacgccaggtgtgatcatggaagatgccaccattgagttgggtcccctggttttactggagatgatgaggccaagtggcagcacttaatt

SEQ ID NO: 889057 - DNA, 120 bp, Artificial Sequence
  ENSG00000246250_38 (sequence is synthesized)
aggtgtgatcatggaagatgccaccattgagttgggtcccctggttttactggagatgatgaggccaagtggcagcacttaattattaaagcaacactgagcagtgctggtttgaaggtc

SEQ ID NO: 889058 - DNA, 120 bp, Artificial Sequence
  ENSG00000246250_39 (sequence is synthesized)
aaagaaaactacaaaagcagcaacaacaaaacagcagaatgatgaataacttggattaagaatgaagatttgtgttgtaccgtcaggtaaagaagtcagtgaactgaggttctggctaag

SEQ ID NO: 889059 - DNA, 120 bp, Artificial Sequence
  ENSG00000246250_40 (sequence is synthesized)
ggcaagggaaatatggaagaagccacctgtgatgttataaccaataacagaaacaaagactgtatgagctttgtatgttttctctttgctagctatatgtatgtgttttgtacatgaaaa

SEQ ID NO: 889060 - DNA, 120 bp, Artificial Sequence
  ENSG00000255240_0 (sequence is synthesized)
ctgggatcctcagagatggagatctggatgtgaagagaaagagaaaaacaaaagtcaacagacagtactgtgaccaagtcagtgatggtgagatcagcagcatctctaggacccttctga

SEQ ID NO: 889061 - DNA, 120 bp, Artificial Sequence
  ENSG00000255240_1 (sequence is synthesized)
ttgacatgaagtcaccatcaagtaggcagaactcacaggacttatggagcaaggatgactgacacaaacacaaaaatcattctgcctgttgaatgaatcataaaatactgtctttgatcc

SEQ ID NO: 889062 - DNA, 120 bp, Artificial Sequence
  ENSG00000255240_2 (sequence is synthesized)
aggaggcttgtgtcatctgccagcatttatgaaactgtgctccaagtaggctcctgtatcagcagtgcttgcccctgatagatgatgatcatggggggaccaggagcctctagacttaga

SEQ ID NO: 889063 - DNA, 120 bp, Artificial Sequence
  ENSG00000255240_3 (sequence is synthesized)
tcagtttgacaaacagatgaacagaagttctcaaatacacagtaagcagataaccccaacatcaccagaaatatcaacttgtgatggcattttgtcaagttgtctttgttatcggcatca

SEQ ID NO: 889064 - DNA, 120 bp, Artificial Sequence
  ENSG00000255240_4 (sequence is synthesized)
tctgttgctttctgagggaagtattttgagttctcctactgagactgtggatttgcctatttctttttgtatgtcagcttttgccatatgtattttgtagttgtgttgtgaggaagattc

SEQ ID NO: 889065 - DNA, 120 bp, Artificial Sequence
  ENSG00000255240_5 (sequence is synthesized)
atgacttatcttgtgggagaattctgtatttagcagattttcgtcttaagttctgttttgcttagtattgatgttattactttgctttttcagtttcaaaatcatttagtatatcttttt

SEQ ID NO: 889066 - DNA, 120 bp, Artificial Sequence
  ENSG00000255240_6 (sequence is synthesized)
cctttcttttagcctttgtgtttttatttcagatgtgctttcttatgtactgactgtgatccccaaattcatatgttgaagtcccaactccaaatgtatttggaggtgggcctttcagac

SEQ ID NO: 889067 - DNA, 120 bp, Artificial Sequence
  ENSG00000255240_7 (sequence is synthesized)
gggaaggggaaggtgcctttccgcatttggtgtagtcccgcattctgccatatgatggcgccagagaacgcgcctaccgggatagggaggggcaaggaggcgaggaaggaaaaaaaagag

SEQ ID NO: 889068 - DNA, 120 bp, Artificial Sequence
  ENSG00000255240_8 (sequence is synthesized)
acaagtgaagattgacatccattaaggccaatggtagctcaatcttctgttctctgactcccaagcttcccattctcttaggaggctgcatttgtggcgctaaaaaaagggatgggcgtg

SEQ ID NO: 889069 - DNA, 120 bp, Artificial Sequence
  ENSG00000255240_9 (sequence is synthesized)
ggagattccaggacttgtgctcgctgaagatacaactgttagtccaagctcctgtatcagcagtgcttgcacctcataggtgatgatcatgagggggacaaggagcctctagacttaaga

SEQ ID NO: 889070 - DNA, 120 bp, Artificial Sequence
  ENSG00000255240_10 (sequence is synthesized)
gacaagttgccagcattctccagatggagtgtttccctccgcagcaccccctgctggtcagtttgacaagcaggtgaacagaagttctcaaatacacaatagtagattctatcaatcaag

SEQ ID NO: 889071 - DNA, 120 bp, Artificial Sequence
  ENSG00000255240_11 (sequence is synthesized)
catgaagtcaccatcaagtaggcagaactcacagcaggagacctgtctctgatgctgctgagccactttgacaatcgttatatagaaatctgattggatgccgtgaaactggacatcagc

SEQ ID NO: 889072 - DNA, 120 bp, Artificial Sequence
  ENSG00000255240_12 (sequence is synthesized)
aaaatgtcagaatgggactttctagcatttatcctcacacagaaacatcaatttaaacaactatctatgcatgaaaataccttcagaagagctaagaaaaccaggtgaaaggttacagaa

SEQ ID NO: 889073 - DNA, 120 bp, Artificial Sequence
  ENSG00000255240_13 (sequence is synthesized)
atgttgtgtagcagagaaataagaaaagattaattgaagagcataggaagaacaatttttcatttcctgtgtcacccctcccacaacaccaggcagcagggcacagagagaggcaatctc

SEQ ID NO: 889074 - DNA, 120 bp, Artificial Sequence
  ENSG00000255240_14 (sequence is synthesized)
tgtgtcgaagaagaaaagtgaagtgagcactgaactttgccttggactccaacgcagagcctgcttcagtaaaatccagtaatgggtatgcgactattgcccgaaactccaggctagtac

SEQ ID NO: 889075 - DNA, 120 bp, Artificial Sequence
  ENSG00000255240_15 (sequence is synthesized)
ctgcacactaagccagaccagatcacacagcccaggctccaggcttgcctggtggacttggtttctgggtatatcctcatgccaggtctaccccagtgccttggatgtcagacagtcttt

SEQ ID NO: 889076 - DNA, 120 bp, Artificial Sequence
  ENSG00000255240_16 (sequence is synthesized)
aggccggcctcgacaactccaggtttcaagccagccccaggaccaggctagctcctgcaactctagtcaccatgccagtgtccatatatccaacccctaatctggcccctgtggatacag

SEQ ID NO: 889077 - DNA, 120 bp, Artificial Sequence
  ENSG00000255240_17 (sequence is synthesized)
gctcgaggactgcctagcacaaggctagcccctgtggtcgcagactccaagtccaccctaggttccagaccggcccagaactagattggctcacaccaatccaggattcaggcccacccc

SEQ ID NO: 889078 - DNA, 120 bp, Artificial Sequence
  ENSG00000255240_18 (sequence is synthesized)
atttccaggttggcagccctagccctaggccttagtcaggtatctggcaagcatctgcagacccaggctccaggcctcccgaggcctaagccagtttctgccaccccactctccaggcca

SEQ ID NO: 889079 - DNA, 120 bp, Artificial Sequence
  ENSG00000255240_19 (sequence is synthesized)
gttcctatggtcccatcctctagcagacccagggtccaggcccatcacagttgactccagtattgggcaggtgcctacagacccagtatctagtactgcctctgtggacttaggttccag

SEQ ID NO: 889080 - DNA, 120 bp, Artificial Sequence
  ENSG00000255240_20 (sequence is synthesized)
tccagttcctacagccctaggacccaagccaccctttgtggccctagtgtccatgcccacttctgaatatgttggttctaggacagatctcacacaaccagcctccaggccattccacaa

SEQ ID NO: 889081 - DNA, 120 bp, Artificial Sequence
  ENSG00000255240_21 (sequence is synthesized)
ttcttggcccacccctgtggctacaagcaccagtctagcacctatggtctcaaactttagactggccccatctcaccacagccctaggccagcatcagactccaggctggtttttgtaac

SEQ ID NO: 889082 - DNA, 120 bp, Artificial Sequence
  ENSG00000255240_22 (sequence is synthesized)
ccagcatccaacaaactcagggcccagctgtgctctagcagacccagggtacaggccgacttcattagaccctgttgctaggctggccatcatggacaaagtctctaggaccatctctga

SEQ ID NO: 889083 - DNA, 120 bp, Artificial Sequence
  ENSG00000255240_23 (sequence is synthesized)
agactcaggctccaggtctgcccccgtctaccaagatcccaggcccatttctccagattccggctccagtcctgcaccagtaccaggccagtccccatggactcagatgccaggcttatc

SEQ ID NO: 889084 - DNA, 120 bp, Artificial Sequence
  ENSG00000255240_24 (sequence is synthesized)
ccagcagactcagacactatgctcattccaaaatctggccagcccctgcagacacaggctcaatgcacgcctcagagccatgttagcccctgtggacccatgctcagtccagcacctact

SEQ ID NO: 889085 - DNA, 120 bp, Artificial Sequence
  ENSG00000255240_25 (sequence is synthesized)
gttaacaggctctgtacctgcccttatagaaattggctttacgttcatccccacatacccaatgaaaagatccaccccagttgatccaggcttcaggcccaactctacagacccaggaaa

SEQ ID NO: 889086 - DNA, 120 bp, Artificial Sequence
  ENSG00000255240_26 (sequence is synthesized)
caggcctaccatctgctaacacaggcaccaggccagcctgcctgaggactttggcaacaagttcacctgcagaccacactagacaccctacaaagagttgctggatgactaggaaagggt

SEQ ID NO: 889087 - DNA, 120 bp, Artificial Sequence
  ENSG00000255240_27 (sequence is synthesized)
ttttccagataaagccggtatgcaagaactagaataagtttcttgtttttcaaatgtgcagacactaatgcactgcctaaaaatcaagatcaagaacaatcagagaaaaatgataccacc

SEQ ID NO: 889088 - DNA, 120 bp, Artificial Sequence
  ENSG00000255240_28 (sequence is synthesized)
attctcttaggaggctgcatttgtggcgctaaaaaaagggatgggcgtgggagattccaggacttgtgctcgctgaagatacaactgttagtccaaggggtgaccctggagatcattacc

SEQ ID NO: 889089 - DNA, 120 bp, Artificial Sequence
  ENSG00000255240_29 (sequence is synthesized)
aaaatttaaaaatttcaccactgggcacacatgttacccttctcgtgatggcatggcaaagcttgatttgcaagagtttcttttggattgtccccaatgattccctttaaaaataggagc

SEQ ID NO: 889090 - DNA, 120 bp, Artificial Sequence
  ENSG00000255240_30 (sequence is synthesized)
cctggctttctagttacatgtttattggtaactctgtccttccctacaacacttaagcatatttaaagactataccctcccctgcctccagcttggattgtaagctcctcaagagcatgg

SEQ ID NO: 889091 - DNA, 120 bp, Artificial Sequence
  ENSG00000255240_31 (sequence is synthesized)
ctgtgtcctttaacatcaggtctccatgtgagaaggagttcctgccatatcataaatgcccaatcaacatttgtaagtgaagaaagctattctgtggtgtctgctttaatattaagagat

SEQ ID NO: 889092 - DNA, 120 bp, Artificial Sequence
  ENSG00000255240_32 (sequence is synthesized)
ggcttgcccaagattgctaagcagcttcattgtctacaacggaacaagattctgtgggtagcaggtccattggtgccactgacaggaggcctcaaggaaacctagtgccttattcattct

SEQ ID NO: 889093 - DNA, 120 bp, Artificial Sequence
  ENSG00000255240_33 (sequence is synthesized)
gatggcgccttgattttcttccagcacagagccgtaaaatggaatattcttctgacacagatacttcatgtatcgcaccatcatccgtgtcgcgttgcctctccttcggtatttttccac

SEQ ID NO: 889094 - DNA, 120 bp, Artificial Sequence
  ENSG00000255240_34 (sequence is synthesized)
actgtagcccattcctatttcacaagaagggtccatggttacccatgagaccgggaccccctctgggcccagcatacagactgctggcagggctcctaggcagcgcttgatgtaatgcag

SEQ ID NO: 889095 - DNA, 120 bp, Artificial Sequence
  ENSG00000255240_35 (sequence is synthesized)
gctcctcttattcatccctagcttccagttgtcatttaccagcccagaataagacacattcagctgggcatacttaaaattgggagtctcgctgtagaaaacaaaaagaaagacaacaac

SEQ ID NO: 889096 - DNA, 120 bp, Artificial Sequence
  ENSG00000255240_36 (sequence is synthesized)
tttcatccccactcctgtaatttctaggtgcccttccattctagagatcccaggccctcttcttgttaaaagacccaccattgcaaagtggcgtattttgaccattgacaacctttattc

SEQ ID NO: 889097 - DNA, 120 bp, Artificial Sequence
  ENSG00000255240_37 (sequence is synthesized)
atcccaaggaatgaattcatcgtctcttcattccaaaactgatttatgtgaattacaaaaatgtacaaggaatagcaattataaatgatcagcacatgttttttgtacctctccaattcg

SEQ ID NO: 889098 - DNA, 120 bp, Artificial Sequence
  ENSG00000255240_38 (sequence is synthesized)
tcatctgggtggcctgtctcagcccagcttccaagcttgcttttattggtggcatagagcttcaggatatcttccgtaacaaagaggagtgctctcgaatgctctaccttcactgaattt

SEQ ID NO: 889099 - DNA, 120 bp, Artificial Sequence
  ENSG00000255240_39 (sequence is synthesized)
gaaaatgcagctgcttttatcccctcacctaaactttcttgaaaacctgagagaaagccaagaaagcaatattgtcagacatgcagttctctacttacattgctcccacctgattaatac

SEQ ID NO: 889100 - DNA, 120 bp, Artificial Sequence
  ENSG00000255240_40 (sequence is synthesized)
ctcagtgcttagtagttttcaaagttgagtttacaccacaatcagctatagtccttggcacaccacagattgctccacctctcccagctcagagagtttctatgaatttacatttctaat

SEQ ID NO: 889101 - DNA, 120 bp, Artificial Sequence
  ENSG00000255240_41 (sequence is synthesized)
gagctctcaggtgatgctaatgctgttagttgaagacacaatttgagaagcacagctgcttgcccatttcttcagacttgttaccttggatttggagtttctgtttccagtttatgatct

SEQ ID NO: 889102 - DNA, 120 bp, Artificial Sequence
  ENSG00000255240_42 (sequence is synthesized)
cagaatttttcaaaacttcttgtgatttttgagggtctttggagaatatacgatatacattagtgtatgaatccatgtcatcagtcatctcctgtgtaggatggtgaaaggtcaggtcat

SEQ ID NO: 889103 - DNA, 120 bp, Artificial Sequence
  ENSG00000255240_43 (sequence is synthesized)
tcccttgaactttttcttctcctctcactgattgcaattattagaaaaatgacaattgaaaggaaaattttaacaccagcccacgatggctgcagttgggcacatggataatagaaccaa

SEQ ID NO: 889104 - DNA, 120 bp, Artificial Sequence
  ENSG00000255240_44 (sequence is synthesized)
ggcctataagctactgctgacctcttacctgtttaactggagtttgttaaatattgaacactgacaggtactggttataaacctgcttatcagatgcataacaaagacaggatgaaatca

SEQ ID NO: 889105 - DNA, 120 bp, Artificial Sequence
  ENSG00000255240_45 (sequence is synthesized)
gtcaccttccaccaggccttaagatgcctcacctttctccctacccactcaaccgcacacttaccttattttatatatagcatcacagagcgcccagcagaagcaaaggaatgcaacaat

SEQ ID NO: 889106 - DNA, 120 bp, Artificial Sequence
  ENSG00000255240_46 (sequence is synthesized)
tgcttctctccctgcttctctcacctcctggaccacacatatccccctgttatatatactgtgccccacataaccccctgtgggacatattctgcgttgtactgagtccgtgttgatagg

SEQ ID NO: 889107 - DNA, 120 bp, Artificial Sequence
  ENSG00000255240_47 (sequence is synthesized)
gttaagttcttaaacttggcacaagatgaatttaactgtgatttctctaagttttagtgcctactgtttcaccagacacctacaatctatactgttttagaatctgcagtgtccagggtt

SEQ ID NO: 889108 - DNA, 120 bp, Artificial Sequence
  ENSG00000255240_48 (sequence is synthesized)
tgagcaagatactttagtgaatagaaacattaaggagacattgccttttcccaaggctacaggatatcagcctctttgaagagtgacatggcctttacagccagaagcccacaaaataga

SEQ ID NO: 889109 - DNA, 120 bp, Artificial Sequence
  ENSG00000255240_49 (sequence is synthesized)
atgaagtaactgaattttcggtagcactctgcacaatttatgtggtgttggactcatgggttttaaagaaagagacttgtgatcccattctgacaagccacaaacttcatgggacgatgt

SEQ ID NO: 889110 - DNA, 120 bp, Artificial Sequence
  ENSG00000255240_50 (sequence is synthesized)
gtatctgtttatcaggggaaatataaacaataagtgtgagagttttagcagtgaatgtattaatatcatgttgaaaattttatcgttaaggagtaaaagagaaaatagtgtaactaattt

SEQ ID NO: 889111 - DNA, 120 bp, Artificial Sequence
  ENSG00000255240_51 (sequence is synthesized)
taaggaaaccttcaaaaatttgggggtgcttttataaatgcaagttcctgaatatggccaaaacacaacacctcagtgaatttaaaagagtagaagttttaaaagacccgattttaaaag

SEQ ID NO: 889112 - DNA, 120 bp, Artificial Sequence
  ENSG00000255240_52 (sequence is synthesized)
aatgtcttaaaatagccaagtaaatattcaaagaattataaagagaatatcaaagtaaaccagaaaataactaatggaacaatttgtaaaaataaaagccataaatactgaaatgtagaa

SEQ ID NO: 889113 - DNA, 120 bp, Artificial Sequence
  ENSG00000255240_53 (sequence is synthesized)
agttcattattaaatgggaaaaagagaaagagcagaagagagagataaacttctggtaaggcatttaaaggaaatagaagagaaagagaaaagagaaaaaaaggcatagagtatgagcca

SEQ ID NO: 889114 - DNA, 120 bp, Artificial Sequence
  ENSG00000255241_0 (sequence is synthesized)
agatctttccattctctgtttttaatgcaacataactttttgaaagaatgtgtaaaataggttggattttctattttactaaagccttacagaagcacctctgagactcaatcagtgaaa

SEQ ID NO: 889115 - DNA, 120 bp, Artificial Sequence
  ENSG00000255241_1 (sequence is synthesized)
cacgctcaggttctccatccttcaagcctgaaactgagttcaccagctatgaaagcttaagagtgcagcagacattattgctttcacaatgtgaacttgctagggacttcaatagtaagt

SEQ ID NO: 889116 - DNA, 120 bp, Artificial Sequence
  ENSG00000255244_0 (sequence is synthesized)
gactctgaagcctgacctctctctactgccacacaagttctgtgctaacatgggaataacattaggatcaaaacacccccactcatctagccagggctgtggacccgatgattactctat

SEQ ID NO: 889117 - DNA, 120 bp, Artificial Sequence
  ENSG00000255244_1 (sequence is synthesized)
cctgggcctgaaattttctctcagggggaggaattcaggtatgcaaagaggtggttgtgacaccctcatgaccaggactgatcatccatggacaggaaaggagaccatgcattatgaacc

SEQ ID NO: 889118 - DNA, 120 bp, Artificial Sequence
  ENSG00000255244_2 (sequence is synthesized)
agagaacccttctgtgttgcttaattcaggagatgcatacaggagctggagtcaaagctggtgagcaatccaggcttatgaagatgctggacagacttgttatttcctgtatgaggacta

SEQ ID NO: 889119 - DNA, 120 bp, Artificial Sequence
  ENSG00000255244_3 (sequence is synthesized)
tggacaaatcagtggccagaggtattggagacacaaaccctacctgagatgattcttggcctctgtcccatatccaatagagataagcctctcccatcacattccatcttgttcaacttg

SEQ ID NO: 889120 - DNA, 120 bp, Artificial Sequence
  ENSG00000255244_4 (sequence is synthesized)
cttgataaaaacagtggcgcagtttgagagaatggactcccattttaaaagaagttctattgtgtataaaatgctatgcaaatagcattgcatgctacattaaaatctttcataaaagga

SEQ ID NO: 889121 - DNA, 120 bp, Artificial Sequence
  ENSG00000255246_0 (sequence is synthesized)
gggaacagagagactggcccattgatcctagtttgggattgggtgggaagacctcataaaatagtgaagggtagactgagtcttgaatgacctaaacaaatatatagatataattggcca

SEQ ID NO: 889122 - DNA, 120 bp, Artificial Sequence
  ENSG00000255246_1 (sequence is synthesized)
gccctcagctggtctctgattatgacccgacctgctgagataaaatccagtgcatcctgtgctaccttgttcatgtcccaggattcagtgactttgggcaactgaggctgtacaggaagc

SEQ ID NO: 889123 - DNA, 120 bp, Artificial Sequence
  ENSG00000255246_2 (sequence is synthesized)
aaacttacaatcatggtggaaagcaaaggggaagcagactgtacaggaagcatggctgggaggcttcaggaatttacaatcatggcagaaggcaaagaggaaacaagcacatcttctcat

SEQ ID NO: 889124 - DNA, 120 bp, Artificial Sequence
  ENSG00000255246_3 (sequence is synthesized)
tcagtctgaatggagacaggtgctggtgatgcaatcagacaagttctctgctgttctggagtttacatttggaagaattgtgttatataccagggaaggatgtggtaactctcctgaaac

SEQ ID NO: 889125 - DNA, 120 bp, Artificial Sequence
  ENSG00000255246_4 (sequence is synthesized)
cttcccttggtcattgtcttcttcttcttctcctcctcccttttctccctctcttccccctcctccttctcctcttattcttcttcctccttctgtttttaaatgaggaagcccatagaa

SEQ ID NO: 889126 - DNA, 120 bp, Artificial Sequence
  ENSG00000255246_5 (sequence is synthesized)
aatattgtgacagggagaaatggattttaaataagtatgactgaaaaaaaacttttactataatagaaaatcttggtgctgagggaagaaatccaaaaaattaaaaatcttcagaaggta

SEQ ID NO: 889127 - DNA, 120 bp, Artificial Sequence
  ENSG00000255246_6 (sequence is synthesized)
cgcctaacatattttctcaacaaacttttgctttccaataaactgaataaagtgggaatatagcttctcactttctcctaaccttcaattaattattaataaaaactttaatgtacatgt

SEQ ID NO: 889128 - DNA, 120 bp, Artificial Sequence
  ENSG00000255247_0 (sequence is synthesized)
acagggcagagatggatagggaagggagtgtgatgtgacgaggccgcagagagctcagcccccaggatggacgggaaaccctgggtcaccgttcttggagggggacatcagtgcctggca

SEQ ID NO: 889129 - DNA, 120 bp, Artificial Sequence
  ENSG00000255247_1 (sequence is synthesized)
catagtagatgcccaaagaacatctgctgactgacctcacctaaagcatttgggcagttacccacaggtgctccatgacaccttctggccagcagaaaggacctgcagccaagtgctctg

SEQ ID NO: 889130 - DNA, 120 bp, Artificial Sequence
  ENSG00000255247_2 (sequence is synthesized)
atttggggcaggaagcttggcctggatgacctgaggggcagtcatgtcctctggcccacccagtcttcacttctcacctcctcaccccccgccctctggagggcagctcctatctctcct

SEQ ID NO: 889131 - DNA, 120 bp, Artificial Sequence
  ENSG00000255247_3 (sequence is synthesized)
gggttagcctcagagttcggcgaggggaggcactgtttggggctacagtcctgggcccggcgttgcttgccagtgagatgtctgatgccaggggggtgccaaggagcagcaagcctgggg

SEQ ID NO: 889132 - DNA, 120 bp, Artificial Sequence
  ENSG00000255248_0 (sequence is synthesized)
ggggctgcggaattttggaagcgcagaagttttctcctcctgtcctgtaactggttttcactcactcaactgagagatttctttgttgcaatgatggggtctaagataacacttctggag

SEQ ID NO: 889133 - DNA, 120 bp, Artificial Sequence
  ENSG00000255248_1 (sequence is synthesized)
gctgcaggcgagaaacacagctgatatcatcttttattgtgtgttgttatttgcctagcattataaattaaggaggaatagtaacaaagagcttgaagacatgcacagctcacaggcccc

SEQ ID NO: 889134 - DNA, 120 bp, Artificial Sequence
  ENSG00000255248_2 (sequence is synthesized)
gggtggaggctggcgacatcagacagacagaaccaagacatctgaggggcaaccaggaggtgcgtgtggctgcagagcacacagacttgtctttggacaaaattgagaagaactcataaa

SEQ ID NO: 889135 - DNA, 120 bp, Artificial Sequence
  ENSG00000255248_3 (sequence is synthesized)
cttggcttcctcgcttctgctcctcagacgcgcgtggatgatttgaagatattagcctaacaagatggaagcaggtttaaaattttacataagaagttacctttttcaggtaatggtgtt

SEQ ID NO: 889136 - DNA, 120 bp, Artificial Sequence
  ENSG00000255248_4 (sequence is synthesized)
tttctgtaattttcccaaacctttcgcttcctcaagtattgcaaatttttagggcatgcttgaatgatttaattatgaagaataactacattttaaacttaattttttaaaaaagaaacc

SEQ ID NO: 889137 - DNA, 120 bp, Artificial Sequence
  ENSG00000255248_5 (sequence is synthesized)
agttttataattttcctagccaaggagtagagcaggcatgacattcaactctatggagtttggaaaatttttagaaatttattactgaacagcacttggttttttggatttgaaaattaa

SEQ ID NO: 889138 - DNA, 120 bp, Artificial Sequence
  ENSG00000255248_6 (sequence is synthesized)
gccatagagctacaactaaattctgttttgccaaacttcacagcaccagcaggctctgagcaatcataagcatttgaaactagcaggcactgccccttaactctgtcgctatcttgggca

SEQ ID NO: 889139 - DNA, 120 bp, Artificial Sequence
  ENSG00000255248_7 (sequence is synthesized)
tattacaggattggctctaaaaagcctaccatgtgttctgaattcctggaagatagagcttatataaattacataataacaatattgatttttttttttactttagtcatagattggcaa

SEQ ID NO: 889140 - DNA, 120 bp, Artificial Sequence
  ENSG00000255248_8 (sequence is synthesized)
tactatatggcactttatgaaactattcccatgcatatattcagtgagtaggatttgatcttagctttcatgatacaggcagtttccttttagtgtcattgaagggctttatgccaccta

SEQ ID NO: 889141 - DNA, 120 bp, Artificial Sequence
  ENSG00000255248_9 (sequence is synthesized)
aaaatgtttaataacataaattatatatttgctttataagttacattactcggcctttgtcactgcttatcagcattaacccatattttccaacttgttaatattactaagagagcccac

SEQ ID NO: 889142 - DNA, 120 bp, Artificial Sequence
  ENSG00000255248_10 (sequence is synthesized)
ggattcttgcttaatgaagcaagccaaaatttcttctgaaaaaaacccctcattttcctcctcaacacaaagaagattcttaaaggacgtattcaattaatactttaagaaaaatatcta

SEQ ID NO: 889143 - DNA, 120 bp, Artificial Sequence
  ENSG00000255248_11 (sequence is synthesized)
ctcccaaacaaaccatccctttactaggtcagtatttgattttcttctcgtttttttcctgcagcctgggtatcttctggttgctcttttattttctaaaatggaaactttggattgttt

SEQ ID NO: 889144 - DNA, 120 bp, Artificial Sequence
  ENSG00000255248_12 (sequence is synthesized)
ggaggttaacactacaaaccatttgaaatgaaaaacttctctctgttctatatttgccaaggaaagggagagctgcccccagctgaaacgcagcattgagctcctttctgtggaggtcaa

SEQ ID NO: 889145 - DNA, 120 bp, Artificial Sequence
  ENSG00000255248_13 (sequence is synthesized)
gagcgccatgcaaatttatgaaagtggtgctatttgaatgtctcagtgtaccactttgatagatcttagtctatcgctaacaaatattgtatcgttctagtaagcgtgatgataacaatt

SEQ ID NO: 889146 - DNA, 120 bp, Artificial Sequence
  ENSG00000255248_14 (sequence is synthesized)
cattctcattactctgggacgttgggcttattctgctccattataataggagcacctacatcccccacattccagcaatatttaacagggttcaaagtggccatcctcaaatacctctag

SEQ ID NO: 889147 - DNA, 120 bp, Artificial Sequence
  ENSG00000255248_15 (sequence is synthesized)
ctctattgaaacacctcgcccagcctagcgcactgagagctctcattttccccccttgctcgggatggtgccacaggaggctgtgcgggccccgctccgcttcgaatggatacagttaag

SEQ ID NO: 889148 - DNA, 120 bp, Artificial Sequence
  ENSG00000255248_16 (sequence is synthesized)
ctaatgatctcgagaggatatcgtcctggataagggtggagcctacgcccaaaaacaagattacctgaaagagaaaagaaagggggaaaacacacagagatacagtcggggaggccacat

SEQ ID NO: 889149 - DNA, 120 bp, Artificial Sequence
  ENSG00000255248_17 (sequence is synthesized)
gaagatggaggcagagacaggagtgatgagcctgcaagccaaggaatgccaagggctgccagcagccatgagaagctgagagacacagagaacgagtcctctgccagagcctccagaagg

SEQ ID NO: 889150 - DNA, 120 bp, Artificial Sequence
  ENSG00000255248_18 (sequence is synthesized)
aactaaccctgtcaataccttgatttcggacttctggactccagaactgtgagagaatatatttctgttgttttaagccattcagtttgtagtaattggttacaatagccatgggaagct

SEQ ID NO: 889151 - DNA, 120 bp, Artificial Sequence
  ENSG00000255248_19 (sequence is synthesized)
aacatagggtccttcaacaatcaaagcaaaaaagaggacctattagcacatggagtgcaaaggaggaaggaatgactgagctgtttgaaagtgcagcgggatgtcatgggcaaccagaac

SEQ ID NO: 889152 - DNA, 86 bp, Artificial Sequence
  ENSG00000255248_20 (sequence is synthesized)
ctgtttgaaagtgcagcgggatgtcatgggcaaccagaactcaggtccaaattctgccagaactctccctctgtgttagtctaggc

SEQ ID NO: 889153 - DNA, 87 bp, Artificial Sequence
  ENSG00000255248_21 (sequence is synthesized)
gaaagaggttcaattgactcacagttctgcagggctgcgggggggactcaggaaacttacaatcatgacaaaagtaggagaagtgcc

SEQ ID NO: 889154 - DNA, 120 bp, Artificial Sequence
  ENSG00000255248_22 (sequence is synthesized)
tcatgagaactcactcactatcatgagcacagcagcatggggataactgcccccacgattcaattacctcccaccaggtccctaccaagacacgtggagattatgggaattacaattcaa

SEQ ID NO: 889155 - DNA, 120 bp, Artificial Sequence
  ENSG00000255248_23 (sequence is synthesized)
ttgggtggggacacagccaaaccatatcggtctctttcctctctgcttcactgtcattgaaaactggcattcttcacttggcagcaaacattgctgctaacatcttttgagttttttatt

SEQ ID NO: 889156 - DNA, 120 bp, Artificial Sequence
  ENSG00000255248_24 (sequence is synthesized)
catcttttgagttttttattgtatggcttcaatcatctcagacatactaacttcctttcatatttccaaattatctgaaagaatcttactttcctaatttgggtcatgtctcaccctgaa

SEQ ID NO: 889157 - DNA, 120 bp, Artificial Sequence
  ENSG00000255248_25 (sequence is synthesized)
ctaaccaacagaggctaagctgccaggatcttataaaatatgacagctcctaaggaaaccacttgaatgagtggaggtgctgggcacccaggagtccatcacatgggatcttttctgtct

SEQ ID NO: 889158 - DNA, 120 bp, Artificial Sequence
  ENSG00000255248_26 (sequence is synthesized)
actggaagtgtgacattagcaagtcacttggcctttctgagctttcttatcttgtaaaaaatgaggatagattgtttgataaacactctacacctagaaggatctcaataatgtttgtta

SEQ ID NO: 889159 - DNA, 120 bp, Artificial Sequence
  ENSG00000255248_27 (sequence is synthesized)
ataatggtcatagaagtatagaacttaaatggaccttaaagacagacaaggttaatcaccttatttttgcagatgagatttcagaatttaagttggtgagaaaaccaggacaagaattta

SEQ ID NO: 889160 - DNA, 120 bp, Artificial Sequence
  ENSG00000255248_28 (sequence is synthesized)
ggttacttaactaccagattagtgtttctttgttattttatatgatctgcccccatccctgtggatataaaataaggtctcatctgaaaggtgttattcaactaaagaaaaagcagcttt

SEQ ID NO: 889161 - DNA, 120 bp, Artificial Sequence
  ENSG00000255248_29 (sequence is synthesized)
cttagaacagacactgatattaggctttagattagatattaacacagggataaaggtgtcaaaaaagaaagaccaaagaattgtgttgggagttaaaacgtgaaggacacagtcaagtgc

SEQ ID NO: 889162 - DNA, 120 bp, Artificial Sequence
  ENSG00000255248_30 (sequence is synthesized)
ctgcaaaatcttgccatttttgagcctataaacagtaattactttgagacagcattcacacaaataaactatgatgggttcagacccctctgattattaagccatcttgtttacatccct

SEQ ID NO: 889163 - DNA, 120 bp, Artificial Sequence
  ENSG00000255248_31 (sequence is synthesized)
ctatcctgtgtttcttttcctttggctatccttattatataaataaaaacagttaggaagagcctatttgcgtcagtttgacaatgagaaaatcaggagaaaggtttttccttctttggg

SEQ ID NO: 889164 - DNA, 120 bp, Artificial Sequence
  ENSG00000255248_32 (sequence is synthesized)
ccaagctttggtccttgtaagaacaattgctaatatgtctagtgactatagttctgatcatttttatgcttataaaagcctgatgctgaatgcctatgttttaaaatttttataagatca

SEQ ID NO: 889165 - DNA, 120 bp, Artificial Sequence
  ENSG00000255248_33 (sequence is synthesized)
actttgctttcagataaccctccttcctccacctcacaaaaactcacaagctgcaacccttctgatgtccactcccacacaaaccagcttcaggcctttttcaagatgtgactggagtga

SEQ ID NO: 889166 - DNA, 120 bp, Artificial Sequence
  ENSG00000255248_34 (sequence is synthesized)
tttgcacccggatgcctagactcgccatctgctcaaagactgctcagaaagccctcccatgcattcccctgctgcataccagcccactctgcctgcagctgctgtctgcaggacttcata

SEQ ID NO: 889167 - DNA, 120 bp, Artificial Sequence
  ENSG00000255248_35 (sequence is synthesized)
tctatgccacactgtgtaaaagctgtgcttcaagaaatcacaaaaacattttcctgcacctactacacagcctgagtgcggcataagttgaccttgcttgctaagaaatggggcaagaaa

SEQ ID NO: 889168 - DNA, 120 bp, Artificial Sequence
  ENSG00000255248_36 (sequence is synthesized)
tgcttttttgtgtgtgtcatgtctgtttgtttttcaattaagagaggaaagcattaggcagatggaatgtacatgtgaggatgaggagacagaaaacaagtagccctttccatcaagata

SEQ ID NO: 889169 - DNA, 120 bp, Artificial Sequence
  ENSG00000255248_37 (sequence is synthesized)
gagggttttctggggttgctggctattgaatgtcactcctgatttctctttccaaggcactgtaccaccagcctactgagattgtgtgggagctttcatgggggttgtatttcactgatg

SEQ ID NO: 889170 - DNA, 120 bp, Artificial Sequence
  ENSG00000255248_38 (sequence is synthesized)
gggttgatgcccaggtctgggaagaggagaatggatacagctcggagtgggttagctgtgagttcttagcatctgtgttcttggatcccacagcctttggatcaggaggaggtcaggcaa

SEQ ID NO: 889171 - DNA, 120 bp, Artificial Sequence
  ENSG00000255248_39 (sequence is synthesized)
agatgggctgtctggaaagctggactcagcctggagcatgttccccagattgctattttgtgaaggcttccgcatacaaatgactcagatccaaacattcaaaaatgatcttggagggcc

SEQ ID NO: 889172 - DNA, 120 bp, Artificial Sequence
  ENSG00000255248_40 (sequence is synthesized)
atctggttcttgctggttctaaaagcttccttcagcctggagtatggatccagtacaaaagatagtgagagctgttcattgaggtttaacatgttccactgaccgaggctagaagctggc

SEQ ID NO: 889173 - DNA, 120 bp, Artificial Sequence
  ENSG00000255248_41 (sequence is synthesized)
tttaaaaaatagccaacactgatgctccaagggccaattgctgatgcttgtcacagtgaagatcccggtgttacacatccaatcgttcacctccttccaagactatgacattccaggaaa

SEQ ID NO: 889174 - DNA, 120 bp, Artificial Sequence
  ENSG00000255248_42 (sequence is synthesized)
tgcaaggacaaagactgaagagactgctatattgatggactctcaagccaactatgaagttgaaacaaagaaagtgatcacctgaagacacctcctctgctaagaaacacccccaaattg

SEQ ID NO: 889175 - DNA, 120 bp, Artificial Sequence
  ENSG00000255248_43 (sequence is synthesized)
tgcagcttctgccactagaactctcagaacaagagacaatcttttcaagaaacagaaaaactcaataatgacatctagattttcatgagccaagaactttcccttcctcatgtgtattcc

SEQ ID NO: 889176 - DNA, 120 bp, Artificial Sequence
  ENSG00000255248_44 (sequence is synthesized)
tctgtttgtacttaaattcatgtgacattcatttttttcctagtatggatatgcttattaatgcacttgtttcaaaatcccaaattgcacaaatgtgttaatattttaagaaacaaaatg

SEQ ID NO: 889177 - DNA, 120 bp, Artificial Sequence
  ENSG00000255248_45 (sequence is synthesized)
aaagggtaaaataatcatagtaccacattggtccacttgacactaaccaatcgatcatttttttttaatcaagaaagctagattctatcagataaaatcactgcttctaaagagtttaaa

SEQ ID NO: 889178 - DNA, 120 bp, Artificial Sequence
  ENSG00000255248_46 (sequence is synthesized)
tctagttagaaaaagttatagaaatgtttgcaaagataagtaacagatagagtcagtagaggataagatcaaaaacaaaaccaagcaaaagatgagttcaggggagtttgccatcaagtt

SEQ ID NO: 889179 - DNA, 120 bp, Artificial Sequence
  ENSG00000255248_47 (sequence is synthesized)
ggcaaaactgacttacttagggaagaaagttataaaacaggaaaatatgagatgaaccttgagtgatgtggaagatttagataaatggaaaggaaggagaaaatggagttctttaggtgg

SEQ ID NO: 889180 - DNA, 120 bp, Artificial Sequence
  ENSG00000255248_48 (sequence is synthesized)
ttgtaattggaggaggaaatgaatacacacatcttgttgacttaaacccagacattcagcagctctctatacatatctggaaaagactgcacagtcacctcctgtctctcaccccaggta

SEQ ID NO: 889181 - DNA, 120 bp, Artificial Sequence
  ENSG00000255248_49 (sequence is synthesized)
ttacttagaattattatcatatttcccttcctttaaagtaagtaagggtgattggtgacaatatggagaactatgatttttccattaacctaataataattggtatttattgagttctgt

SEQ ID NO: 889182 - DNA, 120 bp, Artificial Sequence
  ENSG00000255248_50 (sequence is synthesized)
taagcattttacatattaactcacttaagcctttcaacagccttgcaaaataggtattattatccccattttacaggcaagaaaactgaggtttaagtaacttgccgaagtgccatatac

SEQ ID NO: 889183 - DNA, 120 bp, Artificial Sequence
  ENSG00000255248_51 (sequence is synthesized)
agggctcacattcagtattgcagttgcaaagctcatgatctatagtgccaagttgcaatattgtagtcaatgtcacaattattacccctttttatattccttgatatttttccatggcaa

SEQ ID NO: 889184 - DNA, 120 bp, Artificial Sequence
  ENSG00000255248_52 (sequence is synthesized)
acaattagctatttcatttaataatcacctaaaacttttcagtcttctgattaaaattacgctggagtgatagaatgtattttcatgatagaaattgggaaaaaaaatggggaatgaagt

SEQ ID NO: 889185 - DNA, 120 bp, Artificial Sequence
  ENSG00000255248_53 (sequence is synthesized)
ttatcagcatttcagacttgttttttttttttttttttgcaagactttgatgagattgttcacttttgtctatgtaaaatcccaaatccttgagaataaaaaagggggaggtttaagtca

SEQ ID NO: 889186 - DNA, 72 bp, Artificial Sequence
  ENSG00000255248_54 (sequence is synthesized)
cctttcttttctttctttcctctttctctttccttctttctttttttcttctttctttccttccttccttcc

SEQ ID NO: 889187 - DNA, 120 bp, Artificial Sequence
  ENSG00000255248_55 (sequence is synthesized)
cttctttctttttttcttctttctttccttccttccttccatctttcttttctttctttccattttttttttcctccagaagaatggaaacagtattcttttccgatcagttcagtaata

SEQ ID NO: 889188 - DNA, 120 bp, Artificial Sequence
  ENSG00000255248_56 (sequence is synthesized)
caactggattctccctccttggttcttccctggaccaaggacagaagaatcattcaacacagaggctattgacaaaaggggcatatttggtgcaaacaggggtaagtcatgattagttca

SEQ ID NO: 889189 - DNA, 120 bp, Artificial Sequence
  ENSG00000255248_57 (sequence is synthesized)
gaattactcttggagtagcaattgctggatgtgcctcttttgttgaggtgattggatcttttggcaaaaaccagtgactgcaaaggatgagagaaacgatcagaaaaactgaaaagctgt

SEQ ID NO: 889190 - DNA, 120 bp, Artificial Sequence
  ENSG00000255248_58 (sequence is synthesized)
cctccagttcactatcagtagcttttgcactggtctgcccttcctaaattaagtatgcacttcaatttgatgagtggaaacagtctatctgggcagtaaccagggagctttgtgcctagt

SEQ ID NO: 889191 - DNA, 120 bp, Artificial Sequence
  ENSG00000255248_59 (sequence is synthesized)
agattgcttctgttctgcacttctttggtttcccacctcaatgtaaaaaatagctagcaatgaagtccagaagttgtcaatggttcatccccagaagaatgcataatgtccaaagttgta

SEQ ID NO: 889192 - DNA, 120 bp, Artificial Sequence
  ENSG00000255248_60 (sequence is synthesized)
tgtgtatgatgtcttcaatggtattaagttatttcaaattcttagttcacctacataaatcatttctaacaagcatcttcttaaccaactttatgcacagtgtatgtttgtaagtgcttc

SEQ ID NO: 889193 - DNA, 120 bp, Artificial Sequence
  ENSG00000255248_61 (sequence is synthesized)
tgcacgaatgtttatacatgactgtttccatagtacttatgtttttaaaaatattcagtcatttcctactataatcctcatgtatccatgtaactgactcaaaaatacttcagccacaga

SEQ ID NO: 889194 - DNA, 120 bp, Artificial Sequence
  ENSG00000255248_62 (sequence is synthesized)
aagctaaaactgagcaaatctcattcttcttttccatcccctttgcatgtggctggcatttagtaatgattaataatatggccagctgaataacagaggtttgagacacaattctttctc

SEQ ID NO: 889195 - DNA, 120 bp, Artificial Sequence
  ENSG00000255248_63 (sequence is synthesized)
aaaggagtcagctaagctgggtctacttatggacaaacatctaaatgtgtggaagtatctgatatttgacaatggtaaatttccacttagctagctagcattgtcagacttcaatctcct

SEQ ID NO: 889196 - DNA, 120 bp, Artificial Sequence
  ENSG00000255248_64 (sequence is synthesized)
catggctctggccgtcctgttttaagcatgataattgttggccacatctcacatagttctcattgagtgagttcataaataaacagggtttttttttttttttaaagagcagccaagcac

SEQ ID NO: 889197 - DNA, 120 bp, Artificial Sequence
  ENSG00000255248_65 (sequence is synthesized)
gtctccaagatatggaaggaagtgagaaatgacagggctgcaagctttgtatgtaggagcccggcagggcgggggagcggcgaggagagccaagtggattctcagaaaaggggggaagcc

SEQ ID NO: 889198 - DNA, 120 bp, Artificial Sequence
  ENSG00000255248_66 (sequence is synthesized)
acttctgagactttccaagagtgcaggaaattctaccccccaagtatggcaccttggcatgctgagtattttaagctgaaggaaacagagaaaaccacagaagcagaaaggtctttctga

SEQ ID NO: 889199 - DNA, 120 bp, Artificial Sequence
  ENSG00000255248_67 (sequence is synthesized)
agtggatgctgtggggcaccacctccttgaggaccaaggcactccagctgccaggaatttggctgctaacctcacacagctgagccttccatgaaaattgctctctgccaaagagaactt

SEQ ID NO: 889200 - DNA, 120 bp, Artificial Sequence
  ENSG00000255248_68 (sequence is synthesized)
cagtaaagattaaatgtgcttctcaaaggcagccacttcatgctgctatgtcgaaagggccattattattattatattttaatggtaaaagagaaaaggagagaggttgagcgagcgaga

SEQ ID NO: 889201 - DNA, 120 bp, Artificial Sequence
  ENSG00000255248_69 (sequence is synthesized)
gagaagctaggtgtgatgatgacagactagcttttctgagaggaaaaggaaaagggaagggagagaaaaaggagagcctctgagctcaacggaggattgtgcctgagaagaacccacaga

SEQ ID NO: 889202 - DNA, 120 bp, Artificial Sequence
  ENSG00000255248_70 (sequence is synthesized)
ggcctggaataaaagaagaacaagaagaagaaagaaatgaaatgaaaaacagaaagaaaaaggagaagaaacatttgtaaaagggtcatcttcccatctgcctcccctccttttcctttc

SEQ ID NO: 889203 - DNA, 120 bp, Artificial Sequence
  ENSG00000255248_71 (sequence is synthesized)
atttttggtggcggcacaggaaagccccacttccagtctgatgaggaaagcgacaatctatcaggtacagaaccaggggctgtctgcgaagatggaggggaattatgcttcggattcctc

SEQ ID NO: 889204 - DNA, 120 bp, Artificial Sequence
  ENSG00000255248_72 (sequence is synthesized)
tgaaatattggccaaaggcttcaaagaatccgcagcgggaggtgcggggggaatgtctctccccagcccgcacccagcccttcccacttcgtgtctaccaaatgacagcctggtgctcgc

SEQ ID NO: 889205 - DNA, 120 bp, Artificial Sequence
  ENSG00000255248_73 (sequence is synthesized)
tcttggtgatttggccttgacttcagccaagcagctgatgcagacgaagcctccgtttgcaggactggcaaagtgcacgctaaagaaagaaggaagaaatttttcaaaaagcagctctgg

SEQ ID NO: 889206 - DNA, 120 bp, Artificial Sequence
  ENSG00000255248_74 (sequence is synthesized)
ggaggtttcatactccccccccccccccgcctttttttaatttttaagtgaatattttccaaatttgatcagttccagcccctccctccactcccacccaactgcccttttttctctcgt

SEQ ID NO: 889207 - DNA, 120 bp, Artificial Sequence
  ENSG00000255248_75 (sequence is synthesized)
gctctgatgtagatgggatggaattccaagtgctgggaatacttctagcagctaaagttaagagcgtaccagatgtgttcgagaaccttgagttgatctgaaaagagaatctgctcaagg

SEQ ID NO: 889208 - DNA, 120 bp, Artificial Sequence
  ENSG00000255248_76 (sequence is synthesized)
atctgcaccatggttggcaaaaagagacccgttgcctcctgtaaccagacactcaggctttccaggagcccagggagcaagccgagaagaaagggggcagtgtggtctaggaaaattcaa

SEQ ID NO: 889209 - DNA, 120 bp, Artificial Sequence
  ENSG00000255248_77 (sequence is synthesized)
gggctcctcgagggcggccagagccgacgctgaggaggggcagagagcgagcgatggctgctagcacgttgtcacctctcactctcacctcagcttcccaaagtgctggtattacatgca

SEQ ID NO: 889210 - DNA, 120 bp, Artificial Sequence
  ENSG00000255248_78 (sequence is synthesized)
tgagccactgtacccggccatcttctactagttttatagtataagattttgtgtttaagtctttaatccagatgatcatgccactgtactatggcctgggcgacacagcaatgtttttaa

SEQ ID NO: 889211 - DNA, 120 bp, Artificial Sequence
  ENSG00000255248_79 (sequence is synthesized)
acagcaatgtttttaaaataaataaacaaaatgaagaggaccctctgaaggaagcagattgctcccacaggatatgggagacaccccaaatactagctgggtataagtaaacaagaagag

SEQ ID NO: 889212 - DNA, 120 bp, Artificial Sequence
  ENSG00000255248_80 (sequence is synthesized)
cctgccaggagtttccgtgaggttttttcagtgggattatttgtgtccctgtggctcttcagggagcttgcagaattctagctaaagataagaagggcatcgcttcaaatgggaggccaa

SEQ ID NO: 889213 - DNA, 120 bp, Artificial Sequence
  ENSG00000255248_81 (sequence is synthesized)
tcaatgcagcattaggaaggcttcattcagctcagcaccaccttgggtaagtgcaaaactgagttttcagctactgtctgctgacaggcaaaacatttctttggcaatgaagagtaaaca

SEQ ID NO: 889214 - DNA, 120 bp, Artificial Sequence
  ENSG00000255248_82 (sequence is synthesized)
gacacctgtctggatttgacactcctggggaatataaagatgaattagtagctgcctctcccttgaggatcttacgtgggtgctcttgttatctcttgctatataataaaccaccccaaa

SEQ ID NO: 889215 - DNA, 120 bp, Artificial Sequence
  ENSG00000255248_83 (sequence is synthesized)
attcagtgacttgaaataatgacaatcatttattttgcttatgaatctgccatttggggtttccagagttactcttctcagaagcccaggttgagtctaaaaggcttcttatgacctggc

SEQ ID NO: 889216 - DNA, 120 bp, Artificial Sequence
  ENSG00000255248_84 (sequence is synthesized)
ctcagaggtctatcattcaggcaaatcattaaggccagaccatattcagggggaggggagttgtcctccaggtctccatgggagtagcaaagaattggcacagcactaagcctgttatgc

SEQ ID NO: 889217 - DNA, 120 bp, Artificial Sequence
  ENSG00000255248_85 (sequence is synthesized)
gattcaaacctagtactctggtcttgctagaagagaacttgtgggtctttggttcaatttccttaattttcaaataggaaaaacagaccaacaaaaaacaactaaacacaaagaacgaaa

SEQ ID NO: 889218 - DNA, 120 bp, Artificial Sequence
  ENSG00000255248_86 (sequence is synthesized)
agaaaagcctgtttggtgtaaaatttgactttaggtcaaatttgactttaggtcacttatgagtttccaaggaggagctgtgaaagagttcaggcagccagatctttcaagtctgggcat

SEQ ID NO: 889219 - DNA, 120 bp, Artificial Sequence
  ENSG00000255248_87 (sequence is synthesized)
ggttatgttgaatgtttttagatgaggtaatgctgtagatagtcaacagatagcatgttactgtgctctccaatcgctgtcaatttcaggaaactataggaacactaggaacagacgcct

SEQ ID NO: 889220 - DNA, 120 bp, Artificial Sequence
  ENSG00000255248_88 (sequence is synthesized)
aaatgactttgacctcaagtgcaagtacttagggtaaaattatctcacactgtgatgtaaatttctgctatgctctgtttaattgtattttattttcagatttcatcaggtttgacataa

SEQ ID NO: 889221 - DNA, 120 bp, Artificial Sequence
  ENSG00000255248_89 (sequence is synthesized)
atgtatttataatgattgcattaactgggatttgaagctcaaaatgaatatgctttttttttttgagatagggttttgctctgtcacccaggctgataatatacctataaaaagaaagaa

SEQ ID NO: 889222 - DNA, 120 bp, Artificial Sequence
  ENSG00000255248_90 (sequence is synthesized)
aatcgctgtcaatttcaggaaactataggaacactaggaacagacgcctaaatgactttgacctcaagtgcaagtacttaggtgaagatcccggtgttacacatccaatcgttcacctcc

SEQ ID NO: 889223 - DNA, 120 bp, Artificial Sequence
  ENSG00000255248_91 (sequence is synthesized)
atagcatcaagaaactaatgcaaaactgcagagatctttccgtgagataattgaatataaaatcatgattgctttttacaaatttggattcatcccaaatccattgttcttcaaaggcag

SEQ ID NO: 889224 - DNA, 120 bp, Artificial Sequence
  ENSG00000255248_92 (sequence is synthesized)
gaaaagtgatcagagaaaaggtggacggtaacaacacttcaccttgagctgttagaataccagcatttagcataactgatatttgttgcaattaagccatgctacgttgagtgcaaatgg

SEQ ID NO: 889225 - DNA, 120 bp, Artificial Sequence
  ENSG00000255248_93 (sequence is synthesized)
gcaactacaatgaggaccactggacttctgaagttcaagttctattctgtctgaagacaatttccctgccagaggtcaaactttagcacacacatgccaacacagaagtcatagtcctgc

SEQ ID NO: 889226 - DNA, 120 bp, Artificial Sequence
  ENSG00000255248_94 (sequence is synthesized)
attacagtatgcatttggaaattgccttgtgaaaccgtcagaatacagaaaacacaaagtttaaacgttttggatgccttctgtaaggtaaagcagtacctcagcagtgaatcaggaaga

SEQ ID NO: 889227 - DNA, 120 bp, Artificial Sequence
  ENSG00000255248_95 (sequence is synthesized)
agtgctgagtcactctcaaacttcacagcattccacgacagctcatccttcttgactttcctttttttttcccttttcctttttccttttttaagttctcttaatattttttattcccaa

SEQ ID NO: 889228 - DNA, 120 bp, Artificial Sequence
  ENSG00000255248_96 (sequence is synthesized)
gccttccattagtaaagggacaatgaagggaaggcgaaccccgcgtccaaaacatggccaatgaaaggacactggaatggaagccaggaatcctgctgtggtggagaggcatagactcat

SEQ ID NO: 889229 - DNA, 120 bp, Artificial Sequence
  ENSG00000255248_97 (sequence is synthesized)
gagtccaccacaatcggatacttgcttctttttaacagccctatcagccgagagaaataatgactcctgaatcatttgacagtaaaaaagttaaaatgatgtctcaatggcgctgcatca

SEQ ID NO: 889230 - DNA, 120 bp, Artificial Sequence
  ENSG00000255248_98 (sequence is synthesized)
gatctagagtatctcctcgaggaagtacaactgtctgttttcactaaggtggggagcagtatgtgtccagagctctagagggaccgaaaggccaagtgtccacggtggcaagagaatcca

SEQ ID NO: 889231 - DNA, 120 bp, Artificial Sequence
  ENSG00000255248_99 (sequence is synthesized)
aagcatgctcagtgtaaattctcctggagcctgtcaagctatgtttgaactcgttccaggatagtggatttacttttttttccccaccaggaagaatactcgattagactgcattttgcc

SEQ ID NO: 889232 - DNA, 120 bp, Artificial Sequence
  ENSG00000255248_100 (sequence is synthesized)
cggagtgggttagctgtgagttcttagcatctgtgttcttggatcccacagcctttggatcaggaggagtgaagatcccggtgttacacatccaatcgttcacctccttccaagactatg

SEQ ID NO: 889233 - DNA, 68 bp, Artificial Sequence
  ENSG00000255248_101 (sequence is synthesized)
aatcacagcataagcacgtgttccaaaggccatcctccagcagagatttcggcagtggtacctgttgg

SEQ ID NO: 889234 - DNA, 120 bp, Artificial Sequence
  ENSG00000255248_102 (sequence is synthesized)
ctgaatacaacatctttgcgtctttttcttcaccctccccacatgcttgcatctcccagactcctagggttaatccccaggacaaccttgctttgaaagaaaaaatgtggtgagcctact

SEQ ID NO: 889235 - DNA, 120 bp, Artificial Sequence
  ENSG00000255248_103 (sequence is synthesized)
tgaagatttggattccaagaggcctctgtctgtcctgcctcagccagagccagacagccagctcaaggagatgggcaatttacagagaaagcagcattgtgttgatgttcctttcagctg

SEQ ID NO: 889236 - DNA, 120 bp, Artificial Sequence
  ENSG00000255248_104 (sequence is synthesized)
atagaccagccggtgctgatggggtccgggacttgacgatggcgcctgctcgttcctgttgtgttctatctgaggcatgattttctttcgtttttgggaggtagagagcacggggcagag

SEQ ID NO: 889237 - DNA, 120 bp, Artificial Sequence
  ENSG00000255248_105 (sequence is synthesized)
gttgcacctgacacattagaactccgttgtcactgctgtggctgttattcccctcggcaagagccaaggagcaaacaggacgtgaagatcccggtgttacacatccaatcgttcacctcc

SEQ ID NO: 889238 - DNA, 120 bp, Artificial Sequence
  ENSG00000255248_106 (sequence is synthesized)
accttcactgctaagaggaactaagatctagagtatctcctcgaggaagtacaactggtaattaataagaagtccagtggctcacacctgcgatcccagcactttgggaggctgagatgg

SEQ ID NO: 889239 - DNA, 87 bp, Artificial Sequence
  ENSG00000255248_107 (sequence is synthesized)
atctctacaaaaatacaaaaattaaccagatgtgatggtttgtgggaggatcgcttgagcctaggaagtcaaggctgcagtgagtca

SEQ ID NO: 889240 - DNA, 120 bp, Artificial Sequence
  ENSG00000255248_108 (sequence is synthesized)
ggatcgcttgagcctaggaagtcaaggctgcagtgagtcatgattgctccgctccactgcactctggccttgatgatagagtgagaaccagtctcaaaaaaaaaaaggtcattttctaag

SEQ ID NO: 889241 - DNA, 120 bp, Artificial Sequence
  ENSG00000255248_109 (sequence is synthesized)
catttgttgattcaatactgcccactatgtacactgacaattagacataatttaatttcagctcatggtatgaatggagacaaaatgaaatcattttaatgcacattaaggcaatatagt

SEQ ID NO: 889242 - DNA, 120 bp, Artificial Sequence
  ENSG00000255248_110 (sequence is synthesized)
gcccttaaataaaaagttgaagttcataagggaccatcattaagatttaactttgtaacaaatattttgtttttgtttgttttatttttagatttgcataataaaacattcatattctta

SEQ ID NO: 889243 - DNA, 120 bp, Artificial Sequence
  ENSG00000255248_111 (sequence is synthesized)
taattgccttttcaattagtgggtgtacactgattttttttttccacacaaaaactatgtttttcatgtattggagtgatttcccaaacacagggaaaatatgtcttttggttaatttgc

SEQ ID NO: 889244 - DNA, 120 bp, Artificial Sequence
  ENSG00000255248_112 (sequence is synthesized)
atttgaaagaacttctttttgtatgaaaggttctttctctctaccacaaattatgtgttttttaaacaaatattgtggtgagctgatgtagccgtaatggtctgaatgtggatgtgttgt

SEQ ID NO: 889245 - DNA, 120 bp, Artificial Sequence
  ENSG00000255248_113 (sequence is synthesized)
tctgtgttatattaattcttggcttgggtaggtttggtgaaagttattgcttttgttgctgccagagatgaaagagagtttgttttgttgtggatgttgttttggaacttttggtgagct

SEQ ID NO: 889246 - DNA, 120 bp, Artificial Sequence
  ENSG00000255248_114 (sequence is synthesized)
ttgaggctgccttgggagccccttatagagaggagagccatctctttccacgtttaatgtgcatttttcaaaatattcaaatttaactctaagacgggagtatagctttttaagaatctg

SEQ ID NO: 889247 - DNA, 120 bp, Artificial Sequence
  ENSG00000255248_115 (sequence is synthesized)
tgtaggaatagagttttcttaaaaatgtagttttggagggaaatggtttatagaaaggtttgtaataaagaatttaaatcaagactgccatggtgaatataagcaaaaaatgcaaaaaaa

SEQ ID NO: 889248 - DNA, 120 bp, Artificial Sequence
  ENSG00000255248_116 (sequence is synthesized)
aggtctgggaagaggagaatggatacagctcggagtgggttagctgtgagttcttagcatctgtgttcttggatcccacagcctttggatcaggaggaggtcagtgaagatcccggtgtt

SEQ ID NO: 889249 - DNA, 120 bp, Artificial Sequence
  ENSG00000255248_117 (sequence is synthesized)
cttatgtgaggacactcatcatcctggcgttaatgtgcttctcttctatttggcatttgagtccaacactacctgatctcagtccttctttttagaatcaatatttccatagcaagtgta

SEQ ID NO: 889250 - DNA, 120 bp, Artificial Sequence
  ENSG00000255248_118 (sequence is synthesized)
gcatcatcttaaatggggaatcccactttttttttttaaagctagagatggcagtttggtgggattggccaaaaataatttgaagaaagaatgcactaagggtgaaaatgttatgtttat

SEQ ID NO: 889251 - DNA, 120 bp, Artificial Sequence
  ENSG00000255248_119 (sequence is synthesized)
aaaaatattatgaaagctaaatgtgatgcacttgaaaaatgtggcaggatatttcactgtatattcatgaaatctgtatctaaactatatcaataaatactattcaagagaatataaaaa

SEQ ID NO: 889252 - DNA, 120 bp, Artificial Sequence
  ENSG00000255248_120 (sequence is synthesized)
cgtctagaggccacaccttgttcagaattaatagatcatataggtgtaaatttattttcaactttcagttcttgtctggtggaagaaggtgggttatctgaaatgagacagagtaacacc

SEQ ID NO: 889253 - DNA, 120 bp, Artificial Sequence
  ENSG00000255248_121 (sequence is synthesized)
agatgaggttgtgtttgactcataatacacgggtggatgtgggtgaactgagcagctggtagatgtttgcggtgtgtttgtgtggttcattaatctattcgttcatctttacagcaatac

SEQ ID NO: 889254 - DNA, 120 bp, Artificial Sequence
  ENSG00000255248_122 (sequence is synthesized)
cacacttttccaatttctatactttttttgtttttatgatattgtaaatggtatgtttatagtttcatttttcaagttttgattgctagtatgcagtaaagcaattgacttttgtatgta

SEQ ID NO: 889255 - DNA, 120 bp, Artificial Sequence
  ENSG00000255248_123 (sequence is synthesized)
aacattgtattctgtgataatactaaatcagcttattaggatttttttaaagactccttagaattttctatatattatgtcaccagtaattcaaaagagttttgctcttttcttttcggt

SEQ ID NO: 889256 - DNA, 120 bp, Artificial Sequence
  ENSG00000255248_124 (sequence is synthesized)
ccttatgcattttgtttatttatattgtcctattttactggctggggacctctagtacaaggatgaataagagtgctaagaatggacatccttgctttgtttcctaagggaaaagcattc

SEQ ID NO: 889257 - DNA, 120 bp, Artificial Sequence
  ENSG00000255248_125 (sequence is synthesized)
ttcctaagggaaaagcattcagtattttataattaaatatagtattatttctatttgtaaaaaataagtggactttatcagattgagaaaattttcttttatatctaattttctggtggt

SEQ ID NO: 889258 - DNA, 81 bp, Artificial Sequence
  ENSG00000255248_126 (sequence is synthesized)
atacaatgtccttcagtgtccatatgagcatttcagtggagaagaaaagaaactttgctacctgggaactgaagactactt

SEQ ID NO: 889259 - DNA, 120 bp, Artificial Sequence
  ENSG00000255248_127 (sequence is synthesized)
tagatgctggctcctagggtgggcagattctggtcctgcaccaaccctgactggtgaccttcttgtccatcaacaccatgtgggtccaggtggcttctgtggtcccttcagctcaagctg

SEQ ID NO: 889260 - DNA, 63 bp, Artificial Sequence
  ENSG00000255248_128 (sequence is synthesized)
gcttcaaatgggaggccaatcaatgcagcattaggaaggcttcattcagctcagcaccacctt

SEQ ID NO: 889261 - DNA, 120 bp, Artificial Sequence
  ENSG00000255248_129 (sequence is synthesized)
caggctgatctcaaacccctgacctcaggggatccactgcctcggccccccaaagttctggaattacagtgaagatcccggtgttacacatccaatcgttcacctccttccaagactatg

SEQ ID NO: 889262 - DNA, 120 bp, Artificial Sequence
  ENSG00000255248_130 (sequence is synthesized)
gtttcctctagagaaaggaattcatggaaggagagatgggactgtacctggtggaagcacaatagggtggtggttaaggctgatatttgtaagccctctcacttgttgattgccagcctc

SEQ ID NO: 889263 - DNA, 120 bp, Artificial Sequence
  ENSG00000255248_131 (sequence is synthesized)
ttcctatcaccttctgaagacctttttatcagttccttactgagtttgtccagtattacctcttagtgtcccttggccagaggtttctcttagaaacatcagctgacagcttgaaagtct

SEQ ID NO: 889264 - DNA, 120 bp, Artificial Sequence
  ENSG00000255248_132 (sequence is synthesized)
cactctttttcctctatctgtcaaaattctatttattcttcgtggcccggtttaaataccaacttttcatgcagcctttctgggctgccctaaaatgccattcagaacacctactccgtg

SEQ ID NO: 889265 - DNA, 120 bp, Artificial Sequence
  ENSG00000255248_133 (sequence is synthesized)
ttcccactgcactcttagcaaccagtaaagcgcaattgtgttagagagagtgggcaaatctctctgtgcaatagcgataataatctgtctcttgtattagaccgtgagctctttgaggag

SEQ ID NO: 889266 - DNA, 120 bp, Artificial Sequence
  ENSG00000255248_134 (sequence is synthesized)
aggaactgcactgccctcagctttggatcctatatcttagtcacttgtgcctcctacattttaaaactacacaaatgaaattgcattgttttcatggaattgaatcctatgaagaaaaaa

SEQ ID NO: 889267 - DNA, 120 bp, Artificial Sequence
  ENSG00000255248_135 (sequence is synthesized)
gcaatgggtgtgaacttctaactcttttaaggtctggttggagctgacctaggagtatacaaccaaggaaagggctcaagcactctgacttccagctcaaatccttaccttcattataag

SEQ ID NO: 889268 - DNA, 120 bp, Artificial Sequence
  ENSG00000255248_136 (sequence is synthesized)
ctccctctggatcccagaggccctccatgactgaggaggtggctctggattcctcaaaactgaatttcagataactcacttgcaatatttggatgagtgccttgatgacatacactctag

SEQ ID NO: 889269 - DNA, 120 bp, Artificial Sequence
  ENSG00000255248_137 (sequence is synthesized)
agatcatgaggcaatgagaatatttcacttagcttattttttgccgtgtgcttatcaggacattcacatggctggagttagaaaagggtgtggaacctatatttggctaaatgcaatgaa

SEQ ID NO: 889270 - DNA, 120 bp, Artificial Sequence
  ENSG00000255248_138 (sequence is synthesized)
gaaattccttggctaaaaaagaaaacaatctttcctttcttaaaaagttaagttgatgtaaaaaaaaaatctttgcagtgcaagatagagtttctttttccttttctgtctgtcttgggg

SEQ ID NO: 889271 - DNA, 120 bp, Artificial Sequence
  ENSG00000255248_139 (sequence is synthesized)
gctttatctgattttaatcattattcaaattatatgatttgaaacagctgaagctgttttttttccttggggaaaaaaaaaagaaatctgcagttgcaactattgcagctatctacctac

SEQ ID NO: 889272 - DNA, 120 bp, Artificial Sequence
  ENSG00000255248_140 (sequence is synthesized)
cctactcccctcctccagggtagcatgggctgtcaagtgtaaatgttgaggattatgaattttacctttaaaatgcttcaatgccctgcagagttttctcagcaattttcaagtcttgtt

SEQ ID NO: 889273 - DNA, 120 bp, Artificial Sequence
  ENSG00000255248_141 (sequence is synthesized)
aaccataatacatctagttcttgattatccacaaaaaagggaaatgaatagtggcacagataatccaaaacagaaaaacattcaaaatgtttcttatattttactttggaatgctttgta

SEQ ID NO: 889274 - DNA, 120 bp, Artificial Sequence
  ENSG00000255248_142 (sequence is synthesized)
tggcttttgggggttccaattttcttcccagtgatgttctgctcaggaaaaagttaaaatgagtttgcattccctaagcccgcactgggggatgtggctcagccacatgctgggtggcag

SEQ ID NO: 889275 - DNA, 120 bp, Artificial Sequence
  ENSG00000255248_143 (sequence is synthesized)
ggagaaggcagcccaaaaaataagggaaaagaattccactgataatctagaagtggaactgctcctatgaataataaagggctgatcagaatataattcagttttataaattcatgtgga

SEQ ID NO: 889276 - DNA, 120 bp, Artificial Sequence
  ENSG00000255248_144 (sequence is synthesized)
caattttttggtccacattaaaaaaaatctagttatcctcttcagaagagttaaaactggtatcaaagagaactttggtatcaaaaataaatgacctcaagatcctttacttctcacagc

SEQ ID NO: 889277 - DNA, 120 bp, Artificial Sequence
  ENSG00000255248_145 (sequence is synthesized)
ccagtagcactggcactatgtgaaggagtcaggatctgttgctggggccaaggggactcagttctcagctaatgtactccagctccatccttcaaccttcttcagttgaacatgtgtaga

SEQ ID NO: 889278 - DNA, 120 bp, Artificial Sequence
  ENSG00000255248_146 (sequence is synthesized)
tttataaaatgccaggctatgtactactgtcccatctaccatggtagttacaattatcattcctattttacagatgagaaaactaaggctcatataggctcattattaatttaagttcac

SEQ ID NO: 889279 - DNA, 120 bp, Artificial Sequence
  ENSG00000255248_147 (sequence is synthesized)
tgttttcctggtttccctcattgttcttagaaagcaaattcaattaaatatttatgagctctgactactaggttgctcgtatgtatatatgtataatatgtatgtgtgtgtgtgtgtgtg

SEQ ID NO: 889280 - DNA, 120 bp, Artificial Sequence
  ENSG00000255248_148 (sequence is synthesized)
tgtgtatatatatatatatatatcatgatattgtgttgcaagaaaaaaatctaataatatttagatataatctctgccctccagagttttcagtttaaaatagaaaccagatgaatagaa

SEQ ID NO: 889281 - DNA, 120 bp, Artificial Sequence
  ENSG00000255248_149 (sequence is synthesized)
tagaatgagaaaccacgtgactatagagtaaggcagaatgagacaagtagatataagaaatggcagggcagggtcaaatcacatcaggatgggaacaaaaaacaggagatttcagaaaag

SEQ ID NO: 889282 - DNA, 120 bp, Artificial Sequence
  ENSG00000255248_150 (sequence is synthesized)
gctaatgaatgaatgaatggaagtcagtgggcaatttcaatttcaatatgctgcgtatgacgtgagtaaggaaccaagtgcacactgctattgagatgggccttaacaactggataccat

SEQ ID NO: 889283 - DNA, 120 bp, Artificial Sequence
  ENSG00000255248_151 (sequence is synthesized)
aagagagaaggaagccatttttaaaacccctcatgttttcatgttttagaaaattgaaatactcacctagtaatttggtataaaacaatgggcacatttttcagtaattttagtactgga

SEQ ID NO: 889284 - DNA, 120 bp, Artificial Sequence
  ENSG00000255248_152 (sequence is synthesized)
aggagaggaaaagaataggtaacaaaaacaaatttattagtccaaggccaccctattgctcaagtggatccctaaaaactcaggggtcctaactcctactccagtgatcagctgctagct

SEQ ID NO: 889285 - DNA, 120 bp, Artificial Sequence
  ENSG00000255248_153 (sequence is synthesized)
aggccagctttagggtatgacggtagcaccaaggccaagcttctgggaagccttagagtagcttctgggaagaaagtagggattccaggatgtttacaaaatataactcaaggattatgt

SEQ ID NO: 889286 - DNA, 120 bp, Artificial Sequence
  ENSG00000255248_154 (sequence is synthesized)
gtcttcaatttgttctggaagtttccacactcatcttagctaaatcacattccttttcccttgcagacttttttgtctgtccttgatttcttctttgacatcttctcttcccccattatc

SEQ ID NO: 889287 - DNA, 120 bp, Artificial Sequence
  ENSG00000255248_155 (sequence is synthesized)
ttttactctatcaaacctgattttaccccctgtataaaaatgcaaaagccatagtcgtttactcctacacacccttagcatttgctgggtgtttgtctctttggtctctcgagccttaga

SEQ ID NO: 889288 - DNA, 120 bp, Artificial Sequence
  ENSG00000255248_156 (sequence is synthesized)
agtgggaggtggggccagtctggcacagtctgtgggtttgaaaggagctgggcgggttggagaatgccagtcagcctttgtagttctgagctcagagagggggtgacacatactgggctt

SEQ ID NO: 889289 - DNA, 120 bp, Artificial Sequence
  ENSG00000255248_157 (sequence is synthesized)
gcatttatgaacttcctaatcgcataacatgtgtaaaactgcactagtgtttttattaggctcctacatatttttatgtgtcactgatgaagtgtttgaatgttttgcccagtctcattt

SEQ ID NO: 889290 - DNA, 120 bp, Artificial Sequence
  ENSG00000255248_158 (sequence is synthesized)
ttgtgctaaaccttatgatgtgacttttattgcatgattttatgtggcaatggcgatttttaggaatgcatatttcatattagggtagaattgactgtatcttgttgggatatgggttat

SEQ ID NO: 889291 - DNA, 120 bp, Artificial Sequence
  ENSG00000255248_159 (sequence is synthesized)
gtaagcaaattcaatagccaaatataatcatactgtaacccctaaaatctgcattttgcaacaggtaaatgataactcaataataattaaatcaatattaataatttctttctgcttaag

SEQ ID NO: 889292 - DNA, 120 bp, Artificial Sequence
  ENSG00000255248_160 (sequence is synthesized)
gtttacatcttaactgtatatttgcccatgattgcttatgcatttcattttacttctcggtgagtagcaaactactcacagttccctggatgtgccaagttctcttatggctcttagaac

SEQ ID NO: 889293 - DNA, 120 bp, Artificial Sequence
  ENSG00000255248_161 (sequence is synthesized)
tcaacgttacttttattaaattctcactttccgtctttgccagattaatttctactaatcatttagactttggttaaaatatcacttctttcaggaagtcttcctggctattatttcctc

SEQ ID NO: 889294 - DNA, 120 bp, Artificial Sequence
  ENSG00000255248_162 (sequence is synthesized)
ctcagtttggttaaatgcctcttatacgtgctctcacagcattttgtgcttagctttatcatagtttttgctacatttggaaggaattatttgtcattgcttttagatcccaactttcaa

SEQ ID NO: 889295 - DNA, 120 bp, Artificial Sequence
  ENSG00000255248_163 (sequence is synthesized)
gttaagagctatgcattttaatcccaaatctccatgcctaggtcagtgctggcatgaaacagactcacagagtaatattatctgaaaattatctaaataaattaatgaagatactatttc

SEQ ID NO: 889296 - DNA, 120 bp, Artificial Sequence
  ENSG00000255248_164 (sequence is synthesized)
ttgagctagtttattagtttcctatttctaattaacaaaaatgaacacaagtttagtggattaaaacaacagaaacttattatcttacagttctagaggtcagaattctgacatggatct

SEQ ID NO: 889297 - DNA, 120 bp, Artificial Sequence
  ENSG00000255248_165 (sequence is synthesized)
ttcttcaactaatgagataatcaagtgatttttcattattttatcctgccaatatgtttactaacattcattttattttgagtgttaaaacagctttggatttctggtataatcccacta

SEQ ID NO: 889298 - DNA, 120 bp, Artificial Sequence
  ENSG00000255248_166 (sequence is synthesized)
ggtcatgatgtattcgcctttttatgtattcctggatttgggctgatcatattttcttgaggacttctgtatctgtgttattgaaaggtattaatctgtacctttctttttttgtaatgt

SEQ ID NO: 889299 - DNA, 120 bp, Artificial Sequence
  ENSG00000255248_167 (sequence is synthesized)
atgtgaatggcttggtatcaagttaacactggcctcataaaatgaattgggaagtgttcctttcttttatatttttgaaagagtttaaatgcaatttgtattatttctttcttaattgat

SEQ ID NO: 889300 - DNA, 120 bp, Artificial Sequence
  ENSG00000255248_168 (sequence is synthesized)
tcctaatatgagacaagacatggcaaaaaaaagtgtcaaacaagagaatgagagtggccaaagaaacgaggtggtggtggctagacatgaaacaaagtacaagacataaaaacatttaag

SEQ ID NO: 889301 - DNA, 120 bp, Artificial Sequence
  ENSG00000255248_169 (sequence is synthesized)
tttgaaagagataaaatttggaaaagggagaactagcagtgtttaagattccgatgggggagggaaagccattgattgggcctttgaaaccatgccaggaaccaagagccaggggtagtg

SEQ ID NO: 889302 - DNA, 120 bp, Artificial Sequence
  ENSG00000255248_170 (sequence is synthesized)
ggcttcattcagctcagcaccaccttggcgactcagaaccaaaaccagcatgctttttataatttcaccatggatgcactagccatctccaaagagcagcaaaaaagcagtgctcacaag

SEQ ID NO: 889303 - DNA, 120 bp, Artificial Sequence
  ENSG00000255248_171 (sequence is synthesized)
atccagagccactccaaagaaagctggaagaaaaaagagacttggagatgaacaggaaaacaatagctgtccacagaagggaaaaggatcaataacaaatgaatatcttaaaaagttgag

SEQ ID NO: 889304 - DNA, 120 bp, Artificial Sequence
  ENSG00000255248_172 (sequence is synthesized)
ttacatcccaaaggaactgactctctgactggaaattaaactcatgcctcagcagtgaatgtgtggaatccttgacactagactgcaggctggatacccttccttgaagatcctgtgggg

SEQ ID NO: 889305 - DNA, 120 bp, Artificial Sequence
  ENSG00000255248_173 (sequence is synthesized)
gatccaaagcaggcagtttgaatgtacgaaggattttaacttagttttaactctgatttctgcttttttcaaatcctgccaaggaagtttttaaggctatatttctttcataggtactga

SEQ ID NO: 889306 - DNA, 120 bp, Artificial Sequence
  ENSG00000255248_174 (sequence is synthesized)
taagatagctgtttaggacaagagctctcttaagagttctcttttaaatctagccaatttatttattccatcagtgactcaagccaataagccttttccatggaaagtcccatgggtaat

SEQ ID NO: 889307 - DNA, 120 bp, Artificial Sequence
  ENSG00000255248_175 (sequence is synthesized)
tttccaggtttacaataccatggtcataagtggcattttaaaaatggatgcaaaagttgcacctccccagtgatacccgtctcacaaatttagtcccagaaataaactaagatagcaaaa

SEQ ID NO: 889308 - DNA, 120 bp, Artificial Sequence
  ENSG00000255248_176 (sequence is synthesized)
agacagagagacccagaccgagtctgcaggagaaaactggtcatgatgtcaaacgtggaggaaacaaccaataggcctagtgggatgctctctatttatcagcacagttactggaatcca

SEQ ID NO: 889309 - DNA, 120 bp, Artificial Sequence
  ENSG00000255248_177 (sequence is synthesized)
aacaaagaaactttccagaatgacaaccgtgctctgccactgaactgtaggtgagcatgtggtttgtgacgtattatttcattctgccatcataccagttgtgagatcttgcttgtgaaa

SEQ ID NO: 889310 - DNA, 120 bp, Artificial Sequence
  ENSG00000255248_178 (sequence is synthesized)
ctaagttaactccattttatggacaaagaaactgaggtgagagtagttaattgagcataaaataagtagcagagataggtatcgagtctagatctgttgaagcctagagcttgttttgcc

SEQ ID NO: 889311 - DNA, 120 bp, Artificial Sequence
  ENSG00000255248_179 (sequence is synthesized)
acgtcatattgtctcattgactcttccagcagtcctggcaagggagtccttaatttcagcaaaacaaatctcagaccaatttccactggactctattaaactccactacctttctgatgt

SEQ ID NO: 889312 - DNA, 120 bp, Artificial Sequence
  ENSG00000255248_180 (sequence is synthesized)
tggtggcagctctatactgaaccatacgtgaagattgaacttggaataaaataataaagctccatttgttaaaaaccacagctacttcatgagctgtttctccataagcaacatagacac

SEQ ID NO: 889313 - DNA, 120 bp, Artificial Sequence
  ENSG00000255248_181 (sequence is synthesized)
tacagtaataaagattaaaaaacaaaacaataataaccgtaagcaaaagaagctgtatgacactcaaatgaggaggaggaggaggaggatgacagtgatatctgccagggtgggttagta

SEQ ID NO: 889314 - DNA, 120 bp, Artificial Sequence
  ENSG00000255248_182 (sequence is synthesized)
taaatgagaccgtgttcctctggagaaagatactatttggacatacagtctgttttcactaaggtggggagcagtatgtgtccagagctctagagggaccgaaaggccaagtgtccacgg

SEQ ID NO: 889315 - DNA, 120 bp, Artificial Sequence
  ENSG00000255248_183 (sequence is synthesized)
tggcaagagaatccaggagactggaccatcaagtcttttactcagagactggagaccacgccttacctctcggaacagccctgtgtgaacctccgactttatgatacgttgtgattgtga

SEQ ID NO: 889316 - DNA, 120 bp, Artificial Sequence
  ENSG00000255248_184 (sequence is synthesized)
tacaggacttcccatgcagcgcgtaagccatgcaggcttattactcacaccacactcacctggacccagagacctccaggcactgaggactgcgtctcccggaagtatttccctgagaaa

SEQ ID NO: 889317 - DNA, 120 bp, Artificial Sequence
  ENSG00000255248_185 (sequence is synthesized)
ttgcagaggacctcagtcctgcaactcacacagaggctgttcttcgtggccggaaccggaccccacgccctctggggcacatccctgagtgcgagcactcttctctcgccctcctcccac

SEQ ID NO: 889318 - DNA, 120 bp, Artificial Sequence
  ENSG00000255248_186 (sequence is synthesized)
ttccttgaaatgtcttggatgaaaattgggttctgcacactggatctggctggttgattctgcctgcgaagactgaagttggctttgatgcctatagatgcactcacccttcgctcgggt

SEQ ID NO: 889319 - DNA, 120 bp, Artificial Sequence
  ENSG00000255248_187 (sequence is synthesized)
tccagaggccatgtggtgtatggggaaggcaatgtagatggtgggaaaatcacttgacttctcttgctcatctgtcaaatgaaactgttaccatccttccttcgtgcatccaaatataga

SEQ ID NO: 889320 - DNA, 120 bp, Artificial Sequence
  ENSG00000255248_188 (sequence is synthesized)
tgtaaggagcacatgtgattatactgcacacaccaacagttcctgactatccaagtgctgtataattataaggttttatagtcattattctgctgcatgtttcttactagtgatttaccc

SEQ ID NO: 889321 - DNA, 120 bp, Artificial Sequence
  ENSG00000255248_189 (sequence is synthesized)
gtattgcacaattaaaattatttgaaaagctgtctttccccagctgttaatatagtcccttactttttttcatttccaccaatcaactgataaatcaaatatttataaagatgctaaatt

SEQ ID NO: 889322 - DNA, 120 bp, Artificial Sequence
  ENSG00000255248_190 (sequence is synthesized)
tgtcatatacctactcaccatcaaaaagttagtatcctatgtaagtcacatgaatggatgcgcaatgtgtacatagactatttgtatttttctaaaaatactaaatacatatatacatcc

SEQ ID NO: 889323 - DNA, 120 bp, Artificial Sequence
  ENSG00000255248_191 (sequence is synthesized)
ttttttcgcccatgtgcctattccccttttaataaaaatatatgtaaatatgtatttgagcaagaaacataatacctacatccacacacacagcatcttcgcttagatagcagatttaat

SEQ ID NO: 889324 - DNA, 120 bp, Artificial Sequence
  ENSG00000255248_192 (sequence is synthesized)
gggggagaggaacaaacgcatcactctatcagcattgcagctatttcagagtccagaagtgaccacaatgcacaattcatgtggttaaaaaaatgatggatcaatttctgccctgttcct

SEQ ID NO: 889325 - DNA, 120 bp, Artificial Sequence
  ENSG00000255248_193 (sequence is synthesized)
agtaatgaatatcaatatcttgcctcttctagacagactgtcaacagcttcagatgtttttaaatgagtttttaaaaataaatttgcgaagtcaattattttgaatctcatctgaagcaa

SEQ ID NO: 889326 - DNA, 120 bp, Artificial Sequence
  ENSG00000255248_194 (sequence is synthesized)
attttttcccaagtaaaataattataaataatactaattatgagcaaatcattcagttactctcagtctggttcaacctttaggttaataaaccaatccattaaaattcatcttgctcaa

SEQ ID NO: 889327 - DNA, 120 bp, Artificial Sequence
  ENSG00000255248_195 (sequence is synthesized)
aggaccaatttgttaaaaaatgtagcgacctttcaccacaagtatgattgatattttctttaacaataatcagagctgtctttcccagaacagagtatggtcaagtgataggtatagaaa

SEQ ID NO: 889328 - DNA, 120 bp, Artificial Sequence
  ENSG00000255248_196 (sequence is synthesized)
actagggttcttttatacctctcttggtaatacttctcagataggtacagaatgatattgatgatgatgaagatggtggtgataatgtacaaaattaaaactctaatgttaaagagagta

SEQ ID NO: 889329 - DNA, 120 bp, Artificial Sequence
  ENSG00000255248_197 (sequence is synthesized)
ccttaaaaagatatttgaaagcctcaaggcaactgttcacaaaacccaactatattactcttcatgccacaaacagagtttagatattcccctctgcctctagtgtttcgttctcaccaa

SEQ ID NO: 889330 - DNA, 120 bp, Artificial Sequence
  ENSG00000255248_198 (sequence is synthesized)
aggagtagggcagagatttgcaaatgtgtcccatgggccaaatctggtccactacctgttataaataaagttttgttggaacaaagcccatccattcatttagatattgtctttggctgc

SEQ ID NO: 889331 - DNA, 120 bp, Artificial Sequence
  ENSG00000255248_199 (sequence is synthesized)
tttcctaatacagaggcagaatggagttgttacaacagacaccacatggtccacgaatcttaaaatgttattatcattctcttacaaaaagcgtctgccaacccctgtgttaggtaatga

SEQ ID NO: 889332 - DNA, 120 bp, Artificial Sequence
  ENSG00000255248_200 (sequence is synthesized)
aaaaaaaaaaacaattcatctttgaatttataacagtagctaatctttgaacagcactttagagtttacaaagtctgaccatgttatgttgtaataggtattattatcttcacttaactg

SEQ ID NO: 889333 - DNA, 68 bp, Artificial Sequence
  ENSG00000255248_201 (sequence is synthesized)
atgttatgttgtaataggtattattatcttcacttaactgatgaagaaattgccgacttttcttcttc

SEQ ID NO: 889334 - DNA, 65 bp, Artificial Sequence
  ENSG00000255248_202 (sequence is synthesized)
gaaagaatgtatagcgaatagaatgagctcagggaatttttccattcataacatttatcttacta

SEQ ID NO: 889335 - DNA, 120 bp, Artificial Sequence
  ENSG00000255248_203 (sequence is synthesized)
agctcagggaatttttccattcataacatttatcttactaatatttcagagtgaagtcaattttcagggtgaagacctcagtaaagaatatagtggtttcacatccaagaaaaattttgt

SEQ ID NO: 889336 - DNA, 120 bp, Artificial Sequence
  ENSG00000255248_204 (sequence is synthesized)
taggctgtggacactgtgtggaggtgacagtattagaactgctattggattgaggcttggtgagattagatgatccaggcagattcacatctcctcagccaattgcttaatttttcccca

SEQ ID NO: 889337 - DNA, 120 bp, Artificial Sequence
  ENSG00000255248_205 (sequence is synthesized)
tagagtgattccttttctgcccaccttcctatttttccaacttaatattaatgcaacttctacttcaccttcccatcatgcataggtgatttttttccttaaaattgatgtcataatatc

SEQ ID NO: 889338 - DNA, 120 bp, Artificial Sequence
  ENSG00000255248_206 (sequence is synthesized)
cttttgatcattataaacttggttataaaaggatttcacagtcaaagaattccagggaggggataagtattgagataggataaggaatattctttgagaaggtcccagagtaatggttca

SEQ ID NO: 889339 - DNA, 120 bp, Artificial Sequence
  ENSG00000255248_207 (sequence is synthesized)
atcacaaagtttcttccccttggcatgcagaatgaattcttcattcttgactcctttattagcctatcctattttatcccaactcagagtagcttagccatagctgttatcctaggtatt

SEQ ID NO: 889340 - DNA, 120 bp, Artificial Sequence
  ENSG00000255248_208 (sequence is synthesized)
taatgctccttcttcatgcatgtctcacattcctctcatgcatttctcattaagtcgtctttcaccccctccatctgtttgtgtaatgcttggtatgtgactgttgctgtgtaataatag

SEQ ID NO: 889341 - DNA, 120 bp, Artificial Sequence
  ENSG00000255248_209 (sequence is synthesized)
gccctaagtcatgtgactttaatttgtaaggtcagacaccatttttcctgcagagaattcatttttgtcctaaagctaactcttttacctcacgatgctactgtttctgatgaccaaaga

SEQ ID NO: 889342 - DNA, 120 bp, Artificial Sequence
  ENSG00000255248_210 (sequence is synthesized)
gtcacatcaggaatccataagctggattctgatcctgatattgtaattgacttgtcacaactccagtccagttgcttcagctctctgatcttcgatttatttatcagaaaattgtccttc

SEQ ID NO: 889343 - DNA, 120 bp, Artificial Sequence
  ENSG00000255248_211 (sequence is synthesized)
ctctctctcttttgcctcctcccctccttcttcccatctttccctccttctttcctctttctttccttcctctcttccttccttcctttttttccttctttttttgacagagtgcaggaa

SEQ ID NO: 889344 - DNA, 120 bp, Artificial Sequence
  ENSG00000255248_212 (sequence is synthesized)
tctagagtatctcctcgaggaagtacaactggtaagtccttaccagcgagtttaacgtttgtttctaaaatgtaccaaataacaacaaagatcccccaagcctggcaaacagtacccatg

SEQ ID NO: 889345 - DNA, 120 bp, Artificial Sequence
  ENSG00000237879_0 (sequence is synthesized)
cggaaaggcgcctgggctggtgacggtgtcaagtgtaggcaagaaatacggctgatcaagaagcgacttcacctccctcgcacaacactgagtccctttgcggcaggggccctccccgcc

SEQ ID NO: 889346 - DNA, 120 bp, Artificial Sequence
  ENSG00000237879_1 (sequence is synthesized)
gcgaaccctacttggaaccttgcgccatgcgatgtctctctcattctaggccacggaagccctgggtcaccctttcagcctggttctctccggtggtgctggcttgtttctcctgtctgt

SEQ ID NO: 889347 - DNA, 120 bp, Artificial Sequence
  ENSG00000237879_2 (sequence is synthesized)
tggggtcagctgcgtccagcctcggctcctgcaggattgcccgggcaacccagaggagatgggcgggcgtggaggtcctccctggatgacccttcccaccatttcaacatcattaggaat

SEQ ID NO: 889348 - DNA, 120 bp, Artificial Sequence
  ENSG00000237879_3 (sequence is synthesized)
cttcaccttctcccaaaggctctggaagttttacagacagcatctttctagcctcgccctgcgtctctttctagtcatttgactgaggctgaacaaagcccagatgggagtttcattccc

SEQ ID NO: 889349 - DNA, 120 bp, Artificial Sequence
  ENSG00000237879_4 (sequence is synthesized)
ttcacctcccccaactcccagctgaaggaggctggccccagacacaggacacagcttcctgaccctgcgggcaggagcctggcttgttggtgacgggcaggagcctggcttgttggtgag

SEQ ID NO: 889350 - DNA, 120 bp, Artificial Sequence
  ENSG00000237879_5 (sequence is synthesized)
tgggcctcctcattgctgctggagttttccatcctcattccacaacaagccaagtcagcaagttgctgccaggaaccttcacaccttgtgctttgggatctgaggggaaacacacacacc

SEQ ID NO: 889351 - DNA, 120 bp, Artificial Sequence
  ENSG00000237879_6 (sequence is synthesized)
ggcaccaccctccctgagcccgggaatgaagccagcatcagcggagagcaacctactgaggaaaatgatggagtaattccctgggcacacttcaggcgtggtgccaggtaacaggccctg

SEQ ID NO: 889352 - DNA, 120 bp, Artificial Sequence
  ENSG00000237870_0 (sequence is synthesized)
caatctctatctgtgaacctgtagtcaattcagagttccccagactggcgttctgttacagagggagtttagattcaacttcagatgagaaaaatgaggatctgacatgaaaagtgactt

SEQ ID NO: 889353 - DNA, 120 bp, Artificial Sequence
  ENSG00000237870_1 (sequence is synthesized)
gcagtaggtgcaaactagtgtccagggctctggcctccacctctggtcaactttcaccaccccatgttatgctaacccctggcattctgtttgtgcacaaccaagtctttaatttgtcct

SEQ ID NO: 889354 - DNA, 120 bp, Artificial Sequence
  ENSG00000237870_2 (sequence is synthesized)
gtttccttgggtgttgaaacccaagtcccatcccctgaggaaccaacaacattgaatacgaatatggccatgaactgattggccaaatctactctgacctgtgctcccaaggtgaatgac

SEQ ID NO: 889355 - DNA, 120 bp, Artificial Sequence
  ENSG00000237870_3 (sequence is synthesized)
cttgttggggttgactaagtcttttccagggaggtcaacatcacctcagctatttcaaaacagagctaaagttccagtccagggaatggctgattcttcaggtgtgtttctgtgtgcaca

SEQ ID NO: 889356 - DNA, 120 bp, Artificial Sequence
  ENSG00000237870_4 (sequence is synthesized)
acttgttctttcaacaacctccccatgagtttctggaatgtgaagactacttttgtctgaagaaaccactggcctacatatttttgttatacacacatgaaaaaattgttacaagaggta

SEQ ID NO: 889357 - DNA, 120 bp, Artificial Sequence
  ENSG00000237870_5 (sequence is synthesized)
agtaaacacttttgagtatatagactcttgctgcatgatcccactgtcaatctctatctgtgaacctgtagtcaattcagagttccccagactggcgttctgttacagagggagtttaga

SEQ ID NO: 889358 - DNA, 120 bp, Artificial Sequence
  ENSG00000237870_6 (sequence is synthesized)
ttcaacttcagttgcttttggcatctttgtggtaaaatatttgccaccagacctgccttacaagaggtcccagaaggagtgctaaatataacctgccttacaggaggttgccaagggagt

SEQ ID NO: 889359 - DNA, 120 bp, Artificial Sequence
  ENSG00000237870_7 (sequence is synthesized)
taacctgccttacaggaggttgccaagggagtactaaatatagaaaggaaagactgttaccagccactacaaaaacacactttaagtacatggaccagtgacactataaagcaaccacac

SEQ ID NO: 889360 - DNA, 120 bp, Artificial Sequence
  ENSG00000237870_8 (sequence is synthesized)
tgatgacaggatcaaatctgcatatgtaaaaactagccttgaatataaatgggctaaatgcccaattaacactgagtaggcagttggttaaagaagcaagactcaacagtatgctgtctt

SEQ ID NO: 889361 - DNA, 120 bp, Artificial Sequence
  ENSG00000237870_9 (sequence is synthesized)
caaaagacccatcttatatgcaatgatgtccataggctcaaagtaaaagaatggagaaaaatctaccaagcaaacagaaaacagaaaaaaggaggagttgctaatctaatttcagacaaa

SEQ ID NO: 889362 - DNA, 120 bp, Artificial Sequence
  ENSG00000237870_10 (sequence is synthesized)
acagactttaagccaacaaagatcaaaaaagacacagaagggcattacataatggcgaaagcctcaattcaacaagctgacctaacaatcctaaatatatatgtatccaacacaagaaca

SEQ ID NO: 889363 - DNA, 120 bp, Artificial Sequence
  ENSG00000237870_11 (sequence is synthesized)
cccagattataaagcaagttcttagagacctatgaaatgacttagataatcgcacaataatagtgggagaattcaaacaccccactgacaatattagattattgaggcagaaaactaaca

SEQ ID NO: 889364 - DNA, 120 bp, Artificial Sequence
  ENSG00000237870_12 (sequence is synthesized)
aagatattcgggacctgaactcaatgcttgaccagatggatctaacagatatcgacagaactctctacccaaaaacgattgaatatacgttcttctcatctgcacatggcacatactcta

SEQ ID NO: 889365 - DNA, 120 bp, Artificial Sequence
  ENSG00000237870_13 (sequence is synthesized)
aataaaacaaaaaaaaaaactgaaattataccaaccatacccttggaccacagggcaataaaagtagaaatcaagactaagaatatcactcaaaaccacacaattacatggaaattaaac

SEQ ID NO: 889366 - DNA, 120 bp, Artificial Sequence
  ENSG00000237870_14 (sequence is synthesized)
aacctgctcttgaatgacttttgggtaaacaatgaaattagggcagaaatcaagaaattctttgaaaccaaagcaaacaaagctacaatataccagaatctctgggacatagctaaagca

SEQ ID NO: 889367 - DNA, 120 bp, Artificial Sequence
  ENSG00000237870_15 (sequence is synthesized)
aagtttatagcactaaatgcccacaacaaaaagaaagatctcaaattaagaacttaacatcacaaaccaaccccaaagctagcagaagacaagacataaccaaaatcagagctaaactga

SEQ ID NO: 889368 - DNA, 120 bp, Artificial Sequence
  ENSG00000237870_16 (sequence is synthesized)
gagctaaactgaaggaagttgagatgtgaaaaaccatacaaaagactaatgaatccaggagttgagtctttgaaagaattaatgatatacctctagctagactaataaaaaaagagagaa

SEQ ID NO: 889369 - DNA, 120 bp, Artificial Sequence
  ENSG00000237870_17 (sequence is synthesized)
gttccaaataaatacaatcagaaatgacaaagggaatattaccaccaactccacagaaatacaaactctcagaaactgctgtgaacacctctatgcactcaagctagaaaacctaaaaga

SEQ ID NO: 889370 - DNA, 120 bp, Artificial Sequence
  ENSG00000237870_18 (sequence is synthesized)
aatgatacattcctggaaatatacaacctcccaagattgaaccaggaagaaactgaatccctgaacagagaatatctcttgtaaagatgtcttcaaaatctcaaactccagtgctccttc

SEQ ID NO: 889371 - DNA, 120 bp, Artificial Sequence
  ENSG00000237870_19 (sequence is synthesized)
ttttaagaactccaggcgtgtcttaccagtaatgtccccctggagatgatactgacattttgaaaaacattcctcaaacagaaatcaccatcttcctctttcaaatcctgttcctctcta

SEQ ID NO: 889372 - DNA, 120 bp, Artificial Sequence
  ENSG00000237870_20 (sequence is synthesized)
gcctgtgctctccatatgctcatccattactgaagctagaaactgaataattgtcattgattcatatttagtacctgttggctttgcttcttaagataaattccaaatggggttgctgaa

SEQ ID NO: 889373 - DNA, 120 bp, Artificial Sequence
  ENSG00000237877_0 (sequence is synthesized)
agattcttcttggtttctctctggaacattccttcttcctgggttaggcaggaccccttcaggaatgaggtgttatgatctatcagtataaactgagagagaagactgcccaagttctgg

SEQ ID NO: 889374 - DNA, 87 bp, Artificial Sequence
  ENSG00000237877_1 (sequence is synthesized)
tatcagtataaactgagagagaagactgcccaagttctggcctatagacagaagacttctaacagtgaaggacatgtttgcttccct

SEQ ID NO: 889375 - DNA, 120 bp, Artificial Sequence
  ENSG00000237877_2 (sequence is synthesized)
atataaggacaagccattctcagtcaagcatgaaactgaatctgagcaggaaaagaagaaagctgaaaacacactgaggattatgggagaggggcaagtgcatgaagcttctcaatgaca

SEQ ID NO: 889376 - DNA, 120 bp, Artificial Sequence
  ENSG00000237877_3 (sequence is synthesized)
gaaatttgaacacagattttgagcttccaaatcaggagaaaaagaagtgttctataagaagtttggacaagactctgcaagaagttaagaggtccttaaaggcaactgtgaattaacgga

SEQ ID NO: 889377 - DNA, 120 bp, Artificial Sequence
  ENSG00000237877_4 (sequence is synthesized)
gactagttttgagaaaatcagtcctgatttgtttctcctggagttttcttctttatgtgatccttcataaaagctgctaatatgggaaagattgaaatcagcaagtttctggctgtaagc

SEQ ID NO: 889378 - DNA, 120 bp, Artificial Sequence
  ENSG00000237877_5 (sequence is synthesized)
taaaagaggctcttgaatcatatttccgcctgcttagcaaatttctcttgcgacaattggatgttatttggggttccatactagcaggaagaagtacaagcaaagctaagtcattttgag

SEQ ID NO: 889379 - DNA, 120 bp, Artificial Sequence
  ENSG00000237877_6 (sequence is synthesized)
aataaatattatctctctatatatttgtaaatgttattttctttttttttgaggtttatgattgatccttggcatgtgtccccttgtgtattgctctactaaaaatagcctaaaaaagaa

SEQ ID NO: 889380 - DNA, 120 bp, Artificial Sequence
  ENSG00000237877_7 (sequence is synthesized)
agattcttcttggtttctctctggaacattccttcttcctgggttaggcaggaccccttcaggaatgaggtgttatgatctatcaggtgaaggacatgtttgcttccctttccaccatga

SEQ ID NO: 889381 - DNA, 120 bp, Artificial Sequence
  ENSG00000237877_8 (sequence is synthesized)
tagttacaattctactttctccttcacttgagtatcagtcttcagagaactaccataacaaaggagtggatacagatatacgcaaaaaagtctatgagaaaattagtacattaaatttgt

SEQ ID NO: 889382 - DNA, 120 bp, Artificial Sequence
  ENSG00000237877_9 (sequence is synthesized)
gaaagctcatttaaagtaattttctactaacaattttaatcaaatgtattaatcatatttctatgcttagtgatgttaaataaaaatttaaaaggtggcaatcaataaacagagataaaa

SEQ ID NO: 889383 - DNA, 120 bp, Artificial Sequence
  ENSG00000237877_10 (sequence is synthesized)
gcaaagatgaagatggaattctctgtcatccatgaagcacagtttttaaagtatctagtgtatataaggacaagccattctcagtcaagcatgaaactgaatctgaggaaaagaagaaag

SEQ ID NO: 889384 - DNA, 120 bp, Artificial Sequence
  ENSG00000237877_11 (sequence is synthesized)
agattttgagcttccaaatcagcagctacacagggatattcatccaagcagaaagataataccagagttccgaactggaggctgaatagcaaaaggaagaaaagcacttcacataaaata

SEQ ID NO: 889385 - DNA, 120 bp, Artificial Sequence
  ENSG00000237877_12 (sequence is synthesized)
gacaggcatgctttcaggactaactaagcatgactgctgttaaactggctcactccatatactctgtgctacagcaatttaatatttcattaaaaagcattaatgatggctccagtgaat

SEQ ID NO: 889386 - DNA, 120 bp, Artificial Sequence
  ENSG00000237877_13 (sequence is synthesized)
ttctcctattcaagctccataatgacagcagttcaagcgagtgttgatctctgagtgatgcaacacaaaaacatcgcctaacaaaggaacacttggagtactactcatattctctgcaac

SEQ ID NO: 889387 - DNA, 120 bp, Artificial Sequence
  ENSG00000237877_14 (sequence is synthesized)
gagagtaaagagaagtatctgagacgaatgataattcaattgaagtaattcagatgagaagtgacaagagcctgaacagaaatggaaagaaatgggaagttgtaagaggcactgaaatgg

SEQ ID NO: 889388 - DNA, 120 bp, Artificial Sequence
  ENSG00000237877_15 (sequence is synthesized)
tgtcttactgatgtacgaggccatgattgacaactttgagactttgctggaagcgacaaaagtatatctataatattatgctgaattgcataggtctttcttcttaaatgaggctagaaa

SEQ ID NO: 889389 - DNA, 120 bp, Artificial Sequence
  ENSG00000237877_16 (sequence is synthesized)
taacataccaccaagtgtttggcttttaggaaattgagcattttctttagttctagctgcagtttaatttcctcagaattagacattatgcggtatctggaacgttaaaaaaaaaaaaaa

SEQ ID NO: 889390 - DNA, 85 bp, Artificial Sequence
  ENSG00000237877_17 (sequence is synthesized)
ctactcagatgaaaactacttgcatgaaagaattgagacaacaagatgaattagaggagcagcacagtttttaaagtatctagtg

SEQ ID NO: 889391 - DNA, 120 bp, Artificial Sequence
  ENSG00000237877_18 (sequence is synthesized)
atgttgagatgattgagccacaagtttgaaactgccaggacttctgagtcaccacatggaaaactgctcgtctgcagagttataaaatttggctaggacttcatgtgaaggacatgtttg

SEQ ID NO: 889392 - DNA, 120 bp, Artificial Sequence
  ENSG00000237877_19 (sequence is synthesized)
accatagagtgatgtgcctttgagcaacaacaagtattgaattataatctatgtagatatatgctaagaagaataaatacagagtactatgacagcataatttaattaattattaaggta

SEQ ID NO: 889393 - DNA, 120 bp, Artificial Sequence
  ENSG00000237877_20 (sequence is synthesized)
tcattgaggaaacaaaatatgagacttgaataggaattatccaattattcaagaaaggttggggtgggcagaacatatttttggtgtctttggtaggagcagttttgatataatggcaaa

SEQ ID NO: 889394 - DNA, 120 bp, Artificial Sequence
  ENSG00000237877_21 (sequence is synthesized)
ggtagaagccagatggagagtcagttcagattcaacatgggcttaggagataaagtagcatatataaagattcttcccaataaatttgacttgaaatgaaaaagaaaatattatagcata

SEQ ID NO: 889395 - DNA, 120 bp, Artificial Sequence
  ENSG00000237877_22 (sequence is synthesized)
tggaaagtaatttgggattcaaggagagatttatttttctttaatatgggagatgccagagaatgtttgaatactcacgtacaacaatgtgtagaaagggaagatatagtcaatggatgt

SEQ ID NO: 889396 - DNA, 120 bp, Artificial Sequence
  ENSG00000237877_23 (sequence is synthesized)
gactaaaaaatgagtaagataggatcccaaatacaataagagtgctaggattatagaagaagggaaaccaaactctgacatccattataacaagagtgaataaagagagtattggtgact

SEQ ID NO: 889397 - DNA, 120 bp, Artificial Sequence
  ENSG00000237877_24 (sequence is synthesized)
gttcaggttaagtttacagtttggtgatgagatgagttgagttcttatctgatggcttcaagattttacaaaatagtaattgaggtcatcagctaaaaagtgtgatgaaaagatgaaggg

SEQ ID NO: 889398 - DNA, 120 bp, Artificial Sequence
  ENSG00000237877_25 (sequence is synthesized)
gtcattgatataaatattttagcaccatatgaaaatagagtaagattgatggacattgttgactactcaattaatactgttaggaatatataatgccaatctatgtgattttatctaaca

SEQ ID NO: 889399 - DNA, 120 bp, Artificial Sequence
  ENSG00000237877_26 (sequence is synthesized)
accctcaattggcaggatgtaagctcaaaggaaattagtagggtcttgaccaacatgcgagaagggatggagagagggacatagaaattaaagacattgataacaaaatgattttaatga

SEQ ID NO: 889400 - DNA, 120 bp, Artificial Sequence
  ENSG00000237877_27 (sequence is synthesized)
atgttgagatgattgagccacaagtttgaaactgccaggacttctgagtcaccacatggaaaactgctcgtctgcagagttataaaatttggctaggacttcatcacagtttttaaagta

SEQ ID NO: 889401 - DNA, 71 bp, Artificial Sequence
  ENSG00000237877_28 (sequence is synthesized)
aggcaggaccccttcaggaatgaggtgttatgatctatcaggtgaaggacatgtttgcttccctaagatga

SEQ ID NO: 889402 - DNA, 120 bp, Artificial Sequence
  ENSG00000237877_29 (sequence is synthesized)
tatgtgagcctgaactctaagccatctctttgagatttatgcatttctgtggacatttaccagattttatctatataacagaaaaagaacaaaggatcttgttgagaggtgaagccagct

SEQ ID NO: 889403 - DNA, 120 bp, Artificial Sequence
  ENSG00000237877_30 (sequence is synthesized)
tctaatttatactcaataaatgaattgctgtagtaggtacgtcacatttatattatatatcaataatagattaaacaattgctataaagcttgctctttcaaaagagtttctaaaggcaa

SEQ ID NO: 889404 - DNA, 120 bp, Artificial Sequence
  ENSG00000237877_31 (sequence is synthesized)
cacatctctgtttatgcttttaactttaaaagaaagtcaaaagttactccgtgagaaaatatcttgttgctttagaaacatatgattacctatctgatgaaacaataaatatttattaaa

SEQ ID NO: 889405 - DNA, 120 bp, Artificial Sequence
  ENSG00000237874_0 (sequence is synthesized)
tctctgggcacagccctggaacccccatcagtgaactgcactctgacaatttggagcccagctttcagccttaagggactggactggatattccctgtttcacccgaaatcaactttaaa

SEQ ID NO: 889406 - DNA, 120 bp, Artificial Sequence
  ENSG00000237874_1 (sequence is synthesized)
aattttgaaagcaacaaaattattttttatgaagaagaaaagtctccactgcattcttcacaaaataattcctagtatttcttaatgactattaaaaaaatctaactacttatattacaa

SEQ ID NO: 889407 - DNA, 120 bp, Artificial Sequence
  ENSG00000275024_0 (sequence is synthesized)
cagctcctgggatggcctcacctgaggagactcttgggccttggcagaaacattccctaaagttctccaaataaggcttcttccaacaagatcccaccctgggctgcccacacaggggca

SEQ ID NO: 889408 - DNA, 120 bp, Artificial Sequence
  ENSG00000275024_1 (sequence is synthesized)
ggccaatcaggtgctcctctagggcagggtcttccctggggtaaaatggagtacacgccaagtcaattcagagctcatggagttgctgaaataaaggttgccaaggctgggcgtggtagc

SEQ ID NO: 889409 - DNA, 120 bp, Artificial Sequence
  ENSG00000275024_2 (sequence is synthesized)
gtttaagaccagcccgggcaacatagtgagaccccatctataaaaaaaaatcttaaaaattagccggccacggtggtgcgtgtctgtagtcccaactacttaggaggctgaaatgggagg

SEQ ID NO: 889410 - DNA, 90 bp, Artificial Sequence
  ENSG00000275024_3 (sequence is synthesized)
caactacttctggaagtttgaggctgcaccaagccatgattctgccactgtactccatcctggtgacagagcaagaccttgtctcaaaaa

SEQ ID NO: 889411 - DNA, 120 bp, Artificial Sequence
  ENSG00000275025_0 (sequence is synthesized)
cttccttttagctctcagcttgcctaggtaccctgtaaggtccagtgacaagtcacctcctctgcatgtccatagcaactgccccacaacgtgtcattcaacaaacattcatggtgcacc

SEQ ID NO: 889412 - DNA, 120 bp, Artificial Sequence
  ENSG00000275025_1 (sequence is synthesized)
tccatgcatagaaaacagcgctggaaaggcaccactacatctgacgaaactgaactgtgttcggttagggggtggaggggagtggttggcattttcttctatctactattgtgcattttg

SEQ ID NO: 889413 - DNA, 120 bp, Artificial Sequence
  ENSG00000275025_2 (sequence is synthesized)
caagtgtcaagtgaacctgttacacttccacaatgagggaaaaatatcagtgttcttttaaaataatgtttggattcctaatttaaataaaacgaactctttggcagctccctgctccta

SEQ ID NO: 889414 - DNA, 120 bp, Artificial Sequence
  ENSG00000230479_0 (sequence is synthesized)
ggcttccctgctcagaggcagggaattgtgcagctggagtttcattttccaagctgcagctgtgggtgattcggatggtctgttggtggaatgtggagctggacgggtcaaggagcacag

SEQ ID NO: 889415 - DNA, 120 bp, Artificial Sequence
  ENSG00000230479_1 (sequence is synthesized)
tgtggaaagagggacaatttgctacaagttggagataagagacatggcatactgtgaaaccagtgctgacggaagaaggtgactttcttggaaggtcaagacacttgcttgacagcgatg

SEQ ID NO: 889416 - DNA, 120 bp, Artificial Sequence
  ENSG00000230479_2 (sequence is synthesized)
tccaggagggctagggagagttctgctggaagtgaaggcagcacctgagggtggctgagggaactggtcagggctgggaacgcctccagccctttgaggaatgattcgctgattaagaga

SEQ ID NO: 889417 - DNA, 120 bp, Artificial Sequence
  ENSG00000230479_3 (sequence is synthesized)
aaaagccagcaccctgagtggctccaaggtttggggaccctctcaaggcacaaatcccagttccttttcaattttgaaaatcgttgtgggcgattctggaattgagaagtgtgctgagag

SEQ ID NO: 889418 - DNA, 120 bp, Artificial Sequence
  ENSG00000230479_4 (sequence is synthesized)
ccatggatttaacatgacaagaatttccgccccttcgtcactgagcacaccgcaaatgctccagggccagggacttacttgggcttctgcgtgtcttccacagtgtgcatcaatccgccg

SEQ ID NO: 889419 - DNA, 120 bp, Artificial Sequence
  ENSG00000230479_5 (sequence is synthesized)
ggctctggttggtgtttaaaaaaaaagatgcagcgaaggaatctggtgtggacaaacgccctgggcatggaccaaaagcctggcccttgtgtccctggcaatgggacggtgaaggacaga

SEQ ID NO: 889420 - DNA, 120 bp, Artificial Sequence
  ENSG00000230479_6 (sequence is synthesized)
aagacagcacatccagtagtgtcaggagcttggagcaggcattcggaagcatctgttaaatgttattgatggaggattgacataacccacatctgcatagcttttttggtctgtttttgg

SEQ ID NO: 889421 - DNA, 120 bp, Artificial Sequence
  ENSG00000271917_0 (sequence is synthesized)
tgtttttccattcccaagaaaatgcaagattgtgttttggggaagattctcaactgtgagatgacagcgtatgctatgttcctttcattgcaattggtgttttatagcatcctgcccagc

SEQ ID NO: 889422 - DNA, 120 bp, Artificial Sequence
  ENSG00000271917_1 (sequence is synthesized)
ctggcccgcatttggccccgtagccatgctgtcctcaggctaggatctggttagttgttccagactcaagttggtccctccttctgctctgtggagaaaaatcacaacctcaaagggata

SEQ ID NO: 889423 - DNA, 120 bp, Artificial Sequence
  ENSG00000271917_2 (sequence is synthesized)
ggtttttttttttatggttgctcctgaaagtggcatggtccctctagatgtcagcaaatattaaggcaattaaataaggcaaattaattatgggaaacattagcattgatttctgaagac

SEQ ID NO: 889424 - DNA, 120 bp, Artificial Sequence
  ENSG00000271917_3 (sequence is synthesized)
agtcttcttcttgctgagtctagcctcaccccttcttgccttttaggaagagttccatgttcttagacaagcttgttttcggataaaatattagacttttttcttagaaaatccctttgt

SEQ ID NO: 889425 - DNA, 120 bp, Artificial Sequence
  ENSG00000271917_4 (sequence is synthesized)
tttaaaattggtaatttttaaaaatcccaatctctggctacatttgagtttgaggaaattctttttcacatctctaaatatgtttcaatttgatagtattagtaaataagtaaataaaaa

SEQ ID NO: 889426 - DNA, 120 bp, Artificial Sequence
  ENSG00000271917_5 (sequence is synthesized)
tgccttattccacaaatgtttattgagatccttctaatttccagtaccaggaatacacacatcaataggacatggttcttatacttcataaagtcatagaaagcaaaaagaactggcagt

SEQ ID NO: 889427 - DNA, 120 bp, Artificial Sequence
  ENSG00000271917_6 (sequence is synthesized)
tggtgaatggccattgtaaggtgcatttacacacatataatcatactcctatcaactataaatatatgaattgcttataagcatgattgacatttgttattcttacatagattttgtgag

SEQ ID NO: 889428 - DNA, 120 bp, Artificial Sequence
  ENSG00000271917_7 (sequence is synthesized)
tgactagcaaaagctgttctttgcttctagaaccatgctgtcccaatataactttttgcattgatggaaatgttctattttagcactgtccaataagttagcctttagcaaaacatagct

SEQ ID NO: 889429 - DNA, 84 bp, Artificial Sequence
  ENSG00000271917_8 (sequence is synthesized)
tagcactgtccaataagttagcctttagcaaaacatagctattgagcacttgaaatatggctagctcgttatccgcatgttctc

SEQ ID NO: 889430 - DNA, 120 bp, Artificial Sequence
  ENSG00000271917_9 (sequence is synthesized)
atgggggaacaacacacactggggcctgttgaggggaagaggggagggagagcatcaggaagaatacctaataaatgctgggcttaatacctaggtgatgggtggagcaaaccaccatgg

SEQ ID NO: 889431 - DNA, 120 bp, Artificial Sequence
  ENSG00000271917_10 (sequence is synthesized)
cacacatttgcctatgtagcaaacctgcacttcctgcacatgtaccccagaactttaaataaaagttggaaattaaaaaaaaaaaaagtattgggcatgaggtccaaaagagaattggta

SEQ ID NO: 889432 - DNA, 120 bp, Artificial Sequence
  ENSG00000271917_11 (sequence is synthesized)
tcaactaagtaccgttaacatacaagatatgacaatgaagaattaatactgattagctgctagatacgaagatgcttacatataaacaagcacgtttttcaaaataaacatcttgaaact

SEQ ID NO: 889433 - DNA, 120 bp, Artificial Sequence
  ENSG00000271914_0 (sequence is synthesized)
cttaataaatatttgttgccttaatgaaacatactattttattcaggctgaggaatcattcataatttctccccatgtccctatgcttcagtaatacggttttttttaatcaaaataatt

SEQ ID NO: 889434 - DNA, 120 bp, Artificial Sequence
  ENSG00000271914_1 (sequence is synthesized)
cagttcccctcactgtgggactttggatcagtcacttgatctctctgggcttcaattttcttatctgaaaaattgagagaacagcatgtaccttacacagtttgtaaggttaggtaatat

SEQ ID NO: 889435 - DNA, 120 bp, Artificial Sequence
  ENSG00000271914_2 (sequence is synthesized)
acataaagcacagagaaaatcctccccaaatgttagtgaataacacaagtatttactatttaccattttaaagtacttaccatataatattaaacaataaatgtatgggactcaaaacca

SEQ ID NO: 889436 - DNA, 120 bp, Artificial Sequence
  ENSG00000230472_0 (sequence is synthesized)
tcttcttgaagtagatgagattcacttccttcctttaaatatgaggaagccaaggcaaggagaagaaaagtgaattaactaaggagagaaagctaagagcaaaggggacaccattaggat

SEQ ID NO: 889437 - DNA, 120 bp, Artificial Sequence
  ENSG00000230472_1 (sequence is synthesized)
tcaagccccaggctctactgagcattctacataatgtacagtatattgcatttaaaattttgcaaactcctgaattacaaaatacatttggctccatgtttgaggataggcaattctaga

SEQ ID NO: 889438 - DNA, 120 bp, Artificial Sequence
  ENSG00000230472_2 (sequence is synthesized)
tctacaaaagaaaaaatggacaaggcaaatcagaaagcaagcattattcacgaaagccaagatatggaaataacctaagtgtccatcaacggataaataaagaaaatgtgccacacgtat

SEQ ID NO: 889439 - DNA, 120 bp, Artificial Sequence
  ENSG00000230472_3 (sequence is synthesized)
atgttattctttctacgttgtaacctttgcaagtatagcatttgaagtttagttgccagtgatgtgtgtctcaattcttcttgaagtagatgagattcacttccttcctttaaatatgag

SEQ ID NO: 889440 - DNA, 120 bp, Artificial Sequence
  ENSG00000230472_4 (sequence is synthesized)
gaagccaaggcaaggagaagaaaagtgaattaactaaggagagaaagctaagagcaaagttccttgctgagtttaggataaagagacagacgaggaggaacccaattactaggggacacc

SEQ ID NO: 889441 - DNA, 120 bp, Artificial Sequence
  ENSG00000230472_5 (sequence is synthesized)
catctgcgattccgggagagctgacaggctaggagccagctgtagcttacacttgaaaataataataatatccacttaggggtatggaattatttatcaccactggtggaatttttgcca

SEQ ID NO: 889442 - DNA, 120 bp, Artificial Sequence
  ENSG00000230472_6 (sequence is synthesized)
aaggcaagaaatgaaaacatccgatgaaaaatgtcctcagtccacagcccattacactgacacaccgtacaaactgattaactctctggccaagaataaacagtactatagttactacta

SEQ ID NO: 889443 - DNA, 120 bp, Artificial Sequence
  ENSG00000271918_0 (sequence is synthesized)
aggcagcacccgggaacttctgataccaaactccgcgaacagtgacgcagaccccacgcttgcagaccacacgcttccgtacagacctcagctgccaggcgcactgtgagccccacaggt

SEQ ID NO: 889444 - DNA, 120 bp, Artificial Sequence
  ENSG00000271918_1 (sequence is synthesized)
ggaccaccgtgactgtagaggcgctacacggccccacgcactccgcagacgcagcgtcgcaacctcggcagcccaccccaccccaccccactcaaccgggcccgccgcggcgcccaggcg

SEQ ID NO: 889445 - DNA, 120 bp, Artificial Sequence
  ENSG00000271918_2 (sequence is synthesized)
gcaggcagcaaggacagccttgtgcgagcccgatctgggccttcctgggcgcggctaccgcaagagcttaacggatcagctacctggggctctcccgtaggatcagcgccgcggggaccg

SEQ ID NO: 889446 - DNA, 120 bp, Artificial Sequence
  ENSG00000271918_3 (sequence is synthesized)
ccatcttcggctttctcgcactgccgccgtctgttagctgcgccgaacccagccaatggcggccgcggcggacggaaagccggaaggcccaagccgcgcaggggccgttttagggctccg

SEQ ID NO: 889447 - DNA, 120 bp, Artificial Sequence
  ENSG00000271918_4 (sequence is synthesized)
ggtctcctgcgacccgggcgccgggagacttgtcccgcagtcctggagggcggagagggcagcccagttgccctcccgacactccaatcgtgttggagttaagtctgtgcatatatatgt

SEQ ID NO: 889448 - DNA, 120 bp, Artificial Sequence
  ENSG00000271918_5 (sequence is synthesized)
ctttatatttatatattatatatgtatgtacatacctggataggggtgtgtgtctgtatttaatagggcaggtttaagcaagtctatgtacagacctgtatagatatatgtgtgtatgtt

SEQ ID NO: 889449 - DNA, 120 bp, Artificial Sequence
  ENSG00000271918_6 (sequence is synthesized)
cccgtgtatacatacttggataaatggtgtgtgcgtgtgtatatttttttaatagggcgggtttaagtgagcctgtgtgtacatacttggataggtgatttgtgagtatttttttttcca

SEQ ID NO: 889450 - DNA, 120 bp, Artificial Sequence
  ENSG00000271918_7 (sequence is synthesized)
gcgtttgggctacagagaggcaggcatttgagcgagctcccccgagcctgcccaggaagcggcgcatcacccctcaggagaggtggtgcctccagttccaccctaagcactgtgccgtca

SEQ ID NO: 889451 - DNA, 120 bp, Artificial Sequence
  ENSG00000271918_8 (sequence is synthesized)
acccctcctgtatctgcatctgcagggcttgtagtatgtacgttcaattccttcagcaacgttcaatgaatgagtgcctactgtgtaccaagcactgttctaggcactggagatacaaaa

SEQ ID NO: 889452 - DNA, 120 bp, Artificial Sequence
  ENSG00000271918_9 (sequence is synthesized)
ggccaaaattcctgccctcagggtttgccggcagtctaaatggacaagtatttgttgcacccttctttagagtctgacagtgcagagtaggggagatgaatcgctgcagtgagtgatgtc

SEQ ID NO: 889453 - DNA, 120 bp, Artificial Sequence
  ENSG00000271918_10 (sequence is synthesized)
aaagacctcacccaagactagggagacaccatgtttgcataaataccttggtctgcctttgagaaaaacatggagtgagttaaaggaattcagatgtgggagcagtgaaaggcatccgag

SEQ ID NO: 889454 - DNA, 120 bp, Artificial Sequence
  ENSG00000271918_11 (sequence is synthesized)
gtaagatcaggaaaagctccctagggcaggtggcaaatgcggtgggtctgcagagatgtggagggtgaggctgtgtgtttcaggtcagtagagtagaagggcggtttgacgtttgaagaa

SEQ ID NO: 889455 - DNA, 120 bp, Artificial Sequence
  ENSG00000271918_12 (sequence is synthesized)
caggaatttagactagaaaaagcctttaatgactggttgtggcatgtgcacttaatctggtgagaaatgggtaagcattaaatgttttttctatccattaaatgttttgaaccaaagaaa

SEQ ID NO: 889456 - DNA, 120 bp, Artificial Sequence
  ENSG00000230471_0 (sequence is synthesized)
atgcagcttgtgaggaagcctttggtggtcatctttaacagctcagttccccagagaagctccctggaaaccaggaggctgacttcttcaccaactgcagaaccacctgaggccacgtgg

SEQ ID NO: 889457 - DNA, 120 bp, Artificial Sequence
  ENSG00000230471_1 (sequence is synthesized)
cagagccctgagtgccttgcctggctgtaagaggaatactttcatcaccaagcctaggagagtgcctttgtccatcgagggtccccattggggttaactggagcccttgcagatcaaggc

SEQ ID NO: 889458 - DNA, 120 bp, Artificial Sequence
  ENSG00000230471_2 (sequence is synthesized)
tgcctctgccttctgtgttcctgtctgtggctgtgctgttgtcccagtcaccaccgtaaccagtgatccagttctcactccctcctccagagcaagataatagcctcagatgaagaaatt

SEQ ID NO: 889459 - DNA, 120 bp, Artificial Sequence
  ENSG00000230471_3 (sequence is synthesized)
ctggttctgagcccgagaatctgagacagactcagatctaaatctttttaaagccttcaaggagattatgatgcctacgtgagctggctcagaagaagaatttatttcaggaatgccaag

SEQ ID NO: 889460 - DNA, 120 bp, Artificial Sequence
  ENSG00000230471_4 (sequence is synthesized)
aatttctcatgcttggtggtaggacattccttgataatttagccaggtgagaagttgtcaaagaactgccaaacccataaggattcttgtagctcacagccaggaggctaccttatattt

SEQ ID NO: 889461 - DNA, 120 bp, Artificial Sequence
  ENSG00000230471_5 (sequence is synthesized)
tgaatttaagattaagggaaaaaaaaacacaaaaacatatacaatacattcttgttgtggtcgagcataaagtaattaactatacagagaaaaacatgaaagtcttttctgttacgaatt

SEQ ID NO: 889462 - DNA, 120 bp, Artificial Sequence
  ENSG00000230471_6 (sequence is synthesized)
ccctctgtccaagattcaggtccagtcccctcggcttgctaggctctgcctgttccacatctatgcattccccatctatctaatgtatattcagacacaaatgtatatacatgagatcaa

SEQ ID NO: 889463 - DNA, 120 bp, Artificial Sequence
  ENSG00000230471_7 (sequence is synthesized)
gtaatcccagctcttagggaggcagaggtgggaggatagcttcagcccaggagttcaagacctgcctgggcagtatagcaagaccctgatctccacaaaaaggaaaaaaaaagtataaaa

SEQ ID NO: 889464 - DNA, 120 bp, Artificial Sequence
  ENSG00000230471_8 (sequence is synthesized)
agaccctgatctccacaaaaaggaaaaaaaaagtataaaaaataaaataaaataaaaataataaataaataaaaataaagaagcaaaagtttatacacttaaattgtgcttcataatgca

SEQ ID NO: 889465 - DNA, 120 bp, Artificial Sequence
  ENSG00000230471_9 (sequence is synthesized)
ttagtctttcatttttcctagaaattatttatgtacccagcaaatatccatcaattaaatttgtacaaggttttgagttacctaaagatctttgaaattattctaaagtgggcataccat

SEQ ID NO: 889466 - DNA, 120 bp, Artificial Sequence
  ENSG00000230471_10 (sequence is synthesized)
cctaaagatctttgaaattattctaaagtgggcataccatgaaagataacttttttttaattttgagatggagtttcactccgttgcccaggcttggagtgcagtggcacaatctcggat

SEQ ID NO: 889467 - DNA, 120 bp, Artificial Sequence
  ENSG00000230471_11 (sequence is synthesized)
tcctgagtagctgggactacaggcccacacgatcacatctggcaaatttgtaaatttgtaaatttttagtaaagacggaatttcattatattggtcacagtgatctcaaactcttgacct

SEQ ID NO: 889468 - DNA, 120 bp, Artificial Sequence
  ENSG00000230471_12 (sequence is synthesized)
cccacagtgctgggattacaggtgtgagcgacctcgcccagccaaaagataacttttgaaataaaattcatcagtgcaataaatcaattttgttaaacacagattgacgtttacatattt

SEQ ID NO: 889469 - DNA, 120 bp, Artificial Sequence
  ENSG00000230471_13 (sequence is synthesized)
tttgttaaacacagattgacgtttacatatttaaacatgatgtaaaagcaatgctagcttattttatcagtaaatatgtataagtttaagaaaaaaatatacaagcagaataaaaatgta

SEQ ID NO: 889470 - DNA, 120 bp, Artificial Sequence
  ENSG00000083622_0 (sequence is synthesized)
tgaaaacttcctgaggcctcctcagaagcagatgctgctatgcttcccgtacagcctgaagaaccaaacatttctatacatttatgagacccaactccaaaagcatactggaatggaatt

SEQ ID NO: 889471 - DNA, 120 bp, Artificial Sequence
  ENSG00000083622_1 (sequence is synthesized)
aagctaaagagagctgatcaaactaaaaaaaaaagttaaaggtgaggaggccaaggctcagaagagtcacttgcccatgatcactgctcttatagcgccaactcagagctcaggcaatgc

SEQ ID NO: 889472 - DNA, 120 bp, Artificial Sequence
  ENSG00000083622_2 (sequence is synthesized)
tcatgttctttccactgtgcctcatcgctcatgtctgactcttctagaaatgtgggcaaatcccctgccttctgtgggtctcagatttccataaaaaataaaatcaatggatcaacttaa

SEQ ID NO: 889473 - DNA, 120 bp, Artificial Sequence
  ENSG00000278890_0 (sequence is synthesized)
tcctctcctaaaaatgtcaaaaaagagtcagtctgcagggttttcaggggaaatggacgtggaccgtgcggtcttacctggtgataacacattgtagatttggcccaaatggtcctgtgc

SEQ ID NO: 889474 - DNA, 120 bp, Artificial Sequence
  ENSG00000278890_1 (sequence is synthesized)
cttgcaccctctggacgcacggtggtttctggaaggactccccatcttgctttccctccgctgcatctgagtcaggtgggactgttgcctgctgcccgcttacatgatggcacctggctc

SEQ ID NO: 889475 - DNA, 120 bp, Artificial Sequence
  ENSG00000278890_2 (sequence is synthesized)
ctacctgggctctcgtcgtttgtttcttcaaaggcttccagaaagatctttccacatctcaactctgatcaagtcactccctgctcagcagcccttgctgggcctctcccatctgggagt

SEQ ID NO: 889476 - DNA, 120 bp, Artificial Sequence
  ENSG00000278890_3 (sequence is synthesized)
caaggcccatgcgtctgctcccgccttttcagcttagcctgggagtgccttcctcgtgctccagacaacacgctcactctctcccaattccaaaagtccagacacacccagagctttccg

SEQ ID NO: 889477 - DNA, 120 bp, Artificial Sequence
  ENSG00000278890_4 (sequence is synthesized)
gacccctggcttctacttacagagttgtctccactcttgaaggcccaacataagcatcaactccctcacaaacattttggaatctaaacctccctcccacaatttacctctgaacctcac

SEQ ID NO: 889478 - DNA, 88 bp, Artificial Sequence
  ENSG00000278890_5 (sequence is synthesized)
aatctaaacctccctcccacaatttacctctgaacctcactgatccatactttgttattattgtagttttgcacttgttgcccaggct

SEQ ID NO: 889479 - DNA, 67 bp, Artificial Sequence
  ENSG00000278890_6 (sequence is synthesized)
ctccagagtagctgggattacaggcatctgcaaccatgcctggctaattttttgtaattctttttgt

SEQ ID NO: 889480 - DNA, 63 bp, Artificial Sequence
  ENSG00000278890_7 (sequence is synthesized)
accatcgcgcccagccctcattgatctgtatttgcaaacctcagagcatttgtttcacttgcc

SEQ ID NO: 889481 - DNA, 120 bp, Artificial Sequence
  ENSG00000278890_8 (sequence is synthesized)
atctgtatttgcaaacctcagagcatttgtttcacttgcctggcgtcagcctgcgtgtgcaaagcggtcccctgggatacccatctgtcttctctgcatctcttcttgagcctgaaatat

SEQ ID NO: 889482 - DNA, 120 bp, Artificial Sequence
  ENSG00000278890_9 (sequence is synthesized)
gcctcttgcctgcaaagattcagtacacatttgctggatagaatcaggtcatttcctttccctcttgttagatgatgagggccctgactgcaagaagtgtgtctgctgcttctcctactt

SEQ ID NO: 889483 - DNA, 120 bp, Artificial Sequence
  ENSG00000278890_10 (sequence is synthesized)
cccccaatgtgtttctgggatgaagacaagtgacaaatcaaaactaataacacatagttaccattatcaggcacccaaaggcttcacatatgctagccccggctattcagccagccagtg

SEQ ID NO: 889484 - DNA, 120 bp, Artificial Sequence
  ENSG00000278890_11 (sequence is synthesized)
ggtaggtactgtggttcccattttatggctgtggagggtgagtggccacccatttctgctgctttcccctgatcaaagagcccatgaatgtgggttgattcactgaggcaaatccagata

SEQ ID NO: 889485 - DNA, 120 bp, Artificial Sequence
  ENSG00000278890_12 (sequence is synthesized)
tgcttggcctcatgtcctgtgttctttccacgactcgtcattggcactcgcaaggaaaccaggccccagccactgcccaggagctctgctgggtgccgagtggggctttgccagcgagat

SEQ ID NO: 889486 - DNA, 120 bp, Artificial Sequence
  ENSG00000278890_13 (sequence is synthesized)
acacaagacttgtgtctacttggttcatagctgtgtccccatggtctggtccaggcttggcaccgagtaggtcgttaataaatattttaaaatgaataaataggcagcagagagctcaag

SEQ ID NO: 889487 - DNA, 120 bp, Artificial Sequence
  ENSG00000278890_14 (sequence is synthesized)
cagggatgagcaagaatagcgagttagcatgaagaatgaaatgaaaaccccatgagtctgaagtgcagaggttttaaaatgcacagccctcaatgggaagcactgactcgtcacagaagt

SEQ ID NO: 889488 - DNA, 120 bp, Artificial Sequence
  ENSG00000278890_15 (sequence is synthesized)
acaaaaaaaaaaaaaaatctgggcaatgccgaggcaggaaaaaccatttagcatgaaataggaagggaggaggaactagcagcaggcattgcacagaaaggaaggaaggggtgaatttat

SEQ ID NO: 889489 - DNA, 120 bp, Artificial Sequence
  ENSG00000278890_16 (sequence is synthesized)
aggaaacccaactgcattatcctgaaagaaagcatggacaatttcagaaacgcccaaggcacttccactctggatatttacggaggaggcagggacgtccctcccaggcagagcatcggg

SEQ ID NO: 889490 - DNA, 120 bp, Artificial Sequence
  ENSG00000278890_17 (sequence is synthesized)
aacaagcctgggggactgtgcggagagagaagatacctggctccagcctttggcctctgtgaaccttgatttcatgagggcgcccagagccagcaactgctgtagccacaaacccttaca

SEQ ID NO: 889491 - DNA, 120 bp, Artificial Sequence
  ENSG00000278890_18 (sequence is synthesized)
ctaattccacaataagacagagataattgccacaaacacacctgtatctgtcattctccgccgtgctcaggggttcctgaagctctctgttgtcattaaagacagctcagcgtccagttg

SEQ ID NO: 889492 - DNA, 120 bp, Artificial Sequence
  ENSG00000278890_19 (sequence is synthesized)
ctcagaaatatacacgggcccttctgagcggagcagagtggagctgccgggctcccggtccctggccggctggagacagcacatccagtctcactccatatttctgcttattttctctct

SEQ ID NO: 889493 - DNA, 120 bp, Artificial Sequence
  ENSG00000278890_20 (sequence is synthesized)
cttcctgtactccctttcccaggacaagctccgcggccaggagtctgtcttgattgatggcattttacctggacctctcttctgcggttttctccctgatactagaaatgtgtgtgtgag

SEQ ID NO: 889494 - DNA, 120 bp, Artificial Sequence
  ENSG00000278890_21 (sequence is synthesized)
attgtgtatacctgtgtggttgtgttatgtgggtgtgtgcaagtgtgggtgtgtgcatgtgtgtgtgtctgtgagtgtatgtgtgagaatgggtgtgcgtgtgtgtgcatgtgagagtat

SEQ ID NO: 889495 - DNA, 120 bp, Artificial Sequence
  ENSG00000278890_22 (sequence is synthesized)
gtaaatgtgagtgtgaatgtatgtgtgagtgtatgtgaatgtgagtgaaaatgtgtgattatgtgtgtgtatgtgtgtggggtgtctatgagtgtgagtgtgtgtgaatgtgaatgcatg

SEQ ID NO: 889496 - DNA, 120 bp, Artificial Sequence
  ENSG00000278890_23 (sequence is synthesized)
tgtgattgtgtgtatatgtgtgtggaggggtgtctgtgtgagagtgagtgtggatgtgtgtgaatgtgtgtgaatgtgagagtatgtgagtgtatatgtgtgtgtatgtgtgaatgtgag

SEQ ID NO: 889497 - DNA, 120 bp, Artificial Sequence
  ENSG00000278890_24 (sequence is synthesized)
tgaaaaggtgtgagtgtatgtgtgtgagtgtgtgagagtatatgagtgtatgtgtgaatgtgtgtgactgtcagagtatgtaggggtgtgtgtgtgaatgtgaaagtatgtatttgtgtg

SEQ ID NO: 889498 - DNA, 120 bp, Artificial Sequence
  ENSG00000278890_25 (sequence is synthesized)
aatgtgagagtatgtgagtgtgtgtgtgtgtgaacgtgagtgtgtgtgcatacatgcgcatgtgaacagtccatggagcttaatcccctggaggagggattctacagcatcacatgtaga

SEQ ID NO: 889499 - DNA, 120 bp, Artificial Sequence
  ENSG00000278890_26 (sequence is synthesized)
aggcattctgctcagagaatggcctccatttttccgggaacgcacctgttcgttcctctatcagaggcaccagctacggctgcggctgccccgtccttggtgaatgtacaacgacgcttc

SEQ ID NO: 889500 - DNA, 120 bp, Artificial Sequence
  ENSG00000278890_27 (sequence is synthesized)
ttggcatgagatgcagacaggcccacactttgggaaaggggccagaacccgagatgtatgtatgtatttcctcgctaagaagaaaccgcaggtctaaccatgatgtcattagaatgattg

SEQ ID NO: 889501 - DNA, 120 bp, Artificial Sequence
  ENSG00000278890_28 (sequence is synthesized)
tttagaggcctggaatgagaccatctaattaccagtccaacctgactcactggtcctttcaaatccaatagtgtttcttaaaataaatgctgaaaatgacttcattcagggaaaggcagg

SEQ ID NO: 889502 - DNA, 120 bp, Artificial Sequence
  ENSG00000278890_29 (sequence is synthesized)
ttgtggccatttaattatggctacagattaatgaatgaataaaatatactctggctaaattgtgggaatattttccaatttttccctagaaagtagtattccactgatctaacctgggac

SEQ ID NO: 889503 - DNA, 120 bp, Artificial Sequence
  ENSG00000278890_30 (sequence is synthesized)
gtgggattttgtcctaaacacggctttgtgagtgcagaagacaaaaggaaaccaaagatctctctcattgacaccaggccagggaagggcaggcacccaccctcacctgtaaattcaggt

SEQ ID NO: 889504 - DNA, 120 bp, Artificial Sequence
  ENSG00000278890_31 (sequence is synthesized)
ctgggggtccgggtgcctgctccgatgccatggagaggcgttctgtaaactacagctgtgctgagagcctcatctacaccaagccttggatcagatgcctccatattccatttcattcat

SEQ ID NO: 889505 - DNA, 120 bp, Artificial Sequence
  ENSG00000278890_32 (sequence is synthesized)
ttctcgtggcatatttggaatggatagtaatgtcctagctttactgctaaagaaattgaagtgcagaaggactcacctaagctcacgtagtttgtgtcagagcccaaatctgaactcaag

SEQ ID NO: 889506 - DNA, 120 bp, Artificial Sequence
  ENSG00000278890_33 (sequence is synthesized)
tcatcagactccaaaagattcttcctaaaataatgcagctccttctcacagatgcaaaacctttgctagaaaaaaaaaaaggagagaaggtgatgatgttaaatcattcatcagacaaag

SEQ ID NO: 889507 - DNA, 120 bp, Artificial Sequence
  ENSG00000278890_34 (sequence is synthesized)
acactcgtgaaggcccactttatgagaatatctgaatggtgcagggaacacacagatgaataagactcagctctgccctcacgtaagcagcgtctaatggtgaactcagatggacaccaa

SEQ ID NO: 889508 - DNA, 120 bp, Artificial Sequence
  ENSG00000278890_35 (sequence is synthesized)
tgcatccccacgacattaaagggatcataaaaaattaatagaattatgtgtcctgcaaacagcaaggacagggacattcatatctaacagttgcagggaagtttttccaaaggataagct

SEQ ID NO: 889509 - DNA, 120 bp, Artificial Sequence
  ENSG00000278890_36 (sequence is synthesized)
gctcttgctggctgggttatgaaggagaattgaaatttgacagatggaggtttggaaagccctgaagagagagagagagaaggaggtggcgtgagcagtgtgggcgggcggtgagagagg

SEQ ID NO: 889510 - DNA, 120 bp, Artificial Sequence
  ENSG00000278890_37 (sequence is synthesized)
agggcagatttgggcctgtgtaagagccacactcaggctcaagcccaccccatcccatgtgacctccagggagtaaaagtgggatgcaggtcacgtgtgccaggatgctcagtgacagat

SEQ ID NO: 889511 - DNA, 120 bp, Artificial Sequence
  ENSG00000278890_38 (sequence is synthesized)
cgagagatctgcaagcgggccgctccttcccccgacaggagttcctgagcacctgcagggaaccagcgctgggcctgacgcgaggctccttttctagtgagtcacctcaagtgaggacag

SEQ ID NO: 889512 - DNA, 120 bp, Artificial Sequence
  ENSG00000278890_39 (sequence is synthesized)
cacaggcaacgctggacacaggaggacacccagagcgtctgggaaggcacctgagctgggagctcaaggcaggagaggaaataggcagcaagggagaagggtgtctttctgggacaaaag

SEQ ID NO: 889513 - DNA, 120 bp, Artificial Sequence
  ENSG00000278890_40 (sequence is synthesized)
agtcgcacctgcagaggcacagaggtgtgagagagaaaggaccacgagcggccaagggcaggcggtacacagagctccggcaggagatggaggagagggtggcaaagccacagttcctgc

SEQ ID NO: 889514 - DNA, 120 bp, Artificial Sequence
  ENSG00000278890_41 (sequence is synthesized)
agtgtggcccgggctgtgcagtggcaggtgcccctgacaccacgggagctgctgagagggcagctgcgtgggcagatgtttatcccagagagggcagcaatacaagggttggagggaggt

SEQ ID NO: 889515 - DNA, 120 bp, Artificial Sequence
  ENSG00000278890_42 (sequence is synthesized)
ggggagatccgcttcaggctgtgatgttggcttaggctggaggggaaagagcccggagctggggcagaactcgggttgtccaggaggcgacactgaattagtgtctggggtcagatccat

SEQ ID NO: 889516 - DNA, 120 bp, Artificial Sequence
  ENSG00000278890_43 (sequence is synthesized)
agagggcaggagtcagtgcctgcgtggctggctcggtgaggaagagaggggtgggagtgatgcatgaactctctgaggctcccaccgcagcagctccactcccaagtatggggctggcag

SEQ ID NO: 889517 - DNA, 120 bp, Artificial Sequence
  ENSG00000278890_44 (sequence is synthesized)
gagtctcaggaccaagggaggatggtgagttggttagttaagtttgagccggttgagttgagatgtctgcgtagagtcaggttccaccatcacgaggcatttggcagatgggctgtgagg

SEQ ID NO: 889518 - DNA, 120 bp, Artificial Sequence
  ENSG00000278890_45 (sequence is synthesized)
tgaggggatccaaggcttggaaacaaagttttgggagcagtcactgcctggctgagaaactcaccccaaaacagcatgtcccatccaccccagtccacccaaaacaagaaggaagatgta

SEQ ID NO: 889519 - DNA, 120 bp, Artificial Sequence
  ENSG00000278899_0 (sequence is synthesized)
ctggggctcttcctgcagcaccgggcgcggccaaccctcgcttccccagggcagggctcagctcgggtcaatgcaaccagccaagtcaggcccggagcgggccggctctgcccgccagtc

SEQ ID NO: 889520 - DNA, 120 bp, Artificial Sequence
  ENSG00000278899_1 (sequence is synthesized)
caaacctctggaccctcgccagcggggatgggcgtgggccccggcggccaccgccccgccaactcgagcactggaggagcgcacccgctacgccagccccggacctacctggaggggaga

SEQ ID NO: 889521 - DNA, 120 bp, Artificial Sequence
  ENSG00000278899_2 (sequence is synthesized)
gcagagctcctggacagcggccacgggcctgagggcggacgctgaggcggccagagtccgtcccagcaaccccaagtatccctggtggggcagagcggggagacgaacgggggggctgcc

SEQ ID NO: 889522 - DNA, 120 bp, Artificial Sequence
  ENSG00000278899_3 (sequence is synthesized)
gcgggccagcgcggcccgtcccaggggtcgtgaggacctggctctccccttaacaccaggccaccgccgccgccgccgccattttgccttccactcagtgtcgccgccgccgcactccgc

SEQ ID NO: 889523 - DNA, 120 bp, Artificial Sequence
  ENSG00000278899_4 (sequence is synthesized)
tgcaggtttcccggatgtgggcatttcccggcgtcgcttgcgcgggggccgaggactgggggcttttgcccgcccggctgctgcgagggagcgcgcagcctgcggcctccgggcttcgtt

SEQ ID NO: 889524 - DNA, 120 bp, Artificial Sequence
  ENSG00000278899_5 (sequence is synthesized)
gactcgcccgcgcccgtgggttaaggctgtctcccgcccagcctacttggttgattcaatccttttccccattgatctatttctctggaccgagtagggatgtgcatttcacggagctac

SEQ ID NO: 889525 - DNA, 120 bp, Artificial Sequence
  ENSG00000278899_6 (sequence is synthesized)
gttctcagaagggaacaactgagttgctctgggaaacctccctgtggacctcagaattccagatttttggcgctttgaaataaaattttattcttgcttagcgttctttccccgaacaag

SEQ ID NO: 889526 - DNA, 120 bp, Artificial Sequence
  ENSG00000278899_7 (sequence is synthesized)
ccggtgagcttccagcatctgtattttctgaatccggcagataagaaatgcttgagccaggaccgattgattagcagcggtttagagatcttatctgtcaaccgcatccgtagaaggaga

SEQ ID NO: 889527 - DNA, 120 bp, Artificial Sequence
  ENSG00000278899_8 (sequence is synthesized)
tcgttattgccataattggaataccggtgacggtgtgacaagaggttttacttctggttaagctgaatgtaaagtgtgggatgggatcgttgggtttgatgtataaggtacggtccaccc

SEQ ID NO: 889528 - DNA, 120 bp, Artificial Sequence
  ENSG00000278899_9 (sequence is synthesized)
tttgtgaagatcgcctttgccagtttttcctctaggaaatatacagttagtgttttcaagtaccttctttcgtaatttttctactacagagtacaaaaaaattaaagacatctttttctg

SEQ ID NO: 889529 - DNA, 120 bp, Artificial Sequence
  ENSG00000177788_0 (sequence is synthesized)
gcgcacggggaggccggggcggggcgcgtgaggacttcggcgcgcgccggaagcacgtgcgcgggctgggcgctctggcggtgtgcgctgaggtgggcagagcggcaggctcctgagtat

SEQ ID NO: 889530 - DNA, 120 bp, Artificial Sequence
  ENSG00000177788_1 (sequence is synthesized)
aacagattggttctgattaaaaccatttcagaggaaagacagtgatcccaggaagcgggaagaaaacagcatcacctgaagttattcctattcgttagatttgttttcttcctgcgaaaa

SEQ ID NO: 889531 - DNA, 120 bp, Artificial Sequence
  ENSG00000177788_2 (sequence is synthesized)
actgctatgtacaagaaagaagtcagtgagctgcagtgatagttagcattattgactgaaactggaccagagatccctgaaacctggacaaggtggtagaaatacaaattatgctgccat

SEQ ID NO: 889532 - DNA, 120 bp, Artificial Sequence
  ENSG00000177788_3 (sequence is synthesized)
ttcaaagctgtgggcagttttctactttgtggaaaatgaagacttaggtaggcctttgggaaagacgatttgttttggaaaaaccacccaaagggatcatttggtttgcaaatgtaactg

SEQ ID NO: 889533 - DNA, 120 bp, Artificial Sequence
  ENSG00000177788_4 (sequence is synthesized)
cagtatcacaactggaagaagaaatatacaagggcgaggtttgaaggagcccttcagtatccttggatgatactgtggaagattctttgcatctcagtaactttggatctttgaagatcc

SEQ ID NO: 889534 - DNA, 120 bp, Artificial Sequence
  ENSG00000177788_5 (sequence is synthesized)
aagaaaataaatttcttcaaaatatttttagagactgctttgattctgaggcactgctgattatatggaagaaaaaaatattggaagattaatttgtggttttctccagttatcgtctcc

SEQ ID NO: 889535 - DNA, 120 bp, Artificial Sequence
  ENSG00000177788_6 (sequence is synthesized)
cttctctttgggggaggtttgtgacgcagtaaaaacagatatacaaaagcctaggcatgttagagatttgcctaagggaaatgtaattatgaagaaggattttttcaagctgaaactaga

SEQ ID NO: 889536 - DNA, 120 bp, Artificial Sequence
  ENSG00000177788_7 (sequence is synthesized)
tcccacttttttccaggtcagtgggtccttcaagtatctggtactttccttcctgcttcctgacaatgttaaagaatgtggcatgaccttacatttaatgcccaacgtgaggagccctgg

SEQ ID NO: 889537 - DNA, 120 bp, Artificial Sequence
  ENSG00000177788_8 (sequence is synthesized)
ggcttgatgcatgagattcttggagctaggcctggtggagggcactggtcacagcctcggtggaatggtgactttctttggtaactggaattgaagaaaatgagtggacttgtgtctgag

SEQ ID NO: 889538 - DNA, 120 bp, Artificial Sequence
  ENSG00000177788_9 (sequence is synthesized)
cacttgggaactcagcaatccctgggtgttaccttgagaaggagccaaattccagacatacaagtggagacttgaaaatggaagctcaattccacacccaggctggtggagactatgaca

SEQ ID NO: 889539 - DNA, 120 bp, Artificial Sequence
  ENSG00000177788_10 (sequence is synthesized)
tatgtccatgatcagatacctctgttgctagggaatattcagtcagaatgggctagattaactgcagtaatgcagatctctcaacccatttatgacttacgcagcaaagttcctcgctca

SEQ ID NO: 889540 - DNA, 120 bp, Artificial Sequence
  ENSG00000177788_11 (sequence is synthesized)
gactacctgtccactcccacgagcagagacttgctcatgggccctcctagacccaggctgaccgagtgtgttttatctaaatgcatctccacaatcactcaggtaggagtggctatgcat

SEQ ID NO: 889541 - DNA, 120 bp, Artificial Sequence
  ENSG00000177788_12 (sequence is synthesized)
taggactgattgtgcattagttagagaagcacttaccaggaattgctataagaacttctatttacatttcatgggccaaagcaagtcatgtggcaacacttaatttcaaagaggacagga

SEQ ID NO: 889542 - DNA, 120 bp, Artificial Sequence
  ENSG00000177788_13 (sequence is synthesized)
aatgcaatattgttatgtccctgaaagaaaggagaagagaaagtctatggaaagacattatgactaccactggaattttcacctgtccaggcagctcatcgtgcttttatttgaaacaat

SEQ ID NO: 889543 - DNA, 120 bp, Artificial Sequence
  ENSG00000177788_14 (sequence is synthesized)
atttgaaacaattttattgaagtataggcataactgcacatacgtatgtatttattttattttattttttgagatgtagtcttgctttgttgcacaggctggaatgcagtggcgtgatct

SEQ ID NO: 889544 - DNA, 76 bp, Artificial Sequence
  ENSG00000177788_15 (sequence is synthesized)
tgcagtggcgtgatctcagctcactatctgagtagctgggattacagccacgcgccaccacacctggctaattttt

SEQ ID NO: 889545 - DNA, 120 bp, Artificial Sequence
  ENSG00000177788_16 (sequence is synthesized)
tgcacatatttaaagtgtacattttgacaatttttaatatatatgtacgcttgtgcttgctgctccaggggaccgctatttctaggccttttcagtggacagaggcatttttgtgattgt

SEQ ID NO: 889546 - DNA, 120 bp, Artificial Sequence
  ENSG00000177788_17 (sequence is synthesized)
tttatctcatttgtcacttaggaagaataacttcttgtgaggtttagtggtggttttggggttgatagtataggtcttcatcacagtccacctccaagtgataatacactactttataca

SEQ ID NO: 889547 - DNA, 120 bp, Artificial Sequence
  ENSG00000177788_18 (sequence is synthesized)
gagtataagaaactgacaaccatttgcttccatcctcccccagcatctgtgctggggatgttgtacttctacatatgttgtacacccacatacattgttattgtttttacttaataagct

SEQ ID NO: 889548 - DNA, 120 bp, Artificial Sequence
  ENSG00000177788_19 (sequence is synthesized)
gagtgctggcaccacctataagcacacagtaaggataaccatggagagaatatgccgagccttttaatcagcccagaagagcgccttctgtgttaaggcgaaatgccagaatcccaagga

SEQ ID NO: 889549 - DNA, 120 bp, Artificial Sequence
  ENSG00000177788_20 (sequence is synthesized)
gcccaaaagaatttcacgttttgtttcagttaaggagaggcctttccttactgctgactttaaggaaactggaaattgtgcttgtgggggaagtggctttggaacttggggcctctttgg

SEQ ID NO: 889550 - DNA, 120 bp, Artificial Sequence
  ENSG00000177788_21 (sequence is synthesized)
gacctggtaggcaatggggtttgggggcaagtttgtgggacatgtgtctgaacaggaaggaagggaggagcagtggggccagccaggaagcagtgccgaatgcagatttctcttcttgtg

SEQ ID NO: 889551 - DNA, 120 bp, Artificial Sequence
  ENSG00000177788_22 (sequence is synthesized)
cagctttgcttagagttgaacattacttcccagagatagattgaccccaatcctgcagagattggctatcctgctcttcaacttatttttagatatatggtctcacttgaatctcacatc

SEQ ID NO: 889552 - DNA, 120 bp, Artificial Sequence
  ENSG00000177788_23 (sequence is synthesized)
caatgaggagttcctgacccctcaatttagctccacctggcattccagagcaattcaaggacctggtagggctactagcaatccactgctacatataggggaacaatgagttttaaagct

SEQ ID NO: 889553 - DNA, 120 bp, Artificial Sequence
  ENSG00000177788_24 (sequence is synthesized)
gctcagaaatctgtgattcgagtatcaggaaatccttgactctttatcaaatgtgaagttgctgatttaagaaataaagttaagaaacaatattcattaacagaatggaatttaatgcaa

SEQ ID NO: 889554 - DNA, 120 bp, Artificial Sequence
  ENSG00000177788_25 (sequence is synthesized)
ccgctggtgttttggggttattttctggtcacatagtgccccctggtgggttcactgacatactcttctggaatgctcctttcccaggctgtgctttgtgacaaggccagcaccagcagg

SEQ ID NO: 889555 - DNA, 120 bp, Artificial Sequence
  ENSG00000177788_26 (sequence is synthesized)
gtgattccaagaatttgcagtttaggcacagtccaacgatgctctaaagattgtctgttaagggaaaatatgagttatgaaaatgctgtgggttgtactgtatcccccaccaaaagatac

SEQ ID NO: 889556 - DNA, 120 bp, Artificial Sequence
  ENSG00000177788_27 (sequence is synthesized)
gttaaagtcctaagccccaatacctgtgaatgcagacttatttggaaaaagggtctttgcagatgtaactatgaaactaaggtgaggtcattagggcaagcccttaatccagtatgactg

SEQ ID NO: 889557 - DNA, 80 bp, Artificial Sequence
  ENSG00000177788_28 (sequence is synthesized)
cacctgtaatcccagcgtttgctgggcaacatatcgagaccccatctctactaaaaatttaaaaattagccagacatggt

SEQ ID NO: 889558 - DNA, 120 bp, Artificial Sequence
  ENSG00000177788_29 (sequence is synthesized)
cccatctctactaaaaatttaaaaattagccagacatggtggcacgcagctgtagtctcacctacttggaaggctagtgggaggatggcttgagcccaggagtccgaggctgcagtgagc

SEQ ID NO: 889559 - DNA, 120 bp, Artificial Sequence
  ENSG00000177788_30 (sequence is synthesized)
gaggatggcttgagcccaggagtccgaggctgcagtgagctatgatcatatcaatgcactccagtctgggcaacaagggagaccctgactcaaaaaaacaaaacaaaaacaaaacaaaac

SEQ ID NO: 889560 - DNA, 120 bp, Artificial Sequence
  ENSG00000177788_31 (sequence is synthesized)
atgccatgtgacaatggagacagacactggactgatgcacctgcagaccgaggaatgcgcaaggattgccagcagcccccagaagccaggagcgggacatggaatagagtctctctcaac

SEQ ID NO: 889561 - DNA, 120 bp, Artificial Sequence
  ENSG00000177788_32 (sequence is synthesized)
ccctcagaaagttctaatcctgctgatgccttgattttggacttcagcgtccagaactgtgagatgagatatgtttgttgcttaagcctcccggtttatgctgctttgtgatggcagccc

SEQ ID NO: 889562 - DNA, 120 bp, Artificial Sequence
  ENSG00000177788_33 (sequence is synthesized)
aagcagacgaatacagaaagaaatggggatttgagttggaagaactgctttgagtcccagctaccacttagtacctgaatgaccttgggcaaagaagttcaatttttctgagcctcagtt

SEQ ID NO: 889563 - DNA, 120 bp, Artificial Sequence
  ENSG00000177788_34 (sequence is synthesized)
ttataaactgcaaaatggagaaatacaaaagtaactgttctcctgcctcaggatccctgtgaggatgaagtgtgactatgtgtataaaaatattttgtttattgtacagcactgtgtact

SEQ ID NO: 889564 - DNA, 120 bp, Artificial Sequence
  ENSG00000177788_35 (sequence is synthesized)
ttttgtttattgtacagcactgtgtactgcaatcttattacacaaagaaaggaaggtgggaggtagtagagcggagtgattacaagctaggctctggctgggcacagtggctcatgcctg

SEQ ID NO: 889565 - DNA, 120 bp, Artificial Sequence
  ENSG00000177788_36 (sequence is synthesized)
accctccgtccggccgcgaccgcgaggaggaagaggagatgggctacgcgaggcccggcccaccccgcgttcgcgcgtgcgcacggggaggccggggcggggcgcgtgaggacttcggcg

SEQ ID NO: 889566 - DNA, 120 bp, Artificial Sequence
  ENSG00000177788_37 (sequence is synthesized)
tgtctctcttttccttttaattgtggtaaaatagacataaaatgtagcaactcagccatcttgaaatgtacagtggcattaaatatattcccattgttgtgcaaccatcaccaccatcca

SEQ ID NO: 889567 - DNA, 120 bp, Artificial Sequence
  ENSG00000177788_38 (sequence is synthesized)
tctctagaacgcttcatgttgcaaacctgaaactctgtacctgtttaacaacaactccccattcacttctccccacagtgcctggcaaccaccattttacttcctgtctaggaattggct

SEQ ID NO: 889568 - DNA, 120 bp, Artificial Sequence
  ENSG00000177788_39 (sequence is synthesized)
agcataatgtcctcaagattcatctgtaacattgtagaatgtgtcagaatttccttcctgtttaagactgaatactattcaatactttgtacatatatactgcattttcagccaattctt

SEQ ID NO: 889569 - DNA, 120 bp, Artificial Sequence
  ENSG00000177788_40 (sequence is synthesized)
ttcaatagatttaaacaataagaaaaaagtgttttatatttactcacatagttaccatatctaagactccttattctcttgtatagattagatttccatggtctcatttcccttttgtct

SEQ ID NO: 889570 - DNA, 120 bp, Artificial Sequence
  ENSG00000177788_41 (sequence is synthesized)
gaagggctttccttgacagatcttgaagtgtagatctcctggtgactaattctttcagcttttatatgtccaaaaaagtctttatttcacttctgtgtttgaagctatttttgctcaatt

SEQ ID NO: 889571 - DNA, 120 bp, Artificial Sequence
  ENSG00000177788_42 (sequence is synthesized)
tcgatttttagggttttcaattttttttttctaacatgaagatactgtttcagtgttttctggctcattttgtttccgataaggagtgaactgccattcttatctttatttcttttatgc

SEQ ID NO: 889572 - DNA, 120 bp, Artificial Sequence
  ENSG00000177788_43 (sequence is synthesized)
aacgtgtcttttatctctgcttggttttaagatttcatctgtatcactagtctgaagcaatttgattatgatgtgccttggtgttgattttctttaaagttcttgtccttgagtttcact

SEQ ID NO: 889573 - DNA, 120 bp, Artificial Sequence
  ENSG00000177788_44 (sequence is synthesized)
gaacttctctggtctttgagtttatagttgctatcagatttggagttttttcagccattatttcttcaaatatttttttctgcccctgcctctcctttcctttggcgattctactacaca

SEQ ID NO: 889574 - DNA, 120 bp, Artificial Sequence
  ENSG00000177788_45 (sequence is synthesized)
aatattagatcacttgaatttgtttcacagctaactcaggctttgttcattttttgtcagtcttttttctttctgtttttcattttcgtgtaatttccattgctgtgtctttaaattcac

SEQ ID NO: 889575 - DNA, 120 bp, Artificial Sequence
  ENSG00000177788_46 (sequence is synthesized)
tcatctttcctatagtatctaatctgctgtcaattccatccagcgtatttttcgtctcaggcattgccatttcacctgcagaagtttcactcggtgtctggacctgcatctgggtcctct

SEQ ID NO: 889576 - DNA, 120 bp, Artificial Sequence
  ENSG00000177788_47 (sequence is synthesized)
ggtttccgtgtttagtgctcaagcatatggaacatgtgtcatttctactaactttatcacctaagtaatttctgagattgtttatattgattggcttttctcttcattgtaggtaatatt

SEQ ID NO: 889577 - DNA, 120 bp, Artificial Sequence
  ENSG00000177788_48 (sequence is synthesized)
ttcctactttacaagccagataattttttattgaatgccagacattgagaagtttactttgagatacatataatgtttatttttatgaatatttttgagctttgttctggggtgcaggta

SEQ ID NO: 889578 - DNA, 120 bp, Artificial Sequence
  ENSG00000177788_49 (sequence is synthesized)
agttccttggaaagagcttgatgcttcaggtcatgtttttacactttttttagggggtgggccctgagcagcattctactcaacaaatccttgagttgtgaaggttttcaccatgattgg

SEQ ID NO: 889579 - DNA, 120 bp, Artificial Sequence
  ENSG00000177788_50 (sequence is synthesized)
cggaattcggagttcctctgggccgtgcgtgagtgctggggattgttttctctaatattcgctggtgattctttatctggcatggggtaggagtgcctaccacagtaggaatttgaaatg

SEQ ID NO: 889580 - DNA, 120 bp, Artificial Sequence
  ENSG00000177788_51 (sequence is synthesized)
caggtatttcttcacttgcctgcactgctcagtaaagacttgaagggaaccctctgcaaacctctggcactctctctctctctgtacagctctgcacaacccccagctcagggagtgctg

SEQ ID NO: 889581 - DNA, 120 bp, Artificial Sequence
  ENSG00000177788_52 (sequence is synthesized)
cttcttcctcctgtctgactccagagctcagtctgtggcagtctttctctgcagtcacttacttgctcattcatttcatctggtcttaaggctttcaatatgatctaaagctgatgattc

SEQ ID NO: 889582 - DNA, 120 bp, Artificial Sequence
  ENSG00000177788_53 (sequence is synthesized)
cttaatttctagcttgcctaggcttctatgtacaattgcttacttgatacgtccacttgaatgaatgcctattaggtttcttaatactaacgaaataaaaaccaaggccgggcacggtgg

SEQ ID NO: 889583 - DNA, 120 bp, Artificial Sequence
  ENSG00000177788_54 (sequence is synthesized)
ccgggcgacagagcagattccgtctcaaaataaacaaacaaacaaacaaaccaaacatccagatttcttgaccaaaccagtgccttctgcaatcttttgtatctcagtaaatggcagttt

SEQ ID NO: 889584 - DNA, 120 bp, Artificial Sequence
  ENSG00000177788_55 (sequence is synthesized)
ctctagagggacagaactaataggatacatgtatatatgaaagggagtttattgaggagaattgactcacacgatcacaagctaaagtcccatgattggctgtctgcaagctgaggtgca

SEQ ID NO: 889585 - DNA, 88 bp, Artificial Sequence
  ENSG00000177788_56 (sequence is synthesized)
tagggaagccgacagtgtagccttccatctgtgggcaaaggcccaagaggccctggcaaaccactggtgtaagtctaagagtccgaaa

SEQ ID NO: 889586 - DNA, 120 bp, Artificial Sequence
  ENSG00000177788_57 (sequence is synthesized)
ggccctggcaaaccactggtgtaagtctaagagtccgaaagctgaagaactgggaggctgatgttcaagggcaggaagcatccagtacggcagaaagatgaaggccagaagactcagcaa

SEQ ID NO: 889587 - DNA, 120 bp, Artificial Sequence
  ENSG00000177788_58 (sequence is synthesized)
ccagaagactcagcaagtctgctttattctagccgctctggtagccgattagatggggcccacccagattgagggtgggtcagcctcttccggtccactgactcaaatgttaatctcctt

SEQ ID NO: 889588 - DNA, 120 bp, Artificial Sequence
  ENSG00000177788_59 (sequence is synthesized)
acacacctaggaacaatactgtgaatccttcaatcaagttgacacttaatattaaacatcacaccagggccaaaccttgggagtcctgcctgacttctcacacccacatttgatccatca

SEQ ID NO: 889589 - DNA, 120 bp, Artificial Sequence
  ENSG00000177788_60 (sequence is synthesized)
gcaagtcctacaggctctactgtcaagagcatccagaatctgcttttgctactcccactgcctcacccccgaatcctggccacctcctggaccagcccgcctcacctctctcctgccttt

SEQ ID NO: 889590 - DNA, 120 bp, Artificial Sequence
  ENSG00000177788_61 (sequence is synthesized)
tgcagctacctccccttcctgcttctatgcttgtctccctgtgttgtcttttctcaacacagctgctagagcaatcctattaaaatgtaaacaaacaaaaccaaaaataaatgacaattc

SEQ ID NO: 889591 - DNA, 120 bp, Artificial Sequence
  ENSG00000224243_0 (sequence is synthesized)
tgcgagtttaaattcactgaaagaggcccagataccaagtcgagtgaatttcatagacatcatcttctgttttaatgatcgcggcagtgatcgtttctgaagtcataccctttagggtga

SEQ ID NO: 889592 - DNA, 120 bp, Artificial Sequence
  ENSG00000224243_1 (sequence is synthesized)
actcacaacaatgcatgtcagagaggctgcgcgccctaaagcaaaacagttaaaacatcaggccacgctcctcaaactgcaggattgcaagcagctcacaaacttccagtccccacccca

SEQ ID NO: 889593 - DNA, 120 bp, Artificial Sequence
  ENSG00000224243_2 (sequence is synthesized)
atctgaggctgggaaaacttcctaggagaaggcaagagaaagccaccagaccagagccgaggactaaactttaaggtcgaagacggcagaggggcaggttctcccctgcacaccccaagg

SEQ ID NO: 889594 - DNA, 120 bp, Artificial Sequence
  ENSG00000224243_3 (sequence is synthesized)
cctctcctgcacccgcgaggccttccttgagcgcccaggcccccgaaatgcctgccctccttctgacaaaaggagggggtaggatgtgaaggggtagtgcaaccaacaatgtttttgtaa

SEQ ID NO: 889595 - DNA, 120 bp, Artificial Sequence
  ENSG00000224243_4 (sequence is synthesized)
ggaactaactgtaagtgtgtctcgaacttgcgcgggggcttcagcccgcccggggctgcggagctggccggtaaaggctctcgggagaggggcgcggtgtctccacggtgactttccgtg

SEQ ID NO: 889596 - DNA, 120 bp, Artificial Sequence
  ENSG00000224243_5 (sequence is synthesized)
aaggaggatggggtgtctccgcagctttggggccccaggaaagaacagatacctcagtatacactgcccacagttaagaaaccacgacctgagacattgttttgaagaggtgaaaatgcc

SEQ ID NO: 889597 - DNA, 120 bp, Artificial Sequence
  ENSG00000224243_6 (sequence is synthesized)
cacagaaccatcttctgcatggtttgaaaattcagtggaaactaggtatttatgaacgagatgcttactgcagtttgcatgcactgagtagacatttgtggattaattcatctagggttg

SEQ ID NO: 889598 - DNA, 120 bp, Artificial Sequence
  ENSG00000224243_7 (sequence is synthesized)
ggggagaggttccaagaggagggtaagaacaaagaacagacacaggcccagctgaccattcccttcagtgagaaaaagacccgcaggcagagttgagcacgcggctcacattcgcacatg

SEQ ID NO: 889599 - DNA, 120 bp, Artificial Sequence
  ENSG00000224243_8 (sequence is synthesized)
cttggcatcatgaaccgtaaggaagagcaaagctggtttccagaaagacgttaactcacagtcgtacttctctccacttcccttgctcctctccctggcctctctacatctccctgctct

SEQ ID NO: 889600 - DNA, 120 bp, Artificial Sequence
  ENSG00000224243_9 (sequence is synthesized)
ctcctgcaccagggcttggtcagtgcttaactctggcaggtgccacgagtgctgcctgctgcagcttgctaggattcagatgccactcatgaggcatgggcaagtgtgagcacacagaaa

SEQ ID NO: 889601 - DNA, 120 bp, Artificial Sequence
  ENSG00000224243_10 (sequence is synthesized)
acacacgcacacctgcacaggcacgtgcagcctctgtggggcatgtttagaactcctgggtctgctggcgggtacctttccccctcgtgctttccacgtgcagccaaggcctacttctat

SEQ ID NO: 889602 - DNA, 120 bp, Artificial Sequence
  ENSG00000224243_11 (sequence is synthesized)
tgcagtaaaaattagtctccgtgtctgcctgtctgaacacaagctaacttacaaggaaacatgaaatttaattttaaattgaagttaaaaattttccattagacttaatttaaaaatttt

SEQ ID NO: 889603 - DNA, 120 bp, Artificial Sequence
  ENSG00000224243_12 (sequence is synthesized)
tagcttcattttaaaatttaattaaattagatttaactggttccttgaaaattgctgatctctctctgaacgtaatcctattttcaaaattatggttggttttcttagattgatagggtc

SEQ ID NO: 889604 - DNA, 120 bp, Artificial Sequence
  ENSG00000224243_13 (sequence is synthesized)
ctcagtgtggggagggagaggtatttgaaggtgaatatgagagcatctacaggtaaagagtttaggcacagtttagatcatgtagagaaaaatctgtcatttagggggagaagctgattc

SEQ ID NO: 889605 - DNA, 120 bp, Artificial Sequence
  ENSG00000224243_14 (sequence is synthesized)
ttggaaccaaattattcaaattaaccatatccaatctgcagtgccaaaaccaaaaccaaaccaaccagcctaaattgttcactttactttggcaggcaccaaatatgcatatgtgtatca

SEQ ID NO: 889606 - DNA, 120 bp, Artificial Sequence
  ENSG00000224243_15 (sequence is synthesized)
aataaagtgaacaattggagttctttctctaatttagataatttctggaaaaaaaccagcaatccacatcttttgcctcaattgctagattattactgatgagagaatatttatgttttt

SEQ ID NO: 889607 - DNA, 120 bp, Artificial Sequence
  ENSG00000224243_16 (sequence is synthesized)
aacttttctttctcctttgggtgaggtggctggaatggataaatgtttcaattctgcatttctaaactctgcatatctatagagtcgtgttgcatgtgttactcacatatgattattgac

SEQ ID NO: 889608 - DNA, 120 bp, Artificial Sequence
  ENSG00000224243_17 (sequence is synthesized)
ggggctccgggaggtgcccgtgggcagagcgttaggggcgcggccgtgccggacccgccctggggacccgctggagctggaggaggaactaactatggcttggcatcttcttccgagcaa

SEQ ID NO: 889609 - DNA, 120 bp, Artificial Sequence
  ENSG00000224243_18 (sequence is synthesized)
gcgcagctctcaggccgggcctgagcctgcagcctgtgtgccctccatcatcagggccccctctcaggacaggctacaccgagggtgggacggcggacttccagggacacttccaagtcg

SEQ ID NO: 889610 - DNA, 120 bp, Artificial Sequence
  ENSG00000224243_19 (sequence is synthesized)
gggcggaaccagaggcaaggctggagaggccgtgcggctcaagacaggcacgtgcagaccaccagtatgcaaggctggtgtgcaagaagtgagagccagcttccgttcctcagcctttct

SEQ ID NO: 889611 - DNA, 120 bp, Artificial Sequence
  ENSG00000224243_20 (sequence is synthesized)
tctctaaacaccaagttccaccattgacagaacactgagtcctgcacagtcacatggacacgagtaaggagagttcagaggctgcagtggagttccacacgaagcacaggaggtgaaacc

SEQ ID NO: 889612 - DNA, 120 bp, Artificial Sequence
  ENSG00000224243_21 (sequence is synthesized)
aaatattctggataaaatgttacaaactcattattcaatgaactcaacaatgcatattgtatttctttggttctaagacactcattttaaatatttttatcatctctggaatctaaatgc

SEQ ID NO: 889613 - DNA, 120 bp, Artificial Sequence
  ENSG00000224243_22 (sequence is synthesized)
ggggctggcgctgccggagccgggccggaccggggtccgagatctgcgtcgcgctgggcacgctggccacccggtccggaatgagtcggggctccgggaggtgcccgtgggcagagcgtt

SEQ ID NO: 889614 - DNA, 120 bp, Artificial Sequence
  ENSG00000224243_23 (sequence is synthesized)
taaatggcatcttaggcttgttgaaatagaaaaagtgtgtgtgtgtagaagtagcctacagataatttcttgtcccgatggtctcaggggtaaaaaaaattgtttgtgtcaaatatcagc

SEQ ID NO: 889615 - DNA, 120 bp, Artificial Sequence
  ENSG00000224243_24 (sequence is synthesized)
tattcttccctaatatttctttatgtagggattataaattataaccccaaacttttgcataactatttttattctaaaaacctcttgtccttataatgagtggttcatgctagtttgcag

SEQ ID NO: 889616 - DNA, 120 bp, Artificial Sequence
  ENSG00000224243_25 (sequence is synthesized)
tgtgtattcgacagagaatttctgttgctttgtcccccgctcccatcaactaaaaaaaatctacaaatgaaaactctaggagaccagtttcccattcggtaccaaagctaaaaatgagtt

SEQ ID NO: 889617 - DNA, 120 bp, Artificial Sequence
  ENSG00000237298_0 (sequence is synthesized)
ggagcgcctctgactgacttcccccatgtgtccgtgtggccacaccgtgctactttcagaggcagtgggcttttcgctaagggataaaaagaagtaaaaccttgcctttagcgcagctct

SEQ ID NO: 889618 - DNA, 120 bp, Artificial Sequence
  ENSG00000237298_1 (sequence is synthesized)
ccttcactgggcagattgctctccctccccactctcccaggcccaaattggatctcagcgcctgggagctccaactttagcaagtgcgaaatcctgtcttcggttttggaattttcatcc

SEQ ID NO: 889619 - DNA, 120 bp, Artificial Sequence
  ENSG00000237298_2 (sequence is synthesized)
gcacagactatatcagccacggataggatatgtgagaataccagcatgtcaaggctgggaatcatccttaggcatcacctagccagtcctgcctctcattttaagaatcagaggtgggga

SEQ ID NO: 889620 - DNA, 120 bp, Artificial Sequence
  ENSG00000237298_3 (sequence is synthesized)
ctgtggacttacggatgctgctgcgacactctatgacctcagactgcaagtaagagccaatcccgaagcggtttgttgcagccacacggaacacatactcatttccttcgtttagaacca

SEQ ID NO: 889621 - DNA, 120 bp, Artificial Sequence
  ENSG00000237298_4 (sequence is synthesized)
gcaaagaaccaggaagcagcaggaggtggacggccagcaataggtatcaccagctctactggtctgccagctgggacatggatggtcttctgaggcattgtagaaagatcgattgttggc

SEQ ID NO: 889622 - DNA, 120 bp, Artificial Sequence
  ENSG00000237298_5 (sequence is synthesized)
aacactatgggaaagaaatcaggcatttattcttaagcattatttttatgctttgcaggcctcgagaacatatccagtgagtcggctaccaccatcgtagagtggtttttcccaggcaag

SEQ ID NO: 889623 - DNA, 120 bp, Artificial Sequence
  ENSG00000237298_6 (sequence is synthesized)
ggtaacagtggatttggtgacatcgaccacttctagctttgcaggcaccaaaggcacttctgagaccagtactgcatcagatgtttcacaaggttctccaatgccataaatattttctgg

SEQ ID NO: 889624 - DNA, 120 bp, Artificial Sequence
  ENSG00000237298_7 (sequence is synthesized)
tagatgtaatggacaacacgatctgaatgtaacatctcaactcctcaaaatttaaactgtaatgaaccaaacaaattaatgatgacttctagttttttctggcaattgatttacattttt

SEQ ID NO: 889625 - DNA, 120 bp, Artificial Sequence
  ENSG00000237298_8 (sequence is synthesized)
tattcttcattgtaaagctaagaaattctactgaatgatggtcttatttctacatgatatcataagaaatacagttacattaagctgtattttgaaaatatttattgatttcattaaaaa

SEQ ID NO: 889626 - DNA, 120 bp, Artificial Sequence
  ENSG00000237298_9 (sequence is synthesized)
gtaggaagaaaataaaaggcacaaaggctaaagaagcaagaatggctaaaaaaggaaataattctttagagtaaggaagtttaaataaagctcaatacagcaaacaccaattgattatct

SEQ ID NO: 889627 - DNA, 120 bp, Artificial Sequence
  ENSG00000237298_10 (sequence is synthesized)
gtcatttgcaatatattggaatatacaaatagaattccagatttcaggagtttatacactgatattgaaagaggaaatggggaataagacaagtgcataataaacactaggaaagaggca

SEQ ID NO: 889628 - DNA, 120 bp, Artificial Sequence
  ENSG00000237298_11 (sequence is synthesized)
catataaagtgatcctggggttggatgaggaagagatcatatacaaatggagagattaaggaaggtttaatggagaaggtgacgtttgaggtaggcctagaagaacatttgtaatttagg

SEQ ID NO: 889629 - DNA, 120 bp, Artificial Sequence
  ENSG00000237298_12 (sequence is synthesized)
ctggtgggaatggtgttgcaagtactattggctttgggaacagcataagcagaggcatggaagtgggaaactgaaaggaattttgggggaaatgaataataatttcttaaaataacaatc

SEQ ID NO: 889630 - DNA, 120 bp, Artificial Sequence
  ENSG00000237298_13 (sequence is synthesized)
actcctcgtaagaatttaggttaataaatataccaacctgccacagtaagttttccagatgtcatattttctcccgcgtaaaatgtgtattttccttcatcatctttcatcatatttaga

SEQ ID NO: 889631 - DNA, 120 bp, Artificial Sequence
  ENSG00000237298_14 (sequence is synthesized)
actgtcaatttatatatttttccatgtgcttcaattttatatttagaactgggcttgatttccttgtccttaaaattccacaggacatcaattccagagtgggacagctcaacctcaaac

SEQ ID NO: 889632 - DNA, 120 bp, Artificial Sequence
  ENSG00000237298_15 (sequence is synthesized)
accacattttgagtttctgtacaggttgtctttttcccgtcgatgacaaagctgtattctccctggtcctccttggttacatccttgaccgtgaggttctgacgtccacgacgagatgta

SEQ ID NO: 889633 - DNA, 120 bp, Artificial Sequence
  ENSG00000237298_16 (sequence is synthesized)
ttctggaacttctatgtcctgaagttctttcacaaactcaacaactgcacctgaagtgtataacagaaagataaatcaatttttttggagagcctacgtccaggggacattcttgcaggg

SEQ ID NO: 889634 - DNA, 120 bp, Artificial Sequence
  ENSG00000237298_17 (sequence is synthesized)
gacatccgtgcaggagacatccttgcaggtgacatccgtgcaggagacatgcgtataggagacctgctcactgaacgtggagagagagatctgcaaaacaaagacacacaatactttcgt

SEQ ID NO: 889635 - DNA, 120 bp, Artificial Sequence
  ENSG00000237298_18 (sequence is synthesized)
gaggcataaagaaaactcagcaaaacaaacttcattttgtcttattcattattcatgttattttagaatttacttcttgcacgtattagaaggcacctcaaactcattcagatctaaaat

SEQ ID NO: 889636 - DNA, 120 bp, Artificial Sequence
  ENSG00000237298_19 (sequence is synthesized)
agaatatattattgttgcccccacaactatgtttttcctatattctcaattttagctggtagtcattcagtatatccaggtacccaggctcaaaaatcttggaataatcctcaatactct

SEQ ID NO: 889637 - DNA, 120 bp, Artificial Sequence
  ENSG00000237298_20 (sequence is synthesized)
cttttccttaccacttggatttaatcagtcactagacttttttgatttaactactaaaacatcctaataaatgttggttggataagtaaaccaatgaatacatttatggaaaaataaaaa

SEQ ID NO: 889638 - DNA, 120 bp, Artificial Sequence
  ENSG00000237298_21 (sequence is synthesized)
atacacattctttatctcagaggaggaaaacatagaaatgaatttggaaacaaaacaaagcaaaacaagactccatctacacattgcagccagactgacttggagtttgaatgctggcac

SEQ ID NO: 889639 - DNA, 120 bp, Artificial Sequence
  ENSG00000237298_22 (sequence is synthesized)
caccgcttacaggctggatgaattaagacaattttcatagattcccagggcctcagtgttcctatttccaaaccaataatagtcatctttttattgcagggctgttgtataaatttacat

SEQ ID NO: 889640 - DNA, 120 bp, Artificial Sequence
  ENSG00000237298_23 (sequence is synthesized)
atgtaaaaatcaggtgtcaaataagagctattgtgatattagctatagcactaggaaaataaacagtatgttacactgatgaaaattctttgctcatcttacacaggggcaagaaataaa

SEQ ID NO: 889641 - DNA, 120 bp, Artificial Sequence
  ENSG00000237298_24 (sequence is synthesized)
aacttctggcaattgttggtgttgccaatggtgcaacataccatgaagattaaggaaacttagcaacagtgaacttggaccttctaatagctgtctaaccccgagctcatcacttgaaaa

SEQ ID NO: 889642 - DNA, 120 bp, Artificial Sequence
  ENSG00000237298_25 (sequence is synthesized)
aatttgggaatcgtgtacgtgcactccttaggttcactggagacatggacccatgtcttcctgttagcttctcttttctcaattacatagtttgtaatcttagacccaccatcatcttta

SEQ ID NO: 889643 - DNA, 120 bp, Artificial Sequence
  ENSG00000237298_26 (sequence is synthesized)
ggtggaaaccaagatagtgtcatttgatctgctgaaacagattcaaattttatgggtcccactggagggccaggacgacctaaaatggtttaaagaaggaaccctttatcactcagatga

SEQ ID NO: 889644 - DNA, 120 bp, Artificial Sequence
  ENSG00000237298_27 (sequence is synthesized)
ttttaaagccaaatgttatttatgaacagaaaaacaagtaattttaaccaaaccatgcagtctttacccaggacattcagtctcatctcctttgatgctgttcccagattatttacagct

SEQ ID NO: 889645 - DNA, 120 bp, Artificial Sequence
  ENSG00000237298_28 (sequence is synthesized)
gtgatggtatataagccagtgtcactcctgcgagactgcggaataactaaagtgcaagtatcatctaccaccagtttgttgacatgggtgtcatagagaacaggttctttgttatcaggc

SEQ ID NO: 889646 - DNA, 120 bp, Artificial Sequence
  ENSG00000237298_29 (sequence is synthesized)
ttctttggaggagctttaaaccaggttagtgtcgggaatggcacacctttaattttggccacaatgttaacattggttccttcttcaacctccatgaattcttttagatcaattgatggt

SEQ ID NO: 889647 - DNA, 120 bp, Artificial Sequence
  ENSG00000237298_30 (sequence is synthesized)
gggcctagattatttaaaaaaagttgtcattaggagcaaaaagcattgagggatagaaagtagaattcacagttactataaagttgtttggatccactgtaggcagactttgtagctcag

SEQ ID NO: 889648 - DNA, 120 bp, Artificial Sequence
  ENSG00000237298_31 (sequence is synthesized)
cccaatataaagaatggttctgtctttaacactattacgctagtttggggagcaggtacacggggtcagcatcttttattggatctacatgtggctatgtatctgtgcttgcctcacttt

SEQ ID NO: 889649 - DNA, 120 bp, Artificial Sequence
  ENSG00000237298_32 (sequence is synthesized)
atttggcatcattatgcatgtaatgatgtgtattattatattctcatatcctgacaaaagggaagagaggagattgtagtaggagagtatcatgggatactctctttaatatttacacag

SEQ ID NO: 889650 - DNA, 120 bp, Artificial Sequence
  ENSG00000237298_33 (sequence is synthesized)
aattatgaagggatacacaagaaggtgaattccccttttaagaaatataactgttaataaaaggaaagcaattttccattttgcacaaatttaggacagaaatattcaaagagggtagtg

SEQ ID NO: 889651 - DNA, 120 bp, Artificial Sequence
  ENSG00000237298_34 (sequence is synthesized)
atatatatatatatatatatatacttcattaaaatggatatatcttttctcatatagagaaataaaaacttgattgtgaagataaatgggtctcagcagttgctaagaaaatgactggtt

SEQ ID NO: 889652 - DNA, 120 bp, Artificial Sequence
  ENSG00000237298_35 (sequence is synthesized)
gactggttactttctgtcccttttgaggagcatgcagagaaattgctttagcctctgataaataaaacagactgcgaggaaaattacagcgaggaaattacagacatcatctcctttgaa

SEQ ID NO: 889653 - DNA, 120 bp, Artificial Sequence
  ENSG00000237298_36 (sequence is synthesized)
cagggaaaaggtaacaggttgtaattgcagtggaaggggagaccaaacattcaaagattgctgaagagccaacgaactctgattctgtcaagatgatgtctttgatttctttcacaaact

SEQ ID NO: 889654 - DNA, 120 bp, Artificial Sequence
  ENSG00000237298_37 (sequence is synthesized)
tcagtggcacagcctttagctggaaaatgcaagaagacatatgtagatgagacaaagatagaccatgtctatacatgtatgaaatggatgggagacaaaggaagcaacactcatgagcca

SEQ ID NO: 889655 - DNA, 120 bp, Artificial Sequence
  ENSG00000237298_38 (sequence is synthesized)
ggaccataaaagccacagaaatataagaaatgaatgggactactctctgatcattgaaaaagagagacagaacattcgatggaggcagaaagagcaaggagtcagatggtattgcctctg

SEQ ID NO: 889656 - DNA, 120 bp, Artificial Sequence
  ENSG00000237298_39 (sequence is synthesized)
aatttgctgattcagaagatgtcggactcatgttatcctatagaagatgtaacaacccatatacatttatgaaaatcaggaactacattattataatgatgaaggaaaagcccaagaaat

SEQ ID NO: 889657 - DNA, 120 bp, Artificial Sequence
  ENSG00000237298_40 (sequence is synthesized)
caaccaacctgaaacctgcaatgaagctgtgcagctgtctttgccaacagggttctgcacctcaaaactgtataccccactgtcactcggtgctacattgatgatcttaaggccggatac

SEQ ID NO: 889658 - DNA, 120 bp, Artificial Sequence
  ENSG00000237298_41 (sequence is synthesized)
tttgttgaagaagcttattttgtatttgttgtcacttgttagctcttttccatccttaaaccacttagtactgagttcaggggtgccagctactgtacactccaaggtacaggtgtctcc

SEQ ID NO: 889659 - DNA, 120 bp, Artificial Sequence
  ENSG00000237298_42 (sequence is synthesized)
cgtggtaacttttatggattctggcttttctacaattgttgcaggctctggaatgaaatgtaaaagatatccatattttaaactcaaattgaaaaactaaagaaaatacagatcctggtg

SEQ ID NO: 889660 - DNA, 120 bp, Artificial Sequence
  ENSG00000237298_43 (sequence is synthesized)
ctctgtgactggcttgcttgatggttagggtctgatcgctgcctgagacaccatatcggtactcctcagagttggtgatcacaggatctggtttgccactgaaaggaatcttgatgctga

SEQ ID NO: 889661 - DNA, 120 bp, Artificial Sequence
  ENSG00000237298_44 (sequence is synthesized)
ccacttcacctcggagagcatgaactgctcccatgccttcaagagttttaggatggcatcaactgttccaaaaacattgctgagctggactttgtatttcccagcatgagtcttacgttg

SEQ ID NO: 889662 - DNA, 120 bp, Artificial Sequence
  ENSG00000237298_45 (sequence is synthesized)
gacattcttcatgacaagatgagtatagtgctcagtgttttcaatagtaatgttttctgagttttgcaaaagtttctgaccatggaaccaagtcatggcaggtactggacgaccaatgta

SEQ ID NO: 889663 - DNA, 120 bp, Artificial Sequence
  ENSG00000237298_46 (sequence is synthesized)
aacatgaagccgaagtgtggaacccacagctccataatatttctctttcagtgggtaaccaggatggaactgcggtgttgcttgcaggagaagcttactactggtttctacttctccaac

SEQ ID NO: 889664 - DNA, 120 bp, Artificial Sequence
  ENSG00000237298_47 (sequence is synthesized)
ctcattggtggctatgcaggcactgtctccagactgtctatattcaacccagtatccaagaatttctttaccaccatcacattcaggtttctcccactgtagagtgacactatctttgga

SEQ ID NO: 889665 - DNA, 120 bp, Artificial Sequence
  ENSG00000237298_48 (sequence is synthesized)
tattgaaagaatctcaagttctcctggttggcttggtttatctgaaatattttaaaataatgaaaagggagtcagctttactggtgaaataaaaggaccaaacatggcttgcttctttaa

SEQ ID NO: 889666 - DNA, 120 bp, Artificial Sequence
  ENSG00000237298_49 (sequence is synthesized)
gtgggtgatacggctttcgggtgagaaggttctggagatttcactcgttttggagacttaactgcttctggggatttcacccgaggctctggggatttgactcttggtggtgatgtcaca

SEQ ID NO: 889667 - DNA, 120 bp, Artificial Sequence
  ENSG00000237298_50 (sequence is synthesized)
gccttttcagttaccctggccttttgaatagtcagagtgaactctgcttcttgtttcccttcactgttttctaccaccacgctgtaattgccctcatcggaagcctggactgaagagatc

SEQ ID NO: 889668 - DNA, 120 bp, Artificial Sequence
  ENSG00000237298_51 (sequence is synthesized)
catatgaggagagactttcccttgtctccgtcatctgtgatttcacttccctgacagaagacgaagcttccatctcagatgttttcttaaatgatgaaacagcatacgcctctgttcttg

SEQ ID NO: 889669 - DNA, 120 bp, Artificial Sequence
  ENSG00000237298_52 (sequence is synthesized)
tcagctcagggaaaacagatctggggacctcttcatctctgcgttgggaagcataggtggtataatcccctcctgtcacgtccaacgttgcatagtcagaagcttcgcccttgtagttgg

SEQ ID NO: 889670 - DNA, 120 bp, Artificial Sequence
  ENSG00000237298_53 (sequence is synthesized)
tcttttatctcccccatactatcaggtgtattcttaatatctacccgctgatgggctgagagataaattttcaataagaagcagttattttattttaatttttaaatatttttgaaagta

SEQ ID NO: 889671 - DNA, 120 bp, Artificial Sequence
  ENSG00000237298_54 (sequence is synthesized)
ttgatgaccatggatgagctaatggctgtggtctcaatggtggcttcttgaggttctccacaggcaacccatttatcagaaccacgtggacatctttcaactatcctggacaacaaccat

SEQ ID NO: 889672 - DNA, 120 bp, Artificial Sequence
  ENSG00000237298_55 (sequence is synthesized)
gttatttcttagccattggacttccaccttatctttattgagttctgctaaaaagacaacatcagcaccaggggcttcaagaatatcttgtggaggcctgatgatctcaacaggaatttc

SEQ ID NO: 889673 - DNA, 120 bp, Artificial Sequence
  ENSG00000237298_56 (sequence is synthesized)
gaagtagagcatttgttcctctcactatgtctgcaggctcaagagttttgatgaaagaaggaggttctacaaaagcatgaaagcattgtgtggaccttcttattgatagcggactgcaca

SEQ ID NO: 889674 - DNA, 120 bp, Artificial Sequence
  ENSG00000237298_57 (sequence is synthesized)
ggctctaattctttaatgaaatgtggcttatcaatgatgatcaactctgcttggcagatgtctgctccaaacttgttggaagccttacaagaataaactcctctatcttgaatggtggag

SEQ ID NO: 889675 - DNA, 120 bp, Artificial Sequence
  ENSG00000237298_58 (sequence is synthesized)
caatatgaaatgaagtgacaacatctgtgccaatgtatggcatttacctgtcacagttagtgtggctgtacagctgacactgccatactcattggaagctttgcatgtatactcgccgca

SEQ ID NO: 889676 - DNA, 120 bp, Artificial Sequence
  ENSG00000237298_59 (sequence is synthesized)
gtcaaccacctgggttctcaggatttcaaggctggagatatactttgaagatcgaatagaacacttgtcactctcataaatttctcggccagctttaaaccactggaaccggacattggg

SEQ ID NO: 889677 - DNA, 120 bp, Artificial Sequence
  ENSG00000237298_60 (sequence is synthesized)
agcactttggatctcacagcatataagcattagaagacaggactcaagtgtctgctggctgtaaaaatactggagaaactcatctatagcatgcagaatacatattcagtcattgtgtac

SEQ ID NO: 889678 - DNA, 120 bp, Artificial Sequence
  ENSG00000237298_61 (sequence is synthesized)
aatgcagctgtatagtccttggtctaccagctgaacattacatatgactcaggttggctgtgcttgatacttggcctacagcattactagcaacaaacgtcttcttcctttggtgaactg

SEQ ID NO: 889679 - DNA, 120 bp, Artificial Sequence
  ENSG00000237298_62 (sequence is synthesized)
aatgaggcaccaggatacacatgaactgccactggacatgaactgcacacaataagtgagttaacagaaacccggcattgaaaacgggctggctgcccttcagaagtgacagtgtcctga

SEQ ID NO: 889680 - DNA, 120 bp, Artificial Sequence
  ENSG00000237298_63 (sequence is synthesized)
agcggggtgatgatggcaggtggataaacaggcatttcctgatcaggagacacaacttctggaactaaagaaagaaaccacaagatttgtcatgattaagtcaccatagagacctcacag

SEQ ID NO: 889681 - DNA, 120 bp, Artificial Sequence
  ENSG00000237298_64 (sequence is synthesized)
attgttacagagaaaaagcggggccaaatgaaacgtgatggtctatgattcacaatgaaaagtggtaaaggagaggcgagaccatggcatataacagggaaataattagttgaattagaa

SEQ ID NO: 889682 - DNA, 120 bp, Artificial Sequence
  ENSG00000237298_65 (sequence is synthesized)
gagaatggtaggaacaacaatgatttacatgaactcttgagtaattgttacagacattgttaagattcgatctatatttaaatggggttctgaaagttgttttactttaccttccagact

SEQ ID NO: 889683 - DNA, 120 bp, Artificial Sequence
  ENSG00000237298_66 (sequence is synthesized)
gttccatgtccgccacatctagggtgacaggttggattatgtccctccctaagagatgttggactcataacctcaagtacctcaggatgcgaacttatttggtgataggctttatagagg

SEQ ID NO: 889684 - DNA, 73 bp, Artificial Sequence
  ENSG00000237298_67 (sequence is synthesized)
ctcaggatgcgaacttatttggtgataggctttatagaggtatgtgtcatttataaagaaaagaggtttaatt

SEQ ID NO: 889685 - DNA, 120 bp, Artificial Sequence
  ENSG00000237298_68 (sequence is synthesized)
caaggaggagcaagtcacatcttacgtggtgtcagggaagagagaaatgagaaccaaacaaaaggggtttccccttataaaaccgtcagatcttgtaagacttattcactaccatgataa

SEQ ID NO: 889686 - DNA, 120 bp, Artificial Sequence
  ENSG00000237298_69 (sequence is synthesized)
ctctgtgactggcttgcttgatggttagggtctgatcgctgcctgagacaccatatcggtactcctcagagttgattctgcgtgtgaaaaacataaaaagaaaaaaagtcaacttcttca

SEQ ID NO: 889687 - DNA, 120 bp, Artificial Sequence
  ENSG00000237298_70 (sequence is synthesized)
ttcaagagttttagtgggtaaccaggatggaactgcggtgttgcttgcaggagaagcttactactggtttctacttctccaacctcattggtggctatgcaggcactgtctccagactgt

SEQ ID NO: 889688 - DNA, 120 bp, Artificial Sequence
  ENSG00000237298_71 (sequence is synthesized)
tttgcaaacaactggttcagaagcagggctggtctcactcaggccaacatcattctgtgcgatgatgcggaactgatactcagcatcgggaacaagccctgtgacagtgtacattgtggt

SEQ ID NO: 889689 - DNA, 120 bp, Artificial Sequence
  ENSG00000237298_72 (sequence is synthesized)
ggtgatctgagtcttgttgtgtctgacccacttgtcagtggatgtctctttgcgttcgatgtagtagcctgtgactctagaaccaccatcatctttgggccgggaccaggacaagctaac

SEQ ID NO: 889690 - DNA, 120 bp, Artificial Sequence
  ENSG00000237298_73 (sequence is synthesized)
aaactcgtattcaagaccttcaataaggtttttcactgaaaagacagtttctcgaatttcttctgttgtcacagaaatccatttattctgcttcttctcacgcttctcaagaattttatg

SEQ ID NO: 889691 - DNA, 120 bp, Artificial Sequence
  ENSG00000237298_74 (sequence is synthesized)
caaagatggaactttaccataggaagatacagaaatcaagttgtactcaccaaatggactcttaatgatcacaactgaggacacttctagagggtcactgatgccgaaagtgttctgagc

SEQ ID NO: 889692 - DNA, 120 bp, Artificial Sequence
  ENSG00000237298_75 (sequence is synthesized)
tgaaacccggaagtaatagccagcattttctgtgaggttcacaattctacaggttgtcactgagatggctgaagacaccaattgccattcagccccctccttggcctcacatttttccac

SEQ ID NO: 889693 - DNA, 120 bp, Artificial Sequence
  ENSG00000237298_76 (sequence is synthesized)
gatctgaaggtggactgaactttccaggtccagctgcattttcagcacatactctgaagacataggtccagcaagattttcagccaacacacggaatctgtattttttcttattagtgag

SEQ ID NO: 889694 - DNA, 120 bp, Artificial Sequence
  ENSG00000237298_77 (sequence is synthesized)
acctttcactctgaattaggaacaaagtgcatgtgtatcatcatgctgattgagaaacttaccaaactgatatttggctgttattggagaggcctgaactggttcaccaacaccatacat

SEQ ID NO: 889695 - DNA, 120 bp, Artificial Sequence
  ENSG00000237298_78 (sequence is synthesized)
atgtaccttccacaaaaagtctagcacgagacttcctgtcttctaccccgcaagcatattcacactcatcatccagcctgcaatcttttataatgagtctgtgtatacttccatcttttt

SEQ ID NO: 889696 - DNA, 120 bp, Artificial Sequence
  ENSG00000237298_79 (sequence is synthesized)
caaatttgtatctaaaggagacattggattatcagttagcttgcaatgatggccactaaattgtcaaaagtgtatatatagctacagaaatagagaataaaaagatcttgcttacttttt

SEQ ID NO: 889697 - DNA, 120 bp, Artificial Sequence
  ENSG00000237298_80 (sequence is synthesized)
aatttaaatcatttaattatttaattatttttattaaaaatttttgacttttagcttcaggggtacatgtgcagtttgttacatgggtatattgcatgatgctgaggtttaattttgtac

SEQ ID NO: 889698 - DNA, 120 bp, Artificial Sequence
  ENSG00000237298_81 (sequence is synthesized)
tttccttgctgttcctcattttcttcaattctacatttattaagcatgcactctgtatttttttctcactataacattgccagtcctccttcctttcctctcttcctccttcccttctct

SEQ ID NO: 889699 - DNA, 120 bp, Artificial Sequence
  ENSG00000237298_82 (sequence is synthesized)
ctgagaaaaggaggtttagaaacctgagaaaaggaggtttagaaaccttagaaagaccacagggttaattttgtgacctatttttatttacattagggcatattaaaaacaaattctttt

SEQ ID NO: 889700 - DNA, 120 bp, Artificial Sequence
  ENSG00000237298_83 (sequence is synthesized)
gcggaaggtggggtgtggggccggaagaccctccccccgcgtcttcagaggagcgctgtttctggaggagttaggggaaggaggctgcctggtaagccaggaaaggggcttctggccgtt

SEQ ID NO: 889701 - DNA, 120 bp, Artificial Sequence
  ENSG00000237298_84 (sequence is synthesized)
ttctggaggattgcttggaggttctggaggatctgtaaatataagtggaaagcacacatgtattagaatacagtcccaagtattataagccaatgactttcatttaaaaacagaaaagtg

SEQ ID NO: 889702 - DNA, 120 bp, Artificial Sequence
  ENSG00000237298_85 (sequence is synthesized)
ctgaaataatgtttataattttgtggttgaaagggcacttactcaatggtgtttttggtgtgactggttcctcagatttcaagggtttgcttatgccaaactggttttctgctgaaacac

SEQ ID NO: 889703 - DNA, 120 bp, Artificial Sequence
  ENSG00000237298_86 (sequence is synthesized)
ggaaatggtattctacattctctttgaggccttttaccaccagagatgtacctcggactctggaatcaatggtataccaggcggctttaggcacttctcgtctctcgaggatgtagccta

SEQ ID NO: 889704 - DNA, 120 bp, Artificial Sequence
  ENSG00000237298_87 (sequence is synthesized)
agatgtcagcaccaccatcatcagcaggaggtctccagctgaccctcacagagcggacttggatgtcatcatattccagtggcccttctggactgttgggacttcctatcaccctgacct

SEQ ID NO: 889705 - DNA, 120 bp, Artificial Sequence
  ENSG00000237298_88 (sequence is synthesized)
tgatgtagacagccttcttgccacatttattttccagaaccaggtcataagtgccagaatcacccctgtctgcttctttgatcacaagctcagtgtgtgtttcagatgttgcaatcatgg

SEQ ID NO: 889706 - DNA, 120 bp, Artificial Sequence
  ENSG00000237298_89 (sequence is synthesized)
cacgcttactaatatcctggccttccttggtccatttacatattgggaatggttttcctttgattggtatggtaagtctgatgacgccaccttgccttacaaagataccttcttggtatc

SEQ ID NO: 889707 - DNA, 120 bp, Artificial Sequence
  ENSG00000237298_90 (sequence is synthesized)
tttcatcaagttcataatcaggatattctggaaaaaaaggtagggtttcaatttagcatttggggtagggggactaagaaataagtctatggcaattattgcagaaagcaaatgatcata

SEQ ID NO: 889708 - DNA, 120 bp, Artificial Sequence
  ENSG00000237298_91 (sequence is synthesized)
tgtctcaccaagcatttcagtgactttgactgttcctggtacctcagcaggctcaccaggtccaccagcattacaagctaggacgcggaacctgtattctgcaccctgaggtaggtgtgt

SEQ ID NO: 889709 - DNA, 120 bp, Artificial Sequence
  ENSG00000237298_92 (sequence is synthesized)
tagagtatactctcgaatcttggttggagtggtgttacacttggtccattcatgttgatctactttttgcatttcaatcaagtagcctgtgactttagatcctccttcatcttctggaac

SEQ ID NO: 889710 - DNA, 120 bp, Artificial Sequence
  ENSG00000237298_93 (sequence is synthesized)
actccaggccagggagactgatgtccttgttgtatcagtaactcttgggttttgtggctttcctggaggagctgagaataagaataagaatatactggttaaagttgctgcaaagttgaa

SEQ ID NO: 889711 - DNA, 120 bp, Artificial Sequence
  ENSG00000237298_94 (sequence is synthesized)
tgaaaattagctgtgccacctaacaaattcaatgagttgttgaaacggactgttaacattagcctgtttttttgtcttgtgaaaattttattcatggctgggtgtggtggctcatgcctg

SEQ ID NO: 889712 - DNA, 69 bp, Artificial Sequence
  ENSG00000237298_95 (sequence is synthesized)
tggtggctcatgcctgtaatcacagcaagttgggaggccaaggtgggcagatacttgaggtcaggagtc

SEQ ID NO: 889713 - DNA, 120 bp, Artificial Sequence
  ENSG00000237298_96 (sequence is synthesized)
tgagaaagataacatgtgaacgctttcgactattaaacgtagccaagctacatcatgttattatgcatttattagaaaatattggttacataaccttggaagtaagctacagtaacttta

SEQ ID NO: 889714 - DNA, 120 bp, Artificial Sequence
  ENSG00000237298_97 (sequence is synthesized)
tagcagagaaaactaagtggcttagagttctcatagctttttgttgttgttgtgcgtgcaaattagattggagagtagaggattgagaatggcataaaatcataagacatgcattccttg

SEQ ID NO: 889715 - DNA, 120 bp, Artificial Sequence
  ENSG00000237298_98 (sequence is synthesized)
ccaaaaatagtaacataggactcagtgtagtgcaaaacatgttttgttttgttttttgatagagtaggcactgcatacttagttcaataaatcagagaaacttttttcttatgaatgaga

SEQ ID NO: 889716 - DNA, 120 bp, Artificial Sequence
  ENSG00000237298_99 (sequence is synthesized)
ggtacactaatggctttttcataaggacagtgtataaggatgtcctgggtcaggatgagaacatacctaaaaggcacacaggggtttgtaaagtaggagagtataagaccgtctttagat

SEQ ID NO: 889717 - DNA, 120 bp, Artificial Sequence
  ENSG00000237298_100 (sequence is synthesized)
ttgccaagactctcagggtgatagcttagttgtagcctaagttcataaatagtcatcatgtactagcaactgtccaaggctctggcatgtaaagattattgctattaatttcctcttact

SEQ ID NO: 889718 - DNA, 120 bp, Artificial Sequence
  ENSG00000237298_101 (sequence is synthesized)
acatgtgggtagggcttgctagaaatgaaagaccctcacaaggattacctcattaaataactgtgaaatctgaaatctaaactctgtgatattggaaggatattttaaaataaagggact

SEQ ID NO: 889719 - DNA, 120 bp, Artificial Sequence
  ENSG00000237298_102 (sequence is synthesized)
gacctgccagttcaagcttagctctggcttctttgtctttggcaataaatctgtattcaccctggtcacggggcttaatatcacaaatctgtagtcgatgtatctttccttcactcatca

SEQ ID NO: 889720 - DNA, 120 bp, Artificial Sequence
  ENSG00000237298_103 (sequence is synthesized)
cgagcccagatcagagatacagtactcttggtgacatcaataacctcaggtttcccaggaggatctaaaacaaaaagaggaacacctggagatgaagacaaggaagatgtcagtttctac

SEQ ID NO: 889721 - DNA, 120 bp, Artificial Sequence
  ENSG00000237298_104 (sequence is synthesized)
attaagtaacaaactagaaagaaaacaactttttttctccttcacaaaaacataccaaatgggaactgcgcaaccatctttggagatgtgagaggctctgaaatgccaaatcggttttca

SEQ ID NO: 889722 - DNA, 120 bp, Artificial Sequence
  ENSG00000237298_105 (sequence is synthesized)
gcacggacccggaagatgtactcctggcctgggatcagctttccaaccctgcaggaagtttttgtgactgaagctagagccgtgacccagtcacctcggcttacatcacacttctccact

SEQ ID NO: 889723 - DNA, 120 bp, Artificial Sequence
  ENSG00000237298_106 (sequence is synthesized)
ccactcgtgttggtgtaatgaatcttactgctttcttggagttccacaccattgtggtaccatttaacctcggcagttggcttagactgaacatttaaaataaaacgtgtattttggcca

SEQ ID NO: 889724 - DNA, 120 bp, Artificial Sequence
  ENSG00000237298_107 (sequence is synthesized)
agcttgctcatgggttttgtggagggcgtagattggaaccaaaaagcacgcctcggcttggtgctccctgtcgccctctgttgacatggggagagaagagcgggtctgactcggaaatga

SEQ ID NO: 889725 - DNA, 120 bp, Artificial Sequence
  ENSG00000237298_108 (sequence is synthesized)
cgccataatgctgaggaaccactcctggcgttgcggaaggtggggtgtggggccggaagaccctccccccgcgtcttcagaggagcgctgtttctggaggagttaggggaaggaggctgc

SEQ ID NO: 889726 - DNA, 120 bp, Artificial Sequence
  ENSG00000237298_109 (sequence is synthesized)
actgagtactctgtccagcgatctgcaggctgctcttcttctctgtaactagtgatgtagccatcgattttagcacctccatcacgtaggggaggtaaccaggctaaggtggcactgttc

SEQ ID NO: 889727 - DNA, 120 bp, Artificial Sequence
  ENSG00000237298_110 (sequence is synthesized)
ttggtcatttcagtcacttctaatttccttgggggatccggctcacctagaagaaaaacataatttagaagattacctaggtggctgccatgagatagtcatgtgttcaggagtaacatc

SEQ ID NO: 889728 - DNA, 120 bp, Artificial Sequence
  ENSG00000237298_111 (sequence is synthesized)
cagaatattaataggacctgttggtggcccaggaacatcaagaacagtaagatgtacggctactgttttgctaccggctgcattggaaactgtgatttgatattccccagtgtctctcct

SEQ ID NO: 889729 - DNA, 120 bp, Artificial Sequence
  ENSG00000237298_112 (sequence is synthesized)
ctggaggacagtgtgacaactggagtgccaggaggaccaggaactttgaatggatattgggctacagtaggctctgaattgagagaatagacgccttgatggctcctctggcagttcttg

SEQ ID NO: 889730 - DNA, 120 bp, Artificial Sequence
  ENSG00000237298_113 (sequence is synthesized)
atgaccatggatgagctaatggctgtggtctcaatggtggcttcttgaggaactacttacagattggatcatgtgctgttttgggatctgaaggtggactgaactttccaggtccagctg

SEQ ID NO: 889731 - DNA, 120 bp, Artificial Sequence
  ENSG00000237298_114 (sequence is synthesized)
ctgaagatgtactctttattggggattaatttggtggccttgaagtttgtatccttgacggtggatgagagcttgtgccacacttcactatcagttgctcgtctctccacaacatagttt

SEQ ID NO: 889732 - DNA, 120 bp, Artificial Sequence
  ENSG00000237298_115 (sequence is synthesized)
cattacagatgcagaaaaaaaaattgttcaccattttttttatttttttctttcaagaaagtaactgcaaagagtttatccccttttaaaatgagaaccttccttacctaagacgttcac

SEQ ID NO: 889733 - DNA, 120 bp, Artificial Sequence
  ENSG00000237298_116 (sequence is synthesized)
ttccaccacagcagtggcccggccacacacattcacagcctcaatgatatatgtgccagtgtcacttctcttactatcaacaatagtcactgtggatttcttagggacattttcaatggt

SEQ ID NO: 889734 - DNA, 120 bp, Artificial Sequence
  ENSG00000237298_117 (sequence is synthesized)
aattcttttgtcctgcttcagaatcatatcagcctttgtccaagttattttaggttcaggttttccggttacggtggcaggaagttcaatcttggtcccagcttttacagtgagaccagc

SEQ ID NO: 889735 - DNA, 120 bp, Artificial Sequence
  ENSG00000237298_118 (sequence is synthesized)
aaggagcttcacatcgaggaagatttctggggcctctgaattggaaaagattatttatgatgttatcaagttcaagcagatttaaggttctccacaggcaacccatttatcagaaccacg

SEQ ID NO: 889736 - DNA, 120 bp, Artificial Sequence
  ENSG00000237298_119 (sequence is synthesized)
atttactttgcatcttgtagtgtctctgccagctttattaatagcagtcgcagtataccaggcagaatcttggctgacagtggaatcgattttaagggcagcttctcccttggttccttc

SEQ ID NO: 889737 - DNA, 120 bp, Artificial Sequence
  ENSG00000237298_120 (sequence is synthesized)
aattctataaaaagttgggggagggaataatcaatatagtggtatagcttccctggttattggatttgtataatgagcttagctttattatttccatacttacctgattttgggatattt

SEQ ID NO: 889738 - DNA, 120 bp, Artificial Sequence
  ENSG00000237298_121 (sequence is synthesized)
atgaggcacaatgatgtcactgtttttcaaccatacaatgtcagggttggggttacccgtagctctgactttcatttcaagtcgggaaccttcctttatattgacatttttcagtttttc

SEQ ID NO: 889739 - DNA, 120 bp, Artificial Sequence
  ENSG00000237298_122 (sequence is synthesized)
tacaaacatcggttttacctgatgttccacagctgaaagagaaaggtcatgatttagagggagtaaggctgaaatacctgtttataacccaagtgataagaaaattcatttatttttatt

SEQ ID NO: 889740 - DNA, 120 bp, Artificial Sequence
  ENSG00000237298_123 (sequence is synthesized)
ttatctcattttaccttccacagttaaaatcactgaaattgaagatctgcctgccctgttttgggcaaccacagtccattccccagaatcactgggtgtggcagggacaataattagtga

SEQ ID NO: 889741 - DNA, 120 bp, Artificial Sequence
  ENSG00000237298_124 (sequence is synthesized)
ttgagtaccatcttctttaatgactactttatgggtatagtcattgacaatttgctggcctgtgaaaatatgtttaaaagaaagtagattttaaaatagtttttaaaaattgttagatgc

SEQ ID NO: 889742 - DNA, 120 bp, Artificial Sequence
  ENSG00000237298_125 (sequence is synthesized)
atacataagcttgtttttgtgtttttatgattcatgagcaaaaacttatcacgcttaccatcatgaaaccagaacgtctctggcataggtctaccaacaacctttaagtcaaatctggca

SEQ ID NO: 889743 - DNA, 120 bp, Artificial Sequence
  ENSG00000237298_126 (sequence is synthesized)
gtttgcccttctaaacatttgaaagaaacaggttttaacacaaagactggtttatatagtctctcaagttgtgactcatctgtctcctccagcctacgtccaggggacattcttgcaggg

SEQ ID NO: 889744 - DNA, 120 bp, Artificial Sequence
  ENSG00000237298_127 (sequence is synthesized)
gttcactgccatcacttggaaggttgatgttatctttggtccatgtcacttcaggagcaggacgacctttaattggcacaaatatcctaatactgagtcctgctctaacaacaagtgttc

SEQ ID NO: 889745 - DNA, 120 bp, Artificial Sequence
  ENSG00000237298_128 (sequence is synthesized)
ttcgaagctcggcatctagttcaaaatcaggagccatctcccgttctacgatttcaacatctggaatcaccgctggctccccaacacctgcatcgttgatggcactgattctgaagttgt

SEQ ID NO: 889746 - DNA, 120 bp, Artificial Sequence
  ENSG00000237298_129 (sequence is synthesized)
atttttctttagtctgaagatcaggaacaacgaactgagtgattctgagggcggttcctgtggtatcttttatccaggcctcgtctcctactttttgatgctccacgacatagccagtga

SEQ ID NO: 889747 - DNA, 120 bp, Artificial Sequence
  ENSG00000237298_130 (sequence is synthesized)
tttcaagtccaccatcataatgaggcttgccccatgccaaagaagcagatttcttggtagtatcagtgacatgcggatttgaaggtggtcctggaggatctgagaaagaaacaaagacac

SEQ ID NO: 889748 - DNA, 120 bp, Artificial Sequence
  ENSG00000237298_131 (sequence is synthesized)
aaaagtatatattcagagtttggcttttgggtaatttagataaaatattggcactctggaatgaacggtgttgaaaaagacaaatactaacatgctgcatctttcatcagaacagaatct

SEQ ID NO: 889749 - DNA, 120 bp, Artificial Sequence
  ENSG00000237298_132 (sequence is synthesized)
cctagatggaaccaactctgtggtacgattgaagctccctgtgagatctggctgaggcttctgctgagaccacattcgtgctcagcttgcttcctctgccctatctgctggctgccccat

SEQ ID NO: 889750 - DNA, 120 bp, Artificial Sequence
  ENSG00000237298_133 (sequence is synthesized)
tccctttttccctgagagtaataatccctcaaagaatttctgagacaagaatccccgtctcaggctctgcttttagggaatctgacttaagacggaaaacttgctgaataaattaatgaa

SEQ ID NO: 889751 - DNA, 120 bp, Artificial Sequence
  ENSG00000237298_134 (sequence is synthesized)
gagcatgcagagaaattgctttagcctctgataaataaaacagactgcgaggaaaattacagcgaggaaattacagacatcatctcctttgaacagggaaaaggtaacagtttaggaaaa

SEQ ID NO: 889752 - DNA, 120 bp, Artificial Sequence
  ENSG00000237298_135 (sequence is synthesized)
aaaatgcaagaaccaaagaagaataaagaccacgtttccagtttccaacataagagagtaaatatcacaaggcacatacacaagatgaaacattgacatttcacagaatcggttaatgag

SEQ ID NO: 889753 - DNA, 120 bp, Artificial Sequence
  ENSG00000237298_136 (sequence is synthesized)
ctcaagacagatttaggtggtcaatcacagagggtaaaggattatagataaaactggagatgaacaaaaggatgggaaagcagaattcaacacaaaagaggccttgatgattccaagaag

SEQ ID NO: 889754 - DNA, 120 bp, Artificial Sequence
  ENSG00000237298_137 (sequence is synthesized)
agctgctatacctggtgcaggtactggcaccttaggtttaacttctggaaggacttcttcttcaggtggagcctccactttcttaggagcaggaactggcaccttcttctcaggcacagg

SEQ ID NO: 889755 - DNA, 120 bp, Artificial Sequence
  ENSG00000237298_138 (sequence is synthesized)
cttcttgggtacctctggcactttaacgaaatgatttagagaaaaattttatacgacataaaaatactgattccaagcatagtttcaaaagattaagataagatttgtgagttacttagc

SEQ ID NO: 889756 - DNA, 120 bp, Artificial Sequence
  ENSG00000237298_139 (sequence is synthesized)
aatatatgtacacatgtccatacacataaataaaaaaattttgaacttgtagctgaaacacaaagatgtatacctttcacttcaataacttcttcctgtactggagtccgggaaggtttt

SEQ ID NO: 889757 - DNA, 120 bp, Artificial Sequence
  ENSG00000237298_140 (sequence is synthesized)
agaggctgtgccttccacaaatgctatcctgtatctgtcagaagcagctatttctttgccatccttaaaccaggacaccctcatggggagggagcctgcaattttgcagtccagtctgca

SEQ ID NO: 889758 - DNA, 120 bp, Artificial Sequence
  ENSG00000237298_141 (sequence is synthesized)
gatgtttggcttccagcttcattttcagccaggcacgtgtatttgcctccaaaactaatctgaacatcagggattatcaagactgcaacaccattggaaaagctcattttgatttttccg

SEQ ID NO: 889759 - DNA, 120 bp, Artificial Sequence
  ENSG00000237298_142 (sequence is synthesized)
gcagagtgctttcaaagttgggtagcaatctacttttatgagctccaaattgtatttttaaatgcactgggaaaggacaaaagcctgcttcttaggttttattttcagctggaagtagcg

SEQ ID NO: 889760 - DNA, 120 bp, Artificial Sequence
  ENSG00000237298_143 (sequence is synthesized)
aggcattcctaccttccactgagagtgaagctgatgttgtggcaacaccatagtcattcttggcttcacaggtatagactgccgcatcctctgggaaggcttcaattagcaaaagcgtgt

SEQ ID NO: 889761 - DNA, 120 bp, Artificial Sequence
  ENSG00000237298_144 (sequence is synthesized)
gctgaggggggccgggggcatctacatgaaccaagaggaaagaaatagaatagacgccttgatggctcctctggcagttcttgatgaccatggatgagctaatggctgtggtctcaatgg

SEQ ID NO: 889762 - DNA, 120 bp, Artificial Sequence
  ENSG00000237298_145 (sequence is synthesized)
agcatgcagagaaattgctttagcctctgataaataaaacagactgcgaggaaaattacagcgaggaaattacagacatcatctcctttgaacagggaaaaggtaacagatatcgcacag

SEQ ID NO: 889763 - DNA, 120 bp, Artificial Sequence
  ENSG00000237298_146 (sequence is synthesized)
gcatgaactgctcccatgccttcaagagttttagagaatagacgccttgatggctcctctggcagttcttgatgaccatggatgagctaatggctgtggtctcaatggtggcttcttgag

SEQ ID NO: 889764 - DNA, 120 bp, Artificial Sequence
  ENSG00000237298_147 (sequence is synthesized)
ctctgtgactggcttgcttgatggttagggtctgatcgctgcctgagacaccatatcggtactcctcagagttgatgatagccaatgactctacttcctccatcactgattggctcattc

SEQ ID NO: 889765 - DNA, 120 bp, Artificial Sequence
  ENSG00000237298_148 (sequence is synthesized)
tagttttttattaggaaaaatgaccatcatgaatgctgttacatctttgcctataatactcagcagaatcttaccattttctgcgaggatagtcactggatcagaaggttcagaaggaac

SEQ ID NO: 889766 - DNA, 120 bp, Artificial Sequence
  ENSG00000237298_149 (sequence is synthesized)
taatattttgagatctaggctgtgagatgaaggctggagcatctgagagttctttgctcagtgtcaaatcatactgacacttgacgattccttccttggttttgcttatgcaggtgagga

SEQ ID NO: 889767 - DNA, 120 bp, Artificial Sequence
  ENSG00000237298_150 (sequence is synthesized)
ttccttcatctctgtgactggcttgcttgatggttagggtctgatcgctgcctgagacaccatatcggtactcctcagagttggtaagctctacgccattcagtacccatttcacatcag

SEQ ID NO: 889768 - DNA, 120 bp, Artificial Sequence
  ENSG00000237298_151 (sequence is synthesized)
tggcaccagcaatgttggcttttaaaaccagtctttgaccttcgtttatgctcatctgagtagaaaatgctttaatctcagcatgagttctgacttcttctgatgcctgtgatgttttag

SEQ ID NO: 889769 - DNA, 120 bp, Artificial Sequence
  ENSG00000237298_152 (sequence is synthesized)
tgatttcctcatggacaatggatttttccagggaggttgctgctgatttcttgacttcttcagaaatcagaacctttgaagcttcctctttgagggctaacttttcttgagattttgcct

SEQ ID NO: 889770 - DNA, 120 bp, Artificial Sequence
  ENSG00000237298_153 (sequence is synthesized)
tttttgggaaatttcctcttggacaacagctttcttctgaggtgtaatttcagaagtcttttgtgtagagactttctgtgcctcagtatcttttatagctaaaaaagaaacctctgtaag

SEQ ID NO: 889771 - DNA, 120 bp, Artificial Sequence
  ENSG00000237298_154 (sequence is synthesized)
tctcaatggtggcttcttgaggtaaggttctttcattcatgttccaggtgacggttggaggaggctttccagacacataggcaatgattcggatcacccctccagcatggacaacaattc

SEQ ID NO: 889772 - DNA, 120 bp, Artificial Sequence
  ENSG00000237298_155 (sequence is synthesized)
tatctctgacactggcatctagctgaaggtcaggtgaaactggaagcaattgaaaattacaaatgtgatttttccccttcaatctgaaacataaatactgatggcataaggaaggattga

SEQ ID NO: 889773 - DNA, 120 bp, Artificial Sequence
  ENSG00000237298_156 (sequence is synthesized)
ccatttacatattgggaatggttttcctttgattggtatgcaggctcaccaggtccaccagcattacaagctaggacgcggaacctgtattctgcaccctgagaatcagaggtggggaga

SEQ ID NO: 889774 - DNA, 120 bp, Artificial Sequence
  ENSG00000237298_157 (sequence is synthesized)
tcgatgctggaggacccggtttatctgaaggaataaggaagaagagtgaatatgtggaatggggaatgagtatagagtagaggtctggagacctgggctgcagtctttctattgtcaatt

SEQ ID NO: 889775 - DNA, 120 bp, Artificial Sequence
  ENSG00000237298_158 (sequence is synthesized)
tcctatatgacctaggagcagtaatggtatagtctcctgagtccttccggttcacgctgaatagctccaaggtgcacagattccgctgcatggccatctttatgccttctgctggtttta

SEQ ID NO: 889776 - DNA, 120 bp, Artificial Sequence
  ENSG00000237298_159 (sequence is synthesized)
ttctaggccagtagctgtgtactcttcctggggaatctggtgaggtgcagtattgcaccgtacccatttatcaccaggaagtttgcaagcttctacgaaatagccaataattttactgcc

SEQ ID NO: 889777 - DNA, 120 bp, Artificial Sequence
  ENSG00000237298_160 (sequence is synthesized)
cagttcttgatgaccatggatgagctaatggctgtggtctcaatggtggcttcttgagttactttggatccaccatcttttagtgggggagaccactccagatctgcagatgatttagtc

SEQ ID NO: 889778 - DNA, 120 bp, Artificial Sequence
  ENSG00000237298_161 (sequence is synthesized)
tgccaccattatcaagaggggcatcccatgtcaagtagcaagattcagctttaatgtcagtaacagcaagatttcttggtggggatgggcggtctggaaaggaatcaacagagaatattg

SEQ ID NO: 889779 - DNA, 120 bp, Artificial Sequence
  ENSG00000237298_162 (sequence is synthesized)
agaaggcaattcttaaacagacactggatgcctttttgatgtaagaaagcaagtcacttaccatatacttcaacgtgaacatttcggaacactgagccaaggcgattggaagcagtaact

SEQ ID NO: 889780 - DNA, 120 bp, Artificial Sequence
  ENSG00000237298_163 (sequence is synthesized)
gtgtaagtgcctttgtcctcccggaccgctttgggaatgctaagctcagtttttgcctcacttcgggatacctcttccttggttatctgaagtgcatcagtgggtttttcaattacagtt

SEQ ID NO: 889781 - DNA, 120 bp, Artificial Sequence
  ENSG00000237298_164 (sequence is synthesized)
tcatttttggaccattcaatcttaggcattggaaggcctgtcacatctgcagggatgtggacaggctctcctgccttaactttgatagtgtctcctcgaacactcagacgcaacttaata

SEQ ID NO: 889782 - DNA, 120 bp, Artificial Sequence
  ENSG00000237298_165 (sequence is synthesized)
gttggaggcactgcaaagagaagagaaagaaaaacagtaacaaagtcataaggatgtttttttcaacttatgggataaaggcacactgtaaaatgcattaaaattattattatattcaga

SEQ ID NO: 889783 - DNA, 120 bp, Artificial Sequence
  ENSG00000237298_166 (sequence is synthesized)
ctgttagaactttgccttcatcaatgctgatatcagatggaagagcttcaattttaggcggaattcctttatggaacaatgacaaaaaaaaggtcttagaatcactgaaaaaaataaaga

SEQ ID NO: 889784 - DNA, 120 bp, Artificial Sequence
  ENSG00000237298_167 (sequence is synthesized)
attgggctacagtaggctctgaattgagatgctggaggacccggtttatctgaaggaataaggaagaagagtgaatatgtggaatggggaatgagtatagagtagaggtctggagacctg

SEQ ID NO: 889785 - DNA, 120 bp, Artificial Sequence
  ENSG00000237298_168 (sequence is synthesized)
agaaaaatgattagtcatatagaaagtaattgacatattgtgcatcctgcaaataaatgttacacggcagttggtagctttactttgaaatgtaatctatccaagtttctgtgtagctat

SEQ ID NO: 889786 - DNA, 120 bp, Artificial Sequence
  ENSG00000237298_169 (sequence is synthesized)
aaagaaagtttgactacaagaatgaattcacatcagttggctgtccctctttcacatggaatttaataaggcttcttagagttttctgtgcttgaaagagaggcaaaaaaacgatctaaa

SEQ ID NO: 889787 - DNA, 120 bp, Artificial Sequence
  ENSG00000237298_170 (sequence is synthesized)
ggccttaaacatgtaaggaagaagggtgaggagatacttacgaaggaccattaaggaagctgtagctgaacactggccacggaaatttttggccttaattgtgtactttccactgtcgct

SEQ ID NO: 889788 - DNA, 120 bp, Artificial Sequence
  ENSG00000237298_171 (sequence is synthesized)
atacatttctggagcggcttatgctgacatttgaagaaatagaaatctaagacaaaggaaaaagaaaagaaatgttgaagttcttcagatgtggaagacatggtgatcacaggatctggt

SEQ ID NO: 889789 - DNA, 120 bp, Artificial Sequence
  ENSG00000237298_172 (sequence is synthesized)
aaaatccaaatggtcaaattgttaacattcttaattacgaacataaatttatgattctggctatgaaacttatagtcaatttccaaataattgtttcatgaaagaaaaattgcatagcta

SEQ ID NO: 889790 - DNA, 120 bp, Artificial Sequence
  ENSG00000237298_173 (sequence is synthesized)
attttaccacatgctaagggtgactttagagcttaggtaaacaatgaaatccttcgttgttgaataccttcaacaataagtttagcagtcgttttgacattttcatcttccacaagtaca

SEQ ID NO: 889791 - DNA, 120 bp, Artificial Sequence
  ENSG00000237298_174 (sequence is synthesized)
cagctgtaatcttcagcatcagacgtatcaatggtcagtatggagaggaagtgaacctttctgtcagagtgcatcctgtatttatctccctcatgaacctccataccatctttataccat

SEQ ID NO: 889792 - DNA, 120 bp, Artificial Sequence
  ENSG00000237298_175 (sequence is synthesized)
ttcactttgacaaatggttctgaagtttcacattcaaaggttgccatagtgtctttttccttagcaacaacatcttgtaattcctgtgtgaaagtgatcaattgcttggctacaagaaaa

SEQ ID NO: 889793 - DNA, 120 bp, Artificial Sequence
  ENSG00000237298_176 (sequence is synthesized)
aggtgggggaaaaaggggagagcacattatattaaattaaattctcaacctgaggaatggggaaagaaaataaaagtaaacacactcatggatattcttgaatacaaagacaggtccatc

SEQ ID NO: 889794 - DNA, 120 bp, Artificial Sequence
  ENSG00000237298_177 (sequence is synthesized)
aaaggaaagacatgcaaattaccttggacaagtaagaatgcgtgactggaggtttctccagctatgttgatggcttttaccatgatgctggcagagtcctcagcagtcacatctcttatg

SEQ ID NO: 889795 - DNA, 120 bp, Artificial Sequence
  ENSG00000237298_178 (sequence is synthesized)
accaattcacaaacattgtcttcgggccagtaccagtagatccggtcagaccgttcaattttgacaccatttttgtaccattcacattcggggtctggtttccccacgactctgacccgg

SEQ ID NO: 889796 - DNA, 120 bp, Artificial Sequence
  ENSG00000237298_179 (sequence is synthesized)
aagtgtgcatcagatccttggcccactgtttggctctggattctttcgaagatttttggagcctccatactaggacttagttcaatcttgtcaggtttaaaagttggaatcgtgattttg

SEQ ID NO: 889797 - DNA, 120 bp, Artificial Sequence
  ENSG00000237298_180 (sequence is synthesized)
agttcatcttttgtcttcctgaggagttcctcataggattcatccttctttcgagacttgagctccacagcggtaatggcttcataatagccctcttctgttctgcgcttgaatttactg

SEQ ID NO: 889798 - DNA, 120 bp, Artificial Sequence
  ENSG00000237298_181 (sequence is synthesized)
cgcagctcttccgactcttcaggcactttttcatgggtaattctttcagcccttttcaacttcacaacttctttggtttcagtggtgtcaacaggtctatccactttttgtacttcaaac

SEQ ID NO: 889799 - DNA, 120 bp, Artificial Sequence
  ENSG00000237298_182 (sequence is synthesized)
tgaagctttcctggttcatgtacgtgaaactcaggccttggttcaggagctctcctaaggacagacctaaaatcttccctctgttgaatctcaagcttcactttatgctctatcacacct

SEQ ID NO: 889800 - DNA, 120 bp, Artificial Sequence
  ENSG00000237298_183 (sequence is synthesized)
tcaggattttccgcggtgaccttcacttcacctgtgtcatatgatttgcagtccacgatgtccaggtaatggataccatcatagcgaactctgaaccttttgcttttgcggatgagctgt

SEQ ID NO: 889801 - DNA, 120 bp, Artificial Sequence
  ENSG00000237298_184 (sequence is synthesized)
ccattgaggtaccagttgactttgggctgagggtagcctgttaccctgcagcggaaccttgcagtctccccttcaagtactctaactggctctgggtacaagacaatgtctggcttttgc

SEQ ID NO: 889802 - DNA, 120 bp, Artificial Sequence
  ENSG00000237298_185 (sequence is synthesized)
ttttctttctgatctgttgttacacctgtaagtgcaccttcatgagccattctctctaattcttcaattctctgtaagcctttcctcccctcaggcaattgggattcttccacaagactt

SEQ ID NO: 889803 - DNA, 120 bp, Artificial Sequence
  ENSG00000237298_186 (sequence is synthesized)
ttctcatctttaacaataagggtagcagatgtgtgatctgttccatatttgttagtggctctgcaagtaatgataccactgtctctagaatatgcaacgccataatcaaggctgcagtac

SEQ ID NO: 889804 - DNA, 120 bp, Artificial Sequence
  ENSG00000237298_187 (sequence is synthesized)
ccaaattcattgatcatacggagcctgttggctgcttcaagtggctttccatcatggagccactccaccaccatcgttgggtcaccaatgggtgttagcctgcattcaaagtgggcaggc

SEQ ID NO: 889805 - DNA, 120 bp, Artificial Sequence
  ENSG00000237298_188 (sequence is synthesized)
ccaaagcgcttaagtcttaaggaagtgagttttttcttgaaaaatggtttctgttgtttctctttgtcatagagatcaccttcttcccattgctcttggccatatcgcaaatggaggggc

SEQ ID NO: 889806 - DNA, 120 bp, Artificial Sequence
  ENSG00000237298_189 (sequence is synthesized)
ggatatgtgagaataccagcatgtcaaggctgggaatcatccttaggcatcacctagccagtcctgcctctcattttaaggctctgcttttagggaatctgacttaagacggaaaacttg

SEQ ID NO: 889807 - DNA, 120 bp, Artificial Sequence
  ENSG00000237298_190 (sequence is synthesized)
atcatgtctgaaagtacacacttctaaaagtcatacatttcttgcaagcatcatttcagatggctggatagaagtttgaagcaggctaataaaactttggaagtggcattttttaccttt

SEQ ID NO: 889808 - DNA, 68 bp, Artificial Sequence
  ENSG00000237298_191 (sequence is synthesized)
tgcagtacctacctaccatgttactgtcttggttgttggtctctccagttggtaatacaagcatttcc

SEQ ID NO: 889809 - DNA, 120 bp, Artificial Sequence
  ENSG00000237298_192 (sequence is synthesized)
ttaaagaagaaatataaaactaaaggcaaaaaaaatgattttggggtggactatttgataaaactatttaccttcaatgatcagtttgccacttgtgtgcttatcttcagcttcaaacat

SEQ ID NO: 889810 - DNA, 120 bp, Artificial Sequence
  ENSG00000237298_193 (sequence is synthesized)
agctgacttgatcaccattgaatgcttagtgccatcctttataagctcaaatctgtcatcacctgtgatttcctgggttccttttagccaacggaatgttttgggctccctggatacttc

SEQ ID NO: 889811 - DNA, 120 bp, Artificial Sequence
  ENSG00000237298_194 (sequence is synthesized)
acactcaaacttagcctcatctttctcgaagactttaacatcactgagaggtgtgatgaagataagaggcaattctgaaagaagtggacagtggatgaagtcagaatacgtttccattga

SEQ ID NO: 889812 - DNA, 120 bp, Artificial Sequence
  ENSG00000237298_195 (sequence is synthesized)
tgacccttgatcaatgcaggggtgtatcaggaagtcttgcagagaaaatacaaaaacgtggctgacaagtagagcatacctttcactttcagattggctgcagatttggcattagcagcc

SEQ ID NO: 889813 - DNA, 120 bp, Artificial Sequence
  ENSG00000237298_196 (sequence is synthesized)
tggaaggaaacctctcctgtcatacccagctgacagttatgaaggatcagaatatgcttctttccatcctcaatgatttcacagtcctgtttggagtgagggttagaaggaaagaaagaa

SEQ ID NO: 889814 - DNA, 120 bp, Artificial Sequence
  ENSG00000237293_0 (sequence is synthesized)
acaagttgcaaggtgggtgaggaggaagcacagaagttgtgtggggtagaaaaagcctggggaaaatggtgcctttaggccacccatcacgtgcctcaagttccaaagaatgtgaacagc

SEQ ID NO: 889815 - DNA, 120 bp, Artificial Sequence
  ENSG00000237293_1 (sequence is synthesized)
gattcccagggttctgttttatttccacccaggaaacaccagcattcttgaatcctttcagcattaggcaaaggagcagatgtgggcattctgcatctcaaggaggtctttagcaacacc

SEQ ID NO: 889816 - DNA, 120 bp, Artificial Sequence
  ENSG00000237292_0 (sequence is synthesized)
ctgcaggaaacagaaaatgcactgcctagatggaccctctgactccccaccacccaggctggagcggcagaggctgccaggaagagccagaaaacaggtcactgaccagctaatacaggc

SEQ ID NO: 889817 - DNA, 120 bp, Artificial Sequence
  ENSG00000237292_1 (sequence is synthesized)
caaggctgctgggaggccaggaatatggccatgaggagcacagcacgatgttccctctatcacgtgtgcatattctagtggaggaagactgacagtaagtaggaacactctactggtaag

SEQ ID NO: 889818 - DNA, 120 bp, Artificial Sequence
  ENSG00000237292_2 (sequence is synthesized)
ctcccaagtgcccgcaggccaccacacaagtggacagccctggacagcccgcccctagggaagaatcaagggaggagaaacagaagccctggaactgtgctagcatataaaaccccaagt

SEQ ID NO: 889819 - DNA, 120 bp, Artificial Sequence
  ENSG00000237292_3 (sequence is synthesized)
tagcatataaaaccccaagtcaagggctgaatggcacacttggatctctcaagtcacctgcttggcccccttccaagtgtatttacttccatttgttcctgctctaaaactttttaataa

SEQ ID NO: 889820 - DNA, 68 bp, Artificial Sequence
  ENSG00000237292_4 (sequence is synthesized)
ctgcaggaaacagaaaatgcactgcctagatggaccctctgactccccaccacccaggctggagcggc

SEQ ID NO: 889821 - DNA, 120 bp, Artificial Sequence
  ENSG00000237292_5 (sequence is synthesized)
gatggaccctctgactccccaccacccaggctggagcggcagaggctgccaggaagagccagaaaacaggtgaacccaaggccactccctccccagcctgaggaacactctactggtaag

SEQ ID NO: 889822 - DNA, 120 bp, Artificial Sequence
  ENSG00000272247_0 (sequence is synthesized)
ctgggtgactgtgttcgtggggctgaggccctcgaggtgcccacttccagctttccaccaattactgcactgtctttccgtttcctgccccgctgacgcgtacacctatttcagactcag

SEQ ID NO: 889823 - DNA, 120 bp, Artificial Sequence
  ENSG00000272247_1 (sequence is synthesized)
cgcagctccgcggggagaaaagtgcggggctccctctcggctccacaccagactccggagtagttcgaactgcgctggggtcgccaagacgcgcgctgcccttctcccagcactgccctc

SEQ ID NO: 889824 - DNA, 120 bp, Artificial Sequence
  ENSG00000272247_2 (sequence is synthesized)
gggaatacaaaatagaatgaggcaagctccctgacctcaaagatttcagagttcagttggagaaatcgacagaatctggtacttttaaaactaaacatgatgaatgaatgtggtgagaac

SEQ ID NO: 889825 - DNA, 120 bp, Artificial Sequence
  ENSG00000272247_3 (sequence is synthesized)
agcggcagaaaatggcactgaattccatagaaatatctggaaaggtcatttcaaaaggggagaaaaggtgcgtagtttagccagctttcagggcaagggagtgaggggcgctgaagctcc

SEQ ID NO: 889826 - DNA, 120 bp, Artificial Sequence
  ENSG00000272247_4 (sequence is synthesized)
ttgaagttgaaacccaggctagaatgagtaagaatgcgccagtcagggtgcttgtttgagcgggttggttgcagggcgggcagttacgagggataataaagacaaaagcgtgaaacagaa

SEQ ID NO: 889827 - DNA, 120 bp, Artificial Sequence
  ENSG00000272243_0 (sequence is synthesized)
acagcttccagcatgtgttgtgaaacatttcttctaatttctaaaattgaaacaattactatgatctacaaaatttgaagaacaactatgaatcaataatttactgctataatcaacaaa

SEQ ID NO: 889828 - DNA, 120 bp, Artificial Sequence
  ENSG00000272243_1 (sequence is synthesized)
ggataaattaacttcatctgacacatgctgaataatctacataaatatgattgcaagtcatggcaagtattcgtaagtgatttgagaaagtccatgcatgggagcaggacaaagagaaat

SEQ ID NO: 889829 - DNA, 120 bp, Artificial Sequence
  ENSG00000272243_2 (sequence is synthesized)
aatctgatcatccctaagaggtttcaagacaggatatttgttggcacatttgctgctttggcatcaacagagacaggagattccaccacagcaagcaggaattggggcaggaaaatggtg

SEQ ID NO: 889830 - DNA, 120 bp, Artificial Sequence
  ENSG00000272243_3 (sequence is synthesized)
aaccagtggccaaggacactacttgcagcacattcatggaatatatttgtagattccgcaaacaatgagcggcgaataatgagcaattgcgtaaagctgagtcctggaaggctgcctgta

SEQ ID NO: 889831 - DNA, 120 bp, Artificial Sequence
  ENSG00000272243_4 (sequence is synthesized)
gggggcagtatgtggtctggccttaaggacaaacggaattttcaccggagaagactgtggcgggggcttttcaggaggaatgaataggaagagtacaggaggctgtatagcagcaggtgg

SEQ ID NO: 889832 - DNA, 120 bp, Artificial Sequence
  ENSG00000272243_5 (sequence is synthesized)
ctttgtttggttggaaaacactccaagtgaaaaggcattgtgaagaatggaagagctactgagaaaccagcctatggagtttggctgtctctcctagtcacaaataaggagctgttactg

SEQ ID NO: 889833 - DNA, 120 bp, Artificial Sequence
  ENSG00000272243_6 (sequence is synthesized)
gtttttgtcaaaagaacaggatgatcacatctgtgccttaggacactttagatggggcagaacaggtacaggggatgtggtgggggaagaaatgactcgatttcaaacaaatcaaataaa

SEQ ID NO: 889834 - DNA, 120 bp, Artificial Sequence
  ENSG00000272243_7 (sequence is synthesized)
tggtctttctttgcgaaggagatttgagaaagtccatgcatgggagcaggacaaagagaaataatctgatcatccctaagaggtttcaagaatgagcaattgcgtaaagctgagtcctgg

SEQ ID NO: 889835 - DNA, 120 bp, Artificial Sequence
  ENSG00000272243_8 (sequence is synthesized)
tttggtatcaggatgatgctggcctcatggagtaagttaaggagtctctccttttcaatcttttgaaatagtttcagtaagaatggtaccctctcttctttatatttctggtagaatttg

SEQ ID NO: 889836 - DNA, 120 bp, Artificial Sequence
  ENSG00000272243_9 (sequence is synthesized)
tggtagaatttgactgtaaatgtatatttggctggtcctaagttttttgtggttggtaggctttttattactgatttgatttcagaactcattatttgttagttcagggattcaatttct

SEQ ID NO: 889837 - DNA, 120 bp, Artificial Sequence
  ENSG00000272243_10 (sequence is synthesized)
cccttgttcagccttgggaaattgtttgtttctaggaatttattaatttcttctagattttgtcctttgtgtgcatagaggtgttcatagtagactctgagaggtgtatatatatatata

SEQ ID NO: 889838 - DNA, 120 bp, Artificial Sequence
  ENSG00000272243_11 (sequence is synthesized)
agtgggatgtcagccatagcagaaatcagagagccctggtgaaacttattagcaaacattgcttgagaggcttgtctaggcacgagcaatgaaaggaagaaataaatatttcatctttcc

SEQ ID NO: 889839 - DNA, 120 bp, Artificial Sequence
  ENSG00000272240_0 (sequence is synthesized)
acagtgcattgtccctaaacgacccatacttgcctcactgacaccatgtggcccacttcccatctataatctatgtctgggtgtgaagcccttcccatatgatcccccgaatggaacttc

SEQ ID NO: 889840 - DNA, 120 bp, Artificial Sequence
  ENSG00000272240_1 (sequence is synthesized)
acaagttcgaattcactgggtcacagtgtgatagcgtgaagatgggaggacgttaagggaaggctatgggtgagttgggaaatgtgttaggcagggtcagagattaccacatcctaaaaa

SEQ ID NO: 889841 - DNA, 120 bp, Artificial Sequence
  ENSG00000272240_2 (sequence is synthesized)
gtgccatatctaatccttttccatttttgttctctgagcttctttcttagggaagatccttcttgagaagcccctgctgagtattaggaaaatgcatttcaggacctctcatcaacacac

SEQ ID NO: 889842 - DNA, 120 bp, Artificial Sequence
  ENSG00000272240_3 (sequence is synthesized)
cctctttctttaccacaaccacatatatgggggcataactcaacatgtgtaaaagacaatcttctgcttttcactgaacctccaggaattcaggacaataaacctctacatgcagaccaa

SEQ ID NO: 889843 - DNA, 120 bp, Artificial Sequence
  ENSG00000278344_0 (sequence is synthesized)
aacagtttgtggataacatagttcaaaggtatgtgaaagggcttcagatacgctgcttcctgacccagcacagtaaggatcatttacgtgccttcacttacaagatcttgccctgtcact

SEQ ID NO: 889844 - DNA, 120 bp, Artificial Sequence
  ENSG00000278344_1 (sequence is synthesized)
ctattggcttttgaaattaacaggaaggaacaggcactggaaggagcttcataaaccatcaacccagtcttatctccatagcaacatggttttctcacatctgaataaaaaaacaaaaaa

SEQ ID NO: 889845 - DNA, 120 bp, Artificial Sequence
  ENSG00000272249_0 (sequence is synthesized)
caattactctaatgattaagagcactgaacaaactgatcaccaatataagggctggccttcaggtagaaagtgtgccttccctctgtatgtagttcatggtctctaggtatgaggagtat

SEQ ID NO: 889846 - DNA, 120 bp, Artificial Sequence
  ENSG00000272249_1 (sequence is synthesized)
tgggggaaaataaatataaattacatatatgtatttacatgtgcataaatataaatatatgtatatatggagagagagtatatataggtatatatgtgtgcatgtgtctgtatgtgtata

SEQ ID NO: 889847 - DNA, 120 bp, Artificial Sequence
  ENSG00000272249_2 (sequence is synthesized)
ctcacaccttccacatgactctaggttcattatctttgactttataattttctgtgtgtgcgggtgtgtcaaaaacatatacagctataaagaaacatccacacctccttaccactgtat

SEQ ID NO: 889848 - DNA, 120 bp, Artificial Sequence
  ENSG00000272249_3 (sequence is synthesized)
tttgaattgtactcgtgtttatatgtcagtctcagtttattgtgttcacctttgtctatacagaatttattgcccactctcttttcatggtctgacgtcaataaagttccctcttcaccc

SEQ ID NO: 889849 - DNA, 120 bp, Artificial Sequence
  ENSG00000272248_0 (sequence is synthesized)
acgcaagtacgcatgcgcctccccagctgccgctgggaagagcgcgctccccagggccccgccccctccaaggatttccggggaggcgggttccactgctgacttaccggttttactcct

SEQ ID NO: 889850 - DNA, 120 bp, Artificial Sequence
  ENSG00000272248_1 (sequence is synthesized)
ctgctcaaaaggcgcctgcccgaggccgctttccgttgcaaaggttcctgaatttggggaggaagagcagcaagactgaaatattgggcatacgtttgttgcttcataaacgtttgctga

SEQ ID NO: 889851 - DNA, 120 bp, Artificial Sequence
  ENSG00000272248_2 (sequence is synthesized)
tgatacgccgatgtttgctttaattgtaactccccctgccgcagttcccagtctttgaaaattacaacagcaacatagttttgggcgtgtccttgacaaatgtgtttcattccccaggta

SEQ ID NO: 889852 - DNA, 120 bp, Artificial Sequence
  ENSG00000272248_3 (sequence is synthesized)
gtaccgtgcaagtgaacttggtgagaattttttcaaggaaatttttgccagcatcgatttttgaaacttagtttttaccatgctctttaaaaaaataaacacttggtttgttcaaatacc

SEQ ID NO: 889853 - DNA, 120 bp, Artificial Sequence
  ENSG00000268628_0 (sequence is synthesized)
gcgaccaaggcgcctgcgcgaccccaggtccggcccatccctccattccctgtaaccgccagcctccgcccctcttgacaaccacccgctacgcttaccctgttacaaggaacccaggct

SEQ ID NO: 889854 - DNA, 120 bp, Artificial Sequence
  ENSG00000268628_1 (sequence is synthesized)
gcaaccaggaaaaactgccatcagaaagtttatctaagccggagcaaacttggctggaccggcccctgacccgccttggcgctgccgcccctgtcttctgcggtccccggccaggcgagg

SEQ ID NO: 889855 - DNA, 120 bp, Artificial Sequence
  ENSG00000268628_2 (sequence is synthesized)
accagagttttgttctcggagattcttgcctttcttgttttagcacaaacgcgcacgcacccctttcccataacgagcccctccgcccaactacagatcccgggatctgttgcaggggct

SEQ ID NO: 889856 - DNA, 120 bp, Artificial Sequence
  ENSG00000268628_3 (sequence is synthesized)
ggaaaggccccactcgagaggcctgagctggctgcggctcttggttccggggcaggttctccagggttggatacgctctggacgcctgggcgggttgttttgcttcggcctcgctggcca

SEQ ID NO: 889857 - DNA, 120 bp, Artificial Sequence
  ENSG00000268628_4 (sequence is synthesized)
cccgcccaccccgcctggaacgcggtttggatcggcgctgggagccctccgtaaccccagctgaaggccgcgcaggcaggcggggacgccggagctgcggggccggttcccagccagcat

SEQ ID NO: 889858 - DNA, 120 bp, Artificial Sequence
  ENSG00000268628_5 (sequence is synthesized)
gcatccagccttttcggaatcaggcgggtccctggtgattcgctgggttttcccacttcccacggggacctcacctttgggaattaattgctgacagtgttagagttacaaagtagccag

SEQ ID NO: 889859 - DNA, 120 bp, Artificial Sequence
  ENSG00000268628_6 (sequence is synthesized)
ggaaagaaaacagaccttatttctgttctgttccacttcagatagtagcagaggagacttggatttcattggtgttggttttcgtgattcctgccttctaaaatcccaagacttatttat

SEQ ID NO: 889860 - DNA, 120 bp, Artificial Sequence
  ENSG00000268628_7 (sequence is synthesized)
catttatcatcagctcagatcccaggaaaacagtccactgcacttcggtttctgctccaagtcacccattaaataaataattgaacacctgctggtgccaggcgcagttctaatgcttgg

SEQ ID NO: 889861 - DNA, 120 bp, Artificial Sequence
  ENSG00000268628_8 (sequence is synthesized)
gatatgtcggtgaacaaagcaaaggtctccctcacctgggggagctgaaggcctgcggggaagaagtgggagacagagggtaaaccatggccatccctaagtaaattatttggggtgttg

SEQ ID NO: 889862 - DNA, 120 bp, Artificial Sequence
  ENSG00000268628_9 (sequence is synthesized)
gaagaggtcggtgatagggaaaacaagaaaaagaatatgggggcccagagtgcttgtgtctggagcaggtcacagaattaaatagatggtgtgtgtcaggcctctgagcccaagccaagc

SEQ ID NO: 889863 - DNA, 78 bp, Artificial Sequence
  ENSG00000268628_10 (sequence is synthesized)
tcaaaacctataagaactaataataatccaccactctttgctgactctctgtttggactcagcccacctgcacccagg

SEQ ID NO: 889864 - DNA, 80 bp, Artificial Sequence
  ENSG00000268621_0 (sequence is synthesized)
aaaataaacagtatggactcatgtgacatttggtgccgaagacctgagacaggaggactcctttgggagaccggtcccct

SEQ ID NO: 889865 - DNA, 120 bp, Artificial Sequence
  ENSG00000268621_1 (sequence is synthesized)
gacctgagacaggaggactcctttgggagaccggtcccctgtcctcgccctctctccatgagatccacccatgacctcgggtcctcagcccagccgaaggaacttctcaccaattttaaa

SEQ ID NO: 889866 - DNA, 120 bp, Artificial Sequence
  ENSG00000268621_2 (sequence is synthesized)
tcggggacgcaaagccaacaagaatgaagaagtggccagctgccaaacagggaagggccgcctgtccagtggatacatgacccacatgaccttacctatcattggagatggctcacactg

SEQ ID NO: 889867 - DNA, 120 bp, Artificial Sequence
  ENSG00000268621_3 (sequence is synthesized)
ctcaccctgcccccttgtcttgtatccaataaataacagcgcagcctggcattcggggccactactggtcactgtgtcttggtggtagtggttccccgggcccagctgttttttctttta

SEQ ID NO: 889868 - DNA, 120 bp, Artificial Sequence
  ENSG00000268621_4 (sequence is synthesized)
tcgggaaattaaagcaatgtgaacaccctctggccagcctgttggagggtgagagaccacatggaggagacagagccctgatgtcccagctgaggacatcccagaaaagcctatttccag

SEQ ID NO: 889869 - DNA, 120 bp, Artificial Sequence
  ENSG00000268621_5 (sequence is synthesized)
acaactgaggacaggtgaatgagttctttgtagatgaaccagaatccagtctatctacctgctgagcacagacatgtgagcaacccccccatcaaggtcaactgagcctggcccagatca

SEQ ID NO: 889870 - DNA, 120 bp, Artificial Sequence
  ENSG00000268621_6 (sequence is synthesized)
acagaatcacgagatgacctatggactcaggagcaatcatgatgtggttgttccatgacactgaatgtagaggtcgttgattctgcagcaccagcaaactgacacataacaccgtgttta

SEQ ID NO: 889871 - DNA, 120 bp, Artificial Sequence
  ENSG00000268621_7 (sequence is synthesized)
atattgggttctgggctttggggtccctgcagagttcctgatttcagccccaagggctcattcacaaatttattactcagattctaccctgtcaacccaggacgtgttacttacacattt

SEQ ID NO: 889872 - DNA, 120 bp, Artificial Sequence
  ENSG00000268621_8 (sequence is synthesized)
tatagatcgtagatatgattatatatgaatattactaatcattagtctgtagcaattactctttattccattataataataatcttctctctacaattataacttaagagaaaccaggcc

SEQ ID NO: 889873 - DNA, 120 bp, Artificial Sequence
  ENSG00000268621_9 (sequence is synthesized)
accaggccatacagagataggagctgaacggacacagtgagaaatgaccagaagacaagagtgtgagccttctattatgccccgacagggccactagagggctccttagtctagcgttaa

SEQ ID NO: 889874 - DNA, 120 bp, Artificial Sequence
  ENSG00000268621_10 (sequence is synthesized)
actagagggctccttagtctagcgttaatgccagtgcccgggaagatgcccgttacctagccgactttggtctagcggtagcgtcagtgcccaggaaaagcacccactacttagcagact

SEQ ID NO: 889875 - DNA, 87 bp, Artificial Sequence
  ENSG00000268621_11 (sequence is synthesized)
actctgctccaccacctcttgtggagggcctgacatccgtcaggcctgcccgcagttatccagcagtcacgctcctggtccgcttac

SEQ ID NO: 889876 - DNA, 85 bp, Artificial Sequence
  ENSG00000268621_12 (sequence is synthesized)
gtagtagcagaattagtgaaagtactaaaagtctctgaaatgcaaaaataaaggcataagctgtctcctttctctccacctcagc

SEQ ID NO: 889877 - DNA, 120 bp, Artificial Sequence
  ENSG00000268621_13 (sequence is synthesized)
gtgaatcagtgcaagggcccaggacagcggaagaggtgtgaagccatcctgtgatcgggaagccacagggtgtccagacccagcgggagccgaggattcaggagaatctccccagtcagc

SEQ ID NO: 889878 - DNA, 120 bp, Artificial Sequence
  ENSG00000268621_14 (sequence is synthesized)
aatcccagcacttagggaggccgaggaggaagaattgcttgaggccaggaatcccagaccagcctggacaacatggcaaaatccagtctttacaaaaaaaaaatttttttaattgctggg

SEQ ID NO: 889879 - DNA, 120 bp, Artificial Sequence
  ENSG00000268621_15 (sequence is synthesized)
tttacaaaaaaaaaatttttttaattgctgggcatggtggcacacacctgtggtcccaactacttgggaggctgtggcaggaggattgcttgagctcaagagttccaggctgcaattagc

SEQ ID NO: 889880 - DNA, 79 bp, Artificial Sequence
  ENSG00000268621_16 (sequence is synthesized)
tagctatgatcaaaaacaaaaaagaagggaggaaggggggaaagaaaggaaaaagaaaggaaggaaggaaggaaggaag

SEQ ID NO: 889881 - DNA, 120 bp, Artificial Sequence
  ENSG00000268621_17 (sequence is synthesized)
tcggagacagaggagacacgttttgtccatgaactcaaaattctgctgctggtcacagactcgggaagacagtcttcccttggtgtctaatcactgtggggatgcatgtctgattattca

SEQ ID NO: 889882 - DNA, 120 bp, Artificial Sequence
  ENSG00000268621_18 (sequence is synthesized)
tagtgtctcccaggtaggggccaaagcgtcacctgcccggccctgggggtgcaagtggagtggattttactcctgtccagaaaatggagtgagaccctgtctctaaataaatacatacat

SEQ ID NO: 889883 - DNA, 120 bp, Artificial Sequence
  ENSG00000268621_19 (sequence is synthesized)
tctctatgagaagggcacatttaacattttttacaaagggtgtaatagtcatggtttttctgttatctgatctaagcaaggcaggacaacaaaggggaacttaattgataacaagggtca

SEQ ID NO: 889884 - DNA, 120 bp, Artificial Sequence
  ENSG00000268621_20 (sequence is synthesized)
taacaagggtcattaattaacagggcaccactgggtggacacagtggcatctgtaattccaacacttggggaggccgaggtgagaggatcgcttgaggtcaagagtttgagaccagcctg

SEQ ID NO: 889885 - DNA, 120 bp, Artificial Sequence
  ENSG00000268621_21 (sequence is synthesized)
aaactctgtctctaccaaaaaatacaaaaattaacttggcatggtggcacatacctgcagtcccagctacttgggagggtgaggtgggaggataacttgaacccgggaggtggaggttgt

SEQ ID NO: 889886 - DNA, 120 bp, Artificial Sequence
  ENSG00000268621_22 (sequence is synthesized)
gagatcatgccactgcactccagcctctggaacagagagagactcagtatcaaaaaaaaaaaaaagtcttggtcagatgcagtggctcatccctgtaatcccaacccctttggaggccaa

SEQ ID NO: 889887 - DNA, 79 bp, Artificial Sequence
  ENSG00000268621_23 (sequence is synthesized)
ccaacccctttaaccagcttggccaaaatagcaagaccctgtctcaaaacaaaaaacactaccaaaaaaaaaaaaaaaa

SEQ ID NO: 889888 - DNA, 120 bp, Artificial Sequence
  ENSG00000274370_0 (sequence is synthesized)
tgatggccatgagagagaagctgagagcaaccagagcccacagctccatgctggtcccccatctgcaaacgctgggccccatgggagctgtgactcggtttccagctcgtcacagggctg

SEQ ID NO: 889889 - DNA, 120 bp, Artificial Sequence
  ENSG00000274370_1 (sequence is synthesized)
gccgaggccccggcatgtcaagccatctcaggttgggcaggaatgtggtccgtgttcacatgtgtctctgtgtgtgtgagagagaggggtcagctgggacgctggggtggcagggacagt

SEQ ID NO: 889890 - DNA, 120 bp, Artificial Sequence
  ENSG00000274370_2 (sequence is synthesized)
cctcatcctccctcgacctcgactccctccacatgaggagcccccccttcctggctatcctgtgagttgagcttcctctgctgggagggctttgtcagaggttccctgcggttccagaag

SEQ ID NO: 889891 - DNA, 120 bp, Artificial Sequence
  ENSG00000274370_3 (sequence is synthesized)
gaaagctggctgcagggagggccgggcactggacaccgtgtggctgagcctgtggcgggggctgcacagctgggttcccagcccccctccttgtccccaccccaccgcactgggaggccc

SEQ ID NO: 889892 - DNA, 120 bp, Artificial Sequence
  ENSG00000274370_4 (sequence is synthesized)
tgctgaggggccagagtccggctgcaggtcccacgggtgggggtggggcccctcattagcactgcagctgacactgagggcttccacctcgctaattgattaaactgtttagaaaccagg

SEQ ID NO: 889893 - DNA, 120 bp, Artificial Sequence
  ENSG00000274373_0 (sequence is synthesized)
ccaatgaaattctagcctttaaacacgagttcatgatgcttcctgctttggggattgtggatgtgtgttgacacctgggtccctgtcccccagtgatgacaaagagcaaaggcacctgct

SEQ ID NO: 889894 - DNA, 120 bp, Artificial Sequence
  ENSG00000274373_1 (sequence is synthesized)
ggcccacgctggacacacatgtgagaaagacatgcatctgtgaagtgctcagctgctgtggtgtggggctgtttgttacacagcccagccaagcccagcctgactgatacactccctcaa

SEQ ID NO: 889895 - DNA, 120 bp, Artificial Sequence
  ENSG00000274373_2 (sequence is synthesized)
gaaacaccacaggaggcatctgtggaggagctggtcgtggcagggtgggcacagctctgccctgctgtggaaggagttgacgatcccccagggccctgtccccgagggagggcctggtct

SEQ ID NO: 889896 - DNA, 120 bp, Artificial Sequence
  ENSG00000274373_3 (sequence is synthesized)
cctgagcagtgtcctggatcggggctggcgtgtgagtaaaagtgggtccagccctccccaccccaagctgggagaggtgagacccccacagcccactaggcgccagtgactgatgggccc

SEQ ID NO: 889897 - DNA, 120 bp, Artificial Sequence
  ENSG00000274373_4 (sequence is synthesized)
gccactgtcttcacagcccccagagttctctggtaatcacaggcgtggaacatgtgccaggaacctttggtttgcgtgtacctttagatgctcggattaaattacacccataatgcatta

SEQ ID NO: 889898 - DNA, 120 bp, Artificial Sequence
  ENSG00000274372_0 (sequence is synthesized)
agctaatttttgtatttatagtagagacgggggtttcatcatgttggccaggatggtatcaatctcctgacctcgtgatgcacccgcctttgcctcctaaagtgttgggattacaggctt

SEQ ID NO: 889899 - DNA, 88 bp, Artificial Sequence
  ENSG00000274372_1 (sequence is synthesized)
caccgcgcccggccttctctctaactgtcattcatttagccctttccatacgcttttgaagttaaattggttctgtgattttatgatt

SEQ ID NO: 889900 - DNA, 120 bp, Artificial Sequence
  ENSG00000274372_2 (sequence is synthesized)
tacgcttttgaagttaaattggttctgtgattttatgattacatataatgttctagtcattcttgtacgggcattttcggcgttttcagccactggtgtatttctataggatagaggtgc

SEQ ID NO: 889901 - DNA, 120 bp, Artificial Sequence
  ENSG00000274372_3 (sequence is synthesized)
aattactataggaagagcaattactccatcatagtgttcacacggtttttatatcattccattctctctcctctgttggcttattagctataactctttcttttgttactttagtaattc

SEQ ID NO: 889902 - DNA, 120 bp, Artificial Sequence
  ENSG00000274372_4 (sequence is synthesized)
ccttagggcttatagcaaacctttttaactgaacacagtcaaccttcaagtgatattaaacctcgccttctggccttgaagttattgctgacatgtactttgcttttacgcatgttataa

SEQ ID NO: 889903 - DNA, 120 bp, Artificial Sequence
  ENSG00000274372_5 (sequence is synthesized)
acccacaacccattgttattgcttttgtttaaatggtcaaacttttacaaaagaaatttacaaaataagaaaatacctagtatagttacctatttctggtgttcttcatttcctcatgta

SEQ ID NO: 889904 - DNA, 120 bp, Artificial Sequence
  ENSG00000274372_6 (sequence is synthesized)
aggtgtaggaggagagaagctcaattatcaccctggtctcctggagtatcccaggcacagtcccaagagttcagcttttcatactcgagttcctgggtcctgaaggcctttttggggaaa

SEQ ID NO: 889905 - DNA, 120 bp, Artificial Sequence
  ENSG00000274372_7 (sequence is synthesized)
gtactgatgttcgtgtcaaggttgggaagaaagggtttgggaggaaccaagcaacagggaggcaaagagaagacatcaacaagcgaggcaagaactttccacaggctcacactggataca

SEQ ID NO: 889906 - DNA, 120 bp, Artificial Sequence
  ENSG00000274372_8 (sequence is synthesized)
ggaccagagacaagaagctggcgaagcctatatgggttcccgatgtcacatcgcagctaccgcattggagggttaagagccgctgacaaatctctttcgggaaggggctgtttccctccc

SEQ ID NO: 889907 - DNA, 120 bp, Artificial Sequence
  ENSG00000274372_9 (sequence is synthesized)
tgttttcctcagaagaagagttccaaacaaaagatctactaccctgagaagcggtgaagtgctcctggggcccaccaaggccacacaagtcaaggagtggatggccttgccccagctatg

SEQ ID NO: 889908 - DNA, 120 bp, Artificial Sequence
  ENSG00000274372_10 (sequence is synthesized)
gctcagatcacctttgcaggatgacatcttgttgggagatggtcatcagagacagggccatggaagacgctgtcaggaggaggcacagaggaaaggctatgggagcacaaagcaagaaag

SEQ ID NO: 889909 - DNA, 120 bp, Artificial Sequence
  ENSG00000274372_11 (sequence is synthesized)
tggccttctgcaagccaggaagagaggcctccccagaaaccaactctaccagcacattgatcttggacttttggcctctagaacattgagaaaataaaagtctgctgttaaaccacccaa

SEQ ID NO: 889910 - DNA, 120 bp, Artificial Sequence
  ENSG00000274372_12 (sequence is synthesized)
aggatagaagagccacagtagaagagagaggaagaggagtccgccaggtgggatgctgcaagccgctggatagcacggcggagatagggcgttcctgccccgcaagcctccctgcgaccg

SEQ ID NO: 889911 - DNA, 120 bp, Artificial Sequence
  ENSG00000274372_13 (sequence is synthesized)
caggcctccggccgccttcttccaggaagacgcgccctgctttcttctgatgttggtagagacgctgcaaagcgcatcgtcctcgagcatttcttctctccccaagaccctccgaaggag

SEQ ID NO: 889912 - DNA, 120 bp, Artificial Sequence
  ENSG00000274372_14 (sequence is synthesized)
catttcttctctccccaagaccctccgaaggaaggatgggcggacagactaagtggtcaaacgcgcagagctccagcttccgcaggagcatttcccgagtgtctttcatggatctggatt

SEQ ID NO: 889913 - DNA, 120 bp, Artificial Sequence
  ENSG00000274372_15 (sequence is synthesized)
attttctcccattctgtaggtggtctgttgaccctgttgatggtttcttttactgtgcagaagctctctcattgaattaggtcctacttgtgaatttttgtttttgctacaattgctttt

SEQ ID NO: 889914 - DNA, 120 bp, Artificial Sequence
  ENSG00000274372_16 (sequence is synthesized)
gtggacttggccataaattctttgccacgtctgatgttgagaatgatatttcctaggttttcttctacactttttctgctttgaggtcccagtatatattgtgtcattgcaaatgacaac

SEQ ID NO: 889915 - DNA, 120 bp, Artificial Sequence
  ENSG00000274372_17 (sequence is synthesized)
caaccacagactaatcattacaagccaagaaagggaacttattggtgaccaggaaaaatgtccaacaaatgaaaattagtaaaagacattcctgggtgtctttttctgtaaagtgtgggg

SEQ ID NO: 889916 - DNA, 120 bp, Artificial Sequence
  ENSG00000274372_18 (sequence is synthesized)
cattgttgtctatagagttcagcaaactttttctgtaaagggccagggagataggaagtattctaggcttgtgagccaagaggcaaaattaaggatattatgtaggtgcacatataacca

SEQ ID NO: 889917 - DNA, 120 bp, Artificial Sequence
  ENSG00000274372_19 (sequence is synthesized)
atagtaactgagtagaacttctcaggtggtaaatgttctttgcattgagagcctaggctcaactttcctaggctccctggtacagccctccctttccacccctcaggctgtttccctccc

SEQ ID NO: 889918 - DNA, 120 bp, Artificial Sequence
  ENSG00000238078_0 (sequence is synthesized)
gctcatcatgaacaaaaccaaggcagacaacactgtcattaatggagcttatcatgtaatacggaagcctgggataagcaacaaattacacaagtgacaaatgtgatgagtgctgtgaag

SEQ ID NO: 889919 - DNA, 120 bp, Artificial Sequence
  ENSG00000238078_1 (sequence is synthesized)
cagagtgcggggtgcccagggaatcagcagagccctggaggataacagcctgagctccaggaaggaagtttcttcaagtgtaaaatgagagattggatggatcagaagattcaggcctcc

SEQ ID NO: 889920 - DNA, 120 bp, Artificial Sequence
  ENSG00000238078_2 (sequence is synthesized)
ttgaaaatccccatgggtgaaccccaacacacaggctattcagccagcagccccaagtcctttatgaaaagccaaggttgattgaaactctcccttctcaggagagaaactagaggcaaa

SEQ ID NO: 889921 - DNA, 120 bp, Artificial Sequence
  ENSG00000238078_3 (sequence is synthesized)
gcttcctcatcagcagagataaacttggcaggagccaattcaggtaggaccatggccaactcagggctcgtgcttgatcgaaggggatctgtgttagtcagcattctccagagaaatgga

SEQ ID NO: 889922 - DNA, 120 bp, Artificial Sequence
  ENSG00000238078_4 (sequence is synthesized)
ccattggatagatatgtaaagagatttattatgggagttggctcatgcaattgtggagtcctagaagacccaccacctcctgtctgcaagctggagaaacagcaaagccagtgacgtaat

SEQ ID NO: 889923 - DNA, 120 bp, Artificial Sequence
  ENSG00000238078_5 (sequence is synthesized)
taagtctgaatccaaaggcataagatcaaggagaactgatggtcacctgtgtatacttccattatggcatgtaacatgctggcaagaaattgattcattgggttgtgtcttctcagctgc

SEQ ID NO: 889924 - DNA, 120 bp, Artificial Sequence
  ENSG00000238078_6 (sequence is synthesized)
ctgaagaatgaaatcatatactctagtttcatatgcccagcattgtacacaacttgacacatcacagcagctctaggaaagcacataggctgacaactgagtgaacaacccactgactgt

SEQ ID NO: 889925 - DNA, 120 bp, Artificial Sequence
  ENSG00000238078_7 (sequence is synthesized)
gtgtcgttcagggttgggaaagcaagggcaggtctctgtgccccatctctagcttttcctcaacttaggctttataaacccttgcatcaaaaaataaaagctaaggctaattgtttcaaa

SEQ ID NO: 889926 - DNA, 120 bp, Artificial Sequence
  ENSG00000237128_0 (sequence is synthesized)
ccctctgtttagttagtggaattgagaacaaggcccaggtggatgattgaggactaaaccccaaacttgccttggatcactccactgtttcaggacatcaagggctccagacattgagaa

SEQ ID NO: 889927 - DNA, 120 bp, Artificial Sequence
  ENSG00000237128_1 (sequence is synthesized)
aacgccatatggacccctctatgctgtgaaatacttcagtactcaggagaagtcacgttctggttgctgcaagcgtgtgataccctgtcattaaaataagaaatagattgttatcctctg

SEQ ID NO: 889928 - DNA, 120 bp, Artificial Sequence
  ENSG00000237125_0 (sequence is synthesized)
ggataatgcaagtgtttaacagatgcttcactattaaaatattttccccccaagtctcaaatattgaagaatctctaaccaggtacagtatcactctgctctcttttctggttgaaaaga

SEQ ID NO: 889929 - DNA, 120 bp, Artificial Sequence
  ENSG00000237125_1 (sequence is synthesized)
aagaaagaaagaaaacgcaggtattgcttttcgaagtgctttgtaggtaatcgagggacaccagtccctacgaagaccttgggcgattttgaagtgcgggcacctcgattccccgaatct

SEQ ID NO: 889930 - DNA, 120 bp, Artificial Sequence
  ENSG00000237125_2 (sequence is synthesized)
gtagtgtggctggtatcggtgttcccctggtttaactagcctgtttgaaggcacagatcattcatggggatgtataaccgaaaccagtcctctccaccgcctggggatcttcactttcgc

SEQ ID NO: 889931 - DNA, 120 bp, Artificial Sequence
  ENSG00000237125_3 (sequence is synthesized)
agtctacgactgcctgtgactccagaaagacaaactgcagattggccaagctgtttattcttgtttgactttttgtacaaagtcactttaaatctgctgcagaaagaataaagcacctag

SEQ ID NO: 889932 - DNA, 120 bp, Artificial Sequence
  ENSG00000237125_4 (sequence is synthesized)
ccctttggatggactcctgcaggcgtgtggctgtccctggcccacttttaattctttggagatggctcttctgtgtaaatcagctgctgggtgcgttcggtcacctcgtaggccagccta

SEQ ID NO: 889933 - DNA, 120 bp, Artificial Sequence
  ENSG00000237125_5 (sequence is synthesized)
gtttgtatcagcagaacagtagtggactcgactcaggtcgtaagccttatatttcacagacaattaaatcttggctgctgttgaacaaaactgtaatatttactttgttctataccgaga

SEQ ID NO: 889934 - DNA, 120 bp, Artificial Sequence
  ENSG00000237125_6 (sequence is synthesized)
agcacttttaaagtaaaaaagaaaaaaaaaccaaatactacacttcaaaaagaaaatatgacaatgaatctctttttatggattctctctgcataagtggaaacaatatgatttaaatcc

SEQ ID NO: 889935 - DNA, 120 bp, Artificial Sequence
  ENSG00000237125_7 (sequence is synthesized)
ccaacaccccatcccccttttcagacacagctgaagtgatacagatactgtcttctaacacataatctccctctctcgggagaggcacctgcctgtgctacattcgatttagtttgtaag

SEQ ID NO: 889936 - DNA, 120 bp, Artificial Sequence
  ENSG00000237125_8 (sequence is synthesized)
gtttcaggcccctccccgacccatgtaatatgtaacaaggattatcaaataataaggtcttggatgtgaagtctgctttacacaagaattcaagaaagataggcaggacttgagtaatta

SEQ ID NO: 889937 - DNA, 120 bp, Artificial Sequence
  ENSG00000237125_9 (sequence is synthesized)
tgttacaacttcatattactttccaaatgaatacccattttcttctcatgtcaacttctagagatgggatgctgaggcagagaaatatttttatgagactctggagtacatactaaaatg

SEQ ID NO: 889938 - DNA, 120 bp, Artificial Sequence
  ENSG00000237125_10 (sequence is synthesized)
tgcttccttattatttaagaatgtgtaaggtatggacctacatttgtttgctggtggtcataaaataaattcatagccattgtggccaataagcaatctccttcacgctttaaaagtttt

SEQ ID NO: 889939 - DNA, 120 bp, Artificial Sequence
  ENSG00000237125_11 (sequence is synthesized)
tggtttataatcccacctggattgtattttcactattctgtatcaccctcctattgcaatattttggttctcaatcttatgtaaagcaaacctcagaaatgatcgtttccataaaattgt

SEQ ID NO: 889940 - DNA, 120 bp, Artificial Sequence
  ENSG00000237125_12 (sequence is synthesized)
gcaatggcaaagccacagaataatattttgagtccatatagccgtgcatgctcatctatatagctcttatacagttttctagctgattgctttggtatttcaagaaataggaagcagtag

SEQ ID NO: 889941 - DNA, 120 bp, Artificial Sequence
  ENSG00000237125_13 (sequence is synthesized)
aatgcaaaagattataatattactttcacgtgtgttaatctgtttagtataaaactgctagggtgtcttaaccattaacgcgttttgccacactactttcaaatggtgatctgagataat

SEQ ID NO: 889942 - DNA, 120 bp, Artificial Sequence
  ENSG00000237125_14 (sequence is synthesized)
tacgaagattttgatgttaatcccacgttaaatgaacaactatgaaaataatcttaaagcattattactcccatatacatgccagcaaacccaattgtggagagaacatgattacttttt

SEQ ID NO: 889943 - DNA, 120 bp, Artificial Sequence
  ENSG00000237125_15 (sequence is synthesized)
atctgacattatcctataaggatatggctacatttatttcttttaaaattggagcagttttcaattactttttaacagaattgttttcaacacagcattttgcagtgcccataaaccata

SEQ ID NO: 889944 - DNA, 120 bp, Artificial Sequence
  ENSG00000237125_16 (sequence is synthesized)
gcaactttgtcctgatcgatacatatttttctgcattattattcattagcctctttgcaaactcactaaaatagaatagtattaaagtatgaatatatagagaacaattattaggttcta

SEQ ID NO: 889945 - DNA, 120 bp, Artificial Sequence
  ENSG00000237125_17 (sequence is synthesized)
catatttatttaggtaaaccaatgttattaaaattaaaaacatgtgcctggcatataagtgcttcttcaggaattcttttttggatgcatagttattattttttaaacaaactcagattt

SEQ ID NO: 889946 - DNA, 120 bp, Artificial Sequence
  ENSG00000237125_18 (sequence is synthesized)
tcaaacactgattttcttctctgaacgggcattgcattgttttaaacagtagctcctggaataatgccacctttagtattttagactttcaaacaacaattggaattggataaatgcttt

SEQ ID NO: 889947 - DNA, 120 bp, Artificial Sequence
  ENSG00000237125_19 (sequence is synthesized)
cagctgggagcactttcctaatacctttgtaggtaatgggattctctatttgtgctgggtgacaaacggacagtgccctggacagactgcctaccctctgcagaatctaccaaaaagtag

SEQ ID NO: 889948 - DNA, 120 bp, Artificial Sequence
  ENSG00000237125_20 (sequence is synthesized)
agttttcccatgagactgcttgtggtccatctaaaaatgaaaaaataatcagagaaaatgcgcaaagccttttctaactacagttatgaaatgatggcttaaagaggtatttagaaaata

SEQ ID NO: 889949 - DNA, 120 bp, Artificial Sequence
  ENSG00000237125_21 (sequence is synthesized)
agagtggagtaatacagaaacaaaatctgaagaagaaagtttgcttaggagctgatgctctttgtctacaaacaagagggtaaggagctggatccaattgaattgaattgtttttgtttg

SEQ ID NO: 889950 - DNA, 120 bp, Artificial Sequence
  ENSG00000237125_22 (sequence is synthesized)
cttgtttgttttcttccattcagtgcctttcaaactgttttttactggatgaagaaactcaaccaagaaaatatatgtcgattcttgtatatgggacaatattagctgctgtgattttta

SEQ ID NO: 889951 - DNA, 120 bp, Artificial Sequence
  ENSG00000237125_23 (sequence is synthesized)
atactagcataaaatataagaatctttttattactgtgatattgttttttcctaaatgaatgcatagtgtaacaattggtgtcaaaaagcattgaatttttttcagatggattaagctgg

SEQ ID NO: 889952 - DNA, 120 bp, Artificial Sequence
  ENSG00000237125_24 (sequence is synthesized)
aataataaagtatatctatgagatgatttctgtaaactctgacttgctgagaaaaaagtgaaaaagctttttctggaagaaacatggcaacttaaccgttattaatctggactaaataaa

SEQ ID NO: 889953 - DNA, 120 bp, Artificial Sequence
  ENSG00000237125_25 (sequence is synthesized)
acaggaaactgcttctttacatttctagtaattttttctgcttttccaaacattgttaagttctatgcaacttgtgctattcaagtaaagatgatgtcagtaataaaattacagaatcta

SEQ ID NO: 889954 - DNA, 120 bp, Artificial Sequence
  ENSG00000237125_26 (sequence is synthesized)
tgtagtgtggctggtatcggtgttcccctggtttaactagcctgtttgtggaagtgactctgaccgttcccttaagaatctttaatgctcttacatgagatgagcctcagaacaagctaa

SEQ ID NO: 889955 - DNA, 120 bp, Artificial Sequence
  ENSG00000237125_27 (sequence is synthesized)
gaaccatcgaaagaacatcaagcctggaaggtgacagaaggagcaatgtgttcttgaagatgtcacctcagcccacctgctccaaggacagtgcttcttgcgacactctgatagctctgc

SEQ ID NO: 889956 - DNA, 120 bp, Artificial Sequence
  ENSG00000237125_28 (sequence is synthesized)
attggccaaggtacatctcagatcagatccctctgggaaaagcgcgggaatgcttggctctagtagttaggagctctggtgagagcgcccctagtgccattttcccatccctgcccttga

SEQ ID NO: 889957 - DNA, 120 bp, Artificial Sequence
  ENSG00000237125_29 (sequence is synthesized)
cagtcccctttggtctaaattcacggttctagacagtcaaagtctacctgctgggtgtccactctcaagccataggttttcaatcctaaaagggattaggaccttggctcaaaatgtggt

SEQ ID NO: 889958 - DNA, 120 bp, Artificial Sequence
  ENSG00000237125_30 (sequence is synthesized)
caacgcagtgttcaaattaggagggcagctgggagatggcagcaggggatgaaagtatgactcctacttcgtccgcaactgtgggtctggcacctcttgacttgccagtatgctggcaaa

SEQ ID NO: 889959 - DNA, 120 bp, Artificial Sequence
  ENSG00000237125_31 (sequence is synthesized)
caacccatctctcttggagaatccacacttcgtttcttctaggtccagcctaaatgttacctcctccagggagcctttccagatactgcttctcctctctcccccaactccctcccacaa

SEQ ID NO: 889960 - DNA, 120 bp, Artificial Sequence
  ENSG00000237125_32 (sequence is synthesized)
agtctacgactgcctgtgactccagaaagacaaactgcagattggccaaggttcctgacagtcactgagctatacgcaataataaagtgcgtgattcgcgtgtggaaaccagtgtcgtgt

SEQ ID NO: 889961 - DNA, 120 bp, Artificial Sequence
  ENSG00000237125_33 (sequence is synthesized)
ccttaccagcttccttttctgtccaccttccctctctcttctacctccgtttcgcttttcttcagtgcatgttagcggtttgctggatttcccttctccctcgctgttcaactgctagca

SEQ ID NO: 889962 - DNA, 120 bp, Artificial Sequence
  ENSG00000237125_34 (sequence is synthesized)
gataatgcaagtgtttaacagatgcttcactattaaaatattttccccccaagtctcaaatattgaagaatctctaaccagggacaccagtccctacgaagaccttgggcgattttgaag

SEQ ID NO: 889963 - DNA, 120 bp, Artificial Sequence
  ENSG00000237125_35 (sequence is synthesized)
actgtgggtttcttgacaacctaatcaatgcattgaacaaaggagatgtttagacaacccatataaaatgaataagagaaatagggtgaataccgtctaccccaattgcaatcagattag

SEQ ID NO: 889964 - DNA, 120 bp, Artificial Sequence
  ENSG00000237125_36 (sequence is synthesized)
tttcctttattttgaaaacgattagaactagtagaggagttagatgtggcccactagggaacaaattttcatctccaagccgtcctctggctcgatcgggtctgcactgggtctgcatca

SEQ ID NO: 889965 - DNA, 120 bp, Artificial Sequence
  ENSG00000237125_37 (sequence is synthesized)
acttgcgctggctcagagggaggctcagccccagcctggccttcctggtgcccactcccaacatcctgagcagggccgactctaggcaccccacgattagctgagtgatctagggcaagg

SEQ ID NO: 889966 - DNA, 120 bp, Artificial Sequence
  ENSG00000237125_38 (sequence is synthesized)
acctaggcgtctctaagtcttagtttccccatctgaacaatgtggataatgacacgtacctggggtgggcaggctagagtaaatgggaaaatcaaagcgccagccagagcgggtcgcact

SEQ ID NO: 889967 - DNA, 120 bp, Artificial Sequence
  ENSG00000237125_39 (sequence is synthesized)
gttagttcctgtattttctcctcctgcctctggtttcttccgttccgttctagctgcctgaagacccagcccgacagcgatgcctgtcagcccgcgtcgcccaccagggcagctgctctc

SEQ ID NO: 889968 - DNA, 120 bp, Artificial Sequence
  ENSG00000237125_40 (sequence is synthesized)
ccaactcgcatggggggcaccaccccgcctcggtgccctagagctgagcgcagccgcggctccacggggatcgccagggcctcagccctcgcggccggcggcgcgggagtgttgcggggc

SEQ ID NO: 889969 - DNA, 120 bp, Artificial Sequence
  ENSG00000237125_41 (sequence is synthesized)
agcggccacccccgatttaggtcgccagctttccagtcactgcgatggccactggggcgccccttccatcctggttaaattctcattgtgatccccagccctcttctcggttccccacac

SEQ ID NO: 889970 - DNA, 120 bp, Artificial Sequence
  ENSG00000237125_42 (sequence is synthesized)
ccaggaggccggttctccgccgctcaggctgggagaggtcaccgctccgggcagggtggacccccagctccgtctcggaggacctttcgccggaggcgagcaggaaggggttaaccatga

SEQ ID NO: 889971 - DNA, 120 bp, Artificial Sequence
  ENSG00000237125_43 (sequence is synthesized)
gcctcccaccctcacctcccagaccctggtgccgggctaaggcctccgcttccctcctgaggtctcattaggaaaccctcaccgctattttcaacatttcctcaatcaagtgcctttaaa

SEQ ID NO: 889972 - DNA, 120 bp, Artificial Sequence
  ENSG00000237125_44 (sequence is synthesized)
tagagctgcacaaacagattggcggcaaaagcgtagatcttgtcacgattgagaccaatccagtatttcagccttgtttgctttgcaattacgggttggcttgtggctacggtgccaccg

SEQ ID NO: 889973 - DNA, 120 bp, Artificial Sequence
  ENSG00000237125_45 (sequence is synthesized)
gggcaaatctgcagccgctcgctttctcctctgcgctccgggcgggtggaggaagcgacccgcggagtcactgcagggaggagagggggacgcgcgcggggggaggcggcggagggcgga

SEQ ID NO: 889974 - DNA, 120 bp, Artificial Sequence
  ENSG00000237125_46 (sequence is synthesized)
agacaaactgcagattggccaagatggggaaattgaggcagagaagccaagacatgtgctaaaggtcatgcaggctatgaatggagctggaatgtgaacgcaggccatatgaccccagag

SEQ ID NO: 889975 - DNA, 120 bp, Artificial Sequence
  ENSG00000237125_47 (sequence is synthesized)
cccatgttcttgaacccttagaaagacagcagcaacacacctggtgcagcagctgcttagttggagtggctgacaagttcttggcacatttgttccatagtaaagaagaatttaacttgc

SEQ ID NO: 889976 - DNA, 120 bp, Artificial Sequence
  ENSG00000237125_48 (sequence is synthesized)
ttttctccatgactgcagttgaattgcagagttgtagagacatccaggttcttgttagtgtggacgaactatccatgaagatcttaaatgcaggagtctatgagaacaccaattaatcaa

SEQ ID NO: 889977 - DNA, 120 bp, Artificial Sequence
  ENSG00000237125_49 (sequence is synthesized)
ttgtcaaatatttgagtatctattgtgagcaaggcactgtataaccattatgtcatgtattaatctattggaaaataatttgaccttggttgtatagtattttgtttatttttaccttaa

SEQ ID NO: 889978 - DNA, 120 bp, Artificial Sequence
  ENSG00000237125_50 (sequence is synthesized)
attttgtaactctattataagtgtttacataccaactatttgagggctgtatgcaaggtatagttttattgtactttgcttcttctgttacaataaagtacaagtacagtaaaataatca

SEQ ID NO: 889979 - DNA, 120 bp, Artificial Sequence
  ENSG00000237125_51 (sequence is synthesized)
aatgcaagtgtttaacagatgcttcactattaaaatattttccccccaagtctcaaatattgaagaatctctaaccaggctcgaaacgccggtctcagtggctattgagttacccaccaa

SEQ ID NO: 889980 - DNA, 120 bp, Artificial Sequence
  ENSG00000237125_52 (sequence is synthesized)
gttaccccggttagagctgtttggggtggctcacgttattgcggcaaactttggagatgacggctgagtcctccgggcgaacatgtcaagccgattgtaaatgctgttatttccacatcc

SEQ ID NO: 889981 - DNA, 120 bp, Artificial Sequence
  ENSG00000237125_53 (sequence is synthesized)
gaaccattaaacgccagtttaagaggcaggccgggaggacggctcgtggatgttgagactgctggccttggtgatcttgaacgcattataacggaaaatggatctccacttgtaagtcac

SEQ ID NO: 889982 - DNA, 120 bp, Artificial Sequence
  ENSG00000237125_54 (sequence is synthesized)
gcactgaagctgctcctatttctgaaatatgtattgttatttttttccctgcatgttgaacattatactcttctgttctttcgcattctcttcttcccttccggatgacttctagggttt

SEQ ID NO: 889983 - DNA, 83 bp, Artificial Sequence
  ENSG00000237125_55 (sequence is synthesized)
tcgcattctcttcttcccttccggatgacttctagggtttttgtgattctgtaattctaaaggagaaaggataataagaattg

SEQ ID NO: 889984 - DNA, 120 bp, Artificial Sequence
  ENSG00000237125_56 (sequence is synthesized)
gagatgccatttctcagcccaattggaaagaggccgggagcaccagttccctgaccccctcagccccaccgcctgccgccccctggtactgaccagctccttcttcctcttctcctcttt

SEQ ID NO: 889985 - DNA, 65 bp, Artificial Sequence
  ENSG00000237125_57 (sequence is synthesized)
ccctgtaatctcagctacttgggagtctgaggtgggagacttgcttgaacccaggaggtggaggc

SEQ ID NO: 889986 - DNA, 120 bp, Artificial Sequence
  ENSG00000237125_58 (sequence is synthesized)
ggaggtggaggctgcagtgagctgagaccctgccactgcactccagcctgggccacagaacaataccccgtctcaaaaaaaaaaaaatcacatcttaccaatataagctaacacatcatc

SEQ ID NO: 889987 - DNA, 120 bp, Artificial Sequence
  ENSG00000237125_59 (sequence is synthesized)
accaatataagctaacacatcatcattttaaagaatattagaatcataaataagaaagcttgaaaatgttaagaatcaaataagcccattatctagaaataaatagaacttgctgtgtaa

SEQ ID NO: 889988 - DNA, 120 bp, Artificial Sequence
  ENSG00000237125_60 (sequence is synthesized)
ttcaattaaatttgatagagcaaataattactggcacctgtagtaggcactgtggagtacgccaagctttccatgagacgctccctctaccctctgtacttgttagtgtattgcgaacct

SEQ ID NO: 889989 - DNA, 120 bp, Artificial Sequence
  ENSG00000237125_61 (sequence is synthesized)
atgttctctgtactgaagaaacagagaatggagaatttcccatccttctctctagtctcaatttccaaaggcaaccttcctataatttcactctcttgcataggaaattcatacaaagtc

SEQ ID NO: 889990 - DNA, 120 bp, Artificial Sequence
  ENSG00000237125_62 (sequence is synthesized)
catcagccctgtaattagtctagagcaagcggtgaaaaagtagggatgagaacaggcagatttagcaactcatgttgaagtatccaccttactccagaaactggtagtgactataatgga

SEQ ID NO: 889991 - DNA, 120 bp, Artificial Sequence
  ENSG00000237125_63 (sequence is synthesized)
tcttttcctctgctactcttttactttcatgcccagacttaacgttatcagtctagaatttctgatactccagaggaaacccgtatgagatactgcatgtggctctctgacctcattctc

SEQ ID NO: 889992 - DNA, 120 bp, Artificial Sequence
  ENSG00000237125_64 (sequence is synthesized)
cctgcccaaacttctgagatcccaccccaaggaaaggctgctgaattgcagcaagattatactcaaaaccatgtcctgtttctttccaggtcttttgtaggatgtattcattctggggaa

SEQ ID NO: 889993 - DNA, 120 bp, Artificial Sequence
  ENSG00000237125_65 (sequence is synthesized)
tattcattctggggaataaatagaaataggaaaatctccactactaccaccttagtccaagccattacaccattacatgtctcacctggttattgcaacacacacacacacacacacaca

SEQ ID NO: 889994 - DNA, 120 bp, Artificial Sequence
  ENSG00000237125_66 (sequence is synthesized)
gctggagtgcagtggtgcaatcacagcttactgtaaccttgaactcccatgctcaaactatccttctgcctcagcctccaagtaggtagaactacaggtgtgcctcaccatgcctggtta

SEQ ID NO: 889995 - DNA, 120 bp, Artificial Sequence
  ENSG00000237125_67 (sequence is synthesized)
actatccttctgcctcagcctccaagtaggtagaactacaggtgtgcctcaccatgcctggttaatcattttttagctttttagatagaggtggggtcttgctatgttgcccaggctagt

SEQ ID NO: 889996 - DNA, 120 bp, Artificial Sequence
  ENSG00000237125_68 (sequence is synthesized)
gccctccaaaatgctaggattacagatgtgagcccctgcatcaggaatggctattgcaatattcttctaactggttaacctgtttctgttctagacattccaacacatcaggcatgctgt

SEQ ID NO: 889997 - DNA, 120 bp, Artificial Sequence
  ENSG00000237125_69 (sequence is synthesized)
cacctcaggccatttgtacttgctcttccctctgtctggaccacatttcactctattttgggctctatcctgcagtgtctctgtactgaaatgtcaacatcctcagtgaggatttatctg

SEQ ID NO: 889998 - DNA, 120 bp, Artificial Sequence
  ENSG00000237125_70 (sequence is synthesized)
ggctactttatatgaaattgtaactcccaggccttatgtttcctaatcccattccaaattttatttttcactaagttatttattgtcatcgaatgtattgcatatttaaaatttttactc

SEQ ID NO: 889999 - DNA, 120 bp, Artificial Sequence
  ENSG00000237125_71 (sequence is synthesized)
tgtctattctctgtctctcactacatgatgtaaggtttgtgaaatatttttgtctgttttctcaccattgtgttcccggtgcctgaatggtactgccacatagtgtcacaaggtatagtt

SEQ ID NO: 890000 - DNA, 120 bp, Artificial Sequence
  ENSG00000237125_72 (sequence is synthesized)
tttattgtactttgcttcttctgcttcaataaagtacaaatacagtgcaagaattctgtcttaccattacaagctaatgtatcatcatcatatatttgatgacaaatatatgacaaacta

SEQ ID NO: 890001 - DNA, 120 bp, Artificial Sequence
  ENSG00000237125_73 (sequence is synthesized)
tatttactgcttcaacaaacatacatatacatatatttgtcgaaagaataaataaataaataaatgtataaaagaagggacttactcctaccttatacatattttttagaatactctagt

SEQ ID NO: 890002 - DNA, 120 bp, Artificial Sequence
  ENSG00000237125_74 (sequence is synthesized)
attttttagaatactctagttccagtccaaaacttggttagaacaacacttagttttcacttgagcaaagagaaccaattccacatttgcacctggtgttttctttgttacagatcacaa

SEQ ID NO: 890003 - DNA, 120 bp, Artificial Sequence
  ENSG00000237125_75 (sequence is synthesized)
cattcagtgtttgaattttgtcttttctagcttaagagaagaatgttgagggcaagtttagtaatttctgacttttctcacatttttgaaagaggcacttgcattagaaagtaaaaaatc

SEQ ID NO: 890004 - DNA, 120 bp, Artificial Sequence
  ENSG00000237125_76 (sequence is synthesized)
tttacgctttccagaaataatccctttgaggaaacatctcagaaataacgtttaaacgtatctttgtgtaatgtgcatatactaagaaaaaatacctctttaagtagattagggctgctt

SEQ ID NO: 890005 - DNA, 120 bp, Artificial Sequence
  ENSG00000237125_77 (sequence is synthesized)
ttaataattgaagtgtgtgatcacatttcaaactcagttcttcatcttgatcttcagatatttaacagaatatttgggtcagatggtcaacaactgcacatatttcttttttcttctttg

SEQ ID NO: 890006 - DNA, 120 bp, Artificial Sequence
  ENSG00000237125_78 (sequence is synthesized)
acttaagtgaagggagtaacaagagagttttctctgcaggagaaagagttgggggtggggtggggagtcaacaaatatgtcccaccacctgtttctataaagttttattggaacatatcc

SEQ ID NO: 890007 - DNA, 120 bp, Artificial Sequence
  ENSG00000237125_79 (sequence is synthesized)
atgcccatttcgtaacttgttgactgtgcatacagcctatgctcactttcatgctaaaacagctgaattgagtagttgcaacagagatatgactttcaaagcctaacataattgctgcct

SEQ ID NO: 890008 - DNA, 120 bp, Artificial Sequence
  ENSG00000237125_80 (sequence is synthesized)
ggtcctgtataaaaacaattgtggatccctgacatttgactataaccaatactagttgggaaggccagtggaaaggcatgtggccacatggaggaggctaaaataaaagtgtttgataaa

SEQ ID NO: 890009 - DNA, 120 bp, Artificial Sequence
  ENSG00000237125_81 (sequence is synthesized)
taatccagaggatggctacttagttcttaattaatttgtagttacatattttctcgatttgtacaattgctgagatctgttacattatttgtaaataaaactatcctcgttgacatatta

SEQ ID NO: 890010 - DNA, 120 bp, Artificial Sequence
  ENSG00000237125_82 (sequence is synthesized)
gtggaaagtattagaaacatgattgtgtttgcaaagggagacataaacgttaagaccagaggatctgaataaaaaagtagcaggatccttgctctgatctttcctgacatttcccaaatc

SEQ ID NO: 890011 - DNA, 120 bp, Artificial Sequence
  ENSG00000237125_83 (sequence is synthesized)
acacacctggtgcagcagctgcttagttggagtggctgacaaggagagaatgatttccaggaagagcggaacacatatggaaggccttagcttatctttagcgcctcatacacccgttct

SEQ ID NO: 890012 - DNA, 120 bp, Artificial Sequence
  ENSG00000237125_84 (sequence is synthesized)
ggacttcagaaaggccagtgagtgggattaggcctcagagataggatgtcagtcccagtgagggatggcctagagcattctttaattctttcctttgggtcacacataagaaacaatttt

SEQ ID NO: 890013 - DNA, 120 bp, Artificial Sequence
  ENSG00000237125_85 (sequence is synthesized)
ggataatgcaagtgtttaacagatgcttcactattaaaatattttccccccaagtctcaaatattgaagaatctctaaccagaaggcacagatcattcatggggatgtataaccgaaacc

SEQ ID NO: 890014 - DNA, 120 bp, Artificial Sequence
  ENSG00000237125_86 (sequence is synthesized)
taacagatgcttcactattaaaatattttccccccaagtctcaaatattgaagaatctctaaccaggctcgaaacgccggtctcagtggctattgagttacccaccaagttaccccggga

SEQ ID NO: 890015 - DNA, 89 bp, Artificial Sequence
  ENSG00000237125_87 (sequence is synthesized)
tctctgccttgaaggcctccgcctcgccattctggtcgtccttggccagcaggtccatgagagacaagatctctctccattgccaacat

SEQ ID NO: 890016 - DNA, 120 bp, Artificial Sequence
  ENSG00000237125_88 (sequence is synthesized)
ccactgtgcccagctcctgtttctactttcttaaggaatccaagaaaacaaatgttaaaatttgcggaataagaggaaatggtgttatagaccaacggaacagaatgtggaactcataaa

SEQ ID NO: 890017 - DNA, 84 bp, Artificial Sequence
  ENSG00000237125_89 (sequence is synthesized)
ggtgttatagaccaacggaacagaatgtggaactcataaataagtccacacacctacaacgaaggaaaggattccctattcaat

SEQ ID NO: 890018 - DNA, 120 bp, Artificial Sequence
  ENSG00000237125_90 (sequence is synthesized)
tgaaactggaccccttccttatgccacatacaaaaattaacttatggtggactaatgacttaaatgtaaaaccaaaatctataaaaactttgtaagtaaggggtggaggaagcaagctag

SEQ ID NO: 890019 - DNA, 120 bp, Artificial Sequence
  ENSG00000237125_91 (sequence is synthesized)
tgggttcagatggcaaaggagggattactagaatgatgaattttagaagccccacagctggtttacaaaagcacctacctgccaaatcatatagaccattttaggacatgtcaagtagtt

SEQ ID NO: 890020 - DNA, 120 bp, Artificial Sequence
  ENSG00000237125_92 (sequence is synthesized)
tagcttttattctgaatgctattgaaagccactgattttaagcagcaaaaggcaagccaggattttagagagaaatgtctgatgatagtaatgcagagtgaaatggagggggatgaaatt

SEQ ID NO: 890021 - DNA, 120 bp, Artificial Sequence
  ENSG00000237125_93 (sequence is synthesized)
ggaggcaggaagccattgcagaagttaaggtgggagaggatgacttcttggctttagacatggaaaagaagtgaggggtgggcacgataacaagtcaaagatgacatctgaagttcttgt

SEQ ID NO: 890022 - DNA, 120 bp, Artificial Sequence
  ENSG00000237125_94 (sequence is synthesized)
tgaggaactagttggaagtaccatttgatgtcattttgcaaatgggaatatagaaggaaatggtattagtttttaaaaattgtcttgaaaaattatacaagctcattataaaaattagat

SEQ ID NO: 890023 - DNA, 120 bp, Artificial Sequence
  ENSG00000237125_95 (sequence is synthesized)
caatacagtaaggtcataaatgaaagttaaatattatctcaaatctcagaactaagaaatattccttgttaatttctggtacacttaataccagacatgtttctatgaaaaaatatacac

SEQ ID NO: 890024 - DNA, 120 bp, Artificial Sequence
  ENSG00000237125_96 (sequence is synthesized)
agtcctttccttgctcaccgccgacaaagtggttggggcaggaaggcgaggtcagtgcgaatggagggcgcccaacttcggtgttgcagttgactctgtgctcgggctctgccctccact

SEQ ID NO: 890025 - DNA, 120 bp, Artificial Sequence
  ENSG00000237125_97 (sequence is synthesized)
agccctagagtcttgggcagcaggattgagaaatatatatatttcaggtttgccgcggctgggcggtaggagacagggacttaaaagcccaggattagagtcggtgcagggcccattctt

SEQ ID NO: 890026 - DNA, 120 bp, Artificial Sequence
  ENSG00000237125_98 (sequence is synthesized)
tttctaggaaaggggttaacatccttgaacgtccccagacaagcgtcttaaagcattgaacctagaatagggattaactgaaactaggctcgttggtaagcgccaggggcttgcagttga

SEQ ID NO: 890027 - DNA, 120 bp, Artificial Sequence
  ENSG00000237125_99 (sequence is synthesized)
gctcggaacaaaatagtgacctactgctctaaacccccaacttgcgtgggtctgcaattttttagcacaaggagagccttttaaagacctggttcttcaaggaaagaatgcaggtagtgt

SEQ ID NO: 890028 - DNA, 120 bp, Artificial Sequence
  ENSG00000237125_100 (sequence is synthesized)
ggttgggggttctgtttacattttcacccggaggcaaaccccgaatgtgtaaatactggtagttcaattctctgacatttgatacgtttttgaaaagtctgtttataaaaacacatttag

SEQ ID NO: 890029 - DNA, 120 bp, Artificial Sequence
  ENSG00000237125_101 (sequence is synthesized)
gccttgggagcaggtagacaaagtaagattgcactggggctgggaacatataaaaattcagggaaattagttggttggctgctttaagacccaaagggagttttgggaattgaagggagg

SEQ ID NO: 890030 - DNA, 120 bp, Artificial Sequence
  ENSG00000237125_102 (sequence is synthesized)
aagaagagtccagaggagggctgagttagggattgagatgctctgtccaccagagaccagcggtgagtggcctcacttttgaaagcttcagaacttgccacatttagcttttctcatgct

SEQ ID NO: 890031 - DNA, 120 bp, Artificial Sequence
  ENSG00000237125_103 (sequence is synthesized)
tttaattgaaacaaacaaacaaacaaaaatgaatgaattacctcgtggctccagatagcattgcaagtggtaaaggaaatggacaacatggtacagaaaaaagaaatcataaaagatgct

SEQ ID NO: 890032 - DNA, 120 bp, Artificial Sequence
  ENSG00000237125_104 (sequence is synthesized)
aatctgaacatcagttctcactcacagtgtcattatcagttaactgctgtggtccaagggcctaagacttgatgtggctcagaaacccaaatccagaggtcactgccttagaaagctggc

SEQ ID NO: 890033 - DNA, 120 bp, Artificial Sequence
  ENSG00000237125_105 (sequence is synthesized)
ttgatgagaggggacaaatggatgaaccctagtggtgtccccaactgtagtaactgactcagggaggccaggctggccctgactggttgagctctaccctaaatgcacaaacgcatccac

SEQ ID NO: 890034 - DNA, 120 bp, Artificial Sequence
  ENSG00000237125_106 (sequence is synthesized)
ttttctcttgcagtgtcctttggcctgttttgttccaggttttccaggatactgggttagcctgctcctttgggaagttgtgaagcaaggatgccatctcaagtttgccctcaatttagg

SEQ ID NO: 890035 - DNA, 120 bp, Artificial Sequence
  ENSG00000237125_107 (sequence is synthesized)
tgtcctgggcatcctggtggtagtgatggaggtgttggcagtggtggcaatgaaggagagggtggtgttggtgatgagagggaaagtgggagaagaaagggagaaaggcacagtccctga

SEQ ID NO: 890036 - DNA, 120 bp, Artificial Sequence
  ENSG00000237125_108 (sequence is synthesized)
ggggaccccactcctgggctgcactagtgtagctgctgatgcacatgttgtaagtactcaaaggcccagggaactggcttgctgggggctcctctgggtgcctgtggaggaatcttagct

SEQ ID NO: 890037 - DNA, 120 bp, Artificial Sequence
  ENSG00000237125_109 (sequence is synthesized)
aggagtgcttctctgcctctcctcagaggctgagggctgagccaaaaccggccttactcgtgtccagaaactgcttcacaaggaggcagcccaggtttgggtgagtgtttgggattctgt

SEQ ID NO: 890038 - DNA, 120 bp, Artificial Sequence
  ENSG00000237125_110 (sequence is synthesized)
acctttgttgtagctgatggtgtacctactgtactgcacatgtcaactgccttcagccaaatagacagaatctggttcaagcatttattttgctcctcatgtctcttgtctctttgccgt

SEQ ID NO: 890039 - DNA, 120 bp, Artificial Sequence
  ENSG00000237125_111 (sequence is synthesized)
cactgctacttctttctctggaaaaagacggaaagagcagcagagaggctgaacatggccatgcaaacattttggtcttgtgagatattattatacttgaaaaaatcaatctggtttaaa

SEQ ID NO: 890040 - DNA, 120 bp, Artificial Sequence
  ENSG00000237125_112 (sequence is synthesized)
ctaattttaaaaaaatctttagttaggttttagggaaaatacagattgtctcagggtgtttattatttcaaaggcaagggcagtttatatcctctgttttgctcataagaacccaaaata

SEQ ID NO: 890041 - DNA, 120 bp, Artificial Sequence
  ENSG00000237125_113 (sequence is synthesized)
aactggacccaaaaagaatcaggccagagggtcataaatgcacattttatgttcatgggaattatggctcaattctcatcatcgtctttcaaatcttgtttcaccttgtttttctaacca

SEQ ID NO: 890042 - DNA, 120 bp, Artificial Sequence
  ENSG00000237125_114 (sequence is synthesized)
ctcctcctcactgcttgagctccagggcccagacgtgctgcggccagcccgtccggcctttggttttcttgtcgttgctgctcactgtgcttttcaagatttcgttctggacagaggaaa

SEQ ID NO: 890043 - DNA, 120 bp, Artificial Sequence
  ENSG00000237125_115 (sequence is synthesized)
ggcgagggcgagaaaagtggaaagagaaattcagagaggatacctggttccacaccaacccggagcttcctgcgccggaggagacagtgaaccagagaggaaaggatacgatgggggagt

SEQ ID NO: 890044 - DNA, 120 bp, Artificial Sequence
  ENSG00000237125_116 (sequence is synthesized)
cccagcccctgcagagaagctaccaaggttagcgctaccctagccggcggggaggcctcggcgctgcagcgctcaacaaccggatccacaagtttataaacaaccgcccgttttcgagtc

SEQ ID NO: 890045 - DNA, 120 bp, Artificial Sequence
  ENSG00000237125_117 (sequence is synthesized)
gtttatggaggagcggggggccttttctcttactccagatgtaggggcgggagctggagtcggcgctaagtctggtttctctgttttcattagcaatcctagatccacatctaggaaaaa

SEQ ID NO: 890046 - DNA, 120 bp, Artificial Sequence
  ENSG00000237125_118 (sequence is synthesized)
tagggcgaaggagcctctgtttcggcctgggcctctcggccagaggctctcggcctccagctcagcagtgcctctcctccaaggcttctgaaatctctggttattcgggaggtcactcga

SEQ ID NO: 890047 - DNA, 120 bp, Artificial Sequence
  ENSG00000237125_119 (sequence is synthesized)
ttatgcagccaccaaagggctgcaggggccaaagaagaaaaattcgacaaatgcaattattttccgggcccttcgtggacatagctctatcctgcaccactgccctgtgggcacttggta

SEQ ID NO: 890048 - DNA, 120 bp, Artificial Sequence
  ENSG00000237125_120 (sequence is synthesized)
ggaatctgagaaaattttaagcggctcaatttactttcgtgttatttttaataacaatgaccatagtaatgccttttcccccttaaaatgtacaggcttattcaaataaaattagaaatg

SEQ ID NO: 890049 - DNA, 120 bp, Artificial Sequence
  ENSG00000237125_121 (sequence is synthesized)
ccaatggaatatactcatctgggaaattacattttaacgtcatagccaaggaaaaattggagctgtattttgaagtcaaaagtacttattttatgtttaccattacgttttccgggcata

SEQ ID NO: 890050 - DNA, 120 bp, Artificial Sequence
  ENSG00000237125_122 (sequence is synthesized)
gggcttcttcgagacttattctggaaacatctgaaagcaagattggattggaggccaaaagaagggtctaacagagacggggtgaggcatccagaccagtgcgatcgcgatcgatcgcga

SEQ ID NO: 890051 - DNA, 120 bp, Artificial Sequence
  ENSG00000237125_123 (sequence is synthesized)
agagttttcaaggtccgtcctaagtactaggggagcagcgataacccggaggtaagatcaccagcgcaaagcatccctaaccttctcctcctcctgctgacaccctcccctcaactctct

SEQ ID NO: 890052 - DNA, 120 bp, Artificial Sequence
  ENSG00000237125_124 (sequence is synthesized)
aagctgtcttttctctggaatgattgaatgaagctctggggaggaaaaggtggattggcagatctcttaaaggaagcttctccttctaggcactattctaaggcttaatattttaactcc

SEQ ID NO: 890053 - DNA, 120 bp, Artificial Sequence
  ENSG00000237125_125 (sequence is synthesized)
ctatattaacctagttcaactaaacagtgatctgagtaattttatttttattaaagctcagatcaaaatgccattaacattgattgagaaaatcaaaggaatctttgatgtgagtggtta

SEQ ID NO: 890054 - DNA, 120 bp, Artificial Sequence
  ENSG00000237125_126 (sequence is synthesized)
atctttgatgtgagtggttaaattgctgaattatttcagtcccataccctcacagcatgagtacctgatctgatagacttctttggaattccttttttgtttgagacagagtcttgctct

SEQ ID NO: 890055 - DNA, 120 bp, Artificial Sequence
  ENSG00000237125_127 (sequence is synthesized)
ttacagatgtgcaccaccatgcccggctaattattttgtatctttagtagagatgaagttttgccatgtgggccaggctgttctcaaactactggcctcaagtgatctgcccgcctcggc

SEQ ID NO: 890056 - DNA, 120 bp, Artificial Sequence
  ENSG00000237125_128 (sequence is synthesized)
tggctgggattccataataaatccctctgtgtctatttcttttttcaaatataattttcttcatttccaaacatcatctttaagactccaaggatttttccaggcacagtggctcatacc

SEQ ID NO: 890057 - DNA, 120 bp, Artificial Sequence
  ENSG00000237125_129 (sequence is synthesized)
gatttttccaggcacagtggctcatacctgtaatcccattgcttggagaggccaaggtggaagttcatttgaggccaggagttcgagaccaggtgggcaacatagtgaaaccttgtctct

SEQ ID NO: 890058 - DNA, 120 bp, Artificial Sequence
  ENSG00000237125_130 (sequence is synthesized)
aggaaataatggtgcctcactacctttcaaagcttttgaccttcaagtcagaaaataaattatttttaggaaaggcatctcaaccttatttacaaatgaactatttgtcaagagcaacct

SEQ ID NO: 890059 - DNA, 120 bp, Artificial Sequence
  ENSG00000237125_131 (sequence is synthesized)
ctataaggataataggacttcctggtttgaaatgcagcatgaacaattctcagaggctcctggaagactaagaatgaggtttcttgatccgccttccctcggcatcttctcactctcttc

SEQ ID NO: 890060 - DNA, 120 bp, Artificial Sequence
  ENSG00000237125_132 (sequence is synthesized)
cctccttctcagaagctgtgtgcagcaatgggctatgcaactggtttcactggtgcctggtagaacttttaattcctccctgtcagcacatccctagtccactttcatagtttggataag

SEQ ID NO: 890061 - DNA, 120 bp, Artificial Sequence
  ENSG00000237125_133 (sequence is synthesized)
gactggataagcagctgaacttctggggacttttccaaatgaaattcaacctttagacctttggaggtttacccagtcttcctcactacccgaagatgagtttggaacaaattttctctt

SEQ ID NO: 890062 - DNA, 120 bp, Artificial Sequence
  ENSG00000237125_134 (sequence is synthesized)
aatggattctatttgtgggtaggagaggtaatgactgccttgctcagagtcatgagcataacttcaaataaggaaaaagagcctcgcaggaatgtgagaatagatgcgatcctgaggaag

SEQ ID NO: 890063 - DNA, 120 bp, Artificial Sequence
  ENSG00000237125_135 (sequence is synthesized)
gtgtgtctgaggaggtgctgggaggttctgatcggctgttgaaggcagatactgtatctcacgtgacagaagtcacctcctgacatcagagttgtgtttgagtggtaatttaaaaaataa

SEQ ID NO: 890064 - DNA, 120 bp, Artificial Sequence
  ENSG00000237125_136 (sequence is synthesized)
tatagctgacaaggaaatgtggaaggcattacgttgcaatacagtgaaatgaacatacaacattcaagatcaattaccgggtactgattagctgggagaaaggcaataaaactttaaaaa

SEQ ID NO: 890065 - DNA, 120 bp, Artificial Sequence
  ENSG00000237125_137 (sequence is synthesized)
tgtcaaggtgggactgactatgcctcctgctggtttgttgcgaggaattctttttttgggaaaatcctgttgaattgtgtggcttgtgaatctggctctagaactgttaatgttataaga

SEQ ID NO: 890066 - DNA, 120 bp, Artificial Sequence
  ENSG00000237125_138 (sequence is synthesized)
attgaaagaggactatttaaaaataccaagacatcttttaaaattcctatttttagaacagctacttgtcattaaaataaatcattccatttctatttgtccaggttactgctttcacag

SEQ ID NO: 890067 - DNA, 120 bp, Artificial Sequence
  ENSG00000237125_139 (sequence is synthesized)
cagggccagggctatggtgaagtgtgggaggtgcccagtccccttcactgcagtcatggctctgtttcatgccacatgtgttattttataagtggttaagccccacataggcatgcaaac

SEQ ID NO: 890068 - DNA, 120 bp, Artificial Sequence
  ENSG00000237125_140 (sequence is synthesized)
atggtacatctctatgtattggttttggtaatgttgtaaataattgggagaatacattaaaatttggtaatagtgctcctttggactcagtctctttttttttttttaagacagagtttc

SEQ ID NO: 890069 - DNA, 66 bp, Artificial Sequence
  ENSG00000237125_141 (sequence is synthesized)
atccagttctaattccccaacagagttgtcttggttgcagtgagatatatatatatatatatatat

SEQ ID NO: 890070 - DNA, 62 bp, Artificial Sequence
  ENSG00000237125_142 (sequence is synthesized)
tctggagagcagtggcgcgatcttggcttgcagtgagacatttttatccatcctgatcacag

SEQ ID NO: 890071 - DNA, 120 bp, Artificial Sequence
  ENSG00000237125_143 (sequence is synthesized)
ttggcttgcagtgagacatttttatccatcctgatcacagcacttgcctccgggctcatgaagcccagcatgttactgctgttctgaacgtctctgctttttgagagacatgtttaatga

SEQ ID NO: 890072 - DNA, 120 bp, Artificial Sequence
  ENSG00000237125_144 (sequence is synthesized)
attgggagtatctgtgcacattgcattcacttaaaaagggaaaaataccttttaacagttatagctacagaaattcaatttagtttatttaggaggaaatgagagacttgaattgtaggt

SEQ ID NO: 890073 - DNA, 120 bp, Artificial Sequence
  ENSG00000237125_145 (sequence is synthesized)
gtgaaatcttacaatctttcagaatgatttggtttgggggatggttggaactgcatggaattccttcagccaaaataatttttgtgagcacattcccaagctcacgatcatgttttgata

SEQ ID NO: 890074 - DNA, 120 bp, Artificial Sequence
  ENSG00000237125_146 (sequence is synthesized)
agaaaaatccctttctccacaagttctcaggtcccactcattggcccctgccctcatttctggaacctatgttaggcagttatgtggctcagttcttggtgatatgttttcaatttgagt

SEQ ID NO: 890075 - DNA, 120 bp, Artificial Sequence
  ENSG00000237125_147 (sequence is synthesized)
caacttgatgagagaaaaattactaaaaagtgggaatgagctgtgaggtgaacagggttttcctatcaaagtggaggtatttttaaaagcatttattatttcaaactcaaacatttatag

SEQ ID NO: 890076 - DNA, 120 bp, Artificial Sequence
  ENSG00000237125_148 (sequence is synthesized)
aaagccatgagtgtgaagtgtatgattaccagttgtggcttgctgcattgaaaaattcaagttcataggaaatatttactgaggctctggtttgcaagcagtttgttcaagagaacaatt

SEQ ID NO: 890077 - DNA, 120 bp, Artificial Sequence
  ENSG00000237125_149 (sequence is synthesized)
tggtccagaaggcatgtcagccaaaaaagagtttactaatatagtagtaacaggcaattaggattcataagcatcgccatggctgagacatgatttaaggtcttagatggaaagagttct

SEQ ID NO: 890078 - DNA, 120 bp, Artificial Sequence
  ENSG00000237125_150 (sequence is synthesized)
gttattaagataacagaatttaaatgctgtatctgtctaggtcttatgcatgtcagaagtgagaaaactacttcttcattttccatttttatgagctctgatgtaacacagttttttttt

SEQ ID NO: 890079 - DNA, 120 bp, Artificial Sequence
  ENSG00000237125_151 (sequence is synthesized)
ttttctgtgttgaaaatgatgaatatagttcttggcacatttgttccatagtaaagaagaatttaacttgcaagtgaaaaacctctgcctttggccatggattaaaaagatgttatatga

SEQ ID NO: 890080 - DNA, 120 bp, Artificial Sequence
  ENSG00000237125_152 (sequence is synthesized)
tgaagtttacttcctaaggaaaggttagttttgtgtggcactttctgaaaatttgtttgggacatatacaattcttttgtataaattctggaggtctgaggaaaattacttaatcacatt

SEQ ID NO: 890081 - DNA, 120 bp, Artificial Sequence
  ENSG00000237125_153 (sequence is synthesized)
agatgagaacatttctttttgtgtgaattgagttcttatcaaggttctgatgttttttctcatgtatttgcccttgggttcatctcaatacaatgcatttgtgtactattgaataaaaag

SEQ ID NO: 890082 - DNA, 120 bp, Artificial Sequence
  ENSG00000237125_154 (sequence is synthesized)
caggctgcaacagtatttatgacatatgatcctatatacacgtaaaatcttgtgtgtgtgtttgtgtgtgcacatgcatataaaaaaaactacattgttaaagttgttaatagttaactc

SEQ ID NO: 890083 - DNA, 120 bp, Artificial Sequence
  ENSG00000237125_155 (sequence is synthesized)
ccggtggtgggttttaagtgattattattttctttgtataagaaaaatagtgcacagttttcttttgttgttacgaaaggtgtcatacatttgaaagaggacatatgcacagtttaaata

SEQ ID NO: 890084 - DNA, 120 bp, Artificial Sequence
  ENSG00000237125_156 (sequence is synthesized)
ataataacatagtgaatacccactgcttggctgaaaaaaataatttattactctgttgcagaaggcaagccttccttctgcccctgcctctgtcatggaggtagctacttgcttgaattt

SEQ ID NO: 890085 - DNA, 120 bp, Artificial Sequence
  ENSG00000237125_157 (sequence is synthesized)
tgtgctaatcatgtctttgctttcttatatagtttagccagctgtgaatgtctccataaaacatacacagttttattttgattgtttttgaactttaaataaatgaaatcatactggata

SEQ ID NO: 890086 - DNA, 120 bp, Artificial Sequence
  ENSG00000237125_158 (sequence is synthesized)
gtaaattagagggaggcgagggcctgcggcgccagcgcgggacagggcggcctggggctcgccgctggtcaggccaggttagcccaagggagaccaaagactccaccttgagcatcgccc

SEQ ID NO: 890087 - DNA, 120 bp, Artificial Sequence
  ENSG00000237125_159 (sequence is synthesized)
tttggaggcgggcagagtccggccgcaggccacaaagcgatccccacccgaaggactccacaaggacagtcctttccttgctcaccgccgacaaagtggttggggcaggaaggcgagaag

SEQ ID NO: 890088 - DNA, 120 bp, Artificial Sequence
  ENSG00000237125_160 (sequence is synthesized)
acagtgacctgagtgcacgcacccaagccggcaggccactctagaaaaccgtaaacccctcagagagtcactgcaggaataggggaaatggaagtgatgaaattcaatatagcatttagc

SEQ ID NO: 890089 - DNA, 120 bp, Artificial Sequence
  ENSG00000237125_161 (sequence is synthesized)
tgaatcatcatctgaggttaagcccagtgaacaattagcagtatcgggagtctcctcgtacctgtcaaaatcgcaccgacgggattttgtgcaaagcacaacaaatgagacccaagtgct

SEQ ID NO: 890090 - DNA, 120 bp, Artificial Sequence
  ENSG00000237125_162 (sequence is synthesized)
catagaacattccaaagagtcaacagagagaagtggaaagtattagaaacatgattgtgtttgcaaagggagacataaaccccaagaacatttgtttccctggactctgtttctcctacc

SEQ ID NO: 890091 - DNA, 120 bp, Artificial Sequence
  ENSG00000237125_163 (sequence is synthesized)
aacacttccctgggacctcattgccctcaaaggagactgccctgttcctttacttctacttctgatcagtcaagcagctactctgtcccatcagctcccattttaggaccaactgattct

SEQ ID NO: 890092 - DNA, 120 bp, Artificial Sequence
  ENSG00000237125_164 (sequence is synthesized)
cttacgacatacatttaaactccagtttaaaaagatttttcttttttttctgaaaaatcagttgagatgataatacacagtaggttattttctaatgtccatatctaacataaaaatcca

SEQ ID NO: 890093 - DNA, 120 bp, Artificial Sequence
  ENSG00000237125_165 (sequence is synthesized)
tgggtgacagagtgagactttgtctcgaaaaaaaaaaaaaaaaagacccagatcaaatgatttttttaaaaatttgttttttgcccaatcatttctgggaggtgtatgtagttgttgttg

SEQ ID NO: 890094 - DNA, 120 bp, Artificial Sequence
  ENSG00000237125_166 (sequence is synthesized)
ggtgtatgtagttgttgttgttttcactttttttgtggaaaatttttagtagtgggggttcaaagtttgtttaaatatggaagataattttccaaaaataaagtatggactaattaacct

SEQ ID NO: 890095 - DNA, 120 bp, Artificial Sequence
  ENSG00000237126_0 (sequence is synthesized)
gattgaaactgaattagaagagtcaacacagctcagagattgacagtgactggtgagctttacatgtcctcatttttgagagagggtaacagcttccaattaattacatctccttgggca

SEQ ID NO: 890096 - DNA, 120 bp, Artificial Sequence
  ENSG00000237126_1 (sequence is synthesized)
caaagaattgcttttgtggtgggacagaagttcaaaggtgtagaaggctgtgtgcagatgctgagtggctaacaggggctgtgccagttaggaagctcgtctctcagttccacacccgct

SEQ ID NO: 890097 - DNA, 120 bp, Artificial Sequence
  ENSG00000237126_2 (sequence is synthesized)
gcaaacatctctgcttcgcagctggcatcctgttggatttttccagtagagggaagcttccatgctgcaggaagaaggggcgtgctccttcccgttcctgtcagcactgctgcagcagtt

SEQ ID NO: 890098 - DNA, 120 bp, Artificial Sequence
  ENSG00000237126_3 (sequence is synthesized)
tgctctcacagctgcatgtgatcccagctgccatttctgacctgctcagaaccagcttcatgatgggctcaaagacccaggaccagctctggcatgtacacgtggccacggtacccttcg

SEQ ID NO: 890099 - DNA, 120 bp, Artificial Sequence
  ENSG00000237126_4 (sequence is synthesized)
tacaacacgggaagagaacaacaggacgcccaagaggcatctggacagcacacagcaaacagaaaggctgaacgcccccccatggaaccccattaaaaaacaatgtttgtctattacaaa

SEQ ID NO: 890100 - DNA, 120 bp, Artificial Sequence
  ENSG00000237126_5 (sequence is synthesized)
agacaggaaaaacacccaaaaggtaaaggccaggctggttcatgccggacacctaaccccctgctaccacatgctgttttccacactgggtgctggcctgtgggaacctgcacaagtcgg

SEQ ID NO: 890101 - DNA, 120 bp, Artificial Sequence
  ENSG00000237126_6 (sequence is synthesized)
gggcaacatggtcccaggaagtctttgacaggctgccccctgctggctgctgcgggaaccacatggcagatggctcctggtgtcccctggaaggggtatcagatttccttcgttcttgga

SEQ ID NO: 890102 - DNA, 120 bp, Artificial Sequence
  ENSG00000237126_7 (sequence is synthesized)
aagaggctccatcacgcggtgcagagctgggggcaccgctggcccacccatccctgtcgagtcctctgacccgtttcttcatttctcagtcaggtcttgctctgtcacccaggctggagt

SEQ ID NO: 890103 - DNA, 120 bp, Artificial Sequence
  ENSG00000237126_8 (sequence is synthesized)
tcctcccacctcagcctcctgagtagccgcgactacaggcgcatgccaccacacccagggtcccatccagataccacatgacacccggttgtcctgtcttcggaggctcctcctggctgg

SEQ ID NO: 890104 - DNA, 120 bp, Artificial Sequence
  ENSG00000237126_9 (sequence is synthesized)
cctcctggctgggacagcttctcagactttccttgctgcgatggctgctcaagctttgaggagtacagtcagtgttctatagaacgtctctctcgctactgaaattcgtctaatgttttt

SEQ ID NO: 890105 - DNA, 120 bp, Artificial Sequence
  ENSG00000237126_10 (sequence is synthesized)
gaggtaacagtgtgctggacattctgagggctgcaggggcctcctgtggaccctgctctcttgcaggtgacccatcagtgcgctgtacttctacaaattgttggaatggagacttttttt

SEQ ID NO: 890106 - DNA, 120 bp, Artificial Sequence
  ENSG00000237126_11 (sequence is synthesized)
tttttctaagttatttgagtcaaaacgatcttgacgggaagctgttagaggtctcatggaaataggcctggaggacaggatttggctgaggctttcaactgacatcagacaagactgcaa

SEQ ID NO: 890107 - DNA, 120 bp, Artificial Sequence
  ENSG00000237126_12 (sequence is synthesized)
tcaagggaaagcagacctggggcccacgggcaatcacatgggatgagaaataccaaagaatgtgaccatccaggtagccgggggacacagctccaaaaaagtgagagtggtgctggatta

SEQ ID NO: 890108 - DNA, 120 bp, Artificial Sequence
  ENSG00000237126_13 (sequence is synthesized)
ttctggagtcagatcacccagcttctctgatgagtgactggtcatttttaaagcatgcctgcagcagtcttcaagaggtttctgcctgggcatcacaatcagcacacatttgctcataca

SEQ ID NO: 890109 - DNA, 70 bp, Artificial Sequence
  ENSG00000237126_14 (sequence is synthesized)
ggtcgcaccccaactttaaagatgagggtcggtgcaggacagaatacatttcagctccaaaaccagcatt

SEQ ID NO: 890110 - DNA, 120 bp, Artificial Sequence
  ENSG00000237126_15 (sequence is synthesized)
ggtgcaggacagaatacatttcagctccaaaaccagcattgtctttaatggggactcctagaggcattcccaccaagttaggaacaagacagcacgcccactgttaccagcgtaaatcaa

SEQ ID NO: 890111 - DNA, 120 bp, Artificial Sequence
  ENSG00000237126_16 (sequence is synthesized)
caatgtaccggaggtgctaacccacacaataaggcaacatctccagcatgaagcccactggcctcatgtctgtacttctggagtccaggtgagcaaaggtcacctgcccactggacttgg

SEQ ID NO: 890112 - DNA, 120 bp, Artificial Sequence
  ENSG00000237126_17 (sequence is synthesized)
cctttccacgctgcactcgctggaagggagtcactgtatgcagccaacactgaaggaatgaagttattccacacaggatttagaatgctccacagacgatttttctgctcttcctattta

SEQ ID NO: 890113 - DNA, 120 bp, Artificial Sequence
  ENSG00000237126_18 (sequence is synthesized)
ccactgcagacaggcagagccatgcaaataaagccatccagcaaggtcaccttttcctcagatgccccagtttcaggatgatagaatttgcatattaagtgttaataggcctggcaataa

SEQ ID NO: 890114 - DNA, 120 bp, Artificial Sequence
  ENSG00000237126_19 (sequence is synthesized)
tatgggaaacaggcctgacacacagggtctgctcatatgggaaaatgatttcagtcacagtccttagctccaaattctgtacttggaacctagattataatctagctcctaatcaaacta

SEQ ID NO: 890115 - DNA, 120 bp, Artificial Sequence
  ENSG00000237126_20 (sequence is synthesized)
gattctgctccagttcagtttactaaggcattccctctaagctgcctcagtgaaaccagtgagagccactggattacaattctaagtgcagctgtgcctaagaaggagagagtcccacag

SEQ ID NO: 890116 - DNA, 120 bp, Artificial Sequence
  ENSG00000237126_21 (sequence is synthesized)
gagaggagaccggagggcataaggcaggggatgatacaaaatcctggacagtcatcacatcagtaacacagcttcagaaagtggtgggcttggaggaggggagagaaagaaacaaaatgt

SEQ ID NO: 890117 - DNA, 120 bp, Artificial Sequence
  ENSG00000237126_22 (sequence is synthesized)
cccaataatttaatggcagagctagaagagagcatttacagctattttgggactctccaacagaacacttttcctggatgcacagacattcataatactggtaactctcatcaacagctc

SEQ ID NO: 890118 - DNA, 120 bp, Artificial Sequence
  ENSG00000237126_23 (sequence is synthesized)
aaaggagagcgcacggctcagggacgtcccttcagtgagcaatggaaggactggctggaggcctcccatccatttcggacaaacacacacatacagaaaaggattattgccagcttgtgt

SEQ ID NO: 890119 - DNA, 120 bp, Artificial Sequence
  ENSG00000237126_24 (sequence is synthesized)
aaaccagctctggcatgtacacgtggccacggtacccttcgtacaacacgggaagagaacaacaggacgcccaagaggcatctggacagcacacagcaaacagaaaggctgaacgccccc

SEQ ID NO: 890120 - DNA, 120 bp, Artificial Sequence
  ENSG00000275383_0 (sequence is synthesized)
tatttctcccatttggattcatcagttgtcaacacattttgccacgcatttcattgtatttttattttcttgactgcaccatttgagagttacttggagacatcctgacacttcatccct

SEQ ID NO: 890121 - DNA, 120 bp, Artificial Sequence
  ENSG00000275383_1 (sequence is synthesized)
gaatacttcagcctgtatctctgtaggcaaccgcaatgccattatcacacttaaaaagctcaaccttgatataacgctattatctcaccgatacatactcaaatgtcccgttgtctcatt

SEQ ID NO: 890122 - DNA, 120 bp, Artificial Sequence
  ENSG00000275383_2 (sequence is synthesized)
tatatcctgtgtagctgtggttttatttgtgatccaagagccaatcaatgttcacatcattttttctttcatgacatttttaaagaatccaggcagttgtcttgtaaaaggtcccacaat

SEQ ID NO: 890123 - DNA, 120 bp, Artificial Sequence
  ENSG00000275383_3 (sequence is synthesized)
tggaatttgtcctgtttattattcatggttatattcaggcaagtcgttttggtaaccatattacataggccttgttatctatttcccattatatcatatcaggaggcccattgggtaggt

SEQ ID NO: 890124 - DNA, 120 bp, Artificial Sequence
  ENSG00000275383_4 (sequence is synthesized)
ttgtgctattttgtgacgctaagtttgatcactgggctatctgtgacagtttcctgtccttccttctatccaaccccgccacccaaaaaaaaaaaaaccaaaccaaatctgacatcacaa

SEQ ID NO: 890125 - DNA, 120 bp, Artificial Sequence
  ENSG00000275383_5 (sequence is synthesized)
gaagcaacaagctacatctaagatgtgggacaaatagcccaataaacccagggtcacccaggcctccctgctgcctttcaaaaaacctgggcacattcctgccacaggaactttgcactt

SEQ ID NO: 890126 - DNA, 120 bp, Artificial Sequence
  ENSG00000275383_6 (sequence is synthesized)
gctattcctgacacgcgtaatgttccccatgaagagcatggtttcctccctcatcctcaagtctttgttcaaatatcagcttttcagcaagaccttcattaactagtctagcccccagta

SEQ ID NO: 890127 - DNA, 120 bp, Artificial Sequence
  ENSG00000275383_7 (sequence is synthesized)
gatctgatggttttataaggggtttccttttttgttggctctcattctctctcttgcctgccgccatgtaagacatgcctttcaccttccaccatgatcatgaggcctccccagccacga

SEQ ID NO: 890128 - DNA, 81 bp, Artificial Sequence
  ENSG00000275383_8 (sequence is synthesized)
gatatatctttatcaacagtgtgaaaacagactaatacacccccttaccctgctctactttttccccatagcaattatcac

SEQ ID NO: 890129 - DNA, 120 bp, Artificial Sequence
  ENSG00000275383_9 (sequence is synthesized)
cccttaccctgctctactttttccccatagcaattatcacctcctgacatgtcatataattgacttattatatttgctgtctgtctccctctggtggtgtgtaaactctgtcagcatagg

SEQ ID NO: 890130 - DNA, 120 bp, Artificial Sequence
  ENSG00000275383_10 (sequence is synthesized)
gatttttcactgttctattcactgctgtattcacttacagaattgctcttcgctgggctggctccttccccactttcaggtgtcagttcaaatgtaagtcttccctgactaccccttata

SEQ ID NO: 890131 - DNA, 84 bp, Artificial Sequence
  ENSG00000275383_11 (sequence is synthesized)
cagtaactttctatctgttcaccccactttaatgtatctatcttatttactgtttactgcctaatgtctttgtttgtttgcttg

SEQ ID NO: 890132 - DNA, 120 bp, Artificial Sequence
  ENSG00000275383_12 (sequence is synthesized)
gctcaagtgatcctcccacttcagcttcccaagtggctgggtctacaggcatgagataccaagcgtgggctgtctagggtcttatctcactgctcccacccctcatgaagacgaaagtct

SEQ ID NO: 890133 - DNA, 120 bp, Artificial Sequence
  ENSG00000275383_13 (sequence is synthesized)
ttgcctgctttgttcactgctatatccccaatactggcacatagtaggtcctcaataagtatttgccgaatgaatgaatgacttcacagggaggtataacagttaaaaacatgccattca

SEQ ID NO: 890134 - DNA, 120 bp, Artificial Sequence
  ENSG00000275383_14 (sequence is synthesized)
actcacttctctgggcatcttgatataacagttcagttcctacctggcagagctgatgagggttaagagagctaagtgaaagaagtgacaagacctagagtcataggatatattaatatt

SEQ ID NO: 890135 - DNA, 120 bp, Artificial Sequence
  ENSG00000275383_15 (sequence is synthesized)
tttaaagagagttttgattctcccaccaacagtctagaactgggggcattcacagtttgtctccagagagggcagaaggctggcgggaggagtgagcaatccaccagcactgccatttgg

SEQ ID NO: 890136 - DNA, 83 bp, Artificial Sequence
  ENSG00000275383_16 (sequence is synthesized)
tggcgggaggagtgagcaatccaccagcactgccatttgggtaataattgagcgatgaagtctcactttgtcgcccaggctgg

SEQ ID NO: 890137 - DNA, 120 bp, Artificial Sequence
  ENSG00000275383_17 (sequence is synthesized)
gctggtcttgaacccctgacctcaggtgacccgcctgctttggactgccaaaatgctgggattacaggtgtgagacaccatgcccagggggaactgtaaattaaaacaacgagttgaggc

SEQ ID NO: 890138 - DNA, 120 bp, Artificial Sequence
  ENSG00000275383_18 (sequence is synthesized)
aggcacccgaccttcaactgtcatgttatgagaacactcaagtagccctatgaagaggtataacaggattgaggccttctgcaaacagctagcaccaacttgccagccatgtaagtgaac

SEQ ID NO: 890139 - DNA, 120 bp, Artificial Sequence
  ENSG00000275383_19 (sequence is synthesized)
caccaacttgccagccatgtaagtgaaccatcttgaaagtgattgtgcagccccagtaaagccttcagatgactgcagtcccagcaacatcttttttttttgtttgagatggagtctcgc

SEQ ID NO: 890140 - DNA, 120 bp, Artificial Sequence
  ENSG00000275383_20 (sequence is synthesized)
ccagcaacatcttaaccataaccttgtcagagaccccaagccaaaaccactcagtcaagccacttgcaaattttttatccatagaaactatgtgagataataaatgtctgtttttaagcc

SEQ ID NO: 890141 - DNA, 120 bp, Artificial Sequence
  ENSG00000229249_0 (sequence is synthesized)
atatttaatttatggtacttttttctggttaattttatcttttccataccaagtaatataggcagttgcaacatccatgaagagttgttaattggagcacaaggcatctgcagtgtcaaa

SEQ ID NO: 890142 - DNA, 120 bp, Artificial Sequence
  ENSG00000229249_1 (sequence is synthesized)
agtgcacctggagacaaatgaccagactaccataaaacagaagcttaattatgttcacttacattttcaaattattcccaacaaattaccctgggtccttatgtgacaggtgtcataccc

SEQ ID NO: 890143 - DNA, 120 bp, Artificial Sequence
  ENSG00000229249_2 (sequence is synthesized)
tatacctggaagaaggaatgctgcatagagaggcccggaagaatctgaaaaaacaggccttactgggctccttcagtttatcaccattacaacacaccctttttgtccaatcgtatttct

SEQ ID NO: 890144 - DNA, 120 bp, Artificial Sequence
  ENSG00000229249_3 (sequence is synthesized)
atacagctgatcctgcattgagtgcaagcaaaaaactgtcaagttttccctggatctttgggctttcatttctgaagtctcctgtgtcacgtaaaactttgttaaataaatttgttatgc

SEQ ID NO: 890145 - DNA, 120 bp, Artificial Sequence
  ENSG00000229249_4 (sequence is synthesized)
gagcaagtaccattttatgaataaagcaccattgaagtcattgctattccttgaagccaaaaaagtgtcagtaaaacccagtcagaattaccatcttctgaactccatgcgagaaaactc

SEQ ID NO: 890146 - DNA, 120 bp, Artificial Sequence
  ENSG00000229249_5 (sequence is synthesized)
ggaaaacacaaaactatcagtcattgtcaaatactccataaatggagacagagaaggggttcagttctctgtgtaacaaggacagaggagaaaggcatctgcagtgtcaaatctacagag

SEQ ID NO: 890147 - DNA, 120 bp, Artificial Sequence
  ENSG00000229249_6 (sequence is synthesized)
agcctcttgcaaattcatgtgggacatggaaacgtgaaagaagaaaagctttgttgtgatttactctgtggccctccgagacttcgtgtaacagcaactgcattttaatgcaatggcagc

SEQ ID NO: 890148 - DNA, 120 bp, Artificial Sequence
  ENSG00000272799_0 (sequence is synthesized)
tagaaaataaacgagacgaaacagcagtctagaagtaggcaccaaatccaagttttcatgtgcgatccaggtattagggtccatccaggaacagcctgctggaattgctagcctggcatt

SEQ ID NO: 890149 - DNA, 120 bp, Artificial Sequence
  ENSG00000272799_1 (sequence is synthesized)
tagcctggcattcacagaagattgtgccacccacgaggaatgtgttttcagccctgaaattcctgggagtgagaggtgaagccagctggatttctgggttgggtggggacttggagaact

SEQ ID NO: 890150 - DNA, 60 bp, Artificial Sequence
  ENSG00000272799_2 (sequence is synthesized)
ctgtaggcatgggcagggacaaataagccaataaaaactggccaccccagcctgcagggg

SEQ ID NO: 890151 - DNA, 120 bp, Artificial Sequence
  ENSG00000272799_3 (sequence is synthesized)
gaccaatcagcagggcatgggcagggacaaataagccaataaaaactggccaccccagcctgcaggggcagcctgcttgggtccttttccacattgtggaagctttgttcttttgctctt

SEQ ID NO: 890152 - DNA, 120 bp, Artificial Sequence
  ENSG00000277548_0 (sequence is synthesized)
acaaatttggagatggagttctcactgaaataatccaccctcaaatgacctagcttcagaaagtgatcatccccaccacgtaaatgatgtgtatcccaatcactgaagatttaagactgt

SEQ ID NO: 890153 - DNA, 120 bp, Artificial Sequence
  ENSG00000277548_1 (sequence is synthesized)
taacaacccattgctaactggatgctaaacatcacccctaaatacttaatttgctcctgttatctgggcctacaaaaagatacttgaaagtcggtatacagaaaatttctggaagaactg

SEQ ID NO: 890154 - DNA, 120 bp, Artificial Sequence
  ENSG00000277548_2 (sequence is synthesized)
cttaagaaagtgataacaatagttacctctggggaatgggactagatgacttgaggatgacacactatttttgtaccatcggcatttatttttataataaaaaaatacactgggctccta

SEQ ID NO: 890155 - DNA, 120 bp, Artificial Sequence
  ENSG00000223774_0 (sequence is synthesized)
tgtctgcccctggatcagacccagacagggaggggctgctgatgctggtagagacagagctgaggccacagtcctaccctctcctccaggccctacccagccccgccctgttggctcatg

SEQ ID NO: 890156 - DNA, 120 bp, Artificial Sequence
  ENSG00000223774_1 (sequence is synthesized)
cccacaactacttaacttcttgagctgcttgaggttgctggagcggatggcagccaatagctggtcacgggagttcttctcctgggcagggaggactttgtctcccatcttcctctgggt

SEQ ID NO: 890157 - DNA, 120 bp, Artificial Sequence
  ENSG00000223774_2 (sequence is synthesized)
tggttgtggaagcggagctcggtcagcgtgttgttctggaggagggcccggaagatggccaggatgcctttgcctgtgatgtggttggagtccaggttgaggctggtgatggtcttgttg

SEQ ID NO: 890158 - DNA, 120 bp, Artificial Sequence
  ENSG00000223774_3 (sequence is synthesized)
gccttgagcatgatggcaatggcaaaggccacgtggtcatcggctcgcgtgttggccaaggcgaacagcttaaccacagtgttgaactccagagcctcagtaaaccggaccaagatctca

SEQ ID NO: 890159 - DNA, 120 bp, Artificial Sequence
  ENSG00000223774_4 (sequence is synthesized)
tctcagtgatgtgctaaaaggactcttcttgtccagaaacctgagctccatgtactaaagcaaaatttggagagcctcagagacaagaaaaggaaagtgagaagagataaggcatccttc

SEQ ID NO: 890160 - DNA, 120 bp, Artificial Sequence
  ENSG00000223776_0 (sequence is synthesized)
agggaacgcaatggaggtcactccactgtcactacaaattccgggaaggaaacttccccagattcctccacttggaggtggcgctcggcctcaggctaggagggaacaggtgagaaagca

SEQ ID NO: 890161 - DNA, 120 bp, Artificial Sequence
  ENSG00000223776_1 (sequence is synthesized)
gcccaggtggggtgggtttgcagcgaggagacaccccagggcaaacagcctgaccccagccagggatgtccaagaaaggccgcgactcctgataatcccttatgccccggagcgcctcgc

SEQ ID NO: 890162 - DNA, 120 bp, Artificial Sequence
  ENSG00000223776_2 (sequence is synthesized)
ctgcagaggcagcgtccccgccacccagccccggctctgccgcggtgaggaccggcgggtcggggtggactggacactgtcccacccatcaaatggtgatttaggagccgtgacatccga

SEQ ID NO: 890163 - DNA, 120 bp, Artificial Sequence
  ENSG00000223776_3 (sequence is synthesized)
atgccatcctccactggcgagaccctcagagcagccacgcctctagcgactgccccgccacccgaggccgggggtcgcgcgactcacccaaagactggtgtttcaggcgctccacggagc

SEQ ID NO: 890164 - DNA, 120 bp, Artificial Sequence
  ENSG00000223776_4 (sequence is synthesized)
aggttgtttgtcagcagctaagtgccgtcagggttcccggctctggcgtccgtgggcggctacgggaagcgacaggagtcagtcctcgttcacttcccggctcgcgcgcctcactgctgt

SEQ ID NO: 890165 - DNA, 120 bp, Artificial Sequence
  ENSG00000223776_5 (sequence is synthesized)
ggtctccccaccctccccgcgccccgccttctgtgtctggggcgtccctggcggctctgctgggttttggacagggacccgccgctgatcgccacccagctcggcctcctgcacagcctc

SEQ ID NO: 890166 - DNA, 120 bp, Artificial Sequence
  ENSG00000223776_6 (sequence is synthesized)
actggcttgctgtgggacgagcacagagggataaggacaaagaatgtgtcctgggtggatctggctgcctttgcccggaaggcggagtggggtgggaggtggtaggaaaatgggaaggaa

SEQ ID NO: 890167 - DNA, 120 bp, Artificial Sequence
  ENSG00000223776_7 (sequence is synthesized)
agaaaagaaaggtgggccgacgtccacctggctgttccaggcctccaggtctaggagggagggcgctcggggctgggacttttcaggaccagggtggtcaccgcacaggccccgcctgcc

SEQ ID NO: 890168 - DNA, 120 bp, Artificial Sequence
  ENSG00000223776_8 (sequence is synthesized)
tggaccaagcgctggccttcccggggcgcccaggtccacggggtcaacgccagggttttctcagcttcctcgtctgcctcggatccaagtccagacagtgccagaagagacttggaggcg

SEQ ID NO: 890169 - DNA, 120 bp, Artificial Sequence
  ENSG00000223776_9 (sequence is synthesized)
ctgctttttgacagtacacacctctgtatgcaggtgaaacggtgggggaagggttcagtacgctggactgtgcccagcccaagctccccatccgttagtgataacttggactcgcagcca

SEQ ID NO: 890170 - DNA, 120 bp, Artificial Sequence
  ENSG00000223776_10 (sequence is synthesized)
ctccgcgtcactcgccagttatcctgcgtgtgggtgttttctccaaattggacacttagggaacagtttaagcagtatggagcacaattctgtgcctattagatgctcttaaatacccga

SEQ ID NO: 890171 - DNA, 120 bp, Artificial Sequence
  ENSG00000223776_11 (sequence is synthesized)
cttctcagggccctacactgactgatagtttgacctattggctgtaaacacaccagccagaaatacaaataaagttaaacaaagtcatgtcagccacttggaatggctggctgcttactg

SEQ ID NO: 890172 - DNA, 120 bp, Artificial Sequence
  ENSG00000279078_0 (sequence is synthesized)
gtgtaggtgcatttgtttaaaaaatataactccccattgcctctgggataaagtcttatctcagtttacatatattcttgataacctctccaactttatgtctcaccacccccactcact

SEQ ID NO: 890173 - DNA, 120 bp, Artificial Sequence; identical to SEQ ID NO: 714173
  ENSG00000279078_1 (sequence is synthesized)

SEQ ID NO: 890174 - DNA, 120 bp, Artificial Sequence; identical to SEQ ID NO: 714174
  ENSG00000279078_2 (sequence is synthesized)

SEQ ID NO: 890175 - DNA, 120 bp, Artificial Sequence; identical to SEQ ID NO: 714175
  ENSG00000279078_3 (sequence is synthesized)

SEQ ID NO: 890176 - DNA, 120 bp, Artificial Sequence
  ENSG00000279078_4 (sequence is synthesized)
gcctagtatataagagatactcaataaataaatatttgtcaaatcaactaattgattccttgtgacctaattctagagaatgggaagaaggcctgttattttgttgtcctttatggttct

SEQ ID NO: 890177 - DNA, 120 bp, Artificial Sequence
  ENSG00000279078_5 (sequence is synthesized)
ttaggaaagctctccaagcttggcatttgtcagggtgggaggaaaactgttgaagtattaagactggacacatggctgctaattcatcagcttatcattgaaaaagtccatagccaaaac

SEQ ID NO: 890178 - DNA, 120 bp, Artificial Sequence
  ENSG00000279078_6 (sequence is synthesized)
ctgactgtgcacttactataggaccctgacctgcctgggtctccctgtctctccagccagtatatttaaaggtaatgagataatgatgagtgttttgaaaaatgtttagtgttcaaatag

SEQ ID NO: 890179 - DNA, 120 bp, Artificial Sequence
  ENSG00000279078_7 (sequence is synthesized)
aaaccattcgtgtcccttcactctctgaacatagtctgcaaatctctccctctctggtatgtttctgttttgtggattagactgctaaataagcgaagagttaattttgaagttcaggtc

SEQ ID NO: 890180 - DNA, 120 bp, Artificial Sequence
  ENSG00000279078_8 (sequence is synthesized)
aacaaattcctgtttggagacgggctgttcctgaataccaggttgttatctgtctattacagccccttcacttctgggctcctggccctttgcgaagtacttcagaaagcctagagagaa

SEQ ID NO: 890181 - DNA, 120 bp, Artificial Sequence
  ENSG00000279078_9 (sequence is synthesized)
gagagggccctcaaatcccattccagcccctaaatgaaagtggcatcacaaggagaaaagtggaggtagaaatgtaccatgggggacgttgccccattgcctttcttcccctgactactg

SEQ ID NO: 890182 - DNA, 120 bp, Artificial Sequence
  ENSG00000279078_10 (sequence is synthesized)
atgtgctaataggtgccaatactgtgctggctccagtgggattcctctctgcaaagctgctggcttagcttgactgtttccctattcctctccttagaactttcatagccagtcaagcat

SEQ ID NO: 890183 - DNA, 120 bp, Artificial Sequence
  ENSG00000279078_11 (sequence is synthesized)
agaattgcatccattcttctgaaataggtactgtgcctaatttttcattggcttggccaagattctgttacctgtaattatgtcatatgggctgactggtgtaggtttggtaggcctcac

SEQ ID NO: 890184 - DNA, 120 bp, Artificial Sequence
  ENSG00000279078_12 (sequence is synthesized)
tgctctccagaggctagtgttcctatcccaggatggctgttgggattaggagtggaatgaggaatagtttaggaccacaagagatttggcctccttggaacatgtaggaaggcctcaagg

SEQ ID NO: 890185 - DNA, 120 bp, Artificial Sequence
  ENSG00000279078_13 (sequence is synthesized)
atgtaattctagcccagggaagaaaatccttttcagcagacgcttcccttcccttcccctagggaatgtgtccctactatagtaaactcttccttaagagagttttatgttttctctgtc

SEQ ID NO: 890186 - DNA, 120 bp, Artificial Sequence
  ENSG00000279078_14 (sequence is synthesized)
agatcaatttgtttttcttaatgttgttcctatcaaaaaaaaaaaaaaggaagaaatacagtcctcagacctgacagtttcatttttccccccaagtagaagcaatagaaaccttagcag

SEQ ID NO: 890187 - DNA, 120 bp, Artificial Sequence
  ENSG00000279078_15 (sequence is synthesized)
ttccaagactcctggcactcacttttcctctccatctttaggtctaacccagctcagcccagagtaaagacataaaagcctcacatgtgatttcctcttgcattttttctgctagaaggg

SEQ ID NO: 890188 - DNA, 120 bp, Artificial Sequence
  ENSG00000279078_16 (sequence is synthesized)
tccacagtacttactttatgcctcatctcaattgaagctggatgatgaggatagtgggcagtgattgcaattggggaatgcatgtactggatcacataaggtcatgaaagtccttgaaac

SEQ ID NO: 890189 - DNA, 120 bp, Artificial Sequence
  ENSG00000279078_17 (sequence is synthesized)
agagccttgccaagcagaacccttgccactcatggtattcgatacagtctacccatctgacatgaaatgatattcttaatgagccattcctatggaagatagctattgccaggcacattc

SEQ ID NO: 890190 - DNA, 120 bp, Artificial Sequence
  ENSG00000279078_18 (sequence is synthesized)
agtctcctggtctccctctcatagctatgtagggcctatgacctagaataaatggaaaaatgttatcaggaggaagagactgctggactcccctgagaggtagggtttgtgctaggagag

SEQ ID NO: 890191 - DNA, 120 bp, Artificial Sequence
  ENSG00000279078_19 (sequence is synthesized)
ctgggtgccatttatttcattttgatatatcaggtgctcctagtaacaattcctagtttctcttacctctgtaatcatcctgaatagtcactgcttcttgagctttggtgagtgttctct

SEQ ID NO: 890192 - DNA, 120 bp, Artificial Sequence
  ENSG00000236457_0 (sequence is synthesized)
gcagctggtgtaaggccctggcaggctgaggcgctgctgtctataggggtttacttctgtctgcattgaaacatggcttgggaaggggttggtggcctgctgccagcctcgaatttggaa

SEQ ID NO: 890193 - DNA, 120 bp, Artificial Sequence
  ENSG00000236457_1 (sequence is synthesized)
gacttcatatgttgatgcagttgacatcagtatcaaactattttacatgtgatctggtgtatttcctgaggaaatctgcaagatatttattaagaactaataaaataaacctctccatga

SEQ ID NO: 890194 - DNA, 120 bp, Artificial Sequence
  ENSG00000274080_0 (sequence is synthesized)
ttgtaaatgatgctaaaaagccctagtaaatttcatgttccagtggtcccccttcctctgtgtcctcgtttgtcccagaggaagttggctggggcaggaagggtcagcagttgttctctt

SEQ ID NO: 890195 - DNA, 120 bp, Artificial Sequence
  ENSG00000274080_1 (sequence is synthesized)
tgtcagagcagccaggaaaagtctcaggttgcctctaagtagaccagctgtgtgtcaagctctgtgccaaaggcaggagctgcttttactccctgcagcaaggcgagcatgtaaagacct

SEQ ID NO: 890196 - DNA, 120 bp, Artificial Sequence
  ENSG00000274080_2 (sequence is synthesized)
gacaggccagggtggaggggaggtgggcagcgctgtgggctttggcaggcaggaaggcttcctggaggaggcgctatcctgaattgtgggcagaggagggaaggtaagaggggcttccct

SEQ ID NO: 890197 - DNA, 73 bp, Artificial Sequence
  ENSG00000274080_3 (sequence is synthesized)
gaattgtgggcagaggagggaaggtaagaggggcttccctgttagaataagaccagaagggccggaagcagat

SEQ ID NO: 890198 - DNA, 120 bp, Artificial Sequence
  ENSG00000274080_4 (sequence is synthesized)
tacaaaaattagtggggcgtggtggcgctcacctgtaatcccagctactaggcaggctgaggcaggagaattgttcgaacccagaaggcaaaggttgtggtgagccaagatcaggccact

SEQ ID NO: 890199 - DNA, 120 bp, Artificial Sequence
  ENSG00000274080_5 (sequence is synthesized)
gcctgggtgacagagtgagacttcatcttaaaaaaaaaaggaaaagaaaaggtgggctgtgtggcttcaaggtgaggtgtataaaggagacagggaggccgggcacagtgactcatgcct

SEQ ID NO: 890200 - DNA, 83 bp, Artificial Sequence
  ENSG00000274080_6 (sequence is synthesized)
aaggtgggctgtgtggcttcaaggtgaggtgtataaaggagacagggaggccgggcacagtgagaggtggatcgcctgagctc

SEQ ID NO: 890201 - DNA, 120 bp, Artificial Sequence
  ENSG00000274080_7 (sequence is synthesized)
caagagtgagaccctgtctcaaaaaaaggagatgagatgctgagagaagcaagtggtggcccagtcatggaggagggggacgggtttggaagccaagccaaggagtgtggactttgtccc

SEQ ID NO: 890202 - DNA, 120 bp, Artificial Sequence
  ENSG00000274080_8 (sequence is synthesized)
cactttagaaagaattgtcctggctgcaactggaagatgagctccgagtgtgacactggagtcagggaggtccctgtgagaaatgacaccaggccaaggggtgacacagtgagagaggat

SEQ ID NO: 890203 - DNA, 120 bp, Artificial Sequence
  ENSG00000274080_9 (sequence is synthesized)
ggaggggaggggacagcgggagaaatgtcacagatcctatgagattgagatttttttctcaattagacccggaatataacagtcagacctggaatgctgggagtcagtggggtttttgtg

SEQ ID NO: 890204 - DNA, 120 bp, Artificial Sequence
  ENSG00000274080_10 (sequence is synthesized)
gcaagttttgggacatcctagggagggtccccaggcagctggatatgaggctagagcaggaaagggccagagtgagagaggctgcagggtgggcattgcaaaggagtcagtgaaaagtgg

SEQ ID NO: 890205 - DNA, 120 bp, Artificial Sequence
  ENSG00000274080_11 (sequence is synthesized)
actttgggaggctgaggcagtcagatcgcttgagcccaggagtttgacaacagcctgggcaacatggtgaaaccatgttgaattttttttaaaaattcacagattagctgggtgcagtgg

SEQ ID NO: 890206 - DNA, 86 bp, Artificial Sequence
  ENSG00000274080_12 (sequence is synthesized)
agtttgacaacagcctgggcaacatggtgaaaccatgttgaattttttttaaaaattcacagattagctgggtgcagtggtattag

SEQ ID NO: 890207 - DNA, 120 bp, Artificial Sequence
  ENSG00000274080_13 (sequence is synthesized)
tgccactgcactccagcctgggcaacagattgagaccttgtctcaaacacacacacacacactccatcctgggcaacagattgagtccttgtctcaaacacacacacaccagcctgggca

SEQ ID NO: 890208 - DNA, 89 bp, Artificial Sequence
  ENSG00000274080_14 (sequence is synthesized)
ggccagggcccggtgaggtggctgacacctgtaatcccagtgctttgggagcctgagttgggggatcatttgaggtcaggagtttgaga

SEQ ID NO: 890209 - DNA, 67 bp, Artificial Sequence
  ENSG00000274080_15 (sequence is synthesized)
ccggtgaggtggctgacacctgtaatcccagtgctttgggagcctgagttggacgtctctattgaaa

SEQ ID NO: 890210 - DNA, 120 bp, Artificial Sequence
  ENSG00000236453_0 (sequence is synthesized)
taagtttcctgaggcctccccagcccttcagaactatggggtaacacatagaaaaggcacggagaagttaagtgatttgcctgtggtcacaaagcctgttagcagcaaacccagaacaag

SEQ ID NO: 890211 - DNA, 120 bp, Artificial Sequence
  ENSG00000236453_1 (sequence is synthesized)
ctgtggtcacaaagcctgttagcagcaaacccagaacaagaacctaagatttatgaccgccagttccagctgtttttcttcgtcatgtatcctcagcaatcaacataatcaaaatctgtt

SEQ ID NO: 890212 - DNA, 120 bp, Artificial Sequence
  ENSG00000236453_2 (sequence is synthesized)
caaccaaacaggaagtaatccagcgaatctggaacagcggtggaatttagaagcaaggccagatgaggaccctaagacctagagaaactaagtcatttgctcaagaagacaaaggtaatc

SEQ ID NO: 890213 - DNA, 120 bp, Artificial Sequence
  ENSG00000236453_3 (sequence is synthesized)
atcagaaatcaacatgagatttcagctctcctgatccttagtacaacatgtgaaagaagatatgttgtctttactcacagtggaggcatttttctagctgtgtttgatttggcttcccta

SEQ ID NO: 890214 - DNA, 120 bp, Artificial Sequence
  ENSG00000236453_4 (sequence is synthesized)
tagattcaggacccataactcttgttctcactcatctgctatgctgctgataaggactttcaggtcaacagctgtaactgctaaatgaagttaatactctggaaaaaaaaaaaaaaaaaa

SEQ ID NO: 890215 - DNA, 120 bp, Artificial Sequence
  ENSG00000236453_5 (sequence is synthesized)
agactttcacagtgtcaggttagttacctaaatcttaggtaactttaggttagttacctaaagtcactctgtgacttcatcctgatataaaggaacaaggaagagagtcggattaggcta

SEQ ID NO: 890216 - DNA, 120 bp, Artificial Sequence
  ENSG00000236453_6 (sequence is synthesized)
aagtcagcgagaacaaagatccatctcttcgttgactgccttaatccctagagctgtgttcttcaatttgttactatttgctacaatttttctgcctaacaagcaagttctatcctgcct

SEQ ID NO: 890217 - DNA, 120 bp, Artificial Sequence
  ENSG00000236453_7 (sequence is synthesized)
aggagagaaacttttagtaaattcatcttcattcactactattcagctcatgctgtaaaaacttagataatgctgtctgaaatacttaactcctggtcaaatgcagctgctatttcattc

SEQ ID NO: 890218 - DNA, 120 bp, Artificial Sequence
  ENSG00000236451_0 (sequence is synthesized)
gctgggattacaagcatgagccacagtgcctggccgtttttaaatttaaatttttaaacataaattgaataaaataggaaatttggcccctcagtctcactacccagatttcaagtgctc

SEQ ID NO: 890219 - DNA, 120 bp, Artificial Sequence
  ENSG00000236451_1 (sequence is synthesized)
agtaggcacatgtggcagtggctgctgcattggacataatgaggccagattgtctggaaacgaagaaagctgttggagagctagactggaaccagatgacagaggactctggaagccgtg

SEQ ID NO: 890220 - DNA, 120 bp, Artificial Sequence
  ENSG00000236451_2 (sequence is synthesized)
gttgtgattttggctcacgtgcagtgcacgacaactcttctccaacagcatgacatagtccactgtctcaggatcccatttttccaccagctgcagagcaggaagggacaaatcaaagtg

SEQ ID NO: 890221 - DNA, 120 bp, Artificial Sequence
  ENSG00000236451_3 (sequence is synthesized)
tgagcattcggatcaccaacgctgtgacctcgctgtgtgaacgggagctactacaggaaggaagcttacaaatgagctgcatggatcccacattttgctaaaatcaaataggacctttct

SEQ ID NO: 890222 - DNA, 120 bp, Artificial Sequence
  ENSG00000236451_4 (sequence is synthesized)
cctctttgttgaatgccgtaatacacaagaaataagccagcaggatgctcatgtccaaggtttccctttatctaccacacgagttggcatgaaacaacttctggggttcaaatcttctga

SEQ ID NO: 890223 - DNA, 120 bp, Artificial Sequence
  ENSG00000236451_5 (sequence is synthesized)
gggctgagaaacctaggcagataacatctccttatttcttaacactctcttagaaaattaaaaggactttgtagaaaatccttttgactgatggagtagctccgaggaacagagaaagac

SEQ ID NO: 890224 - DNA, 120 bp, Artificial Sequence
  ENSG00000236451_6 (sequence is synthesized)
agattaacaagatgaaagaccaggagccagaggacccagaccaggagccagaagacccagatgctttgagggcaacatcttccttttgttggaaataattaagtggttcctcttattagg

SEQ ID NO: 890225 - DNA, 120 bp, Artificial Sequence
  ENSG00000236451_7 (sequence is synthesized)
tcatgagtgaggtattgaacactccagcagtaatctgcacagacctccattcttccagacctccctgccaacaattccgtaagcactcaattccagtaaaatccttcttctgtttaaaat

SEQ ID NO: 890226 - DNA, 120 bp, Artificial Sequence
  ENSG00000236451_8 (sequence is synthesized)
gcctagaaaattttctattttcctgaccagctttgactgatacaaacagaaaatgtggtgccaggtcctgcaaccatcatcttgcagacaatcctttcacaatattccaacatgctgagg

SEQ ID NO: 890227 - DNA, 120 bp, Artificial Sequence
  ENSG00000236451_9 (sequence is synthesized)
attccgagacagaaagacaacagattctcagacgatgtcattgagccactgccccagatcccgacagcatcgcgttttcactgctttttagaacatttactggtgatgagagactctaaa

SEQ ID NO: 890228 - DNA, 120 bp, Artificial Sequence
  ENSG00000236451_10 (sequence is synthesized)
gctcccagcttcatgccaggtactctccactgtgcctgggaaatatgaatccctgccctcatgaaaaaacattggccatgaggattttccctacaacccaagaactatttgaagtttgaa

SEQ ID NO: 890229 - DNA, 120 bp, Artificial Sequence
  ENSG00000236451_11 (sequence is synthesized)
gcagaacagagaaagagagagagcaggagagagagagacagacagaatccactagtagaataagccatgatcaccactcaaaacttgtaagtttacttctttgctaatagatattggaat

SEQ ID NO: 890230 - DNA, 120 bp, Artificial Sequence
  ENSG00000236451_12 (sequence is synthesized)
cattaagtttgctcttaaaaaagtatttttgttttgttttgttttttcagttgctactacttgatcagtacctggaattctgaggaaaaccctattagagattgcaaatccagtaaataa

SEQ ID NO: 890231 - DNA, 120 bp, Artificial Sequence
  ENSG00000236451_13 (sequence is synthesized)
aggcagcagtggtaccttgttaaaaacatcaaatccaaagtgctctgaggaggaatatgtacggtgtgttctagggacagaaaataagacaaacgtggctggagtattggaaggggaagt

SEQ ID NO: 890232 - DNA, 120 bp, Artificial Sequence
  ENSG00000236451_14 (sequence is synthesized)
gagtgttactagagaaggtcatgaggtgaggcgggccagatcatatgggtctgtgtaagctatggcaaggagtgtggattttattccaagtaagatggaaagcctttatgaagttttaaa

SEQ ID NO: 890233 - DNA, 120 bp, Artificial Sequence
  ENSG00000236451_15 (sequence is synthesized)
aacggcagtgttatgatttgtaacatctgagtttatgtttacatcgtggccaaattattttataaaataatgtaataatggttcaacagtttgattgtgttgcccttaaaatttcacaag

SEQ ID NO: 890234 - DNA, 120 bp, Artificial Sequence
  ENSG00000236451_16 (sequence is synthesized)
tgcccttaaaatttcacaagacttaaaattttctacactattcatttcagtattgactgtaatttaataactcaattagtaatgttaaataaattatttgttactacctattgaaattat

SEQ ID NO: 890235 - DNA, 120 bp, Artificial Sequence
  ENSG00000236451_17 (sequence is synthesized)
atatctgtttaatataatatacatgtgtctgatatatatatatatatttatgaattatatatgaaaacactggctttcttgatttcgtcgtcggatgttttccttgaacatttaccaagc

SEQ ID NO: 890236 - DNA, 120 bp, Artificial Sequence
  ENSG00000236451_18 (sequence is synthesized)
cattggtattctaatgctatagaaactggtgttaataactctattataaaatgtctattgataacctttaaatattcttatagaaatagtcttttcagggggctgggcatggtggttcat

SEQ ID NO: 890237 - DNA, 89 bp, Artificial Sequence
  ENSG00000236451_19 (sequence is synthesized)
caggtggataacctgaggtcaggagttccagacctgcctggttaatgtgggtagccgggcatgttggcgagcacctctaatcccagcta

SEQ ID NO: 890238 - DNA, 90 bp, Artificial Sequence
  ENSG00000236451_20 (sequence is synthesized)
aaaccccatctttactaaaaatacaaaatgtagccgggcatgttggcgagcacctcaagaatcacttgaacactggaggcagaggttgca

SEQ ID NO: 890239 - DNA, 120 bp, Artificial Sequence
  ENSG00000236451_21 (sequence is synthesized)
aaacctgcaagccagaggtaaaaatgagggcaaagctcttcaaatctttggaagcagaacggtgttctgagacgacaatgagattagctttgctcagttatacaaagagaaaaacacttt

SEQ ID NO: 890240 - DNA, 120 bp, Artificial Sequence
  ENSG00000236451_22 (sequence is synthesized)
accaggagagcctcaatcaacctgaacaatgaagagaaagaaacaagcctggtgattggaaaggaagttctttaagtgtgaattgctccgagtacaatataaaccttgtcagttatggga

SEQ ID NO: 890241 - DNA, 120 bp, Artificial Sequence
  ENSG00000236451_23 (sequence is synthesized)
ttgtggaagattagaagataatggatactattattccatccagattcctcttcaggaccaaggactcattttccagctggcaggaatgttagctactgacggccatggctgagttcctct

SEQ ID NO: 890242 - DNA, 120 bp, Artificial Sequence
  ENSG00000236451_24 (sequence is synthesized)
tcaggaattatcctccacttgaggggaattgctttgttcagtgttacactccctctatagtggcagcccacactggttgatgtggggtacaaagtcctggaccttgtcttagatgggata

SEQ ID NO: 890243 - DNA, 120 bp, Artificial Sequence
  ENSG00000236451_25 (sequence is synthesized)
gttctgaagggctattccagctccagaactcctcataggattggctgaggtctcctctgcaactggatcacagttcaactttttcttctgcccagtccttcttctctcatctgttgccag

SEQ ID NO: 890244 - DNA, 120 bp, Artificial Sequence
  ENSG00000236451_26 (sequence is synthesized)
ctggctattttcacctttgccttcaactataaaggctgggctctctctgcaggagtgggatcaggctgatcagagatgccacacataccttctgccattggttgctatgcagagcaaaac

SEQ ID NO: 890245 - DNA, 120 bp, Artificial Sequence
  ENSG00000236451_27 (sequence is synthesized)
ttcgttcattcttcagtgcttaacaatctcccaaggaaggtagatgcattttccaagatagcagtttcatcaaagaacagccgataatgacagataaagagcagcctggcggcttgagct

SEQ ID NO: 890246 - DNA, 120 bp, Artificial Sequence
  ENSG00000236451_28 (sequence is synthesized)
tatgtccgtttcaaggatttactgaatactaatagaacacagcttttgttgagaaaatgcctttgcagtcagtgattgccttgtgtcgttaaacctagccaccaattgttttgccccaca

SEQ ID NO: 890247 - DNA, 120 bp, Artificial Sequence
  ENSG00000236451_29 (sequence is synthesized)
ggatctgtaatactttaccaaatcagggaaaaatattaattagattttttttaatttaggaagaagttcgactttaagtatgtatttatttattcaatagtgaaaagatttgtgtgtatg

SEQ ID NO: 890248 - DNA, 120 bp, Artificial Sequence
  ENSG00000236451_30 (sequence is synthesized)
gtgagtgatttccgtttcgttactatagagtgacacatggtacatgtgggaggcagaatgaaatgatctgtaatcccattctaataaaggcagtttgaagcatatgttattgggccatcc

SEQ ID NO: 890249 - DNA, 120 bp, Artificial Sequence
  ENSG00000236451_31 (sequence is synthesized)
cgtacatacacaccctgaactacacaattatgcttttcattacatgttatgttacactttctctatttgtatacattggtttttacctctcaagctgtaatatacatttcacaaggtcat

SEQ ID NO: 890250 - DNA, 120 bp, Artificial Sequence
  ENSG00000236451_32 (sequence is synthesized)
ggtcctagtacttcttttactcgtccatgttgttattaagagaaattgggcacatgtcataggttgaaaatacatgttaattgagtagcacagattgtgagttcagaaagtgacaggaaa

SEQ ID NO: 890251 - DNA, 120 bp, Artificial Sequence
  ENSG00000236451_33 (sequence is synthesized)
aaagaaggcggctttggcagattccaacagaagctgagtttttaaaggagtaaatggaaacatatgaaaaatttgacctaagtgatggaaaaaataaaactctgggaaggcggcttgttc

SEQ ID NO: 890252 - DNA, 120 bp, Artificial Sequence
  ENSG00000236451_34 (sequence is synthesized)
caactttctgctaagccaagaccttcaaaacaggaattgacaattttgaatgatgaagagaaatctttggctataccaaaatagatgtaatcttcaaattacttagattacggagatgta

SEQ ID NO: 890253 - DNA, 120 bp, Artificial Sequence
  ENSG00000236451_35 (sequence is synthesized)
aaaccagattaaaaatctcagttctttgaatatttgatatacaagtttccctctcacttctctctgtttttcatcttcatgacttttggcctaataaagacttcattaaaaataaacaaa

SEQ ID NO: 890254 - DNA, 120 bp, Artificial Sequence
  ENSG00000270792_0 (sequence is synthesized)
aaacagtcatgtggacctagcctgaggtagtagccatagatgtcagtggcaagacagaagattcagtctctaaacaaaaccatcaactctcagaaagaagagtctatgtccctgtacaca

SEQ ID NO: 890255 - DNA, 120 bp, Artificial Sequence
  ENSG00000270792_1 (sequence is synthesized)
gaatctggcttgactttgcgacttgctttcaccaatcaaatgcagaagaagtgaagtctggtcctcaggaggttttgtactcctctgctgactctcctgggatgctaaaaacgccatgag

SEQ ID NO: 890256 - DNA, 120 bp, Artificial Sequence
  ENSG00000270792_2 (sequence is synthesized)
ctagagtgaggccattccaatctccagctgatctgctgtggatgagcatggccaagatcaactgagcttggctcagatgagcaagactccctggataacctacaatcttgttgggccaag

SEQ ID NO: 890257 - DNA, 120 bp, Artificial Sequence
  ENSG00000270792_3 (sequence is synthesized)
aagacatatgtgcatagaaatctttgaactttgctgataagagaaagcctagaattccaagccaactccttcattgaatagatgaggaacataaagccaagagaaaatgataggcttgac

SEQ ID NO: 890258 - DNA, 120 bp, Artificial Sequence
  ENSG00000270792_4 (sequence is synthesized)
agttcccgttctgcagctccccgttcacgttctgcatggacaggatctccaactcgaactgacccgaggccccacacacctgccggcgagggaaggaggttggaccatatattatgggag

SEQ ID NO: 890259 - DNA, 120 bp, Artificial Sequence
  ENSG00000270792_5 (sequence is synthesized)
caccttttgcaaggatgaaatactccgtctggatggatgggaataattcagctggggatttggaggccctaaagggcagtgtagccaatggacaggtgatcccaggtacctgcatgagtg

SEQ ID NO: 890260 - DNA, 120 bp, Artificial Sequence
  ENSG00000270792_6 (sequence is synthesized)
caggcccttcctgcagacctgcactgaactataacgtgggcatacagggctggcctgagtgatcaatagaatactgtagacgcaacaacatgtggcttctgaggaagcattgtagcctct

SEQ ID NO: 890261 - DNA, 120 bp, Artificial Sequence
  ENSG00000270792_7 (sequence is synthesized)
tggtttgttcatgctgtggaagccagctgccatgtcaagaggatgctcaagcagccatgtggaaaggcccgtatgcaactctcagaaagaagagtctatgtccctgtacacagaatctgg

SEQ ID NO: 890262 - DNA, 120 bp, Artificial Sequence
  ENSG00000270792_8 (sequence is synthesized)
actcaccggccaggcgaaactgaaaggcagcacgatgcggttgcggtcgttgccgcggctggccttgaggttgaaggtgttgcccccgatgacaggcgtggaccctgagccgaagctgca

SEQ ID NO: 890263 - DNA, 120 bp, Artificial Sequence
  ENSG00000270792_9 (sequence is synthesized)
tgcaaggatgaaatactccgtctgggtaaggcattttcattgaagcttgtagctgtttgtttagttatttaaatcaggttgatggatgtaaagtgagctccttctactcacctgaagcag

SEQ ID NO: 890264 - DNA, 120 bp, Artificial Sequence
  ENSG00000270792_10 (sequence is synthesized)
aaacagtgctaggtgatactcaaatctctgggcacccaagaagactccaaatctcagcatctcttgaaataggtggcaatgtgtaacagcattctagccaatgtaacatattttacgtcc

SEQ ID NO: 890265 - DNA, 120 bp, Artificial Sequence
  ENSG00000270792_11 (sequence is synthesized)
gggcagtaagtaactatactttgtgttaagccactatgatgtggggctgtttgttacaactgcaaagattgctgtccttgattaatgcaccatgcaatgttctcccaggcttagtttctc

SEQ ID NO: 890266 - DNA, 120 bp, Artificial Sequence
  ENSG00000270792_12 (sequence is synthesized)
tgcttgattgctctcttcatgttcaactcttatatgagttggtgacactttggttgaaacatttccaaggactgaagaatatgtttattatcaaaccaactgattatgaaaataatctgt

SEQ ID NO: 890267 - DNA, 120 bp, Artificial Sequence
  ENSG00000270792_13 (sequence is synthesized)
atttttaaggtatgtgaaggagtaggtatacatttgtgctttgggccaattttatatctttaaaataaaaatacattaaataagcaggtaatattaataattaataataccatataatga

SEQ ID NO: 890268 - DNA, 120 bp, Artificial Sequence
  ENSG00000270792_14 (sequence is synthesized)
tctgtaaagcatatattgatatgtaaaacactgtgctaagtacacatatataagcacaactcttatagcaatgctttgaggtaaatgctttattaactccattttacagatgaggacact

SEQ ID NO: 890269 - DNA, 120 bp, Artificial Sequence
  ENSG00000270792_15 (sequence is synthesized)
gaggcttaaagagcttaaataacttactaaaagttacatatgtggaaatagtggaatggagcttggagtcaaagcatactaggctctaaaacttgggctctcaatcactttattaaccat

SEQ ID NO: 890270 - DNA, 120 bp, Artificial Sequence
  ENSG00000270792_16 (sequence is synthesized)
aatagagacattaattctcagtccttagacctcttaagtctcaccatgattcatgatgataattatcagtgatgattgacatttctgtatactcactcactactgctctgtgctctgtgc

SEQ ID NO: 890271 - DNA, 120 bp, Artificial Sequence
  ENSG00000270792_17 (sequence is synthesized)
tgtatgtgagatagcttattaaaagtcttcacaatcatcatatgagacaggcatattactgtctgttatatgtatacctagtgtatctagtagttacagtaagcactccataaatataaa

SEQ ID NO: 890272 - DNA, 120 bp, Artificial Sequence
  ENSG00000270792_18 (sequence is synthesized)
agtggccaactgcaagccaggaagaaaccttcagcagatcccaaccatgctagtaccctgatccagacattcagccttcagaactgtaaaaagtagaataaaattctgttgtttaagcca

SEQ ID NO: 890273 - DNA, 120 bp, Artificial Sequence
  ENSG00000270792_19 (sequence is synthesized)
aaacagtcatgtggacctagcctgaggtagtagccatagatgtcagtggcaagacagaagattcagtctctaaacaaaaccatattccatgtcttcatctataaaagtggaagaataatg

SEQ ID NO: 890274 - DNA, 120 bp, Artificial Sequence
  ENSG00000270792_20 (sequence is synthesized)
gcaaatgctatgtgaagatgaataacatcaggtgtttgggttgtttccaggtctggctgttatgattaatgctccatggacatttttgaacatgtcgttgcaactctcagaaagaagagt

SEQ ID NO: 890275 - DNA, 120 bp, Artificial Sequence
  ENSG00000232519_0 (sequence is synthesized)
agtatctctccgctggctgatagctccccgggcaaaaagaaaaccttgccagaaaagcggaagctcccctaaagcctcccatgccccttcatctcttcagaagtcacgtggaccacgact

SEQ ID NO: 890276 - DNA, 120 bp, Artificial Sequence
  ENSG00000232518_0 (sequence is synthesized)
gattgtaagtttcctgaggcctccccatccatgaggaactgctgttgtagcaggacgagccgcagacaaaactccttagacaccggattgaagaaggcagacttgcgtctcaaaagccga

SEQ ID NO: 890277 - DNA, 120 bp, Artificial Sequence
  ENSG00000232518_1 (sequence is synthesized)
ggattgaagaaggcagacttgcgtctcaaaagccgagctcaccgcgtgagcaattcccgtcccttttaagggcttacgactctaagggggtctgcgtgagagggtcgtgatcgattgagc

SEQ ID NO: 890278 - DNA, 120 bp, Artificial Sequence
  ENSG00000232518_2 (sequence is synthesized)
aaccattctgacctctggttatggctgtcatccaaacagtttatataacctgtctgggaaattgaagattgttcatatctaactctgcagttacaaaaggaccatgtctcatggaattat

SEQ ID NO: 890279 - DNA, 84 bp, Artificial Sequence
  ENSG00000232518_3 (sequence is synthesized)
aactctgcagttacaaaaggaccatgtctcatggaattatccacgctcagatcttccgcatggctcaaaaccatttttgggata

SEQ ID NO: 890280 - DNA, 120 bp, Artificial Sequence
  ENSG00000232518_4 (sequence is synthesized)
caggacgagccgcagacaaaactccttagacaccggattgaagaaggcagacttgcgtctcaaaagccgagctcaccgcaattctatgaaagaaaaaaatcccattttcccagggagaaa

SEQ ID NO: 890281 - DNA, 120 bp, Artificial Sequence
  ENSG00000232518_5 (sequence is synthesized)
tacaggtgtgagccaccatgccggcctctgtcaagtcttattactttaaattatttacctctgtttgtttatatatacttacatactctgatggtttaaaagaatatgcagtgaaaatta

SEQ ID NO: 890282 - DNA, 120 bp, Artificial Sequence
  ENSG00000232518_6 (sequence is synthesized)
agtctccttcccatcctctgcaccctgggcacccaggatcctttcttaacaaccactgttaccagtttattgttaacataggttttaatgcactagaaatgtagtatcagagcaccatca

SEQ ID NO: 890283 - DNA, 120 bp, Artificial Sequence
  ENSG00000232518_7 (sequence is synthesized)
atcaaaatagtaacagagtgttgtatatctcccctgtaagagtcacagcccacacctctacaacaaacacagggtaacaagagaaaagcaaaacagctgggcacagtggctcatgtctgt

SEQ ID NO: 890284 - DNA, 69 bp, Artificial Sequence
  ENSG00000232518_8 (sequence is synthesized)
gccagtagttcgaggctgcaagtcagctataattgcactactccactctagcctgggtgacagagcgag

SEQ ID NO: 890285 - DNA, 120 bp, Artificial Sequence
  ENSG00000232512_0 (sequence is synthesized)
aatctgctgctggtggacttgcactataataaagacaattcttcaagctgaaggataatagcaccagatggaagcttataaatgccagaacaaatgaagatcattggaaacaggatgtga

SEQ ID NO: 890286 - DNA, 120 bp, Artificial Sequence
  ENSG00000232512_1 (sequence is synthesized)
ggccaatctggctgggacatctgccaccccatggatctccagggttgattcggctgatctggctggctaggctggtgtccccttcctccctcaccactccttgtgtgtctgtcccgaagc

SEQ ID NO: 890287 - DNA, 120 bp, Artificial Sequence
  ENSG00000232512_2 (sequence is synthesized)
tcatttgccaaactggcactaatgcaagaactctgtgattaactgatgttattgaagactgctttagactgactgactgtcagcatgcctccaaaattcatatgttgaaagctaatcccc

SEQ ID NO: 890288 - DNA, 120 bp, Artificial Sequence
  ENSG00000232512_3 (sequence is synthesized)
aataagatggtatttggaggtggggcctttggaagatgattaggtcatggggataaaagggactagtagcttctaaaagaggctccaaagagttgccttgctctttcctccatgtaagga

SEQ ID NO: 890289 - DNA, 120 bp, Artificial Sequence
  ENSG00000232512_4 (sequence is synthesized)
cacagtgagaagacaattgtctatgaagcaagcagtgggccctcacagacaccaaacctgctgatatcttgatttatgacctccataactgtaaaaaataaatgtttactgttcaagcca

SEQ ID NO: 890290 - DNA, 120 bp, Artificial Sequence
  ENSG00000232512_5 (sequence is synthesized)
acagataagcaaaagcagagaatctgctgctggtggacttgcactataataaagacaattcttcaagctgaaggataatagcaccagatggaagcttataaatgccagaacaaatgaaga

SEQ ID NO: 890291 - DNA, 120 bp, Artificial Sequence
  ENSG00000285698_0 (sequence is synthesized)
acacacggaggggagccctggctttcagacccacccgggctgccccagaaaggctgaccggggtcgccagggccccagccacttgaacaccaagaaaacagcttcaaaccgcccactata

SEQ ID NO: 890292 - DNA, 120 bp, Artificial Sequence
  ENSG00000285698_1 (sequence is synthesized)
ctctgctgaggagcggcagcagcacattttgcaaaattttccttcctgtgcctcactgagatttttctgcctgggttccccaaaagcccaaaagaagtgaactccatggcttcattccat

SEQ ID NO: 890293 - DNA, 120 bp, Artificial Sequence
  ENSG00000285698_2 (sequence is synthesized)
taaggaaatcaagaaggactagagaaaggaaaggcaacctatgcatcataaattccaactctgagaaggagaggtagaaaaggagaccagaaagcaaagtgctaagagaggagaccatct

SEQ ID NO: 890294 - DNA, 120 bp, Artificial Sequence
  ENSG00000285698_3 (sequence is synthesized)
ggctcactgttggacagcctggatgctacagtgagaaatatcagctggtgaccatgcaaactgaagcctatttttctccgttccagaattattcaataccagctacttatctgtaaccaa

SEQ ID NO: 890295 - DNA, 120 bp, Artificial Sequence
  ENSG00000285698_4 (sequence is synthesized)
gcagtagcaccctctacttttattgttcgtttgtctaatcacccattctttcagcaaatatgtattaagttctgtctatgtactagacattggagataaaaaatattaatgaaacagagt

SEQ ID NO: 890296 - DNA, 120 bp, Artificial Sequence
  ENSG00000285698_5 (sequence is synthesized)
aacagtaggtgcccaggacacaattaatgagtgatgactagacgcaaatgtaaacaaatggtaacatgaggctggacttccaggaagctaagcaagcaggaaacatgggcccagaagaca

SEQ ID NO: 890297 - DNA, 120 bp, Artificial Sequence
  ENSG00000285698_6 (sequence is synthesized)
gcttactgaagagggaccatggaaaagtttagcaatgctaccaacttagaattattgatcaataattttgttagacaagacgaaaccatagaaataggtaatattgtgttattttgttaa

SEQ ID NO: 890298 - DNA, 120 bp, Artificial Sequence
  ENSG00000285698_7 (sequence is synthesized)
tttttgctttttcctagcttctataatcatggaagaacttgagcatgattgtcttttcacataaaggggggaaaggggggtgtatgtcttgaatgatgtgtggttcacattgtggccgat

SEQ ID NO: 890299 - DNA, 120 bp, Artificial Sequence
  ENSG00000285698_8 (sequence is synthesized)
ccctacaccaagtgcccaggagtggagtcatataactcacaggcaaaatgccagtgggtcgagagtataagaaatctaacagtgcccatttcctacagagcagcaaatggcatttcagag

SEQ ID NO: 890300 - DNA, 120 bp, Artificial Sequence
  ENSG00000285698_9 (sequence is synthesized)
caattttcatggtgtcatcttttccaaggtttatgtacacagggaagatggagggaacttctagatatatttgcaggcatatgaaaaagacagaaacaagggtggctggcactcaaagca

SEQ ID NO: 890301 - DNA, 120 bp, Artificial Sequence
  ENSG00000285698_10 (sequence is synthesized)
aaagcaagttgattctgttgtgtaacaatgtgaaactacttaatgtgaatgcacttaatgccctaaaatgtgcacttaacaatggttaaacaggtgattaaaatggtaaattttatctca

SEQ ID NO: 890302 - DNA, 120 bp, Artificial Sequence
  ENSG00000249073_0 (sequence is synthesized)
ccatcctggctgaactttggataagatctacgtttgggattcttcttggtgatggatgatgcctagaccagccccagacaccctcccaagcctaagctcccctctcctgttctgacatcc

SEQ ID NO: 890303 - DNA, 120 bp, Artificial Sequence
  ENSG00000249073_1 (sequence is synthesized)
ccatcccaccaggaacccaagcttgtggccatcgtgccaggaggacttcttccaggttttagtatagcctgagtgacctctaggagtccttggacctgagctaactcctgtacaattttg

SEQ ID NO: 890304 - DNA, 120 bp, Artificial Sequence
  ENSG00000249073_2 (sequence is synthesized)
tgcagccacatccaaacatcttcaccccacaggactagaggagtcactgaccctgactgctgggctcctccgatggtcatgggcaacaaccaaatgcaaagcttggtccctgatggacac

SEQ ID NO: 890305 - DNA, 120 bp, Artificial Sequence
  ENSG00000249073_3 (sequence is synthesized)
cagtctgaagaaccttttctataagaatctcctcctgctctagactgtgcgcatcctaacggcagcagcctgcctgtcctgtgcgccactgtgttcccagagtcctcagcaggccctggc

SEQ ID NO: 890306 - DNA, 120 bp, Artificial Sequence
  ENSG00000249073_4 (sequence is synthesized)
ccacctaggtgctcactgaatgaacacacaagagaatgaatgtaaggccagctggtgggacagtgagcgtctgcctgcacaatgaggctgcccaggggaggaaggtaccccctacatgtg

SEQ ID NO: 890307 - DNA, 120 bp, Artificial Sequence
  ENSG00000249071_0 (sequence is synthesized)
gaacaaagggaaagaaggctatgtatagctttatttaattcttccttcagttccgtgaggtcttaccatcaccacttcagcctggcatcaaactagggcagatgctgaacatgctctttt

SEQ ID NO: 890308 - DNA, 120 bp, Artificial Sequence
  ENSG00000249071_1 (sequence is synthesized)
caaagtagagaaacagtcttttgctttgttttgttgccttgtggaagtctgaagacaagtcaagatgtttatctctcctgcacttcatttctacacaagttagtgagaaacagagtcgtg

SEQ ID NO: 890309 - DNA, 120 bp, Artificial Sequence
  ENSG00000249071_2 (sequence is synthesized)
ttttgggtgaagctgagtgctttgctgcaaaataccccctacttggtgtttgcctggttctttctggaatgtaaaacccctttgtctgctcaacaccgctggtggctttatgcgagcagt

SEQ ID NO: 890310 - DNA, 120 bp, Artificial Sequence
  ENSG00000249071_3 (sequence is synthesized)
gaattcacatctatagaagagaaaatcaaggctggtcactgagcccggtgagaaagctcaggcgactttcaggactcttgccttcttcacagattgccagaacaataaactttcatctta

SEQ ID NO: 890311 - DNA, 120 bp, Artificial Sequence
  ENSG00000236989_0 (sequence is synthesized)
cgcacgctcagggtgtgggcctctgccggctactttccaagaagcaatgagacctgcttggaattcttagtgggattatctggaagttgctggcagagggggttgggtgctggaggaagg

SEQ ID NO: 890312 - DNA, 120 bp, Artificial Sequence
  ENSG00000236989_1 (sequence is synthesized)
aacaggcagagagatcacgtgtctcagggagacagcattgcatggcgctgacgttgccgccaggctgtgcggagtcgaattcttcaccacatgctggctgtgtgggcttaaactcttcgt

SEQ ID NO: 890313 - DNA, 120 bp, Artificial Sequence
  ENSG00000236989_2 (sequence is synthesized)
gaaaatgaaccaatacaagtcccggccatcatctgatctattctgagggatcggggttacctgagggattgggagattcctgatgctttcaccaagagagaccagtgacctattgaagtg

SEQ ID NO: 890314 - DNA, 120 bp, Artificial Sequence
  ENSG00000236989_3 (sequence is synthesized)
gtgcctctggctcagtcggcctcagtcttccgctgggactcagacctgctccggaagtaaaaaatgttcctgatatgtcatcaactctgtcctctttgtgcttaatttgcattgacaact

SEQ ID NO: 890315 - DNA, 120 bp, Artificial Sequence
  ENSG00000236989_4 (sequence is synthesized)
gaaaagttaagcagatgcatcattgggcctccttgttcattttttgcacttcactgtaaaaaacaagaaatgattatagaaaaatgtatatatctgctggaaaactcctttctcccctct

SEQ ID NO: 890316 - DNA, 120 bp, Artificial Sequence
  ENSG00000236989_5 (sequence is synthesized)
cctgttctgcatttctttcttctctccctctgtctttagctccttcattctatccctccttggaagatgaatagccactttgtaaactgaattccattttactgggatctgttttgcagg

SEQ ID NO: 890317 - DNA, 120 bp, Artificial Sequence
  ENSG00000236989_6 (sequence is synthesized)
atggggttgatgatccccaccaggaaactgtaagccctgaatgaaacgagttctgctaagatttttggaacctgagaaacaccatacaatgtaagatgcttatacatcgtctggccaaga

SEQ ID NO: 890318 - DNA, 74 bp, Artificial Sequence
  ENSG00000236989_7 (sequence is synthesized)
accatacaatgtaagatgcttatacatcgtctggccaagaattcttttttgactttagtgcaacaataaaggac

SEQ ID NO: 890319 - DNA, 120 bp, Artificial Sequence
  ENSG00000236985_0 (sequence is synthesized)
aggagcacaaaagaatgtacggacagatcttaaagccaccagagagtaagggaagcagtgatgggcagagggagaagttaaataccgattcagtcttcacggtgctcggctgaccccagg

SEQ ID NO: 890320 - DNA, 120 bp, Artificial Sequence
  ENSG00000236985_1 (sequence is synthesized)
ggagtcctggagcttggatggtgccttcagaaaggtcccaaaatgaggctgttgacaagtgaccatctagcccaggaagtggattgttttaatgcccttcaaggtccagcaaagacaagg

SEQ ID NO: 890321 - DNA, 120 bp, Artificial Sequence
  ENSG00000236985_2 (sequence is synthesized)
atgacaaccatatttgcaagccagtccccacactaccaatgttctttctacaagaagtaggaacccctgtacaatgaggatgaagaaaaccctcaagcaggagaaaaagaaaagaagaca

SEQ ID NO: 890322 - DNA, 120 bp, Artificial Sequence
  ENSG00000236985_3 (sequence is synthesized)
caagtttttatcgagtgttttgaagtagggattgtataatgggtgcccatctgtctccacagtgcccagcagagttctaggaggtagagacgtctgttgtgtttgctttttcttcacctt

SEQ ID NO: 890323 - DNA, 120 bp, Artificial Sequence
  ENSG00000236985_4 (sequence is synthesized)
ttggtggttcttcactaatctatgcatgaattcattttgaaacctatatcccattttccttctgggaagtcattttctctccccctcttagctcatgaattcccagtgaaattgaatcca

SEQ ID NO: 890324 - DNA, 120 bp, Artificial Sequence
  ENSG00000236985_5 (sequence is synthesized)
ctgtgaattccgtggaattgcctccagaggtgggcagggaaatcaggtccagtcagttagagtattttattctctgactacagtaatcagttcagaaagagtaagtgacgaaatcatagc

SEQ ID NO: 890325 - DNA, 120 bp, Artificial Sequence
  ENSG00000236986_0 (sequence is synthesized)
aacagctagaggcaacaacacggatggatcttacaagcctgatgtggaacaagagaagcctgtccagagactaagtgaatggatttatgtggtatgcaaaaacaggcaaaaccaaatcat

SEQ ID NO: 890326 - DNA, 120 bp, Artificial Sequence
  ENSG00000236986_1 (sequence is synthesized)
agtgttttgggaggtatgcttacatagtaaagctctgaaggaaaacaaagaaaaggcgactaaagagaatgacaacttacacaatgcagaatcctggattggatcctagatccaatcaac

SEQ ID NO: 890327 - DNA, 120 bp, Artificial Sequence
  ENSG00000236986_2 (sequence is synthesized)
gtgtaggggcaaagaaacaaaggatcagagagggtgggaccctgaccaggattacacaggtgagagacacagagtcacttgcaaacccatatctgaaccactctaagactccctaaatgt

SEQ ID NO: 890328 - DNA, 120 bp, Artificial Sequence
  ENSG00000236986_3 (sequence is synthesized)
ccatatttattgagtgcaagtcctctccacacctgtgaatgctgctctgggaaggaacagccgaggacaggctccacagggaagtctgtttgtaaaggcggagctgctgaagactatcca

SEQ ID NO: 890329 - DNA, 120 bp, Artificial Sequence
  ENSG00000236986_4 (sequence is synthesized)
ccaggtgattcagcctcttcctctgttggttgatgatttcccgattgttggctagggtgttaaacagtgtctctcgctctggcacaagcaggtgcctgttgacaacaatgagaaaagaat

SEQ ID NO: 890330 - DNA, 120 bp, Artificial Sequence
  ENSG00000236986_5 (sequence is synthesized)
taaacatgaatggttcaagtaaaggaatctcccagtaaaaaaacaaacaagactacaatggtaacagtgaaaatgataaaatggagaaccagcactggacaagaaccattaagaaattac

SEQ ID NO: 890331 - DNA, 120 bp, Artificial Sequence
  ENSG00000236986_6 (sequence is synthesized)
gcagtggcatgaccatagctcactgcagctgcaggctcaagcaaccctcctgcctcagccacctgaagagctaagattacagaagcctttttcggcaaggcacagtggctcatacctgta

SEQ ID NO: 890332 - DNA, 120 bp, Artificial Sequence
  ENSG00000236986_7 (sequence is synthesized)
cagcctgggcaacatggggagacctcgtcttttatttttttctattatttatttattttttaaaatgcctttttcccagatgcaaacttactcaaaacccaacacaaatcagaaaagtaa

SEQ ID NO: 890333 - DNA, 120 bp, Artificial Sequence
  ENSG00000236986_8 (sequence is synthesized)
accttctctggctaaagcagaggctaggatccagctcagcctatctcaaacccttgtgaatcagtgccataaaacttgaggactgcagaaaacagtgtaaaagccaaaacgactactttg

SEQ ID NO: 890334 - DNA, 120 bp, Artificial Sequence
  ENSG00000236986_9 (sequence is synthesized)
ctgcttcatcaagtatatataagctggttcttattccactattcagattaacaacagattctggagacattttctctatcccctattaagaaccaacacacacacacttacacacacata

SEQ ID NO: 890335 - DNA, 120 bp, Artificial Sequence
  ENSG00000236986_10 (sequence is synthesized)
gccactcctagctatgtaaccaaatgaaaagtacacatgtgctccgagagacacacacgggaatattcagaaccttttctgtaatagctataaactgaaagcagcacatgtccaacagga

SEQ ID NO: 890336 - DNA, 120 bp, Artificial Sequence
  ENSG00000236986_11 (sequence is synthesized)
gaacatcattcacatcttggacagcaaatttcacatactgatgaaggcgccgaatttcctataagaaaaaaattaaaagtaagttgaccaggtgtgggacagaaacactggggaacaata

SEQ ID NO: 890337 - DNA, 120 bp, Artificial Sequence
  ENSG00000236986_12 (sequence is synthesized)
aagtttgaggcctcaaattctctgaggcaagaatgattcatcacacctgcaaaccccacagatgtcatgaggaagaccagagatgccagtgaacgcttcccgctggaattccagacaaat

SEQ ID NO: 890338 - DNA, 120 bp, Artificial Sequence
  ENSG00000236986_13 (sequence is synthesized)
gtgagatagcagaagaggacccccacactaaggcataccggtagtagagccatcaccacatctggagacgtttccagggtcccatctgcagcagcatacactatggcgaagacgtaggta

SEQ ID NO: 890339 - DNA, 120 bp, Artificial Sequence
  ENSG00000236986_14 (sequence is synthesized)
ccaatccacagcacatccagaactgaaagacacatcttaatcagtagctcataaaaatgacagcaaccagatacaagaaaaagcagcttatgtttggaatagccactatggataaaaaaa

SEQ ID NO: 890340 - DNA, 120 bp, Artificial Sequence
  ENSG00000236986_15 (sequence is synthesized)
ggcaaataacttgtttttctgatagtttgggggaagatgtatcaaaacagtcaaaagaattctaaaatacttctatattaagaaccataatgaacaaggaaaacagaataggttttaata

SEQ ID NO: 890341 - DNA, 120 bp, Artificial Sequence
  ENSG00000236986_16 (sequence is synthesized)
cgatttttaaaactatataattaaaatgaggccgggtgtagtggctcaggcctataatcccaacaccctgggaggccaaggcaggaggactgcttgaagccaggagttaaagatcagcct

SEQ ID NO: 890342 - DNA, 120 bp, Artificial Sequence
  ENSG00000236986_17 (sequence is synthesized)
gggcaacacagcaagactctgtctctaataatgtatacaaataaaaaagttacataaaaaaactttataattaaaatgaaaaacaaaattggccaggagtggtggctcctcactttggga

SEQ ID NO: 890343 - DNA, 120 bp, Artificial Sequence
  ENSG00000236986_18 (sequence is synthesized)
atcccagcactttgggaggctgaagcagaagaatcacatgagcccaggtgtttgagaccagcctgagcaacacatcattctgcaaaatctacaagtggatagcgcaccaccactacctgg

SEQ ID NO: 890344 - DNA, 120 bp, Artificial Sequence
  ENSG00000236986_19 (sequence is synthesized)
aagtggatagcgcaccaccactacctgggcccactgtgtccctgcaagaaagacaacgtgaaagaaggttcttgtatgcaaaggtgctttgctccttctgacagtttttcaaagtcaaac

SEQ ID NO: 890345 - DNA, 120 bp, Artificial Sequence
  ENSG00000236986_20 (sequence is synthesized)
agaaagtacttctggtgaatcacaatttagtgtcatctgcatgtttttctttcataactgaggatggattatcattaaattgtatagaagttgtttcaagcaacaggaataaaacaaaga

SEQ ID NO: 890346 - DNA, 120 bp, Artificial Sequence
  ENSG00000236986_21 (sequence is synthesized)
cagagagggtgggaccctgaccaggattacacagatgctgatcccactccaagtctagaacatcattcacatcttggacagcaaatttcacatactgatgaaggcgccgaatttcctata

SEQ ID NO: 890347 - DNA, 120 bp, Artificial Sequence
  ENSG00000236986_22 (sequence is synthesized)
cactgccagcataccggtagtagagccatcaccacatctggagacgtttccagggtcccatctgcagcagcatacactatggcgaagacgtaggtaccaatccacagcacatccagaact

SEQ ID NO: 890348 - DNA, 120 bp, Artificial Sequence
  ENSG00000236986_23 (sequence is synthesized)
gcacaggtacaatgacccaagaagcccaaactcatccccaaatggtaatttttctgctggattataatcagggcaaattatgaagaattgtaataaaaagtcgggatccatttcatgtca

SEQ ID NO: 890349 - DNA, 120 bp, Artificial Sequence
  ENSG00000273680_0 (sequence is synthesized)
tgactagcataatcttgtaaatatactttggtcatgttaccacatcataaatcttcactggttcttgttcattagaaggtaaattctaaagttcttggcttgctattcaaggttcctcct

SEQ ID NO: 890350 - DNA, 120 bp, Artificial Sequence
  ENSG00000273680_1 (sequence is synthesized)
tcctgttttgcaagctacttttttatccttatcatctctgcactacagatcctctgcttctaccaggattataccagagtgctagaattccttgtccctcagggattacgactgaaagaa

SEQ ID NO: 890351 - DNA, 120 bp, Artificial Sequence
  ENSG00000273680_2 (sequence is synthesized)
cataatcaggtctcctgcctgttgggtatttatatcccattatgacagagtgtggtagaagaaacaaatttgggttcaaatctggctcttagacttactatgcaattaccatgggcaagt

SEQ ID NO: 890352 - DNA, 120 bp, Artificial Sequence
  ENSG00000273680_3 (sequence is synthesized)
tatttgctgtgtttaaatctagatatctgcctcataaaaatggggtaacaaaagtaatacttgcctcatagaggtgtggtgaagtctaaatgaaactgtgttacagggtagagtatggag

SEQ ID NO: 890353 - DNA, 120 bp, Artificial Sequence
  ENSG00000273680_4 (sequence is synthesized)
tgcaggacctgtaatgtagtaaatgctcaagaaatgttcattctcctctgcacaaatgttatgtctggtataaagtcgatgcacagtaggtgctcaataaatattaactgactgattata

SEQ ID NO: 890354 - DNA, 120 bp, Artificial Sequence
  ENSG00000273687_0 (sequence is synthesized)
caagaagaggcaaccaactgcaatggaaatgaaaagcagaagtaacaaaatgccaaatcaaggcaagatcaaatgcatagtacacatgtatggggatggatccaaatcaatgtcttcatc

SEQ ID NO: 890355 - DNA, 120 bp, Artificial Sequence
  ENSG00000273687_1 (sequence is synthesized)
tgttcctaagtagctatctttcagatgtcctgtttcctagaaagagaaacgacctcatgctgcaaagcatgctcttgtctttccagtttgcccactggctaaataaaaatccaaaactag

SEQ ID NO: 890356 - DNA, 120 bp, Artificial Sequence
  ENSG00000270139_0 (sequence is synthesized)
gaagactgatattttatatcatggagaaaatttgagatttaaagcccttgtgtgttcctacaaaaacaaggtccttagagtccacctctaagaacaaagatggtacccattcactccaac

SEQ ID NO: 890357 - DNA, 120 bp, Artificial Sequence
  ENSG00000270139_1 (sequence is synthesized)
gtctttaaagaggtaattaaattaaaggagatcagtaggatgggcctgaatccagtgactggtgtccttataagaagaggaggttaggacacaaaaacacagagaagaccatgtgaagac

SEQ ID NO: 890358 - DNA, 120 bp, Artificial Sequence
  ENSG00000270139_2 (sequence is synthesized)
acagggagaagatatccatttgcaaagcaaaggatggggctcggaaaaacctaccctgccaataccttgagctggtactccttgcctccagaatcgtgaaaaaataaattcctgttgttt

SEQ ID NO: 890359 - DNA, 120 bp, Artificial Sequence
  ENSG00000270137_0 (sequence is synthesized)
gaccacataggattggtatgcaaaattgtatcagaaaattagatgaaacgcaattgttaaaacatagtgaagtctgtttcagacgtgctgtattggcacaactaaccagataggtaatag

SEQ ID NO: 890360 - DNA, 120 bp, Artificial Sequence
  ENSG00000270137_1 (sequence is synthesized)
cagatgctgctgaggaaatgaaggcaactacacaactactgtgggaaacagatggggaccagggagtaaggtgacgatgtgtgcgccaagtggcctaaaaacccgtgaggaaactcacac

SEQ ID NO: 890361 - DNA, 120 bp, Artificial Sequence
  ENSG00000270137_2 (sequence is synthesized)
ggtgcatcaaatatgagagtgttcacagcagcactgggagcagcccagctctccatcaaaagtcatgcattccttcagtggaataaataaatgaattacagctacagaatctcaggaaca

SEQ ID NO: 890362 - DNA, 120 bp, Artificial Sequence
  ENSG00000270137_3 (sequence is synthesized)
gtaagctaaaaaccaagtaactgaagaaaacataatatttcacttatataaagataaaaaagttttaaaactaaacagtgtatttttaagagattcaactgtgtgtgggaaaagcataaa

SEQ ID NO: 890363 - DNA, 120 bp, Artificial Sequence
  ENSG00000270137_4 (sequence is synthesized)
gaaaaactagagaatgatgaacaaaaattcaagacagtggttgcctctaaggtggggaagggccattatcagttcaaactggaaaatggtgcaaagggaccttcaaaaatgatgatactc

SEQ ID NO: 890364 - DNA, 120 bp, Artificial Sequence
  ENSG00000270137_5 (sequence is synthesized)
tcttaaactgtatgatcagtacctaagtgttttgtgctattgatattctttgtgtcatacccatttttttcatatttattagatatttaataaaaccagttttaaaaaatacaaatccaa

SEQ ID NO: 890365 - DNA, 120 bp, Artificial Sequence
  ENSG00000270135_0 (sequence is synthesized)
caaagtttaatacagtcattatcttttacacatttgaaaaaagtaacttgttttaatttataaaagaaaataggctatagaatattaatctctgtgaaacaataagacaagtgtatgaaa

SEQ ID NO: 890366 - DNA, 120 bp, Artificial Sequence
  ENSG00000270135_1 (sequence is synthesized)
ttttaaggccattggagacttctgcaagatatacacgtccatctaccacaaatggctccacatctgtattgtctggttttagacaacccatttgaattaagtctgaatatgcctaggatt

SEQ ID NO: 890367 - DNA, 120 bp, Artificial Sequence
  ENSG00000270135_2 (sequence is synthesized)
tttaggaaaaaaactatatcattaagaaaaaatgtattcaatttacagtgcttacggaaatttaaatattcaaattagctgtgctaatttgtagtttaaaataaaatattctgaataaca

SEQ ID NO: 890368 - DNA, 120 bp, Artificial Sequence
  ENSG00000270133_0 (sequence is synthesized)
tctggggtgccgtgcctggaaggcaggaggttggctgaagaagacatcttttacaaacatttaggaagtgagatggggaggttccttcctgatttagaattaattgaaggttcctcccgc

SEQ ID NO: 890369 - DNA, 120 bp, Artificial Sequence
  ENSG00000270133_1 (sequence is synthesized)
aagagaacaagcttgtaatttcatgcttgggcattagatgcatttttggaaagcagtgatcatgtccactccacactcattcataaaaggcaatgtgctgtcctgcaaagaagactggac

SEQ ID NO: 890370 - DNA, 120 bp, Artificial Sequence
  ENSG00000270133_2 (sequence is synthesized)
tgtgagacaggagatgagagaatatctaatatttttctgtgtttattctctgctattcagtgttaaattactccttacagcacagtggagtctcactctgtcacccagcctggaatacag

SEQ ID NO: 890371 - DNA, 120 bp, Artificial Sequence
  ENSG00000270131_0 (sequence is synthesized)
ccttttctgaacaaatattttcatgtctaaagttatttttctttctttcctctattagtttattccttaactcaggtgttaggaaaaacacaatctgattgaattgcatgaaaatgtaaa

SEQ ID NO: 890372 - DNA, 120 bp, Artificial Sequence
  ENSG00000270131_1 (sequence is synthesized)
ttaaccttagagagatttgtattttaagaagaaaatcttggttaactcagattttttgggaatgatgtgaaaaactccagaacatagaggagaagattcaacactcaagctacacacaat

SEQ ID NO: 890373 - DNA, 120 bp, Artificial Sequence
  ENSG00000270131_2 (sequence is synthesized)
tttgagagttaaacgtgaatgaggcactagtgataaaagaatgaatagagacacttgtcaatgtgagtttttggtgtcccttaggagaaattctgtgcaataaagaggctatttatggca

SEQ ID NO: 890374 - DNA, 120 bp, Artificial Sequence
  ENSG00000270130_0 (sequence is synthesized)
cggcccctgtcttccaggatttatgcagcctgatgcaggagagacaggtagataagagaagagctgccagtgctaggatgggcagcccttcacccttcatggacagccttcccctggctc

SEQ ID NO: 890375 - DNA, 120 bp, Artificial Sequence
  ENSG00000270130_1 (sequence is synthesized)
ctgtacttggcggatgcctcatgaggatttaattatacattgttttctttgtactttagttgctgagtctcatatccccaagtaaattgtaagcataggactgagtacacagtgagcact

SEQ ID NO: 890376 - DNA, 120 bp, Artificial Sequence
  ENSG00000270130_2 (sequence is synthesized)
aaggagaatcgattgcctggcctattgtaaaggccttgtaaactttaaaaagcaaattaaaaaacaaaatcaatgatgacgttaagctcttggggatccccataacgtcctggtgattag

SEQ ID NO: 890377 - DNA, 120 bp, Artificial Sequence
  ENSG00000270130_3 (sequence is synthesized)
agtggctaggcgactaggctttggaattcatgggacagtgcacttttaaatttggcagttctaaaatgaaaataaagaattgtcctttgactctaataaagttagcttaatggaaaactc

SEQ ID NO: 890378 - DNA, 120 bp, Artificial Sequence
  ENSG00000224204_0 (sequence is synthesized)
acccaccacagagaatcttacataggttcacatatctgcatatccctatatgcacatttatgtctatatatgtgtgtatcactcaccagaaactttggcctctgaaaattttctcatttc

SEQ ID NO: 890379 - DNA, 120 bp, Artificial Sequence
  ENSG00000224204_1 (sequence is synthesized)
caattctcctaagtaaatggaggccagccatgattctgactttggtccttagtaacgtccttaatagtgccagttatttacctgtagtttttcagctacatgcctaccctttcactctgt

SEQ ID NO: 890380 - DNA, 120 bp, Artificial Sequence
  ENSG00000224204_2 (sequence is synthesized)
tccgtaatgctggggactgggaatctgaaaactgtttctcaagctcctttgccaattagcttcctgcaaataggaggcactacaggaaattagtgggttgcagaagggaaaagggtgctg

SEQ ID NO: 890381 - DNA, 120 bp, Artificial Sequence
  ENSG00000224204_3 (sequence is synthesized)
tgttgctgtctctcactctctctccccctctactccctcccttttctttttctgacaataactctggaagaatctttagttcctcctgcaaagctcagctctggagtggcagttctcctc

SEQ ID NO: 890382 - DNA, 120 bp, Artificial Sequence
  ENSG00000224204_4 (sequence is synthesized)
tactctcctaagtgacggtaccatcacctcctcccttctgtgaccctagacacaggagtcgcagctgctttctaaagttactaatctgtggtttatctcatttttccctcttcttgcctt

SEQ ID NO: 890383 - DNA, 120 bp, Artificial Sequence
  ENSG00000224204_5 (sequence is synthesized)
ccaacatatttcatgtattaaattccttgtttaaaatacctagtgtgctttttgctttcctggctaatactgaaatatttccaaaattgggagagactcacttttgaatctatttctatt

SEQ ID NO: 890384 - DNA, 120 bp, Artificial Sequence
  ENSG00000224204_6 (sequence is synthesized)
aagaatcaatgaaatggaatactttattaggctgatttgaaaatgggctcatgcctacctttttaggctaacaggctttcctgcatgttgatgggggttcaaataaagggcattttattt

SEQ ID NO: 890385 - DNA, 120 bp, Artificial Sequence
  ENSG00000224204_7 (sequence is synthesized)
tacctcttaattctatctcatttgcttttatttccacatgagcccaacttcaattttcaacatttctccttgaccttcgtctgatccatcagtgatatgatttggctctgtgagagtcac

SEQ ID NO: 890386 - DNA, 120 bp, Artificial Sequence
  ENSG00000224204_8 (sequence is synthesized)
aggagtacacagctgcgactcctgtgtctagggtcacagaagggaggaggtgatggtaccatcacttaggagagtagaggagaactgcctgccactccagagctgaggtttcctgaggcc

SEQ ID NO: 890387 - DNA, 120 bp, Artificial Sequence
  ENSG00000224204_9 (sequence is synthesized)
tccccagccgtgtggaacttagccagataaccaaagggaggctaaccgaagttaagtaacctacacaggatgaaataactagactccaattctgctcaggatgacaatggactcaacaac

SEQ ID NO: 890388 - DNA, 120 bp, Artificial Sequence
  ENSG00000224204_10 (sequence is synthesized)
aacaacaacaacaacaacaaaatagctgtgttgcccagcttcctttccaactggagtcagctacaggatgagattcgggccaatgacatttaagaaaaacttcttgttgcacttccaatg

SEQ ID NO: 890389 - DNA, 120 bp, Artificial Sequence
  ENSG00000224204_11 (sequence is synthesized)
atccattttaaaaggggacagattcatcagcatatgctttctgcctcgagtccagggtttctcaacactttgggccagataattcttgctctggggtttgtcctataaattgtaggatgt

SEQ ID NO: 890390 - DNA, 120 bp, Artificial Sequence
  ENSG00000224204_12 (sequence is synthesized)
ttagcagcatctttggcttctacaaattagataccaggagcaacccatgcccccctccgcaagttgtgacaaccaaaaatatctccatatattgccaaatgtgcccctggtggcaaaatc

SEQ ID NO: 890391 - DNA, 120 bp, Artificial Sequence
  ENSG00000224204_13 (sequence is synthesized)
acctccagctgagaactactgctttagcctttcctcttcttcctttctggaatgctgatgcaatgccagaagccgagcagccatctagtaatcacaaggcaacacatatgaggaaaaaat

SEQ ID NO: 890392 - DNA, 120 bp, Artificial Sequence
  ENSG00000224204_14 (sequence is synthesized)
ctacatgctgaagatggtgggatgaaaagctgatggcattcgaaggccagcatattagacctggactgcctccctcttttcccttcatgacatacagaaaataaagcccttatttgtttg

SEQ ID NO: 890393 - DNA, 120 bp, Artificial Sequence
  ENSG00000235189_0 (sequence is synthesized)
ttcttccggccgctctgaccccggggctgcggctccgagatagctcagggcctggaagtgcatgctgggaccaactacataatccttggtaagaaaaggaggtggccctgacaagtgcaa

SEQ ID NO: 890394 - DNA, 120 bp, Artificial Sequence
  ENSG00000235189_1 (sequence is synthesized)
ctcgagaaatgcaatgctgtagagtccaaaggtgtctgacttgaacgaaatgatcccactgggggacaatgcaacatatactccagggtcatgttttgtcatgatgcagcaaggagatct

SEQ ID NO: 890395 - DNA, 120 bp, Artificial Sequence
  ENSG00000235189_2 (sequence is synthesized)
ttacaaggtgaactggaacttacaccttgcttctcctgttctcaggagacttggactggaactataccaccagctgtctcggatctccggcttgcagacggcacatcatgggacttctca

SEQ ID NO: 890396 - DNA, 120 bp, Artificial Sequence
  ENSG00000235189_3 (sequence is synthesized)
gtctccatcactgcatgagccaattccttataataaatctctgtctctctcattatacatatcttggagaaccctcaggaaccttgactaatacacaagataaattcagttttaattgta

SEQ ID NO: 890397 - DNA, 120 bp, Artificial Sequence
  ENSG00000235189_4 (sequence is synthesized)
agttaacaaatacatccacttgtccaccaatcacaagggatccattgagtgagccactgcaacaaacaggaaccccttcaaagagcttccagtctggtgggaccaactacataatccttg

SEQ ID NO: 890398 - DNA, 120 bp, Artificial Sequence
  ENSG00000235189_5 (sequence is synthesized)
aagcatagtggaaaacatattggacttagattcaaacacacctgaacctgtaacttatgagccaggtgaccttgggggtaagtaaatttatttctctaatggggttaaataatgcctact

SEQ ID NO: 890399 - DNA, 120 bp, Artificial Sequence
  ENSG00000235189_6 (sequence is synthesized)
caatgctttaaaagattttcagtgtggaataagactgcaaatgcttacaataatagcactaagactaataacagctaacagttaattatataatgcttactatatgctaggcactggtat

SEQ ID NO: 890400 - DNA, 120 bp, Artificial Sequence
  ENSG00000235189_7 (sequence is synthesized)
taaggtctttacatgaagcactcaataaatattagctgcagagaaatctcacggaattgactatataacctgccctaactgacgggaacgttacctattctttccatcaagggaactgat

SEQ ID NO: 890401 - DNA, 120 bp, Artificial Sequence
  ENSG00000235189_8 (sequence is synthesized)
acagaaaaggaaaaacaatcaggatgagggggagggaaaagacaacatggaaattgagtctcatgtaaaatctcttgttatttatttatttatttttgagacggcgtctcgctctgttgc

SEQ ID NO: 890402 - DNA, 120 bp, Artificial Sequence
  ENSG00000235189_9 (sequence is synthesized)
gttggtcttataaattatacttatgcaacttgagggtagtgattgtaacttagtttccaaatcctcatagcacttaatatgatacagtatcttatatatgaaacactaaccatttgcaat

SEQ ID NO: 890403 - DNA, 120 bp, Artificial Sequence
  ENSG00000235189_10 (sequence is synthesized)
ttatttgagagacctgaacaaatacatagaacattgtcacacccttccattccaggaatgtgctctctaccctaattttgaaggcagtttagcaattgtcacccacctcatcttcactct

SEQ ID NO: 890404 - DNA, 120 bp, Artificial Sequence
  ENSG00000235189_11 (sequence is synthesized)
cactcaagaggtagtcttttggcaaatccgctagttcttcctgttggctcaaagccagaaggctgttaaaagaggcaacagagaaatgtgaatgcaatatacccatgtaacaaacctgca

SEQ ID NO: 890405 - DNA, 120 bp, Artificial Sequence
  ENSG00000235185_0 (sequence is synthesized)
cgacattggccctggaaatcccccgggcaagagagggttgtaaattcagcttccttaacgtcgcagattagaatgttctacaccacagcacctgcataaataaaggtcttttagatgcca

SEQ ID NO: 890406 - DNA, 120 bp, Artificial Sequence
  ENSG00000278305_0 (sequence is synthesized)
gtttcagaaatctggatgctaagaaggttatgagaaaactatgcgtataggaaaatggcaacaaccaaaagacttaaggaatgtaaggaggaaacaataagcatattgtggattgtaata

SEQ ID NO: 890407 - DNA, 120 bp, Artificial Sequence
  ENSG00000278305_1 (sequence is synthesized)
aagaacattcagcagatcgtcattttgtcatcactgtgaatacagcttctgaaaggaaagggacagagaaagagaagaaagagactaaaacaaggaaaagagtttcattaaaaaaagaag

SEQ ID NO: 890408 - DNA, 120 bp, Artificial Sequence
  ENSG00000278305_2 (sequence is synthesized)
tggccaagtttacccagatacctaaaggttagttaaccttttaaattttgtaatttatttttaatgggaagctttctaaagtgtacatttccttgtcttatgagacagagtagattaaat

SEQ ID NO: 890409 - DNA, 120 bp, Artificial Sequence
  ENSG00000278305_3 (sequence is synthesized)
ggaccatttgatcataattagcccttgggaatataagtatctagtgctcagttcatagttacagactcagatgtagatacagattgaatagcttgtgtgctgaaggctcacagacacaat

SEQ ID NO: 890410 - DNA, 120 bp, Artificial Sequence
  ENSG00000264622_0 (sequence is synthesized)
gtgaccttctatggaaggaagccctgcagagaagcagcctgggaaatgttcacctctcttctcttcggtccccttccatggctccccactggtcagaccgacagaagtcagaaggagtca

SEQ ID NO: 890411 - DNA, 120 bp, Artificial Sequence
  ENSG00000264622_1 (sequence is synthesized)
ctggtctccactcgagcattccaggaatgtcaggtggatgggatctggcccggagctgacattttattcgggcaacctatgggagatggatttgccagtggtcgggagacaccacatcat

SEQ ID NO: 890412 - DNA, 120 bp, Artificial Sequence
  ENSG00000264622_2 (sequence is synthesized)
ccggccccagctctgactccgctcacgccttggaatgtctttagtcatttaaattcatttgcctggaactggcattgtttctccagtaagatggcaaataacaaacttcatttagtcttg

SEQ ID NO: 890413 - DNA, 120 bp, Artificial Sequence
  ENSG00000235180_0 (sequence is synthesized)
gactgcatcaaatgaccaacggtctgagtatgaggcacatcaggggcagaaccagagaagagaaagtacggtgatgtggctgcccaacaggaggtcagctcacccagacagcttcctcca

SEQ ID NO: 890414 - DNA, 120 bp, Artificial Sequence
  ENSG00000235180_1 (sequence is synthesized)
gctctgaaacagatcgactgagcaccagatgaagttggcatggatgggagatgtgatgtacaagagaaaagcaaaaattacttgagttatctccccgaagtcaaaagtaatgggacacgc

SEQ ID NO: 890415 - DNA, 120 bp, Artificial Sequence
  ENSG00000235180_2 (sequence is synthesized)
agaccctcctgaaattctgagcagaaattgctgctacatttgaatcagattctaagagatcatcaacattagaaggtgcacatcataattcaaatctctgaagaggaagaaggaagatat

SEQ ID NO: 890416 - DNA, 120 bp, Artificial Sequence
  ENSG00000235180_3 (sequence is synthesized)
tgacttcagtcttcatttagtcctgttatgggacttccagacactgaaaaaactcatccctacagccggctggaggatattgtcctggaaggggcagctttcacacatggtttgaattca

SEQ ID NO: 890417 - DNA, 120 bp, Artificial Sequence
  ENSG00000235180_4 (sequence is synthesized)
aggtcattagaccataaggagttttcattacccttcattcatgtcaacagcaaacacttactgattgagcgtccacttggtgccctatgctaggtgcttccaggtgcatccaaaaaggga

SEQ ID NO: 890418 - DNA, 120 bp, Artificial Sequence
  ENSG00000235180_5 (sequence is synthesized)
tgcagcacaaaaaattaaaatgactagaagcagcaacacatggaaggtaaaaatctttctaataagagcaatggaagaaacatttctacaaatgttaagttgtaagtcaaatgtttttaa

SEQ ID NO: 890419 - DNA, 120 bp, Artificial Sequence
  ENSG00000235180_6 (sequence is synthesized)
aaagaaagaaatgacaaatttgattagacaaaaatgagaaactgcttgctgtggtctcaatgtgtccccccagattcatatgttaaaccttaattgccaatgtgagagtattacgaggta

SEQ ID NO: 890420 - DNA, 120 bp, Artificial Sequence
  ENSG00000235180_7 (sequence is synthesized)
gggactttaggaggtgattaagtctctgccttcatgaatgggattagtgtccttacaaaagaggtgcaaggaagctgcccatccattccaccacataaggatgcatccaaaggtgccatc

SEQ ID NO: 890421 - DNA, 120 bp, Artificial Sequence
  ENSG00000235180_8 (sequence is synthesized)
tgtgaagcagagaatgccctcactagacatcaaactagacgtcaaacctaaattggccttgatcttgggcttcccaccctccagaactgtgagcaataaatttctattttttataaatta

SEQ ID NO: 890422 - DNA, 120 bp, Artificial Sequence
  ENSG00000275567_0 (sequence is synthesized)
ctttggcatcacacagacttggtctagcaagttaattttagtcccagttcctcatctgtaaaataagaatgtgtaccttgtaccttgtatgggcattggattaaaagtaacataaatccc

SEQ ID NO: 890423 - DNA, 82 bp, Artificial Sequence
  ENSG00000275563_0 (sequence is synthesized)
cttacttttagttttttatctatggtagaaccacccagagcaggggtcctcaactcccaggccacagactcataccagtcca

SEQ ID NO: 890424 - DNA, 120 bp, Artificial Sequence
  ENSG00000275563_1 (sequence is synthesized)
cactaggcaagccaaggaagcttcacctgtacttacagccacacgccatggctcatattacagcctgaactctgcctccactcagatcagtgataacattagaaactcattggagcacga

SEQ ID NO: 890425 - DNA, 120 bp, Artificial Sequence
  ENSG00000275563_2 (sequence is synthesized)
accctgttgtgaactgcctatccgaaggatctaggttgtgtgcttcgtatgagaatctaatgccagatgatctatcattgtctcactttgcccccagataagaccatctagttgcagaaa

SEQ ID NO: 890426 - DNA, 120 bp, Artificial Sequence
  ENSG00000275563_3 (sequence is synthesized)
aataagctcagagcttccactgattctacattatggatatgtgccgccgaagcaagcacaaagccctacttttacacatgcctagtgatgcttcatggacaaggcttggctctgttgagt

SEQ ID NO: 890427 - DNA, 120 bp, Artificial Sequence
  ENSG00000275563_4 (sequence is synthesized)
ccaactaacctacctgagattctgagatttctcttcaatggcttcctgtgagctagagtttgaaaatatcttaaaatcttgagctagagatggaagtagcttggacgattttcattatca

SEQ ID NO: 890428 - DNA, 120 bp, Artificial Sequence
  ENSG00000275563_5 (sequence is synthesized)
gggccaaccacagctgggagccactgctcaggggaaggttcatatgggactttctactgcccaaggttctatacaggatataaaggtgcctcacagtatagatctggtagcaaagaagaa

SEQ ID NO: 890429 - DNA, 120 bp, Artificial Sequence
  ENSG00000275563_6 (sequence is synthesized)
gaaacaaacactgatctctttctgccacccctctgaccctttggaactcctctgaccctttagaacaagcctacctaatatctgctagagaaaagaccaacaacggcctcaaaggatctc

SEQ ID NO: 890430 - DNA, 120 bp, Artificial Sequence
  ENSG00000275563_7 (sequence is synthesized)
caacggcctcaaaggatctcttaccatgaaggtctcagctaattcttggctaagatgtgggttccacattaggttctgaatatggggggaagggtcaatttgctcattttgtgtgtggat

SEQ ID NO: 890431 - DNA, 120 bp, Artificial Sequence
  ENSG00000275563_8 (sequence is synthesized)
aacaatggctgagcatataaccataggtatgggaacaaaaaacatcaaagtcactgtatcaattgccatgaagactcgagggacctgaatctaccgattcatcttaaggcagcaggacca

SEQ ID NO: 890432 - DNA, 120 bp, Artificial Sequence
  ENSG00000275563_9 (sequence is synthesized)
gtttgagtggcaacaatgcagcagcagaatcaatggaaacaacagaatgattgcaatgtccttttttttctcctccttctgacttgataaaagggaccgtcttccttggatttagtgaac

SEQ ID NO: 890433 - DNA, 120 bp, Artificial Sequence
  ENSG00000275563_10 (sequence is synthesized)
ccgtcttccttggatttagtgaacccctttggttcctgaaaaattcaaggagtatctaggacatagtccccagaagacagtacaagactttctgataaactggacatttcaagacccaaa

SEQ ID NO: 890434 - DNA, 120 bp, Artificial Sequence
  ENSG00000275563_11 (sequence is synthesized)
gtgatactattttttatcccatgcataggtgctacacttggatcaaatgaacaatgttgggatctctatggataaaggtcttaaaagtcctgagataaagaatcctgcacccactggtac

SEQ ID NO: 890435 - DNA, 87 bp, Artificial Sequence
  ENSG00000275563_12 (sequence is synthesized)
gccacgcgaaaactacctgaactgaactatgacatctcacctgatatgtaagatgtaactgttataattattttaaacctcaattta

SEQ ID NO: 890436 - DNA, 73 bp, Artificial Sequence
  ENSG00000275563_13 (sequence is synthesized)
ctcacctgatatgtaagatgtaaatgtaaacacttacacattatgacgactagaaacagcatactctctggcc

SEQ ID NO: 890437 - DNA, 120 bp, Artificial Sequence
  ENSG00000275563_14 (sequence is synthesized)
catcaatgttttgctcaagtagaaggctgactatacttgccgatccacaacatacagcaagtatgagaacagttctaaaatgacagagataggaacagtaataaagttattttaaaagct

SEQ ID NO: 890438 - DNA, 120 bp, Artificial Sequence
  ENSG00000275563_15 (sequence is synthesized)
aatttgatatactttaccaatttaacatcttgcctgtccgtgcagaatcaaacatttacatgcactaaaagacataagcatcttcagtgctcaagtgttcatctttgtaaaataccacca

SEQ ID NO: 890439 - DNA, 72 bp, Artificial Sequence
  ENSG00000275563_16 (sequence is synthesized)
tcttcagtgctcaagtgttcatctttgtaaaataccaccaaggttgaaaggaagggacaaaaaaaaaaaaaa

SEQ ID NO: 890440 - DNA, 120 bp, Artificial Sequence
  ENSG00000275560_0 (sequence is synthesized)
gagcacgcactggaacccggggccttcagacctcacgatacctgatcttactggttgctggcaaattaaaagcttatggggttttgttttgtttatacttcgtgaggtcaaaaaagtagc

SEQ ID NO: 890441 - DNA, 120 bp, Artificial Sequence
  ENSG00000275560_1 (sequence is synthesized)
aatggggaaggctggggatacggtaattcctcagagtttctatgcccagagatactttctcttcaaactgttgaccagagcagctacttgtaacccaggccccatcgggtaggaaggtcg

SEQ ID NO: 890442 - DNA, 120 bp, Artificial Sequence
  ENSG00000275560_2 (sequence is synthesized)
gtactccctcagtccgaattaatgagaattaatttcctagaggttcagcttgagtcggtaacagattttgagccatacatggaaaaatggcaaatacatgattaagtttcaattttgagg

SEQ ID NO: 890443 - DNA, 120 bp, Artificial Sequence
  ENSG00000275560_3 (sequence is synthesized)
gggaatgtttggtagaaattgctcatctttggttatgcaagggattagagatgtgaataggatggtatgttgtgttctttgacattttaataaactgtcactttccctgttgtctcctaa

SEQ ID NO: 890444 - DNA, 120 bp, Artificial Sequence
  ENSG00000260478_0 (sequence is synthesized)
gggtatttcaggccccatgggtggtgccacaagcatgtgaccttcagggctcagagttggagacagcaggcgagctggttatgcaggggaaagcggagaccctcaccagatgacagtgcc

SEQ ID NO: 890445 - DNA, 120 bp, Artificial Sequence
  ENSG00000260478_1 (sequence is synthesized)
atgcttttggacttcccaacctccagaaatatgatatctgtaaatacacaagtacagcagccatggcttgggaagggcatagtgaacaggagctcgtactgctcagaaataaggatctgg

SEQ ID NO: 890446 - DNA, 120 bp, Artificial Sequence
  ENSG00000260478_2 (sequence is synthesized)
atcacagcatcagcaaggactaagagacacccctaaggaagaaaagtagtagtaggctgaacctgcttcctgagttccagacgcctaaatgtgatctccttgatttctagatgagtctct

SEQ ID NO: 890447 - DNA, 120 bp, Artificial Sequence
  ENSG00000260478_3 (sequence is synthesized)
cctgcctccaactcaacagtccttgtagaactcatcatctcctttaaccttacataaacctgagcacatcctccattaactaaccacgcagttacacgaggccaagcattgagtgtcatt

SEQ ID NO: 890448 - DNA, 120 bp, Artificial Sequence
  ENSG00000260478_4 (sequence is synthesized)
cctggctttcccttctatacagttcccgcaattatatccaatcaatccactgaatctagtcctgttgattctaccttcttagtacctttcaaatatatccttggcctccatccctatccc

SEQ ID NO: 890449 - DNA, 120 bp, Artificial Sequence
  ENSG00000260478_5 (sequence is synthesized)
tcctagtgttcagggcaccattgcctttcattagattgccacaggagtctcctcacctgattctcaactgctaccttgtctgcacataaaacagctttacaatagccaaaatgatccttc

SEQ ID NO: 890450 - DNA, 120 bp, Artificial Sequence
  ENSG00000260478_6 (sequence is synthesized)
taaatttaaattttgatttctgcactaccctgcttgaaacctcacaaaggctgcccactggccatatgacaacacataatcataatctagtttctaaatatcacttcagattgttctcct

SEQ ID NO: 890451 - DNA, 120 bp, Artificial Sequence
  ENSG00000260478_7 (sequence is synthesized)
cccaggacccaggggacattccaaaataatgcattctttcaggctctcaaaagaaccacttccaggcgagtccttctctcacttcattgctgactaactccgcagctccttggaatttag

SEQ ID NO: 890452 - DNA, 120 bp, Artificial Sequence
  ENSG00000260478_8 (sequence is synthesized)
tatagctattacctctttccagagctgtttgctggcaccccaatggctgccctaggtcctattttcctgtgcttactaagatcttagcatacaagcacatgtcgtttcattgcacttcac

SEQ ID NO: 890453 - DNA, 120 bp, Artificial Sequence
  ENSG00000260478_9 (sequence is synthesized)
cttattgaaccttgtggatattgttttactgtgttgtctatcagtgccatattttcaacagcacatgctcacacatgtctctatatcacattttgttcattaccacaacatttcaaacct

SEQ ID NO: 890454 - DNA, 120 bp, Artificial Sequence
  ENSG00000260478_10 (sequence is synthesized)
ttttattattattataaccattgtggtgatctgtgatgagtgatctttgatgttactattataattgttttggggtgccacaaacctcacacatataaaacaatgaacttaattgataaa

SEQ ID NO: 890455 - DNA, 120 bp, Artificial Sequence
  ENSG00000260478_11 (sequence is synthesized)
ggggtggttccagggtatttcaggccccatgggtggtgccacaagcatgtgaccttcagggctcagagttggagacagcaggcgagctggttatgcaggggaaagcggaggtgtctttct

SEQ ID NO: 890456 - DNA, 120 bp, Artificial Sequence
  ENSG00000260478_12 (sequence is synthesized)
gaagactgttgctgaccgttgagccgacatggacaacctgaaagcccctgctgtggcacacagggcgtcagaaactgacctaaatctcgaaggctgtggttctcacattcgttgcacatt

SEQ ID NO: 890457 - DNA, 120 bp, Artificial Sequence
  ENSG00000260478_13 (sequence is synthesized)
aaaattacccgaggagcttttcaaacatctctgtgcctgaattccacccccagagatttatttaactgttggagaggggatgggaagaggttagaccctcaccagatgacagtgccatgc

SEQ ID NO: 890458 - DNA, 120 bp, Artificial Sequence
  ENSG00000260478_14 (sequence is synthesized)
agagacacccctaaggaagaaaagtagtagtagtggcttggaaccaggacccacaatatctccaaggatgccggtatatcccacttcatttcaatgacccacttactgagttacattcca

SEQ ID NO: 890459 - DNA, 120 bp, Artificial Sequence
  ENSG00000260478_15 (sequence is synthesized)
tactacattatcaatgcctccaagtcagagactatgtcttacttttgtttgtatgtctagttgctagaatagttctgagtgcacagtaggtgatgaggtttattttgatgttgaacaaat

SEQ ID NO: 890460 - DNA, 120 bp, Artificial Sequence
  ENSG00000260478_16 (sequence is synthesized)
atgtacaacctgcaaagatatttttactcagtgctttatccattcagattttgccctcatgaatcaaaactgtagttataaatataaataaatgtataaatgcatatatatgtgtgtgca

SEQ ID NO: 890461 - DNA, 120 bp, Artificial Sequence
  ENSG00000260478_17 (sequence is synthesized)
tacaatcagttggccctccatatctgtggattccacatcctctgattcaacaaactggataaaaagtatttttaaaaatcaataaaaaatacaagctaataaaaaatacagtataacatc

SEQ ID NO: 890462 - DNA, 120 bp, Artificial Sequence
  ENSG00000275569_0 (sequence is synthesized)
ttctgttattagaattagtttatttatttggaataattcacttcttggattggatggatgccaagctggattattaccctaggctgctgatggaaagcatccaaaagttttaccagttct

SEQ ID NO: 890463 - DNA, 120 bp, Artificial Sequence
  ENSG00000275569_1 (sequence is synthesized)
tttgttagtttcttgtatagggtaagaataaaaactcatttaaattgccataatttatgcaatgaaacccaataaactagccaaatttcaagttcctgccttccatcaacatttccatta

SEQ ID NO: 890464 - DNA, 120 bp, Artificial Sequence
  ENSG00000275569_2 (sequence is synthesized)
catgagtctttaggatgaaaactgcttcagaaaatgaagatttcaatgactagtttagtctgaatcatcatggctgaaattagaaaacacaaagccagtgtgatcaatgggaagatcatt

SEQ ID NO: 890465 - DNA, 120 bp, Artificial Sequence
  ENSG00000275569_3 (sequence is synthesized)
gacataagtgtcagtttctgttaatggtgtggcctctaattaattttgtgatcttttgcaagttacttaatccctgtctgttttttactctgagagataataaaattggaccaaatcaat

SEQ ID NO: 890466 - DNA, 120 bp, Artificial Sequence
  ENSG00000248859_0 (sequence is synthesized)
gtggggatctggccctctcccgcttgcaggtgtggctggcgtacgcgttgggagcgcctgcttgcccctcctccgggggggaaggactggccgtcgtccctgccccgggggtgcgggtgc

SEQ ID NO: 890467 - DNA, 120 bp, Artificial Sequence
  ENSG00000248859_1 (sequence is synthesized)
gccgagccctcgggaggcctggctctggtgtgggctgcggggagaaggcgcgggaaggaaggaaggaggcgaagcggtgcgggagggaggcggccgttgccatggaaggagctgcaagcc

SEQ ID NO: 890468 - DNA, 120 bp, Artificial Sequence
  ENSG00000248859_2 (sequence is synthesized)
ccctgctccgctgtccgccttgggtacagaagcggcgagtggcccctttccaggaggcctgtttaccagcacgacaacggcaaattagtgcgcttaagaggcattcggcgtttatcccgg

SEQ ID NO: 890469 - DNA, 120 bp, Artificial Sequence
  ENSG00000248859_3 (sequence is synthesized)
caaacatgcgcagcgtgaagggggcctgcgaggcctgctccccggaatctgctgaaatggggtctgctgtgcatcttaatcgacttacttccacccatcacattaaacgcatttaatcta

SEQ ID NO: 890470 - DNA, 120 bp, Artificial Sequence
  ENSG00000287539_0 (sequence is synthesized)
gtgccccacaggcaagaggtcccaactatagatgaagcacgcaggctacagacaggtcttttattgaatcatctaaatatcacagatacttaggtctgaggagtcatccaacatcgtgtt

SEQ ID NO: 890471 - DNA, 120 bp, Artificial Sequence
  ENSG00000287539_1 (sequence is synthesized)
tctgtagctggacaactcttagaacctcctcagcagcctgcggaactgttcctttttaggagacgtagacagcaccccaacattttctgatatccttgtttttaactattgctgcttgct

SEQ ID NO: 890472 - DNA, 120 bp, Artificial Sequence
  ENSG00000287539_2 (sequence is synthesized)
gaatcagagcagctgaatttgaacaagactgaaacaagctcaatgtcgcttccttcaaagattaattcgacattctgggcttgagatactgaataagcaacacctggcctcatccgaacc

SEQ ID NO: 890473 - DNA, 120 bp, Artificial Sequence
  ENSG00000287539_3 (sequence is synthesized)
agagtcccgttctcctggataacgacgtttctggggaagtgagcacccacagaggtcatcttgtaatggaacccagggcaacccctttgaccatgctccgtacacgactatgaacagtcc

SEQ ID NO: 890474 - DNA, 120 bp, Artificial Sequence
  ENSG00000287539_4 (sequence is synthesized)
caacggcagccggctcccttcagtttccccaccgtttgtcaacccggagcctcttttcctttccaaggagactgagttctacattgatgtgattgaagtctctcctcaaggctgtgtgca

SEQ ID NO: 890475 - DNA, 61 bp, Artificial Sequence
  ENSG00000287538_0 (sequence is synthesized)
gttctcgagctgtaacacttaccgcgaaggtttgcagcttcactccttaagccagcgagac

SEQ ID NO: 890476 - DNA, 120 bp, Artificial Sequence
  ENSG00000287538_1 (sequence is synthesized)
ctgtaacacttaccgcgaaggtttgcagcttcactccttaagccagcgagaccaggagcccactgggaggaagaacaactccagacgcgcctccttaagagctgtaacactcaccatgaa

SEQ ID NO: 890477 - DNA, 120 bp, Artificial Sequence
  ENSG00000287538_2 (sequence is synthesized)
gtcaccggcttcattcttgatgagaaggcttccactgcactactggaagaaaccattgctttgggaattttctatcctgcagccctcagcaaccctctgctggaatgctgccactatgac

SEQ ID NO: 890478 - DNA, 120 bp, Artificial Sequence
  ENSG00000287538_3 (sequence is synthesized)
tgctagagacacttcatggaagcccacaggacatgtcaccttttctcatgggctcatttcatgggccaggcacgagcttctgttcattccacctatgggtttgaaggtcaactctgcagc

SEQ ID NO: 890479 - DNA, 120 bp, Artificial Sequence
  ENSG00000287538_4 (sequence is synthesized)
gacatagaaaaattatgatagggaaagaaatatcacctaactgattccatcttgcttctgacctccaagctgcctttgttcattcctgggcataggccaacctaaccatggagaaattta

SEQ ID NO: 890480 - DNA, 120 bp, Artificial Sequence
  ENSG00000287538_5 (sequence is synthesized)
atttatagtttgactttcaatcaaggatgataagagtccctttctaaaactgacctcctccttgtcccagtactgacaccacctttgtaagacccatgaaaggccacggagattgggatt

SEQ ID NO: 890481 - DNA, 120 bp, Artificial Sequence
  ENSG00000287538_6 (sequence is synthesized)
ataggaggggtctgaattctgctaagatgtaggcatagttaaataataacccaccattgttccatagcttgcttgcttataatccctaatcactcaggattcttgaagccagaggtcaca

SEQ ID NO: 890482 - DNA, 120 bp, Artificial Sequence
  ENSG00000287538_7 (sequence is synthesized)
tagataacatcactattgtagaacctaaggggggccttttgagatgttttccagacttttgcattcttacaactaactccatttggacccatgactcatgactcaaccagtcgtgtggtc

SEQ ID NO: 890483 - DNA, 120 bp, Artificial Sequence
  ENSG00000287538_8 (sequence is synthesized)
gactcatgactcaaccagtcgtgtggtccccacctaagggctgactcagctcatgaggactgttttccacacccctatgattttatctccaaccaataagcagcaaccactgcttagccc

SEQ ID NO: 890484 - DNA, 120 bp, Artificial Sequence
  ENSG00000287538_9 (sequence is synthesized)
ctcccaggcaaattatccatgaaaaccctagcttccaagctttcagggagactgatctgagtaataaactcctatctcctgcttagctagctgtgtttattaaactctctgttacaatac

SEQ ID NO: 890485 - DNA, 120 bp, Artificial Sequence
  ENSG00000234580_0 (sequence is synthesized)
gtaactgagtgtatgacttggtccaatgaaggtaagcctgacgaggcagaaccagtccactgtcacagagtcacagatggccagcccggaaggaaagagccgctggttacgaggtgtgca

SEQ ID NO: 890486 - DNA, 120 bp, Artificial Sequence
  ENSG00000234580_1 (sequence is synthesized)
gagacaagctagtatcccaacacatccgtcctgtgaactccattagggtggatggagaggaagagactaaggattcacacatcacgaagacatttgtggaagacggagtgtgtttccatt

SEQ ID NO: 890487 - DNA, 120 bp, Artificial Sequence
  ENSG00000234580_2 (sequence is synthesized)
atcctttcagagtttgcaaacgaggcggtgcccagcatagacaggttctctgcccacccatcctgaatccacaaggccacagatgcagaaaggatatttaataaagttcaacactgagtc

SEQ ID NO: 890488 - DNA, 120 bp, Artificial Sequence
  ENSG00000234580_3 (sequence is synthesized)
gcaagaaagctcaaacggaaaggaagttccttactgtgattgagaatatatcatacttctggtatgctactgaaagcttctgaggttggggataagacaagggctctgtctgtcaccatt

SEQ ID NO: 890489 - DNA, 120 bp, Artificial Sequence
  ENSG00000234580_4 (sequence is synthesized)
tctcttgaaccttacaatggaatttggcactatgggagttgcaaatcaacacagtggccactcaaggagaagcaaggggtggctggaaggagaggtgcccctggagttctgtaaaatctg

SEQ ID NO: 890490 - DNA, 120 bp, Artificial Sequence
  ENSG00000234580_5 (sequence is synthesized)
cttcttgatgtgcctttgagtgttctctttgtgtaaattctttgaactgcactcttatgatttgtgcatatttccctatgaaaattatacctcaataaaatattgacttaaataacagaa

SEQ ID NO: 890491 - DNA, 120 bp, Artificial Sequence
  ENSG00000234584_0 (sequence is synthesized)
ggtagagttaacagtagcccaataagagaagaggtgtgaacatgccggaatgtcttccagagtaaagcagttgaatgaatttttcatttggttcttagaagaactacaactgtactttga

SEQ ID NO: 890492 - DNA, 120 bp, Artificial Sequence
  ENSG00000234584_1 (sequence is synthesized)
agaagtatgaaggactctgaagaactgtgaaggacttcatgcctctgtggttgggtggtcaaggtcatgagatactcagaggatctctgcaagcaactgcctgcaggaaagcagctgcct

SEQ ID NO: 890493 - DNA, 120 bp, Artificial Sequence
  ENSG00000234584_2 (sequence is synthesized)
ttgcagacacaagagatgaatgtctgtttgatcaagaggaaaggagtaaactttgttctctcgtattatttctctgcattagtgaatgtgcttgcttcctaaatcctcattagcaaagta

SEQ ID NO: 890494 - DNA, 120 bp, Artificial Sequence
  ENSG00000234584_3 (sequence is synthesized)
tcttcttatgaagaaatctgttctgtccttgccactggatccatctctataaagactctagcaaaaagttctataggcacaatctaataatatgcaaaaataaatgcatcttaaaaaaca

SEQ ID NO: 890495 - DNA, 120 bp, Artificial Sequence
  ENSG00000287531_0 (sequence is synthesized)
ggcttcagcgaggcccagcgggaagccgatgtccctgtgccagggtgagggcagtcaccgaagcagatgctgggccactgagaagagcgattgatttcagaagctcaaattcctcagggt

SEQ ID NO: 890496 - DNA, 120 bp, Artificial Sequence
  ENSG00000287531_1 (sequence is synthesized)
ggccgccgtcctcctccccttggtgggagggcggaggtagctgggagctgtgttggccaccactggctgccaacgcagctcgagttgggagagttgtcgccagtctctggctgtaagcag

SEQ ID NO: 890497 - DNA, 120 bp, Artificial Sequence
  ENSG00000287531_2 (sequence is synthesized)
cgattggtgaatgactggcccccacacacctgccacccagtaaaacggccaggagtggtgcttgctgctggccagtgaaacaagcacctttgagggcttgacctccaggcacagcatgtc

SEQ ID NO: 890498 - DNA, 120 bp, Artificial Sequence
  ENSG00000287531_3 (sequence is synthesized)
cagccaggaaggcctcctcactctgctaagtgttgagcctgggtgtttttcagactcactttcagggcaccgtgagtgggtggggaggcggcgggggggcagaaggcgaagcactaacca

SEQ ID NO: 890499 - DNA, 120 bp, Artificial Sequence
  ENSG00000287530_0 (sequence is synthesized)
ggcatagaggatcaggagaggggacgccacctgccacacgctggatgctggggtccgcacgactgcggcttgtgtcgctgtggttggtggtggtgatggaaactgcagcgtggctggagt

SEQ ID NO: 890500 - DNA, 120 bp, Artificial Sequence
  ENSG00000287530_1 (sequence is synthesized)
gcacattcacacagactggctaatgagaccccacactgaagaagcctagaacttccacagactccctgaaatctaagtcctcatttttaacatacagcttttaatactagcttcagaagt

SEQ ID NO: 890501 - DNA, 120 bp, Artificial Sequence
  ENSG00000287530_2 (sequence is synthesized)
cccggatccctgcaaagcaacaatgaaccatttcttgattggattgtgatgtgacgaaaagtggattttatacgacaaccggcaatgaccagctcagtggttggaccaagaagacgctcc

SEQ ID NO: 890502 - DNA, 120 bp, Artificial Sequence
  ENSG00000287530_3 (sequence is synthesized)
tcccaaagccaaacttgcaccaaaaaaggttatggtcactatttggtggtcgtcggctcgtctgatccactgcagctttctgaatgccagtgaaaccattgcctctgaggagtgtactca

SEQ ID NO: 890503 - DNA, 120 bp, Artificial Sequence
  ENSG00000287530_4 (sequence is synthesized)
tgtactcagcaaattgatgacatgcactgaaaactccagcgcctgcaggcagcattgatcaacagaaaagcccaattcttcttcatgacagcacctgaccacatgtcacacaactcacgc

SEQ ID NO: 890504 - DNA, 120 bp, Artificial Sequence
  ENSG00000287530_5 (sequence is synthesized)
tttaaaagttgaacaaattgggctacgaagtttcacctcatctgccgtattcacctgatctctcgccaactgactactacttattcgagcatcttgacaactctttgcagggaaaatgct

SEQ ID NO: 890505 - DNA, 120 bp, Artificial Sequence
  ENSG00000287530_6 (sequence is synthesized)
aaaatgctttcaggaccagcaggatgcagaaaatgctttcaagagtttattgaatcctgaagaatggatttttacactatagaaataaacagactgggcgcagtggctcacgcctgtaat

SEQ ID NO: 890506 - DNA, 77 bp, Artificial Sequence
  ENSG00000287530_7 (sequence is synthesized)
agtgaaagtccatctcagagttatttctcattgacaaaaatgtgttggttgtaatggttcctattttgattaataaa

SEQ ID NO: 890507 - DNA, 120 bp, Artificial Sequence
  ENSG00000287530_8 (sequence is synthesized)
atgatttaaaattcacagtccaaactgctgttacttttgcaccaacctaaaaatacttgtatacgtgtgaaacatgccagacttccaagacaggagatgtgtgacagatgtgaagggatt

SEQ ID NO: 890508 - DNA, 120 bp, Artificial Sequence
  ENSG00000287530_9 (sequence is synthesized)
tcttgggaggtgtttaggaagcctttggaagcagttcttatctcagacatgcaagcacgagcctcctcttttgtgcattcccagccctgttttgtcagcgtctgaaaagagtgattccat

SEQ ID NO: 890509 - DNA, 120 bp, Artificial Sequence
  ENSG00000287530_10 (sequence is synthesized)
cctggtatgtgcaattctcacagcttgtatagataaaattttgcaactgtgcaaatatttccgcagagtaaatatctaggaatagaagaagtagttcaaaaagtaaacacatttgaaatt

SEQ ID NO: 890510 - DNA, 120 bp, Artificial Sequence
  ENSG00000287530_11 (sequence is synthesized)
ctaataactattgtcaacagccctcctcagtgctggtactaattacacttctaagagctgtgtatgatgggagctgttttccctcaccctcaccagaagtacttttttatatttttcagt

SEQ ID NO: 890511 - DNA, 120 bp, Artificial Sequence
  ENSG00000287530_12 (sequence is synthesized)
tttcctacttgataagtgagcagtgatttcttagtattgttttaatttgaattttttttattatgagcaaagtcgagcatcttttctgatgattaaaatgctgttgtatttccttttctg

SEQ ID NO: 890512 - DNA, 120 bp, Artificial Sequence
  ENSG00000287533_0 (sequence is synthesized)
ggggctccaaccccacatttcccctccacactgccctggtagagattctccatgagggttccactcgtgcagcaggcttctgcgtggacatccagacttttccatgaatcttcctaaatc

SEQ ID NO: 890513 - DNA, 120 bp, Artificial Sequence
  ENSG00000287533_1 (sequence is synthesized)
tgaatcttcctaaatctaggtgaaggtttccaagcttcaactcttgcactttgcactgcaatggtagtgcaggtccactgaaccatcaaagaccagttgcagaaggtagaagttataatc

SEQ ID NO: 890514 - DNA, 120 bp, Artificial Sequence
  ENSG00000287533_2 (sequence is synthesized)
aagatcatcagaactggcatctggtgagatctctctccttgggttgtaagtgaccaccttctctatgtccttccatggactttcctctgtgcttttgtggctggagtgcaatggtgtgat

SEQ ID NO: 890515 - DNA, 120 bp, Artificial Sequence
  ENSG00000287533_3 (sequence is synthesized)
ctcggctcactgcaacctttggaataatgttcatgagcccaaagacaagacaacctttggaataatgtccatgagcccaaagacaaaattcccagcttaataaatggcccaacagcatca

SEQ ID NO: 890516 - DNA, 120 bp, Artificial Sequence
  ENSG00000287533_4 (sequence is synthesized)
ttagaagtaactagaattcttcctagctccactggaaaggatgaacatgggggctcccgcaagataagtacagggccagtggacagtgactggtctagtgagaatagaatcccaaagatc

SEQ ID NO: 890517 - DNA, 120 bp, Artificial Sequence
  ENSG00000287533_5 (sequence is synthesized)
ctgggaaataaaattacacaacaagcttccaggaaacaagtggaacaaacgaggcaacctcgcagatactaccaggaatggataagcagaagagggtcagagccacaaaatctaaacaaa

SEQ ID NO: 890518 - DNA, 120 bp, Artificial Sequence
  ENSG00000287533_6 (sequence is synthesized)
agacaccaaaccacaagaagcacccagccctgtgaacaccagctgtggctacatctgtaccaatcttttcagacagctgccgtgggactgctgagagcagccacacaccaaacagcagtg

SEQ ID NO: 890519 - DNA, 120 bp, Artificial Sequence
  ENSG00000287533_7 (sequence is synthesized)
catctgaacacaagtcccaagacactcctctctattaatcctcattttgagaagatggatatggttatgttacaacatccccatacaacacttgtgggcgagggtaatcagacaccctca

SEQ ID NO: 890520 - DNA, 120 bp, Artificial Sequence
  ENSG00000287533_8 (sequence is synthesized)
cctaaagagggcacaggaaggaggaggatgaaaacagagggctagggaagggatgtgtgctctggatcacatagactttccccacaggcactatttaaaacaaaagaagagccctagaaa

SEQ ID NO: 890521 - DNA, 120 bp, Artificial Sequence
  ENSG00000287532_0 (sequence is synthesized)
agtacacagaggcacatatccccaacctcaaggcaacataagaacgagagtctcagaagtacattatagattataataaatttttcatttaggagacaaaaaaattctattttctcatac

SEQ ID NO: 890522 - DNA, 120 bp, Artificial Sequence
  ENSG00000287532_1 (sequence is synthesized)
aaaaatattaaatgagaaacttaaaaatattggagaacactgctgctgggaaacacaagagaaacagtcattaatggtgggtatttgtatacacaaagactttgctcaagaagtatctgg

SEQ ID NO: 890523 - DNA, 120 bp, Artificial Sequence
  ENSG00000287532_2 (sequence is synthesized)
aggaatgacagattgaaggtattttttctttggaggtatattttttttcttcagaggtatatattattcagaggtatgtatttttctttggaggtatatattttttctttgaaggtatat

SEQ ID NO: 890524 - DNA, 120 bp, Artificial Sequence
  ENSG00000287532_3 (sequence is synthesized)
atatttttttcttcagagccaaattaaagttggggctactcatcaggcaggtcctaaggggagacttcaatttgtatttttttaaaaaaagggaaggaaagaaagaaagggtaggaaaaa

SEQ ID NO: 890525 - DNA, 120 bp, Artificial Sequence
  ENSG00000287532_4 (sequence is synthesized)
aacagtatgtgaaggaagtggagcatcactgggtgattcagcatggctggaatcactgggcaaggaagtagtaacaagagacaaagctcgagaggcaaatacatgcataataatgaaggg

SEQ ID NO: 890526 - DNA, 120 bp, Artificial Sequence
  ENSG00000287532_5 (sequence is synthesized)
tcctggaggcaatgaggatccactgaagataggtatgttgaagctgtgacctcaacagacttatactttaaaagcttactctggagacttcaagttctgggaagaaggaatagatatatt

SEQ ID NO: 890527 - DNA, 120 bp, Artificial Sequence
  ENSG00000287532_6 (sequence is synthesized)
tcccattcttcccattttaagtataacttaaaaccctaagacattatacataaaacaaacataagacgactccgaaatgtgaagaaaaaaacttcctcaggacactgggacctgataaac

SEQ ID NO: 890528 - DNA, 120 bp, Artificial Sequence
  ENSG00000287532_7 (sequence is synthesized)
aacataacggtggtaccatcaccttatgtaaggggacaggagaacgggagtcagttgttgacacagcacatgaggagactgctacaagcatttaacatctggaaactcagaatgttcaat

SEQ ID NO: 890529 - DNA, 120 bp, Artificial Sequence
  ENSG00000287532_8 (sequence is synthesized)
agaatgttcaatatctcagagtgtgaaactctctctcatgtgaaaaaattacctcaccccaaatgcttgtggttcaccaattaagaaattcaaccctctccctctccctctccctctccc

SEQ ID NO: 890530 - DNA, 120 bp, Artificial Sequence
  ENSG00000287535_0 (sequence is synthesized)
gggaagctgtttctcagacaggagcagcgacacccctgccacgcctgccgcctggagttgagtggggtccccgtgccgccttcagcgcgcctccttatgcacctctacctctgctgcagc

SEQ ID NO: 890531 - DNA, 120 bp, Artificial Sequence
  ENSG00000287535_1 (sequence is synthesized)
gtacctcttccgcagccctagcggcctccccgaggggcgccgcggcctcggctgtccctcccctgcctggcacgaccacctgacccccagcgacccaagaagcaagttgtgtttgcagac

SEQ ID NO: 890532 - DNA, 120 bp, Artificial Sequence
  ENSG00000287535_2 (sequence is synthesized)
gcaaaggggctgtcgttggtatcggtgcactggtttgaagccactgcgggcacagcctgaagagggccggtgtcccgcgtgcagcctccccggcccggcctcctcctgctgcagaaccgc

SEQ ID NO: 890533 - DNA, 120 bp, Artificial Sequence
  ENSG00000287535_3 (sequence is synthesized)
cccccacgcccgggctgctgcgccccaggagggactagcgggtattcagggatgcccgcactctcgggggcgagcctgcagctgtgtgccctgtaggggcttcctgcggggcaccgtgag

SEQ ID NO: 890534 - DNA, 120 bp, Artificial Sequence
  ENSG00000287535_4 (sequence is synthesized)
cgcaggtggggacaagcgggccgtgcagatgcgcaccccctggatgcctggggctccttccaacaagagccctgtgttggaatgccgggtccccgccgaggtgagagggtcggcttcgcc

SEQ ID NO: 890535 - DNA, 120 bp, Artificial Sequence
  ENSG00000287535_5 (sequence is synthesized)
ttccaggtggtgttgccgccgagtaccctggccccgcgggccaccgtccagttctgcttctctttagagcgtgctcagcggcctttcggggacagtaatcaaaggcaaaactacagctgg

SEQ ID NO: 890536 - DNA, 120 bp, Artificial Sequence
  ENSG00000287535_6 (sequence is synthesized)
ccaggctctgtgagggcgcacagacagacaggctgaggcctctgcgcctgccttttccacctgggcaaagcgtgatttcttgtccaggacgcgcgtgtttcccatgtcggggaactttgc

SEQ ID NO: 890537 - DNA, 120 bp, Artificial Sequence
  ENSG00000287535_7 (sequence is synthesized)
tcaatctgttttcttgctcctgaattcataatggggaaacaggactgattcaactcctagtccctgcagaaggcctcgaatgccttgcattcttctctcacttcctgactacaagggatg

SEQ ID NO: 890538 - DNA, 120 bp, Artificial Sequence
  ENSG00000287535_8 (sequence is synthesized)
aggttttgctttaggaagattctgggaatggagtcgggaaaccgaagaaatgcaaataaagtatttatatgtaattattgaaagggcttagcagagagtgtctaaggaccgtgggtggtg

SEQ ID NO: 890539 - DNA, 120 bp, Artificial Sequence
  ENSG00000287535_9 (sequence is synthesized)
tgtgcgtgcgcatgtgtgtatgtttgtgtgtgtattgcagaggttggggaggggttctttacgttaaagatgggagagagaactttgcccttctactttcctctccatctaggaagggct

SEQ ID NO: 890540 - DNA, 120 bp, Artificial Sequence
  ENSG00000287535_10 (sequence is synthesized)
actttcctggtaacttgaaatagtcaggcttattccacttttgccaaaaggaatgttcattaaagcatcttcaacagttgatataataaacactttttctccctcttcatcatataaaag

SEQ ID NO: 890541 - DNA, 120 bp, Artificial Sequence
  ENSG00000287535_11 (sequence is synthesized)
tgtggggagactctgtctctgttcatttcaaaatatgggtacttttaaaaacacttattttcagtagtttagtacactttaatttttaattttaatttttattattattttttagacagt

SEQ ID NO: 890542 - DNA, 120 bp, Artificial Sequence
  ENSG00000287535_12 (sequence is synthesized)
ttattttttagacagtatctcctcatgttgtccaaactggtcttgaactcctgggttcaactggtcctcctgcctaaggatcactcagagtgttgggattacaggtgtgagccatggtgc

SEQ ID NO: 890543 - DNA, 120 bp, Artificial Sequence
  ENSG00000287534_0 (sequence is synthesized)
tttttttttttttcttacaagaaatctcaccgtagtcatgctatgaaaaaaaactgataaattacctggattccatattagaagatgcagtttcttgccccaactctctcaccaaacata

SEQ ID NO: 890544 - DNA, 120 bp, Artificial Sequence
  ENSG00000287534_1 (sequence is synthesized)
acctggtttttgttgttgtttccttaaaatcttagggaattcctttccttttcttaccagttcctaccacaaaaaagacctgaaagaaagggcagaggagaggaagaaaaggaggcagga

SEQ ID NO: 890545 - DNA, 120 bp, Artificial Sequence
  ENSG00000287534_2 (sequence is synthesized)
aggaagaaaggatagaaggaaggacgagaagaatgaaagaagaatgggagagaaagaaagaaggggaggaaggaaggaaaaggtttaatggagtctacttagctgcctagtaacagttga

SEQ ID NO: 890546 - DNA, 120 bp, Artificial Sequence
  ENSG00000287534_3 (sequence is synthesized)
acggtcactttgggtacttggtttcattaagcatataaacagcacaggggaaggagtgggcttctgagaagagagtcctggacagtgaggatacaccatgggagaagaaaggatagttct

SEQ ID NO: 890547 - DNA, 120 bp, Artificial Sequence
  ENSG00000287534_4 (sequence is synthesized)
actgagcccagcgctggtcaggctcttcaagtgcagtgttcatgtcacagtagtcggctttagatgggtcactgttgacgtggagaaagtgcaaaggaggtcaatgaggacagtgagaga

SEQ ID NO: 890548 - DNA, 120 bp, Artificial Sequence
  ENSG00000287534_5 (sequence is synthesized)
tgccaacctccttttggaaacaactgaaggaaatgagtgtggttagccaagaaaaaatgaaggaaaaatacagtagttgtatcagacttattgtatccctccctggagggtatttgttca

SEQ ID NO: 890549 - DNA, 120 bp, Artificial Sequence
  ENSG00000287534_6 (sequence is synthesized)
ttcaacaaatatctactgaactctagctatgtggcaggcactgtggacgtgtgtgaatgaggcacaggccctgacttctggtagcttatctattgttaaggcaagcaattgtcatctctg

SEQ ID NO: 890550 - DNA, 120 bp, Artificial Sequence
  ENSG00000287534_7 (sequence is synthesized)
ccaggggctcatggaggaggacacaggaagtgtcagtggggcacacaggaggcagcttggtctggtgtttaacaatgtgtgttctggaacctgactacctggccttgaatgtcagctctg

SEQ ID NO: 890551 - DNA, 120 bp, Artificial Sequence
  ENSG00000287534_8 (sequence is synthesized)
ccacttactgtgtgaccctagacaagccacttaacttccctgttcagtacctgccccattgggatgctcagcagattcaagggcttaagatcggtgaagtgcctagaagaaggcccagta

SEQ ID NO: 890552 - DNA, 120 bp, Artificial Sequence
  ENSG00000287534_9 (sequence is synthesized)
cacaataaatacggggtaataggtgatgcttaaggctccctagcttatcaaccctgtgagggttaccacagcattatgtaatattttactgcttataaagcacgtacataatatatcatt

SEQ ID NO: 890553 - DNA, 120 bp, Artificial Sequence
  ENSG00000287534_10 (sequence is synthesized)
taatattcccccaagaacctgtgaggtaagcaaagagggtgtatttattttcagatatgctatgtttcagagatgctatgatatgctatatttcagagatgctatgtggctttctcaagg

SEQ ID NO: 890554 - DNA, 78 bp, Artificial Sequence
  ENSG00000287534_11 (sequence is synthesized)
cacctaggctggtcagctcaagcgatcctccctcctcagcctctgaatttcctccttggcaggaaccaggagactagt

SEQ ID NO: 890555 - DNA, 120 bp, Artificial Sequence
  ENSG00000287534_12 (sequence is synthesized)
gcctctgaatttcctccttggcaggaaccaggagactagtggctgcactcagttaaaggaacagctgcaaatgggaagataagaaagagaataagaggaaataagttctttttttctaga

SEQ ID NO: 890556 - DNA, 120 bp, Artificial Sequence
  ENSG00000287534_13 (sequence is synthesized)
gaatgaagacaatattcctttctagttgcctccttcacagaaaaaattcaccagaatggattatgttctcagcaccgtcaaagccttgtagaaacacaagaagatcctgcaaccattttt

SEQ ID NO: 890557 - DNA, 120 bp, Artificial Sequence
  ENSG00000287534_14 (sequence is synthesized)
ctcttccagtctttctccttgccattctgagcagagccatattgcagtgcagtggaaagggtatatgaatggtcattcattcagacttacatggctgtctggcaatttaagagttcaatg

SEQ ID NO: 890558 - DNA, 120 bp, Artificial Sequence
  ENSG00000287534_15 (sequence is synthesized)
gctgaactggaaagaacagccagcatgattttattgttttctgagaatcaaatgaatagttcacactatctatgcacctatcatctaaggaacagacaggttattttgctgaggatgagc

SEQ ID NO: 890559 - DNA, 120 bp, Artificial Sequence
  ENSG00000287534_16 (sequence is synthesized)
atagtcactagcctgtaagaggtttctccacaagaatatgcttcctcaaaatgtacttgcaaggctgttgaggctactactcaccttagacatgatcccactttggctcaaagatcccac

SEQ ID NO: 890560 - DNA, 120 bp, Artificial Sequence
  ENSG00000287534_17 (sequence is synthesized)
tctgccagtggttctgttaggtctctataacttcatttctatagcagccctcctgccacccggctgccaactgtgaggacctgttgttcaagggcgtatcacttgagcaggtgagcattc

SEQ ID NO: 890561 - DNA, 120 bp, Artificial Sequence
  ENSG00000287534_18 (sequence is synthesized)
ttattagtatcacagagcagctatcattcacaattacagcatgaatgttgactaaatcagagaccattcaaacccacctacaccctgtgacatcagcatgtggttctattctgccctgcc

SEQ ID NO: 890562 - DNA, 120 bp, Artificial Sequence
  ENSG00000287534_19 (sequence is synthesized)
tgattttagatgctttaggaatgatgtaacttggcaaagaaatcctaagtcaaaatttttttgatgataatctcagatcaactgagaatgatgccaatcaacccatgaatgtaatgtgtc

SEQ ID NO: 890563 - DNA, 120 bp, Artificial Sequence
  ENSG00000287534_20 (sequence is synthesized)
tcacatgtgggattctataattagtgcttactaatagaggtttcttcaagttactgaaatgagtttacaaactttaggtagctcaggaccctaccctcatgtatatgtgagatttcattt

SEQ ID NO: 890564 - DNA, 120 bp, Artificial Sequence
  ENSG00000287534_21 (sequence is synthesized)
ttataaatgccactgtcaaagggtcagatgttgctttttattctcgttgctaggatggtcaaaatcaacattttgatggttgtgttgaacagagcagtccagtcagatttaatccagtca

SEQ ID NO: 890565 - DNA, 120 bp, Artificial Sequence
  ENSG00000287534_22 (sequence is synthesized)
tattaggatcatgccattagagaacagttccacaatcttttctaattcctcttttgtttctggatcataattaaaataatataggaacaaccttattaataaagcttgaattagtttgtc

SEQ ID NO: 890566 - DNA, 120 bp, Artificial Sequence
  ENSG00000287537_0 (sequence is synthesized)
gggaggtggcggccgccctgatcccaccccgcgggcctccccgcccgtacctcggagaaccactggcgagcggccggccccctttggctcactcggcctcagccgcagaggggaggcgtc

SEQ ID NO: 890567 - DNA, 120 bp, Artificial Sequence
  ENSG00000287537_1 (sequence is synthesized)
tttctctgcagcccgggggctctccgagagcctcctagcagcctctcctcccccggcggaatgggaggggggctcggggcgtggggggcaggggacgcatgctgtggaagatgctctccc

SEQ ID NO: 890568 - DNA, 120 bp, Artificial Sequence
  ENSG00000287537_2 (sequence is synthesized)
aagcagatggggcgggggttctgcgcgcacagctgcccggccctcgagactttctcatcctcaacttgacgctctggaaaatggatccagctgctcctatgaggtgtctccgcaagcagg

SEQ ID NO: 890569 - DNA, 120 bp, Artificial Sequence
  ENSG00000287537_3 (sequence is synthesized)
agctgcctggaaaccagagggagccctgtgaaacagccagggtgggggctccttatgctccatttcacaaaggaggaaccagagctgagagagagggagagaggaagaagaagaaagaag

SEQ ID NO: 890570 - DNA, 120 bp, Artificial Sequence
  ENSG00000287537_4 (sequence is synthesized)
aaagaagaagaaggaggagaaggagaagaaggagaagagagaaaggaggaaggagaaaggaggaaggaagaagaaggaagaagttaagaagaagaagaggtggaggaggaggaggagggg

SEQ ID NO: 890571 - DNA, 120 bp, Artificial Sequence
  ENSG00000287536_0 (sequence is synthesized)
aaatgtaagaggggcctcagaagtgaatacctgtttgacattccagaaggagccttcactctgtcaatattcttggaagaatatcaaccctgaatacctatcatgtatcctttacagctt

SEQ ID NO: 890572 - DNA, 120 bp, Artificial Sequence
  ENSG00000287536_1 (sequence is synthesized)
caatggtatagggtctacatatcttcaggaaaatatctttgtaaatctaaatattaaggttttctttggtctttctcattctttgaacttcacttttaaaacatctttattggagtaaat

SEQ ID NO: 890573 - DNA, 120 bp, Artificial Sequence
  ENSG00000287536_2 (sequence is synthesized)
tttacaaatacatatagttttataatgaaataaaatatatttaatttctctttctctctacctatctctgaaatctttttataaaaattagcagtttcttcatccacttagtcctaccct

SEQ ID NO: 890574 - DNA, 120 bp, Artificial Sequence
  ENSG00000287536_3 (sequence is synthesized)
agtttcttcatccacttagtcctaccctatgttctgctcactgggacatctctttaaaaatactttgattgtttttttctgggattttactctacattttaaaatggtatgcttattctg

SEQ ID NO: 890575 - DNA, 120 bp, Artificial Sequence
  ENSG00000287536_4 (sequence is synthesized)
ctatctcttggtttattgatactggataccacctattggcctcctgttacggtgaataaggacttaggtgttttttatatatctgctccattttaccttaccctaagttaccaaaaatac

SEQ ID NO: 890576 - DNA, 120 bp, Artificial Sequence
  ENSG00000287536_5 (sequence is synthesized)
tgttttataatacttgtaacattaataatcaaggtttacatttttatgatcagacatacagtgttcattacatagctgaatagtgtatgaagattacatttccatgcctttgggtttttt

SEQ ID NO: 890577 - DNA, 120 bp, Artificial Sequence
  ENSG00000287536_6 (sequence is synthesized)
ttattacccaaagtaatgaattactgcattttttactaacattatgttctgaatgtctatccaaattttccccctaagccccatttacatcttccaaatatcaatcagcacttcctcttt

SEQ ID NO: 890578 - DNA, 120 bp, Artificial Sequence
  ENSG00000287536_7 (sequence is synthesized)
tatgctggaaacctatcttggacctgtatctctggctcacattcagatctgttgctctccagatcttacacagctgtcatcctgaggctgcccttgaccacatttcctgttggattccct

SEQ ID NO: 890579 - DNA, 120 bp, Artificial Sequence
  ENSG00000287536_8 (sequence is synthesized)
gtttctggattctatgacctcacttctgaattttcttctgttttgcacattctccagtagtttccaagaaagtgtgtatgtgacataaatcactgagtttctgaatgctaaaaattttgt

SEQ ID NO: 890580 - DNA, 120 bp, Artificial Sequence
  ENSG00000287536_9 (sequence is synthesized)
tctttcttcccacttgattgatagtctgacagaatattctagattgaaaagaattttctctcaaaatgtaaaggcttttcttcatttcttctgttagggggagtcctatgcctagtgact

SEQ ID NO: 890581 - DNA, 120 bp, Artificial Sequence
  ENSG00000287536_10 (sequence is synthesized)
ctgctctgccagttaccactattccttctgtttacatttttcaaaaattcgctaaaataacctattctctaatgccttctctttttttcctctttgattttgtgggtttataaattttta

SEQ ID NO: 890582 - DNA, 120 bp, Artificial Sequence
  ENSG00000287536_11 (sequence is synthesized)
ttttcaattttagggggtttcaagctggaaaaaaaatcaatacatgtgaccatccatcaccttattcaaaagtaagattttattttttttgctgcctgactaaattggcaaaatgatagt

SEQ ID NO: 890583 - DNA, 120 bp, Artificial Sequence
  ENSG00000287536_12 (sequence is synthesized)
aataaggtggcagcaaggtaaaaacttctttttaatgatgtacctaaataactgcacaaactaacaatgacgaaacagataagttacagggctggtgcaaatggacattacccatttggt

SEQ ID NO: 890584 - DNA, 120 bp, Artificial Sequence
  ENSG00000287536_13 (sequence is synthesized)
aaataaagaattataacagaaagtccatttagatagtaggaagaatcaagtttgatctagatctcaagggagtctgtgtattctaaaatgcatgagtcattttcattttttaattttagc

SEQ ID NO: 890585 - DNA, 120 bp, Artificial Sequence
  ENSG00000287536_14 (sequence is synthesized)
attaattttgtgttttcatcagttacttcattttcctttgaaggtgtgatattctgtcaagttctataacacggatgctggttttctactgcaatttgcttttaaaatgtccagtggaaa

SEQ ID NO: 890586 - DNA, 120 bp, Artificial Sequence
  ENSG00000287536_15 (sequence is synthesized)
gaaatgctaaagaacgttataatgagtgctttgtcttagtgatgtttaaaagaaccttgcctctcaaagaaactgcttaaaacaagcctgtggagcaaatggtcatgcaactttaaaatg

SEQ ID NO: 890587 - DNA, 120 bp, Artificial Sequence
  ENSG00000287536_16 (sequence is synthesized)
ctgccagtaaaatagctaagtaatctcaagaaacccatctgaatgctaaccacctagaccagaaaactcaatccaaactccaataatcaactgcttcgtgaaagagccagctgctgaaaa

SEQ ID NO: 890588 - DNA, 120 bp, Artificial Sequence
  ENSG00000287536_17 (sequence is synthesized)
gatgttcttcctactgctgctaagaaagaaaaaataactgtgcatactctatgtacaccatattcaacacgtgcttttacagccagaagagaactgaagaaatcagtggagtgtgataaa

SEQ ID NO: 890589 - DNA, 120 bp, Artificial Sequence
  ENSG00000287536_18 (sequence is synthesized)
tatcagtgtgtccaaagaaatcagtttgtgaaaatttcattatttttttaattttcccctctcaacggctgcttagattgttttacagtcactctgatttagcaagagaatattgactgg

SEQ ID NO: 890590 - DNA, 120 bp, Artificial Sequence
  ENSG00000287536_19 (sequence is synthesized)
aagggaaaatattttttaatgctgtgaataagcaaattgtcaattttgcttctaacactaaatgtcttagagtttaatattaaatatagttaagaaattttagaaaaataaacctgagac

SEQ ID NO: 890591 - DNA, 120 bp, Artificial Sequence
  ENSG00000287536_20 (sequence is synthesized)
taaaatgataaagaaaagaaacaaatatattattgataccattttgtatgtttattattgatcacccaaatcattcaccccatacctgtgcctttctgtcatctggaacaatgttaccct

SEQ ID NO: 890592 - DNA, 120 bp, Artificial Sequence
  ENSG00000287536_21 (sequence is synthesized)
taatgatgttattttaacagacagaatgatgacagtttaatcttgatatgggagtaggcctatccagttaactctggtttctcaactcactcacctctaactcttacagaagatatttaa

SEQ ID NO: 890593 - DNA, 120 bp, Artificial Sequence
  ENSG00000287536_22 (sequence is synthesized)
gcataatcctaatcttttaccactattccactcacttatcctcactactttgtcactcttgagctctttcctgtctccactatccatgctcaagtaggtcttggctacctttctgctcca

SEQ ID NO: 890594 - DNA, 120 bp, Artificial Sequence
  ENSG00000287536_23 (sequence is synthesized)
agaagagatgatcattgtcaggaaaagtcactgtagcctccttacatacaagcctccttacatacatttcaagttagtgacctgggtcctctgatgttctgccctaattttagctatcaa

SEQ ID NO: 890595 - DNA, 120 bp, Artificial Sequence
  ENSG00000287536_24 (sequence is synthesized)
acatcttccctaagaaaaactttctatgtgaataaaattcatccttttgaattaattaagttcataggtgtcattgttacttaactcaagattatgaaaacctcagcaccaaagcataca

SEQ ID NO: 890596 - DNA, 120 bp, Artificial Sequence
  ENSG00000287536_25 (sequence is synthesized)
ttctcaccaaatttcaactctcagctctattgcatgcaacacactcaaacatcccaatatttgtaggtaaggagacatccatatcatatttcatatcctaatattggagatttgtgttag

SEQ ID NO: 890597 - DNA, 120 bp, Artificial Sequence
  ENSG00000287536_26 (sequence is synthesized)
ttatgtgtgagtacctatatataattccaaaacttggcattattttcctacatacaccaagaatttaatttgtttatttttttgcaatttataaatgattgacccaatatataaatatat

SEQ ID NO: 890598 - DNA, 120 bp, Artificial Sequence
  ENSG00000230803_0 (sequence is synthesized)
gatcccagttgagggccccaccccaccccaggacccagctggtgcagttgacaaggatgcgctgcgcccaaggctatttaaacccgccctgttggggggcctcgagctcagatcttcgca

SEQ ID NO: 890599 - DNA, 120 bp, Artificial Sequence
  ENSG00000230803_1 (sequence is synthesized)
gaggataggacagtacacttggatatttactcacctttttctcattcactatgtctgccgtggtctcgatgagagtgtgccacgtaagtttcccccattaaaagtcatgaattcagtgga

SEQ ID NO: 890600 - DNA, 120 bp, Artificial Sequence
  ENSG00000230806_0 (sequence is synthesized)
ggagcctccatcccagttcccaccacgcacccgctccacaaatcctgcccaagggtctctcatccaatgacctcaactgctggaagaagccacaagagggaatgcctttcatctgtgatc

SEQ ID NO: 890601 - DNA, 120 bp, Artificial Sequence
  ENSG00000230806_1 (sequence is synthesized)
agaagccacaagagggaatgcctttcatctgtgatctcacataccagcctgtcctttccattgagaggaaagctgagctccactgaagcaacagaggcccaaggagaaaccttaactgtg

SEQ ID NO: 890602 - DNA, 120 bp, Artificial Sequence
  ENSG00000230806_2 (sequence is synthesized)
tgcctttgggggaaagcgtggccccaggaagggcttccgtgctggccactgcagtggggttgacagagctggtaagccacaagggggccccacccaaagacaagggggacatttattcct

SEQ ID NO: 890603 - DNA, 120 bp, Artificial Sequence
  ENSG00000230806_3 (sequence is synthesized)
gggaacaacaaaacctgatgaggccgagtacatgacaatgaagactgtagagcttttccgttctctataaaaaggcaaggggtttctagacagggaagaaaaagaatttacagagcagtc

SEQ ID NO: 890604 - DNA, 120 bp, Artificial Sequence
  ENSG00000230806_4 (sequence is synthesized)
tttgtgtactaacatacagcctgcatctcttttctttaaaatttcttggaagagaatgagtcatctcaacattgcaggaaaccaaatagaagttgggggaaaaaattactttggacaaag

SEQ ID NO: 890605 - DNA, 120 bp, Artificial Sequence
  ENSG00000230806_5 (sequence is synthesized)
tttttctcttaaatgtttgcatagtaatctttgcctggaaaaaaaaaaagatgcctaaatttagaatagagatgtggtacagttaacaattctggttctatcggatgggaagtgtgatgg

SEQ ID NO: 890606 - DNA, 120 bp, Artificial Sequence
  ENSG00000230806_6 (sequence is synthesized)
tgtgctcaggctgggatctcttattttgaaactcaccacaaccatttggccagagtgcttcactggcctccactctgactgctgccgaggggctgatcagaagacaatgagattgcaaca

SEQ ID NO: 890607 - DNA, 120 bp, Artificial Sequence
  ENSG00000230806_7 (sequence is synthesized)
gcttctaccagttgtatgctgacaaaatgggtaggaaagcttcctttttccaacagataacagcattggaaacagaactgaaatgcactgtgtcatctcatctccccaagacaagactgt

SEQ ID NO: 890608 - DNA, 120 bp, Artificial Sequence
  ENSG00000230806_8 (sequence is synthesized)
tcttccttagacctctttaaatcagtacatttcctgagcttggatgggtttgtctattagtgtttcccaaagaacaccaattatgaaagaggtttcagacctgttctcaatagggaggtt

SEQ ID NO: 890609 - DNA, 120 bp, Artificial Sequence
  ENSG00000230806_9 (sequence is synthesized)
acttgttaccgattctctagttatttagatcagcactcatgtgctttccaagttgggggtgggactgttgttaattggttatctacatttcaaagctgtattttttgacaggcacaaaag

SEQ ID NO: 890610 - DNA, 120 bp, Artificial Sequence
  ENSG00000230806_10 (sequence is synthesized)
taccccctatttgtaagaaagaagaataaaaagaggaaggcatgtctctgccatgtggcgagagctcatttcagccccatcccaaggctgagcctgtcagcaggtaggaacagtagggcc

SEQ ID NO: 890611 - DNA, 120 bp, Artificial Sequence
  ENSG00000230806_11 (sequence is synthesized)
atttagttctctgccatttagcctgtgtcagcagttttccaaaaaagaatccagttttcaagggcacatatctccccaacaaccactactatcccctccccaccctaaagattgttcaga

SEQ ID NO: 890612 - DNA, 120 bp, Artificial Sequence
  ENSG00000230806_12 (sequence is synthesized)
gaccaactgttaaaaaaaaatccagtttaaaactgaatttatgttacagatttcagaggaaaggaacatgaccctgtattaagctctggcagcagaagcaccaccatacataaggtggtg

SEQ ID NO: 890613 - DNA, 120 bp, Artificial Sequence; identical to SEQ ID NO: 868689
  ENSG00000230806_13 (sequence is synthesized)

SEQ ID NO: 890614 - DNA, 120 bp, Artificial Sequence; identical to SEQ ID NO: 868690
  ENSG00000230806_14 (sequence is synthesized)

SEQ ID NO: 890615 - DNA, 120 bp, Artificial Sequence; identical to SEQ ID NO: 868691
  ENSG00000230806_15 (sequence is synthesized)

SEQ ID NO: 890616 - DNA, 120 bp, Artificial Sequence; identical to SEQ ID NO: 868692
  ENSG00000230806_16 (sequence is synthesized)

SEQ ID NO: 890617 - DNA, 120 bp, Artificial Sequence; identical to SEQ ID NO: 868693
  ENSG00000230806_17 (sequence is synthesized)

SEQ ID NO: 890618 - DNA, 120 bp, Artificial Sequence
  ENSG00000230805_0 (sequence is synthesized)
tttattcaatagctctgggcctgaaaaacaccggggaaattgcatcccattttccccaagcccattagcaaccagcggtctcattctcgatgattccgctgagccaccccggctctaggg

SEQ ID NO: 890619 - DNA, 120 bp, Artificial Sequence
  ENSG00000230805_1 (sequence is synthesized)
gagggggttttattctgcctctgccgccacccccacccaccctcagaagggcaccagcttttccaatctgtgaaccccaaagaactgcagggcagggacccctggggacccctcaacccc

SEQ ID NO: 890620 - DNA, 120 bp, Artificial Sequence
  ENSG00000230805_2 (sequence is synthesized)
ccccaagggcggatttcttctggctctgggctctattctcgggaggggggcactggggtgggggcgcccagatttggagtggcagcaccccctccgcctccacctcgggctgtgggaccg

SEQ ID NO: 890621 - DNA, 120 bp, Artificial Sequence
  ENSG00000230805_3 (sequence is synthesized)
caggttacaaagtgccgggagccgtgcagggccagtgaacccctcgctgagactcagtttgctgccatcacaagtgctctgagaatcctggagagggaggatattggagacaaacgggac

SEQ ID NO: 890622 - DNA, 120 bp, Artificial Sequence
  ENSG00000230805_4 (sequence is synthesized)
ggcccactcctctcccttacagctcccacagctcagaagtcagcggagcagagtccccaggaaaccagggtcagggatggaggctgctgaggagcgggtctgggtgaggaccagcttgtg

SEQ ID NO: 890623 - DNA, 120 bp, Artificial Sequence
  ENSG00000230805_5 (sequence is synthesized)
acctgtagctccggggaccagagtgtgaacgattttggcatagatgctgctctgagcttcctaagagcaaaaacgggctgttgctgtttgcggttcttgttctgtttgggggatgccatc

SEQ ID NO: 890624 - DNA, 120 bp, Artificial Sequence
  ENSG00000230805_6 (sequence is synthesized)
ccgggccagggtgaggtctgggctgcaggtgcacagcgacctcaggattggtgggggtcctccccaaccatggatcactgagggggagccccagtttaacgtgaacctaacaggcattta

SEQ ID NO: 890625 - DNA, 120 bp, Artificial Sequence
  ENSG00000230805_7 (sequence is synthesized)
actctcatcctgcctaggaggtggaggccagatacaagaaaaccacagtaccagtaaatgacaaaggctggatcttaacccaagtcctccgactctgaaggccatacccaacaggtccca

SEQ ID NO: 890626 - DNA, 120 bp, Artificial Sequence
  ENSG00000230805_8 (sequence is synthesized)
cggcgctgcccacccaccacaccgctagcgcctctgaacctcgccaggcacgtccggttctgcggcccccactccgcccccgcctgccgggagccgcgcagttacaaagtgccgggagcc

SEQ ID NO: 890627 - DNA, 120 bp, Artificial Sequence
  ENSG00000230805_9 (sequence is synthesized)
gtgcagggccagtgaacccctcgctgagactcagtttgctgccatcacaagtgctctgagaatcctggagagggaggatattggagacaaacgggactgctgcccgccttttaggcgacc

SEQ ID NO: 890628 - DNA, 120 bp, Artificial Sequence
  ENSG00000230805_10 (sequence is synthesized)
gtctgggaggtggaggccagatacaagaaaaccacagtaccagtaaatgacaaaggctggatcttaacccaagtcctccgactctgaaggccatacccaacaggtcccattttatttgtt

SEQ ID NO: 890629 - DNA, 120 bp, Artificial Sequence
  ENSG00000230805_11 (sequence is synthesized)
ttacttttttttaattgaagaaaaaaaaactagcattcccctacagtgccccccacctggtggggacatcttgggttggcaaggccaccactttcaagagtagaagtgtttttcagcagg

SEQ ID NO: 890630 - DNA, 120 bp, Artificial Sequence
  ENSG00000230805_12 (sequence is synthesized)
agacacctgctccctgcacccaagccgtcatggtcggcttgcctccgcttgtccagaagtctccaggcttggggccctgattgccagccggtgacacttggtctcccagcagctgcccct

SEQ ID NO: 890631 - DNA, 120 bp, Artificial Sequence
  ENSG00000230805_13 (sequence is synthesized)
ggaggtggaggccagatacaagaaaaccacagtaccagtaaatgacaaaggctggatcttaacccaagtcctccgactctgaaggccatacccaacagccagctcagacccaggcggtgg

SEQ ID NO: 890632 - DNA, 120 bp, Artificial Sequence
  ENSG00000230805_14 (sequence is synthesized)
agcaggaaggctctggggaaaacagtgtgagtcaccgggcggccagagtgtgtccttccctgctagcgcactacacggcaggtttcatagcttgacagcaaagtgtttgaaaacgaagag

SEQ ID NO: 890633 - DNA, 120 bp, Artificial Sequence
  ENSG00000230805_15 (sequence is synthesized)
caggaattccgcggttcctgcccggcctcgccatccagctgggagaagagcatggtcatttccttcacttagtccacggccactcggcgctcatccccagcacagccctccccaggctgc

SEQ ID NO: 890634 - DNA, 120 bp, Artificial Sequence
  ENSG00000230805_16 (sequence is synthesized)
gattctgtaagatgtgggggatgtggcggggtggggggtggcttctccacatccccagggctctccttcttccccagtgaggtgggagaagccgcagattggggtctgctgaggagcggg

SEQ ID NO: 890635 - DNA, 120 bp, Artificial Sequence
  ENSG00000230805_17 (sequence is synthesized)
cctacatgaggcccaggtcgtgacccatggctccggggaccagaaggtaaacagtttcggcacagggtgctcccactaggtcataggtggattcagccttctctgagaaccgagaagatt

SEQ ID NO: 890636 - DNA, 120 bp, Artificial Sequence
  ENSG00000230805_18 (sequence is synthesized)
ctggagtcttttgaagcaggaaaggagatcagaggaggagatggtggcaaagcggggactgagactcttgaaatgtgtttatcccaggcagagcagccgctgaaaggggagatggagaga

SEQ ID NO: 890637 - DNA, 120 bp, Artificial Sequence
  ENSG00000230805_19 (sequence is synthesized)
gaatgtcaaaagcagcactgggtgttttcctggggtctctccacagtgccccatcatttccgaatcaccaggcccgctggcacaggggtctgcagcccaacctcgcagaatgaccccctc

SEQ ID NO: 890638 - DNA, 120 bp, Artificial Sequence
  ENSG00000230805_20 (sequence is synthesized)
tctgcaggcgggcatcaccctgacagccccctcccaggacagaaaacctatagacacctggctgctgggtgtcaggccacccgcccgtttctcttcctttccttccagcctttcctctcc

SEQ ID NO: 890639 - DNA, 120 bp, Artificial Sequence
  ENSG00000230805_21 (sequence is synthesized)
caaccagccccctccccacccggtcccccttctatttttcctggctaaaaccagccacagataccaccacacccggaaagagataaataaataaaagaaaaacaacctcaactgtgaaaa

SEQ ID NO: 890640 - DNA, 120 bp, Artificial Sequence
  ENSG00000230805_22 (sequence is synthesized)
ctctgtgccggacacaggcagggaaaatgtcagccccgcgagggaaatggcaaagggaagatgacagcagacgagagaaacaacagccccacctgacacagccaggaccctgcggagagg

SEQ ID NO: 890641 - DNA, 120 bp, Artificial Sequence
  ENSG00000230805_23 (sequence is synthesized)
cggcaggagcccccacttcctcgggactcagcctctgcaccccgggactgcccatggcccctctgagggctctcctcactccttcctccctcattagggaagaggccagtacccagcagc

SEQ ID NO: 890642 - DNA, 120 bp, Artificial Sequence
  ENSG00000230805_24 (sequence is synthesized)
cagccagaggttttgcagctttgcccagcggctgggttcgccgaagggtctccctgggggttcccagcatgagccgaagccaccctcccctgtgggatctgtgaggccaggcattgggcc

SEQ ID NO: 890643 - DNA, 120 bp, Artificial Sequence
  ENSG00000251361_0 (sequence is synthesized)
aggaaaaacaatgcctgtctttgtctgactcaaaaagcatgctgaatggacttttcatccatgtggctgtgatcagttcctaaagcagaggaatctgcagcctaatgacacatcaggaat

SEQ ID NO: 890644 - DNA, 120 bp, Artificial Sequence
  ENSG00000251361_1 (sequence is synthesized)
tgatggaaccccagcagacagcttctatgaggagattaggactctcagaagagacaccagaggcgtggccacacagagaaaaagatcatgtggggacacagtgaaaaggcagccatcata

SEQ ID NO: 890645 - DNA, 120 bp, Artificial Sequence
  ENSG00000251361_2 (sequence is synthesized)
aaccaactctgctgacaccttcatcttgaacttctagcctctagaactgtgaaaaaacaaatttctgttgttaagacacccggtctgtggtattttgttaagacagccctagcaaactaa

SEQ ID NO: 890646 - DNA, 120 bp, Artificial Sequence
  ENSG00000251361_3 (sequence is synthesized)
cacaattttgtacactaaataaagtccaattcaattttaattttatagaaactgaaacaaataatttaaagatttacttagtaaattacttcagattgggatcaaatgtgtacatgaatt

SEQ ID NO: 890647 - DNA, 120 bp, Artificial Sequence
  ENSG00000251361_4 (sequence is synthesized)
atgaaaatgtaagaaatggatatttaaataagtataccagaacataaaaattccagtgcctggttttttttttttttttgaaagccacttatcccaacaataaaactgatgctcaaaata

SEQ ID NO: 890648 - DNA, 120 bp, Artificial Sequence
  ENSG00000181123_0 (sequence is synthesized)
gtgcccaggtgtagagtggctgccatccctacctgagcacacagcccgggaacaggatctcgttctccacctgcagggaggagccgcggcccacggacctcgtgtgctcatactgcagcc

SEQ ID NO: 890649 - DNA, 120 bp, Artificial Sequence
  ENSG00000181123_1 (sequence is synthesized)
tcacctgctcgcacaggcagatggacacaaccagggggccacgtcgctcacctcccagaatcacaatcttcctgcgtgtctcctcactcatgaacgacttgaccaagttgaaggccacgg

SEQ ID NO: 890650 - DNA, 120 bp, Artificial Sequence
  ENSG00000181123_2 (sequence is synthesized)
acatgtaaatctcttgagaagctggaccagaaaggacgtggggatacagagccacagccaagagcaggtgctggacaggaggtggacagatatggattctgccactctctgctgtgtgac

SEQ ID NO: 890651 - DNA, 120 bp, Artificial Sequence
  ENSG00000181123_3 (sequence is synthesized)
cttcagcaagttacccaccctctccaagtcttagtgcagttaactggaaaatgaaggtgaaataatgtatgtataacacctggcacagttcctggctttcaataaatggttgtctcaggc

SEQ ID NO: 890652 - DNA, 120 bp, Artificial Sequence
  ENSG00000181123_4 (sequence is synthesized)
gttgtctagggttggagctggcacatctcttcccacaatgcctggggttacccaaagggcatcaagtgtcccaaattcttcatgccaaactggtctctgttttcattggcatttgtggaa

SEQ ID NO: 890653 - DNA, 120 bp, Artificial Sequence
  ENSG00000181123_5 (sequence is synthesized)
agcctgtagtgcctaaggctactggggagaggacctgggtctgagggtgatcaccaacaaaagagcccaagcagttgtcattcctctcccaaccctgggcaaataatccacaaatagttc

SEQ ID NO: 890654 - DNA, 120 bp, Artificial Sequence
  ENSG00000181123_6 (sequence is synthesized)
agaaatggatgctgctgaaacatgggcctggctatctggatttgaatcttaacttcacctctaatgtgttgtgtgatcttgagtctcacaaggaaattgaagctggtaacatctccttct

SEQ ID NO: 890655 - DNA, 120 bp, Artificial Sequence
  ENSG00000181123_7 (sequence is synthesized)
tacagggtactgagatgaccagtgtagaagagaccaataagctacctcacctactgcctagcacatggaaaaccccaaagccgatgtccccaccatctgaagcaaactgccacctgcagt

SEQ ID NO: 890656 - DNA, 120 bp, Artificial Sequence
  ENSG00000181123_8 (sequence is synthesized)
gggggtacaggagcctcgacatagggcaggcatcactgggaggagcttgaatgttgctttctggcctgcccccagcccccatcttttacctataaaaaccccaggctctgttggcagagg

SEQ ID NO: 890657 - DNA, 120 bp, Artificial Sequence
  ENSG00000181123_9 (sequence is synthesized)
ggtggcacagtggcagagtggagcagcagagaaggagaaaagagaagcagcagccaggtgtcggagagaagcagtttgacttcagagggatggcttgacagcgagacttcagagaagagt

SEQ ID NO: 890658 - DNA, 120 bp, Artificial Sequence
  ENSG00000181123_10 (sequence is synthesized)
tccgccagggacagctgaactctgggagaagactgcctttccactccatccctgttccagctccccatcctgctgagagccacttccactgctcagtaaaatcctccatattcaccaccc

SEQ ID NO: 890659 - DNA, 120 bp, Artificial Sequence
  ENSG00000181123_11 (sequence is synthesized)
ttcaattcatttgtgtgatctgaatcttcctggatgctggacaagaactcagaaattaaaattaagtatgatcatgatgacgatgttgatgatactgctgctgctgctgtctgtactacg

SEQ ID NO: 890660 - DNA, 120 bp, Artificial Sequence
  ENSG00000181123_12 (sequence is synthesized)
ccaaagacctctgagggtactgagatgaccagtgtagaagagaccaataagctacctcacctactgcctagcacatggtaggggccactcatctgatccatggccccaaagctggctccc

SEQ ID NO: 890661 - DNA, 120 bp, Artificial Sequence
  ENSG00000181123_13 (sequence is synthesized)
ctggagcttacagagatccccccaccctcccgagagctggaaagagagggcaagcagaggggagactggcagggaaaacaattccagtaaaccccgcagctcttacagacgccagcctgg

SEQ ID NO: 890662 - DNA, 120 bp, Artificial Sequence
  ENSG00000181123_14 (sequence is synthesized)
agctggcaccatcacttcccaccgagatgcacaaacgtctgagcagctttctcccaatcctgggccttccctccaccccaggaacccagcacctcactttgtcccactgtgtggccccct

SEQ ID NO: 890663 - DNA, 120 bp, Artificial Sequence
  ENSG00000181123_15 (sequence is synthesized)
gcagctgacctgggtactggttcactggacacagaggctttggccaaggcactgccccctgctgagcttcggtttcctggcctgtaaaatggggctataatctctgtctgcttcaggact

SEQ ID NO: 890664 - DNA, 120 bp, Artificial Sequence
  ENSG00000181123_16 (sequence is synthesized)
taatgtgaagcggctgtgcaaactgtggagtgctgtgccatgaagctctggtgaagacctactctgagcacctgcctagactttcttacagtggtgtcctccctagcttgggctccttgg

SEQ ID NO: 890665 - DNA, 120 bp, Artificial Sequence
  ENSG00000181123_17 (sequence is synthesized)
tcctccctagcttgggctccttgggcagtgaggtgggctggggcaggtgagcctctccaacagccattgaaacacccgcaaccctggggcctggggtggtggctcacgcctgtaattcca

SEQ ID NO: 890666 - DNA, 120 bp, Artificial Sequence
  ENSG00000251367_0 (sequence is synthesized)
accacgaacagttttcagcacttataccttcaattcagttgctttattttgtttattttttcactaaaaactgtcatattcatctttgtatcaccagcacctagcgtatttgttactaac

SEQ ID NO: 890667 - DNA, 120 bp, Artificial Sequence
  ENSG00000251367_1 (sequence is synthesized)
agggatttaggtgacaaattacattatctgccctagcgattggtattgcactggtggtaatctagactttgagagtgtgtcaggtgagaaggtagctggaataattatgttggctccata

SEQ ID NO: 890668 - DNA, 120 bp, Artificial Sequence
  ENSG00000251367_2 (sequence is synthesized)
cagatgaacgattcttagaatatatatcttgtctgctccatagtggtttgcacaatgcttagcaaggatctagtttttgctcaatacatacacaattacttgatatttagacaagctgag

SEQ ID NO: 890669 - DNA, 120 bp, Artificial Sequence
  ENSG00000251367_3 (sequence is synthesized)
ccaagcgttagtgcttgctttatttaacagctgatggctgatggctgctctttaaagtggatgtaaaggatgtgaaaagagagtagacaagaaatataccattggggccgggcgcggtgg

SEQ ID NO: 890670 - DNA, 120 bp, Artificial Sequence
  ENSG00000262703_0 (sequence is synthesized)
ccccaccccgcggttgccatgaccattccaatggctccagcccatctcctgccagcttcctcctcttcgaaaccatccccaccccactgctgcagtcaacattgtcaaatccacctcctg

SEQ ID NO: 890671 - DNA, 120 bp, Artificial Sequence
  ENSG00000262703_1 (sequence is synthesized)
cctccagaactcagttgatccaagcgcgatctagcaccttaggtttatggaaacaaactcctggatgttccagaggaagaggcggtggaggaacagcactacagcagcagtgcagtgagc

SEQ ID NO: 890672 - DNA, 120 bp, Artificial Sequence
  ENSG00000262703_2 (sequence is synthesized)
agagttcaaggccatcttgaagcaggcaggtccttccagacagccaatgaggctcatcaggatagagccctcctaccttccaccactgccccaggctccccaaaggcacgcggctctatc

SEQ ID NO: 890673 - DNA, 120 bp, Artificial Sequence
  ENSG00000262703_3 (sequence is synthesized)
cccttcaagcctttgcacaggctgctccatggagctgcacaatctcctgccactgcacacagacagagggtgcccaagtgtcccagttttaacactgaaagtcccacgtcccaggaccct

SEQ ID NO: 890674 - DNA, 120 bp, Artificial Sequence
  ENSG00000262703_4 (sequence is synthesized)
cccaggagggttggtccttacagataactccaatgcatccttcagggctgcctcttccaggaagccttccctgagccctcaaacctagatcagctgtccctcctctgcgccacctcactc

SEQ ID NO: 890675 - DNA, 120 bp, Artificial Sequence
  ENSG00000262703_5 (sequence is synthesized)
ttgcctgcaatgttactttgtgttttagtggcccgcttacctccctgcctccctgatggcagtgactcaattttgtcaagctggactcagtattaattaacaagaagaaatgacatggcc

SEQ ID NO: 890676 - DNA, 120 bp, Artificial Sequence
  ENSG00000262703_6 (sequence is synthesized)
cctgccagctggcattcaggccagtgggtatgtcagacaggttcaccaatgcccatgggttcaaacacttatttactagatgccaggcttatgccagggctgagaccagataggagactg

SEQ ID NO: 890677 - DNA, 120 bp, Artificial Sequence
  ENSG00000262703_7 (sequence is synthesized)
ccccagcctgcctgcaaggtgctttgcctgcaaaccaacacaccaagcagcatgggttacttgctgggccaaggctaaggccaagggttggcaaactttttctgtaaagggcgagacaaa

SEQ ID NO: 890678 - DNA, 120 bp, Artificial Sequence
  ENSG00000262703_8 (sequence is synthesized)
tattttgggcttttcccgccatagggtctctgtcccagataaaattctagctggggtgggacagcggcccgagacattctgtaaattaccaatgtattccaataaaacttaacttatgaa

SEQ ID NO: 890679 - DNA, 120 bp, Artificial Sequence
  ENSG00000227893_0 (sequence is synthesized)
agcccactttctttaactttaatagaatgaaaatacaaatcaaaccaatccaatttcttgagaataaattttgaacttgtaacaccatttcaatataaaaatgacactttgttgccttta

SEQ ID NO: 890680 - DNA, 120 bp, Artificial Sequence
  ENSG00000260635_0 (sequence is synthesized)
gaaggtggagtggcacagaaggaaacccgagttctacttaaaattcagttaaactgacgcctccagcaggcacggtctcgctctgttgccatgctggagtgcagtggtgcactcatggct

SEQ ID NO: 890681 - DNA, 120 bp, Artificial Sequence
  ENSG00000260635_1 (sequence is synthesized)
actacagattgcaatgagaaattagagttcaactatttgggtttttattgcctgctctgctagtgaaagcacatacaaccccaggcaagttaataccctgttttcaccaaatgaaaaagg

SEQ ID NO: 890682 - DNA, 120 bp, Artificial Sequence
  ENSG00000260635_2 (sequence is synthesized)
aactatgtatggctcaacatgttccagaaaaaatgattttgtactcacagagtgtgtaatgtgtatacatagacccatatggaagctaccacactgtattaaagacaaagtataaaaaca

SEQ ID NO: 890683 - DNA, 120 bp, Artificial Sequence
  ENSG00000260634_0 (sequence is synthesized)
cggggaccttggtagcggcgccactggctgcggctgcagagtgagaacaagcaaacgccccccaccggcagggtggaaggaaaatggagtgcgttggcgctgcggaggagtcactgcggt

SEQ ID NO: 890684 - DNA, 120 bp, Artificial Sequence
  ENSG00000260634_1 (sequence is synthesized)
gaggatggcccggacaccaatttgggcacccgcaggcgcagctagccggtggggcgcacctgggtctcctccggcttccgcgggatatctgcagggcgactccctccagattcagtaaac

SEQ ID NO: 890685 - DNA, 120 bp, Artificial Sequence
  ENSG00000260634_2 (sequence is synthesized)
gtcctgctgggggagtccttcccctgcaaaaggcccgcccctgcctcccatgtcgtggagttcgaggcagggtccctgaaagggtcttggggtgggaggagtcctgtgagatcaccgaat

SEQ ID NO: 890686 - DNA, 120 bp, Artificial Sequence
  ENSG00000260634_3 (sequence is synthesized)
gagtcagggtctggcctgggtcccaggcccaggggtcccgaggccctggggcagctgggtagctctgctggccgccctgtgcggggactctctacctatgcaggtctggtcggacctgga

SEQ ID NO: 890687 - DNA, 120 bp, Artificial Sequence
  ENSG00000260634_4 (sequence is synthesized)
ggcagcgggttctgctgctgcgaagattcccaacggccggttggggaggggctgcacaatcctggacctcgcgggagtacaggacccgcaaaggcaggggagtcggatcatgtgccaaga

SEQ ID NO: 890688 - DNA, 120 bp, Artificial Sequence
  ENSG00000260634_5 (sequence is synthesized)
gcatcccggggtcccggctgctggcttggctgccctggtcatcgctgcggttatgtgccgttgctaccgcagagcaagcggccccggttcttgaaccacacctgcacttgatggtcctgc

SEQ ID NO: 890689 - DNA, 120 bp, Artificial Sequence
  ENSG00000260634_6 (sequence is synthesized)
ttgtgggctgttacctgctctttccagcctgtctccagctccggcggctttcccttactgtagactgcacttcctgccgccgcctcctgggagagcgtgggatggtgggggataactagg

SEQ ID NO: 890690 - DNA, 120 bp, Artificial Sequence
  ENSG00000260634_7 (sequence is synthesized)
ttctggcatcctcactcctcctgcccacaagcgatgggatttaaatcgcactgtccatgctgtgctcatcgaggcccaccctgcttttactaggaccctccctgcagtccccactccctc

SEQ ID NO: 890691 - DNA, 120 bp, Artificial Sequence
  ENSG00000260634_8 (sequence is synthesized)
cttcccacgagtcttgcagtcatggattaatcccttcattattgaccagctgctgcaggcaggccctgtgtcgtcctgtatcactttaacgtgacctcattagtctttgatttctccttc

SEQ ID NO: 890692 - DNA, 120 bp, Artificial Sequence
  ENSG00000260634_9 (sequence is synthesized)
actttctggtacaataagagacttgtatccagtctccttttgtacattttttgccctagacttagaatcagccaatttcattggtaaatgttatctagagagttcagccgtggaagtgtg

SEQ ID NO: 890693 - DNA, 120 bp, Artificial Sequence
  ENSG00000260634_10 (sequence is synthesized)
ctcattgttactgggttttcattgcttctgggtcttttcagtggacagaactagaaaatatgtattttttaaagagtaaaacacaatgtgagttcatactgcaatttccaattcactttt

SEQ ID NO: 890694 - DNA, 120 bp, Artificial Sequence
  ENSG00000260634_11 (sequence is synthesized)
aagattacaagatttttacttaaacttccttgattttatgctatgtcatttttatactgaaaattatggttcctaatgatggaaacatagtaatttaataaaaatgtcaatactaatata

SEQ ID NO: 890695 - DNA, 120 bp, Artificial Sequence
  ENSG00000260630_0 (sequence is synthesized)
gcgcaggcgccgtgtgcccaggcgcctggcgtccgcgtcggcgatccggggtctgggcgcggcgaggtctggtgtggcagatgtggatagctggaccctcctgggtgcctctgcgttatg

SEQ ID NO: 890696 - DNA, 120 bp, Artificial Sequence
  ENSG00000260630_1 (sequence is synthesized)
tcgtttggttgatgcatttggagagaatctgtgctctccacaactgcaggggcaacatgctttcctggcctcttcagatcagggtggctgttcttgggtgctgcaccaaaactccagcag

SEQ ID NO: 890697 - DNA, 120 bp, Artificial Sequence
  ENSG00000260630_2 (sequence is synthesized)
tgggctttcttcaagtggccggctcacctcattcctgccaagacccaggtccgtgttctcacagtgctgccatctttcctccgtgtgagcgtgggctgtgcggagagtggacctcggtgt

SEQ ID NO: 890698 - DNA, 120 bp, Artificial Sequence
  ENSG00000260630_3 (sequence is synthesized)
gtgcggggctgcgtgcactgccatcgctccctctacacgagccggcgtggacccagggctgagctgtgaccacgagggccatcccgacgagccgccatggacccagggctgagctgtgac

SEQ ID NO: 890699 - DNA, 120 bp, Artificial Sequence
  ENSG00000260630_4 (sequence is synthesized)
catgagggctatcccgacgagctgccgtggacccagggctgagccgtgaccatgagggccatcccgaaactgtgattgttttctgatgaagaaaccaaggctttgtgactaactcaaccc

SEQ ID NO: 890700 - DNA, 120 bp, Artificial Sequence
  ENSG00000260630_5 (sequence is synthesized)
ctcaagaaggacaaaactagcatcagagccccttgctcctgggtctggcaagaatgcctcttgtttgctgagaggtccacagatttacccggctcaagactgggagatgggaggtgacca

SEQ ID NO: 890701 - DNA, 120 bp, Artificial Sequence
  ENSG00000260630_6 (sequence is synthesized)
ggtcagtgccagcctctctctgagctcctctgagtcgtggcagctgaggtgctcctccgagaatgttctgccatccgtgaggtcgtgtacgcctggaagcttttgttccattgaactctg

SEQ ID NO: 890702 - DNA, 120 bp, Artificial Sequence
  ENSG00000260630_7 (sequence is synthesized)
ccagggagctatacttagccacgcgagtggaggccaggagtgggttctctgaatatagatagtagcaagcaggctattttcaaacacctagagaacccccatgattattctgggccaaaa

SEQ ID NO: 890703 - DNA, 120 bp, Artificial Sequence
  ENSG00000260630_8 (sequence is synthesized)
tgatatttataggatgctctgggcccttggacatgaaggcaataaccttagcgccttttggcgttcgggataagtttctatcaacggggagtggagagagggacccggtcacccagaggc

SEQ ID NO: 890704 - DNA, 120 bp, Artificial Sequence
  ENSG00000260630_9 (sequence is synthesized)
ccgctgtccctcaacacctgtttccaggaggccaggcgtcttctttgcttttacactatgagtcagagaacagcgagaggcacgcagggccctactaattttccttcctgcacaccctgg

SEQ ID NO: 890705 - DNA, 120 bp, Artificial Sequence
  ENSG00000260630_10 (sequence is synthesized)
atcaggggactttttctgctgtgaggagggtgcagcccctgcctttcagagctcaggacaccctcttcctcttgtccaggatcctcagggatttcctaggcttccaccctcacccagaca

SEQ ID NO: 890706 - DNA, 120 bp, Artificial Sequence
  ENSG00000260630_11 (sequence is synthesized)
tcactggaccgtcactgaaacacccgcttccagtgtgctcaggtcctgcagcctcctgtccatccttgccccgcctcccgcccggaggaaagactctgacactgcccctggaagagggag

SEQ ID NO: 890707 - DNA, 120 bp, Artificial Sequence
  ENSG00000260630_12 (sequence is synthesized)
gagagtggatgtgatgagtgaagatttgggtggggaaaggaaggcctgagtcctgggaggaagagctctccccgccccgagcccccggagactgtgagcaaggctgagacgcctccttcc

SEQ ID NO: 890708 - DNA, 120 bp, Artificial Sequence
  ENSG00000260630_13 (sequence is synthesized)
tggtgctcaagctgcaggtgttggataggcctccagaagcccagattttaaatgaccgctccaggttaacctggggatggtcaggcagaacaaggaggagaggccagcagtgaagggcag

SEQ ID NO: 890709 - DNA, 120 bp, Artificial Sequence
  ENSG00000260630_14 (sequence is synthesized)
ggctggtgggcagtggctgggggtgtcctgggtggggctggccaccctcgctgcctctgacttgggccagacctgcgttaagtggagtggctcctccattctttacaccccaggcccctg

SEQ ID NO: 890710 - DNA, 120 bp, Artificial Sequence
  ENSG00000260630_15 (sequence is synthesized)
gcaggtgccctgcctttcctctgcccctctctctgccaacccatcctctccctcccagcccctgcccgcccagatataaatataagagcattttccatgggctgagacagaagggaaaac

SEQ ID NO: 890711 - DNA, 120 bp, Artificial Sequence
  ENSG00000260630_16 (sequence is synthesized)
attcagctttattttcggcttgtgaaattcctgtccttcattcccaacaggtgcaatcgcctcatttagatattgggacccagaaatagaagacaatttacaatatagcttcctttaggg

SEQ ID NO: 890712 - DNA, 120 bp, Artificial Sequence
  ENSG00000260630_17 (sequence is synthesized)
atctggatgctaccaaacaaacaaacaaacaaaaaaagccctcctgtgagatgccgagacttaatagaaaccgtggttggagctcttgcctttttccaggccggtggagaccctcacccc

SEQ ID NO: 890713 - DNA, 120 bp, Artificial Sequence
  ENSG00000260630_18 (sequence is synthesized)
tggcagcctgaccgtgaagcagaggaggcaagagctccgggagacagtcgggagggagggggccctggaggacaggctcctagccctactcctcctcaagacccgggtgctggcctgtcc

SEQ ID NO: 890714 - DNA, 120 bp, Artificial Sequence
  ENSG00000260630_19 (sequence is synthesized)
cctgcctttgccccgatggggatgagggagaggagatgggtcagggaacagctatggccattggggaaggtgacttggatgcaacctttgaaagagatgcttccagtaaaccccatcggt

SEQ ID NO: 890715 - DNA, 120 bp, Artificial Sequence
  ENSG00000260630_20 (sequence is synthesized)
agcgtcggccgagcgcggtccttggagaacccttgctgcggagaatgacgctcactctgcggcctggcctcgcctccccatcccttctgcaaactcacaggacaggattgatggggagag

SEQ ID NO: 890716 - DNA, 120 bp, Artificial Sequence
  ENSG00000260630_21 (sequence is synthesized)
cccaggcgaaacgaagctgaccctagtgaccagccctactggcggctctggaacaggcccgggaccggtggcctggagacagtggtcctttctggatgggctgcagtctccgaaggcttc

SEQ ID NO: 890717 - DNA, 120 bp, Artificial Sequence
  ENSG00000260630_22 (sequence is synthesized)
ccccactggagtcagccctttaggagtttgtccagtgcctccagaaagctgttttttgggggacggaggacttggcctggaattctggaattcccagggggtcagacatggttatgggaa

SEQ ID NO: 890718 - DNA, 120 bp, Artificial Sequence
  ENSG00000260630_23 (sequence is synthesized)
gtttaataaaaccggtgaatcacgtgaattctgcaacagctgcacgtgtgacctgggcaatccgtttccctcctttgtggtcctgtagagccctcagggtcataaaaagctgggagccgc

SEQ ID NO: 890719 - DNA, 120 bp, Artificial Sequence
  ENSG00000260630_24 (sequence is synthesized)
tccgcacacatgtgtagtcacatgcgcatccacatacacataacagaagccagtgtccttcaccatgagccaggcactccggcagtttctgctctattttattttacaaaattgctgggg

SEQ ID NO: 890720 - DNA, 120 bp, Artificial Sequence
  ENSG00000260630_25 (sequence is synthesized)
gtgactgatgaaactgatttcaaaatgcacatttgaaaagcatggtcctagctggcaccccctggtggcagcccgggcctcgggtgtgggtccaggtgggatcccccccatccccaactc

SEQ ID NO: 890721 - DNA, 120 bp, Artificial Sequence
  ENSG00000260630_26 (sequence is synthesized)
tgggttctgagctgggataaaggcctcttggcggtgttgctgggggccacagccccaacagcgcccttcctgctctcccccaccggccacagagcgtgagtcccgaccaccgcgtccgcc

SEQ ID NO: 890722 - DNA, 120 bp, Artificial Sequence
  ENSG00000260630_27 (sequence is synthesized)
ggcgcccctcagtgggcctttgtcccaagaagctgccaagccaggtggggactgctctcaccgcccgtgtggcaggctgtcctctgaaggacagagtcctcttctctcgtgtccctaagc

SEQ ID NO: 890723 - DNA, 120 bp, Artificial Sequence
  ENSG00000260630_28 (sequence is synthesized)
ctagcaggcagtgggaatgaacgggcagcccggttgctgggcacccatctccccagcctagccggtgtgtggaggattgcagccctttagcccagcctgcccaggcaagcctgccggggt

SEQ ID NO: 890724 - DNA, 120 bp, Artificial Sequence
  ENSG00000260630_29 (sequence is synthesized)
gagcaggagggcttctggggtgaagggaggtgggggagggagggagaccacgggcggaggctcacctgaactgaatgcaggaggggcagtgcctttgcaccagaaagagcccatgtgtcc

SEQ ID NO: 890725 - DNA, 120 bp, Artificial Sequence
  ENSG00000260630_30 (sequence is synthesized)
ttctcaccatcccctgtgcttacacccccagtcagcatgctccgggggtccctgagccgggccgccccagacggccctccttccctcccacccaccaccccgcgacccctcccaaacgtg

SEQ ID NO: 890726 - DNA, 120 bp, Artificial Sequence
  ENSG00000260630_31 (sequence is synthesized)
tgcgccaggaagatgactccagggtgcctttagctggggctgtagtggttgggacgggcggctgtatatcaggggtgagttccagggagacttgggggcttagaaaacttagaaaacttc

SEQ ID NO: 890727 - DNA, 120 bp, Artificial Sequence
  ENSG00000260630_32 (sequence is synthesized)
gggagagaatcccgcccgccctgccggaggcggggctcagtgccctgaagtggaggcgcccgtgggccacctccctccctgcagccgcagccgctgcgcagaggcgctggctccttctcc

SEQ ID NO: 890728 - DNA, 120 bp, Artificial Sequence
  ENSG00000260630_33 (sequence is synthesized)
tcccacctgggacaggtgtctccccagcccccgctcccaggggcctctctctctctcccgcccctcagggtcgagtcccggcaggggctcggggatcgggtagtcagtacctctctgcgt

SEQ ID NO: 890729 - DNA, 120 bp, Artificial Sequence
  ENSG00000260630_34 (sequence is synthesized)
ctccagccgccggtagttggggaccctgtggctggagtgcgttttcaccaggaaggagcgcggcatgttcccctcccgggcggcaggccggggtgggctggggcgggaggggcgcgcctg

SEQ ID NO: 890730 - DNA, 120 bp, Artificial Sequence
  ENSG00000260630_35 (sequence is synthesized)
ggtccggactgctgcgtccgccggcgcttgaaggggtcaggctcattagcatagcgcgccgcctccgccaaccagcgcccggcgcgagtggggcggggccacgggggcggaactgagggc

SEQ ID NO: 890731 - DNA, 120 bp, Artificial Sequence
  ENSG00000260630_36 (sequence is synthesized)
gaggcggggtctcgggcaacacgcccaggacaggtgcgcgggcgggacggggcggggagcgcgtggccgccggtgtcctccccacgggaattctctggcgtgcgcgccgccgagtcacac

SEQ ID NO: 890732 - DNA, 120 bp, Artificial Sequence
  ENSG00000260630_37 (sequence is synthesized)
gcgcccggccagcctttggtttttctatggcttacttggagttctctttaattctgacatagaagttcgcacaatccctcttttacagatgaagaaaccaaggctttgtgactaactcaa

SEQ ID NO: 890733 - DNA, 120 bp, Artificial Sequence
  ENSG00000260630_38 (sequence is synthesized)
ccccgagcacagcctgcacagcatcctactgctgatccccggggcttcctgcgtcctggcgcttcctgtcctttccccaagcccaggcatctgggactttaaaaagtcagaaagcaactg

SEQ ID NO: 890734 - DNA, 120 bp, Artificial Sequence
  ENSG00000260630_39 (sequence is synthesized)
gaaaggaaggcatgtgtctagcttgctctatatctgccttgcattgggaggccttcagtgggaatgtttttctggaagcagtcagcaaatgtgaaacaccatgaagccaggcgattggag

SEQ ID NO: 890735 - DNA, 120 bp, Artificial Sequence
  ENSG00000260630_40 (sequence is synthesized)
ccagtaaaccccatcggttaagatcagctgtcccccatgatcctttgtgtgtgtttttttgttttcacacagggtctcggtctgtcgcccaggctgagtgcagtggtgtgatcttggctc

SEQ ID NO: 890736 - DNA, 120 bp, Artificial Sequence
  ENSG00000260630_41 (sequence is synthesized)
caacctccacctcctgggcacaagcaatcctcctgcctcagcctcctggatagctcagactacaggggtgtgccaccatacccagctcattcttttgtatttttagtagagacagagttt

SEQ ID NO: 890737 - DNA, 120 bp, Artificial Sequence
  ENSG00000260630_42 (sequence is synthesized)
tcaagtgatccacccgccttggcctcccacagggctgggattacaggagtgaactcccatgcctggccctcatgatcctttgtagactgagggacaaaagaagagggtgaggcctcccct

SEQ ID NO: 890738 - DNA, 120 bp, Artificial Sequence
  ENSG00000260630_43 (sequence is synthesized)
ccctctcctcagcgctgagtgcaaggaccctcaaggcaactcttggcaaagccccatgtttccactggctgtttaggtggaattgcgtccccccgcttccgtatgttgaagtcctaattt

SEQ ID NO: 890739 - DNA, 120 bp, Artificial Sequence
  ENSG00000260630_44 (sequence is synthesized)
tcgggccctccgcttgtgaccatatttggaagtagaggctttgcagatgtcatgagttaagatgggggcctcctggagcagggcaacatgactgtatcctcataagaagaggagagacag

SEQ ID NO: 890740 - DNA, 120 bp, Artificial Sequence
  ENSG00000260630_45 (sequence is synthesized)
aaacagacacacacagggagatgccacgggactcccaaagccacaagaaagcctggaacagccccgccctcacagcctctgaaggaaccagccctgccttcacctggatctgggacttcc

SEQ ID NO: 890741 - DNA, 120 bp, Artificial Sequence
  ENSG00000260630_46 (sequence is synthesized)
atggaatctgaggcccacccgtcagtaagagtttcctcctggtatccatggaatctactggtctgtctcactttggcctttgacccaggcaggggttcctaacatctacatcggtcattc

SEQ ID NO: 890742 - DNA, 120 bp, Artificial Sequence
  ENSG00000260633_0 (sequence is synthesized)
caccaaacacacaggcatgaaatacactcatgggcttgtccacatgcacacctgccacaaacacccatcataagcctccaggtaaacaatatgggcatgcgcacttatacacacacttgc

SEQ ID NO: 890743 - DNA, 120 bp, Artificial Sequence
  ENSG00000260633_1 (sequence is synthesized)
acacacatacacatttttggaggcttgaatgcacacccacgcccaacacacaccccctcaggcaggcacacatgggtcccctaaacatggactcagtcttcctacaggagaatttctatt

SEQ ID NO: 890744 - DNA, 120 bp, Artificial Sequence
  ENSG00000260633_2 (sequence is synthesized)
ctgagcaaacacccagcatctgcagtcaatggcaaacagatgaatgggacaaaattcactcatgtgtcctggtggccctaccaatacagccctgaaggagcaggcagcaggcttatccct

SEQ ID NO: 890745 - DNA, 120 bp, Artificial Sequence
  ENSG00000260633_3 (sequence is synthesized)
tcaccagcaggccttcagaagggcaagaccagggtggggatcaggtttggccaggagaacactcagagcttctgggtactgactcaaagccaggggccgacagccttgtgcattcctgac

SEQ ID NO: 890746 - DNA, 120 bp, Artificial Sequence
  ENSG00000260633_4 (sequence is synthesized)
aagtaggtcaccatgacaaggagcactggctcacatgctgggacctacggtgactggaaaagacttggggaaaatccagctgttgtgagacagccagtgttagtaggtgctgccttccca

SEQ ID NO: 890747 - DNA, 120 bp, Artificial Sequence
  ENSG00000260633_5 (sequence is synthesized)
taccagtgagttaggttgggtctatgcagcaccggagctatggagtgtgtgtcagcggcaagggctcctgctcagcacagcaaagactaggagaagaagagggcagtggcttaccaggga

SEQ ID NO: 890748 - DNA, 120 bp, Artificial Sequence
  ENSG00000260633_6 (sequence is synthesized)
ctgtagcgctgggaaggacgggtgaggcaggggacacattatgaatagtgttattttttagcacaccagtgtgttaggcactgtgctgggtgtttttcatgtattatcttgcaagataca

SEQ ID NO: 890749 - DNA, 120 bp, Artificial Sequence
  ENSG00000260633_7 (sequence is synthesized)
gccctgcaagttagattttattgcctccattttacagatgaggagactgaggctcagagggcttaaataaattactctaggtcttcagctaataggggcagagctcagatatgagtcaag

SEQ ID NO: 890750 - DNA, 120 bp, Artificial Sequence
  ENSG00000260633_8 (sequence is synthesized)
ttctcaacatcttcatgttgaagctaaaacttgcattttaaactatcaaaagcaagagggatctaaggagacatggcaactaaaggtactgtggtatcccggatgggatcctgggacaga

SEQ ID NO: 890751 - DNA, 120 bp, Artificial Sequence
  ENSG00000260633_9 (sequence is synthesized)
aaataaacatgaactttagttaatgacaattttaattgtgatacatgtactttactaatgcaaaagtgttaataatagaggaaactgggtgcagggtatacaggaactatttatactatc

SEQ ID NO: 890752 - DNA, 120 bp, Artificial Sequence
  ENSG00000260633_10 (sequence is synthesized)
ttaatgattcttcaaatctaaaactgtcctaaaataaaagacttattttttaaactttgcatttttgccagcagcaggaagcagtagataaccaacattccaaggtgcagcctgtgtata

SEQ ID NO: 890753 - DNA, 120 bp, Artificial Sequence
  ENSG00000260633_11 (sequence is synthesized)
aggcctgaagaggccagggcccctggaaagtttctcaaaataagaggccattctggactttgtaccactgagttcccatcacctacataacttgaaatagagacattaattgcagggctg

SEQ ID NO: 890754 - DNA, 120 bp, Artificial Sequence
  ENSG00000260633_12 (sequence is synthesized)
tgatcacagccaacaccaccttcctaaatggggcaaaagggcgctgaagtcgggcagagcagctgcaaactggcatgaattcccaaggctgtgacagagaattcttgctgggtgtgcctg

SEQ ID NO: 890755 - DNA, 120 bp, Artificial Sequence
  ENSG00000260633_13 (sequence is synthesized)
tacctccctgacaatgtggcctggccaagctgacgtccctccattttctcaactgttgccactagaatgtagtaggaacaatgtataagtcttatacttcttttattaaatttattctta

SEQ ID NO: 890756 - DNA, 120 bp, Artificial Sequence
  ENSG00000260633_14 (sequence is synthesized)
attcttagtaatactactataaatgtagttgctttcttgatttcattttctgatattttatttctagtacatgaaaataaaattcatttttgtatattgatcttatgttttgtcaccttg

SEQ ID NO: 890757 - DNA, 120 bp, Artificial Sequence
  ENSG00000260633_15 (sequence is synthesized)
tcaccttgctgagcttgcttatcagtcctaacagttttttagtggattccttaggattttctatatactgcaagattatggcatctacaaataaagatagtttaagttctttctttccaa

SEQ ID NO: 890758 - DNA, 120 bp, Artificial Sequence
  ENSG00000265287_0 (sequence is synthesized)
taaaggatacattgccttatttatttatatcccaaccttattacaaaaaggcttacaagatgcagatattatagtaatataaaacgattaaaacttagaaaaatgagaataaggaaaata

SEQ ID NO: 890759 - DNA, 120 bp, Artificial Sequence
  ENSG00000265287_1 (sequence is synthesized)
aaagtagaaaaggaagacagaaccaagaacatgactagcatacaaaatacataaacacttgctgaaggtagaccacaaattgggctctaaatggtctagtatcagtacaaacagaaaaat

SEQ ID NO: 890760 - DNA, 120 bp, Artificial Sequence
  ENSG00000265287_2 (sequence is synthesized)
acaatcagctgaatatttagtgtccttaaggtaaaaaccaaacagcaattcaggaaaagcataactgggtccagagaaaatttctcccacgcattcttaaatagaatattatgaactgtt

SEQ ID NO: 890761 - DNA, 120 bp, Artificial Sequence
  ENSG00000265287_3 (sequence is synthesized)
acgataaacaccctttacagtatccacagcaattaaatttatttttttcctgagacaagatctcactctgttgctcaggctggatgcagtggcacgatcttcactcattgcaacctccat

SEQ ID NO: 890762 - DNA, 87 bp, Artificial Sequence
  ENSG00000265287_4 (sequence is synthesized)
gttcaagcaattcttcctgtgccctcatgaccagctaatttttgtattttttggggagaaacggggtttcaccatgttggccacgct

SEQ ID NO: 890763 - DNA, 120 bp, Artificial Sequence
  ENSG00000265287_5 (sequence is synthesized)
cgctggtctcgaactcttgacctcaactgatctgcccaccttggcctcccaaataaccttaaatcttaaggttgatgcatgcctcttaatctcttggtttgcccatcagaaactgaatca

SEQ ID NO: 890764 - DNA, 120 bp, Artificial Sequence
  ENSG00000265287_6 (sequence is synthesized)
tgggctcactaggagaaattgtcagtttaaaaatcctatgcttttcaaagaggttttattttggataactgttgcaattatagacctagagaagacatttaacccacccatgtttcagtt

SEQ ID NO: 890765 - DNA, 120 bp, Artificial Sequence
  ENSG00000265287_7 (sequence is synthesized)
tctattttcttcctcactagattattttattcacttttcaatttttaaaaattagatttattgcagactggcctcaagctcccagactatattttttagctgcattatttaggggttgaa

SEQ ID NO: 890766 - DNA, 120 bp, Artificial Sequence
  ENSG00000265287_8 (sequence is synthesized)
gactatattttttagctgcattatttaggggttgaaatgccagcttttgagacttttgaaaaattcacaggctgggtgtggaggctcatgcctgtgaaggttgcagtgagctgagatcgt

SEQ ID NO: 890767 - DNA, 120 bp, Artificial Sequence
  ENSG00000265282_0 (sequence is synthesized)
aattgaatatccgcaggctgggcacagaaggtaaagcgattagtgatattgatcatggcctaggggctgaaaaggcccagcggttgtccagtctcgacccagcagaggcagtgttgtttc

SEQ ID NO: 890768 - DNA, 120 bp, Artificial Sequence
  ENSG00000265282_1 (sequence is synthesized)
cacatggttagataagccctttcctctcagcctgagagggtggcctggatggtggagctgcaagagcctgataagagccttggcaaggaaggtcccccagtgtttaatggacccctttcc

SEQ ID NO: 890769 - DNA, 120 bp, Artificial Sequence
  ENSG00000265282_2 (sequence is synthesized)
atccacgtacgtggctcaggcagaagcctctgaatcttatgggtctctgtgaatattgaagtgatcccagtcaccaagggatgatgcctccctctccagccagccacttcacctcttcct

SEQ ID NO: 890770 - DNA, 120 bp, Artificial Sequence
  ENSG00000265282_3 (sequence is synthesized)
ctacgaatctctggctggataatagcagggacctcattttcttactggggtcccaaagcgactcctcttgactgtggcatagagttatttctccaaacaagcacgcggcatttcccaagc

SEQ ID NO: 890771 - DNA, 120 bp, Artificial Sequence
  ENSG00000248898_0 (sequence is synthesized)
agtaaggaaatgtgctctcacggttgcagctgctatgggaacataggagaggaaggcatttttctcaagaacagtgggtaggataatcatagaaaattacagagaaagtgacatttgaaa

SEQ ID NO: 890772 - DNA, 120 bp, Artificial Sequence
  ENSG00000248898_1 (sequence is synthesized)
ttctcctagaatacagcgcttgagatggagcagggaatcacaggaaaagcaagtaacaagagcacagcacttcatgaacaaggaaggcaagggcccaggaatggctgaaggggaaatgtt

SEQ ID NO: 890773 - DNA, 120 bp, Artificial Sequence
  ENSG00000248898_2 (sequence is synthesized)
ctgaactcacttcggaatgattattctagtgcctgatggctggaggggtgggagaatggagactagaggctagtgagagagaagattcaccccattccctaccccacattcggaaactgt

SEQ ID NO: 890774 - DNA, 120 bp, Artificial Sequence
  ENSG00000248898_3 (sequence is synthesized)
aagcagactgacaaaggttcccttgggtgaagtcagaagataatgtaaacgacactgtgcagggtgcttcattcagaaatattcttctctgtggattgaggtcctggatcttggtaaatg

SEQ ID NO: 890775 - DNA, 120 bp, Artificial Sequence
  ENSG00000248898_4 (sequence is synthesized)
taactgaactcttctgctgcaggatcttgctttttatatggcatttttgtaatgacctgtatgcagactgagaagatcaaaacatgttctggatatcgttactcatttctggagaaacat

SEQ ID NO: 890776 - DNA, 120 bp, Artificial Sequence
  ENSG00000248898_5 (sequence is synthesized)
ctgatcaactcaaggatcatcaaagtgagagaaacacttttctccatgaataagctacaattataataatatttagtaagcagaaatatttgctattcacaatagttatcttgttattat

SEQ ID NO: 890777 - DNA, 120 bp, Artificial Sequence
  ENSG00000248898_6 (sequence is synthesized)
gcccattattatatttatttgaagagtaggtggtgtctgatgtctctgtttcatatttatgttttcttccctgcaaaagatagtttcttggaaaagagtgtcttatatttacattatttc

SEQ ID NO: 890778 - DNA, 120 bp, Artificial Sequence
  ENSG00000248898_7 (sequence is synthesized)
attaacatccttttcaactaactctgccttgatgtctaatacatagttcaagccaaagtcactctcagagtgccaagcaaattctgctcgccaatttctttttaaataaatggaataagc

SEQ ID NO: 890779 - DNA, 120 bp, Artificial Sequence
  ENSG00000248898_8 (sequence is synthesized)
attttttcatcttagagaatgaaacttacacagtgacccattaactgcagtgatttgctcataaaaggtggaggggtggaaatgaggggagccaaagaaatgacaagtttggcaatgagg

SEQ ID NO: 890780 - DNA, 120 bp, Artificial Sequence
  ENSG00000248898_9 (sequence is synthesized)
cgttagaagcaatgtaaaataagcatattaaaatctgttacagaaaattgtgtaaacccttaaaatgtctctcctccccagtctggaatagctctacattagcagggattcttttttctt

SEQ ID NO: 890781 - DNA, 120 bp, Artificial Sequence
  ENSG00000248898_10 (sequence is synthesized)
ttacaacacagacttattggaaatagggcatcaatcacatgagcccattggtaccctgacctggcataaagcaggatcctctagagaaaaggcatgaagtcaagataattgataaacatt

SEQ ID NO: 890782 - DNA, 120 bp, Artificial Sequence
  ENSG00000248898_11 (sequence is synthesized)
ggcttgaaggttggcaagggtggatcctgaaaatctactttgagatcagacaggtccagtgaagtcactgaaacccccaagaaaggttgcttgaagggcagttaaaagggtaggcacaca

SEQ ID NO: 890783 - DNA, 120 bp, Artificial Sequence
  ENSG00000248898_12 (sequence is synthesized)
tgctggaaggaatgaagcaaagcagcaacagattagagtggaaagccccaaacagacatctcacattttcccgttcggctgagacctggccatgctgatgtttaccactaaatctggaaa

SEQ ID NO: 890784 - DNA, 120 bp, Artificial Sequence
  ENSG00000248898_13 (sequence is synthesized)
tctggaaggcttgtgctgtgctgagcatgtttgaatttcttttcctcaaagcaaaattatgaaggcaattatattctttctgaattcttctgaaccacattgcaattacttggatgctcc

SEQ ID NO: 890785 - DNA, 120 bp, Artificial Sequence
  ENSG00000248898_14 (sequence is synthesized)
agctcatgctaaacataatgaacaacagctgatcttaatcagatgtatgatgtgttctgctactgagaaagcatgtggcttctgagcaaaagatataaattacacttcagagcaaacttc

SEQ ID NO: 890786 - DNA, 120 bp, Artificial Sequence
  ENSG00000248898_15 (sequence is synthesized)
tgaacagtaaagaggacataaggctaccttttctgtcaacttatatttctttcgaaagaattaaagctatgtttttcaaatacacagactgtacttgtcatgggctaacaagtgctcctt

SEQ ID NO: 890787 - DNA, 120 bp, Artificial Sequence
  ENSG00000248898_16 (sequence is synthesized)
ctataggcgtactatagtcacgacgtaagatgggtcaggatgatttttttaaatatgagtttatgaaattcgaaagcatgagcagtaaatatgacttatgaaggtgcctacctctagaga

SEQ ID NO: 890788 - DNA, 120 bp, Artificial Sequence
  ENSG00000248898_17 (sequence is synthesized)
taattaaataacaaaatccatgttcctccaaatatgtcaattattctgtagcacatttctcgaagtaagtctgcaatctatctgtttttatagacacttacagaacatccaaacatgttt

SEQ ID NO: 890789 - DNA, 120 bp, Artificial Sequence
  ENSG00000248898_18 (sequence is synthesized)
ctacaggttattttgcactaccagatcccagatttctttagaacaatatgctgctaccatgctatccttaaaagtttggaaatttaggtatttgtaatttgcttacttttaaattcaatt

SEQ ID NO: 890790 - DNA, 120 bp, Artificial Sequence
  ENSG00000248898_19 (sequence is synthesized)
aggctaaagtccacgggctgtagaagcaaaccttaaagggacatctgcctttcattgagagggtgatctcgttctccgggccaaatcccctaaggtggtaggaaggcggatgaaaacgtc

SEQ ID NO: 890791 - DNA, 120 bp, Artificial Sequence
  ENSG00000248898_20 (sequence is synthesized)
tagttgcaggaaaacaggctgagggctcccactgattctacattatgggctggaatctgagtagctgaggtgcttatgtgactacatgcctacatcactgacccccaataaacaccttgg

SEQ ID NO: 890792 - DNA, 120 bp, Artificial Sequence
  ENSG00000248898_21 (sequence is synthesized)
aaccaagaaaagtcttaaacgtgaagaagcctgtgataaacaaggtgactcacctcatcaaatggaatagggatcttctggcaaagctgcctgggtaaaccgcaactcacaagggataga

SEQ ID NO: 890793 - DNA, 120 bp, Artificial Sequence
  ENSG00000248898_22 (sequence is synthesized)
atttcactaaattcttaagaggttacagactctatttctatccttaaatacactcattattttatccctggatatacccaattatagtttaaacttaaattgaataaaagatgatgggaa

SEQ ID NO: 890794 - DNA, 120 bp, Artificial Sequence
  ENSG00000248898_23 (sequence is synthesized)
gcacagagtggtggcgagtcctttattttaatgccaaacttcaacttcctaagttttctcttccatccctgtctgtgaagaatccggggagtgtgtgagtgcaaatactagttttacctg

SEQ ID NO: 890795 - DNA, 120 bp, Artificial Sequence
  ENSG00000248898_24 (sequence is synthesized)
aacagaatcattgctttcagataaagaaacctcagatcaaatataagcatcaaaatctacaaagattttagagggtgaagaaacacggaaagatctctggtgatggagccagcattgatg

SEQ ID NO: 890796 - DNA, 120 bp, Artificial Sequence
  ENSG00000248898_25 (sequence is synthesized)
taattctatttttatttcaggactgtgcccaggggaataacaaggaagaaaaatgtcagaagaattagtttctctctaattgaacaaatgtatttatatttccttgttgataggcataga

SEQ ID NO: 890797 - DNA, 120 bp, Artificial Sequence
  ENSG00000248898_26 (sequence is synthesized)
ttctcaatgagaaactgaaacttatgaagttacatttaagactccagttgtgacaatgatgaccaatgctctttggtattacgttttccaattcaacacaggaaatgagttggaatttgt

SEQ ID NO: 890798 - DNA, 120 bp, Artificial Sequence
  ENSG00000248898_27 (sequence is synthesized)
tttgcagtttttttttcagcctgttttgtggagtattttttcctgtgatctgtagaaacacaatgataacattacgaactttgccagtcattggcccatcaaaaatgtttgtatgcttga

SEQ ID NO: 890799 - DNA, 120 bp, Artificial Sequence
  ENSG00000248898_28 (sequence is synthesized)
atgggcaagaaattacatttgatggagtcccatgtgcctcattaactaaatttttcttttcggttattattaaaggacagtaggtggccaggcacgatggctcattcctgtaatcccagc

SEQ ID NO: 890800 - DNA, 120 bp, Artificial Sequence
  ENSG00000248898_29 (sequence is synthesized)
accctccagccaggcaatagagcgagagtctgtctccaaaaaaaaaagactgtaggtatgagatcagacgtgacttttaacttttaacttttaactttcatgttcttcatcttccattct

SEQ ID NO: 890801 - DNA, 120 bp, Artificial Sequence
  ENSG00000248898_30 (sequence is synthesized)
tgccacaaaaagactgccgtttccttcttcacattcaatgtgtctcatgggtcagagaatctgtgtggttacactcttaactagtacagccactgttcttcgactacttaaacgctctta

SEQ ID NO: 890802 - DNA, 120 bp, Artificial Sequence
  ENSG00000248898_31 (sequence is synthesized)
tccttccactcagtcatccatttgaccccatttcctttatattctatgcagaattacatgtgcaattagggtttgttttcattattactgttattattataatcactatttgccaattct

SEQ ID NO: 890803 - DNA, 120 bp, Artificial Sequence
  ENSG00000248898_32 (sequence is synthesized)
gttgattaccctttccatttgtttttcaacaaaactctctctgtacaccaacaacactgcctcaatcttttaatctaccagaaaaaaaattcaactccataagcaattggatcaataata

SEQ ID NO: 890804 - DNA, 120 bp, Artificial Sequence
  ENSG00000248898_33 (sequence is synthesized)
gtaggaattcacaattttcagtctcagtggtttccttcaacattaaactcctttttattttgattgtccattacttcataactttgaaatcctctttcaatttctctaatgtaatttgac

SEQ ID NO: 890805 - DNA, 120 bp, Artificial Sequence
  ENSG00000248898_34 (sequence is synthesized)
caagattgtggctcgcaagactgaacttttttgaaatatggacatggggagtccccacattttgctagactacatcttggagggtgcttggaaagcagaaatggtgggaaatcgttttat

SEQ ID NO: 890806 - DNA, 120 bp, Artificial Sequence
  ENSG00000248898_35 (sequence is synthesized)
tttctgtttgcaaaagccactttgcaacttgtggttatcctattctatcaccaagctcctgcctgtatttacagtgggctttgaagaaccagctgctgaaagtgataaatcagcagctga

SEQ ID NO: 890807 - DNA, 120 bp, Artificial Sequence
  ENSG00000248898_36 (sequence is synthesized)
aaatgatgaatgcgagactgattggaactcaaagtgaaatataggtgcttgtcaacaatgttagattggtaacttgaggtggcaaagagtggtgactgctggcaaaatgtatgaatatat

SEQ ID NO: 890808 - DNA, 120 bp, Artificial Sequence
  ENSG00000248898_37 (sequence is synthesized)
gtattatagtagcaattatacttgcttatttcaatgtttttgaagtcttcttatttatagaacattctggctttttattttgaggagcactgctaacaataaatcagaaccaacatttat

SEQ ID NO: 890809 - DNA, 120 bp, Artificial Sequence
  ENSG00000248898_38 (sequence is synthesized)
tgagtgtcgattattatatcccaagtccagtactagactgtggagcattagctatgaaatgcctagttgtgatttccaagcaccacttatggaaaattatgatctgctttttatattagt

SEQ ID NO: 890810 - DNA, 120 bp, Artificial Sequence
  ENSG00000248898_39 (sequence is synthesized)
gcagtatcgctagatgtaacaggtattctggattttaaaacctatttataatgtttgtttctaatgtggtttatgcttactcaaatggaatatttttcagcttgttcctttccaagtggt

SEQ ID NO: 890811 - DNA, 120 bp, Artificial Sequence
  ENSG00000259792_0 (sequence is synthesized)
ctgctcctctggggcagatctgcagggtacagagcagcaaacaagtccgtgagagcatggcgtctggactgccccttggagtgatggggactggggcccccaggggcacctccctgggcc

SEQ ID NO: 890812 - DNA, 120 bp, Artificial Sequence
  ENSG00000259792_1 (sequence is synthesized)
tgttgtatctgttgactcttctgcaaaaagtagacagagaagagagcaggctggcccgctgtgctctactgtgtctgtcccaggactcggaagtattacagttccaaaacgtaacttgaa

SEQ ID NO: 890813 - DNA, 120 bp, Artificial Sequence
  ENSG00000259792_2 (sequence is synthesized)
cagcacaggagctgctgtgatataaaaggagagagtcacctggcgccccctgcagtcctccagttgcccagcagcagtgggacgttcagtggcacacagtgggtctctgtatggcctccc

SEQ ID NO: 890814 - DNA, 120 bp, Artificial Sequence
  ENSG00000259792_3 (sequence is synthesized)
acctgcaaggacttccccgggcaggcccagctgcccagaagccccggaacacacaggaagacaacactataggatggcaggtggggatctgtgcaatacaaacatgtagctagaaaaccc

SEQ ID NO: 890815 - DNA, 120 bp, Artificial Sequence
  ENSG00000259793_0 (sequence is synthesized)
cagtaagggactgcccaggtgtgccctctccctgtcaaagggctgccgctagagacctcgcctgccaataggcattcgctggccgcgccgccctgggcagtgacctggggctgcagagtg

SEQ ID NO: 890816 - DNA, 120 bp, Artificial Sequence
  ENSG00000259793_1 (sequence is synthesized)
gcatctggcatggggacacggccaggggcatgggctcacggccaggacagaggaggacaaggcctaaggcaggaacagtccgggacaggccgaaggccccatggtgccccagggtactat

SEQ ID NO: 890817 - DNA, 120 bp, Artificial Sequence
  ENSG00000259793_2 (sequence is synthesized)
agccactagccacatgtggctacttaaatttcaattagttagaattcagcattccgttcctcagccacaggagccacatttcagggactcagtagccgcatgtggcttagcagctgccac

SEQ ID NO: 890818 - DNA, 120 bp, Artificial Sequence
  ENSG00000259793_3 (sequence is synthesized)
gctggatagcacaaatataaaacacttcccccgtccccccagaaagttctgcagcacagtcgcatgctgaactgtgtcctcccgtaattcatatgttgaagtcctaacccccagtacctc

SEQ ID NO: 890819 - DNA, 120 bp, Artificial Sequence
  ENSG00000259793_4 (sequence is synthesized)
agcatgtgactgcatttggagttaaggtttttaaaaaggtaatgaagttaaaatgaggtcacaggggtgatccctaatccggtatgactggcgtcctcataaaaagaggagatgaggaca

SEQ ID NO: 890820 - DNA, 120 bp, Artificial Sequence
  ENSG00000259793_5 (sequence is synthesized)
cacacacagagggcagcccatgtgaagacacagggagaagatggcatctacaagccaaggagaaaggcctccgatggaactccccctgccgacaccgtgatctcgcacttccagccacca

SEQ ID NO: 890821 - DNA, 120 bp, Artificial Sequence
  ENSG00000259793_6 (sequence is synthesized)
accagaaccgagagcgtcaattcctgtggtggaagccgcccggcctatggtgcagtgctctggcagccctagggaactcatgcaggcacaaagggctccagcctccccacagggttggga

SEQ ID NO: 890822 - DNA, 120 bp, Artificial Sequence
  ENSG00000259793_7 (sequence is synthesized)
cttttctatcaattaactacatgtggagtgatacacagaggcaaaaccctggaggagtgtgcaaggcggaggaggggcggggacgcacaggggaagaaacagttcattccttcattccgc

SEQ ID NO: 890823 - DNA, 120 bp, Artificial Sequence
  ENSG00000259793_8 (sequence is synthesized)
gggggagccgggtgacctgagcagggtttgggattggaatggagaggtcagatatgaagggagtttcccaggaaaacgcaaaaacggggagactacccctaccaggtgagcagagcgggt

SEQ ID NO: 890824 - DNA, 120 bp, Artificial Sequence
  ENSG00000259793_9 (sequence is synthesized)
gggattttggtgaagccggtagcaaggcgggtgcgggaggcagggaggtgagcagcggcgccaggatgcagagtagcctcccggccctgctctgaggcaaggacttcagtcccgtgggca

SEQ ID NO: 890825 - DNA, 120 bp, Artificial Sequence
  ENSG00000259793_10 (sequence is synthesized)
ctggagctggcaagggggtttgggaaagcagaggaactcatgtgtctgggcagagaatgatccataggagagaagactagaaatagggaggccattaaaatgctgttgccggccgggcgc

SEQ ID NO: 890826 - DNA, 120 bp, Artificial Sequence
  ENSG00000259793_11 (sequence is synthesized)
taataataataataataataataataaatgctgttgcctacacctgttaggagctcaggggacatccaggccccagaactcatcattttagagtcaaggaggcaagggcatgaacgtgac

SEQ ID NO: 890827 - DNA, 120 bp, Artificial Sequence
  ENSG00000259793_12 (sequence is synthesized)
attttagagtcaaggaggcaagggcatgaacgtgacggttaagaagcagaaaccgtggctggagaggaggaaatctgcaattaccagaaagtactgagattgtcacagacaagaggagcc

SEQ ID NO: 890828 - DNA, 120 bp, Artificial Sequence
  ENSG00000259793_13 (sequence is synthesized)
aaggagacatgatgactaaacgtcacgtgggttcctagatgggatcccagaacagaaaaaggacattaggtaaaagctgaggacatcagaattaagtatggggctttagtttaataataa

SEQ ID NO: 890829 - DNA, 120 bp, Artificial Sequence
  ENSG00000259793_14 (sequence is synthesized)
tgcatcaatattgattcccgggtaggaggagggtgaggattgaagaactacctatcggggattattgtgctgattacttgggtgacaaaagtatctatctgtacaccaaaccgccatgac

SEQ ID NO: 890830 - DNA, 120 bp, Artificial Sequence
  ENSG00000259793_15 (sequence is synthesized)
atgcaatttacccatgtaaaaaacctgcacatgtaccccctggacctaaaataaaagttggaaagaaataagtatattttactggaaacaacatttgagtcactcagtgtggcaaatgta

SEQ ID NO: 890831 - DNA, 120 bp, Artificial Sequence
  ENSG00000259793_16 (sequence is synthesized)
ccctactcatgtaagggttaataatagggggttttgggtgtgggggacctcagtataacatctttgcaacttttctgtagatctaaaactactcaaaataaaaagtgtattttaaaaaaa

SEQ ID NO: 890832 - DNA, 120 bp, Artificial Sequence
  ENSG00000259791_0 (sequence is synthesized)
tagggcaatgcaagggagcagctaacaacacagctcaagtcagactgccagcttcctgctcaaattcttcctccaacatctcccagctgggtaatcttggacacattgattaatctccat

SEQ ID NO: 890833 - DNA, 120 bp, Artificial Sequence
  ENSG00000259791_1 (sequence is synthesized)
ctccacaactttaaaatggtgctaacaaatgcgtgcactaatgaatattattattagaatggtggttggatgagtatattacatacaaaatgtttaaagaatatgtggctcataaaaagc

SEQ ID NO: 890834 - DNA, 120 bp, Artificial Sequence
  ENSG00000259791_2 (sequence is synthesized)
taggctatgttcatcctggttctgagaaaactctcaaaaatacattagtctgtgctctttatttgatgattaaaatcttgaaaaagtatttgtaaatcagtgcatatttcacatacacta

SEQ ID NO: 890835 - DNA, 120 bp, Artificial Sequence
  ENSG00000259791_3 (sequence is synthesized)
ggaggggctatttaaaggaaattatcagggtaatgcaattattgttgtaaatttagattccaataaagtatttttttctgtaaggcacacctataataaaggaatatgaataattattaa

SEQ ID NO: 890836 - DNA, 120 bp, Artificial Sequence
  ENSG00000259797_0 (sequence is synthesized)
attaagtgcattcagtgtgccagcattgtgctaaggctgtggataccagatgaagaagatcctgttctcatcttcaaggaccatgcagttttgtggaagagacaggcacatacaaaatta

SEQ ID NO: 890837 - DNA, 120 bp, Artificial Sequence
  ENSG00000259797_1 (sequence is synthesized)
gggattacaggtgtgagccacagtgtcaggcctggacgttattttctgagtgatatattaaacaggagagaaagaggattggattgcattttggaacactcactgagagcggtgtggaga

SEQ ID NO: 890838 - DNA, 120 bp, Artificial Sequence
  ENSG00000259797_2 (sequence is synthesized)
gagaggagagcatttggggatattgtagtcccagagctgcatagtcccagaggagacagctcgggggaacttgagtttggtaactcactggatatgatggagggagagagaagattcaag

SEQ ID NO: 890839 - DNA, 120 bp, Artificial Sequence
  ENSG00000227240_0 (sequence is synthesized)
aataaaatttctgtttgtaatcaacctaatataaattcaacacacaattaagatttaggaatgtgtaacaccccaaggctcttaattttcaaaagtcacaaaactatgtttactcaaatg

SEQ ID NO: 890840 - DNA, 120 bp, Artificial Sequence
  ENSG00000227240_1 (sequence is synthesized)
gtttgacattatttaaaaattggattctatcttattctcttgaggaaatttttgggtagttagaagttttgacataattaatttctgaatatttcacatttatctttcagattttcctga

SEQ ID NO: 890841 - DNA, 120 bp, Artificial Sequence
  ENSG00000227240_2 (sequence is synthesized)
catcaatgtatccttttgagtatattatcgtatctcttaacatttctgtttcatccttgacctgagacttttttttttttttttaatcttgagataattcttggctttgtcaaggctact

SEQ ID NO: 890842 - DNA, 120 bp, Artificial Sequence
  ENSG00000227240_3 (sequence is synthesized)
tgccatctgtcttttgtttggtctccctgatgttagtcacgaagtctgcttagaaggatttatgtcttactttgatataggttctatactcaatgctagggaacaatcattggcaagatg

SEQ ID NO: 890843 - DNA, 120 bp, Artificial Sequence
  ENSG00000227240_4 (sequence is synthesized)
tgtctcctttactcaaagaggttttaatggtctatgtttggaaaagagacatacagtcattagaatgcaatattgtgaaagttgacaagggaaattcttggggttatgggaatcttcaat

SEQ ID NO: 890844 - DNA, 120 bp, Artificial Sequence
  ENSG00000227240_5 (sequence is synthesized)
atctttattgagaaatacagatatacacatttatcaaaactcataaaatgatgaatttgtagtattttattgtgtataaattatgcctcaataaaagttcattgtaatgtgctgaaagaa

SEQ ID NO: 890845 - DNA, 120 bp, Artificial Sequence
  ENSG00000227240_6 (sequence is synthesized)
gatgcaaacaataaacctcagaacatctcaaacccaaggagtctggaagcaactcttcatctgttcaagttttatcatgagattgtggcaattcagtcccctcttcaggcttcactttta

SEQ ID NO: 890846 - DNA, 120 bp, Artificial Sequence
  ENSG00000227240_7 (sequence is synthesized)
attctcttgctgttttcagcaaatctgcagtgacttcctccactgaagttctgaacccctcaaattcatccatgagggtttgaatcaacttctatcaaacttccattaagctttatttct

SEQ ID NO: 890847 - DNA, 120 bp, Artificial Sequence
  ENSG00000227240_8 (sequence is synthesized)
attttgtttttatgctcaaaatgttgggcaggatacttttgtagctcacatatgttgttgcttctctgctggctcatttgatggctatggggcagcagctcagcctgccaccacctctag

SEQ ID NO: 890848 - DNA, 120 bp, Artificial Sequence
  ENSG00000227240_9 (sequence is synthesized)
atgtttcttcagcttctccaactccaaggctggcattctctctcttgctgccctgtgaagaggtgccttctgccataattttacagagctttcactctagcatctgaaaaaggaaccaac

SEQ ID NO: 890849 - DNA, 120 bp, Artificial Sequence
  ENSG00000227240_10 (sequence is synthesized)
tcctgctaaatcttgagaattgacacattgaagccttatcttcagactctgaaaaaggctggaagcttatcatgggcctggatcttgtgctattcaaatgttttcaccgatgcctacaac

SEQ ID NO: 890850 - DNA, 120 bp, Artificial Sequence
  ENSG00000267628_0 (sequence is synthesized)
gaggaaaggtatttagggtaagagccgagtgacaagacaagcccagccatggaatgatgaggtagaggagcactgaagcagaggacacagctagggtgggaagcagctggcacatgggga

SEQ ID NO: 890851 - DNA, 120 bp, Artificial Sequence
  ENSG00000267628_1 (sequence is synthesized)
tagctgcagtgtggtgggagaggagagcggggaagctgggccttattaggtttaatccacaagccaggctggaacagccatctctgcagtcagctttatggagtgcagaaaatctatgtc

SEQ ID NO: 890852 - DNA, 120 bp, Artificial Sequence
  ENSG00000267628_2 (sequence is synthesized)
agcagcaagttacacagccgcaatgagaagttgctatttgctgcgtgctctctgcacaggcctggccacccgtgaaccagcaacaccatggaaggcagcatccacaggaatctgtactgt

SEQ ID NO: 890853 - DNA, 120 bp, Artificial Sequence
  ENSG00000267628_3 (sequence is synthesized)
gaaaggaggctgatttcctacctctcgaacagactgggtgagagcaactggattcattcctggtgactgcctgtgagggcagtgcagtgtgtacacatcccaagaacagattatagctct

SEQ ID NO: 890854 - DNA, 120 bp, Artificial Sequence
  ENSG00000267628_4 (sequence is synthesized)
gactttatgacgaaatatcttctgattgttgaagaagacaccatcaacacattcactatcaggaaagtatggcacctctagatcattctaccggcactgatgacgtctcccccaacaaca

SEQ ID NO: 890855 - DNA, 120 bp, Artificial Sequence
  ENSG00000267628_5 (sequence is synthesized)
tttccacagaagaattcctcaagattcctcagaacttctggctcctacttctctagctttgtttgggtaatttctttcatactgagaaagataaattcaataaaatcatactcaatgaaa

SEQ ID NO: 890856 - DNA, 120 bp, Artificial Sequence
  ENSG00000250167_0 (sequence is synthesized)
agagtgcatggaatcatgatttacagctcccctgggcctcacggggaagagagggatgctggatgaagaggaggcttcacagagttggtcacataagtgggaagtcaaaaaaccaaccac

SEQ ID NO: 890857 - DNA, 120 bp, Artificial Sequence
  ENSG00000250167_1 (sequence is synthesized)
agcttaaagaaagaaaggaggaaaaaaaccctgctggacgttggatgtacagccaaacacctgggttgggaatgcagaaaacaggcatggaatgccaggaacgcagcacctgtggctaag

SEQ ID NO: 890858 - DNA, 120 bp, Artificial Sequence
  ENSG00000250167_2 (sequence is synthesized)
ttgtggtctcacaggcaaatactttttaagaatctgctgcatgccaggcctgcgctgtgccaccgtgttaagaagaaaccaagtagccatagccacattggggagagtcatctctccagg

SEQ ID NO: 890859 - DNA, 120 bp, Artificial Sequence
  ENSG00000250167_3 (sequence is synthesized)
cgcgcgcacacgcacacacacatccgctaccctctcgctcacacaacacgccgccttcgcacacttgcacacccataccacagcgcgcacacatttccagcgtcccgctctgcctttggg

SEQ ID NO: 890860 - DNA, 120 bp, Artificial Sequence
  ENSG00000250167_4 (sequence is synthesized)
gagcccagacggtggagaggctgctgaagggcactgcttttctgaatcgtgtggttctctctctggcccggcaggccagcttttccgagccggcgggagacccaggcccagggctcagat

SEQ ID NO: 890861 - DNA, 120 bp, Artificial Sequence
  ENSG00000250167_5 (sequence is synthesized)
caagtgtgagtgcctgcaggcctgacccccaagggcccctgctgggccagaacacaaggccagttctggacaggggcttgtcatagactgtccagcagcaaagtcattgactgtgatcac

SEQ ID NO: 890862 - DNA, 120 bp, Artificial Sequence
  ENSG00000227248_0 (sequence is synthesized)
ctgctttcagaggagtggctggtagactgatggctcttttattagtgaagttcagataagcctgtgatccactccacggcaacccgagggagaggtcaagtcacacagagctctgtgtca

SEQ ID NO: 890863 - DNA, 120 bp, Artificial Sequence
  ENSG00000227248_1 (sequence is synthesized)
ccccctgacagtttcctcaccacagtcagaatggcacttgtgacagacactggagtttctctgctatctaattaaggttccattaacttaactaggttaaccatatttgctttctattat

SEQ ID NO: 890864 - DNA, 120 bp, Artificial Sequence
  ENSG00000227248_2 (sequence is synthesized)
ggccaacctccaggccagaatttcaataattatcatatattgttgattttttttttccacaaacgctttccggttgccactatccttcagcaattgggcaagccttctgtctatgtgaca

SEQ ID NO: 890865 - DNA, 120 bp, Artificial Sequence
  ENSG00000227248_3 (sequence is synthesized)
gcccctgcattctggagcttgccctgcagtgggtgacatggacatgttcagcagagctgtgtaatgactgcggccatgtgccggtagattccaagtgctgtgttatcacacatgaggaaa

SEQ ID NO: 890866 - DNA, 120 bp, Artificial Sequence
  ENSG00000227248_4 (sequence is synthesized)
aactgggcagtcatggaaccattactggaagaggaaagggctagagtgaatccaaaatttcaactagagattggccatgggaagagagaggaagaagatattgcaggaagaaaggtagtg

SEQ ID NO: 890867 - DNA, 120 bp, Artificial Sequence
  ENSG00000227248_5 (sequence is synthesized)
acttgaacacatttggaaaagtgcatttattcaacaagatccaccagtgcaggaagaagagagagagagagagagatgatgtcagaccatgaatgtcccaaatagaaaaattaaaaaggg

SEQ ID NO: 890868 - DNA, 120 bp, Artificial Sequence
  ENSG00000267627_0 (sequence is synthesized)
aggcccggtggtccaggatccagtgctgctccccatgtgcccatctcacatgctgctcggcaccagcagccatcaccactccacttctctcaagagacagagtcttgctctatcccccag

SEQ ID NO: 890869 - DNA, 120 bp, Artificial Sequence
  ENSG00000267627_1 (sequence is synthesized)
tacagatggaggaaggaggtcccaagccaaggaatgcagcatgggcctctagaagctggaatgaccctcacctcacggccagcaagaaatcagggaactcagtcttacccgagtgagcag

SEQ ID NO: 890870 - DNA, 120 bp, Artificial Sequence
  ENSG00000267627_2 (sequence is synthesized)
gaaatcgattctcctctgcagcctctatagagaacacagcctgtcaacaccctgattttggcccaatgagccctgtacctccagaagtgtaacgtaataaatttgtgttgttttaagcta

SEQ ID NO: 890871 - DNA, 120 bp, Artificial Sequence
  ENSG00000267627_3 (sequence is synthesized)
tcaacaggaaggcaggatgacttcaaagatctgctagtgcacctggattctggttttcttactattcagcttcatgaccttgaacaaactttactcagcttggctgtgcctcagtttagt

SEQ ID NO: 890872 - DNA, 120 bp, Artificial Sequence
  ENSG00000267627_4 (sequence is synthesized)
catctggaaaggaaggggataggactataactaaatataattctagatcattttaagtatcatctgtgcactcacgcaatatgtgcatggaacgtggaggcgagagtacaaaaggcatgg

SEQ ID NO: 890873 - DNA, 120 bp, Artificial Sequence
  ENSG00000267627_5 (sequence is synthesized)
atcgacatgaggcccctacaacccagggaaggcccggtggtccaggatccagtgctgctccccatgtgcccatctcacatgctgctcggcaccagcagccatcaccactccacttctctc

SEQ ID NO: 890874 - DNA, 120 bp, Artificial Sequence
  ENSG00000267626_0 (sequence is synthesized)
gtaatcttagcgcggtcaggctgggtcttgcagcgctcactcttcccaggatgctttttggaacccatccaccatctgagagataataagaagcttctctaggacttgtgattttggttt

SEQ ID NO: 890875 - DNA, 120 bp, Artificial Sequence
  ENSG00000267626_1 (sequence is synthesized)
cagcagctccttccacgtttgagaagagtcttctcatttcttactcatagaacatcccatcagacatttctcctgatccacatagtaattcagggatccaggcttcttccataaggtgat

SEQ ID NO: 890876 - DNA, 120 bp, Artificial Sequence
  ENSG00000267626_2 (sequence is synthesized)
ctaaagtgacatacatcacttctgctctcagtccattgaacataacttgtcttatggcttcaactagctgcaagggcctctgggaaatgtagtcctggtctaggcagtcaataaacatcc

SEQ ID NO: 890877 - DNA, 120 bp, Artificial Sequence
  ENSG00000267626_3 (sequence is synthesized)
tgctggctctgccacagaaggcctttctaagatgttctttgagctgagacgtgagagccaaagtgtgagagctacttgaaaactgtgaaaatggagttcccaaagtgggaacagcaagtg

SEQ ID NO: 890878 - DNA, 120 bp, Artificial Sequence
  ENSG00000235978_0 (sequence is synthesized)
gtactgatgagacctctttagtatgacactggcaactgacggcactgcggatatgtttggaataaggttcaaaagaagaggctgttctaagaaagactaccgagtaatcaatcacctcct

SEQ ID NO: 890879 - DNA, 120 bp, Artificial Sequence
  ENSG00000235978_1 (sequence is synthesized)
ccaccagcccctgcacttggttccttgcgttgcctctggctggaagctgttgtccccaacttcagaaagtgtctgcagatttcacaggctctctcttgggtcaagggaccagctctgtga

SEQ ID NO: 890880 - DNA, 120 bp, Artificial Sequence
  ENSG00000235978_2 (sequence is synthesized)
acacggcaagtaacaacagagagaaaacgtgaggagaaaagagagaccgggattttgaaatcctgtttcctgaatgccatctcaccaggcacacgaaagaataaaattaaggaatcaaga

SEQ ID NO: 890881 - DNA, 120 bp, Artificial Sequence
  ENSG00000235978_3 (sequence is synthesized)
agtacagttcccgtcacagcaagtgcttcctctctcggagcagacaaactaactgaagccacagccggaagcaggctgaccacaagtgctaaggttctggttagttcttttctaggttca

SEQ ID NO: 890882 - DNA, 120 bp, Artificial Sequence
  ENSG00000235978_4 (sequence is synthesized)
tctcactcctcaggtcagcaaaagtgtcaatgataaccccaaaaatcaggttaagaacaatgatgatgaccatgaagaagaacaagaggtcataaataactctagcagcaaacaggggtt

SEQ ID NO: 890883 - DNA, 120 bp, Artificial Sequence
  ENSG00000235978_5 (sequence is synthesized)
gggtagaaattaaattgggcattcaacttttaaactgaaaactgcatctcttttcatgtcccctgtctcaattgcgacttctccaagtgtggtgtgacacagccaggagggatattcact

SEQ ID NO: 890884 - DNA, 120 bp, Artificial Sequence
  ENSG00000235978_6 (sequence is synthesized)
tcaaataaatatatcacggataatgggagctggattcctcactgcctgagaaaagaacacaaatagagaaagggagaaagaataaaccctgtaatgctgaaacggaattaaagggaccag

SEQ ID NO: 890885 - DNA, 120 bp, Artificial Sequence
  ENSG00000235978_7 (sequence is synthesized)
ctctttgaagatggggtcaggccacaagccaaggaacggaggcagcctcttgaacctgaaaaaggcaagaaaatggattctcccctagtgccttcagaaggaacgtggacaagcagaact

SEQ ID NO: 890886 - DNA, 120 bp, Artificial Sequence
  ENSG00000235979_0 (sequence is synthesized)
catctgtgacatcatgctggggctgcttgcccacttggctccctctagggaagtactcccagctgcccacagtcatccttctccatcccactgaccttccacccgtgaccaatcaggaga

SEQ ID NO: 890887 - DNA, 120 bp, Artificial Sequence
  ENSG00000235979_1 (sequence is synthesized)
tgtttccagtttattggtgaatttattagggctcagagaggatgacctatccaaggtcccactgccaactgaatgtaggacaagtctctgaacccagtgtgcccctgccagaaagtagca

SEQ ID NO: 890888 - DNA, 120 bp, Artificial Sequence
  ENSG00000235979_2 (sequence is synthesized)
gggatcacagaagtccagcagaggtctgccgccttggaccccgcctcttacacattgagtgtggtttctgcagtgatgatagatcctccgaatgaggaacaatgtattcttcttttctcc

SEQ ID NO: 890889 - DNA, 120 bp, Artificial Sequence
  ENSG00000235979_3 (sequence is synthesized)
taattctcctaaaaaatccacttgggagatacctgctgcaaaacttaaaggcaaccatattctgtacttagatgaagtgtttgtcaagctccctggaaaagagaatcaaaggaccctgac

SEQ ID NO: 890890 - DNA, 120 bp, Artificial Sequence
  ENSG00000235979_4 (sequence is synthesized)
ctgaaaagcgccccccaactaactcagatccatgcgtccctttgggccctgaggaataatactgctggtttaattcaagatataaaaccaataaaaatggtttacctaaaggatatgcca

SEQ ID NO: 890891 - DNA, 120 bp, Artificial Sequence
  ENSG00000235979_5 (sequence is synthesized)
caatggccgtatgtgaaacaatatcctttgtcctgagctcggtttgagagaatcaaacccattataaaagaattagaaaaacaagggatacttctataaaaggtagcctcaccttgtcat

SEQ ID NO: 890892 - DNA, 120 bp, Artificial Sequence
  ENSG00000235979_6 (sequence is synthesized)
actcccatacttccagtaagcaaggaaagtaaatttggtaaagatggttgaccattgtgtagatttgtacaagatctttgagaagtaaatgaatttgtagttcctaatcctgcaactatt

SEQ ID NO: 890893 - DNA, 120 bp, Artificial Sequence
  ENSG00000235979_7 (sequence is synthesized)
ttgactttgtttctgttgtctgtaatgtgttctgctttttcttcctgttcctgtccaaacccttgtttgcttttacctacaaaggagttcaatacttaacttagtaaagaatttctcaag

SEQ ID NO: 890894 - DNA, 89 bp, Artificial Sequence
  ENSG00000235979_8 (sequence is synthesized)
gggaagttctgtcaaccctggcctgctttgggacaccagtggacctccccagagctggtggtgaaaattcctggagttcacaagagagc

SEQ ID NO: 890895 - DNA, 120 bp, Artificial Sequence
  ENSG00000235979_9 (sequence is synthesized)
ggtgaaaattcctggagttcacaagagagctggttgttaaaaggagcctgggccagtgtgatggttcgcatctctaatcccaacactttaggatgccaagacaggaggattgcttgatgc

SEQ ID NO: 890896 - DNA, 120 bp, Artificial Sequence
  ENSG00000235979_10 (sequence is synthesized)
atgccaagacaggaggattgcttgaggccaagtattcaagaccagcctgggcaacacagacattgcaacatccctgtctttaccaaaaaggaaaaaattagccagccatggtggcatgca

SEQ ID NO: 890897 - DNA, 120 bp, Artificial Sequence
  ENSG00000235979_11 (sequence is synthesized)
tgagcccaggagttcaaggttacagtgtccagcctgggtgacagaataagaccacgtctcaaaaaacaaagaaacaaacaaaccagcctgggacctcctccctgctttgcttcctcttca

SEQ ID NO: 890898 - DNA, 120 bp, Artificial Sequence
  ENSG00000235979_12 (sequence is synthesized)
aaccagcctgggacctcctccctgctttgcttcctcttcagcatgtgtgatctctttgcacatgccgattcccctttcacattccaccttgagctgaagcagcctgagaccctcaccaga

SEQ ID NO: 890899 - DNA, 120 bp, Artificial Sequence
  ENSG00000235979_13 (sequence is synthesized)
ttgagtgtggtttctgcagtgatgggcttctctcttccctggagacgtaaaaccagaaggattcagaaggatctgccaaaggaaatctggaccccataaacgatcagtactgccatctgc

SEQ ID NO: 890900 - DNA, 120 bp, Artificial Sequence
  ENSG00000235979_14 (sequence is synthesized)
aacaggaaccacacggcaagtcaccaaacctctaacccaatcttggaacctaccaatcttggaacctgcagtgggtcacagaagggaaaccagccagacgtcagcatgctgctgagacct

SEQ ID NO: 890901 - DNA, 120 bp, Artificial Sequence
  ENSG00000235979_15 (sequence is synthesized)
cggtcaatgagtcacacctgggctcttgtgaattacagaatcaatgttggaagcccaggaagccaactaatcagcctgttaactatagcttcactgctgagccatctgttctagaccacg

SEQ ID NO: 890902 - DNA, 120 bp, Artificial Sequence
  ENSG00000235979_16 (sequence is synthesized)
ttgctgcctctgcccaccacacacttccctggagctggacctgatcagccagaagaagcatctgaaaaggagcatctcaatttcagcacagtcgaccttaacaaaataacttcaggaagt

SEQ ID NO: 890903 - DNA, 120 bp, Artificial Sequence
  ENSG00000235979_17 (sequence is synthesized)
gcaccagcttgggaaccaggacttcggggttcccctgcttctgtcatcagcagctgcacaggcttatctgagactttctctctctgggtgtgcacctataaaatgccaggattggatgca

SEQ ID NO: 890904 - DNA, 120 bp, Artificial Sequence
  ENSG00000235979_18 (sequence is synthesized)
cacagctttttgagaacaaggaccttattggcctctctggcacaagcaagctgcccaaggaatgtgggccaccatctccatagctgctttctgaactggggattgagaggtggcgatcac

SEQ ID NO: 890905 - DNA, 120 bp, Artificial Sequence
  ENSG00000235979_19 (sequence is synthesized)
agggcacgccctaagaaacctgcacactaacctccctctcagacactgcttctggagagcccaacctgtgaccgctgggtcaggaggggtctgaggaagaagatgctaagatgggattct

SEQ ID NO: 890906 - DNA, 120 bp, Artificial Sequence
  ENSG00000235979_20 (sequence is synthesized)
tggatcacccactgcctagctgctgataaggatccttttgctgggggtagatggagcgggtacatgcccccgcacagagcagagtgccacctgcccagaaccgctccacggtccatggag

SEQ ID NO: 890907 - DNA, 120 bp, Artificial Sequence
  ENSG00000235979_21 (sequence is synthesized)
atcggtttacttctcttttcgcctgcttccgcagccaagactcaactccctcccatccatgagttctcttggagtatctttgtgtaaacaaggtctcagtaactaaatcctgtttccatc

SEQ ID NO: 890908 - DNA, 120 bp, Artificial Sequence
  ENSG00000235979_22 (sequence is synthesized)
atcactattgtagaatctaagattggccttttgagatatcttttcaggatttttgcatgtctgacaccaatggctccacctggacccaccaggatctgccaactgctcctgtggccccac

SEQ ID NO: 890909 - DNA, 120 bp, Artificial Sequence
  ENSG00000235979_23 (sequence is synthesized)
ccagaaatgattcagtgcaagaggaagcttcaatcccctgatttcatctctgaaccaaccaatcagcacttcccataccctagccccctgcccaccaaactacttttgaaaaacccctac

SEQ ID NO: 890910 - DNA, 120 bp, Artificial Sequence
  ENSG00000235979_24 (sequence is synthesized)
aaactacttttgaaaaacccctaccctatgagccttcaaggagattgatcttctgtttgtttgtttgtttttgttttttgagacagagtctctctctgtcagccaggctggagtgcagtg

SEQ ID NO: 890911 - DNA, 73 bp, Artificial Sequence
  ENSG00000235979_25 (sequence is synthesized)
cggccgttttcttctgtagtttcactaccatcctttgtggtgagtggggtgagtgttagccaagggtggaacc

SEQ ID NO: 890912 - DNA, 120 bp, Artificial Sequence
  ENSG00000235979_26 (sequence is synthesized)
tttgtggtgagtggggtgagtgttagccaagggtggaacctagttttgttttgtttctctcgcatctgaacaagatttggtctcgatttcagaatgaccacgttgcagagcaggcccccc

SEQ ID NO: 890913 - DNA, 120 bp, Artificial Sequence
  ENSG00000235979_27 (sequence is synthesized)
aaatgtaaaactagggggaagagaaatcacaagtccactaaggctgggcagtggtcttaggttcagaatatggtgtcttaaatattcctgcagaccttggtcctttactgttgcatctga

SEQ ID NO: 890914 - DNA, 120 bp, Artificial Sequence
  ENSG00000235979_28 (sequence is synthesized)
gtgaggctcctacgattgttgctactgataaaataaaacgtacatttgatgtatatagtcagattgccctacagaatgactttacagatttgctgtccagtcagcatggtgtgagagtgc

SEQ ID NO: 890915 - DNA, 120 bp, Artificial Sequence
  ENSG00000235979_29 (sequence is synthesized)
agccacgaggcccacagcagctggggctatccatgggaaaggcccagctcctgtccacagccacagtccctgaacccagcgaccccatgacactgcaggaccctttctcccactagggcc

SEQ ID NO: 890916 - DNA, 120 bp, Artificial Sequence
  ENSG00000235979_30 (sequence is synthesized)
ctacatccacccttccttgggggcaggaggctggagatatctaaggtccaggggatcctgggtgaggatgggaaagttaatcaccttatctagtgtgttagtccatattgcttcactata

SEQ ID NO: 890917 - DNA, 120 bp, Artificial Sequence
  ENSG00000235979_31 (sequence is synthesized)
aagaaatacctgaggctgggggaatttatatagaagagggttatttggctcacagttctgcaggatgtacaagaagcatggcactagcacctgcttctggtgaggcctcagggagcttcc

SEQ ID NO: 890918 - DNA, 120 bp, Artificial Sequence
  ENSG00000235979_32 (sequence is synthesized)
actcatcagttcaggaagggcaccaagccactcatgagagatctacccccatgacgcaaaaacctcccaccagatcctaccttaagcactggagatcacactgcaacacgtgatttggag

SEQ ID NO: 890919 - DNA, 120 bp, Artificial Sequence
  ENSG00000235979_33 (sequence is synthesized)
caaagtgaaataaaaatccagctggattcatgctttcaactggacttggattcccacaaggacttgaaacttaaatcttctagaataaatgatattggtactgaattcaactgaaaagaa

SEQ ID NO: 890920 - DNA, 120 bp, Artificial Sequence
  ENSG00000235979_34 (sequence is synthesized)
cccttttctgcctatcaagccaaacctcctcgttcagctcatcggaacactcattctgttttacaagaatgagttattgcccaattcttgagtcacaaataaaagccgattaagattttt

SEQ ID NO: 890921 - DNA, 120 bp, Artificial Sequence
  ENSG00000226397_0 (sequence is synthesized)
gtagaatgatttacattcctttgggtacatacccagtggacagattgctggctcaaatggtagctctaaattctttgaggaatctccacactgctgtccacagtggctgaactaatttat

SEQ ID NO: 890922 - DNA, 120 bp, Artificial Sequence
  ENSG00000226397_1 (sequence is synthesized)
attcccaccagcaatgttgctccaagaaccatctgagaactgggaagaaagagtggagacctacaggtcagatgacatgggtggagcccatttctacagagtggcttgggctgaggtaaa

SEQ ID NO: 890923 - DNA, 120 bp, Artificial Sequence
  ENSG00000226397_2 (sequence is synthesized)
agaagctagagaagagagccgctgatgcactgcacctgcctaggctggagttaagataccgaaactggcaacacccagagacatttccctcctagtcataaaggaagccagcagcagagc

SEQ ID NO: 890924 - DNA, 120 bp, Artificial Sequence
  ENSG00000226397_3 (sequence is synthesized)
cagaaataatattcaaattctggatccactagaccatattgcccgtctgacaaattatacgcttacatcctgcttcagttctaataaggtacccacaatgccgggttctctacccactgg

SEQ ID NO: 890925 - DNA, 120 bp, Artificial Sequence
  ENSG00000226397_4 (sequence is synthesized)
gagcaaacaagggaacgtgcagacgctggacagcatacgatggatgcctgcaactcctgtacctgcccccgaatgccaccagaaatatgccatctctactgaaacagcttttccaaccct

SEQ ID NO: 890926 - DNA, 120 bp, Artificial Sequence
  ENSG00000226397_5 (sequence is synthesized)
aggggtcaaatgcagactttacaaaaagaaacccaagatggagattcctgttcgggatatactgcaggtggggttcataacaacatagtcctttacttgccaagtaatctgaaagcaact

SEQ ID NO: 890927 - DNA, 120 bp, Artificial Sequence
  ENSG00000226397_6 (sequence is synthesized)
tttacttgccaagtaatctgaaagcaactaattagagaacctgtaagggatgccaatcccagttttcaaaatggcatttcaaggaaattaaatcttatcatgtaaataggtcaagaaatc

SEQ ID NO: 890928 - DNA, 120 bp, Artificial Sequence
  ENSG00000226397_7 (sequence is synthesized)
cgtttaaataacgtatctgcttctctctaggtaatctacaatgttgttagactatcaagccagtagttttaaatatgtgttggagctccaggattaatccctggttgatctgagggagtc

SEQ ID NO: 890929 - DNA, 120 bp, Artificial Sequence
  ENSG00000226397_8 (sequence is synthesized)
attaatccctggttgatctgagggagtcactttgtctaaccaaatacaaatgaggtgggaggtgtatggttgagaggcactattagaagaaaggggccaggtgcagtggctcatgcctgt

SEQ ID NO: 890930 - DNA, 120 bp, Artificial Sequence
  ENSG00000226397_9 (sequence is synthesized)
atgcctgtaatcccaggactttgagaggcccaggcaggtggattgtttgatcccatgagtttgagaccaacctgggcaacatagagaaaccctatctctaccaaaaatacaaaattagcc

SEQ ID NO: 890931 - DNA, 82 bp, Artificial Sequence
  ENSG00000226397_10 (sequence is synthesized)
aaggtggaggttgcagtgagccaagccattgcacaccagtctgggcaaagagtgaaactctgtctcaaataaaataaaataa

SEQ ID NO: 890932 - DNA, 120 bp, Artificial Sequence
  ENSG00000226397_11 (sequence is synthesized)
gttaaggtactaatcacagcagcagtgctgggaaagatgcctaggaaggatgaggatgacaggcactattttggtgtgctccccaccacagcaataacagaaagatagtccaggtgcagt

SEQ ID NO: 890933 - DNA, 70 bp, Artificial Sequence
  ENSG00000226397_12 (sequence is synthesized)
accgaaactggcaacacccagagacatttccctcctagtcataaaggaagccagcagcagagccagaaat

SEQ ID NO: 890934 - DNA, 120 bp, Artificial Sequence
  ENSG00000226397_13 (sequence is synthesized)
gatatactgcagcctacatcatgctatgacaattttcatataaagatgctgtctcggaaagaaaaggattgggagtttgaatgatctatggcttccattccaaaaaggattactacagaa

SEQ ID NO: 890935 - DNA, 120 bp, Artificial Sequence
  ENSG00000226397_14 (sequence is synthesized)
caagatgcatattacactgaatgaaatcatccgttgcccttccggatctatcccgtggatgcagagcaagagcaacccatctttgttcagcatcccaggagacaggcctctattgacagc

SEQ ID NO: 890936 - DNA, 120 bp, Artificial Sequence
  ENSG00000226397_15 (sequence is synthesized)
atcagtctggctcctttgccctctgatttcccattgaatgtggccagtgggagggcccagcagatggagggccaggaggaggaagagtctgcagcatttgttctcctggctcccaccctg

SEQ ID NO: 890937 - DNA, 120 bp, Artificial Sequence
  ENSG00000226397_16 (sequence is synthesized)
ccaggtctctgtctgacagtggctcacgcttttccacagcccctgtcaggtggcctctcccaaagtgacagtgttcacttggttctgtaagtgttttctccattgcctcttgccagggag

SEQ ID NO: 890938 - DNA, 120 bp, Artificial Sequence
  ENSG00000226397_17 (sequence is synthesized)
ggtaatggcttcctagagccagatgccagcacctgaggttgcccaccaccccatgctgtttcccttaaccctgcctacactttcaagaattgaaactctttgcagcctcctttttttttt

SEQ ID NO: 890939 - DNA, 120 bp, Artificial Sequence
  ENSG00000226397_18 (sequence is synthesized)
ttttaaaaaaaggtactatcgatttcctaaaggaccgtgagtgatatacactcagagattcttttgtcatgttactttccgtagctcaatatggctgttatccacattatacaaagaaca

SEQ ID NO: 890940 - DNA, 120 bp, Artificial Sequence
  ENSG00000226397_19 (sequence is synthesized)
taatacctaccttaaatttttaatattttgtctttattcttcaactctgtgtagcatttccttctggttaagaacatgcagataatccaaataaacagatttgactaaaagaaaaaaaaa

SEQ ID NO: 890941 - DNA, 81 bp, Artificial Sequence
  ENSG00000226397_20 (sequence is synthesized)
ctcaagcgatctacctgcctcagttcagcctggtcattatcatttctatcaccagataccgaaactggcaacacccagaga

SEQ ID NO: 890942 - DNA, 120 bp, Artificial Sequence
  ENSG00000242578_0 (sequence is synthesized)
ttgaaatggggcatgtcagccgtgctattggtattttgtaaacttcatcctttgtctgtcagtaaagttaatttttatcaaatcatttatctagaactaatgagagactgcaagagccct

SEQ ID NO: 890943 - DNA, 120 bp, Artificial Sequence
  ENSG00000242578_1 (sequence is synthesized)
ccagtggccaagctaatttctgcaaaaataccatcatcagaatgaaaaaggaattgtatgcagttgttaaatcttgacagcgaagagaagggatggctagaattattttagctgtttaaa

SEQ ID NO: 890944 - DNA, 120 bp, Artificial Sequence
  ENSG00000242578_2 (sequence is synthesized)
atgcagtctgagactcttggcagagaagtggatgaatagaattgctacttgaagagagaaaacactctgagaggattcaagcctaaaactccagctgaatttgaatctccaggtggaagt

SEQ ID NO: 890945 - DNA, 120 bp, Artificial Sequence
  ENSG00000242578_3 (sequence is synthesized)
gaattgtgaaggtgccactcttctctgctggaagtatatgcattgaggccagcgtgtctagtctgtcacaatcctgggtcgtcgggggactgtaccgagcgcccttggagtgctcgcagc

SEQ ID NO: 890946 - DNA, 120 bp, Artificial Sequence
  ENSG00000242578_4 (sequence is synthesized)
agggaagaaggagcgagcagggaggagctgaggagggtcggagcggaatggacacccagagactgagatgagagaggggctataagaagagaaaccagtcgcaggaaaacagaactctcg

SEQ ID NO: 890947 - DNA, 120 bp, Artificial Sequence
  ENSG00000282807_0 (sequence is synthesized)
atgtatgttttaccacaatttttaaaaagctagtgaaaagctggtaaaaagaaagaaaagaggcttttttaaaaagttaaatatataaaaagagcatcatcagtccaaagtccagcagtt

SEQ ID NO: 890948 - DNA, 120 bp, Artificial Sequence
  ENSG00000282807_1 (sequence is synthesized)
gtccctcctggaatccgttggcttgcctccggcatttttggcccttgccttttagggttgccagattaaaagacaggatgcccagctagtttgaattttagataaacaacgaataatttc

SEQ ID NO: 890949 - DNA, 120 bp, Artificial Sequence; identical to SEQ ID NO: 811021
  ENSG00000282807_2 (sequence is synthesized)

SEQ ID NO: 890950 - DNA, 120 bp, Artificial Sequence; identical to SEQ ID NO: 811022
  ENSG00000282807_3 (sequence is synthesized)

SEQ ID NO: 890951 - DNA, 120 bp, Artificial Sequence
  ENSG00000282807_4 (sequence is synthesized)
gaaggtggctgtctgcaaaccaggaagagagccctcaccgggaacccgtccagctgccaccttgaacttggacttccaagcctccagaactgtgagggataaatgtatgattttaaagtc

SEQ ID NO: 890952 - DNA, 120 bp, Artificial Sequence
  ENSG00000223891_0 (sequence is synthesized)
ctcagaagcacgtgcgccttacgtaatttcctgttattcttcggtttgcctcctcccagtggcgtggatttgctcccgacccgcttttggggcgtgcctgcttcctcctctctgttagat

SEQ ID NO: 890953 - DNA, 120 bp, Artificial Sequence
  ENSG00000223891_1 (sequence is synthesized)
tctctgttagatctcgctctgtcacccaggctggagtgaaatggcacaatcttggctcactgtaacctccgcccccaggttcgactgattctcgtgcctcagcctcctcagtagctggga

SEQ ID NO: 890954 - DNA, 120 bp, Artificial Sequence
  ENSG00000223891_2 (sequence is synthesized)
cccagagaggcgaagccacttgagctcgtgagtgacagtcagatgtcaagccctgctctttctaaagcgtgctgccttcagaaaagaagagccagaaggatggaaattacttcagaaaga

SEQ ID NO: 890955 - DNA, 120 bp, Artificial Sequence
  ENSG00000223891_3 (sequence is synthesized)
tgaataccagctttgaaggaataaaagctgacgaggaattgaaggagttgaggcacgagcttgaacagggttgcatgtttggcccttgattgtaaatgcccattgctgcacctgttcctg

SEQ ID NO: 890956 - DNA, 120 bp, Artificial Sequence
  ENSG00000223891_4 (sequence is synthesized)
ttacttggggagttgcagcagaaggaacagcggcctgggactccagagaactgggttccctctcatccctccagggccaccacttcttgtgggcccttgggcaagtcactgtactttctg

SEQ ID NO: 890957 - DNA, 120 bp, Artificial Sequence
  ENSG00000223891_5 (sequence is synthesized)
agtctcagtttccccatttgcagaatggaaataactaccccggtctaccaacttagaagaattgctttgaggatctgataaggtggtgtggatgatgctgccttgggggctttacagtct

SEQ ID NO: 890958 - DNA, 120 bp, Artificial Sequence
  ENSG00000223891_6 (sequence is synthesized)
gagctcaagggaccccttaagttgggcttacttagtaactccaggggtgggcagaacaggactccaatgagggtttttttctttttcccttttttttcttttcctatctcttaactttta

SEQ ID NO: 890959 - DNA, 120 bp, Artificial Sequence
  ENSG00000223891_7 (sequence is synthesized)
aacttttatctttattattttacaatgcccttgtaagatgaaacaagtgatgctgaaatatctttttcttttttaacctttattttagaattggggtacatgtgcaggtttgttacatag

SEQ ID NO: 890960 - DNA, 120 bp, Artificial Sequence
  ENSG00000223891_8 (sequence is synthesized)
tgggctgctgaggtttgggagtacgaatgaattagtcaccccagtggtgagcatagtgcccgataagtggttttttcaacccttactcccatccctctccattcttgtgttccccagtgt

SEQ ID NO: 890961 - DNA, 89 bp, Artificial Sequence
  ENSG00000223891_9 (sequence is synthesized)
ccttactcccatccctctccattcttgtgttccccagtgtctgctgttcccatttttatgagaagtaagaacatgcccagcactttggg

SEQ ID NO: 890962 - DNA, 120 bp, Artificial Sequence
  ENSG00000223891_10 (sequence is synthesized)
attaagcctgcaccaatttgatttccaagactccagtcaatcctcagagctccaggaggggaggggcagcttttcctggtagctgctgatcaccagcagagggagccctaggactgcagg

SEQ ID NO: 890963 - DNA, 120 bp, Artificial Sequence
  ENSG00000223891_11 (sequence is synthesized)
gcctctttccttaccgttggtgaagcccttcactgtggcttcaaaactgtggaagacccgggatttgtggatcacttgcctttagaatagaatcaagaaataaagctgcagaagaaagaa

SEQ ID NO: 890964 - DNA, 120 bp, Artificial Sequence
  ENSG00000223891_12 (sequence is synthesized)
tctccatgtggtaaggattggaagggagtgttgagaggggcttttggggtgctggtaatattgttctttgacccgatgttggttataggagtgtgtgctataatgtggtatatgtacatt

SEQ ID NO: 890965 - DNA, 120 bp, Artificial Sequence
  ENSG00000223891_13 (sequence is synthesized)
tttctgtgcgtataactaaacttcagttaaaagtttttaaaacttaaacatctctatgtataccacaaaataggtatcaggttagggtgagcggtttttttccctacaattcttaacctt

SEQ ID NO: 890966 - DNA, 120 bp, Artificial Sequence
  ENSG00000223891_14 (sequence is synthesized)
cacagcaaaagaaatacaaatagcacttaaacttatgaaaaaatgctcaatctcaatcttcaaagagaagtgcttataaaaagtatgcggagataccatttttaacctgtcagattggca

SEQ ID NO: 890967 - DNA, 120 bp, Artificial Sequence
  ENSG00000223891_15 (sequence is synthesized)
gaaatcccaaagcttgacagcatgccctgtggatggggctggaggtgggggagtcgggagaataaatagcaggacttttaatacattaccagtgggattgtgaaattgacagccctgttg

SEQ ID NO: 890968 - DNA, 120 bp, Artificial Sequence
  ENSG00000223891_16 (sequence is synthesized)
atttgggcaatatctaccaaaattacaagtctaagagtctaccctgtagatgacatttgtacctatatgtaataatttatgtaaaagatgatccattgcaacattggctgcaatagcaaa

SEQ ID NO: 890969 - DNA, 120 bp, Artificial Sequence
  ENSG00000223891_17 (sequence is synthesized)
agatcagaaacaactgaagtgtatgtacaggactggtgcatccacaaagcaaaatactatataactgggaaaaagtttgaggaagctgtgtgtgcgctgaggaaagatctctaagatata

SEQ ID NO: 890970 - DNA, 120 bp, Artificial Sequence
  ENSG00000223891_18 (sequence is synthesized)
ggtgaaaaaaagcacgacgtacagctaagaatatatgtttgtattgcttctatcttcataaagaaaaactgataagctagacaagtaactaagaagtgtttcaggaagtggttgggggcc

SEQ ID NO: 890971 - DNA, 120 bp, Artificial Sequence
  ENSG00000223891_19 (sequence is synthesized)
agcaggaggggccgggcttctgagtgtataccttgtgttctgatttttgaatcatgtcagtgtataacctgtgcaaaacaaaacaaagtttagagttcctgctctaaagctgctgagcta

SEQ ID NO: 890972 - DNA, 120 bp, Artificial Sequence
  ENSG00000223891_20 (sequence is synthesized)
aaaacaaatctgacttgctcgagtgaaaaaggaatccactagaagaatgtcagaaagctcactcaacaaaaggaaaagctaaacagctaggccttatcagcctgggagccagaccgagcc

SEQ ID NO: 890973 - DNA, 120 bp, Artificial Sequence
  ENSG00000223891_21 (sequence is synthesized)
cttcccaggtgccaggaatctctgagcattgcctcaggcgattcagttccacacatctttgttcctgatacatctctccgtacaagattcaaattcccaggaaagaaactgattggcttt

SEQ ID NO: 890974 - DNA, 120 bp, Artificial Sequence
  ENSG00000223891_22 (sequence is synthesized)
agattcaaattcccaggaaagaaactgattggctttcatggcagggtcatatttgacccactcctactcacaggggcaaaaactgtaacttcctttgtattttttctttttcttttcttt

SEQ ID NO: 890975 - DNA, 90 bp, Artificial Sequence
  ENSG00000223891_23 (sequence is synthesized)
ccacctcccacgagtaaccgggaccgcaggcatgcgccaccattcctggctaatttttgcatttttagcagagacgggtgttttactatg

SEQ ID NO: 890976 - DNA, 88 bp, Artificial Sequence
  ENSG00000223891_24 (sequence is synthesized)
cgagtaaccgggaccgcaggcatgcgccaccattcctggctaatttttgcatttttagcagagacgggtcctgacctcaagtgatctg

SEQ ID NO: 890977 - DNA, 120 bp, Artificial Sequence
  ENSG00000223891_25 (sequence is synthesized)
gccaccacacccagccctgtattttcatctaatctcattttcatctcaaacttccattctcccaacttgaggggatatttccttctcttctggtttacagcgctctgttttgcacagata

SEQ ID NO: 890978 - DNA, 120 bp, Artificial Sequence
  ENSG00000223891_26 (sequence is synthesized)
ttcagtgttcaggatcctcctctctcctgtgtgctcccatcctcccggcgtggcatctgggtataagggggcagtgggtaagctttatggctcagatgccattccctgcctgttgctggt

SEQ ID NO: 890979 - DNA, 120 bp, Artificial Sequence
  ENSG00000223891_27 (sequence is synthesized)
cttcactcccacgtggtcgctcggaatttgtccccgggcattacggattatggtggaacctaccaaaatggggtgaacctgatttagttcctgagcagtacacggacctgcttagaaaat

SEQ ID NO: 890980 - DNA, 120 bp, Artificial Sequence
  ENSG00000223891_28 (sequence is synthesized)
tgcctgtctgtagccatgaggtcctcatgtgccacaaccctcgcagcttgtcacctggcctctctttgtccctcagtccacttagcacatcactgggacatgtggacacatctggattac

SEQ ID NO: 890981 - DNA, 120 bp, Artificial Sequence
  ENSG00000223891_29 (sequence is synthesized)
cacctacatggcacccacaggtcaaggggacaacgggctgctgttaccacagcttcggtgccagcttagtgctgtcacgtggtcagtggggggcatctctccctgggctgtgcttgggaa

SEQ ID NO: 890982 - DNA, 120 bp, Artificial Sequence
  ENSG00000223891_30 (sequence is synthesized)
agtgggatcctactgtcccccaaacctgtccagatgcttcttagtcctacataggagttttccttcgaggagggtagacacttgcacctgaactcttgtcctgctttttttttttccttg

SEQ ID NO: 890983 - DNA, 120 bp, Artificial Sequence
  ENSG00000223891_31 (sequence is synthesized)
gcagcaccagaaggcttttgccctgcttgctgtacaggaacttgtctgaaccttatactgtgtcatctccacactatggcctatagaaaatctctatcctctcatccccaggttgtcctc

SEQ ID NO: 890984 - DNA, 120 bp, Artificial Sequence
  ENSG00000223891_32 (sequence is synthesized)
ttgctctgtaaagggaatattttgaaagttaggaaaactgtttctgcctcaacgaagtcacattttaacactaatgtccacagactcaagaaatctaatttaaaacagagccaggcaatg

SEQ ID NO: 890985 - DNA, 120 bp, Artificial Sequence
  ENSG00000223891_33 (sequence is synthesized)
gaattagccacaacagaagtgcatttggtttcatctcaagaaatatcctcctttacacctgtcttggcagatgtgcccactgcttgggtggcaggacactttgattgtctcaccaagact

SEQ ID NO: 890986 - DNA, 120 bp, Artificial Sequence
  ENSG00000223891_34 (sequence is synthesized)
gtgtggaaaggggtggggtacttctccaaagggaaaagtgggctgctgtcacccataaaaggggtagagggaaagggcaggcagaaacagtaaatgtcttccatagcttcaggtcacatc

SEQ ID NO: 890987 - DNA, 120 bp, Artificial Sequence
  ENSG00000223891_35 (sequence is synthesized)
tgcctgctgctgataccacattcatatctgcagcccatgtgtctcctcgatgccacacctctgtgtccacagtcttcctattcagtcgcctatgtggatgtccctctgacacctggtgaa

SEQ ID NO: 890988 - DNA, 120 bp, Artificial Sequence
  ENSG00000223891_36 (sequence is synthesized)
acatgatgtgtttctaattgagcaggttatctttccccctaagcctggtctcctggcctttccccagtcccttccagtttaattgaatcaaatcgaatgtgattcatctcctcccatccg

SEQ ID NO: 890989 - DNA, 120 bp, Artificial Sequence
  ENSG00000223891_37 (sequence is synthesized)
tctggctcctgggttatttaatacccccccaaactttggaaatattttaatgtgttaatatattattttttaataaaaaataattttaacaaaagaaaaatatacctttatagaaaattt

SEQ ID NO: 890990 - DNA, 120 bp, Artificial Sequence
  ENSG00000223891_38 (sequence is synthesized)
agaaaatataaagactcaggcaccttatcatttttatctcctggttagccctgggaggcaggtactattatttatccccattttacagatgaggaaactgaggctcagagaggaaaatag

SEQ ID NO: 890991 - DNA, 120 bp, Artificial Sequence
  ENSG00000223891_39 (sequence is synthesized)
cttgctgctttcacacaggtcagaaggatctatgccggatttgagcccaggtctttctgattgcaagctgaaggcggtcttgtctttgggatactcagttgaggggcttggcctttgcct

SEQ ID NO: 890992 - DNA, 120 bp, Artificial Sequence
  ENSG00000223891_40 (sequence is synthesized)
cagaagcattcgacttggcccctgtccttgaggatgtcccctggcagcatttggtaaaggtgttgcggagcgcctaggagccacactgcctctgagaagccctgcctcagatgcccaccc

SEQ ID NO: 890993 - DNA, 120 bp, Artificial Sequence
  ENSG00000223891_41 (sequence is synthesized)
ctctgtgtggccttgggcacactgcccaagcccctgtgcccagtttactcctctgaaaaatggggatgatgatagtaatcgtaggacttcccttagagggctaggagaggatgaaatgac

SEQ ID NO: 890994 - DNA, 120 bp, Artificial Sequence
  ENSG00000223891_42 (sequence is synthesized)
gaaatgactaatgtggtagaacactgcccggctcatagcatctgatatggcttagatatttgtcccctccaaatctcaggtcaaactgtgacccccagtgttggaggtggggcctgatgg

SEQ ID NO: 890995 - DNA, 120 bp, Artificial Sequence
  ENSG00000223891_43 (sequence is synthesized)
tgggtcatgggggtggatccctcaggaatggcatggtgccctcccatggtaatgagttcaccccaggcccatttgttagagcctggtacctcctgcctcctccctcttgcttccctctct

SEQ ID NO: 890996 - DNA, 120 bp, Artificial Sequence
  ENSG00000223891_44 (sequence is synthesized)
ggccgtgttatctgtgcaggccggctccgcttcacctcctgccatgagtggaagcagcctgagacactcactagaagccaggcagatgctggtgccatgcagaactgtgacccaagcaaa

SEQ ID NO: 890997 - DNA, 120 bp, Artificial Sequence
  ENSG00000223891_45 (sequence is synthesized)
cttcttttctgtatacattacccagtctcagctattcctttatagcatcgcaaaacagactaatatagcatccaacaacattagccactgctactattatcattagtattttaagtgtgt

SEQ ID NO: 890998 - DNA, 90 bp, Artificial Sequence
  ENSG00000223891_46 (sequence is synthesized)
ttagccactgctactattatcattagtattttaagtgtgtgcattttaattgctggtacactgtgtgaactggccgaactgtaatctcca

SEQ ID NO: 890999 - DNA, 120 bp, Artificial Sequence
  ENSG00000223891_47 (sequence is synthesized)
ggggcatattcctcatgcttggcttagcgccatcctgtggtgatgagtgagctaatgggagatctgattgtttaaaggtgtgcggcacctcccctctctcttgttcctgctcttgctatg

SEQ ID NO: 891000 - DNA, 120 bp, Artificial Sequence
  ENSG00000223891_48 (sequence is synthesized)
tgacacacaggctcccctttgccttccaccatgactgtaaattccctatggcctcaccagaagcagatgccagcaccccacttcctatacagcttgcagaaccaagaacaaattaaactt

SEQ ID NO: 891001 - DNA, 120 bp, Artificial Sequence
  ENSG00000223891_49 (sequence is synthesized)
gttttctttataaagacagactcaggcatttatttgtatcagtgcacaaacagcctcatacactgggcatacgtgttatatcctgctttccttcaatttactattagcgtttttatgtca

SEQ ID NO: 891002 - DNA, 120 bp, Artificial Sequence
  ENSG00000223891_50 (sequence is synthesized)
caaactattcctcaaaacattattttaatgactgtataatagtccatcatttaaatatattcataacttattctgtagttaaccatccacccgtttctggacaattaggggtgtgtgtgg

SEQ ID NO: 891003 - DNA, 120 bp, Artificial Sequence
  ENSG00000223891_51 (sequence is synthesized)
gtgagtaggcgtcattcttcacagtagtcctctgcctccaccgccccgggatctccttgcgctcggtcctctacgtggagtcacctatgcagaggaattccacggggcgggggcgaggac

SEQ ID NO: 891004 - DNA, 120 bp, Artificial Sequence
  ENSG00000223891_52 (sequence is synthesized)
agggtgcgggggtctttatggcagacaatccccggctgagcgcttggccagagtttctgtgatgctagaatctggactgcctgcgacctctccgggactcggacaccagccctcgcctcc

SEQ ID NO: 891005 - DNA, 120 bp, Artificial Sequence
  ENSG00000223891_53 (sequence is synthesized)
gaattctcattttacctgctttccatccctaattatattaaataccaaaaactaaaaagttacagtatttcattttatgtaagcacatctccatcataaagagttagatgctttccaaga

SEQ ID NO: 891006 - DNA, 120 bp, Artificial Sequence
  ENSG00000223891_54 (sequence is synthesized)
atgtgactcattactcggggagtacttggaaggtgggaacctcttgtgaatgctgaagcctgttaactcacacacctgacgtggcctgaagttttaagtcattatacataggactggctc

SEQ ID NO: 891007 - DNA, 120 bp, Artificial Sequence
  ENSG00000223891_55 (sequence is synthesized)
acggtgtgatacatcatgacttggaaagagatagaaaagctacaaaatgggatggatctgagtgaacaaaaagccagatcggtgtcctataccagcaattccaagtctttttaaccatgg

SEQ ID NO: 891008 - DNA, 120 bp, Artificial Sequence
  ENSG00000223891_56 (sequence is synthesized)
gaaaaaaacctgaatttgtgtgtggactttatattgaagaaatcaactttgtattaatgcacatggtaatgccatttaattaaaaagctgtggtagatgtaaaattcctctaacagtgct

SEQ ID NO: 891009 - DNA, 120 bp, Artificial Sequence
  ENSG00000223891_57 (sequence is synthesized)
tctttcttgctacaagtgtcttgtacatgctttagtaagagagacttaattccatgaatttatactgcaagaacaatttatataggaagataatagtttctcttaaaaaataactttgga

SEQ ID NO: 891010 - DNA, 120 bp, Artificial Sequence
  ENSG00000223891_58 (sequence is synthesized)
gaagccaagtccaaagtaataaagaaaattatttgcctaaccatgtggctgccatcctaccagttggtaatctggaaaatattctgttcttatgttttaagactcaaattaatttatttc

SEQ ID NO: 891011 - DNA, 120 bp, Artificial Sequence
  ENSG00000223891_59 (sequence is synthesized)
gtgaaaccccatctctactgaaaaataaataaataaatatacaaaaattagctgggagtggtgggcacacacctgtaatcctagctacttggaggctgaggcatgagaagcccttgaacc

SEQ ID NO: 891012 - DNA, 120 bp, Artificial Sequence
  ENSG00000223891_60 (sequence is synthesized)
gactttgggatagaagatagtgataatgattatttgtcttgatttacaagatgttagctcatgtaatcttcataaccaatttgtgaaatgtacttctatgatgtctgttttacagctgag

SEQ ID NO: 891013 - DNA, 120 bp, Artificial Sequence
  ENSG00000223891_61 (sequence is synthesized)
gaaactaggctcagaatagttagataacttgtccaaggttacatagtttgtaagtggtagaacggggattccaatctaggcagtctgactatagcaccctgctgaccgctgagttacact

SEQ ID NO: 891014 - DNA, 120 bp, Artificial Sequence
  ENSG00000223891_62 (sequence is synthesized)
gctttccttagcctccccaccttcacctcctgtatgtacccagctagaccagggatacctgctttcacctggaaaataccactgggtttgaggaaattggctgcccagggcctaggactg

SEQ ID NO: 891015 - DNA, 120 bp, Artificial Sequence
  ENSG00000223891_63 (sequence is synthesized)
ttccagccactctttctttgcatatatttgaacccagcaggcatatttccctctcaggtcttttgtatgtatttcccctcctggagcattgtttactcacagttcatcttgtcattcaaa

SEQ ID NO: 891016 - DNA, 120 bp, Artificial Sequence
  ENSG00000223891_64 (sequence is synthesized)
gctttatcatagcacttgtcactacctgacaatgtatagttattttttggtcccctcactagaatagaagctacccgaggacagggactttgtgtcttttttttagtcactatttttttt

SEQ ID NO: 891017 - DNA, 120 bp, Artificial Sequence
  ENSG00000223891_65 (sequence is synthesized)
aatcaaagatgcacattttcccacaatttattaatagcggttagaaaatctgaatgtgtcttataatcgccagtgtgtcctggtttaattggtagtatttttttctttcttacttgttcc

SEQ ID NO: 891018 - DNA, 120 bp, Artificial Sequence
  ENSG00000223891_66 (sequence is synthesized)
tacagtaagtggtgagtctttaaaatgatggtgtcttagaattgatgaaaatacagtgtatccccaaggcctgaactctatgtggcacatagttggctctcaataattacttgttaaagg

SEQ ID NO: 891019 - DNA, 120 bp, Artificial Sequence
  ENSG00000223891_67 (sequence is synthesized)
ccgtttaaagtctccggcaacacactaataaattgcttcaaaggaaagttctcaaccgttactctcagcagtgtgtgtattagggccatcctcaccacaccctttcaggtagcgagatga

SEQ ID NO: 891020 - DNA, 120 bp, Artificial Sequence
  ENSG00000265912_0 (sequence is synthesized)
aaaatgaacgtctgagatttaatcagaaaaccattggtcaataactgttttaaaatcactgaaatacaaatcatctgacatatgttgtttaccttaagtatatactcattttgtaaattt

SEQ ID NO: 891021 - DNA, 120 bp, Artificial Sequence
  ENSG00000265912_1 (sequence is synthesized)
acacacacacacacaaacacacacacaagcactattcccagctttctcttcatggagtaatttaatttattccattttaaaaatcttagactcagaaaataataaataattaaggaatat

SEQ ID NO: 891022 - DNA, 120 bp, Artificial Sequence
  ENSG00000265912_2 (sequence is synthesized)
cagaaaataataaataattaaggaatattatagaaccgattacatgatttcagtaagctaaaaatgttcactctgtatttctcactatatcaatgagattctttattatacaagtgtaac

SEQ ID NO: 891023 - DNA, 120 bp, Artificial Sequence
  ENSG00000265912_3 (sequence is synthesized)
agctcttaagagcaattagttaagtaaaattttgtcagaagatatgaggattactctcttatttaaaaaaagtaacttgccaacaaacaggcatgattgaattagagaagcttcagtttt

SEQ ID NO: 891024 - DNA, 120 bp, Artificial Sequence
  ENSG00000265912_4 (sequence is synthesized)
ttgtgaccctgctcctgaagtgaaacttggatcctaaacaccaaatggtgggttcacctgccatgatacatgacatttgttttatcaaacagcataaactccgttaaagatgttccttga

SEQ ID NO: 891025 - DNA, 120 bp, Artificial Sequence
  ENSG00000265912_5 (sequence is synthesized)
aaggtctaacttcatgtataccctgccatcagagctgatctaccatagatagactaacaaataccaaccgaatacaatctaatgcacaaaggacagaaaaataaattacattttccccca

SEQ ID NO: 891026 - DNA, 71 bp, Artificial Sequence
  ENSG00000265912_6 (sequence is synthesized)
aatgcacaaaggacagaaaaataaattacattttcccccaagtttacaaaattgattgctcattaagatgt

SEQ ID NO: 891027 - DNA, 120 bp, Artificial Sequence
  ENSG00000265912_7 (sequence is synthesized)
gccactgcactccagcctggtgacagggcaagactctgtctaaaaaataataataaaataagaagatgtttatatgtacatcttaatttaattcactatctcagattatttttaaatttg

SEQ ID NO: 891028 - DNA, 120 bp, Artificial Sequence
  ENSG00000265912_8 (sequence is synthesized)
tcactatctcagattatttttaaatttgcctttaagcttaatggaaaattcccctgaactgtggtataatttgagttcaaaatgtattaatcatatccaaatcttcatcttgaattagga

SEQ ID NO: 891029 - DNA, 120 bp, Artificial Sequence
  ENSG00000265912_9 (sequence is synthesized)
ggtaagcctggacatgataaagtaggttgtaaaaatttagaatttttaatcccagtaatcaaatcagcattctaggaaatcaagtatgatatctattgaaagggtgatgacacctgaatt

SEQ ID NO: 891030 - DNA, 120 bp, Artificial Sequence
  ENSG00000265912_10 (sequence is synthesized)
atggtattatgcttttatagccagcttctgaaactgtaatatcactgagtatcacagacaagacacaataataaggttacccgcagagaaaaggtaaaatgccttgtaaatttaactttc

SEQ ID NO: 891031 - DNA, 120 bp, Artificial Sequence
  ENSG00000265912_11 (sequence is synthesized)
tagattttcaagtttcaagtttttgtactaaatactaaagttgtactaaagttgaagccttatgttcagaaatgttcctgtatctaaaaaataagcttatggcatttccccataaaacac

SEQ ID NO: 891032 - DNA, 120 bp, Artificial Sequence
  ENSG00000265912_12 (sequence is synthesized)
atttctaagtcccaagatggagtaattagagagatgtttctgcatggaattctataaattgtcacacctgtttagttgaacaatgaatgaaaatatgcagacttgaacagaattcaagaa

SEQ ID NO: 891033 - DNA, 120 bp, Artificial Sequence
  ENSG00000265912_13 (sequence is synthesized)
attattaaaagacttacactttaccagcagaaattacttaatataggaaaaacatcagtcatttttcagggagtcatcaagggatttttaaatcactaaaaatgacaaataagaagcgga

SEQ ID NO: 891034 - DNA, 120 bp, Artificial Sequence
  ENSG00000265912_14 (sequence is synthesized)
aaattatcacaattatataagcagtattactgcgatgtacagaacatctgtcaccagtgatagccattcaacattctacaaggggagccaattgacgcattcaatattacaaggctaaaa

SEQ ID NO: 891035 - DNA, 120 bp, Artificial Sequence
  ENSG00000265912_15 (sequence is synthesized)
gcagttattactttttttcacttttaaaacaaaacgcaatcatgtaattttcagttagtataaaaattgaatgcaccctgagtcaaaaataagcaggtatcatattttccatatggccat

SEQ ID NO: 891036 - DNA, 120 bp, Artificial Sequence
  ENSG00000265912_16 (sequence is synthesized)
ttgtagcaaatcatacatttcatttttgagaaatggtatatttttcaaagtatttttctgtgtgttaataaaacatggagagaaagctgtgattctttctttctatacatggcaataaga

SEQ ID NO: 891037 - DNA, 70 bp, Artificial Sequence
  ENSG00000265912_17 (sequence is synthesized)
agaaagctgtgattctttctttctatacatggcaataagagtgtacaatactcagtcggtggatcatgag

SEQ ID NO: 891038 - DNA, 86 bp, Artificial Sequence
  ENSG00000265912_18 (sequence is synthesized)
ctctctctatgcaaggcaattatctataaaccctgtgacaagactggtagcctcaattctcctaagtaacataaacataactcata

SEQ ID NO: 891039 - DNA, 120 bp, Artificial Sequence
  ENSG00000260398_0 (sequence is synthesized)
cacaggcagtaatgaccaaacagagaccaaggtggagctcaagagaaagtaagcatcaaacagcactcagcctgaatccaggcacgttcttcagtccaaaaagcaaaggggatgtaaata

SEQ ID NO: 891040 - DNA, 120 bp, Artificial Sequence
  ENSG00000260398_1 (sequence is synthesized)
cttaagttcatcttactcagatcgcaagaataaaacaccacatagggacttgggaccaacaaaatgctaaccagtgaaataagttgtagagcctctagtgtctctactcattgtgtattt

SEQ ID NO: 891041 - DNA, 120 bp, Artificial Sequence
  ENSG00000260398_2 (sequence is synthesized)
cttgtatctgtctaattcaggtgtggggattcaggatccttttcatctttaatactaaagtcaaaattaacaaaattatatgactataacctattaactttctaatttgcaccacatctt

SEQ ID NO: 891042 - DNA, 120 bp, Artificial Sequence
  ENSG00000260398_3 (sequence is synthesized)
ctttctgattgggttaatatgggtgcttcctcagcaaccttcctgctagtctggactctattgttcatctttctcctaggtgctcctcaggttccacattttcttgcctttctgccatct

SEQ ID NO: 891043 - DNA, 120 bp, Artificial Sequence
  ENSG00000260398_4 (sequence is synthesized)
ctgccccatcaaagtcaattaggccactcacttctctttacttgtcttctggatgactgtaaaaagtttaaaacaatgcttattcattgtctgcaacctcaatctagacataagtgctgc

SEQ ID NO: 891044 - DNA, 120 bp, Artificial Sequence
  ENSG00000260398_5 (sequence is synthesized)
acagctctctcttttcatgtccctggggacagaggaatcttcccactttcaggctaagatttattccttcatttgatgtttttaaaccactttattctgactttaacaggatgtcttaat

SEQ ID NO: 891045 - DNA, 120 bp, Artificial Sequence
  ENSG00000260398_6 (sequence is synthesized)
tatcctttttctttactgactttaccctttttcacaaatgtgctcaagttttcaatttcccatttgcttcatcacttctgtttctcaaaatagtaatgtatactccctattttcatgctt

SEQ ID NO: 891046 - DNA, 120 bp, Artificial Sequence
  ENSG00000260398_7 (sequence is synthesized)
cttctcctccttatttcttattcttttgcaatttggcttccaataaaatttttctcattatcaatgacatctttagtagctcatcgtctctgccatagtcattgaatctctgaccaatgt

SEQ ID NO: 891047 - DNA, 120 bp, Artificial Sequence
  ENSG00000260398_8 (sequence is synthesized)
ggaaattaaaaggtgatgatgattcagaggactcagattaacctaaaataaaatttaatgtttttatatttttaattgatactagtatgacagagtatcactgaataatatagtattttt

SEQ ID NO: 891048 - DNA, 120 bp, Artificial Sequence
  ENSG00000260398_9 (sequence is synthesized)
caactatatagaatcgacatatatcaagaaaacgtcagctttctctctagtatagaacttccataatgtatggatatgtccttgctctatgaccacagtctccccgtaatgtttgcttgc

SEQ ID NO: 891049 - DNA, 120 bp, Artificial Sequence
  ENSG00000260398_10 (sequence is synthesized)
tatgtactcagatcctatagtgctcatttctttataggagtggttgtcacatatctgggcaccaacacagagcctagacattcatagatgggcaagattactttgtgatgttgtaaagtt

SEQ ID NO: 891050 - DNA, 120 bp, Artificial Sequence
  ENSG00000260398_11 (sequence is synthesized)
ctgtgttccattctactcttggataaatgttagtgatatcacttgttcctctcaacagcagccatatatgtgtaaaatcccagtcttgctctacttctctgaattatacctaaacaaata

SEQ ID NO: 891051 - DNA, 120 bp, Artificial Sequence
  ENSG00000260398_12 (sequence is synthesized)
tatctacccgaaatagagtggatcatttttgtatattttattagcttactcaatgacatttaatctggttcaccatggaatctttttgatatgcttcatttgccttcctttttcttccag

SEQ ID NO: 891052 - DNA, 120 bp, Artificial Sequence
  ENSG00000260398_13 (sequence is synthesized)
atgttttttatttagtgagttcttgtttgtttctctctgacacctcctcactaacctaagactggttcctccttgtctacctctccactaaatttcatggttccctgggtttccattctc

SEQ ID NO: 891053 - DNA, 120 bp, Artificial Sequence
  ENSG00000260398_14 (sequence is synthesized)
attcctctcctctaatctctctctccagatgacttcctccactcccacatcagcaactatattcctatggcgaatctcatatcttgatctctagcccaggagtcactcctcattatctga

SEQ ID NO: 891054 - DNA, 120 bp, Artificial Sequence
  ENSG00000260398_15 (sequence is synthesized)
atcttaaaattcaatgttctaatactaaatccaatgcataatcccattttcaaacctgcttttccttatatgctacagatttcagatcatggtagcactgattttccactgaccttaaat

SEQ ID NO: 891055 - DNA, 120 bp, Artificial Sequence
  ENSG00000260398_16 (sequence is synthesized)
caaaatttttggagcccttttagctgttacctcttcctctgatttgtgtgtttgtttgttttttggtcaatcgattctaattcttcactactgaaactgttcacttctttttatctgcac

SEQ ID NO: 891056 - DNA, 120 bp, Artificial Sequence
  ENSG00000260398_17 (sequence is synthesized)
tccaacccttaaatcattacttatctattattatgcaatggcctgctcagcatgacctgcctcatccagcactctttctagccatcttgccaccagatgtattgctctgatacatgattt

SEQ ID NO: 891057 - DNA, 120 bp, Artificial Sequence
  ENSG00000260398_18 (sequence is synthesized)
tgatcatgtatctctcctaattaaaaaatccttaagtttagccagacaaactttacggtataagtaccacattgtatttgtgtataactccttgctctgtgttagcttttatcctgttcc

SEQ ID NO: 891058 - DNA, 120 bp, Artificial Sequence
  ENSG00000260398_19 (sequence is synthesized)
taaaatgtgcttcatgcttgtgggcaaagtctcattgatcctttcagactaagcctcatttcatccttttcggtagtctttctgactcatctccattcccgagccctaccctaggaaatc

SEQ ID NO: 891059 - DNA, 120 bp, Artificial Sequence
  ENSG00000260398_20 (sequence is synthesized)
agccattctatactccttgctctctaacaatttatccacaaatggatctctatatcatagctatttatttgcatgcatatctctccaccttgagtgtgagctttttgagggcatcaactc

SEQ ID NO: 891060 - DNA, 120 bp, Artificial Sequence
  ENSG00000260398_21 (sequence is synthesized)
cgttttattcatctttgtatactcactgtttatctatgtaggttattgctaatcagtacaaacatcagtagatatttgtaaataaataatatctgccctcctgaagctcataatgaagtt

SEQ ID NO: 891061 - DNA, 120 bp, Artificial Sequence
  ENSG00000260398_22 (sequence is synthesized)
aagagagagaatctacacatagatcgattagggaaaatgcaattcagagataaaattcatggttgaaaatagtgacgtctcaagaatattgcattgcagaggataaaaacttaattccta

SEQ ID NO: 891062 - DNA, 120 bp, Artificial Sequence
  ENSG00000260398_23 (sequence is synthesized)
tcaccattttttttagtttatacaagagtaactattttaaaatttctattgcaaactggtgtgctgcatttgtacacacacacacacacacacacgcacaaagatttgataagacataga

SEQ ID NO: 891063 - DNA, 120 bp, Artificial Sequence
  ENSG00000260398_24 (sequence is synthesized)
gaaatgagatgtccaataggacaacacgtaactagatgggcaaattaaggtaagccatccagctaaataagcctttggtaaatttatttctgggaattctgtagcaggaattatcttcag

SEQ ID NO: 891064 - DNA, 120 bp, Artificial Sequence
  ENSG00000260398_25 (sequence is synthesized)
tttgctggaattaagatgagccaaaagggggttatatcttactcttttggcctaagcaatacattgttcagagaggaggatctccaggaaggatcttgcaggccttgaacaaaagttcac

SEQ ID NO: 891065 - DNA, 120 bp, Artificial Sequence
  ENSG00000260398_26 (sequence is synthesized)
tggagtttctgagaatatgccttacagaaatgcactcaaacagcctaaagaaatgagagttctaataacaatagaataaacctcagtgtcaggaattcacagaaaaaagggggaaaaatt

SEQ ID NO: 891066 - DNA, 120 bp, Artificial Sequence
  ENSG00000260398_27 (sequence is synthesized)
gtagaaagggattaagaaacacatttttatatactcaagaaagaaagctcactgatatacatgtatagaaccttaaagaccttttcctgaatagtgttatcttttaaaaaaacactggta

SEQ ID NO: 891067 - DNA, 120 bp, Artificial Sequence
  ENSG00000260398_28 (sequence is synthesized)
ataaaattaactttggagatctaacaagactaaagaagtactgtgaacttttggactctgaaactaagaaaaagactgacaaaggtgatgatgtaggttactgctaatagaacatgttta

SEQ ID NO: 891068 - DNA, 120 bp, Artificial Sequence
  ENSG00000260398_29 (sequence is synthesized)
aactttggctgccatgattcattttacaccttgtttgagtaggatggtgtgactattatgactgtcctgttgaatttctaagttttcttttatcccatatcctctttgaaattcacaagc

SEQ ID NO: 891069 - DNA, 120 bp, Artificial Sequence
  ENSG00000260398_30 (sequence is synthesized)
caagatataatcatgaagttttaagggtaaaaaaacctattctgccttctcagatagtcctaaatacaattcaacaaatcatcaaatttgtctaggaaataaaatttgagcatttactaa

SEQ ID NO: 891070 - DNA, 120 bp, Artificial Sequence
  ENSG00000260392_0 (sequence is synthesized)
tagaaggagaatattgaatattcccaacacaaagaagtgataaatgtttgagatatgaatatggtaattaccctaatctgatctctatatattatatcattgaaacatcacaatgtacct

SEQ ID NO: 891071 - DNA, 120 bp, Artificial Sequence
  ENSG00000260392_1 (sequence is synthesized)
acaaatatgtacaattattacttgtcatttaaaaaaataaaaaattgagtaggttaaactggcttattattgcaaactgccagagtatatttagccattccttggcatttgatcatttgg

SEQ ID NO: 891072 - DNA, 120 bp, Artificial Sequence
  ENSG00000260392_2 (sequence is synthesized)
agcattttcagttagtttttttaatgttcagacatacacagctataatatgttggcacagtaatcatacaaaccctctcttcccccatttcaacttacttcttgggatatattctcagga

SEQ ID NO: 891073 - DNA, 120 bp, Artificial Sequence
  ENSG00000260392_3 (sequence is synthesized)
atattattatcagaaagagcatgatgaaaatattggatcgtggtggctattttattttgtctaggatgttttcccatttcctgtcttcttgttcacctcccttttcttcaggaaatgcac

SEQ ID NO: 891074 - DNA, 120 bp, Artificial Sequence
  ENSG00000260392_4 (sequence is synthesized)
aaggaggagtgtggtccagggagtggtcatttatagtgctcaccttcactggatgggctcctcattctcctgtattcctctgggaaatgactgatttgtcagtgttgggggaaggacatg

SEQ ID NO: 891075 - DNA, 120 bp, Artificial Sequence
  ENSG00000260392_5 (sequence is synthesized)
tgacctgagtctgtccaatcagtgtccatgttggagagggaaagattcagtcctctgtttctcttggatcttgagatataggatgcaggccttagatggtcaacagctcagtcttcaatg

SEQ ID NO: 891076 - DNA, 120 bp, Artificial Sequence
  ENSG00000260392_6 (sequence is synthesized)
tcaatttgctgtcctgaaagattactcatttgcaatgtcactagcaggggatgagtcaaccgacatccccattgccccacatacatggttttagaatttttaaattgcctttactaattt

SEQ ID NO: 891077 - DNA, 120 bp, Artificial Sequence
  ENSG00000260392_7 (sequence is synthesized)
aatacgtatgagggtcatctaagtttagaattctggacctatgtatacatgtgctatgttatatatatatatatatatatatgaaagaaatacatcagcttatcttaaccgttcatcatt

SEQ ID NO: 891078 - DNA, 120 bp, Artificial Sequence
  ENSG00000260392_8 (sequence is synthesized)
aaaatggttggaaaaaaaagaattctggacctatagcccatcttgtcacatattgcttttctcagactccttcagaaatgcaacacagaggactctagcccaacgcataatctacactcc

SEQ ID NO: 891079 - DNA, 120 bp, Artificial Sequence
  ENSG00000260392_9 (sequence is synthesized)
aaactgaagtttctccttcaaactttgtctgctttaccatcctgatgagcttgccttcacattaactcaatgacccatgttgccctgttcaccgaaatcctgaaaccaacactgaggtag

SEQ ID NO: 891080 - DNA, 120 bp, Artificial Sequence
  ENSG00000260392_10 (sequence is synthesized)
tcctggagcctggctgtggctctgcccaactttcctgagccacctccactccttgctactactggtcacagtggagagatacacagaggacaacaggcaaggaaaaaagagagctgaaga

SEQ ID NO: 891081 - DNA, 120 bp, Artificial Sequence
  ENSG00000260392_11 (sequence is synthesized)
ttatcattatttcctcactcttttcatcaaagatattatctcctggtcctgaaatagtaaaaccatgcaagcaagaaaagcatgtggtgaaatatttaaagaattgaaaggaaaaaaaaa

SEQ ID NO: 891082 - DNA, 120 bp, Artificial Sequence
  ENSG00000260392_12 (sequence is synthesized)
aatgaactgtttgtacctatatactatgagaaaaggaacctatactggactgaacaaccaatccagtgttttaaggaagaaactataaattttttttaccccatgaatttttaaagaact

SEQ ID NO: 891083 - DNA, 120 bp, Artificial Sequence
  ENSG00000260392_13 (sequence is synthesized)
tttcctcactcttttcatcaaagatattatctcctggtcctgaaatagtactgctccttgacaccctcctgagataccagacaataaaaaatgtagattttaaaaagtaaccatcacctt

SEQ ID NO: 891084 - DNA, 120 bp, Artificial Sequence
  ENSG00000260392_14 (sequence is synthesized)
gagtagtggtattcaaagtagcaggtcaatgaactgtttgtacctatatactatgagaaaaggaacctatactggacttgttttaaggaagaaactataaattttttttaccccatgaat

SEQ ID NO: 891085 - DNA, 120 bp, Artificial Sequence
  ENSG00000260392_15 (sequence is synthesized)
ttttaaagaactattctaaacatttgttgaaagaaactaacaagagatctgagaataaaatacctgggaataaatttaaccaagaggtgaaagacctggacactgaaaactacaaaaaat

SEQ ID NO: 891086 - DNA, 120 bp, Artificial Sequence
  ENSG00000260392_16 (sequence is synthesized)
tgctggcagaagttaaagaggaacgaattaaatgaactttgttacttcacttcactaatgtgtcaaattgaagaactccttttatcgtgtcttgtaaaacaggtctggtgttgacaaaaa

SEQ ID NO: 891087 - DNA, 120 bp, Artificial Sequence
  ENSG00000260392_17 (sequence is synthesized)
tccctcagctcttttttgtttcggaaagtctttatttcttcttcatgtttgaatgataattttgctgaacatattctagactccttcagaaatgcaacacagaggactctagcccaacgc

SEQ ID NO: 891088 - DNA, 120 bp, Artificial Sequence
  ENSG00000260392_18 (sequence is synthesized)
cctggtcctgaaatagtaagacagccccattctaaggcaggatgcttggcagtggccctctccccgtgacagatacagaaaggtgatagacactttacaaacatgcttcttaagaagaaa

SEQ ID NO: 891089 - DNA, 120 bp, Artificial Sequence
  ENSG00000260392_19 (sequence is synthesized)
aatactacggtcaccaaaaataaataaattatatacacagctttgggatcaagctgctccttgacaccctcctgagataccagacaataaaaaatgtagattttaaaaagtaaccatcac

SEQ ID NO: 891090 - DNA, 120 bp, Artificial Sequence
  ENSG00000260392_20 (sequence is synthesized)
cttatgctttataataagccacaattttgtgctgttcttattctattaaagacaatcgctacaatatataaacatggttagaaaccatgcaagcaagaaaagcatgtggtgaaatattta

SEQ ID NO: 891091 - DNA, 120 bp, Artificial Sequence
  ENSG00000260392_21 (sequence is synthesized)
aagaattgaaaggaaaaaaaaatctacctagaagtttgtacccagtgaaattatcctccaaaagtgaaggaaaaataaagactttatcagaaaaaagaattgatgtagacctaccttgca

SEQ ID NO: 891092 - DNA, 120 bp, Artificial Sequence
  ENSG00000260392_22 (sequence is synthesized)
aagaaggattacaagaagttcttcagagaggaggaaaatggtgtaggtcagaaacttgggtctgcataagcaacagggagcatcaggaaagaagttaggttgtcaataaaagagccacga

SEQ ID NO: 891093 - DNA, 120 bp, Artificial Sequence
  ENSG00000260392_23 (sequence is synthesized)
gagagagagaagagaacttgaagagacaataaaggacacaatttgctgctttctgaatcactgatgaatctgagtcagttaaggtataaatgcttcaaaaataaatagtatgaatggcaa

SEQ ID NO: 891094 - DNA, 120 bp, Artificial Sequence
  ENSG00000260393_0 (sequence is synthesized)
gacaactcaagttgccccaagtcctggtggtaggccaacacccttacaattccagaaatgcctccttatcagctgaaagctccagcccattgacaactgctttctgaattgtgaggacgc

SEQ ID NO: 891095 - DNA, 120 bp, Artificial Sequence
  ENSG00000260393_1 (sequence is synthesized)
tctcagcctcaaagctaatagagttaaaccagctgctcaatttaaagaggaactgaagcagtgagatgttactgtattctgagatggggctaataaactttaatagatttcagctaacaa

SEQ ID NO: 891096 - DNA, 120 bp, Artificial Sequence
  ENSG00000260390_0 (sequence is synthesized)
ttatcactgagaagtggctgctcattcatcgactacatttccaaaaccctcctgcagttagctgtggccatgtaactgagttttagcaaaagattgtgagcaaaagtaatgtgtgccact

SEQ ID NO: 891097 - DNA, 120 bp, Artificial Sequence
  ENSG00000260390_1 (sequence is synthesized)
ttaaagcttggccttgagaactctcaggaaacgctaagctctttgacccttctcactgcttggaatggtggattcccaaggagaatctggaagatttttcttggattttatttccctttc

SEQ ID NO: 891098 - DNA, 120 bp, Artificial Sequence
  ENSG00000260390_2 (sequence is synthesized)
aatggcctactctcagtgttggtgtctgagcttcctctgtgtggaacagaagatttttaaacctgtatatttatagcaaacaatgaatctctaaatagttcttcagatcttgaagtgttc

SEQ ID NO: 891099 - DNA, 120 bp, Artificial Sequence
  ENSG00000260390_3 (sequence is synthesized)
ccacttattaattaatttgagaaggttttgccagatctgagggagattttcatattttttcttctcatatggcaaagaagttctcaggcctatgaatttatagaaagaaagtgaaatctg

SEQ ID NO: 891100 - DNA, 120 bp, Artificial Sequence
  ENSG00000260390_4 (sequence is synthesized)
gcaagatcatcagagactgtttaattgggatttttgtgcttcagaaaacaagaaaatcaagctcagagatgaaatcaggtcttccaaacctcctgaaaggagtctccctgttctatattc

SEQ ID NO: 891101 - DNA, 120 bp, Artificial Sequence
  ENSG00000260390_5 (sequence is synthesized)
aggaaggcattggtcacattgaggtccttttgggattctctagttttcatgtttcagtggtagacaagggagtgtttgaagcatcaagagcattttcagtgtcactattctctgtcttaa

SEQ ID NO: 891102 - DNA, 120 bp, Artificial Sequence
  ENSG00000260390_6 (sequence is synthesized)
ctctcctgaagcaccaaccatgatcaagcttgcagtctgagtgtaagatgtagaaggagacagaaatgaaatgcagttacccaagaaatatttaaatacaattgtattaaatactgtgat

SEQ ID NO: 891103 - DNA, 120 bp, Artificial Sequence
  ENSG00000260390_7 (sequence is synthesized)
ggagagatacagactactgcgagtgtgtatataaaaacggggggtcctgatctggtcaggtggaatggggaaagcttccaggaggaagacaaatttaagctgagacctgaagggcgatta

SEQ ID NO: 891104 - DNA, 120 bp, Artificial Sequence
  ENSG00000260390_8 (sequence is synthesized)
tcccctagtgactggaatgtagggtttgagaccttgggctcaaagactgactgcctgaacaaaattctctcctttaccacacttttagctctgttttctgtgggcaagacactgaagttt

SEQ ID NO: 891105 - DNA, 120 bp, Artificial Sequence
  ENSG00000260390_9 (sequence is synthesized)
tctgtttctccagccctttgtatgaaattagggaataatactattaaggtattgtgctcttaaaccattatcacacaattttgataatcccatgtgaaacttaaatgcaataatgcatgt

SEQ ID NO: 891106 - DNA, 120 bp, Artificial Sequence
  ENSG00000260390_10 (sequence is synthesized)
aaagcattttaacagtgccaaacactcagtaaacaatcaacaaatattggctattattattgcaggattctgcagcttacaaaacattttcataggcatcatacattatctcatcaccaa

SEQ ID NO: 891107 - DNA, 120 bp, Artificial Sequence
  ENSG00000260390_11 (sequence is synthesized)
tgctttcctatagtactagttctcgggacacttcctctgctgatggtactatgattctatttggagaaaataagcaaatgctgtgaacccctttttagctttattaggggctaggagtat

SEQ ID NO: 891108 - DNA, 120 bp, Artificial Sequence
  ENSG00000260390_12 (sequence is synthesized)
tctgtgggagaatcgagacagagcttgggtctcggagtccccaagtatattcaagaatcctcctatgtagactggaagtttaccaatacttaaaattctagcagtgtcttagatgaatag

SEQ ID NO: 891109 - DNA, 120 bp, Artificial Sequence
  ENSG00000260390_13 (sequence is synthesized)
aggcacacatttaaaggactaggttacattaaggattttgaaaacatgacatttatggtttaactgctcctcaggaatcatgtcctcaaactgttcaataatgatgtaagatgggtgaac

SEQ ID NO: 891110 - DNA, 120 bp, Artificial Sequence
  ENSG00000260390_14 (sequence is synthesized)
aaacaatttaagcttcactctaaaataatctcggcgggagcacaatattgtaaacagtcattgctgcatctccattctgtgaagttccctttcattgttgtccatttattcctttaaact

SEQ ID NO: 891111 - DNA, 120 bp, Artificial Sequence
  ENSG00000260390_15 (sequence is synthesized)
aaaagtctttgaccaagttacttagcatcttctaacaattcttaaaagttcttctaaagaaattcagcgtaaggcggtgtgagctattacactgactataaagaatgtcatttctattga

SEQ ID NO: 891112 - DNA, 120 bp, Artificial Sequence
  ENSG00000260390_16 (sequence is synthesized)
aaagagcaaactttccactaaacacatttgaccttcttctatctggtattgtggctcatctgagaatagggatggtggctgtattagttcattctcatgctgctaataaagacgtacccg

SEQ ID NO: 891113 - DNA, 120 bp, Artificial Sequence
  ENSG00000260391_0 (sequence is synthesized)
atgcccttgaaagcaactgctaccttccttctcaagctttatgctctggaaaaaaggacagagaagaacccaacaaccactttcttcacttgggagggcagaagtgagaagaaaatatct

SEQ ID NO: 891114 - DNA, 120 bp, Artificial Sequence
  ENSG00000260391_1 (sequence is synthesized)
tctcataccacaatttatttttcacagcctcacaggaatctaagagacaaattaaatgcacaggcaaattaaatgcatagaaatgaattggactgctcatttttggaggacaaaccttga

SEQ ID NO: 891115 - DNA, 120 bp, Artificial Sequence
  ENSG00000260391_2 (sequence is synthesized)
atctttttttttttttttaggtggttaggtcttttaggagttgcatatttgctatcccataacctccatgattagagcccacgagttaggcattacttttttcttgcctctgtggaagag

SEQ ID NO: 891116 - DNA, 120 bp, Artificial Sequence
  ENSG00000260391_3 (sequence is synthesized)
catggcaatttagatttgtgagaatatgagggagcaaatatgatataaactaaattttgcattaactaaaactttgtcccatgcatttaatacaggaggaaattattttgtacgtaagag

SEQ ID NO: 891117 - DNA, 120 bp, Artificial Sequence
  ENSG00000260391_4 (sequence is synthesized)
gtctttgtagtagggcaaagttcaaactcaccatgtccttattcagtatggtcaatgaattgtgctggatgagtttcgaggaatgtagaccttcttcctttctctcctgggtcgcacctc

SEQ ID NO: 891118 - DNA, 120 bp, Artificial Sequence
  ENSG00000260391_5 (sequence is synthesized)
tgtggagtctgggttagacaaatgcaatatgtgacctttcagtgaatttatttataaaactgcaccttgatttttcctcactatttaaagcctagggatgatttgatgatgaatgattaa

SEQ ID NO: 891119 - DNA, 120 bp, Artificial Sequence
  ENSG00000260391_6 (sequence is synthesized)
acccatggtgggcttagagacgacagagctcacacacgctccatcaagaaaaggaaagctactatgttaatatttattttctaaaaatattaaggctctcagttgtttcattaattctaa

SEQ ID NO: 891120 - DNA, 120 bp, Artificial Sequence
  ENSG00000260391_7 (sequence is synthesized)
agggttaaaaagggctgaaatttgtttatagcactaaatgtttttaataggaaatttactcacataaaaaatttaagcagaagtagtagaatacagattatcataaaacatattttctat

SEQ ID NO: 891121 - DNA, 120 bp, Artificial Sequence
  ENSG00000260391_8 (sequence is synthesized)
gaaaggcatttcttcctcatcttcaataaatatgaagaagttagaggagaggaaaaagcaatcactctaagacaacttttcgtctttgagggacattatgataagcctgaaattaatacg

SEQ ID NO: 891122 - DNA, 120 bp, Artificial Sequence
  ENSG00000260391_9 (sequence is synthesized)
cacaggctattgcatttttctgtgagaaatgtgcccctttgctgtgagattctaaaatgtgttcagatttagtttttattcaaatgatcaagataacgcattagttagataactgctatt

SEQ ID NO: 891123 - DNA, 120 bp, Artificial Sequence; identical to SEQ ID NO: 474513
  ENSG00000260391_10 (sequence is synthesized)

SEQ ID NO: 891124 - DNA, 120 bp, Artificial Sequence; identical to SEQ ID NO: 474514
  ENSG00000260391_11 (sequence is synthesized)

SEQ ID NO: 891125 - DNA, 120 bp, Artificial Sequence; identical to SEQ ID NO: 474515
  ENSG00000260391_12 (sequence is synthesized)

SEQ ID NO: 891126 - DNA, 120 bp, Artificial Sequence; identical to SEQ ID NO: 474516
  ENSG00000260391_13 (sequence is synthesized)

SEQ ID NO: 891127 - DNA, 120 bp, Artificial Sequence; identical to SEQ ID NO: 474517
  ENSG00000260391_14 (sequence is synthesized)

SEQ ID NO: 891128 - DNA, 120 bp, Artificial Sequence; identical to SEQ ID NO: 474518
  ENSG00000260391_15 (sequence is synthesized)

SEQ ID NO: 891129 - DNA, 120 bp, Artificial Sequence; identical to SEQ ID NO: 474519
  ENSG00000260391_16 (sequence is synthesized)

SEQ ID NO: 891130 - DNA, 120 bp, Artificial Sequence; identical to SEQ ID NO: 474520
  ENSG00000260391_17 (sequence is synthesized)

SEQ ID NO: 891131 - DNA, 120 bp, Artificial Sequence; identical to SEQ ID NO: 474521
  ENSG00000260391_18 (sequence is synthesized)

SEQ ID NO: 891132 - DNA, 120 bp, Artificial Sequence; identical to SEQ ID NO: 474522
  ENSG00000260391_19 (sequence is synthesized)

SEQ ID NO: 891133 - DNA, 120 bp, Artificial Sequence; identical to SEQ ID NO: 474523
  ENSG00000260391_20 (sequence is synthesized)

SEQ ID NO: 891134 - DNA, 120 bp, Artificial Sequence
  ENSG00000260394_0 (sequence is synthesized)
tgaggaccccagtcgctgggctgccattctggagcgccacgagaggtgctacgggcgagcgcgagcccccgagggcggctggaagccccggactgttggtagagtggaaggggatagaga

SEQ ID NO: 891135 - DNA, 120 bp, Artificial Sequence
  ENSG00000260394_1 (sequence is synthesized)
tcggtggggcgagcgtcctccgtggccagtcctcccctcaccgcccttcctcagaggggcgcttccggccacgtctgcagcagctggtggccaccaatccccctgagctggttgtgcact

SEQ ID NO: 891136 - DNA, 120 bp, Artificial Sequence
  ENSG00000260394_2 (sequence is synthesized)
gttcgaccgccaccttctgcctcctgccagatgtgggggctgcagtcaccgagctgtgtgccctctgcggtgtgggcccaccacagcctcggtcctggcagctggagctccagagatgga

SEQ ID NO: 891137 - DNA, 120 bp, Artificial Sequence
  ENSG00000260394_3 (sequence is synthesized)
tcagatgaggcggtggccacagtgcccggctggccggccccacagtacaccctcagccagtgcctcaggacagtggactccctacctagtggagacagcactgtggacctgggctgtggg

SEQ ID NO: 891138 - DNA, 120 bp, Artificial Sequence
  ENSG00000260394_4 (sequence is synthesized)
gcagaggctgtgcccagacctgctgcccaaccttggccccagcctggccacccacgaggatgctaggccagccaagaagcatggaacccaggccgagtaaacttggccatggcccaggcc

SEQ ID NO: 891139 - DNA, 120 bp, Artificial Sequence
  ENSG00000260394_5 (sequence is synthesized)
tgctcacctgccacagaacctcaggcctccgggtctcactggacggcagggaggctgaagaggaggctggccactacgggagctcaataaacacttcccaaactcacgcctgatcacaca

SEQ ID NO: 891140 - DNA, 120 bp, Artificial Sequence
  ENSG00000260394_6 (sequence is synthesized)
ccgcccttcctcaggtatcgggaagagttgccagcggccatcaggggcagagcagagaagcatgtgacagggagctggagcggctgctggcctggcagcttgactgtgaagggcggcccg

SEQ ID NO: 891141 - DNA, 120 bp, Artificial Sequence
  ENSG00000260394_7 (sequence is synthesized)
ccccgagggcagggcctccgtagcgcgggtcttcattggggcgtggcatcggcggggcgggtgtctccagtgggggcggggcctccctggtgggtccagcaccccaggcaccctgacctg

SEQ ID NO: 891142 - DNA, 120 bp, Artificial Sequence
  ENSG00000260394_8 (sequence is synthesized)
atagggccctgggctgctgggagcagggtctcccagagcttgtcctgatggggtgtgtctggctgcttctcctcgctgttcacagcagtcctggcagctggagctccagagatggaggcc

SEQ ID NO: 891143 - DNA, 120 bp, Artificial Sequence
  ENSG00000260394_9 (sequence is synthesized)
ttcatgtcagatgaggcggtggccacagtgcccggctggccggccccacagtacaccctcaggtactacctgctgtacctgggccaggttcaagagcgggccacagctctgagccaaggg

SEQ ID NO: 891144 - DNA, 120 bp, Artificial Sequence
  ENSG00000260394_10 (sequence is synthesized)
gaatgaactgtgtgtgggcaggttggggtggcccgtgcccctgggcctgagtccgtgtgcccctccctagccagtgcctcaggacagtggactccctacctagtggagacagcactgtgg

SEQ ID NO: 891145 - DNA, 120 bp, Artificial Sequence
  ENSG00000228229_0 (sequence is synthesized)
gggcacccaagtgaaggatcctgctgagtactcaggggctggtgttgctgtcagggatgttagccaagagcctcagcttcctgtaaaatgaggatgatgatgtccaacagcttatgggac

SEQ ID NO: 891146 - DNA, 120 bp, Artificial Sequence
  ENSG00000228229_1 (sequence is synthesized)
tttcaatctcacctccttttcctgataatagagaggcaacaagaactcagggcatgcaatggggctcaacttctactctctgccacaattttatcatgattcccccaaagagcagagccc

SEQ ID NO: 891147 - DNA, 120 bp, Artificial Sequence
  ENSG00000228229_2 (sequence is synthesized)
caggagccagcagggggcagggtgggcatttctggactggattcattcataataagatcaaaatttccaatccgtatgtctcgggtgccatctgctgatagatccgaccagatggtataa

SEQ ID NO: 891148 - DNA, 120 bp, Artificial Sequence
  ENSG00000228222_0 (sequence is synthesized)
cggccgagagagcggagcacgaggaggcgggggcggcagagaagtgatgctggcgccggggatcggggcagcggcagcggagcagcagcatcttcgggaccctggctgcagcgtccctgt

SEQ ID NO: 891149 - DNA, 120 bp, Artificial Sequence
  ENSG00000228222_1 (sequence is synthesized)
cacagatgctccctaaaaggagtgcagaaattttcatcatagggagaatgaagacagtgtgtgacaacctgaaaaagacaagtctttggttatcagaaaaactacctttaaagctaattt

SEQ ID NO: 891150 - DNA, 120 bp, Artificial Sequence
  ENSG00000228222_2 (sequence is synthesized)
tgaaaacagatcatttagataaaataacatggagaagatgaaaagaaaaatcaagtttacaacagattcagagaaccttgaagttgattatgattttaagaataacagaggagccaagat

SEQ ID NO: 891151 - DNA, 120 bp, Artificial Sequence
  ENSG00000228223_0 (sequence is synthesized)
tgcaagagttccggtctggcagagagcgcggagagacgcagagcgcgggccgctcctccagggcgctccaggccctccggccccgggtcggcgggtgagctagggggcgccccgggacag

SEQ ID NO: 891152 - DNA, 120 bp, Artificial Sequence
  ENSG00000228223_1 (sequence is synthesized)
gccgcgccctctgccctgcagataccggaggcctctgctgtggctgcccactggctgggcccaggccttgaagcggtggcgaacgtctcttccctaccctacctcggtgactgatggcgg

SEQ ID NO: 891153 - DNA, 120 bp, Artificial Sequence
  ENSG00000228223_2 (sequence is synthesized)
cggcggcctctcccagtccggaccctgccggccgtcgggtctcccggcccaagcctgccgggcctggacgaaacccccgccgagcagcctggacgcagcgcctttgggtggcggcgggag

SEQ ID NO: 891154 - DNA, 120 bp, Artificial Sequence
  ENSG00000228223_3 (sequence is synthesized)
tagcgtgccgggaagcatggcggccgctcgaacgccgcgcggcggagggcgttagggcatggagggcccgggaaggcggcctagggacgcaggcaggctcggccgcctcttcaggccacg

SEQ ID NO: 891155 - DNA, 120 bp, Artificial Sequence
  ENSG00000228223_4 (sequence is synthesized)
gagccgccagatctgggtcccgggtgaccactctgtcgccattgggcgagacctacctagtcctaacgacaacggacaaaggccttaacgggcctgggaggtgagcgaagtcccgaacga

SEQ ID NO: 891156 - DNA, 120 bp, Artificial Sequence
  ENSG00000228223_5 (sequence is synthesized)
cgacgggtggaacggttagcggcgatcgggcggttggtctccgtactaccagaccttgctgtcggaagagacaaatggtagaatgacaggccacgtttggcccgttggaaatgccctcca

SEQ ID NO: 891157 - DNA, 120 bp, Artificial Sequence
  ENSG00000228223_6 (sequence is synthesized)
tcctctgggaagattcacaggccgtttacggaaggcctgtgtatataatatgaaaaagctgctctcaactccaccccaaccttttaatagaaaacatttgtcacatctagcccttctaga

SEQ ID NO: 891158 - DNA, 120 bp, Artificial Sequence
  ENSG00000228223_7 (sequence is synthesized)
tggaaagaggttgccgacgtatgatagagttagaaagtcacacatcttgtaaattctcatttgtttaaaagaaatcatagaaaatacatgtcttccggagttgacttttggaaactgagt

SEQ ID NO: 891159 - DNA, 120 bp, Artificial Sequence
  ENSG00000228223_8 (sequence is synthesized)
tgttagacggcctctagaagcgatacgttcacgtttgttcagtgggttagatgacatggagctcgaagacctgagaaggaaaaaaagaaggttctatgctagactggtcatatttagaag

SEQ ID NO: 891160 - DNA, 120 bp, Artificial Sequence
  ENSG00000228223_9 (sequence is synthesized)
acattttcatattctatccattgttttgtgtgcattcgcttcctcactactatgtatgtagttgacaatgctaagcttttttgaaatgtctattctttttagatattctgaagtgtctga

SEQ ID NO: 891161 - DNA, 120 bp, Artificial Sequence
  ENSG00000228223_10 (sequence is synthesized)
tatatgttaaaattagaggtagtaaaaccacattttgtaaatatctttttgttacaattcatagaaatgttgttttttggggggaatggccaaatcacctgttgagtaatactcattgtg

SEQ ID NO: 891162 - DNA, 120 bp, Artificial Sequence
  ENSG00000228223_11 (sequence is synthesized)
tttgtgcagtagttcaggggaggagagaggagggggaggtgcagagagctctatgccatcctgcttacagcgaggcaagatgaatcactatgtctgtgcattttgttttatctatgtata

SEQ ID NO: 891163 - DNA, 120 bp, Artificial Sequence
  ENSG00000228223_12 (sequence is synthesized)
taatgtacataaaggacaaacgagtcctaatttacaacatctagtctttctggatgttaaagaggttgccagtgtataacaaaactagagttagtaaactaatatattttgtacattttg

SEQ ID NO: 891164 - DNA, 120 bp, Artificial Sequence
  ENSG00000228223_13 (sequence is synthesized)
ttttacaagtcctaggaaagactgtcttctgaaaatttgagcattcttgcccactgggttgatggagatgggaagggttctaggccagaatgttcacatttggaagactctttcaaatta

SEQ ID NO: 891165 - DNA, 120 bp, Artificial Sequence
  ENSG00000228223_14 (sequence is synthesized)
taactgttgttacatgtttgcagtttattcgagactgctgtgtacatacatagtggacaaattaactccttacttgaaacatttagactatctagatgtttagaagtgcccgatgtatat

SEQ ID NO: 891166 - DNA, 120 bp, Artificial Sequence
  ENSG00000228223_15 (sequence is synthesized)
taaatgtagaggtagtaaaataccaatttgtaaatatctttttgctaaaattcataggaaatacttttggaagttgaattgtgaagccacctttgtgagcagtatattactgtctatact

SEQ ID NO: 891167 - DNA, 120 bp, Artificial Sequence
  ENSG00000228223_16 (sequence is synthesized)
tgctcaatggtttagaggaggtgggagggaagaaattgcaaaagataatatgctagtgtgttcatacttggacattttcagacaccatttttctgtatgttttgtgcattttgttttgct

SEQ ID NO: 891168 - DNA, 120 bp, Artificial Sequence
  ENSG00000228223_17 (sequence is synthesized)
ctgtatatagtgtatataatggacaaatagtcttaattttttaacatctagaggttgccagtgtatgacaaagtagtaaaattagcatattttgtatgctttgtgttgaaattcatagga

SEQ ID NO: 891169 - DNA, 120 bp, Artificial Sequence
  ENSG00000228223_18 (sequence is synthesized)
aaacttgtcttctgtaattgacttttgcataggaatttgttcagccatctctaagcattacacatgcgtgtacttgtccactgaattgaaggcagagaaggaagagaagagggaatgatt

SEQ ID NO: 891170 - DNA, 120 bp, Artificial Sequence
  ENSG00000228223_19 (sequence is synthesized)
caaggccaaaatggtcacatttagaagataccttagatgataaccattgttatgtgtgtgcagttttatttaacagtgccgtgtacatggtggacaggctatgaaatatctagtctttag

SEQ ID NO: 891171 - DNA, 120 bp, Artificial Sequence
  ENSG00000228223_20 (sequence is synthesized)
atatttggaagtgcttgatgtattttaaagtagtagtagtagaataacactttttgtaaatagcttttaaaaactgatgggaaatgctgtttggaagtggatttgttgaaccacctggga

SEQ ID NO: 891172 - DNA, 120 bp, Artificial Sequence
  ENSG00000228223_21 (sequence is synthesized)
ggtgggagggaaaaaattgcaaaaggtgttttgccattgtttattagaaaatttcagcttaatccattgcctatatgttacaagcatttcatttaactttgctatactgtatatattgtg

SEQ ID NO: 891173 - DNA, 120 bp, Artificial Sequence
  ENSG00000228223_22 (sequence is synthesized)
tatatactggacaaatgagtcctgattttataatatctagtctgtagctattaaagaggttgccagtgtatgacaaaagtagttagtaaactaacgcattttgtacactttgttaaaatt

SEQ ID NO: 891174 - DNA, 120 bp, Artificial Sequence
  ENSG00000228223_23 (sequence is synthesized)
tcgaagtgacacatgtgcttatatccaccaggttggtggtggagaggagttggaaggaatgaagggttctagaccagaatgttcctatttagaagacactttcagatataaccattgtta

SEQ ID NO: 891175 - DNA, 120 bp, Artificial Sequence
  ENSG00000228223_24 (sequence is synthesized)
catgtgtgtagtttattcaacagtgctatgtatatagtggacacacttaagtccttatttgaaatatctagtctttctagatgtttagaagtgcacaaagcatgttaaaagtagaggtag

SEQ ID NO: 891176 - DNA, 120 bp, Artificial Sequence
  ENSG00000228223_25 (sequence is synthesized)
taagtaacacattttgtagttattttgatatgaaatattgtcttggaaattgatcaattctctgagaagtacacgttatgatatttgtgctggttcagggggaagaaggagcacaaagtt

SEQ ID NO: 891177 - DNA, 120 bp, Artificial Sequence
  ENSG00000228223_26 (sequence is synthesized)
caaagggctttctaccagtgtccagtgtgtttatgatgaggcacattgaccattgtcccttatgtctgcattttcgtttactgtgctgtgtatataagcagacataggagtcctaattta

SEQ ID NO: 891178 - DNA, 120 bp, Artificial Sequence
  ENSG00000228223_27 (sequence is synthesized)
tatctagtcgatgttaaagaggttgccagtgtatggcaaaagtagagttagtaaactaatacattgagtacactttgtgttaaaattcataaggaacacttcttaaaaacagaagtaaaa

SEQ ID NO: 891179 - DNA, 120 bp, Artificial Sequence
  ENSG00000228223_28 (sequence is synthesized)
ttgttaaacgccccccgcccccaagcattacagatggcttatagctgtcaacggggttggtagaggtcagaaagggaagtgttctaggccagaatgttcctatttagaagacactcaaat

SEQ ID NO: 891180 - DNA, 120 bp, Artificial Sequence
  ENSG00000228223_29 (sequence is synthesized)
tatagtctatgttatgtatatatgccatttattcaatactactgtgtatataatggaaaacttaagtgcagtttgaaacatctagtctttctaggtgtttaaaagtgcacaatggtcagg

SEQ ID NO: 891181 - DNA, 73 bp, Artificial Sequence
  ENSG00000228223_30 (sequence is synthesized)
acagaggttgcagtaagccgagaccacaccactgcactccagcatggcgacagagcaagactccatctcaaaa

SEQ ID NO: 891182 - DNA, 120 bp, Artificial Sequence
  ENSG00000228223_31 (sequence is synthesized)
tctcaaaaaaaaaaaaaaaaaaaaattccacaacataggttaaaagtagagggctaaagtaacacccctctaagcatttgttttcagtacttcctaggagtggttgcatttgggaatgga

SEQ ID NO: 891183 - DNA, 120 bp, Artificial Sequence
  ENSG00000228223_32 (sequence is synthesized)
cctaggagtggttgcatttgggaatggaattgttaaaacttgatgcttaggagcgtatgctgactattcactgcgtggtggggtggggaggaggaggaggtatgcagggagaagggttct

SEQ ID NO: 891184 - DNA, 120 bp, Artificial Sequence
  ENSG00000228223_33 (sequence is synthesized)
gtgcccctgagttagattagttcagatggtctaaccattgttctatgtatgcattttattgtgttaatattgtgtattaaaggataaacaagtcttaatgctcaaagtatgttaaaaata

SEQ ID NO: 891185 - DNA, 120 bp, Artificial Sequence
  ENSG00000228223_34 (sequence is synthesized)
gatgtagtgaatcagtccctttgtgaatgtcctattgttagtttttaggaaggcctgtcttctgggagtgacctttattagtccacttcttggagctagacgtcctatacttagtcactg

SEQ ID NO: 891186 - DNA, 120 bp, Artificial Sequence
  ENSG00000228223_35 (sequence is synthesized)
gggatggtgaaagagggagaagaggaagggcgaagggaagggctctttgctagtatctccatttctagaagatggttttagatgataaccacaggtctatatgagcatttttagtaaagt

SEQ ID NO: 891187 - DNA, 120 bp, Artificial Sequence
  ENSG00000228223_36 (sequence is synthesized)
gcctgtgtttattgtggacagagtttattattttgcaacatctaacctttatgaatatctgaggtgacaatgtgtgataaaaactagagctagtgggccaggcgcggtggctcatgcctg

SEQ ID NO: 891188 - DNA, 120 bp, Artificial Sequence
  ENSG00000228223_37 (sequence is synthesized)
gcaagactccatctcaaaaaaaaaaaaactagagctagtgaattagccaatttgtaaatacctttttataagtgatagaaaagatgcatcttggacatggaattgttaaaccgcctctga

SEQ ID NO: 891189 - DNA, 120 bp, Artificial Sequence
  ENSG00000228223_38 (sequence is synthesized)
gcagtatatgtcaggacttgttcattaggttggcagcagaggggcagaaggaagtatacagggagagatgtatgcagatgtgtccatatgtgtccatatttacattttgatgatagccat

SEQ ID NO: 891190 - DNA, 120 bp, Artificial Sequence
  ENSG00000228223_39 (sequence is synthesized)
tgatgtatgcatctcttttggctgtactataggaatacattaagtaattcaatggaaatataccttgctaatattataatggtatagctctgttaatgaattctcttagaaacattatac

SEQ ID NO: 891191 - DNA, 120 bp, Artificial Sequence
  ENSG00000228223_40 (sequence is synthesized)
ttaatgtattctgttgctgtatgtttcattttaattgagcattaagggaatgcagcatttaaatcagaactctgccaatgcttttatctagaggcgtgttgtcatttttgtcttctatga

SEQ ID NO: 891192 - DNA, 120 bp, Artificial Sequence
  ENSG00000228223_41 (sequence is synthesized)
aatttttgtcccaagaaaggtaggactacatttttttttaacagattaagttggtgtagtgtattcttgtttatcaaaatactaataaagctttgggattttgaattggtaaatattcat

SEQ ID NO: 891193 - DNA, 120 bp, Artificial Sequence
  ENSG00000228223_42 (sequence is synthesized)
gatgtgtcaaaaatcatgatacatactgtacaatctcagtcccataagatgggatgttgtgcctacacacacacaggacctagaagaacatgtcaaactgtaaactgcttgtgattgtga

SEQ ID NO: 891194 - DNA, 120 bp, Artificial Sequence
  ENSG00000228223_43 (sequence is synthesized)
atgactttgttgtttgcttcttgtgattttcagtttcctataatgcacatattaacatattaactttttaaaataaaggttattttaaaagcctgtttaaaaaaaaaaatcactggaaaa

SEQ ID NO: 891195 - DNA, 120 bp, Artificial Sequence
  ENSG00000228221_0 (sequence is synthesized)
ggctgtggtctcggtgtagcacgatggaatctggtggcttaaacctagctgtccacatttcactatctgaagagcagaaaatgtgttaataggagcctggtgagtggaggagactgaaga

SEQ ID NO: 891196 - DNA, 120 bp, Artificial Sequence
  ENSG00000228221_1 (sequence is synthesized)
tggagagagagcctggacctcaacatgagcatctggagccatttggcagcattaggctgtgaccgcttagagaaccgaaaggtgcagagctttaaaggattatggagtctgaagaccaaa

SEQ ID NO: 891197 - DNA, 120 bp, Artificial Sequence
  ENSG00000228221_2 (sequence is synthesized)
tgggatgatggagaacagctattcagtggtacaaatgtaaatgctcccaggcccgggcaggctggagtgcagtggcgccatctttgctcactgcaacctttacctcctgggttcaagcaa

SEQ ID NO: 891198 - DNA, 120 bp, Artificial Sequence
  ENSG00000228221_3 (sequence is synthesized)
cactgcaacctttacctcctgggttcaagcaatcctcccaccgcagcctccatagtagctgggactacaggagtctgccaccatgactgggtaatttttttgtatttttattagagatgg

SEQ ID NO: 891199 - DNA, 120 bp, Artificial Sequence
  ENSG00000228221_4 (sequence is synthesized)
atgttgggattacaggcataagccactggacccagccttgtttgtttaatgggacaacaggaaaatcctcatcatgagctcttgccacccctaccctgaacagagatccagttgccctgt

SEQ ID NO: 891200 - DNA, 120 bp, Artificial Sequence
  ENSG00000228221_5 (sequence is synthesized)
tgagatgatcatgacaaataataaccataaaatcatttcccttctcttttctagaacacattacaactagcaaaatatttttaaattcgtggcctcatttgatcctgtcagcatagctat

SEQ ID NO: 891201 - DNA, 120 bp, Artificial Sequence
  ENSG00000228221_6 (sequence is synthesized)
ttttgctctttcctgtctaaaggaaaccctttagtatgggttcatagaaacacagtcctgtagaattggaagataccagataaattatttttttctttaaagtcttaacattacagagag

SEQ ID NO: 891202 - DNA, 120 bp, Artificial Sequence
  ENSG00000228221_7 (sequence is synthesized)
aaattcttagcccagaggccatggaattaatgaaattctttttttacaaatgaggaagccgaggccaggaaaattttggtaacttgatcagtcacagaaatggattcctggttgcctgat

SEQ ID NO: 891203 - DNA, 120 bp, Artificial Sequence
  ENSG00000228221_8 (sequence is synthesized)
tctcaatgtactgttcgtcccatgcttccacctgccttcagacatagagtcaggttagggcccagcgtgatggctcatgcctgtaatcccagcatcctggataggccgaggtgggcggat

SEQ ID NO: 891204 - DNA, 74 bp, Artificial Sequence
  ENSG00000228221_9 (sequence is synthesized)
gggtggcgcatgcctgtaattccagctatttgggaggctgagacaatagaatcacttgaacccgggaggcagag

SEQ ID NO: 891205 - DNA, 120 bp, Artificial Sequence
  ENSG00000228221_10 (sequence is synthesized)
agactggatttggcctatgggtcatagtttgcccactcttgatctaatctataaaccatgatttatgagattgtctactctggctgtgaagaacagacactattactggctctggaaaca

SEQ ID NO: 891206 - DNA, 120 bp, Artificial Sequence
  ENSG00000228221_11 (sequence is synthesized)
ccacctggaacacagctgtgacttgataaacaagtgaaacattctttggtgtggtgaggggaaaacaaatttctcaaaggacacgcaccatggtgtatgagaggacactggagcccagcc

SEQ ID NO: 891207 - DNA, 120 bp, Artificial Sequence
  ENSG00000228221_12 (sequence is synthesized)
agcatctgacatgctgaattcaaagtgcaggtgaaagtaggacaactgattcacaagctgggatgcctgtgttgttgtttgccagtgtgcgtgtgtgtgttttcctggcacccttcattc

SEQ ID NO: 891208 - DNA, 120 bp, Artificial Sequence
  ENSG00000228221_13 (sequence is synthesized)
attccccagcacagttgacatcaggttggaagcagtgagttctgagggagactgctagaggacccaacttggagaatcaacgatctgcgatgaagataatgaagataaagacaatgtcaa

SEQ ID NO: 891209 - DNA, 120 bp, Artificial Sequence
  ENSG00000228221_14 (sequence is synthesized)
tgtcagcgtccaaaatcataaggaccctttaagaagcttccagagcagaagtgactgtgcaagaagggccaataaagtctaggcaatgcacgaccaggcgcggtcgctcacgcctgtaat

SEQ ID NO: 891210 - DNA, 120 bp, Artificial Sequence
  ENSG00000228221_15 (sequence is synthesized)
aaaaataaataaataaataaataataaagtctaggcaatgcagcagactgcagacaaatgggtctccagactcatgagcacttggcttttgttactctcacctccaccaccctttacctg

SEQ ID NO: 891211 - DNA, 120 bp, Artificial Sequence
  ENSG00000228221_16 (sequence is synthesized)
tactctcacctccaccaccctttacctggttctatatctgtcctttggaccttcctgcatttaccttcctgcttttgctccttagtctggttttgtcccagaatttactctcctactgcc

SEQ ID NO: 891212 - DNA, 120 bp, Artificial Sequence
  ENSG00000228221_17 (sequence is synthesized)
cgctctcctgtccctgatggttcatagtttcttactatcagggagaaaccctgatattgacttggcccagcagtaattctgtccatgcaattctcttgcatgggctgtgacaggcagaca

SEQ ID NO: 891213 - DNA, 120 bp, Artificial Sequence
  ENSG00000228221_18 (sequence is synthesized)
cctcactaattagatcagcacaggggtctgcatacatttagtgtggggacctccagcccatcctggagcgcacaaatttagttcagcaccattcagctgctgaaatttgatgcagtggcc

SEQ ID NO: 891214 - DNA, 120 bp, Artificial Sequence
  ENSG00000228221_19 (sequence is synthesized)
ctggatgaccaaagaatgtggtgataattctaaacagggtgtgttcattaagtgaaggaaatgtagaatacgttttagatgaaaaagaaatttttaagtttggagggtaaagatcaatca

SEQ ID NO: 891215 - DNA, 120 bp, Artificial Sequence
  ENSG00000228221_20 (sequence is synthesized)
tccgtaaaactaactgatatataacagttcatttttgttgatactagataaataaggagtgaagacattttcagaattacaatggcatttatctgccttcattaaattaagctcaggaaa

SEQ ID NO: 891216 - DNA, 120 bp, Artificial Sequence
  ENSG00000228221_21 (sequence is synthesized)
gggaaaatcaagagtaagacttttaatgtttctaccacctgtcagcctggaaagttttcttagtttttctttttggagaggcatttgagatttgtgttcctgtcaacttgagagaggaat

SEQ ID NO: 891217 - DNA, 120 bp, Artificial Sequence
  ENSG00000228221_22 (sequence is synthesized)
ggaggaagtcaaagggaagaagaggagctgatgttgcagtccgaggggaaacaggagtgagggcagggagcccagaagagggtcagggtgaagatgggtgtggggaaggcagagcaaacc

SEQ ID NO: 891218 - DNA, 120 bp, Artificial Sequence
  ENSG00000228221_23 (sequence is synthesized)
agctgctgctgtcaaccctgacctatttcctggagctctgggagccctcccatccctgctctcagcaacagtgatgctgcctttgggcggctgtgcagccaacccacactgagtgatagc

SEQ ID NO: 891219 - DNA, 120 bp, Artificial Sequence
  ENSG00000228221_24 (sequence is synthesized)
tgtccctgtcattttcttaaatgtcaccagtgaaagagacatttccacctccctggagtacacatactccacttgtggataagtggacacttggttccattttcacagcttccaaaaatt

SEQ ID NO: 891220 - DNA, 120 bp, Artificial Sequence
  ENSG00000228221_25 (sequence is synthesized)
ggtcacagatgactaacaattgtgtcaacttctctggtatgagaagccatagatggaggtatacagaaatgatttcttaaaaaatgtaatgtcctttctatgtggcagtaaaacatcttt

SEQ ID NO: 891221 - DNA, 120 bp, Artificial Sequence
  ENSG00000228221_26 (sequence is synthesized)
cctgccactaggagaaatgtgttctttgaattattttcacagccataaaggcagacctgtgaaaggctatctgtactggatagttctctgctttcatggattttattcagaatcatccat

SEQ ID NO: 891222 - DNA, 120 bp, Artificial Sequence
  ENSG00000228221_27 (sequence is synthesized)
tcttggaaatggtggggaaaggggaaataaaaagagaacaaatatatgttggattagttagtataaattataattcataaactacagtgtccaagcaatattaccttccacatattctag

SEQ ID NO: 891223 - DNA, 120 bp, Artificial Sequence
  ENSG00000228221_28 (sequence is synthesized)
aatagcttggttcctatttttgagcccctgcctggtgccagtaacgtgttttcagctaattcagggtttctgtccccattttccttggaggaatatctaagttctttggggatattgctg

SEQ ID NO: 891224 - DNA, 120 bp, Artificial Sequence
  ENSG00000228221_29 (sequence is synthesized)
gtgccaagcatgaagctgttggagaacgaggaggctttggcatcttgtcctcagcatcacgtaaatcctatcagaacttagaagtgaaatgggaaggattgtttatctcctgcccaacta

SEQ ID NO: 891225 - DNA, 120 bp, Artificial Sequence
  ENSG00000228221_30 (sequence is synthesized)
gctgctgggttgttccttactcccactcacaaggtctctttgtgtcactctaggtcattttgctctcctgagacagtctgggaaccactttgaggctgtttgagtccagagccatggcct

SEQ ID NO: 891226 - DNA, 120 bp, Artificial Sequence
  ENSG00000228221_31 (sequence is synthesized)
aggcctcttgcagtgtggggatcctgctgtgttccctcagccgaatcaggggcactgggcagtgccttcccctctcctggcctattctcagccacgcctaagtgatcttatttcatcttg

SEQ ID NO: 891227 - DNA, 120 bp, Artificial Sequence
  ENSG00000228221_32 (sequence is synthesized)
acactaaccttggatatttgaaatagaattattcatttacaaaggaggaaaatgagattcagacaagctaaatacatgccaaagccacataactacaagtggcagagctcagtctgcttt

SEQ ID NO: 891228 - DNA, 120 bp, Artificial Sequence
  ENSG00000228221_33 (sequence is synthesized)
ccaaacccatgcggctcccttcatcaccgtgactcacccactttatcccccaacttcgaggaagtctcttctgatcacccaagaataatgtctgcctccttagaaattttgtagccgttg

SEQ ID NO: 891229 - DNA, 120 bp, Artificial Sequence
  ENSG00000228221_34 (sequence is synthesized)
agaacagctattcagtggtacaaatgtaaatgctcccaggcccgggcagaaaagagaaaacatttccatggaagaggaaacaggaaattccaacagatcagcaacagttggagtgctaac

SEQ ID NO: 891230 - DNA, 75 bp, Artificial Sequence
  ENSG00000228221_35 (sequence is synthesized)
agtttgagaccagcctgaccaacatagtttcgccaggtgtggtgctgcacacctgtaatcccagctactctggaa

SEQ ID NO: 891231 - DNA, 120 bp, Artificial Sequence
  ENSG00000228221_36 (sequence is synthesized)
attaaatgtaaaatggcagaaacattcgttttgggcaaatttctcattttaaatgagttctatttagaaacaaaacaaatgaaatggtggcaatatcaattacaaggatgataaggcttt

SEQ ID NO: 891232 - DNA, 120 bp, Artificial Sequence
  ENSG00000228221_37 (sequence is synthesized)
atctgatcacatcttcaaggttttatgccttttccttcgtgtcctgtccttccctcctccactccccactcctgtttctctgtatgtcaggtttcaacaaggggaaaaacaaaaactttg

SEQ ID NO: 891233 - DNA, 120 bp, Artificial Sequence
  ENSG00000228221_38 (sequence is synthesized)
gagttccacctccagcctgtgagatgcctgcagggagccatcctgagtcctccgaattgacacagtgtctttggggtaggaatttcccagtgaatgcttacttaaatgaattcaaaaaga

SEQ ID NO: 891234 - DNA, 120 bp, Artificial Sequence
  ENSG00000228221_39 (sequence is synthesized)
gtttttgacacaaattagaattgagtttggttttgcccatctgaaatatctgtaaagactctgaggacagaacagatactttggagttttcttcaaacttgcatagctcaagggaatccc

SEQ ID NO: 891235 - DNA, 120 bp, Artificial Sequence
  ENSG00000228221_40 (sequence is synthesized)
attcaggatgccacattacattcagtatgtcttcttagactcctatgggctgtgacagtatctcagaatttccttgcttttgaatatattgagttttgggcttctgaggtgatcgggcag

SEQ ID NO: 891236 - DNA, 120 bp, Artificial Sequence
  ENSG00000228221_41 (sequence is synthesized)
gacagagatgaagaaaagaaggaagtggaggcaatgaggaaaggagggaagaaggaaggaaggaaatcatgcttgaaagaagttgtggaacatgtcaagtttttttccggatgtggcgga

SEQ ID NO: 891237 - DNA, 120 bp, Artificial Sequence
  ENSG00000228221_42 (sequence is synthesized)
caggaaaatggacagatctctacaatgttctccaaagagattgttttgcttgccaataaaaagagacacctgggagcaccatactctctcctgttcctctgggtatcatatttccttatg

SEQ ID NO: 891238 - DNA, 120 bp, Artificial Sequence
  ENSG00000228221_43 (sequence is synthesized)
acacctgaaactctgatgccttctgggtccatgaaagcagtgagatgagcacaggaaaccacgctgaggatggttgagcaaaaaggtgacattgagccactggattaacctgcccagaaa

SEQ ID NO: 891239 - DNA, 120 bp, Artificial Sequence
  ENSG00000228221_44 (sequence is synthesized)
caggatatcttcagatttcttgttaagtaagaaaatgtaattttgttgattctaagttacactttcttttgttagttcaacatctctgaaatcagaacatattttgccatggtaatatct

SEQ ID NO: 891240 - DNA, 120 bp, Artificial Sequence
  ENSG00000228221_45 (sequence is synthesized)
taccatcactgtaatatgtaatatccttacataggtgtcattgcctatgcatgtgtcaacttgattgctattctctgtgatatgactgacaactgcagccctttgacagttcagtcgaca

SEQ ID NO: 891241 - DNA, 120 bp, Artificial Sequence
  ENSG00000228221_46 (sequence is synthesized)
aaccattgaagattattagggtaagaaatactgctttctgtctgaaaactttccaatgacatcttctgaaaagacaaagaaagtatcagcatcaaaatttgcgtaataggccgggcgcgg

SEQ ID NO: 891242 - DNA, 120 bp, Artificial Sequence
  ENSG00000228226_0 (sequence is synthesized)
caggcctggttagggaaaatagaatgttctagcatagtttaaaatggcaactttcctcccccaacctacaggaagcataagggaatttttctctcatcttctctgtgagaacctggtcaa

SEQ ID NO: 891243 - DNA, 120 bp, Artificial Sequence
  ENSG00000228226_1 (sequence is synthesized)
cctcagatgtgtccacacgaagcctccagccattcatccattacagttcaggtttccctaccctggcatgggttctcattatggtttctgctcctgtgtttctgctctagaaacctgaga

SEQ ID NO: 891244 - DNA, 120 bp, Artificial Sequence
  ENSG00000228226_2 (sequence is synthesized)
attcaatgatgtattggagaaaacaagtgcctgcaaactgtttgcagatatgtggtctttggtctgagctaccatagaaaagcttcccgcaaccaaatgaattacagacactcagcaaaa

SEQ ID NO: 891245 - DNA, 120 bp, Artificial Sequence
  ENSG00000256862_0 (sequence is synthesized)
tcctaaagaatcacaaaaagaaagaccctagctgtctgaatgatctgagctaagtccccagacgtgcaagtgtggccatcctagaccactgagctccagccaagccagcttgcatcagaa

SEQ ID NO: 891246 - DNA, 120 bp, Artificial Sequence
  ENSG00000256862_1 (sequence is synthesized)
gaactgtccagaaaactcacagaatcataagaaataatgcagcgcagcttaacttggactcaccacctatcaagtgctcgacagccacgtgtgcagtggttcctacgtggagcagcatac

SEQ ID NO: 891247 - DNA, 120 bp, Artificial Sequence
  ENSG00000256862_2 (sequence is synthesized)
taagaaccagtgccccaggggaagaaacagaactccacaaggtagcagtgtgggtgtagtacccgcatgtgcccatgttatgggaatgtagatggggagtgaccaccgccaacagaagtg

SEQ ID NO: 891248 - DNA, 120 bp, Artificial Sequence
  ENSG00000256862_3 (sequence is synthesized)
tggccatcttgcccgagatgcctgaggacctcctatttttagatgctgctgcccaaggcctgtatttcatgctatggcttttgtcatttgaattatcagtagctgtctcggagctattac

SEQ ID NO: 891249 - DNA, 120 bp, Artificial Sequence
  ENSG00000256862_4 (sequence is synthesized)
ggagataagacaaccacctgggtcaggaacttgtagagaggattcctacatggagtgggagactgaaataataacctcaaagatgccttccaatcagaagatttggtgattctttctgag

SEQ ID NO: 891250 - DNA, 120 bp, Artificial Sequence
  ENSG00000256862_5 (sequence is synthesized)
agaacatatccccattgttaggaggcgcacgactgtatttagtccaacaacttgctgaaatgtgattctaccatttttccagtcaactcctaagttttaaataccatacatctgccacct

SEQ ID NO: 891251 - DNA, 120 bp, Artificial Sequence
  ENSG00000256862_6 (sequence is synthesized)
taccaggcagtttcaaccataacaacagaagaatactcttggcaaatagatcccactctctgagggttgtgttggggctcagaaaatactaccccgaagtatgacactttggcatgctga

SEQ ID NO: 891252 - DNA, 120 bp, Artificial Sequence
  ENSG00000256862_7 (sequence is synthesized)
atactttgaactaaaagagattggaaggcctcagaagcagcctcggaagcagtctctccctctgatctcctgcccttctgtctcctgcccatctttcgtcccagaagtgagtcacagaaa

SEQ ID NO: 891253 - DNA, 120 bp, Artificial Sequence
  ENSG00000256862_8 (sequence is synthesized)
gcactttaaataaataaatgtataaaagcaaagtagacaaagacacatgaagtcataatgaaaataccagagtcagccaaggaagaaggcagacttgcagttgaaatgctccagatcact

SEQ ID NO: 891254 - DNA, 120 bp, Artificial Sequence
  ENSG00000256862_9 (sequence is synthesized)
ttgtccaccgaacgaaaacatctaagaacatacagtccatactccaagttttaaacgactgtccaccaagaagggaaaaggagaactgatggctcctcttaggcccattcaagacaaggg

SEQ ID NO: 891255 - DNA, 120 bp, Artificial Sequence
  ENSG00000256862_10 (sequence is synthesized)
ggtcccaattcccttgctttagactggtgggactggcaggtaaacctgaggcaaatgactgactacaggttccaaggccagttactccaattagaaagcaaaacacaaagtttcaaaaaa

SEQ ID NO: 891256 - DNA, 90 bp, Artificial Sequence
  ENSG00000256862_11 (sequence is synthesized)
tggtgaagggatgaggctgaaacatcacgggaagtaaaataaataattgtaacaagaaaacaataaagcattggagaatccacccaggca

SEQ ID NO: 891257 - DNA, 120 bp, Artificial Sequence
  ENSG00000229578_0 (sequence is synthesized)
ggcactcactcaaggtcacacacctagttaatagggagtctagcttcaaacccacatctgactgaatctaattccacctacagctttgaaggctcagaaaacataactgcttgaaaaact

SEQ ID NO: 891258 - DNA, 120 bp, Artificial Sequence
  ENSG00000229578_1 (sequence is synthesized)
gagttaactctatgactgccaggacaaaagcttaggatttagaaatgaaacaatgaataagtagacattttgctctcattttgttattttttactttattttccaaatatgtttaggtta

SEQ ID NO: 891259 - DNA, 120 bp, Artificial Sequence
  ENSG00000229578_2 (sequence is synthesized)
gacctttggacagcctacgttgtccagtggaggcagccttcccattccaacggacatttgtgggatattagagaccaagaagtgttaagagatgatcttcacaaaatgctgagcttgtgt

SEQ ID NO: 891260 - DNA, 120 bp, Artificial Sequence
  ENSG00000229578_3 (sequence is synthesized)
gggtgtcgaactacaaacaggaggagatggatattcacatgcagtggtggagggttatggctctccagcctggaggattggagcttgagccaggaaagaagctttcatttgcatcaatat

SEQ ID NO: 891261 - DNA, 120 bp, Artificial Sequence
  ENSG00000229578_4 (sequence is synthesized)
gctagtccatggagtacacagattgttctacaaaccatatggtgactaagcctcattattgaatgcagttgacatggaaacaactagtcaacatcaaataaatagattattttgtgcaaa

SEQ ID NO: 891262 - DNA, 120 bp, Artificial Sequence
  ENSG00000229578_5 (sequence is synthesized)
tggagcttgagccaggtgaacagtgggtccattaaaggggcagctcagttcagcaagtcagagcctgaacaggatgaaaggggcaacccacaaagatgaggactgaattggagttacaga

SEQ ID NO: 891263 - DNA, 120 bp, Artificial Sequence
  ENSG00000229578_6 (sequence is synthesized)
taatccacactcttttggatataatatgtattataatttcttttttctctcaagtagtttaaaagttttacactgttttcattagtcactaatagaaacatatacaatagttttctgcat

SEQ ID NO: 891264 - DNA, 120 bp, Artificial Sequence
  ENSG00000229578_7 (sequence is synthesized)
tccatcaagcttaatattaacagatatgtttacccatctcctgaacattacaaatatcttagaatattaacctctcttaggattagttctattcaaatgcatggattactttgctgtgta

SEQ ID NO: 891265 - DNA, 120 bp, Artificial Sequence
  ENSG00000229578_8 (sequence is synthesized)
attccaagactccatgatattgataatactctataataaagttaaattttctcagatttatccacatatttaccactttctttgatctttagactaaagcaattttaaataccaggctta

SEQ ID NO: 891266 - DNA, 120 bp, Artificial Sequence
  ENSG00000229578_9 (sequence is synthesized)
cttttctttattctaagctggaaatgcattttttttgtagattttcagtaatcccttgttatatcattaactctttgatccgttttaacatgcagttttcatccatcctttttttgttgt

SEQ ID NO: 891267 - DNA, 120 bp, Artificial Sequence
  ENSG00000229578_10 (sequence is synthesized)
tatctttgagagaattgatcatagtgactaagctgcaatactaaattagaggagttttaaatcttaatataactttggcatagtaaaataatttaaacaataaaatgagttcatattgta

SEQ ID NO: 891268 - DNA, 120 bp, Artificial Sequence
  ENSG00000236481_0 (sequence is synthesized)
tgctgtgttcctgggaaacccaagcaaccagaagttcatccaattatttatttgcttcgagtcatccggatgtaaaagtatgcagctatcatatactggtgaagactccttccatgtaaa

SEQ ID NO: 891269 - DNA, 120 bp, Artificial Sequence
  ENSG00000236481_1 (sequence is synthesized)
tagaggaagaaaaagctacaatatggaagacacctgagtttctgaaggactgtgtggagcacttccttctgctgatgaacatgtgctatgaaaaataaacttattttgtttagcaactaa

SEQ ID NO: 891270 - DNA, 120 bp, Artificial Sequence
  ENSG00000261113_0 (sequence is synthesized)
gaaaagaaagaaaacactttatttgtaaagagaaaatggaacttagtacatatgccaaaataaatctgtaacgcaggccacttctctgggccccatcttgagtaggttaaagggtcacct

SEQ ID NO: 891271 - DNA, 120 bp, Artificial Sequence
  ENSG00000261113_1 (sequence is synthesized)
tttgtaaaacatgtctagtactgcagacaaatgtgtgggatgaaaggaaataaaagccatgaaaacagggccaggtgcagtggaataagttctcctagctcagaaggatctcaacctctt

SEQ ID NO: 891272 - DNA, 120 bp, Artificial Sequence
  ENSG00000261113_2 (sequence is synthesized)
gcaagttacttttcacttttaagggcccttaaagaagcatttgcttagctctgtatccaggccatctctccctccccgaagagcaacagaccagcaactgacattaaggtcacatgggtg

SEQ ID NO: 891273 - DNA, 120 bp, Artificial Sequence
  ENSG00000261113_3 (sequence is synthesized)
gagtgcactgactagggctggctctccatctgttcacacacttgttgagtgcctactctatgccaaagcactgtgttttggtgccctggggaacacaaaattgggatagctcctgccctc

SEQ ID NO: 891274 - DNA, 120 bp, Artificial Sequence
  ENSG00000261117_0 (sequence is synthesized)
gtcttcctggggtaagactggattaggggaccctgctcggtcagtggtcctggtgatcgcctagggaaatagatctattctgctgggatctgggactgaatcctaggcaggtttgtgggg

SEQ ID NO: 891275 - DNA, 120 bp, Artificial Sequence
  ENSG00000261117_1 (sequence is synthesized)
agtaggatggtgagaggtgctggaaggcacgggtccacttcttaaccttccttttaactctgtgctgctgggtggaagctttatagtcaatgtcctctccatctctggccacattcccag

SEQ ID NO: 891276 - DNA, 120 bp, Artificial Sequence
  ENSG00000261117_2 (sequence is synthesized)
gactcctgatcattagagtgactgttgtcccaagtggacataattataaatagctcccttcttttactgaaagtgtcctacagtggacaataatttagtcccctcctccagtggaaaata

SEQ ID NO: 891277 - DNA, 120 bp, Artificial Sequence
  ENSG00000261117_3 (sequence is synthesized)
tactagatcgcttctcattcaccaggatatcttagatcaaggctggcgtttgaagcctctgcctgagttcaagccccttgcttccggtgttcctgtccaagcccgcggactggaatctcc

SEQ ID NO: 891278 - DNA, 120 bp, Artificial Sequence
  ENSG00000261117_4 (sequence is synthesized)
caaggaagttacgaataattcggggggggtggcgaaatggggggtggagtggggcgtgaaactgcagccttcacctggctaacagaagaggactcaggacgcccagcaccctggatagga

SEQ ID NO: 891279 - DNA, 120 bp, Artificial Sequence
  ENSG00000261117_5 (sequence is synthesized)
cccaacagcgctccctggaggtgtgggtgcaaagttttgtctagcttggcctccaaggccctccaggcaatgcactgggaagggaagaattagtgattaaatttgacctgaatcaaaaga

SEQ ID NO: 891280 - DNA, 120 bp, Artificial Sequence
  ENSG00000261116_0 (sequence is synthesized)
ctgggattacaggtcttgctcttctttaagttgtgccaaatatgatatgactgcatagtgtttttgtaagaataccattgggaaaatgagaagttttactgggctagttcttccatgatt

SEQ ID NO: 891281 - DNA, 120 bp, Artificial Sequence
  ENSG00000261116_1 (sequence is synthesized)
tgaggatgatattcagattataagataccctttgtctttcttacagtaatgaagtataagctccatatctgttccagagactttaacttgactttgcttcattcacaaagaacagagttc

SEQ ID NO: 891282 - DNA, 120 bp, Artificial Sequence
  ENSG00000261116_2 (sequence is synthesized)
aagaagcagtgcatcctgtgagaagtgtgaagtgtttgtacatcactttaaatatattacttaatatattctaagttgctgtgtggagcagtatactgttgttttaaaaatgcaagattc

SEQ ID NO: 891283 - DNA, 120 bp, Artificial Sequence
  ENSG00000261116_3 (sequence is synthesized)
atattgtctcattaaaataatttaaataatggtataaaatatctatatcattaaaataattttccatagtgtttagaaaccatgaaaaagaaaacatagcaggagaaaatatgacaggaa

SEQ ID NO: 891284 - DNA, 120 bp, Artificial Sequence
  ENSG00000261116_4 (sequence is synthesized)
atatgacaggaaaagaaaacctaacaaagcccagaacccacagttaaccaaactagactgactttgttattacccattctttgttagtattggatagggaattaggataatgagccatta

SEQ ID NO: 891285 - DNA, 120 bp, Artificial Sequence
  ENSG00000261116_5 (sequence is synthesized)
ggcagttctgaaatggaaagccctgaaatttagtgcaatgtaactttaaaactgaaattatataaagagtagaagtttaatcatgtttaattacaaccaaaagcctgttgcctttttgta

SEQ ID NO: 891286 - DNA, 120 bp, Artificial Sequence
  ENSG00000261116_6 (sequence is synthesized)
cagaaatctccttaatttcaggacatgtagatagcttatagaaacatccttttaaatagtttgtgagctcttcctcttcagtggaattgaggaatacagaatgctttatttcatcatccc

SEQ ID NO: 891287 - DNA, 120 bp, Artificial Sequence
  ENSG00000261116_7 (sequence is synthesized)
ctgacaggtgacttaggctttgcacagcagatttatttttctctgcgttttttaaaaattgtttttcttgtatcttttttcttcaaaaatatctatatttgagaatatgtacataacaac

SEQ ID NO: 891288 - DNA, 120 bp, Artificial Sequence; identical to SEQ ID NO: 548951
  ENSG00000261116_8 (sequence is synthesized)

SEQ ID NO: 891289 - DNA, 120 bp, Artificial Sequence; identical to SEQ ID NO: 548952
  ENSG00000261116_9 (sequence is synthesized)

SEQ ID NO: 891290 - DNA, 120 bp, Artificial Sequence; identical to SEQ ID NO: 548953
  ENSG00000261116_10 (sequence is synthesized)

SEQ ID NO: 891291 - DNA, 120 bp, Artificial Sequence; identical to SEQ ID NO: 548954
  ENSG00000261116_11 (sequence is synthesized)

SEQ ID NO: 891292 - DNA, 120 bp, Artificial Sequence; identical to SEQ ID NO: 548955
  ENSG00000261116_12 (sequence is synthesized)

SEQ ID NO: 891293 - DNA, 120 bp, Artificial Sequence; identical to SEQ ID NO: 548956
  ENSG00000261116_13 (sequence is synthesized)

SEQ ID NO: 891294 - DNA, 120 bp, Artificial Sequence; identical to SEQ ID NO: 548957
  ENSG00000261116_14 (sequence is synthesized)

SEQ ID NO: 891295 - DNA, 120 bp, Artificial Sequence; identical to SEQ ID NO: 548958
  ENSG00000261116_15 (sequence is synthesized)

SEQ ID NO: 891296 - DNA, 120 bp, Artificial Sequence
  ENSG00000261114_0 (sequence is synthesized)
ggtcccaagaacatatcaatcctgtgttaatataagaatattatcttgtcctctagataagctaccttaccttccaggctcacaaaccacaagtatgtagccatactgaggcatggaaca

SEQ ID NO: 891297 - DNA, 120 bp, Artificial Sequence
  ENSG00000261114_1 (sequence is synthesized)
gaaaactgtatttgttttgaatgagaacacatttgcctttatcagaccacagctgccttccagggtaaagtcaggcactgactgttagcatggccctgaaaggcaagggaaccttcacat

SEQ ID NO: 891298 - DNA, 120 bp, Artificial Sequence
  ENSG00000261114_2 (sequence is synthesized)
atttttggttgtcacatctaggggaagtggtcctgctggcgtctagttagtagaagcaagagtgctgctgaattttctacaatgcacaggacaactcccacagtaaatatttggctcaat

SEQ ID NO: 891299 - DNA, 120 bp, Artificial Sequence
  ENSG00000261114_3 (sequence is synthesized)
atgtcactagtgccaaagctgagaaagcctggcctagagtgatgggtcttcgtggttgaaactaaaagaagaaattttcctgtatagtaaaaatggatttttattttagcttttaaaaat

SEQ ID NO: 891300 - DNA, 120 bp, Artificial Sequence
  ENSG00000213279_0 (sequence is synthesized)
agaacgaccttccaggcctctgggatgagcgtgtccccagaatctgctctgttcaccttcatccaggcctttgcctctgaaggtgctcacaggtgacgactgagtggctggggcaggcac

SEQ ID NO: 891301 - DNA, 120 bp, Artificial Sequence
  ENSG00000213279_1 (sequence is synthesized)
ccatgtcgggacgggatgtcgcacctgtggactccaggggccaggaagaggatccttcagcgacctgcccgggagcctggaagcttccacagggcaggagggtgtgttctgcaaactgta

SEQ ID NO: 891302 - DNA, 120 bp, Artificial Sequence
  ENSG00000213279_2 (sequence is synthesized)
ccgtgcaactgtgagggcagctgctgcctggccccccgcaggccccgaggctcccgtgctccccttgctccgtccatatcttcctggcttccctcccacaggctcaagggcaagagtgtg

SEQ ID NO: 891303 - DNA, 120 bp, Artificial Sequence
  ENSG00000213279_3 (sequence is synthesized)
caccatgtggacaccgtgtccacccgctggccgtgggtgctccggcgtctggggagcgtctcgggtgctccgggagccatcactctccagttttctctgcaaaggtccatgatgatgttg

SEQ ID NO: 891304 - DNA, 120 bp, Artificial Sequence
  ENSG00000213279_4 (sequence is synthesized)
tggctgagcttagaaagagacttttttttatctgcccaaaatgcttggacgttttctgtccccttcacttcactcctggaaaagacaaggctcaggacaatctgtgggtgtctctcttct

SEQ ID NO: 891305 - DNA, 120 bp, Artificial Sequence
  ENSG00000213279_5 (sequence is synthesized)
aaagacaaggctcaggacaatctgtgggtgtctctcttcttctgaagccaagagccacttttgggtttttttgttcgtttggatggagtttcgttttgtcgcccaggctggagtgcagtg

SEQ ID NO: 891306 - DNA, 78 bp, Artificial Sequence
  ENSG00000213279_6 (sequence is synthesized)
ctgagtagctgggattacaggcatgtgagaccacgcccggctaattttttttttagaacttctggtctcaagcaatct

SEQ ID NO: 891307 - DNA, 120 bp, Artificial Sequence
  ENSG00000213279_7 (sequence is synthesized)
agaacttctggtctcaagcaatctgcccgcctcggcctcctaaagtgctaggattataggtgtgagccatcacgccaggtcaagagccactttctaaagtaacctttggacatgctgccc

SEQ ID NO: 891308 - DNA, 120 bp, Artificial Sequence
  ENSG00000213279_8 (sequence is synthesized)
ccccctacccaggccctgggtcccctcccagctcctggggctcctccaccttacagggctctcccgaggaggcctggcccacccaccccactctctgcatggatgggcagaggctctctc

SEQ ID NO: 891309 - DNA, 120 bp, Artificial Sequence
  ENSG00000213279_9 (sequence is synthesized)
cccaagctagcggcacagagctcttccttctgcctcaacaccacccacccttctcagcagaaggcccagcacatcctgcccctgctcctcccaccgggctccagagagagctgccccgtg

SEQ ID NO: 891310 - DNA, 120 bp, Artificial Sequence
  ENSG00000213279_10 (sequence is synthesized)
atccatgcacacaccagtgcacaggggtccacaccgccaggcgacagcacgctgggtgcagtgtctgcttgctctgcctcctgcctcaggacctgggcccctcagacacccaactgctcc

SEQ ID NO: 891311 - DNA, 86 bp, Artificial Sequence
  ENSG00000213279_11 (sequence is synthesized)
ctgcctcaggacctgggcccctcagacacccaactgctccctcccggaggctcgaaagccagcaaaggaagggataaccatcattt

SEQ ID NO: 891312 - DNA, 87 bp, Artificial Sequence
  ENSG00000213279_12 (sequence is synthesized)
ccatccatgcatccatgcatccatccatccacccacccagccacccattcacccatctgtccatccatccatccatccatccatcca

SEQ ID NO: 891313 - DNA, 120 bp, Artificial Sequence
  ENSG00000213279_13 (sequence is synthesized)
ttcacccacccattcacccaaccatccatccatccatccatccacccacccacccattcaaccatccatccatccacccacccattcacccacccatccatccacccatccatccatcca

SEQ ID NO: 891314 - DNA, 120 bp, Artificial Sequence
  ENSG00000213279_14 (sequence is synthesized)
cccacccaatcaaccatccatccatccatctttccatccatctatgtatatttatgtattttaaggaatttcctcatacaattgtggagtctgaaatctgcaaggcaggtggcagcctgg

SEQ ID NO: 891315 - DNA, 120 bp, Artificial Sequence
  ENSG00000213279_15 (sequence is synthesized)
agacctaaggagagctgcagttggagtcccagggcctctgctagcagaattccttcttgcttggggaggtccatcttggttttcttaagaccttcaactgattgaatgaggcccacctgc

SEQ ID NO: 891316 - DNA, 120 bp, Artificial Sequence
  ENSG00000213279_16 (sequence is synthesized)
attttggagagccacctgcttccccaaagtccactgattgaaatgttactctcagccaaaaagcaccctcccagaaacatgagaaccagaattagtgcttgaccaaatatctgggcactg

SEQ ID NO: 891317 - DNA, 120 bp, Artificial Sequence
  ENSG00000213279_17 (sequence is synthesized)
tggcccagccaagttgacacaattacccatcacaatgctggtgccagggaagggaaggaaaagctcttccctgtgagctggtgacctggggtcctgggctgggatagctcaacaggaagt

SEQ ID NO: 891318 - DNA, 120 bp, Artificial Sequence
  ENSG00000213279_18 (sequence is synthesized)
aaatgtccctctccagagacagcccctcctgtgtctacagatgtcctgatgtaacatgtcttttaaaatgagggtttgttcatgaaatttttttcttaaccaataaaatggattaagtag

SEQ ID NO: 891319 - DNA, 120 bp, Artificial Sequence
  ENSG00000261118_0 (sequence is synthesized)
ctgtctcaaaaaaaaaaaaaaaaaaatctaggcttccttattaatatctgaacaaataattacatatttgcttctttccaaatttggcagcaactaaacttaaaaatttttttaagtaca

SEQ ID NO: 891320 - DNA, 120 bp, Artificial Sequence
  ENSG00000261118_1 (sequence is synthesized)
aatttttttaagtacatttgcttttgcagttagcctggcctccagagctcttggactgcagcacccataatgatggccaaagccgcccccacggcgactcctcctgctgaagcaaagtca

SEQ ID NO: 891321 - DNA, 120 bp, Artificial Sequence
  ENSG00000261118_2 (sequence is synthesized)
ggcagaacaataagatgagcatggtggtgcaggcctgtaatctcagctcctcaggcgggaggatcacttgatccccggaagtttgaagctggactgcgctgaccgcacctgtgaatacca

SEQ ID NO: 891322 - DNA, 120 bp, Artificial Sequence
  ENSG00000261118_3 (sequence is synthesized)
tcgagtgcgagcatgacggcttaggttgatgtttttcaaattttcccaatgatgagtattgtaagggaccaaaataaaaaaatgccaatgcctagtcccctctcatctagaataattcca

SEQ ID NO: 891323 - DNA, 120 bp, Artificial Sequence
  ENSG00000261118_4 (sequence is synthesized)
taggtgatgatggggtccaggactctgaatttcgtcaattttaccaaatacttcgtccagtgaggcaaatatggaaacacttggatcacctcttcgtgaacgcacatcagcgcatacgcc

SEQ ID NO: 891324 - DNA, 120 bp, Artificial Sequence
  ENSG00000261118_5 (sequence is synthesized)
ggctgtttttatcaggcgctcacccctcatccaatggcgtgactagttgtgggtggagcccgaaatctggctgcctagagaaggctgaaggtccagttatagcataactaatgtttcccc

SEQ ID NO: 891325 - DNA, 120 bp, Artificial Sequence
  ENSG00000261118_6 (sequence is synthesized)
agagctcacatacgtgccaagcaccgtgctacagcctccacagccccttcatttaatcttcccgatgggcctatgaaataggtgctcctggcccgcaccgtggctcatgcctctaatccc

SEQ ID NO: 891326 - DNA, 120 bp, Artificial Sequence
  ENSG00000261118_7 (sequence is synthesized)
tgcttccgtctggctgtgtctccggtttctgttgctgcgcccctcatgtcctgtacccatcacccacgcaggagcccacaaaaccttgccgactgtcttcagtccaaccgtggctctcta

SEQ ID NO: 891327 - DNA, 120 bp, Artificial Sequence
  ENSG00000250986_0 (sequence is synthesized)
cagctgtttgcaaggaagctggagaggactcttcccccagaccttgaaattaggcttgaggaactgctccggattgtccgtaacaagcagaacagcacgtacccagcaagacttcctgtc

SEQ ID NO: 891328 - DNA, 120 bp, Artificial Sequence
  ENSG00000250986_1 (sequence is synthesized)
ctgacgaggcacgacgcgagctggcacgaccaggaggggcgaggaaggagggtgctgggggagtcaggctgcactggcgggggttgtgggggctgtctgtgtgtacgtgtgcaggggagt

SEQ ID NO: 891329 - DNA, 120 bp, Artificial Sequence
  ENSG00000250986_2 (sequence is synthesized)
acatggcagaagtgggcatatttcagaggggaaacctacaggtgtttcctagaactgagaacctagaagtggcacgtcctggagctgcagaggcgaacctgcctgtatctcacccatgat

SEQ ID NO: 891330 - DNA, 120 bp, Artificial Sequence
  ENSG00000250986_3 (sequence is synthesized)
gcgtggggcctaggaggacagggttggtccagcagggccatacagccatgggacattgggccctggctgctgtgccggagagagctgggtgcctgcctgggatgccgcgctctaggcttc

SEQ ID NO: 891331 - DNA, 120 bp, Artificial Sequence
  ENSG00000250986_4 (sequence is synthesized)
gtgagcagcctcagctcgggtggaggggagtttggctccttgagccccctccctgcacatgcaggcatgcatgcacatacgcagatgtacagtgtccacacacatatatgtatccacaca

SEQ ID NO: 891332 - DNA, 120 bp, Artificial Sequence
  ENSG00000250986_5 (sequence is synthesized)
catccttgtgcacacatagatccatgcacacacatgaatatacatatcatgaatacacgtgtgttcatgcaagcatgaacacccatacatacacatatccacacatgcatgcaagcatgc

SEQ ID NO: 891333 - DNA, 120 bp, Artificial Sequence
  ENSG00000250986_6 (sequence is synthesized)
aacctattcatgcacacttgcatgccttcacacacacatgcatgcacacatccacacacacactgtctacatataccatgtggatttacagtgcatccatgcctacagaatatacacaca

SEQ ID NO: 891334 - DNA, 120 bp, Artificial Sequence
  ENSG00000250986_7 (sequence is synthesized)
tgtatgcacacatacatgttcccacacatgcacacatgcctgcgtgtgcatacacatgcccgtgtactcttcacatgcaggtgcatatatacatatgcactatcatacacacgtgctttt

SEQ ID NO: 891335 - DNA, 120 bp, Artificial Sequence
  ENSG00000250986_8 (sequence is synthesized)
tgcacacgtatgtctacacatgcatatgtatcacactggcatatgtagaaatgatgcacccatgctgtgcacacacctgtgcatactgcgggcacgcacagccttccctgtgcagataac

SEQ ID NO: 891336 - DNA, 120 bp, Artificial Sequence
  ENSG00000250986_9 (sequence is synthesized)
acgaatccatgcacattgcacacacgtgtgtatgcctgtgctgcacacatctgtccctatgcatgacaccagtcatgcatgtgcacacatggcttcgcatatatggatgtgtacacacat

SEQ ID NO: 891337 - DNA, 120 bp, Artificial Sequence
  ENSG00000250986_10 (sequence is synthesized)
atgcggcacctgtggccttgcccaccctcctaggctgaggagaagatgtatttctgggttgctgctgcagccagctcttccggggctgcggctgggttctgcctcgcctgcctggtctgc

SEQ ID NO: 891338 - DNA, 120 bp, Artificial Sequence
  ENSG00000250986_11 (sequence is synthesized)
acagctccacctggctcctgcggtcagccctcctctccacgctgtgagctgtgaggacatttctcattaactcttgtggaccctgggcctgaccatgtgctgtccgcaggcctggatgcc

SEQ ID NO: 891339 - DNA, 120 bp, Artificial Sequence
  ENSG00000250986_12 (sequence is synthesized)
ctctgcctcatctttcctggggctcgcttccttcaagacttgtcccatgatgttcctccttcaggaagcctcccgtgacctcccgggctggatctgggccacttttgccggcctcctgca

SEQ ID NO: 891340 - DNA, 120 bp, Artificial Sequence
  ENSG00000250986_13 (sequence is synthesized)
tgccccatggggcatggccatcatcagtaaccatacatctcagctgtgtcccatccccactgcctggtccagggctgggctctcagctcacagaaagagctgaatgaaggcctggtggca

SEQ ID NO: 891341 - DNA, 120 bp, Artificial Sequence
  ENSG00000250986_14 (sequence is synthesized)
ggatgggtgccgtgaagggcagatgggcttgtgggcctggctctagcctccttagccgcactgatgcttgctgggtgctgagtgcagggggtgccttcacctggtggctgcttgtgccag

SEQ ID NO: 891342 - DNA, 120 bp, Artificial Sequence
  ENSG00000250986_15 (sequence is synthesized)
gccccagtgcccctggccaacaggcccttttctcagttccatggagtttggggtcatcagatgtggctttaggctcctgctcattcccttacttattgtctggcagtgggggagccttct

SEQ ID NO: 891343 - DNA, 120 bp, Artificial Sequence
  ENSG00000250986_16 (sequence is synthesized)
ggcttccagggcctcagtttcccctgtctgtaaaatgggagcattggaccagagcattccgaggcccatgccagccctgagtgaccccctcccccaacttggctgtgagctcctgggggt

SEQ ID NO: 891344 - DNA, 120 bp, Artificial Sequence
  ENSG00000250986_17 (sequence is synthesized)
gggggtggcgcctgcctgcccatctctgccctcggttggtgtccgcaggggaaagggaagaggctggactcggggagagacccctctccactcagccctggtgggtgcgggaaccaaggg

SEQ ID NO: 891345 - DNA, 120 bp, Artificial Sequence
  ENSG00000250986_18 (sequence is synthesized)
ttgaaatttcatttttaaagacgagtcagggaaaaatgaggcttgcttctctccctgcccctccctgaagaattccagaagctgatttgtcttgtcaggatgtggcagggagccgtggcc

SEQ ID NO: 891346 - DNA, 120 bp, Artificial Sequence
  ENSG00000250986_19 (sequence is synthesized)
tgggctggctctctgagctgttgcatattgatcagcattgatgggtttggcacagtcgagttcttacagagctggcggaagtccctctggagaaagaactgcttcggggactggctttga

SEQ ID NO: 891347 - DNA, 120 bp, Artificial Sequence
  ENSG00000250986_20 (sequence is synthesized)
tttgcaatgagtgtaatagattaaagcagtgggtcagcatgtcttattgagcaccagctgtgtacctcagccctggccctgctgggatccaagctcagatccccgcctcccccgaccctc

SEQ ID NO: 891348 - DNA, 120 bp, Artificial Sequence
  ENSG00000250986_21 (sequence is synthesized)
tcggttgccaccgagccccacctctgcctgcccgctgcacctgctccagtctccacctggcttctcctgctaggggctgtgccctgcccgctagctgcctgagcctgacattcagggccc

SEQ ID NO: 891349 - DNA, 120 bp, Artificial Sequence
  ENSG00000250986_22 (sequence is synthesized)
tccagtgcccaacctcaacccacagcccttcactggttcagttgtcatgcagtccgcagacaccaggaagcatcctctgcgtgcagccctggagatgtagaggtgacgaaggcagggcgg

SEQ ID NO: 891350 - DNA, 120 bp, Artificial Sequence
  ENSG00000250986_23 (sequence is synthesized)
cccagaagacctcacctcctgctccaccatcctgggcctgggcctagcggggtaggctggcagcaggcctgctgcctggactctgggttcgagctggctgggttttcctctgtgaccttt

SEQ ID NO: 891351 - DNA, 120 bp, Artificial Sequence
  ENSG00000250986_24 (sequence is synthesized)
cccagccttggtggccgctgtgcacactcctcagaatgacgtctgcagagctctcagcctggggcctgcccgttgctgggtggttgcaggaaggaggccacttgaccccgttccagccaa

SEQ ID NO: 891352 - DNA, 120 bp, Artificial Sequence
  ENSG00000250986_25 (sequence is synthesized)
tgatacctccctgaggacaagggtgaaaggtgccgggaggcccactgcctgccttcctgcttgcttgggcacatgtgaggatgtgatgcccggagcagcagcagctgtcatgtgaccagg

SEQ ID NO: 891353 - DNA, 120 bp, Artificial Sequence
  ENSG00000250986_26 (sequence is synthesized)
aggagctgaggatgaggatgaaaaccatggaaggaaagaggggaggaaggttctgtaacttgcggctgaatgcgtccaagccatgagttgtcccccaagctcgtgagttgtccccagctc

SEQ ID NO: 891354 - DNA, 120 bp, Artificial Sequence
  ENSG00000250986_27 (sequence is synthesized)
aattctgcctcctttggagagtgacgtcccacacacctgtgcaaccttgcatgccaaaaggactttgcagacatgactgaggaccttgcatgcgggaggtgatccccacgacacctgtgg

SEQ ID NO: 891355 - DNA, 120 bp, Artificial Sequence
  ENSG00000250986_28 (sequence is synthesized)
acccagtgtcatcagggtccttgtaagtgaaagaggcaagaggaccccagaagaggaggtgtgatgacagaagtggaggtcggagtgacatggagacgggacccctggctgcaggatgca

SEQ ID NO: 891356 - DNA, 120 bp, Artificial Sequence
  ENSG00000250986_29 (sequence is synthesized)
gtgcttctgggagctggagaggccaagagacagactctggcctggagccttcggaaggcaccggccctgcagaccacttcagacttccgacctccagggccggaagaggaagcttggtgt

SEQ ID NO: 891357 - DNA, 120 bp, Artificial Sequence
  ENSG00000250986_30 (sequence is synthesized)
ggttctaagcggtggcatttgtgatcatttctcaccgcagccacagtagatggaggcaacacccgtgggtgtttgagggatggatgagtggaagcatgcgtgtggtggaggccactgcac

SEQ ID NO: 891358 - DNA, 120 bp, Artificial Sequence
  ENSG00000250986_31 (sequence is synthesized)
cgtccaattccagacagtcccgaggaacgcccgctggcagccctgcctcggctgttgagtcattatgtgatcttgggcaagtctgaacctctgcttcaccacctgtgaattcagggacag

SEQ ID NO: 891359 - DNA, 120 bp, Artificial Sequence
  ENSG00000250986_32 (sequence is synthesized)
gactcagtggtctttctcggtctttccaggccctcaagtcctggagggcactgtgggagtgtgaggtggagcccgggagtcccgcggatggagatgaaaatgccagccctgctagatcca

SEQ ID NO: 891360 - DNA, 120 bp, Artificial Sequence
  ENSG00000250986_33 (sequence is synthesized)
ggcgggatggagtgtggggtgtgggcacagtggcttgtacaggcctgggctgggcagacttgccccggagtctcaggccactgcggaaggaggacgcgtggccagcaggtgccaccagga

SEQ ID NO: 891361 - DNA, 120 bp, Artificial Sequence
  ENSG00000250986_34 (sequence is synthesized)
gaggagaggagggccaggctgagctgcatctctggactccaaggagagcttggagaggtgactgaaaccctgccccacccccagcctgtctccatctgtgggtccttgggcaaattgcct

SEQ ID NO: 891362 - DNA, 120 bp, Artificial Sequence
  ENSG00000250986_35 (sequence is synthesized)
catctctctgagcctcgaatgcgtagctttcaggactaactagggtactgtgtaccaactgcctctgccaacgcccctgcactgggcagccctgggtacctggcttgggggaggagtagg

SEQ ID NO: 891363 - DNA, 120 bp, Artificial Sequence
  ENSG00000250986_36 (sequence is synthesized)
cctgggaggagactgatgctacatttctctttatctatccctgtattgtttaatttgttccaagtgcttgagttactttggcaaatagaaacaattctaataaagagaactaagacctta

SEQ ID NO: 891364 - DNA, 120 bp, Artificial Sequence
  ENSG00000250981_0 (sequence is synthesized)
aactgacataagctgacactctgctgtatatcttggcacaatattgctttcatctctggagtcgggtgtcttacaaatttaacattgtcagttgggaccgtccaaagatatttacagtaa

SEQ ID NO: 891365 - DNA, 120 bp, Artificial Sequence
  ENSG00000250981_1 (sequence is synthesized)
tgctgaggtcaagcaatggcagtggaactgtacaggatgtgggggctgggccaaagccgtgggactccggatttattttgtgagttggagaattgtctagtcatcagaccaacagaggag

SEQ ID NO: 891366 - DNA, 120 bp, Artificial Sequence
  ENSG00000250981_2 (sequence is synthesized)
ctcagggtgcgaatatttactgagtgtctctgtggggccatacactactctaggcactggacatacaccagtaaagagaagctgtcctcatctgtcttattttctggtcttaaatctaaa

SEQ ID NO: 891367 - DNA, 120 bp, Artificial Sequence
  ENSG00000250981_3 (sequence is synthesized)
gccaagaggcatttagcagcacaaatcctcttcagcagtcaacactcccaaagtttcaggcactgaggaaaataaaaacaaaactgtggccctttcccaagaagcgcacagtgtccacaa

SEQ ID NO: 891368 - DNA, 120 bp, Artificial Sequence
  ENSG00000250981_4 (sequence is synthesized)
gaatgtgaaagccatctggaaactgataaactgcaaaaagctcagccatcttctgttggcaaaataaaagaatggatgtccttggaagaacgatgtccttggaaagtcatcaaataaaaa

SEQ ID NO: 891369 - DNA, 120 bp, Artificial Sequence
  ENSG00000250988_0 (sequence is synthesized)
ggatttactaggaaggtgggacgttggaggggtggccgcatggagtgagtactgtctctggccaccgagcagagccagtgacagcagcgtcctggtaggcaggcaggcgtatcaggtttc

SEQ ID NO: 891370 - DNA, 120 bp, Artificial Sequence
  ENSG00000250988_1 (sequence is synthesized)
agaggatgcggctgggaacgggagtagaggtatatgagctccctgaaagcacaaagcagttatttccatcttcagatcattcagagattatgaaggcacaaaccctgccttcaatttgct

SEQ ID NO: 891371 - DNA, 120 bp, Artificial Sequence
  ENSG00000250988_2 (sequence is synthesized)
ttaacctctcctgggagggggaggaataaggcagtgtttccaagaggtgattttggagctatacaggcattaggtagacaaggaaggggaggtccattctgggtgcctaggactctgtgg

SEQ ID NO: 891372 - DNA, 120 bp, Artificial Sequence
  ENSG00000250988_3 (sequence is synthesized)
ctgatttataaatcgtaaatggtacaaaaaacagtgttgagtatcttttacctttctccagagtactgttcttacttttggatagtgcttcttgttttttccttccctctccctgtccct

SEQ ID NO: 891373 - DNA, 120 bp, Artificial Sequence
  ENSG00000250988_4 (sequence is synthesized)
cgggagtagaggtgaggggtcgttgcatctgtcgcggtgtgtatcttttgggggttcagcgccaccagcgacttgggcctcattcatcgcgcttacatttctccacctcatttgaagaac

SEQ ID NO: 891374 - DNA, 120 bp, Artificial Sequence
  ENSG00000250988_5 (sequence is synthesized)
agcttatgtgaatgactttctcaggagttataaagtgatacagacttatcagcaggttgcaggtgaacatggccttgagatgttttcttctaaataaatgagaaagatgtttcaacaaag

SEQ ID NO: 891375 - DNA, 120 bp, Artificial Sequence
  ENSG00000250988_6 (sequence is synthesized)
gctctttatgctgaataattgtgatgcttgaagttgctaatctgctttaagtggattttaaatgtcaggcaattctagacagttttttcttggtcaaataaaaatttaattaaaacttta

SEQ ID NO: 891376 - DNA, 120 bp, Artificial Sequence
  ENSG00000250988_7 (sequence is synthesized)
gtttcagtagattgtttatagtagtttcaggaattgagattttttacaaaaatacaaaagttttgcttggttctgttctagatgttttcttctaaataaatgagaaagatgtttcaacaa

SEQ ID NO: 891377 - DNA, 120 bp, Artificial Sequence
  ENSG00000246982_0 (sequence is synthesized)
ggggggagacaagatggcggctgcgggagggggtcctcgcttctcagctcccccgctcacccgccttctccttccctgccgccgccctcgctccaggagagagctttcgcaccgcccccg

SEQ ID NO: 891378 - DNA, 120 bp, Artificial Sequence
  ENSG00000246982_1 (sequence is synthesized)
ccctgctcggtgcctgcacgactcccagaaagtcgcgtctcccctaacccccatgcccaggacctgaggacaaaggtctagcgattgtccatcccctcccccagtgaggacagccgggaa

SEQ ID NO: 891379 - DNA, 120 bp, Artificial Sequence
  ENSG00000246982_2 (sequence is synthesized)
actacagtgttgctgtcctcattttacagatgaagaaactgaggccccagatcacagggctggtgagaagaacgtgatatctccagagctaacacttaactactatagtgtaccacacaa

SEQ ID NO: 891380 - DNA, 120 bp, Artificial Sequence
  ENSG00000246982_3 (sequence is synthesized)
ctaacacttaactactatagtgtaccacacaaggagagagcagcattagagaggggtgccacttcctctgatggaagataaaaaagaaagattgccagcctgggcaacatagtgagaccc

SEQ ID NO: 891381 - DNA, 120 bp, Artificial Sequence
  ENSG00000246982_4 (sequence is synthesized)
ccatggcaatgttttgaggattaaagaggagagtgatgactatccaaacgtcagagaacgcaactatgagactagagacactggaaaactaaaaaagtaacgggcctttgctgactcagg

SEQ ID NO: 891382 - DNA, 120 bp, Artificial Sequence
  ENSG00000246982_5 (sequence is synthesized)
gagatgatttcccaagagggaagaaaactggaacctgagaaataagtgatttagtaatgtggctgctaaaatacggaaaaactagaatgaatggcttacacatttttgaaatgaagttag

SEQ ID NO: 891383 - DNA, 120 bp, Artificial Sequence
  ENSG00000246982_6 (sequence is synthesized)
aagccaaacatttcattcaggtaagcatatcacataggagaaactctaggtgactttggtttggcagtgagtttttagatacaacaccaaagcacaatccataaaagaaaagaaagatag

SEQ ID NO: 891384 - DNA, 120 bp, Artificial Sequence
  ENSG00000246982_7 (sequence is synthesized)
ataagttggacttcattaaaatgaaaaacttctgctctgcaaagacactgttaagagaatgaaaacacatgccacagactatgagaaaatatgtgcaaaacacctatctgataaaggaag

SEQ ID NO: 891385 - DNA, 120 bp, Artificial Sequence
  ENSG00000246982_8 (sequence is synthesized)
tatgtctgaaatacaaagaactcttaaaactcagcaataagaaaatgaacaacctgattaaaatatgggcaaaagagctgaatggaaacctccccaaagaatatatgtagatggcaaatg

SEQ ID NO: 891386 - DNA, 120 bp, Artificial Sequence
  ENSG00000246982_9 (sequence is synthesized)
aacatatgaaaagattctcaacacaatatgtcactagaaaattgcaaattaaaacaagataccagtatacacttattagatgagctaaaatccaaaatactaagaacagcaaatgctgat

SEQ ID NO: 891387 - DNA, 120 bp, Artificial Sequence
  ENSG00000246982_10 (sequence is synthesized)
gaggttgtggagcaacaggagctctcattcattgctggtgggaatgcaaaatgatgcagccacttggaagacagtctggcagtttcttaaagattaaacaaaggcttaccagacactcca

SEQ ID NO: 891388 - DNA, 120 bp, Artificial Sequence
  ENSG00000246982_11 (sequence is synthesized)
ggcgagcccgataagagggctgtggacgttcgggtctagttgggagagacaggggtccctgactcttgagcggtcagtcatttcctccccagtccttgtgggtgacgtggctacggtttg

SEQ ID NO: 891389 - DNA, 120 bp, Artificial Sequence
  ENSG00000246982_12 (sequence is synthesized)
tatccagactggactcaaatttctgggctccaatggtcctctcacctcagcctcccaagtagtcaggactacaggtacacactactgtgcgtggctattgtattttcttgattgttgctt

SEQ ID NO: 891390 - DNA, 120 bp, Artificial Sequence
  ENSG00000246982_13 (sequence is synthesized)
taataatttttatgtgcttccttttactttctttgagttcattctttattttctactgtcatcggttgggtgcttaattatgtcattttcaggttttaatttctaatataagcatacaag

SEQ ID NO: 891391 - DNA, 120 bp, Artificial Sequence
  ENSG00000246985_0 (sequence is synthesized)
ccaccatctcttccttttagagtttgccatctccgtaccaccaccaccaccacacacagcaccctcaagactccctgtgatcctgggatgcactcaacgaagagtgtgtggcccaggatt

SEQ ID NO: 891392 - DNA, 120 bp, Artificial Sequence
  ENSG00000246985_1 (sequence is synthesized)
tgatggaaatgctacaagagaagcaggctctccccttctgaaatgatgagtgataatgaccatacaggtcaacttttccaccacttggagggagcctgtcaaagaacaaaggcaacagag

SEQ ID NO: 891393 - DNA, 120 bp, Artificial Sequence
  ENSG00000246985_2 (sequence is synthesized)
acacttggacttctcaatacaggagccactctgcaggcatttattggcaggctacacctaagactttctctgcagaaaaatgttctagatgcacagatttgggggcttgattgacaacct

SEQ ID NO: 891394 - DNA, 120 bp, Artificial Sequence
  ENSG00000246985_3 (sequence is synthesized)
gacacctcactctaaatccgcatgggtctgttgacctcagggaatatgccctagacacagccctacaatcgaccctgtgctgacctggtgatcctcccacttcttcccaaaataattccg

SEQ ID NO: 891395 - DNA, 120 bp, Artificial Sequence
  ENSG00000246985_4 (sequence is synthesized)
aatttgggaacgagatgcccggggatgcaaccagccccgcgctcggaggcggcggtcggagttccgtgcgcagagggcacacaaaagcctcgaggatcattgcctcgaccccatccccca

SEQ ID NO: 891396 - DNA, 120 bp, Artificial Sequence
  ENSG00000246985_5 (sequence is synthesized)
atgccggaagccgcaccacacttggacttctcaatacaggagccactgagaaaccaagtcatgctgaagacctggaaatcccagcaggctgcaaaccagctgcaactacaatgggtcagc

SEQ ID NO: 891397 - DNA, 120 bp, Artificial Sequence
  ENSG00000246985_6 (sequence is synthesized)
ccttttgagatgctgctgactacccacttatctgccaagttagccagtgttaagccatggattcaccacgctcagataaaacctgcccctctgggatccctccagaaaaaaacaggcatg

SEQ ID NO: 891398 - DNA, 120 bp, Artificial Sequence
  ENSG00000246985_7 (sequence is synthesized)
ctgttgtgaaccctaagatggccttaagttaatattcaatgcccagccaaagaccctaaataagaagtcataaaggaaacatgtgcttttcaggtaccaatcaccctccagatctaagaa

SEQ ID NO: 891399 - DNA, 120 bp, Artificial Sequence
  ENSG00000246985_8 (sequence is synthesized)
tggcttcaggctggggctgcagtcacctctttgcccagcttctcccctgccctattctgcttcacttgcatccttaaaggttccacccaagagctcttctacaagaaagcacctataaag

SEQ ID NO: 891400 - DNA, 120 bp, Artificial Sequence
  ENSG00000246985_9 (sequence is synthesized)
caggagttcaagaccagcctgggcaacttagtgaggccccgtctctataaaaaataaaaaaattaaccaggtgtggtggtgcacgtctctagtctcagctactcaggaggctgtggcagg

SEQ ID NO: 891401 - DNA, 120 bp, Artificial Sequence
  ENSG00000246985_10 (sequence is synthesized)
gcccaggaggttgaggctgcagtgaactaagatcatgccactgcacccatcttgggcaacagaatgagatcctgtctctaaaaaaataaaaacaatttacaacagtaagcacctgtacac

SEQ ID NO: 891402 - DNA, 120 bp, Artificial Sequence
  ENSG00000246985_11 (sequence is synthesized)
caatttacaacagtaagcacctgtacacaagccccatctccagtcctgtttctagggcttccaatttaacacacctagaggctgggcatagtagctcatgcctgtaatcccaatactttg

SEQ ID NO: 891403 - DNA, 79 bp, Artificial Sequence
  ENSG00000246985_12 (sequence is synthesized)
taccacagcctgagcaacgaaagaagactctgtctaaaaaaagtaaaaaataaaataaaacacacctggagctttctac

SEQ ID NO: 891404 - DNA, 120 bp, Artificial Sequence
  ENSG00000246985_13 (sequence is synthesized)
aaagtaaaaaataaaataaaacacacctggagctttctacatcccgtaggtatctgtgtttctttctcgtgccctatttgacagagtttcttgagctcgaatctatgtctactttatctt

SEQ ID NO: 891405 - DNA, 120 bp, Artificial Sequence
  ENSG00000246985_14 (sequence is synthesized)
agccttcctgtaacacctgtctcaatgtcttgcacatatagaatgctcagtagagtttttggaataagtatttcatattttggaatcatttacagagcaggggttaaattcctggcttat

SEQ ID NO: 891406 - DNA, 120 bp, Artificial Sequence
  ENSG00000246985_15 (sequence is synthesized)
tttctctagttcttattctgcaccccctgccctgcaaacctgccacataagcaggtcatttctccacccctcaagatgagggcaaacaacttcagaaactgctcacaaacaggcccctgt

SEQ ID NO: 891407 - DNA, 120 bp, Artificial Sequence
  ENSG00000246985_16 (sequence is synthesized)
ggaaatacctccaggccactggcattcctgcctgctgccagagacctgggaggctgttcactgccttgagtatttttgttctttccaacttctctgccccatcaagttaaacagtcctta

SEQ ID NO: 891408 - DNA, 120 bp, Artificial Sequence
  ENSG00000246985_17 (sequence is synthesized)
aaagcaggcagcaacgctaggccgcggggcagagccgcggttcggactctctcttccccggcgctccgagctgcggaagcccaggccgtccgccgctccccggcgcacgcggccgcgcct

SEQ ID NO: 891409 - DNA, 120 bp, Artificial Sequence
  ENSG00000246985_18 (sequence is synthesized)
cataaaggaaacatgtgcttttcaggttggtattattctccccaaaacccttcttgcatgcaggatgtaatgaatcagaaatagttgttagtaatttttttttttttgagacagagtctc

SEQ ID NO: 891410 - DNA, 89 bp, Artificial Sequence
  ENSG00000246985_19 (sequence is synthesized)
tgaactcctgacctcaagtgagccacatctgcctcagcctcccggagtgctaatgaatcagaaatactttttaataggcttaggattgt

SEQ ID NO: 891411 - DNA, 120 bp, Artificial Sequence
  ENSG00000246985_20 (sequence is synthesized)
gccatgaatcagaaatactttttaataggcttaggattgttctcttggattccttaagggatccactttaattcttgggtgttttttttttttttaatcatggtgctccaacaagcggga

SEQ ID NO: 891412 - DNA, 120 bp, Artificial Sequence
  ENSG00000246985_21 (sequence is synthesized)
tgccagtcaggtaatcctgagcacttcagattcaggggtgatgtttgcatttcccatcattatcccacaatgcaccccttagcattaagtagccaaaaaggcagacaaccatattcccca

SEQ ID NO: 891413 - DNA, 120 bp, Artificial Sequence
  ENSG00000246985_22 (sequence is synthesized)
tgatcgaaaaattgatgaatagaaaaaaggggattaaaaccagcccaattgtcccatagaaatgatattacggtttttaaaagaaacataaaaattaaccttcctgtttttaaaatttaa

SEQ ID NO: 891414 - DNA, 120 bp, Artificial Sequence
  ENSG00000246985_23 (sequence is synthesized)
aacttacatttatctcatctgaattccttcctcaaaaaacagacactcaggcaaaaacaaaaacctaaaactcatcagatcactgtatccagacagagacgccagacccctcatccatca

SEQ ID NO: 891415 - DNA, 120 bp, Artificial Sequence
  ENSG00000246985_24 (sequence is synthesized)
acatttgagactttatctcctgttctccttggctgcaacaccccgttaaagttttcttccctggcaatagttactgtctcagtgattggcattctgtgtaacaagcagcagaacctagac

SEQ ID NO: 891416 - DNA, 120 bp, Artificial Sequence
  ENSG00000246985_25 (sequence is synthesized)
tggaaccctggtgtttcagtaacattaccttgtagtaaatgctgttgtgtcatgcccagattcactttaccaagcccagatcccacagattaaagggctcagctccacaagacttcagac

SEQ ID NO: 891417 - DNA, 120 bp, Artificial Sequence
  ENSG00000246985_26 (sequence is synthesized)
accagccacaaatggggtccccaggtgacccacacttctgcccagtggactataaattcaagggttctgtgactttccctacccagctttgataattcactagaatcctcacagaactca

SEQ ID NO: 891418 - DNA, 120 bp, Artificial Sequence
  ENSG00000246985_27 (sequence is synthesized)
ggaaaatgccatacctactattacactttattatgatggacacacacgagcagccagatggaggggtactgaggaagcatctgaatgcaggaggctctgtccctggagagttgggatgag

SEQ ID NO: 891419 - DNA, 120 bp, Artificial Sequence
  ENSG00000246985_28 (sequence is synthesized)
ccactctcctggatgtgttcaccaactcagaagctctccaagccccattgtgtagggattttttatggcagtttcagtaagtacacatgattgattaaatcattggccattggtgattga

SEQ ID NO: 891420 - DNA, 120 bp, Artificial Sequence
  ENSG00000246985_29 (sequence is synthesized)
actcaatctctagcccctctcctgctctcagaggtggaagagcaaggctggaagttctaaccttctcagtacatggttggtttttcctgtgtccaggtcccatcctaaagctacctaggc

SEQ ID NO: 891421 - DNA, 120 bp, Artificial Sequence
  ENSG00000246985_30 (sequence is synthesized)
cccctctgcccaacaagagtcttctcattagcaaaagagtaatttccaagggtgttaggagctctatgctgggaaccagggaccaagagtaaatatatattttgtattttaccacaggta

SEQ ID NO: 891422 - DNA, 120 bp, Artificial Sequence
  ENSG00000246985_31 (sequence is synthesized)
agtcagcgctccgctcgcgccccgcccggctgctgcggaggcggctttccaggaactttccaggaatcggcctcacgtgaccgcgggccccgctactgctttaaagaggctcggtcgcaa

SEQ ID NO: 891423 - DNA, 66 bp, Artificial Sequence
  ENSG00000280511_0 (sequence is synthesized)
gtgaaaccctatacatactgacagaatatattttgcactacaaaagaagaaatccaagcttgtgaa

SEQ ID NO: 891424 - DNA, 120 bp, Artificial Sequence
  ENSG00000280511_1 (sequence is synthesized)
tatattttgcactacaaaagaagaaatccaagcttgtgaatttggaagtttatgtagatattgctctacacataccactctcttctctaaagtaagctgagttttctctgagaagaaaaa

SEQ ID NO: 891425 - DNA, 120 bp, Artificial Sequence
  ENSG00000280511_2 (sequence is synthesized)
agcacttggcaccggagaagaaaagttttattgccctttgaatggaagcagatggctccaggtctgacacttggcctctgagcccaagctaagccatcttatcccctgtgacctgcacat

SEQ ID NO: 891426 - DNA, 120 bp, Artificial Sequence
  ENSG00000280515_0 (sequence is synthesized)
gtagcatgaatcagtggtgtgttcctttttattgctgaatgatatgtcagtcagatgtctatttaaaagactatgctggttatagaatgaaagatggggtaggaggaggaagaaagtaga

SEQ ID NO: 891427 - DNA, 120 bp, Artificial Sequence
  ENSG00000280515_1 (sequence is synthesized)
ggccaagagaccagttaggagacactggttgttgttcaggccgagacaaagaaggtgtgagttggtagagaggctgtgggcatgaagagagaggactgggtgggaggttacaggtctggg

SEQ ID NO: 891428 - DNA, 120 bp, Artificial Sequence
  ENSG00000280515_2 (sequence is synthesized)
agcaattagtgtacaataggaccattggggaggcttgaccagaggccaggagctacatagggaaagtgagaagcccaggagaggtctgaattcccacagggctaagaaacaggacctgag

SEQ ID NO: 891429 - DNA, 120 bp, Artificial Sequence
  ENSG00000280515_3 (sequence is synthesized)
ctgattgcacctctgggcagattcatacctggctgaaggaacagagtgctctaaggacccaccagccctgcggaccctcctggtggtctgctgccaggctggctccttgggctattggga

SEQ ID NO: 891430 - DNA, 120 bp, Artificial Sequence
  ENSG00000280515_4 (sequence is synthesized)
tgaagataatgagaacatgtttgtcaactgtgcaggtgacacaaatctggaaagaacagcaaatttgggataacaatgttcaaaaacatcttggcgggctccagtgatgggctgtggcaa

SEQ ID NO: 891431 - DNA, 120 bp, Artificial Sequence
  ENSG00000280515_5 (sequence is synthesized)
aatctgggcagctccacgggggtgagacctagtggattatgagtcttctggttacctgtctgtcttcctaggatgctgtgagctttgtgagaacaagaacagtgtctgcaggacacaagg

SEQ ID NO: 891432 - DNA, 120 bp, Artificial Sequence
  ENSG00000280515_6 (sequence is synthesized)
agtgtcatctgaaaaggaccccaacaacttgctctgggtctcagctctgggggtttccccaataaaacctgatccctaacccatactgtatgatgtgcagaaatttatcccaagccctgg

SEQ ID NO: 891433 - DNA, 120 bp, Artificial Sequence
  ENSG00000280515_7 (sequence is synthesized)
taactcaacaggtggtcatcacaatagtgacatcttcttcttcgtatccatttatcaaaccaactgtcatgccagcccatggacaacagaaggcacagaccccttggatgatgggcacct

SEQ ID NO: 891434 - DNA, 120 bp, Artificial Sequence
  ENSG00000280515_8 (sequence is synthesized)
ccaaatacaagtattaagcaggggccccattactgcactctgtttacggtgtcctcattcttggaaactggaaattctgataacatttactgcactgtctaatgatataactagcatatg

SEQ ID NO: 891435 - DNA, 120 bp, Artificial Sequence
  ENSG00000280515_9 (sequence is synthesized)
ctctctgaggcagatctggaaaatataagcaagattaactttttgattaatctctctctcaatacagaatacatgctcagcatattcattcattcatccatacacataggtacacagaca

SEQ ID NO: 891436 - DNA, 120 bp, Artificial Sequence
  ENSG00000280515_10 (sequence is synthesized)
cacacacacacaaacacatacacaccacagattctttctacatatttgggatcaacagtttggcttttagtttcaaattaaaaacatttttctgtccttaagactctttgaaaacagtct

SEQ ID NO: 891437 - DNA, 120 bp, Artificial Sequence
  ENSG00000280515_11 (sequence is synthesized)
gtgcactcagggcatcacaccccaccctatgcaggttccatgactgatgtgcccattcccctctcattgccgtgtaggtggttttggatttggggattggctttggtaagcctaagtctg

SEQ ID NO: 891438 - DNA, 120 bp, Artificial Sequence
  ENSG00000280515_12 (sequence is synthesized)
caaccagtacatcggctgtgtctctcacgtgagcccatgagtccttccccctttaagcaaccttctctcagaacctgcaatccttcctcttctggtccccttgctcctgggtgtgtgtgt

SEQ ID NO: 891439 - DNA, 120 bp, Artificial Sequence
  ENSG00000280515_13 (sequence is synthesized)
aacttccctctgttcctcacctcaagggcaagttatgccctagccccctgcttccccctggccagctagcttctgtgacttcacatcttcacagtcctgcgagaccacaaaaaagatcct

SEQ ID NO: 891440 - DNA, 120 bp, Artificial Sequence
  ENSG00000280515_14 (sequence is synthesized)
tcctggctctctcctgccatctcctgcccactcacatctctagctccctggctgaagcagtacagtgctcgaatgaattagaaaagcaggacaaacctaaatccatgtgaaaacatgcaa

SEQ ID NO: 891441 - DNA, 120 bp, Artificial Sequence
  ENSG00000280515_15 (sequence is synthesized)
taggtttcattgtaaagtcccatggttgctttgttctcagctatctgcatatgacattatgacaagcctgatttagcatctggaaagagacctagaggcataattggttaataagctaaa

SEQ ID NO: 891442 - DNA, 80 bp, Artificial Sequence
  ENSG00000280515_16 (sequence is synthesized)
tggaaagagacctagaggcataattggttaataagctaaagaagaatcaatagtggaatgtggctgtcaaaagagaaagt

SEQ ID NO: 891443 - DNA, 120 bp, Artificial Sequence
  ENSG00000281649_0 (sequence is synthesized)
ggcgcgacaggtgggcggacacagaaggcgacgcctagggctgtgttgtcccggaagtgccttctctcctcccgggtctgcgcggacgcggcctccttacctcatttgtcctcgcccctc

SEQ ID NO: 891444 - DNA, 120 bp, Artificial Sequence
  ENSG00000281649_1 (sequence is synthesized)
cccgtccctctacgcgttttggtccctgtttggtgctttctgtttgcagctacggcagtgagtatatctgggcataggaaccaatcagaaacaatcgcttcagcaatcaagaccattgtt

SEQ ID NO: 891445 - DNA, 120 bp, Artificial Sequence
  ENSG00000281649_2 (sequence is synthesized)
catcatggaggaacccatggatacctctgagcctctatctgcattaccattcactgggcagcagtcttttgagccaagtggcaaatttggacagtatccatcgatgcagatgaaccacat

SEQ ID NO: 891446 - DNA, 120 bp, Artificial Sequence
  ENSG00000281649_3 (sequence is synthesized)
ccaggcactggggaagtggaggacatagaacagctcaatcagtgtttgatccaacacttccatctcattaagacaagtttgatttttctttgctttttatttcatggaatacatgagaat

SEQ ID NO: 891447 - DNA, 120 bp, Artificial Sequence
  ENSG00000281649_4 (sequence is synthesized)
ctcttaactgttggagtttccaaggaggcatacctcatgacttcagttaatggaaagaacaaaactaaaatgctgtatggccaaagccacaaagggaaggatccacaatttacattcttg

SEQ ID NO: 891448 - DNA, 120 bp, Artificial Sequence
  ENSG00000281649_5 (sequence is synthesized)
gagctatcatctgtactgtactgttgtgatctactgattggcattggcatagtagtaggggtcaagtgacagaatccgtgccagcagtctccaggttcagaagcaattcaagaccctgat

SEQ ID NO: 891449 - DNA, 120 bp, Artificial Sequence
  ENSG00000281649_6 (sequence is synthesized)
gatagctctccagcaaccaacacatggtgattgtgccaacttgttgctcagttataatgcagggccagtgattggtttaagtgaagaccatggttgagatcatttgtctttggtctaata

SEQ ID NO: 891450 - DNA, 120 bp, Artificial Sequence
  ENSG00000281649_7 (sequence is synthesized)
gagtctagtagaatttgagtctccagggaaagagctacttgaccaaattaaactagtagcaggtagagcatgaatgacagcatattataccatcaagatgttcttagagcagtgtatgga

SEQ ID NO: 891451 - DNA, 120 bp, Artificial Sequence
  ENSG00000281649_8 (sequence is synthesized)
tggatcgattgtactgccatcagttgtgactgacgttgtattcaaggagaaagagaaacttgtttagaaagcactttgaaagttttttgagtacgggggtgccctgtatcaccccgttat

SEQ ID NO: 891452 - DNA, 120 bp, Artificial Sequence
  ENSG00000281649_9 (sequence is synthesized)
ggttgaactttctccttcaaaattaccagacttggcagcagtggcaaattattgggctaaaagacttaatcagacatattctgggttcaaggctcctaatataatacctggtgcaaacat

SEQ ID NO: 891453 - DNA, 120 bp, Artificial Sequence
  ENSG00000281649_10 (sequence is synthesized)
tatacttccactcattcagatggttgcatcctgccaggcatccagtgggactgggaatatggacacttgaacattaaacatcctgaagaattttggaatgacaggttacaagtgaacata

SEQ ID NO: 891454 - DNA, 120 bp, Artificial Sequence
  ENSG00000281649_11 (sequence is synthesized)
atcagttctctatattaaaaaaaaaaaaagatttgggcatagattgggctcacataatctttagagagattttttcatttttgtgaaagtacagaaattcttaactgcttatgaaatgct

SEQ ID NO: 891455 - DNA, 120 bp, Artificial Sequence
  ENSG00000281649_12 (sequence is synthesized)
gattgttaaacagcatccacagctattttgtgttgtttccctgaccccaccctgaagaaaagaaaaattatggcatattgaaaacagcagtatgatgtaagagaaaagatcacaaattcc

SEQ ID NO: 891456 - DNA, 120 bp, Artificial Sequence
  ENSG00000281649_13 (sequence is synthesized)
ttgagggtgggtcttttccatactcataagcctatttataatattcagagtaatttattgacacatattaatattccctcctatcccattaattgccaaatcatcaaacatttattgagc

SEQ ID NO: 891457 - DNA, 120 bp, Artificial Sequence
  ENSG00000281649_14 (sequence is synthesized)
acctactctgtgtagggtgtaagcagtactggggacttacagtgataaaagacatagttttagccttaagtgatgtactgtttcactgaagagatggaatataagaagccaagtaattta

SEQ ID NO: 891458 - DNA, 120 bp, Artificial Sequence
  ENSG00000281649_15 (sequence is synthesized)
gcctaccctccgtctcgccagccgagctgtggaactagcgcgtgccccctcgccgacctcggcgtctccggtccgcccctcacttgtggtggggcgcagctcctggtccctcagctgcgc

SEQ ID NO: 891459 - DNA, 120 bp, Artificial Sequence
  ENSG00000281649_16 (sequence is synthesized)
gccgccccacgcggccgggctgcgggtctagggggtccgcatctccctggctttccaagggctaaggtcgtgattctagggcggctgggcgtccagggcctcggtgggggtggcgtgtct

SEQ ID NO: 891460 - DNA, 120 bp, Artificial Sequence
  ENSG00000281649_17 (sequence is synthesized)
gccctttttatctccccgcaaggcccccagtcttctagggaagccagtcagtgaagcgcggaggtccgggcgcgccgagagagagtccagtctttgaggaccgagtagtcctgggccacc

SEQ ID NO: 891461 - DNA, 120 bp, Artificial Sequence
  ENSG00000281649_18 (sequence is synthesized)
tcccgcctctgctgtcagaagcagcagctgccgccgtggaatccaaaatttcgggagctgtgaccctttcctcatgtaaaacgagtagtcttggacgatctgggcataggaaccaatcag

SEQ ID NO: 891462 - DNA, 120 bp, Artificial Sequence
  ENSG00000281649_19 (sequence is synthesized)
tagctgggactacaggtgtgaacacagcttggaaatctcttaaccatgggagttaagtctcaaaattctggtgatacaagtggttgaaacttaaaactgtatttaaaaaataggattcgt

SEQ ID NO: 891463 - DNA, 120 bp, Artificial Sequence
  ENSG00000281649_20 (sequence is synthesized)
gaatttgagatagttcataagtctgcaaaaggctgtataaatacatattttacatttactattattaattttgtagtaaatttgagtacagcactctctttatctgtggaaacttcagac

SEQ ID NO: 891464 - DNA, 120 bp, Artificial Sequence
  ENSG00000281649_21 (sequence is synthesized)
tctcccctattactttaatttcagtgagacattattaaatataagtgggcttacacatttgttttgctttactgacaaataatacacaacttggaggcttttttttcctttctattcttc

SEQ ID NO: 891465 - DNA, 120 bp, Artificial Sequence
  ENSG00000281649_22 (sequence is synthesized)
ctctaaatgttcaacacttttctgattttgtgatttgaggttgtttaatagcttcctgaggctccattgagaccgtatatacgtgacacttaacagtctagccttcctcggtacatatag

SEQ ID NO: 891466 - DNA, 120 bp, Artificial Sequence
  ENSG00000281649_23 (sequence is synthesized)
atatatgatggtggctttgcctgtagtaaattcatgccaaaacataggctttcagtgcctattacatatggctttcagctctctctactgagggatgtaggagtttatttctgaggtctg

SEQ ID NO: 891467 - DNA, 120 bp, Artificial Sequence
  ENSG00000281649_24 (sequence is synthesized)
agcctcttttcctttacttcctttactctttcctaagccttctttataaaaactatgcatgttctattgttttcctttttgattccctttcttttattatccccagtaggagtgacttgt

SEQ ID NO: 891468 - DNA, 120 bp, Artificial Sequence
  ENSG00000281649_25 (sequence is synthesized)
aattctcatatgttagaaaggcagatctcctggttgaagaaaagatccacccaagcaagtcagcatgtttaataatttttgagggggatctcaaatgtgggaaggattgttatataagac

SEQ ID NO: 891469 - DNA, 120 bp, Artificial Sequence
  ENSG00000281649_26 (sequence is synthesized)
aaccaaatgatgacatgagacaataaatgctataggaattatggaggaataattagctatttattttcttggttagggaagagatattattagttgtagaagtaattactaacttctaca

SEQ ID NO: 891470 - DNA, 120 bp, Artificial Sequence
  ENSG00000281649_27 (sequence is synthesized)
ttttttattgtggaaatcaaaaatatatatatgaaaataaaatgttataattgacttcagtgtcccataaaccagcttcaacaattaccaaattgtgaccaatctttacacacatgcaca

SEQ ID NO: 891471 - DNA, 120 bp, Artificial Sequence
  ENSG00000281649_28 (sequence is synthesized)
ggtgtccctcagtatctgtggggcattggttctaggaccacttatggataccaacatctatggatgctcaagtccctgatataaaatggtggactatttgcatataacctgtgtacatcc

SEQ ID NO: 891472 - DNA, 120 bp, Artificial Sequence
  ENSG00000281649_29 (sequence is synthesized)
cgtattatttaaatcatccctagatcacttataatacgtaatacaatgtaaatgccatgtaaataactgttatactgtattaaggaataacaacaagaaaaatgtacatgttcagtacag

SEQ ID NO: 891473 - DNA, 120 bp, Artificial Sequence
  ENSG00000281649_30 (sequence is synthesized)
acaagaaaaatgtacatgttcagtacagacgcaattttttttgtgtgtggaatattttcattccaaggtcagttgaacccatggacataggaggctgactgtgtgtgtgtgtgtgtgtgt

SEQ ID NO: 891474 - DNA, 120 bp, Artificial Sequence
  ENSG00000281649_31 (sequence is synthesized)
atatttctgaaatgtaaatattctcttcttaaaaaaattattatcacagctaaacaaattaccagtaattcttttatcctcatatacccggtgttcagattttctagattggctcctaat

SEQ ID NO: 891475 - DNA, 120 bp, Artificial Sequence
  ENSG00000281649_32 (sequence is synthesized)
ttttttacagattatttgaatctgattcaattcatgtactgtaatgtttgataacttaagtaccctttataggttctcttttacctcttctttattaaattccttgtaatttgttgtact

SEQ ID NO: 891476 - DNA, 120 bp, Artificial Sequence
  ENSG00000281649_33 (sequence is synthesized)
aaatagattgtcttctagaatttcctgtagtctgaattatgtagtattgtttcacatgttccagtgtcctcttatttcctgtgagttggtagttagatctagaagcttgattaaattcag

SEQ ID NO: 891477 - DNA, 120 bp, Artificial Sequence
  ENSG00000281649_34 (sequence is synthesized)
attttctctctttagatcatcaactttagatcatcaacttggatcatttgtttcattttgcttttgatatgttgttttttagaattacctcttaaaattttgatttaattttataatcat

SEQ ID NO: 891478 - DNA, 120 bp, Artificial Sequence
  ENSG00000281649_35 (sequence is synthesized)
gtaaaatgtttataaatttccaaattcagatcagcaaaacacaataaaatctattcagagaaggcaaaccttctgtccagtctccatcctgttcctgctcttccccttatgggtaaccat

SEQ ID NO: 891479 - DNA, 120 bp, Artificial Sequence
  ENSG00000281649_36 (sequence is synthesized)
atgggtaaccattaagagaaaattggtggttggtccttacatttaaaaatatatataatcaaaaaactgtatatctttgtaccctctttcttaaatttattttatttatttatttattta

SEQ ID NO: 891480 - DNA, 120 bp, Artificial Sequence
  ENSG00000281649_37 (sequence is synthesized)
gtctgcgcggacgcggcctccttacctcatttgtcctcgcccctccccgtccctctacgcgttttggtccctgtttggtgctttctgtttgcagctacggcagtgagtatgaccgttaga

SEQ ID NO: 891481 - DNA, 120 bp, Artificial Sequence
  ENSG00000281649_38 (sequence is synthesized)
tgtatacttaggaaggcattatgctttcaagagaatctgaggatggggaataaagtcaggaaggatcgcaagtgaggattatattaatatgataattagcacggtaagagactgcatgac

SEQ ID NO: 891482 - DNA, 120 bp, Artificial Sequence
  ENSG00000281649_39 (sequence is synthesized)
tgtttggtgctttctgtttgcagctacggcagtgagtatgctggagtgtagtggcgtgatcatagctcactgtcaactttgaacacttgggctcaagctatcctccctcagcctcccaag

SEQ ID NO: 891483 - DNA, 120 bp, Artificial Sequence
  ENSG00000281649_40 (sequence is synthesized)
gtagttttccttgcgggcgtagagggcacgaactcccggcttttgcccgataaatagcatctcttttgtacgagtcattcaaataatagacgcaatctaggctggagtgtagtggcgtga

SEQ ID NO: 891484 - DNA, 72 bp, Artificial Sequence
  ENSG00000281649_41 (sequence is synthesized)
ctactaaatatacaaaaattagccggcgtggtggcgcatgcctgtactcccagttactcgggaggctgaagc

SEQ ID NO: 891485 - DNA, 120 bp, Artificial Sequence
  ENSG00000281649_42 (sequence is synthesized)
aacttttgggaagagctgccggttcggtggaaaagctgtggctgggaatcaggaggcctgggttctagccgtggctcccccacggactcgctggcgattccagaaagctcttattgaggc

SEQ ID NO: 891486 - DNA, 120 bp, Artificial Sequence
  ENSG00000281649_43 (sequence is synthesized)
tgaatttaagattatatcagattacacagttgaattaggggctccattagtagggcccttttagctcagtgaataagtttctccaactataaaacgagagcgttcaatttgatgactttt

SEQ ID NO: 891487 - DNA, 120 bp, Artificial Sequence
  ENSG00000281649_44 (sequence is synthesized)
caggtcccctcagaagctcttgactttgtggttttctttttcttttaaaaaattttttctaggaccgttagagaaatgacttcgtgtttgaatagttaggctgtcgcatacaaagacttt

SEQ ID NO: 891488 - DNA, 120 bp, Artificial Sequence
  ENSG00000281649_45 (sequence is synthesized)
atttagcttattttttttcccccactgaaatactgtgctctgcctctgttttgtgacctttgttttacacatttggtttctccactccaatctcagatttgattcagagtggccgtggca

SEQ ID NO: 891489 - DNA, 120 bp, Artificial Sequence
  ENSG00000281649_46 (sequence is synthesized)
tttgaaaaatggacattttaaccccttagtcaattgtgtttcacctgtcactatcaggatagctcattaatagtaagaaagaaattttacgttgaaagtaaagtgtgttcagcatattgc

SEQ ID NO: 891490 - DNA, 120 bp, Artificial Sequence
  ENSG00000281649_47 (sequence is synthesized)
agtgaaatttggactgaaaatgaggctgtggatttgatttaaatcggcccgagatagattcctatgtcgtcaagaaggaacatctagggaggctaaaggtgctttggaagtaaataagag

SEQ ID NO: 891491 - DNA, 120 bp, Artificial Sequence
  ENSG00000281649_48 (sequence is synthesized)
agtaaataagagcaaaaggtcagaatgaccagtaggtaggctgtgagaccagaaagattgattaaagaccgggcgcggtggctgacgcctgtaaatctcagcactttgggaggccgaggc

SEQ ID NO: 891492 - DNA, 120 bp, Artificial Sequence
  ENSG00000281649_49 (sequence is synthesized)
aagcttaaataagccttaagttgtctagtttaaaacaattcagtcaatgaatactactccctcttttgaatgggaagagcctttgcagttattctatagctgttttatatttgttaagct

SEQ ID NO: 891493 - DNA, 120 bp, Artificial Sequence
  ENSG00000281649_50 (sequence is synthesized)
attttgattcttagataagtttcatttccatttccatgatattttaggatcttatataagaaatatcttttctggtcacgggattgataaagtctttgagtactaacttgggagattctt

SEQ ID NO: 891494 - DNA, 120 bp, Artificial Sequence
  ENSG00000281649_51 (sequence is synthesized)
ggatgataaactgacaaatgtgtgtttttcttccaacgaaaatgtctcattcatagttgttaaactctgctgggaggtaaaatggatatttgtgaggtaaacttaggtgttagaaccaat

SEQ ID NO: 891495 - DNA, 120 bp, Artificial Sequence
  ENSG00000281649_52 (sequence is synthesized)
gcaaatacttcaatgaaggaaggtgtttttttactttgaaattacttatttggaaattttatttaaaaattttagtggacagttggctgagaatcacagaaacgtgaatcacttctagct

SEQ ID NO: 891496 - DNA, 120 bp, Artificial Sequence
  ENSG00000281649_53 (sequence is synthesized)
gtgttcttaaccagctgcataaccttggataggcctcctatctctttgtacttcagtttcctgtgggtagattgagtagtctgtatgagataatctgattttgttatctagttagtatac

SEQ ID NO: 891497 - DNA, 120 bp, Artificial Sequence
  ENSG00000281649_54 (sequence is synthesized)
ttgggagtcaacgtacagggatcaaaaagctgagaaagccttctgagtcaagggtttgtttgtgtgtatgtaaaaaaacatatatattgtcctctgagaatactcttttttaaaaaagtt

SEQ ID NO: 891498 - DNA, 120 bp, Artificial Sequence
  ENSG00000281649_55 (sequence is synthesized)
attaaattcatttgaatgtaattaaagcggtaacataaaccacaacagcctcaggcagactttaaccctggcatacataagctacctaaataagagagcaggttatgcccagcacaattt

SEQ ID NO: 891499 - DNA, 120 bp, Artificial Sequence
  ENSG00000281649_56 (sequence is synthesized)
tcaagtacagacggtacaaaatcctcttaaaggccataggggctaaattgttaaattcatttttctacattttagagaaagagataaatccttcgacccagggaagtcagtttttattat

SEQ ID NO: 891500 - DNA, 120 bp, Artificial Sequence
  ENSG00000281649_57 (sequence is synthesized)
ggttctgtagtttatttttggcatacattcacaggtgtgcctatggctctattcttaatccctttcctttgggatggctgcaagagtagtacaaatttgtaactgtaatttagctcttta

SEQ ID NO: 891501 - DNA, 120 bp, Artificial Sequence
  ENSG00000281649_58 (sequence is synthesized)
atttttttctgtgctgcactggaattatgttttatcttaagtccacactggatcctcaggatggatccagtgaggattttgaaagaagcataattcctttgacttcttttagaattaatt

SEQ ID NO: 891502 - DNA, 120 bp, Artificial Sequence
  ENSG00000281649_59 (sequence is synthesized)
tacctattaaataaaaaggaaaggattcatcttttatttgaattcctctgaggctaacaattcaatataaactgatgaatgctatgagcattattcagacaatcacattcaatttgtgtg

SEQ ID NO: 891503 - DNA, 120 bp, Artificial Sequence
  ENSG00000281649_60 (sequence is synthesized)
acaataacagcatagccacctgaaggacagtacaacaagggcacaggtatatgataccttttagaagaaaagcattaacaggtgggtttatttatttctggaaaacaaaaaactccagca

SEQ ID NO: 891504 - DNA, 120 bp, Artificial Sequence
  ENSG00000281649_61 (sequence is synthesized)
agaatgtagtacatttttggctcttgtccatttggttcttgggattaagctggttctattaccagaactagcatcacaacaccctgacattttgggcagaaatttgagtggctaagaaaa

SEQ ID NO: 891505 - DNA, 120 bp, Artificial Sequence
  ENSG00000281649_62 (sequence is synthesized)
caactatttttaactttatgtgtatagctacaagtggaaaaaagaataaattggcattgttattgctgtctgggctgtccttgatttttggacacaagcttatttttccagagctctcat

SEQ ID NO: 891506 - DNA, 120 bp, Artificial Sequence
  ENSG00000281649_63 (sequence is synthesized)
tttagtcagtagtccatcagtacctaatggaaacatctactgtgtagatatgagaatttctaagactttggagtagttgaaagacagcagagaaatttatcctatcataatttctgtatt

SEQ ID NO: 891507 - DNA, 120 bp, Artificial Sequence
  ENSG00000281649_64 (sequence is synthesized)
ttaagcacatactagatttatcagggctgaaggacaaatggcctggtgttataattcatttataaattcaacagatacttatagatggcccccaaaataccagttaccctgcttggcttt

SEQ ID NO: 891508 - DNA, 120 bp, Artificial Sequence
  ENSG00000281649_65 (sequence is synthesized)
ttgaaatgtaaagtgctatgaaagcctataaaaggggcatttaatttaatctggtgggaagtgattttgagccaagtttaaaagatgaaggctgagaaggatttaatatgctcacagtac

SEQ ID NO: 891509 - DNA, 120 bp, Artificial Sequence
  ENSG00000281649_66 (sequence is synthesized)
taagtgtttcactttatgcatttattcccaaagttgggagttttctctcaattttaggtctttattacgtttgtattttatacacagttttataacaagcacaggaataaacaggtttat

SEQ ID NO: 891510 - DNA, 120 bp, Artificial Sequence
  ENSG00000281649_67 (sequence is synthesized)
cttacttacaaaaacaggtggctggctcagactgtagtttgctaaccctgagaacttgacagcaaaaagaagagataaatagtagttaaaacataaagcagaatcaaataaatttttttt

SEQ ID NO: 891511 - DNA, 120 bp, Artificial Sequence
  ENSG00000281649_68 (sequence is synthesized)
ccatataggtgagatctgataatgtttttaggtagaaaggaagaaacttgtgaagcaggagagactaaacctgtttgatgtttttggttgggggccaggttagagataggatcgggtgta

SEQ ID NO: 891512 - DNA, 120 bp, Artificial Sequence
  ENSG00000281649_69 (sequence is synthesized)
tgtgttgttgaattattcctaaaagggaagagagacaccagtaattgcaaaatcatcaagtatttatagaggtagaggagaaagaataaattcagatgtgttgagatagatgagagtacc

SEQ ID NO: 891513 - DNA, 120 bp, Artificial Sequence
  ENSG00000281649_70 (sequence is synthesized)
tatgaggatttgtttgatttgggaaaatgaaagcagaagtaggagaagcagaagtaggagaaattcagatgtgttgagatagatgagagtacctatgaggatttgtttgatttgggaaaa

SEQ ID NO: 891514 - DNA, 120 bp, Artificial Sequence
  ENSG00000281649_71 (sequence is synthesized)
tgaaagcagaagtaggagagggcagaggataattggaagcttagaatggggaaaggatgtctgtgctgtggggaatactttcaggcagttgttaccagtattttgaagatgacaacttgt

SEQ ID NO: 891515 - DNA, 120 bp, Artificial Sequence
  ENSG00000281649_72 (sequence is synthesized)
ttaacctcgaaacaatttgtggaccaccccatgattgtagttacatttttagtattcatcaatggagaatatgcatattagaaaaaagctactactcagttctctcttagatgactttgt

SEQ ID NO: 891516 - DNA, 120 bp, Artificial Sequence
  ENSG00000281649_73 (sequence is synthesized)
attttattaaccacaacatggactgcacatttgaaaaatgttaatacatgtatgtgagaaattgtctttatgtaatgcaatgccctgggtacccactgagataactaatttaacagcttc

SEQ ID NO: 891517 - DNA, 120 bp, Artificial Sequence
  ENSG00000281649_74 (sequence is synthesized)
ccaggaggctgaaagctcataagttagaaatcattgcgttctaatgaatcaacaataagagaataaaggattgcttagaagtagtattctgtcaaaattaaaatgaacttataatgaact

SEQ ID NO: 891518 - DNA, 120 bp, Artificial Sequence
  ENSG00000281649_75 (sequence is synthesized)
cactttgaaggattccataactttttattcagtagtacttggcagttttgagcaagatgacagaaacaaaatgatctagggttaggcataacattgtatagaaggccagaataaacattt

SEQ ID NO: 891519 - DNA, 120 bp, Artificial Sequence
  ENSG00000281649_76 (sequence is synthesized)
agcttattctttctctaaattaccttttcctgagatcacacccagtttcattaatcacttctgtatttatggtgatcaaattggcatctcattttcttaaccgttttgttgatttcatgt

SEQ ID NO: 891520 - DNA, 120 bp, Artificial Sequence
  ENSG00000281649_77 (sequence is synthesized)
tccccatttacaccttactgaatatttccatttgggtatcttactgtttcacatttaacctactgaaaagaaagcttcttatctttcctttgaaacgagctctctgctgatttctacttg

SEQ ID NO: 891521 - DNA, 120 bp, Artificial Sequence
  ENSG00000281649_78 (sequence is synthesized)
ggattcattgaagaaattgaacagcatcatgactggtaaatgatggtgatgagaaagtagagaaaacctactgtttgctcttaccatttgttttttaaattttagccaaatcaagttctt

SEQ ID NO: 891522 - DNA, 120 bp, Artificial Sequence
  ENSG00000281649_79 (sequence is synthesized)
gactcatacactcttacaaatattcaaatatatgttctctattttgtttccttaatccaataatgttgtaatccttttccaattaataagcaatatgttcaataccgatgcccatttaag

SEQ ID NO: 891523 - DNA, 120 bp, Artificial Sequence
  ENSG00000281649_80 (sequence is synthesized)
ctctcctcccgggtctgcgcggacgcggcctccttacctcatttgtcctcgcccctccccgtccctctacgcgttttggtccctgtttggtgctttctgtttgcagctacggcagctgga

SEQ ID NO: 891524 - DNA, 89 bp, Artificial Sequence
  ENSG00000237429_0 (sequence is synthesized)
cccaggagctgtgtgtgtctgtgtgtctgtctacctggcaaggagatatggcccccatcagactggagctccacagagcagggaactgg

SEQ ID NO: 891525 - DNA, 120 bp, Artificial Sequence
  ENSG00000237429_1 (sequence is synthesized)
actgtacagtgaagcacagacttctgagccagactgcttggtctgaactctggtgtcaccacttagtaagttctggtttgaatgtactcactgagtggtcttcataaattacctctctgc

SEQ ID NO: 891526 - DNA, 120 bp, Artificial Sequence
  ENSG00000281641_0 (sequence is synthesized)
acactcgtctccacacctcctacctcaaagtcctacgcacctacccttcacgtctctccaaagcaactgaattaaagcgcctactggccttggcggcgcaggtcccaagattttgactga

SEQ ID NO: 891527 - DNA, 120 bp, Artificial Sequence
  ENSG00000281641_1 (sequence is synthesized)
ttggttgtacgactagagttgctggagttcaagtattttcattttaactattcaactgaaagcagtgcgttacaacagaacacgggttccaaagaatttactgagaagaagcaaagtaat

SEQ ID NO: 891528 - DNA, 120 bp, Artificial Sequence
  ENSG00000281641_2 (sequence is synthesized)
atatatagaataaagcaaaaatcatcagaaactccaccgtcttggatgaccatagttgatattctgaatggcttctgttccgattgaaccttgactgatgtagcacctatcaccaaattg

SEQ ID NO: 891529 - DNA, 120 bp, Artificial Sequence
  ENSG00000281641_3 (sequence is synthesized)
ctgttcaggaaatatgtcctaaagaaactcccaacagcagcaatacatcagagtggcacctctttacactggttcttgaaagaaaaacaaaagtgtccaagtgactcatcttacagcgcc

SEQ ID NO: 891530 - DNA, 120 bp, Artificial Sequence
  ENSG00000281641_4 (sequence is synthesized)
actggaaagcatggcagagcttcattagaactaaattttaacaagtggctaaagcagagagcacagggaatatgacttcttctgtgatcactctgccagcccttgttctcccattaggag

SEQ ID NO: 891531 - DNA, 120 bp, Artificial Sequence
  ENSG00000281641_5 (sequence is synthesized)
gaggggggccaaccaagcatccccagccccggggccacccagcctgctccggagggagggggcagggaaaaagggcatctcggggccaaaacctcatgccggatcctccggctttccccc

SEQ ID NO: 891532 - DNA, 120 bp, Artificial Sequence
  ENSG00000281641_6 (sequence is synthesized)
actgtgtccactgccctctggtagcacctgaggatcatggaaattaaatcctggtagataaaggggaagacgtaaggaagacaagacaagggactgaggaaatgttggggaagatgagaa

SEQ ID NO: 891533 - DNA, 120 bp, Artificial Sequence
  ENSG00000281641_7 (sequence is synthesized)
cacctcagaaaccacaattgaagaattcctaggacccccaggaaaggggcacatccagaaaggagataagatcagaagcctttatttccactattcagccactcactgcctgagacttaa

SEQ ID NO: 891534 - DNA, 120 bp, Artificial Sequence
  ENSG00000281641_8 (sequence is synthesized)
ccctaagagaaaaaaaattaggtaagatcataagtaagaaaggattttttgaattaaaaatatatgcaaatgcaagttataacaatttttgttctggatatttttgcagtagatagaaaa

SEQ ID NO: 891535 - DNA, 120 bp, Artificial Sequence
  ENSG00000281641_9 (sequence is synthesized)
gttctttgtgctgtggccacctgcctaatgctgttgactggctggtaatagatgcctgggagtcattttgaggttacttagagcctctttccaccaccagatggaaggaaattgggcaac

SEQ ID NO: 891536 - DNA, 120 bp, Artificial Sequence
  ENSG00000281641_10 (sequence is synthesized)
ttcttgagtaattggctcttctgactcacgtttcttgcattgtgacctgggtgctacccaggatgagcaaggaatttcctctctggagttgtttaaggaatagcccaaacgttcagcttc

SEQ ID NO: 891537 - DNA, 120 bp, Artificial Sequence
  ENSG00000281641_11 (sequence is synthesized)
atctttttttaatgccgcctctaacactacctgagcagccacagaaaagtatttgctgctgcagtattttggatcagctgaaatatattttgagtatgtactctgggaaaggcacagaat

SEQ ID NO: 891538 - DNA, 120 bp, Artificial Sequence
  ENSG00000281641_12 (sequence is synthesized)
accatttctttactgagattctcttcaaggatttccatccctccttaaagacctagttgggatggagcaatgtatttagaacatgatgtgagtaccaacaaggagtcgggagacaccttt

SEQ ID NO: 891539 - DNA, 120 bp, Artificial Sequence
  ENSG00000281641_13 (sequence is synthesized)
tagctgtacttctttatctttctctccttgcttcctctgtctctggtttccccttttgcatctcttgtttttcctttcttttcttgtattactttctcttgatcaatagagctgccatag

SEQ ID NO: 891540 - DNA, 120 bp, Artificial Sequence
  ENSG00000281641_14 (sequence is synthesized)
ccttcccagacataaataatcagcttccttggaagtactcagaatgtgaacagctgtagccacttagacctggtcttagattctcaccccttgttgtgtattgtaattatctagggaact

SEQ ID NO: 891541 - DNA, 120 bp, Artificial Sequence
  ENSG00000281641_15 (sequence is synthesized)
taaaaggtactgaggcatgggccccaatggaatcattatccctggggggtggggtgggccctagacctggtattttcaaaaactttcaaaaattattctaacacatacgcagattaaact

SEQ ID NO: 891542 - DNA, 120 bp, Artificial Sequence
  ENSG00000281641_16 (sequence is synthesized)
gatttcatttttgttaataaagttaggaaagctggaagtggctggctgtggatctctgaacctgagatagcccaaaggcaagagtttcccgagtttatgggtgctgagtataggagctgg

SEQ ID NO: 891543 - DNA, 120 bp, Artificial Sequence
  ENSG00000281641_17 (sequence is synthesized)
gttgttgctacttcaggttgttaagacagtcgttataaggggagcaagagtcagattagttcaatttctttctcctggggcagggaggagagggagcagcaagccagcctcgtggccttc

SEQ ID NO: 891544 - DNA, 120 bp, Artificial Sequence
  ENSG00000281641_18 (sequence is synthesized)
tcgtctctagcctacaaggaataggctgatttccccttggcaaggcgcctgaagcagctggcaggcaagccctcctcttcctacttcagtacgccctctgacctgactgcactcagaaac

SEQ ID NO: 891545 - DNA, 120 bp, Artificial Sequence
  ENSG00000281641_19 (sequence is synthesized)
caaaattctgcaggtgaatgtaggctcccatttcgtcccacaatcatttcatcattcaggcacagcttgacctctaatgtgacatcacaaacccttccggtccacagtttttttttcttc

SEQ ID NO: 891546 - DNA, 120 bp, Artificial Sequence
  ENSG00000281641_20 (sequence is synthesized)
ttcagaaactacctaaacaaggaagtttgtgttccaaggtaagataacctgaaatgaaaaactcaggatccctcacgaacagcctgaccctgctttcaaccaggaagttcaagggaggca

SEQ ID NO: 891547 - DNA, 120 bp, Artificial Sequence
  ENSG00000281641_21 (sequence is synthesized)
gaggattaactgcttctggggtggctgagtgtggtagaggaaaaacagaagaaactccaaggtgaaattagaaatcttagaagagctcttctttctcccatagagagaagatgtcagagt

SEQ ID NO: 891548 - DNA, 120 bp, Artificial Sequence
  ENSG00000281641_22 (sequence is synthesized)
ttgataacttaaagactgagaacatcttctgggttttgatgtggatgtgtggctctctaagggccacctcccagaatgctgcttgaaggctctctattcaggttgaagctatttaccaca

SEQ ID NO: 891549 - DNA, 120 bp, Artificial Sequence
  ENSG00000281641_23 (sequence is synthesized)
tgaccaaagtggagttctttcccagagatactcatgatggtaggaagaacccaggccaactgcagcaagcaggctaagcaaaactaaagcttggctaacttcagtaatattttaaatgaa

SEQ ID NO: 891550 - DNA, 120 bp, Artificial Sequence
  ENSG00000281641_24 (sequence is synthesized)
caaaaggagttagctgtccagctattgcttcttgattcagagatggagactctcttcaccttacccaaatactgacgtatcaaagaactggatggattaatttcaaaatgcaaagggccc

SEQ ID NO: 891551 - DNA, 120 bp, Artificial Sequence
  ENSG00000281641_25 (sequence is synthesized)
ttataaaaggatgtgaggatggactgagggatctgaaggacactgtctcttctgttctctttgtgtgcacacttaggctcttgagcccatgaagtctcctcaaaataggataaatcatta

SEQ ID NO: 891552 - DNA, 120 bp, Artificial Sequence
  ENSG00000281641_26 (sequence is synthesized)
attaaaatgtttaatgaggagaaaaagaacatagaaaaaaggaacaaactctctgattgagggtgtatgtgaggttgcctattaactctaagatagtttgggttcatgaaagctagagat

SEQ ID NO: 891553 - DNA, 120 bp, Artificial Sequence
  ENSG00000225303_0 (sequence is synthesized)
tctccacactagtcattattttcaagactagactactacccatcctcagaagagttattcattgctaggtatttgctcctgcagaactagaatcaagaaaccctaaaggaacttgccagt

SEQ ID NO: 891554 - DNA, 120 bp, Artificial Sequence
  ENSG00000225303_1 (sequence is synthesized)
gaaaggtcaagaggaacacttaagctcaggacaatcatcatgggccaagtctgccacagaaagcaagtactggactgaagccagttcccaacctgaggtctcaggagatctatatcttga

SEQ ID NO: 891555 - DNA, 120 bp, Artificial Sequence
  ENSG00000225303_2 (sequence is synthesized)
acccttttgttgagtgagagtgacctggtttttgcaaccaaaagacagagcttatgatagcaacctaagttaaaatcttatatcaagacctaccactgacatatttagtaaggataaaac

SEQ ID NO: 891556 - DNA, 120 bp, Artificial Sequence
  ENSG00000225300_0 (sequence is synthesized)
ctgcttctgcttctcgctgacgcgcgctgctggtgcaagcggccttgcgccttgggactgggtctgaggagggaggagttattcatccccccaagctttcggccccggggagaatctttc

SEQ ID NO: 891557 - DNA, 120 bp, Artificial Sequence
  ENSG00000225300_1 (sequence is synthesized)
attcctgtctatttggttatagaaaaagggaaaaggggcgactttctccataactacttcaggtgtgacatagggggtggcgtgggcacctcggaaaaaaagaaaaaattttggcgtatt

SEQ ID NO: 891558 - DNA, 120 bp, Artificial Sequence
  ENSG00000225300_2 (sequence is synthesized)
cttgagagacgggttggtatccatcgtgtcgttgtagcaggagcatcgtctggattgtctggcggttaactgtagtttcaacaagagttttaatggcttttattatcagtgggataccac

SEQ ID NO: 891559 - DNA, 120 bp, Artificial Sequence
  ENSG00000225300_3 (sequence is synthesized)
aggggagaaacaggaggaccccaatgatgaagattactgtccctaccagcgttttaaatccccctaaattagagaaccaccctcctagaaggtttgttgggtcccatcccttccaggttt

SEQ ID NO: 891560 - DNA, 120 bp, Artificial Sequence
  ENSG00000225300_4 (sequence is synthesized)
ggactggtacacgggctacttttctgatgtttgaagcgatttctagaaccgcttttccattatcatctatgttaagacagcaattggacatgttaaacttagcacagaccgcaccctctt

SEQ ID NO: 891561 - DNA, 120 bp, Artificial Sequence
  ENSG00000225300_5 (sequence is synthesized)
ctgttaataagtagtctagagccagcctgttttgataaattgctgggtgcgtttggttttgttgtcacacgagcatttccagggctgaggcggtttggttagtgattatctctagagcag

SEQ ID NO: 891562 - DNA, 120 bp, Artificial Sequence
  ENSG00000225300_6 (sequence is synthesized)
cctgtagtctaattattctatttaggatatatgtgggagtgcgataaccccgtgaaccatcctcagcccaggtggcaggaccgtaatattcgatgatccattgcggaggccactcgtcct

SEQ ID NO: 891563 - DNA, 120 bp, Artificial Sequence
  ENSG00000225300_7 (sequence is synthesized)
ctcacggtctttggcttcctcctgcctttaaggaccgtttttctctggttatcatacgcagggactccgagggtgttgcccgcctgctttggaagtaagatgaatccaggttgaattgtg

SEQ ID NO: 891564 - DNA, 120 bp, Artificial Sequence
  ENSG00000225300_8 (sequence is synthesized)
gttccccatatccaaaggaatccatcggggcagtccgtcgtcagctggtgttcctaggattgtcgcatagtgcacttaggcaggcgtatgtggcagaagagttagtggtgtttgtacagt

SEQ ID NO: 891565 - DNA, 120 bp, Artificial Sequence
  ENSG00000225300_9 (sequence is synthesized)
tccaggccttttttgacaagacacaattgaggtagctgaagttagagggagaccaggctccggggggtaaccttggccaccactcggctgtggaggcgttgactgttagggtttggtgac

SEQ ID NO: 891566 - DNA, 120 bp, Artificial Sequence
  ENSG00000225300_10 (sequence is synthesized)
gggctttcacctgcggcacgatgggttttatcagtccacttgcgggatatgcacgccgtccctcttactgggttggtaagtgtccaggtcgacgggcgttcctgagaattcaaagtgagg

SEQ ID NO: 891567 - DNA, 120 bp, Artificial Sequence
  ENSG00000225300_11 (sequence is synthesized)
ctggggttttgaaatgctagtaattaagggggaaggtctatcccatgccacggccactgttcactcctgcgggctcccccgcatacccagcaattggacacattcgtggaagtgtccctg

SEQ ID NO: 891568 - DNA, 120 bp, Artificial Sequence
  ENSG00000225300_12 (sequence is synthesized)
tctgacgtcactgctacgtggtacccggatggcctctctctcgatcctcaggagtaatgtcttccggccagccctcttcctgcttcggctaccttggtgacacatgctgctggcgcaagt

SEQ ID NO: 891569 - DNA, 90 bp, Artificial Sequence
  ENSG00000225300_13 (sequence is synthesized)
cctgagaagggaggagttattcatccccccaagctttcaggccccggggagaatctttcaacgcttaccggatcacgaggccaagagatc

SEQ ID NO: 891570 - DNA, 61 bp, Artificial Sequence
  ENSG00000225300_14 (sequence is synthesized)
ccagcactttgggagacagaggtgggcggatcacgaggccaagagatcgcgaccatcctca

SEQ ID NO: 891571 - DNA, 120 bp, Artificial Sequence
  ENSG00000286914_0 (sequence is synthesized)
agagaaacaactgtagaggagcaagagatgatggtgactcagaccaaagtggaagcagtggaggtgaggagagctggtcaaattccaggcagtacctgaaacacattcatcacagtcaaa

SEQ ID NO: 891572 - DNA, 120 bp, Artificial Sequence
  ENSG00000286914_1 (sequence is synthesized)
aggaagtgaagagacacagaagggaagcaagatactgagatgctgccaagtatcccagagtccatgatggagtagagatgaaacaatagacccaggtcattcctctgctggaggttctga

SEQ ID NO: 891573 - DNA, 120 bp, Artificial Sequence
  ENSG00000286914_2 (sequence is synthesized)
gagcaactgactcaccgcagcatgttgttatgtggacctcgagtctgtggactagtgaccttcacctccttcagtgtgtgggtctgtccagggcttccatccctccagtaagaaccctaa

SEQ ID NO: 891574 - DNA, 120 bp, Artificial Sequence
  ENSG00000286914_3 (sequence is synthesized)
cccacattcctgcatttgataactttgagttaaatcaagaaaagcttggaaatttggacatagttgtttataagtcactcatattatctattaaagtctaaaaatgttgtagtccctgaa

SEQ ID NO: 891575 - DNA, 120 bp, Artificial Sequence
  ENSG00000286917_0 (sequence is synthesized)
gggtagggagactgaaccaaggagacaggagatgaagattcctccatgaaccattacattggccacagagatgggtccatgacaaaatttgtgtcaacacttgtcaatcctaggggtttt

SEQ ID NO: 891576 - DNA, 120 bp, Artificial Sequence
  ENSG00000286917_1 (sequence is synthesized)
ctggcagccacgtgcccaccaacaatcaagagctaagaattgggcaacatcatggaaggaagactgtggggaaaaagaaactgagtccctgctgaggcttgttgcttacctgaggccaac

SEQ ID NO: 891577 - DNA, 120 bp, Artificial Sequence
  ENSG00000286917_2 (sequence is synthesized)
catgcccttgaactcttctcttttgtgaagagatacattctctttacttttaaaaattcattttattgaatcttctcttccttgcaacctgtaaatatattcatattacaaagtcccaaa

SEQ ID NO: 891578 - DNA, 120 bp, Artificial Sequence
  ENSG00000286910_0 (sequence is synthesized)
aacaaaccaagtgctttacaaccttgctgctcaaagtgtggtccacagaccagcagcatcgcctgggagatggatcgaaattctgaatttcaggctctgccccaaacctactgaatcagg

SEQ ID NO: 891579 - DNA, 120 bp, Artificial Sequence
  ENSG00000286910_1 (sequence is synthesized)
atctgcattttaacaaagtcccattgatttgcaggcatattaaagtctgagtgccctgctttagtgaacataaagtgaagctaattcataccgaattatcgagctataaaaagggaatgc

SEQ ID NO: 891580 - DNA, 120 bp, Artificial Sequence
  ENSG00000286910_2 (sequence is synthesized)
acaccttcatagaactccctcatcccacacaagacgcaagtcagaaaaaacaaatctctactcaattgtcctgctgtctgtgacctgggaaaagagactgtctgagggatgagttgggtc

SEQ ID NO: 891581 - DNA, 120 bp, Artificial Sequence
  ENSG00000286910_3 (sequence is synthesized)
tcttgtaactgcaacaaagtgaatgtctccggatgttctaaaagacccttctcagaggccccaggaaccttcctgcaaaccaagacttccctccaggcaccttgtttaccccgatgtgac

SEQ ID NO: 891582 - DNA, 120 bp, Artificial Sequence
  ENSG00000286911_0 (sequence is synthesized)
acatgagcagttggcccttagatcatgagaccagctaaagtgcccaaggaaatggaacagcagggagaggggacatcacacacaccaccaaaacctcttcttcatcatggcctatgaaca

SEQ ID NO: 891583 - DNA, 120 bp, Artificial Sequence
  ENSG00000286911_1 (sequence is synthesized)
gccaaagggtaaaatgatcagaaaactggacagtttttgacagtctactattttcagagaagagaatgtcccagctagaaatgcaagtggacgagtgccaacccgatgaggccaatgatt

SEQ ID NO: 891584 - DNA, 120 bp, Artificial Sequence
  ENSG00000286911_2 (sequence is synthesized)
tgcgagtggagacctctgaggaacttggtaaagaaagcagggctttggccttcgcccgggaggcttgggacccctgaccaccccctgccccatcaccaataaacagacaggaaggaggaa

SEQ ID NO: 891585 - DNA, 120 bp, Artificial Sequence
  ENSG00000286911_3 (sequence is synthesized)
ttcagggacagccttcagaaaggagtggctatccactggccacagcgatgactaaagagaggttcatgccacagcagaacacaaacggcgccaaagctgtctaaagcagacactgagttt

SEQ ID NO: 891586 - DNA, 120 bp, Artificial Sequence
  ENSG00000286911_4 (sequence is synthesized)
gggagtgacccatttcattaagaaaggtcagaacagctctccaaactgaaggtaaacaggacggacacactgtggaaaagaggacattttgtttaaaggtctgattggcttaattgtaaa

SEQ ID NO: 891587 - DNA, 120 bp, Artificial Sequence
  ENSG00000286911_5 (sequence is synthesized)
ctctcttgagggagtggctgctgttctggttgtgtgtcacagagacttgagaacagctcgcaggagatcctggatgatctgacctgtggtgcacggccctggcagcctggtgtctgtgcc

SEQ ID NO: 891588 - DNA, 120 bp, Artificial Sequence
  ENSG00000286911_6 (sequence is synthesized)
tcctctcgttgagatgagatttttctctggcacccacttgggttaagagtgagaagccctggggcccatgggcctgctgcatgactctgtacccatcacctggcacatatgcagacttcc

SEQ ID NO: 891589 - DNA, 120 bp, Artificial Sequence
  ENSG00000286911_7 (sequence is synthesized)
tggtcacagggatgaggaaaccacatgaaaagcagttggagaaatttgttaccatgcagccatcctattttctaaacaggaaaactgagttgcagagagcgaagccccagtaagttggag

SEQ ID NO: 891590 - DNA, 120 bp, Artificial Sequence
  ENSG00000286911_8 (sequence is synthesized)
gatagatgattaaaatgctgctgaataagggagaaaaaggcaaactggaaagacctaaccccaaattagtcatgtccaaatcctggtaggaagattacaagagatttttattttctctcc

SEQ ID NO: 891591 - DNA, 120 bp, Artificial Sequence
  ENSG00000286912_0 (sequence is synthesized)
gtacttggagttcttccagggcgttaccgtgaccaccctatgagatatggaaggacgaaaaatggatctctaatgaatacaatcatatctgtaagctacagattttaccatcaaaaatat

SEQ ID NO: 891592 - DNA, 120 bp, Artificial Sequence
  ENSG00000286912_1 (sequence is synthesized)
gatttattagtaaagctggccacatggcactgaatttactggcctttgtattaatcatataaaatagtgatgggagttatagtaggctgattctgagatggctccctgtgatctcattgg

SEQ ID NO: 891593 - DNA, 120 bp, Artificial Sequence
  ENSG00000286912_2 (sequence is synthesized)
aagagagatgtttattatgatatgacaaaagcctagtgctaatgtggtctgcagttatgctgaaaacagaagatatacctgatagacttggctacatggctaaggagatttctgggcagt

SEQ ID NO: 891594 - DNA, 120 bp, Artificial Sequence
  ENSG00000286912_3 (sequence is synthesized)
ggggaagacactatttttctcttgctgcttatagcatgatagaagagccataaagtgagggaagaataaaacaggagagcataaggtcaaaaaaaggtacattaagagacatctggcttt

SEQ ID NO: 891595 - DNA, 120 bp, Artificial Sequence
  ENSG00000286912_4 (sequence is synthesized)
cttccactcttaccacaagaagaacctgagtgaactgaaaatcagtgacaattcgtgtatccaaatgagaatgaagttcctacagcaaacagccacccagaaatctgcaaagatagatga

SEQ ID NO: 891596 - DNA, 120 bp, Artificial Sequence
  ENSG00000286912_5 (sequence is synthesized)
attaggggagtcacagctgagatctgtttacccggtgcagaaaccactagaaacaaactcttggtagcacttcagtggtaatgctgatgattttccggagcgctagtgtggagttgcgtg

SEQ ID NO: 891597 - DNA, 120 bp, Artificial Sequence
  ENSG00000286912_6 (sequence is synthesized)
agagtgataaactcctggggtcacactcttggaatcccacacagttgtggattttacctccagaagccccaccaagctctcacagtaaagagttgagaaaatgccatcatggtcatgtgg

SEQ ID NO: 891598 - DNA, 120 bp, Artificial Sequence
  ENSG00000286912_7 (sequence is synthesized)
ggcgcatggaagagaagttattgtgaaatatacccagaatattctccataacaaagacctaccctccagtgagggataaaacctttagcagagacttatcccacttgaggtaaggtcact

SEQ ID NO: 891599 - DNA, 120 bp, Artificial Sequence
  ENSG00000286912_8 (sequence is synthesized)
tttcacactctgggcaccaatatccttcctgttccttgtaaggggagaagcaaagctaagaaatgcttgtaagggacatggaccccctaaaagactgtgatgtaatcataagagtataga

SEQ ID NO: 891600 - DNA, 120 bp, Artificial Sequence
  ENSG00000286913_0 (sequence is synthesized)
aagacaaaagagagaagactgaagagtggtaaagcttgtggtgtgagatttggattgttgtaagacacatttgcgctgcatcctgaaaacagtgaagtggagatgattttgctctttcag

SEQ ID NO: 891601 - DNA, 120 bp, Artificial Sequence
  ENSG00000286913_1 (sequence is synthesized)
cagatagagagcccttccgaaacagataaacacgcacagtcctcagtggaggccctctaccggcctcgtctactcctgagcacacctcttggactcccttggctaaagcccacagctgaa

SEQ ID NO: 891602 - DNA, 120 bp, Artificial Sequence
  ENSG00000286913_2 (sequence is synthesized)
gcttgagggttccttttaccttccagctggcagggacgaggatgtgctttagcaagagcaaagattttctactgataatattcaaatgcaaagctgtcctgttgatttgggggtggatta

SEQ ID NO: 891603 - DNA, 120 bp, Artificial Sequence
  ENSG00000286913_3 (sequence is synthesized)
aaagtaattataaaatgttagattctaagaagagagtagagcctaatttggtcatcacttttgtggtaacatacttctttctttgctgctaactggatattgtctttgaaaatgctttga

SEQ ID NO: 891604 - DNA, 120 bp, Artificial Sequence
  ENSG00000286913_4 (sequence is synthesized)
cgtctgccaggtggctccagccagcacctactcttttttgcttagcttactatgcctaatatccagtgtctgaatcacagatttgggatcttttaaaaacggaatttggcgcttgattat

SEQ ID NO: 891605 - DNA, 120 bp, Artificial Sequence
  ENSG00000286913_5 (sequence is synthesized)
gccactccatattcctcctactctgattaactcccagcatggaacaagcatgtagtagagtgggaaatctttgttggatttaatcaactgaatggaaccctgggtttttgtatgatgtct

SEQ ID NO: 891606 - DNA, 120 bp, Artificial Sequence
  ENSG00000286913_6 (sequence is synthesized)
agatagttttatgaataaaataggtgtttactaaataattgtttagtaaatggctaacccatcccagcctcactgggaaagagagggaaaggggagctcctctcccttttgctgtggtca

SEQ ID NO: 891607 - DNA, 120 bp, Artificial Sequence
  ENSG00000286913_7 (sequence is synthesized)
aataaatacatgatttatttgctttactctctcttttatatcaactagtaattttcatatcattaaattttctttaagggaagaggtcaaaggaatatctttaaaagggatccagggcct

SEQ ID NO: 891608 - DNA, 120 bp, Artificial Sequence
  ENSG00000286913_8 (sequence is synthesized)
ctcagagttcacctgagctttcccaagtctggtttgttctctctaccctgctgctactactgcaagtgactttcacaagatgcttctgagcatagcattgctctgctgtgaccactgcag

SEQ ID NO: 891609 - DNA, 120 bp, Artificial Sequence
  ENSG00000286913_9 (sequence is synthesized)
atgtcaagagaatttctgccttttggaacttggacaatattggccacctacccagagagaggagaaggataatccagacataaagtgtgaccctggatgggtgaagcatggctctggaac

SEQ ID NO: 891610 - DNA, 89 bp, Artificial Sequence
  ENSG00000286913_10 (sequence is synthesized)
atcttcctaatccctaggtcgttcccagagcaaacggttcagggggaagcttactgatttccggtcctctgactcaggcagagttggca

SEQ ID NO: 891611 - DNA, 120 bp, Artificial Sequence
  ENSG00000286918_0 (sequence is synthesized)
ggggaatgttctggtttgccctgccgagtttaggctggaaaacgtgttcagtttctcctgaagagggaaggggtgaaagagacgaatgcccgacgcgccgggaggcggtcccctctggca

SEQ ID NO: 891612 - DNA, 120 bp, Artificial Sequence
  ENSG00000286918_1 (sequence is synthesized)
gaggtgccgggtgaggagcccgaagccccgcgggctgatcaaagggaataatttgaagaaggtaattatgcacatggaggatgaagattattgctttaacagtatttagcagtctgatta

SEQ ID NO: 891613 - DNA, 120 bp, Artificial Sequence
  ENSG00000286918_2 (sequence is synthesized)
aagaaagagagaacccagtctgccagttctttgagcattttctgaagatctggattgaagtctaaaagtttcctaattcatgtgtaaaaatcgcaagcattcccagacaccaaaatagac

SEQ ID NO: 891614 - DNA, 69 bp, Artificial Sequence
  ENSG00000286918_3 (sequence is synthesized)
tgaggactacaaaccactgctcaaggaaataggagagaatgaaaacaaatagaaaaacattccatgctc

SEQ ID NO: 891615 - DNA, 70 bp, Artificial Sequence
  ENSG00000286918_4 (sequence is synthesized)
gacctcttcaatgaggactacaaaccactgctcaaggaaataggagagaatgctgtaaaatggccatact

SEQ ID NO: 891616 - DNA, 120 bp, Artificial Sequence
  ENSG00000286919_0 (sequence is synthesized)
gaagcccatgaaagcctttggttcagccagagctgagcagacaactggacaaccagctgcagagaggaactaccctctctgctgagagcttcagagacctgcgcagacatcgggactacc

SEQ ID NO: 891617 - DNA, 120 bp, Artificial Sequence
  ENSG00000286919_1 (sequence is synthesized)
agctgcagagagaagctaccctctccagggcctcttctctgctgggagcagcagacattgggatgacctgctgcagagaagagcctcactcttcaaggcttcctttctgatgagagcagc

SEQ ID NO: 891618 - DNA, 120 bp, Artificial Sequence
  ENSG00000286919_2 (sequence is synthesized)
agagatggggccaaccagttgcagagaggagccacgctctctagggtctcctctatgctgagagctgaacactcactgaagtgacccgccagcagagaggagccacccactccacccact

SEQ ID NO: 891619 - DNA, 120 bp, Artificial Sequence
  ENSG00000286919_3 (sequence is synthesized)
ccaggcctcctctctgctgagagctgaatactggatgggacaacctgcctacagagaggagctactcactgttggtctcctctgagctgttctaatactcagtaaggctcctttttatct

SEQ ID NO: 891620 - DNA, 120 bp, Artificial Sequence
  ENSG00000286919_4 (sequence is synthesized)
gtctgcatacctcattcttcctggatgcagggcaagaactcaggcaaaggtgccaccagccacagaggtttctagccagaaaagtgacacacaaaagatcccataacattttgggggctg

SEQ ID NO: 891621 - DNA, 120 bp, Artificial Sequence
  ENSG00000286919_5 (sequence is synthesized)
tctgtggaaggatgggtaaccaaccatcctcagcctgcactccccttgagtgtattctgaatcactgggactccgttgaccctcagactgtagagaaagaggaaaaaaccttttccctcc

SEQ ID NO: 891622 - DNA, 120 bp, Artificial Sequence
  ENSG00000286919_6 (sequence is synthesized)
tctgtcctctcttccagccaggcatgaccatgtaacagtttgggctgctgagccagaagggaaagagtactactgctagacttccaggaaggctgctctaagaaagatgactcagaggtt

SEQ ID NO: 891623 - DNA, 120 bp, Artificial Sequence
  ENSG00000286919_7 (sequence is synthesized)
gcacttttttagttttgggggtttttttccctctacttcctgcttcttggaactaggacatgatgtctggaactctagcagccattttggaccatgaggtgattgtgcgactagaagaca

SEQ ID NO: 891624 - DNA, 120 bp, Artificial Sequence
  ENSG00000286919_8 (sequence is synthesized)
catcgtagaatggagcaccaagacgaaagcccccaaagctgccctataagacctggacttcaaaccagcaaacttcttccatgtgagagagaaataagcttaggttttgtttctgccagt

SEQ ID NO: 891625 - DNA, 120 bp, Artificial Sequence
  ENSG00000286919_9 (sequence is synthesized)
gttatctttgttttcggttatgagccactaaatgtgatcccacttgttaccccagtcattctcccaacttcctagacccattaatagcattctacactcacagtccatcagtggtgcaag

SEQ ID NO: 891626 - DNA, 120 bp, Artificial Sequence
  ENSG00000286919_10 (sequence is synthesized)
actacaacacgattttaaatccaaaagtgatataaatgattttgtgattctgtgctgctgagatatgtgcttttttcaacttgcaaaatatactattgaaatctatagttaaaaaaaaaa

SEQ ID NO: 891627 - DNA, 120 bp, Artificial Sequence
  ENSG00000168367_0 (sequence is synthesized)
gggccagccagggcaggcagggacagcccctctgatgaggaggccactgggctgagaccaatgaatgagatggagccagccacgtggtgagccagaagagggcatcacagggcttgagtc

SEQ ID NO: 891628 - DNA, 120 bp, Artificial Sequence
  ENSG00000168367_1 (sequence is synthesized)
tgggggagcctggctgcccagaggtggcagatgacatgaagaaataaccatgtaagggctggctgtgtatgagccctgacttcccacagctatccccaaacacactcgtttacactgaag

SEQ ID NO: 891629 - DNA, 120 bp, Artificial Sequence
  ENSG00000168367_2 (sequence is synthesized)
caccaggagatcagaaccttctggaatcttaatatgcgaggactcggtggagaaggcggcactgaagaagagtcgtccctaggccaggctggagggaaactcaagacggcggcctggccc

SEQ ID NO: 891630 - DNA, 120 bp, Artificial Sequence
  ENSG00000168367_3 (sequence is synthesized)
tcctgggtggcggaagtgggagcagcaggagccctggcggatccgggaggccagaagagcggaagcttcctcccctctcaggacagccacaaggactttcgggggtcgtggcagctgctc

SEQ ID NO: 891631 - DNA, 120 bp, Artificial Sequence
  ENSG00000168367_4 (sequence is synthesized)
cacttccaacttccagatccctctcactttcctcttcccaccaactccaacctgggaccaagcaggggaaagcagctgcagcccagcttgacgcccctgcaaatggagacctgtgcacct

SEQ ID NO: 891632 - DNA, 120 bp, Artificial Sequence
  ENSG00000168367_5 (sequence is synthesized)
ggttgtgagcattttaaagggtgtcacacagggcatacccttcggtgcctggattcctttgatgaaagggcaaagccttgaacctaagtcatcttcgagtcctcagcacttcacccagag

SEQ ID NO: 891633 - DNA, 120 bp, Artificial Sequence
  ENSG00000168367_6 (sequence is synthesized)
cacagaaaggtttacatccagcaggagttggccctgagctctgagtccagatcattgctcttggctgaagcagcctgtctactcacaaagatgagcatggtccctgccacgaggaaactc

SEQ ID NO: 891634 - DNA, 120 bp, Artificial Sequence
  ENSG00000168367_7 (sequence is synthesized)
gtggtcctgtggactgcggtgtggagggaaagcttgggattctgagcctgataatgcaccattacatccccactcactcgggctgtgtgaacccagcaagtcacaggatcactgggtggt

SEQ ID NO: 891635 - DNA, 120 bp, Artificial Sequence
  ENSG00000168367_8 (sequence is synthesized)
gaaagaaagaaacactcacagaagcgtctgtgcttggagagccatctggtccgtcattgtgactgctgctctcattgctatcatgggtgtcaccattgccatcactcaaggacttctctc

SEQ ID NO: 891636 - DNA, 120 bp, Artificial Sequence
  ENSG00000168367_9 (sequence is synthesized)
caggccccgaagccaagctggtgcctggttcctctgggttgggagaggggctgggcatggacaggaggagggaaaagggacctgtgctagcaggtgatgccatccaagacatctgcatcc

SEQ ID NO: 891637 - DNA, 120 bp, Artificial Sequence
  ENSG00000168367_10 (sequence is synthesized)
taatccctggaacctgggattccactaggtgccatggcaaagagggattaaggtggcaggtggagtgaaggttgctaatcagccgaccttaaagtagggagatgatcctgaatgagacaa

SEQ ID NO: 891638 - DNA, 120 bp, Artificial Sequence
  ENSG00000168367_11 (sequence is synthesized)
aagagagaaccagtcatggtgtcatgagaaggactcaaaatgcaactgctgactttgaagattaaggggctacaaaccaaggaacgtggtagtctctggaaaagacaaggaatagacgct

SEQ ID NO: 891639 - DNA, 120 bp, Artificial Sequence
  ENSG00000168367_12 (sequence is synthesized)
gcgttggggccaccagaaggaaccagccctgtcaacaccctaattttagcccagtgaggcctgtgctggacttctgacctccagaactgtaaactaataaatgtgtgttgtttctgccac

SEQ ID NO: 891640 - DNA, 120 bp, Artificial Sequence
  ENSG00000168367_13 (sequence is synthesized)
gcattttaaagggtgtcacacagggcatacccttcggtgcctggattcctttggtaagtgttatattagggagacgcacccttgctgttgtgtgtggcaagatttgtgcattctcatttt

SEQ ID NO: 891641 - DNA, 120 bp, Artificial Sequence
  ENSG00000168367_14 (sequence is synthesized)
tccatgatattcctctgcatacctatcccataattcactgatccatcctagtgttgaaaagcattgaaggagtttctggtcattggctgttacaaacagtgatgcccgaatgctctggtg

SEQ ID NO: 891642 - DNA, 120 bp, Artificial Sequence
  ENSG00000168367_15 (sequence is synthesized)
atggtccttttgtggacgtggacacatttttcttgcaattgtgcctaaatgtggaatctccaggtgggaggctgtgctcatattcagcttcagtagagagttcgtgtcccatgggagctg

SEQ ID NO: 891643 - DNA, 120 bp, Artificial Sequence
  ENSG00000168367_16 (sequence is synthesized)
cacccccgattatgtttcctgttgcaagccctttttactcctggtcttgggttcaaatgttgattcccttcctttctagccatttgacctggaaccatctaggtaaccatgcagagcaac

SEQ ID NO: 891644 - DNA, 120 bp, Artificial Sequence
  ENSG00000168367_17 (sequence is synthesized)
aatttcctgcttatctgtaaaatagggataagaatagtacctcccacccgggtccctgtaaggaaatgcggcagtccaggaaaattgcttagaatagtgactgtcacgtacaaattctca

SEQ ID NO: 891645 - DNA, 120 bp, Artificial Sequence
  ENSG00000168367_18 (sequence is synthesized)
acatattaggtgttattactctttttatttataataataatgatggccttatcaaattatttggaggcaatctgactttatctgtaatttgcatagatgaaagggcaaagccttgaacct

SEQ ID NO: 891646 - DNA, 120 bp, Artificial Sequence
  ENSG00000168367_19 (sequence is synthesized)
ggaggccagaagagcggaagcttcctcccctctcaggccctggtctctatgcgggagaagccagcaaagaccctgtcctcaggaagcttccatttcagtgcgggaggacccacaatccat

SEQ ID NO: 891647 - DNA, 120 bp, Artificial Sequence
  ENSG00000168367_20 (sequence is synthesized)
atcacaggtccatgaaatgggctcccgaagtccaacctcacagaccccataggaaagcagatggaatctccaagggcaccagctatacatggtggtggaaggaccaacgcatgctctgaa

SEQ ID NO: 891648 - DNA, 120 bp, Artificial Sequence
  ENSG00000168367_21 (sequence is synthesized)
tgccactgcggaccacaggccagtgccctccatgagcctgacctcaggcctcagtaatcgctccttctctgtccaacacgggccctttttctgtcctcctctttctttaggcctttctct

SEQ ID NO: 891649 - DNA, 120 bp, Artificial Sequence
  ENSG00000168367_22 (sequence is synthesized)
gtccctcacgactggcctcaccccgtcctgggctctgcagaactggtgcatggctctgccagggggtgaaccctggctctgccccttttctgactgaggaagctgcttggcctttctgtg

SEQ ID NO: 891650 - DNA, 120 bp, Artificial Sequence
  ENSG00000168367_23 (sequence is synthesized)
tctcagctgatctctaaaatgggagtgaaaatctctaaactcattggccgcagtgagaattagagaagacgcagcaccctgctatatgcctggcatggttgccgtccgccaacagtgcct

SEQ ID NO: 891651 - DNA, 120 bp, Artificial Sequence
  ENSG00000168367_24 (sequence is synthesized)
accagttattatcaaccagtcatgctctgaaactctccacccacctaaacatgtgagacctctgtgacacccccatcctagagctccttacgacctcattggttgagcccatggattcct

SEQ ID NO: 891652 - DNA, 120 bp, Artificial Sequence
  ENSG00000168367_25 (sequence is synthesized)
ctgtttcttagatatcaccattttcctttcatgcgtgactgtatagaaccaggtacctgtaaacaggagcgtctgctctggagcatcctctattctaatttcttagcatctcccatttgt

SEQ ID NO: 891653 - DNA, 120 bp, Artificial Sequence
  ENSG00000168367_26 (sequence is synthesized)
cccgggagaagcactgcacaggatgctctggggtgatgaaaagttccagattgggccatccagggttccagtcagcagccattagccacgagtggctgtgctcttgaagggtggctcaga

SEQ ID NO: 891654 - DNA, 120 bp, Artificial Sequence
  ENSG00000168367_27 (sequence is synthesized)
agcctaagagctgcatgtgtatcttatgtgatctgaattgaagtgtaagcagacacctgtggtgagcagcttccgaggtggactgcagccctggggagtatccccctgcttccaggctgt

SEQ ID NO: 891655 - DNA, 120 bp, Artificial Sequence
  ENSG00000168367_28 (sequence is synthesized)
gctccctgagccccaaaggttccagcaggtgctttcggggttgcaccttagaggcagaaggcaggaaaggtcggtcggcagggctttgtggccccaccttctacagagcacgtgtgtcct

SEQ ID NO: 891656 - DNA, 120 bp, Artificial Sequence
  ENSG00000168367_29 (sequence is synthesized)
catccacgcaccatgctgtttgaagaaagcttaggaaaggaatgatgagacccgtgacttcagtcaagcctttgctgaacatataaggaaacagagagggtcatgaagtggaaggactca

SEQ ID NO: 891657 - DNA, 120 bp, Artificial Sequence
  ENSG00000168367_30 (sequence is synthesized)
cacagccacccctccttcagtggggaaagcgagcctgggaacatgctcaagcccctttggggtggggggtgggaagatggcgacaagcagttccttgtggaccccggtccctgaccccac

SEQ ID NO: 891658 - DNA, 120 bp, Artificial Sequence
  ENSG00000168367_31 (sequence is synthesized)
agagtggggaccccaagggcagtgaggggcagagtgagtttgtaccaggcactgggaccccaagctccctctctctggccatggctgtgggggtccccaagtggaagtggaagagggaaa

SEQ ID NO: 891659 - DNA, 120 bp, Artificial Sequence
  ENSG00000168367_32 (sequence is synthesized)
ctgaggaaaacaaaatggtcctgcttgagagagggaacatgggctgctttctcctcccccaccagctagtccagtgagcctcatctgttctcacgctactaataaagacatacctgagaa

SEQ ID NO: 891660 - DNA, 120 bp, Artificial Sequence
  ENSG00000168367_33 (sequence is synthesized)
ttgggaaggatgaatgccaactatgttccaggaacttccactgttctcacacacccaggtgagtggtgttcaggtgggtggcacccaggtgagtgacatcccagttgagtggcacccagg

SEQ ID NO: 891661 - DNA, 120 bp, Artificial Sequence
  ENSG00000168367_34 (sequence is synthesized)
tgagtagcatccaggtgagtgacacctaggtgagtgacattcaggttagtggcgtctgtgtgagtggcatcatccaggtgagtagcttccaggtgagtggcacccaggtgagtggcattc

SEQ ID NO: 891662 - DNA, 120 bp, Artificial Sequence
  ENSG00000168367_35 (sequence is synthesized)
gggtgagtggcattatccaggtgacacctgggtgagtggcatccaggtgagtgatatcatccaggtaagtggcacctaggtgacatccaggtgagtgacgacatccaggtgagtgacatc

SEQ ID NO: 891663 - DNA, 120 bp, Artificial Sequence
  ENSG00000168367_36 (sequence is synthesized)
atccaggtaaatggcacccaggtgagtagcattcaggtgagtgacacccaggcgagtggcatccacgtgactagcattgtccaggtgcataacacccaggtgagtggcacccagttgagt

SEQ ID NO: 891664 - DNA, 120 bp, Artificial Sequence
  ENSG00000168367_37 (sequence is synthesized)
ggtgcccaagtgagtcacatccaggtaagtggggtccaggtggtggcacccaggcgagtggtgcccaggtgagtgacagccaggtgaatggtgtccaggtgagtggcatcacccaggtga

SEQ ID NO: 891665 - DNA, 120 bp, Artificial Sequence
  ENSG00000168367_38 (sequence is synthesized)
atggtgtccaggtgagtggcatccaggtaagtggtgtccaggtggtggcacccaggtgagtggtgtccaggtgaggggcatcacccaggtgaatggtgtccaggtgagtggcatccaggt

SEQ ID NO: 891666 - DNA, 120 bp, Artificial Sequence
  ENSG00000168367_39 (sequence is synthesized)
gggtggtaccgtcgacgtgacaatagctaaaaattattgggctcattgtggacaggcactgtgccgagcttgacatcactgaactcagttcatcctcgccaggagcttgtgggccgtccc

SEQ ID NO: 891667 - DNA, 120 bp, Artificial Sequence
  ENSG00000168367_40 (sequence is synthesized)
tagatcagaatccgaggagaaaggacttccacacggcagccagcgagctggagggcggcctcctgccaccaccaggctccctaacccagtcctggatatctgtgaaagaatgagtggatc

SEQ ID NO: 891668 - DNA, 120 bp, Artificial Sequence
  ENSG00000168367_41 (sequence is synthesized)
attgtgggggaggggccggccagccagggcaggcaggggcggcctctctgacgagaaggaggccactgggctgaggccaatgaatgggaaagagccagccatgtggtgagctgggagagg

SEQ ID NO: 891669 - DNA, 120 bp, Artificial Sequence
  ENSG00000168367_42 (sequence is synthesized)
gcatcccaggccgtgcgacctgcgcttgcaaaggccctggggccggacagttcttggcagagtctgagggcttgagtctgggggagcctggctgcccagaggtggcagatgacatgaaga

SEQ ID NO: 891670 - DNA, 120 bp, Artificial Sequence
  ENSG00000168367_43 (sequence is synthesized)
tccagaaacatcagtgagtgcagcttgcagggaaatccagaaagccggctggcacgtggagaatggggacgggaggcagtggaggggtctgcggggcacagctgcttctgtgactggtgg

SEQ ID NO: 891671 - DNA, 120 bp, Artificial Sequence
  ENSG00000168367_44 (sequence is synthesized)
tccctgggtcactggtggtcagtgaggcttacagttggggagacagggagaacaagagcaagttgtcatcaatcagcacctccttgcctgtctctccccaggacagccacaaggactttc

SEQ ID NO: 891672 - DNA, 120 bp, Artificial Sequence
  ENSG00000168367_45 (sequence is synthesized)
aaatatctatttaatggacaaacatcgtgaaggaaatgcttttctgtgagcctaccgtgtgccagttttttgacactgtgtgagttgtcagattcagcaaataaaaatacagaatgccca

SEQ ID NO: 891673 - DNA, 120 bp, Artificial Sequence
  ENSG00000168367_46 (sequence is synthesized)
agagtcattgtgggggaggggttgggccagccagggcaggcagggacagcccctctgatgaggaggccactgggctgagaccaatgaatgagatggagccagccacgtgggcttgagtct

SEQ ID NO: 891674 - DNA, 120 bp, Artificial Sequence
  ENSG00000237424_0 (sequence is synthesized)
cctgttcggcgtcttgcagcagtgcctgcgatcccgcgtgagtccgtcgctccctccgcgaaaacctggactctttcccagaagccttgggctccagcaccatgcctgctgcagccgcca

SEQ ID NO: 891675 - DNA, 120 bp, Artificial Sequence
  ENSG00000237424_1 (sequence is synthesized)
aagagcgggaagccacaggctctgcgggtcttggttacagcgtctctggtcgtgccgggcctccttctgcatctgttccacggcccggccatctccctcgtgcagcccagaacaattggg

SEQ ID NO: 891676 - DNA, 120 bp, Artificial Sequence
  ENSG00000237424_2 (sequence is synthesized)
aggaagcgttggcgggcggagggggatgcctgttgggcttttccactagttactgagtgttttttgcgaagagtacgttgctatcagtggcgtccgggtcgtctctccctctcttccttt

SEQ ID NO: 891677 - DNA, 120 bp, Artificial Sequence
  ENSG00000237424_3 (sequence is synthesized)
tggtccccataaatgagctgttctcggctctgggaaagaaaagccctccagcgattatgcggatctaattaagtcaatcaggaaactgccggagagcggcactggcttgaagcggagttt

SEQ ID NO: 891678 - DNA, 120 bp, Artificial Sequence
  ENSG00000237424_4 (sequence is synthesized)
gtcctgaggcacagcggaacgattgcacgcggcccttttcagcggttcgagctcggccagcgccgggctgcaaacggaagcctgagctgggcttggggaactacgcccgcagatttctct

SEQ ID NO: 891679 - DNA, 120 bp, Artificial Sequence
  ENSG00000237424_5 (sequence is synthesized)
aattttattcacaaaactggacaccctcagggaaagcggcaaagccggcgcgagcctccttcccactctggacctagctgcagctccaaagcgagatagctgtctagcctcagccggtac

SEQ ID NO: 891680 - DNA, 120 bp, Artificial Sequence
  ENSG00000237424_6 (sequence is synthesized)
agctcccggcccctttctccacccggatcttcggctgctcagaagcgatcagctcccttagcccaggtgggaggcgggagactccagatcctgtgacccgcggaggcagacctcagacat

SEQ ID NO: 891681 - DNA, 120 bp, Artificial Sequence
  ENSG00000237424_7 (sequence is synthesized)
gttccccatgcacagaaatgactggggctccagtgtgtgcaccttcaactctgaagcccacctgcccacttcaggcgctggcgcggagataaccaccacgcgtctgccgggcaaagttcg

SEQ ID NO: 891682 - DNA, 120 bp, Artificial Sequence
  ENSG00000237424_8 (sequence is synthesized)
agagtgaatttacatcttctctttccgctactcctggccactgtcccctcccagccccatctcccccgcccccaaccctggactatgtggtaggggactcgcttaagcacccaagtactg

SEQ ID NO: 891683 - DNA, 120 bp, Artificial Sequence
  ENSG00000237424_9 (sequence is synthesized)
cgcggttgttgagaccaaggcgagctgcggagcctgtgggctgttgttcgtgggaagagggttgcgacctcaggagagaccgaaaacagcgccacttgaaacccgccggtcctgaagatc

SEQ ID NO: 891684 - DNA, 120 bp, Artificial Sequence
  ENSG00000237424_10 (sequence is synthesized)
tgcgctcttgtgggtttctcggccagctgggccgagcctctctttctctgtcctcatgtgtctgtcctctggacaacagtggctctgtatggcggattgcgaccctgagtgacgggcgcc

SEQ ID NO: 891685 - DNA, 120 bp, Artificial Sequence
  ENSG00000237424_11 (sequence is synthesized)
tgtcttgcatcctgtgtcctgtgtcctcccctccagacctcatgcttggtgtccacagagtggacccaggactgcctggaaggcttatcatccaggcccgcgacttccccccagagtctg

SEQ ID NO: 891686 - DNA, 120 bp, Artificial Sequence
  ENSG00000237424_12 (sequence is synthesized)
aagccttgcgacctggtcggggacgacaaacctgctcggggtcaacagcgagaccctagtggggaatgaggatgggtgagggtgcgcctgggttgagggtctgtgactgtagcatggaaa

SEQ ID NO: 891687 - DNA, 120 bp, Artificial Sequence
  ENSG00000237424_13 (sequence is synthesized)
aggagttcatgcagggatcgcactgagggacagccaagaatactccagcggcagcctccctcctaccaattacacgccgcctgctggcacagtggcacctcgggaacaggacgcccttcc

SEQ ID NO: 891688 - DNA, 120 bp, Artificial Sequence
  ENSG00000237424_14 (sequence is synthesized)
gggccctgaattggggcagcgcaggagggagggtgcagagccatagcgacctgtgtgtaccatagacatgcacatgcgctcaccttcacgtgtaacccttctgagtcccagacagggtaa

SEQ ID NO: 891689 - DNA, 120 bp, Artificial Sequence
  ENSG00000237424_15 (sequence is synthesized)
ctggcgaggccgtaagtaccctcgtgggggcggaaatattgccgcgtccctgagtcctctgggcagatgcagagccgcgtaagcctcatagaagcaaagccaggggaacagtgggagctc

SEQ ID NO: 891690 - DNA, 120 bp, Artificial Sequence
  ENSG00000237424_16 (sequence is synthesized)
tggcctcgcggtgcggacgctagtaatggattcctggggaacagcgacctctggaggagcctctcatccacacagagtcaggaactaaaggactggttctgagacaaagcaccctttcct

SEQ ID NO: 891691 - DNA, 120 bp, Artificial Sequence
  ENSG00000237424_17 (sequence is synthesized)
caccctactcccattccacccgcttggaaaagttatccagagacttttaacctccggactccactcttcgcttatgtttgcttttttttccaacctgtacccacgcttcaaaatccctgc

SEQ ID NO: 891692 - DNA, 120 bp, Artificial Sequence
  ENSG00000237424_18 (sequence is synthesized)
tccagtcctgcctcttccagaaagaagccttctggccagcccagttcctcttcccctcttcctgttctgagctcattctcaggccacactgcacagccaacctgcttcctgcctgctctt

SEQ ID NO: 891693 - DNA, 120 bp, Artificial Sequence
  ENSG00000237424_19 (sequence is synthesized)
ctccaaaaagactgtgaatccactccacccacgccttgtgttgcatgctgggcatgccgttccctgccccaacccaccccaccccccagtgaataaagactgaagttattcattccaaaa

SEQ ID NO: 891694 - DNA, 120 bp, Artificial Sequence
  ENSG00000268423_0 (sequence is synthesized)
gcgtggggctttgaggagtaacgaggcgaagggggaaacggcgtcgccgttagagaagcaaatacgtcgtttctgtggccaggaggcctctatgctgccagagctggggagagagagatg

SEQ ID NO: 891695 - DNA, 79 bp, Artificial Sequence
  ENSG00000268423_1 (sequence is synthesized)
accagtcgtgtggtctcatctcactgcaagtggatggagaaatatattttctcatgtgcctttgaagaaggaactggaa

SEQ ID NO: 891696 - DNA, 120 bp, Artificial Sequence
  ENSG00000268423_2 (sequence is synthesized)
tgtgcctttgaagaaggaactggaaacagaatttggtggggattacaatttgagatgagatttcggtgggaacacagagccaaaccacatcaaccagtaaatcttgggctgatttgttac

SEQ ID NO: 891697 - DNA, 120 bp, Artificial Sequence
  ENSG00000268423_3 (sequence is synthesized)
acagcgatagataacttactacgtcaggatcatggtaacaaggaagactttgggaccctgaggagtatggctgcagcagtcttaagctttggacaggggcttagagtggtggctcatgcc

SEQ ID NO: 891698 - DNA, 120 bp, Artificial Sequence
  ENSG00000268423_4 (sequence is synthesized)
ggaactgatgcctccagccaacagccagcaaggacctgagggctgcccactgccatgagtgagtctggaggcagattttccaccctgagatgcctgcagctccagccagccccttgactc

SEQ ID NO: 891699 - DNA, 120 bp, Artificial Sequence
  ENSG00000268423_5 (sequence is synthesized)
tagccttgaggaacctacagccaaagccacccagttaccctcacccagattcctgactgctggaaattgtgacatcgtaaatgtttcttgttttaagccaatacatgttggtgtaatttt

SEQ ID NO: 891700 - DNA, 62 bp, Artificial Sequence
  ENSG00000204776_0 (sequence is synthesized)
gtgagggcccccactcagctcctggggctcctggggctcctggggctctggtgcagagtcac

SEQ ID NO: 891701 - DNA, 120 bp, Artificial Sequence
  ENSG00000228768_0 (sequence is synthesized)
atagatggaaagcaggcgctgccctcaccgacctggcctcggtagcaggagtgtgtttttgtgtggacaactgcagttgggcccaggtccagccttgctgacggctactcacttgggcct

SEQ ID NO: 891702 - DNA, 120 bp, Artificial Sequence
  ENSG00000228768_1 (sequence is synthesized)
gggactctgttcagagtggagcctccttactctacagctcgctggtaagccctggtggcccatcagcccacagaagggggcactcactcagtgtgcatcgggcagcggccagcaacctgc

SEQ ID NO: 891703 - DNA, 120 bp, Artificial Sequence
  ENSG00000228768_2 (sequence is synthesized)
ctctcacccacctggcccttctgggaggaccgggacttcctggggtcagattggaatgtacgtccaaaataagagtgaatggggatttgctgattattaaaacaattttgtttgcgtgca

SEQ ID NO: 891704 - DNA, 120 bp, Artificial Sequence
  ENSG00000228763_0 (sequence is synthesized)
aggtgatgtctgcagggagccatgaatcatgctgaaaacaggattgttcaaaactttgccaggaagtctctggcagaagtgtgttagcgagtcttagcaaacacagctgcttcctttctg

SEQ ID NO: 891705 - DNA, 120 bp, Artificial Sequence
  ENSG00000228763_1 (sequence is synthesized)
aggtataaaatgctccaggggcaaggttctgagaagatgccctgccactgtatgaggccacaacctgctgtgtataacctcatctaagcacagagaagcaccagactgagcttgggaaat

SEQ ID NO: 891706 - DNA, 120 bp, Artificial Sequence
  ENSG00000228763_2 (sequence is synthesized)
gataaagcaaactgtggacttgaatgaaagacatacaggtattctttgtatattttatagttagcttctgagtctgaaattatttcccaaataaaaagttaaaaacaaatctctactgaa

SEQ ID NO: 891707 - DNA, 120 bp, Artificial Sequence
  ENSG00000268392_0 (sequence is synthesized)
ctctagcctgggcaataaagcgagactgtctcaaaaaaaatcataaaatagtaaaaggcatcaaatttttgaggggaaatacctattggtgaactgaaaactcgacaacagttctggtgt

SEQ ID NO: 891708 - DNA, 120 bp, Artificial Sequence
  ENSG00000268392_1 (sequence is synthesized)
ttgcgccattactccagcctgggcggcgagagcaaaactccgtcaaaaaaacaaaaacaaaaaaaacaaaccatgctttcaaatctgcctaacaattatagcttcagagtccttgtattc

SEQ ID NO: 891709 - DNA, 120 bp, Artificial Sequence
  ENSG00000268392_2 (sequence is synthesized)
aggattatctatttgtaacttactactttttacaaatatttttcttacactaaattagaaagaatgtttggtctcgcaggtgtctgagaatctttagtaaaatacccctacagattctat

SEQ ID NO: 891710 - DNA, 120 bp, Artificial Sequence
  ENSG00000268390_0 (sequence is synthesized)
cttaacttcttagaatgaaaacttgggcttgctcatggaaaagccagactgtaaaatattttaaagaggtttattctgagccaataggagtggtcatggcctgaggaacacaagctcaag

SEQ ID NO: 891711 - DNA, 120 bp, Artificial Sequence
  ENSG00000268390_1 (sequence is synthesized)
gtgagtaatttgaagactatacagttcaacaagtgacagagctagtattcaaaccgaggcagcctggcccctgaaactgtgttccgtagctactgtgtcatgctgcttctccattgacca

SEQ ID NO: 891712 - DNA, 120 bp, Artificial Sequence
  ENSG00000268390_2 (sequence is synthesized)
ggatcggtgattcagaagttgctgtgtgcagagcctttaaatgccaatctttcactctgtcctcccaacagccctgagcagtaaggcctgttattaccagattaaagaactgaggttccc

SEQ ID NO: 891713 - DNA, 120 bp, Artificial Sequence
  ENSG00000279278_0 (sequence is synthesized)
aaaatactttcacggtgacaactagattagtgttttattgaatagctgatgacataaactgtctcatttggtgccaagactgaccatcaccagcataccaaggtcatcactgatcagagg

SEQ ID NO: 891714 - DNA, 120 bp, Artificial Sequence
  ENSG00000279278_1 (sequence is synthesized)
tctaacccaaggagggggtcatgtgcaggcccagcggtggggaggaaagatgctgcagaggagatggatgcccacagaggcccctgagcggataccatgctcactaagtggtaagtatag

SEQ ID NO: 891715 - DNA, 120 bp, Artificial Sequence
  ENSG00000279278_2 (sequence is synthesized)
atctccattttccccacaacctggaggagtaagtactgtcatctgcattttgtagctgaggaatctgactcaacaaaattaaattactcgcctaagcaattagcaatcaaccaagtcttt

SEQ ID NO: 891716 - DNA, 89 bp, Artificial Sequence
  ENSG00000279278_3 (sequence is synthesized)
atctgcattttgtagctgaggaatctgactcaacaaaattaaattactcgcctaagcaattagcaatcattgcctgttcatatccagcc

SEQ ID NO: 891717 - DNA, 67 bp, Artificial Sequence
  ENSG00000279278_4 (sequence is synthesized)
tcgtaagggtcaggaccggacaccactgcatccatgtccatcacaacacagctgccttttcttctgc

SEQ ID NO: 891718 - DNA, 66 bp, Artificial Sequence
  ENSG00000279278_5 (sequence is synthesized)
ctgtctctcctctagggctgaccccacatcggacaccactgcatccatgtccatcacatttccttc

SEQ ID NO: 891719 - DNA, 79 bp, Artificial Sequence
  ENSG00000279278_6 (sequence is synthesized)
ctctggaatggctgcatgttttctcccccaatccaaggcactaggttttggctaggttgcaggttccaagctgctctcc

SEQ ID NO: 891720 - DNA, 72 bp, Artificial Sequence
  ENSG00000279278_7 (sequence is synthesized)
agagaggaatggctgcatgttttctcccccaatccaaggcactaggttttggctaaacctgcaacctcctga

SEQ ID NO: 891721 - DNA, 120 bp, Artificial Sequence
  ENSG00000279278_8 (sequence is synthesized)
agctgcacaaacccaggtctggaacgggctccttaccttggaaggtgaatgatcctggtaggactcttagcctccctgggcctcagtttctttatctgtttcatgggaatgaggatctcg

SEQ ID NO: 891722 - DNA, 120 bp, Artificial Sequence
  ENSG00000279278_9 (sequence is synthesized)
tatctgtttcatgggaatgaggatctcggctggttggttgggtgatgcgggggctgtgtgaaaacagcttgtcaatacaagctgaaatagaaatatttctccacagagtatgaagatcaa

SEQ ID NO: 891723 - DNA, 70 bp, Artificial Sequence
  ENSG00000279278_10 (sequence is synthesized)
caaaaaaggcaaagctgtattgtactcgttccccctaaatataaaaaaaaaatgttgaaggaggcagaag

SEQ ID NO: 891724 - DNA, 79 bp, Artificial Sequence
  ENSG00000279278_11 (sequence is synthesized)
cccctagaagctagaaaaggcagggacccgattcatcccttgagcctccagaagggacatagccctttttggcaaccag

SEQ ID NO: 891725 - DNA, 120 bp, Artificial Sequence
  ENSG00000279278_12 (sequence is synthesized)
tttgttcattgtctatccttttgcattaattgaatttttttctatacatacatgtgaattttcacaataaaagttttttccaaaataaaataaaagaaacaaaaggggctttttgcaacc

SEQ ID NO: 891726 - DNA, 63 bp, Artificial Sequence
  ENSG00000279278_13 (sequence is synthesized)
atctgaatgtcagtgaccaatcagagcagaggcagaccttggagtgggcagggcatcctgagg

SEQ ID NO: 891727 - DNA, 76 bp, Artificial Sequence
  ENSG00000279278_14 (sequence is synthesized)
tgaatgtcagtgaccaatcagagcagaggcagacaggcataaccctttaggtgccagaccatggggaggtccaggg

SEQ ID NO: 891728 - DNA, 120 bp, Artificial Sequence
  ENSG00000279278_15 (sequence is synthesized)
gcaatggctctcagggggctcccggtggtggcaattggtgaatctgcatggtggtgtttcaatattgtcacaaccctgctgtctctcatgctctcaaaaagcatttctcttacctgtgac

SEQ ID NO: 891729 - DNA, 74 bp, Artificial Sequence
  ENSG00000279278_16 (sequence is synthesized)
tgtctccagacaagttaggctagaaggcccctgagtctcagcccctctatagccctcctgtcacccagacctga

SEQ ID NO: 891730 - DNA, 85 bp, Artificial Sequence
  ENSG00000279278_17 (sequence is synthesized)
ggtgagtagcggtgggcaaatccatccccctcatcttagatttatggggagacagagacaaagaggagacactccaggaagacct

SEQ ID NO: 891731 - DNA, 120 bp, Artificial Sequence
  ENSG00000279278_18 (sequence is synthesized)
ccaaggacaccttcctggaggagctgccgtttgagccagctctgagaacaggtggagacaggactggagaggaggaggttgtgccctatgagcaaagactggccaccaccccatctaaca

SEQ ID NO: 891732 - DNA, 71 bp, Artificial Sequence
  ENSG00000279278_19 (sequence is synthesized)
tctgagaacaggtggagacaggactggagaggaggaggttgtgccctatgagcaaagactggccaccaccc

SEQ ID NO: 891733 - DNA, 78 bp, Artificial Sequence
  ENSG00000279278_20 (sequence is synthesized)
aaagtccaggaagatagacatcacccaccacaggggccagtcagggcctgaaccagggcgggcagaggttggctgcct

SEQ ID NO: 891734 - DNA, 62 bp, Artificial Sequence
  ENSG00000279278_21 (sequence is synthesized)
ctaaatgatctctctggagacggggatcaatagggtactggtgattgaccaggcactcagca

SEQ ID NO: 891735 - DNA, 120 bp, Artificial Sequence
  ENSG00000279278_22 (sequence is synthesized)
aggcactcagcacatgcctggagcacacagtgcagggctgtggtggggaggtgggctgagttcctagggagtcacccatgtgtgcctgccgttctgaccagccaccaggccctcagggca

SEQ ID NO: 891736 - DNA, 120 bp, Artificial Sequence
  ENSG00000279278_23 (sequence is synthesized)
ccactaccagcagcagctcacaccccaagaccagctcagaggcggcccctacctcagcagcagggacatcacagacactttgagctggcactagggtggcttctccagctcccacgggga

SEQ ID NO: 891737 - DNA, 120 bp, Artificial Sequence
  ENSG00000279278_24 (sequence is synthesized)
cacgtggagtctcatgcccatgaaagtgccattcaccactggccaggctcatgaggccgcatgagaggggggtcactggggaggagatatcgggggaacagagagggtggttgaattttt

SEQ ID NO: 891738 - DNA, 86 bp, Artificial Sequence
  ENSG00000279278_25 (sequence is synthesized)
aggggaaaggtttgttattattagcaatgctacacttcaatattacactaaaatccagtttctctataacctgggagttgctcttt

SEQ ID NO: 891739 - DNA, 120 bp, Artificial Sequence
  ENSG00000279278_26 (sequence is synthesized)
tcagtaccatcagcctggcaaggagctgggcctgctcctcagagctcccgggactgcgagaattggcatgttcacaaggcaccgtcacagcctctgaaacacgctgtctttaaagatgtt

SEQ ID NO: 891740 - DNA, 62 bp, Artificial Sequence
  ENSG00000279278_27 (sequence is synthesized)
aattggcatgttcacaaggcaccgtcacagcctctgaaacacgctgtctttaaagatgtttg

SEQ ID NO: 891741 - DNA, 84 bp, Artificial Sequence
  ENSG00000279278_28 (sequence is synthesized)
cagagcccattatttgtaagtcatcagacccctccatgaccttaaaactccactctgacctgattattgcaaacctatatacaa

SEQ ID NO: 891742 - DNA, 63 bp, Artificial Sequence
  ENSG00000279278_29 (sequence is synthesized)
agagtcaaatttgttccactacagccaggtcgcatacaattacatcatttggttcttcataca

SEQ ID NO: 891743 - DNA, 90 bp, Artificial Sequence
  ENSG00000279278_30 (sequence is synthesized)
aggacagagtttagcatagaagaactgtaagaaataggttctgaaacatagaaattgcaaagttcaaaaggctatgaaaaaaactaatgt

SEQ ID NO: 891744 - DNA, 65 bp, Artificial Sequence
  ENSG00000279278_31 (sequence is synthesized)
tctatgacttactgtaggaattaatcaatttggtggcgtatttaattaattctatcactagagga

SEQ ID NO: 891745 - DNA, 120 bp, Artificial Sequence
  ENSG00000279277_0 (sequence is synthesized)
tattctttttatatctctggaaaagtattaaatacattcttccagaaaaaccttcgctgaagggcttggctggactagtttcccacagcttatcctagggcctctgggtagaattgtttt

SEQ ID NO: 891746 - DNA, 120 bp, Artificial Sequence
  ENSG00000279277_1 (sequence is synthesized)
tctttattgtgtggatagatcagactcagtacggagaccaacaggctctctgtcttctcctcagaagcaactgggattctccagagcagtcataaggtgacagaaaggccccagaacaga

SEQ ID NO: 891747 - DNA, 120 bp, Artificial Sequence
  ENSG00000279277_2 (sequence is synthesized)
tgtttcgtgtgtgacagagcctccagggagacgactctgttgctttaacagtgctaatgaggccaggttgccagtgggtcctcacctgagccagttacttatttatatgactccatctta

SEQ ID NO: 891748 - DNA, 120 bp, Artificial Sequence
  ENSG00000279277_3 (sequence is synthesized)
ttcctcaaagggtttaaagtgccctgtttgggccaggtgtcttcacactgagaaaagcggcgttccacggtcacagccaggtgagtgcactcgcccatcggcatgggcatccgaggagag

SEQ ID NO: 891749 - DNA, 120 bp, Artificial Sequence
  ENSG00000279277_4 (sequence is synthesized)
cagggctgtggtgggtaaaatgcgctctgcgaaacctcgcctctaactgccttgctcaaagcaacctgccacagaggtcaagagcgtcatttactcatataaagaacagttctttctcct

SEQ ID NO: 891750 - DNA, 120 bp, Artificial Sequence
  ENSG00000279277_5 (sequence is synthesized)
caacccctgagaagcaaagccaccgtaataattttcactatacataggaaaaaatttttgtaatcaaaaaacgaaacgaaattcctgattcaacacattccgagggctgtccaaatcaac

SEQ ID NO: 891751 - DNA, 120 bp, Artificial Sequence
  ENSG00000279277_6 (sequence is synthesized)
ctggcagtgacatcagtgctggtgaaaaccacattttatgactctgccttcactcgtcctcctgggcattttttattcttcaaattggagataaaaataagggttggtctctcaaggtta

SEQ ID NO: 891752 - DNA, 120 bp, Artificial Sequence
  ENSG00000279277_7 (sequence is synthesized)
ggagggagagagcagcatatgttcttcaaaagactcaataagataatagatttttttaaaagctgttgctagtgtaacttacttatagtttcaaagggcttttttaaaatgaaatctttg

SEQ ID NO: 891753 - DNA, 120 bp, Artificial Sequence
  ENSG00000279277_8 (sequence is synthesized)
caagcaatagtaaagaaatctagaaccccctgaggtgatggttagagtcctgtcacggatttaaatctaattattagcctgaaagtaaaaaggagaaaaaaccggccgagtgtcagcccg

SEQ ID NO: 891754 - DNA, 120 bp, Artificial Sequence
  ENSG00000279277_9 (sequence is synthesized)
gaaaacaataatcgccgtggtggtgttcagcagcccagttattagtgccttcaaggatagttcaccgcatttattcttgcccttgaaagacagccacagaagcttcgatgttttctgata

SEQ ID NO: 891755 - DNA, 120 bp, Artificial Sequence
  ENSG00000279277_10 (sequence is synthesized)
attgcttctttttccatggagtagaggtgcttcctgtgctcctaggtttcatctcttctgagcacctgatgaaaagcattggctgtcagtgcaggcacttagaagagaggcaatgtgcac

SEQ ID NO: 891756 - DNA, 120 bp, Artificial Sequence
  ENSG00000279277_11 (sequence is synthesized)
agagccgagtgccccagcctgcacttccccacctgtgtgaccttgtgcacgtaacctgacttctctgtgcctcaatgtcttcatgtgtaaaatggagattaaatgagagaaagcatgtca

SEQ ID NO: 891757 - DNA, 120 bp, Artificial Sequence
  ENSG00000279277_12 (sequence is synthesized)
gagtccttgttccatcagtcctcctgagtggctgcggaacgcagaaaaggcagctggtgacatgctgtgaattggaagtggcttctatttacctcttctccacctactcatatggccacg

SEQ ID NO: 891758 - DNA, 120 bp, Artificial Sequence
  ENSG00000279277_13 (sequence is synthesized)
gattaaaggccccaagtccattttaaggcaaaggccagaaaagcgaccttcagaaggagccagcaccccagctcctgcctcagggcgatatgaagaccccaggaaggaaattatgctgag

SEQ ID NO: 891759 - DNA, 120 bp, Artificial Sequence
  ENSG00000279277_14 (sequence is synthesized)
aaaaggagatcacacctctgtccagcctgcaccggccccttggcatgccctgaagacacaaggcctaaatcaaggtcaaagacacagccctcctggttgtgaagattccaaaggctccca

SEQ ID NO: 891760 - DNA, 120 bp, Artificial Sequence
  ENSG00000279277_15 (sequence is synthesized)
gctgcatgaggagggttacccagaatgtcagatttggagcaattcagcgagaacccttcaaaattcagtgtggtatgtggaaggtaagaggcagacaggccaccaggaggtgggttttat

SEQ ID NO: 891761 - DNA, 120 bp, Artificial Sequence
  ENSG00000279277_16 (sequence is synthesized)
ttcgtgtgcacaaagttttaaaaaatacatgtgcaccattaaaagggaaaaagaagaaaaagaaaaacagcaaaagcaggagactctacgtttttaaaaatctggatttccagcttcttt

SEQ ID NO: 891762 - DNA, 120 bp, Artificial Sequence
  ENSG00000279277_17 (sequence is synthesized)
taaataaagaagtagaggttctggctacactgggcccacattactcccctccctgaacggtgagctggagttgcacagcttaggtcctctttgggtagagtacatgcttcccaattctcc

SEQ ID NO: 891763 - DNA, 120 bp, Artificial Sequence
  ENSG00000279277_18 (sequence is synthesized)
agggctccttccactgttgctacttcagcctatattttagtgttttgcttgtagtgcagaaatatttctctgtgctcatgaatctacaaaatgtgagaaaacaaaacatatacccagagg

SEQ ID NO: 891764 - DNA, 120 bp, Artificial Sequence
  ENSG00000279277_19 (sequence is synthesized)
actgtgtgttttaccagcaagtgcagaaagcgcctttgtggaagcaaggaatagtgctaatatttactatgcaaacccccggcatgcaccactcattctcattacctgcctggctcttaa

SEQ ID NO: 891765 - DNA, 120 bp, Artificial Sequence
  ENSG00000279277_20 (sequence is synthesized)
gggtattttattttgtagcctctgcctggaagacttggaagacggaaatctgtagatagtctgcaactatttatccacccatttctgcttacataggtcatggcagaattaccgtggcac

SEQ ID NO: 891766 - DNA, 120 bp, Artificial Sequence
  ENSG00000279277_21 (sequence is synthesized)
gctactttggcaagagttctgctgtctttagcccttgcatagttaatcacctgcagcaaacttaaagaatcttatccatcggtcttcaaaggggtaggaatttgagagaccaacctttag

SEQ ID NO: 891767 - DNA, 120 bp, Artificial Sequence
  ENSG00000279277_22 (sequence is synthesized)
ctcttttgcttggaatactaataacatgaatttctacaatggtcttctccatctttcatatacatgaggaagttcaggctcagacagataaatgacttgcccaaagggtgaaactggagt

SEQ ID NO: 891768 - DNA, 120 bp, Artificial Sequence
  ENSG00000279277_23 (sequence is synthesized)
attagctggtctagaaagaaggttgggaaggaaacatttccttactccttcacctggggaaagcaagttgcccttccccacaccctcttctgtcccccagcatgcatacaatatgtacac

SEQ ID NO: 891769 - DNA, 120 bp, Artificial Sequence
  ENSG00000279277_24 (sequence is synthesized)
acactagcccactggttacaggctggctagcttctcccagcctctctccagagggtcaccctcatctagcagatgtgggcaggaagagaagtccacttgtgcttgctgccagaggagatg

SEQ ID NO: 891770 - DNA, 120 bp, Artificial Sequence
  ENSG00000279277_25 (sequence is synthesized)
gccactgccaattgaggctgatcatgaagagtgggttcctggagtcctcagcagagcactggctattcatggacaaggacaggtgagaagccctcctgttttctgcctctggctctgtag

SEQ ID NO: 891771 - DNA, 120 bp, Artificial Sequence
  ENSG00000279277_26 (sequence is synthesized)
tgttgcctagttcgcatcagatggggaaggagctaaatactcatcccagctcagaagtggaactgagactgctccgccagggcgcaaatatcatggtgcatagagagcatataaacatcc

SEQ ID NO: 891772 - DNA, 120 bp, Artificial Sequence
  ENSG00000279277_27 (sequence is synthesized)
gtccattttaaggcatggttttctattaagcctttaatgcttacagaagtatacattttccatagaaagggaacctaaactgtcctaatatgtgggcagtttagctcctgactcccaact

SEQ ID NO: 891773 - DNA, 120 bp, Artificial Sequence
  ENSG00000279277_28 (sequence is synthesized)
tggccagaggtgtggtgaatcagcatgtcacattccactaaaagatgcttccctgtttatgtttgtttggtgtttaggaatgtaataactatactagagttctttcttaggctgtggtct

SEQ ID NO: 891774 - DNA, 120 bp, Artificial Sequence
  ENSG00000279277_29 (sequence is synthesized)
gcctctgagggaactgaaagtgatgcagagagccaaaaccagcatcatgattctatcagaaagcgtatgtttgtgtccttcattaggaacattgccgttctatgctaccgaatgaagagg

SEQ ID NO: 891775 - DNA, 120 bp, Artificial Sequence
  ENSG00000279277_30 (sequence is synthesized)
atcttattgatacctccctctcgcttctgcctccaaaccaatcccttgcttccttccacccagaaataaaaggacactctgagttatggcattatcagtgaattttcagtgggtaggatg

SEQ ID NO: 891776 - DNA, 120 bp, Artificial Sequence
  ENSG00000279277_31 (sequence is synthesized)
ttctgagcagtgaaaactataaataaattggttctacgctggaattagctgtggagccggaaagataaacacaggacaactaattgcagccgcacgattaacaagaatgttgttctaagg

SEQ ID NO: 891777 - DNA, 120 bp, Artificial Sequence
  ENSG00000279277_32 (sequence is synthesized)
agagaaaaagtcaacagcattaatgaaaattaagcagtatctcaatggtactagtaaataaataaatatatgtctatgtttaattaaaagcaagacccaattatgtctcacttcttactg

SEQ ID NO: 891778 - DNA, 120 bp, Artificial Sequence
  ENSG00000279277_33 (sequence is synthesized)
agctacttaaatcaagacagtctaatgttaaatgagaaaaatcaactcaggacactgtcatctgcatttaatcaagacttctgtgtctcacacaagctttcaagatgggtagcggtaggg

SEQ ID NO: 891779 - DNA, 120 bp, Artificial Sequence
  ENSG00000279277_34 (sequence is synthesized)
gtgtgtgtttaggagtctcatgcaaacttcccattgccctgcagtggacaggtctatagatctccagttggagtacagaaatcttctagaagaattgtgactgtaaagccacttctataa

SEQ ID NO: 891780 - DNA, 120 bp, Artificial Sequence
  ENSG00000279277_35 (sequence is synthesized)
ctcttactctgtgattctgatgcaaacataccattttgggttaatataagcaaagcttgtatctagaactatagctaaaagtatcaatgtggtgttattttttttctgacaataaaagca

SEQ ID NO: 891781 - DNA, 120 bp, Artificial Sequence
  ENSG00000279277_36 (sequence is synthesized)
atacataaatgtgcagcaaaatgtttacttaaggttttgcttcttttcaactaaatttgtttagtacacattaaaggtcagatgtggggaagatagattgggggtcaggggttgtttcta

SEQ ID NO: 891782 - DNA, 120 bp, Artificial Sequence
  ENSG00000279277_37 (sequence is synthesized)
cctgctttgtctaaataccttaccgcagtcaatgtccttagttgttttgtgtctacccccattaactgaaaacccaaggtgagaaagtcttccttgctgagtttagtgacagttctctcc

SEQ ID NO: 891783 - DNA, 120 bp, Artificial Sequence
  ENSG00000279277_38 (sequence is synthesized)
caggtgaaggggatggggtaagaggcagaaacccctgtctccagaggaatctgaagagagagtgtgctttgatgaccccgggggtgcaggaaggaagtggggcccaagcaggcaatgact

SEQ ID NO: 891784 - DNA, 120 bp, Artificial Sequence
  ENSG00000279277_39 (sequence is synthesized)
atgcctggccctggagttgcgtacttggcccttactgtatcatttcttgtctcacttcctctcacttgtcaggaatgttgccaggactggtgaaaagacaagtgagataccacgccaaat

SEQ ID NO: 891785 - DNA, 120 bp, Artificial Sequence
  ENSG00000279277_40 (sequence is synthesized)
aaagccaaatccttgaaagaaagatgcgatggtctacaaatcaaagtaatttcttctttcactattactgatgcaaatgtctttcttttcttcatctcacaaggtttttttggtgtgttt

SEQ ID NO: 891786 - DNA, 120 bp, Artificial Sequence
  ENSG00000279277_41 (sequence is synthesized)
tttattgagcatttcttctgtgctgggcgctatgcaaggccgaagaatacagtcaggatcagacacagtccctccaagatggggtatataaatttagtaaatttcttactttctctgaac

SEQ ID NO: 891787 - DNA, 120 bp, Artificial Sequence
  ENSG00000279277_42 (sequence is synthesized)
cttgatcccctcatttattacataggacattttttaaaatagtaatacatacatcctgaattttttttcctaaaacagggtagtgctgtgtcaccaaggctggagggcaatagcatgatc

SEQ ID NO: 891788 - DNA, 70 bp, Artificial Sequence
  ENSG00000279277_43 (sequence is synthesized)
actggctaatttttttaaaactttttgcagagacatagagaccgggttttactatgtagcccatgctggc

SEQ ID NO: 891789 - DNA, 120 bp, Artificial Sequence
  ENSG00000279277_44 (sequence is synthesized)
acactggctaatttttttaaaactttttgcagagacatagagaccgggttttactatgtagcccatgctggcctcaaactcctgggctctagcaatcctcctgccttggcctcccaaact

SEQ ID NO: 891790 - DNA, 120 bp, Artificial Sequence
  ENSG00000279277_45 (sequence is synthesized)
gctctggaaatgttttgaggactacataaaataatgtatataaaagggcctagcagaatataactagaagctcaacaaatgttatacattcttcccccccagtcataagcaggaaaacaa

SEQ ID NO: 891791 - DNA, 120 bp, Artificial Sequence
  ENSG00000279277_46 (sequence is synthesized)
aaaaaattaaatccacacatttccccatttcttaacagtttttttttaaagggtggtgttgggagaaacttgaaacttttgattaaaaaaatagctacttaggattaaatagcaaatcat

SEQ ID NO: 891792 - DNA, 120 bp, Artificial Sequence
  ENSG00000279277_47 (sequence is synthesized)
aggtcagaaatcacaggacaagcaattctttaagccaagctttccctgtcaggataccttccacaggggagcagccccttcactggcagtgagaaaggtgctcatttgaatatcaagcaa

SEQ ID NO: 891793 - DNA, 120 bp, Artificial Sequence
  ENSG00000279277_48 (sequence is synthesized)
cggaccagtgaaaattggtagagagccatggaaatgctactgctaggtctgtccctcatgacctgataggctctgtggacatgggcaaccccagaccctggtgacaaaataagcaacaga

SEQ ID NO: 891794 - DNA, 120 bp, Artificial Sequence
  ENSG00000279277_49 (sequence is synthesized)
cccgtttccgggtgcatctcaggtgaattctgctcacagccagaggaaaatgagtgtttctgattcttcctctcccttcgtcagcttttcctctggccttgcctaggtccccaggcttag

SEQ ID NO: 891795 - DNA, 120 bp, Artificial Sequence
  ENSG00000279277_50 (sequence is synthesized)
tactaaagtcccatcattcagtcagttcaaatcccaactaaactccagagatggctgggaggggctgagtgtacttggtggaggcagaggccaaaaagcacagtggatgaagcatcgggt

SEQ ID NO: 891796 - DNA, 120 bp, Artificial Sequence
  ENSG00000279277_51 (sequence is synthesized)
ggtggggtgggaaacatgggatctcaccccttagctgttgctgatgaactggggacccagataagatgctgtggcttcctgcatctcagcttgtttgtctgtaaaatgaaggacttggcc

SEQ ID NO: 891797 - DNA, 120 bp, Artificial Sequence
  ENSG00000279277_52 (sequence is synthesized)
cagatgtctcaatggctcacccagcgctattctcctatcatctctctcgggaagctggtcaggtttccaggatcacctttcttctctaatctccacccaggcaaaggccagaaaagcgac

SEQ ID NO: 891798 - DNA, 120 bp, Artificial Sequence
  ENSG00000279277_53 (sequence is synthesized)
cctgtgtgaccttgtgcacgtaacctgacttctctgtgcctcaatgtcttcatgtgtaaaatggagattaaatgagagaaagcatgtcaggtgggtagcatggtgcctggctcaatgtaa

SEQ ID NO: 891799 - DNA, 120 bp, Artificial Sequence
  ENSG00000279277_54 (sequence is synthesized)
gttctcaatatgtgtaagctgtttatctttttcctcttattatactttggccaaggtggaaaaagcttaccatgacacagtctagcgatgaacataacatatgctggaatatgtattttc

SEQ ID NO: 891800 - DNA, 120 bp, Artificial Sequence
  ENSG00000279277_55 (sequence is synthesized)
ctatgctgggttattggcaaagaagcaaacaggacacaaaatgactaagaatataaaataatataacaagtgcagctaagttgcagacatgttcattccaagcacaatattcatgttagg

SEQ ID NO: 891801 - DNA, 120 bp, Artificial Sequence
  ENSG00000279277_56 (sequence is synthesized)
ccaccctccggttccttaatgaaagcagaggacagaaggtgacatttggcattgggtaatcctatttgccctttcctggaatgcaaagaaggtggaaggaaaggatcccactcctgtagc

SEQ ID NO: 891802 - DNA, 120 bp, Artificial Sequence
  ENSG00000279277_57 (sequence is synthesized)
acacacagaggctttgggaccccgtgcctcctgccaacatcactcagctcattcatttatttattcacgtcagtgacagattctcaagacctctgaaaatatgttaagagcaggctctcc

SEQ ID NO: 891803 - DNA, 120 bp, Artificial Sequence
  ENSG00000279277_58 (sequence is synthesized)
aatcacaccagaaagaatatgattaagaacttagagctgtctttaggctaataaccagcagaaactaaatccaagtatttgggagtgaagatggttgttgaaaatattgaggcctagtaa

SEQ ID NO: 891804 - DNA, 120 bp, Artificial Sequence
  ENSG00000226659_0 (sequence is synthesized)
gaccccaggagcaggggtcgcgccgaagagcagagtccgcggctggaaaccaggcaggggagccacggagtagtcacacaggttttctgccgcctttcaactggtcttattttgctttca

SEQ ID NO: 891805 - DNA, 120 bp, Artificial Sequence
  ENSG00000226659_1 (sequence is synthesized)
tttttcaccagcccatgtggggtgtttaatgttgcacgcgaacgcagtttcttccgggcccggaaggcccacgcacgcaacaatgttgtgcaagtgactggaaaccacctgagtgtccct

SEQ ID NO: 891806 - DNA, 120 bp, Artificial Sequence
  ENSG00000226659_2 (sequence is synthesized)
acaggaggaaaggtctgcgtgccctaagagagagctgctggcgtgcagagagaagcagagatgccgacgacggggaggaaacacactggcggtggtgaggctccttccagcagccacagc

SEQ ID NO: 891807 - DNA, 120 bp, Artificial Sequence
  ENSG00000226659_3 (sequence is synthesized)
cctggttcctctcagtctgtgaccctcccacatccttcccatctatgagagcctgtaaactccttttgcttaaccttgttttagttaaggttttaaacagttgccaccagtgtgccctaa

SEQ ID NO: 891808 - DNA, 120 bp, Artificial Sequence
  ENSG00000254180_0 (sequence is synthesized)
aaggaagattgagtagccatcagaaaggaggaactagatgtattccagtgagagacgttaccaggaggaagaaactataaagttcatggtactcaagggggtctctgaccaaaaaaggat

SEQ ID NO: 891809 - DNA, 120 bp, Artificial Sequence
  ENSG00000254180_1 (sequence is synthesized)
taagaagaattgaggcaaaaggcacacaacaagacattctccagatcacctggcatctagctggggccacaaggtttttttctgccaacggaatatgtgcagaagtgatgtatatgacct

SEQ ID NO: 891810 - DNA, 120 bp, Artificial Sequence
  ENSG00000254180_2 (sequence is synthesized)
cagagcccagcctctaaatatcctgtgtcatgctccacattctgtccattcatctctcagttaactaaatagaagtgatgcaagggaggactccaaggaagccctagggatcatgaagct

SEQ ID NO: 891811 - DNA, 120 bp, Artificial Sequence
  ENSG00000254180_3 (sequence is synthesized)
acagaatgggagaattgctgtcaccacagttctggaagaagaattgttcaggagaacagccattggactatggcatgccaaagaaatctctgttgtgaaaccacaattaaaagttgttct

SEQ ID NO: 891812 - DNA, 120 bp, Artificial Sequence
  ENSG00000254180_4 (sequence is synthesized)
tcctgcctctgcttcttgaccaacccctgagtggccctgtatagtgttctccctaggaaactgcaagcaagatgataatttgatttttgagttaacctgatgagtttttgtagctgtcaa

SEQ ID NO: 891813 - DNA, 120 bp, Artificial Sequence
  ENSG00000254180_5 (sequence is synthesized)
gagctcttaaattgagccaatgaaagcaaaattcaatagaagaaagcaaaaaaatgaagaagacagcattaaaggaaaagatcaagctttctagaatcatactggctattaataatgcct

SEQ ID NO: 891814 - DNA, 120 bp, Artificial Sequence
  ENSG00000254180_6 (sequence is synthesized)
ttggctttgggattgggaatttttgatgtgaccaaacagccatttatgttctcagaaaactggaataggaatatcctatggtggaagaaaagaatggaccatgatgaaaatttctacacc

SEQ ID NO: 891815 - DNA, 120 bp, Artificial Sequence
  ENSG00000254180_7 (sequence is synthesized)
agaagagtttaaagatgaagaaagcaccacagaagcagttcatgtctcactaaggctagacactgatggatctaacgtctctctttggaatttattggcatttaacacctattatcgtca

SEQ ID NO: 891816 - DNA, 120 bp, Artificial Sequence
  ENSG00000254180_8 (sequence is synthesized)
actctggagtcctcagctaaactctaagagaacaggcaaggagaaggggaaaataatgtgactacctctggccaaagcactgaattccacttcaagacccaccttttccctcagctacaa

SEQ ID NO: 891817 - DNA, 120 bp, Artificial Sequence
  ENSG00000254180_9 (sequence is synthesized)
tgactggcactgttttataaagtggttgttttatcagcctgggatctggcacaaggacagtgatgatcagaggcccagctgagcctcaagcacacataacatgcattttcaactccaagc

SEQ ID NO: 891818 - DNA, 120 bp, Artificial Sequence
  ENSG00000254180_10 (sequence is synthesized)
ccctgagatttgggagctgcctattaagaagcgtaacctattccatcctgactatttcacagagggaacagttaaaagaataatgagatattatttcaaataaggaaattatggagaagt

SEQ ID NO: 891819 - DNA, 120 bp, Artificial Sequence
  ENSG00000254180_11 (sequence is synthesized)
ttaaatgacaggcaaacatatttgaagtttattaaataaaaagtcagtaggaaattattgaagctttgtgaagagggaaagcaattagtcaatggagagttttaaaatcagtgtggtcac

SEQ ID NO: 891820 - DNA, 120 bp, Artificial Sequence
  ENSG00000254180_12 (sequence is synthesized)
agcagtaggacaaattaaagaaggaaagaacagagatatgaagactaactagttaacagtccattgcaaaatcccagtgaaaaatggtaagctctctgaacagagaatgattgaaaattg

SEQ ID NO: 891821 - DNA, 120 bp, Artificial Sequence
  ENSG00000254180_13 (sequence is synthesized)
aagaagagagagggaacagtgagaaatgaatctagcatttcaagcctgagtacctgggagaaatgtaggactataaataacagatatagaatagcgcaattaagaggactgtctatttct

SEQ ID NO: 891822 - DNA, 120 bp, Artificial Sequence
  ENSG00000254180_14 (sequence is synthesized)
gttgataatagtatcattttcttaaatttgttttgacaaaaattattttagatatgtcaggtttggggtgacagacagtgagtcagatatgttgatgtatccaacaggaaagcagagata

SEQ ID NO: 891823 - DNA, 120 bp, Artificial Sequence
  ENSG00000254180_15 (sequence is synthesized)
cgggctggcttgggtagttgtctagaagtggtgatgttatccaagatagaaactgcacaatgagaaacagttgcggggttgtatccatcagggtttagtgtagaaaacagaatttacaga

SEQ ID NO: 891824 - DNA, 120 bp, Artificial Sequence
  ENSG00000254180_16 (sequence is synthesized)
tgaggaactgctctttccaccctgcagtaagggcactgctgccaacatcacatctggggcattcagagcgcctgatgccagaagttttgtctgctggagctgcttttctgcccacagcac

SEQ ID NO: 891825 - DNA, 120 bp, Artificial Sequence
  ENSG00000254180_17 (sequence is synthesized)
tataaaaaagaatcacctccgttttccaaatagttcgtgagtgcatttcattggcacaaccttaatcacatccaggaccctagccacaaaatgtctttaaaacatagtgtttagactaat

SEQ ID NO: 891826 - DNA, 120 bp, Artificial Sequence
  ENSG00000254180_18 (sequence is synthesized)
agcccctataatattatgttaatggtggaagagtgtaggaacatacaaaggagatacaaatggatgctgattgcaagtagacaatgcaaagtccccatgggacatcaaagtagagaaatc

SEQ ID NO: 891827 - DNA, 120 bp, Artificial Sequence
  ENSG00000254180_19 (sequence is synthesized)
taacatcccttaggtaaattaaaaatgaaattctgggaccttagagaaagatggggaaatatcaacatttagatcaggggtgtccaattttttgacttccctgggccactttgaaaaaat

SEQ ID NO: 891828 - DNA, 120 bp, Artificial Sequence
  ENSG00000254180_20 (sequence is synthesized)
aatagctgatgagctaaaaaaaaaaatcacaaaaaaagtcttataatgttttaagaaagtttacgaatttgtattgggcagcattcaaagccatcctgggccgcatgcaccccacaggtc

SEQ ID NO: 891829 - DNA, 120 bp, Artificial Sequence
  ENSG00000254180_21 (sequence is synthesized)
tcaaagccatcctgggccgcatgcaccccacaggtcgtgggttggacaaacttcacttagatgataagttgaagccgtggaactaattgagattgtttagagagaggatttagatcattt

SEQ ID NO: 891830 - DNA, 120 bp, Artificial Sequence
  ENSG00000254180_22 (sequence is synthesized)
gaggtgttaaatccccatcctggtgaccacagtgtttaaaaagaaagcctatgtttaaaaggcaggaagaaaaagctgcatcaagggaaatttgctccatatcaggctttagtagcccat

SEQ ID NO: 891831 - DNA, 120 bp, Artificial Sequence
  ENSG00000254180_23 (sequence is synthesized)
ttctgacaaggaatttcctaatactgtacttaaaataccgtagattaaccctatgtagtgaattaaaagaagaacatgtgaaggtgtatgtggtttgaaacaggaagaactgaatggagc

SEQ ID NO: 891832 - DNA, 120 bp, Artificial Sequence
  ENSG00000254180_24 (sequence is synthesized)
tgataaccagttagaattaaccagttaaaatatagtaatgtatacaatttcccagtgtgaatgtaaatatgccatgcatgttacctgaaaattaatattaagctctgataagattcttat

SEQ ID NO: 891833 - DNA, 120 bp, Artificial Sequence
  ENSG00000254180_25 (sequence is synthesized)
ttctaaaagttgacactgttgtattgcctttaaatttgaaggtgaggtataaaattaaaacctatactattttttcatagttttccacttggaccaatttcacaactaaattgttttttg

SEQ ID NO: 891834 - DNA, 120 bp, Artificial Sequence
  ENSG00000254180_26 (sequence is synthesized)
aaaaagtactttttaaatgagcacttattctgttcaaacagtattaggcattatgtgggatccaaagataagacattgtccctcctgtcaaatgcaccaaaattgattaaattaagatgt

SEQ ID NO: 891835 - DNA, 120 bp, Artificial Sequence
  ENSG00000254180_27 (sequence is synthesized)
aacttggggtcatgcttattgctagagcaattttttcatttttccttcttattttcagagagaataaagtctccttctactgaggtaatagctaccacaaagattttataacttaaactg

SEQ ID NO: 891836 - DNA, 120 bp, Artificial Sequence
  ENSG00000254180_28 (sequence is synthesized)
atttctctataatttgggtctaatgagactgcaattttattttacattttatccttttttgttaagtatattcttcctattactttaataaaaaaacaaaatgaagtttttaacattgtt

SEQ ID NO: 891837 - DNA, 120 bp, Artificial Sequence
  ENSG00000254180_29 (sequence is synthesized)
agtttttaacattgttaagaagtgtctgcttgattcttctgttagttcaaatctaaatctgttcataagctttatgaaattacatgtaacaaaatacattatctacacatagacaaatat

SEQ ID NO: 891838 - DNA, 84 bp, Artificial Sequence
  ENSG00000254180_30 (sequence is synthesized)
ggtactcaagggggtctctgaccaaaaaaggattaagaagaattgaggcaaaagatggagtcacccagcatctacttcccaggt

SEQ ID NO: 891839 - DNA, 120 bp, Artificial Sequence
  ENSG00000254180_31 (sequence is synthesized)
ttgaccaacccctgagtggccctgtatagtgttctccctaggaaactgtggattctacttctggtgaagatgacgtgaacattgctgaaatggcaacaaaggattcagaagattacatca

SEQ ID NO: 891840 - DNA, 120 bp, Artificial Sequence
  ENSG00000254180_32 (sequence is synthesized)
ttcataaaagaatcaactgatgtgatcaacttcatggtttcttattttaagaaattgtcaaaagcaccttaaccttcagcaactgctgccccatcagccaggagccatcaacatcaggaa

SEQ ID NO: 891841 - DNA, 120 bp, Artificial Sequence
  ENSG00000254180_33 (sequence is synthesized)
gacccccccaccaggagaaagattaggtctcactgaaggcttgaatggttgttagtatttttcagctctaacgtatttttaaattaaagcttttacactgctgttttaaacattatgctg

SEQ ID NO: 891842 - DNA, 120 bp, Artificial Sequence
  ENSG00000254180_34 (sequence is synthesized)
ttacatacttaatagaccatggcatagggtgaacacaacttttatatgcagtgagaaactaaaaaattcatatcatgtattctattgtgatattcactttattgcagtggtctggaacta

SEQ ID NO: 891843 - DNA, 120 bp, Artificial Sequence
  ENSG00000254180_35 (sequence is synthesized)
agcccccaatatctctgaggtatgcctgtaattgagcattcccataattataaactgtgatacaggctatgaaggaaaagtgcaacatgtcaggagactgtgtaacagagatatctggtc

SEQ ID NO: 891844 - DNA, 120 bp, Artificial Sequence
  ENSG00000254180_36 (sequence is synthesized)
taatggggcgagacagtctgaaaaaattgctttaattgctgagagctggagaaataatagttaaccaggaaagggagaggaatctggaggaggagcttctggcagcaggaatagaatggc

SEQ ID NO: 891845 - DNA, 120 bp, Artificial Sequence
  ENSG00000254180_37 (sequence is synthesized)
aaagtccaagttgtgggaaggataggggcccatttaaagaatggaaaggaaaataaaataggaacacagtacaggaaggagtgagggatatgagaagaaaccagagaaagaaaggggcta

SEQ ID NO: 891846 - DNA, 120 bp, Artificial Sequence
  ENSG00000254180_38 (sequence is synthesized)
atatcgaggttctctaccttggcactgttgattaacatttggggctggatgattctctgttgtggggagtggccctttgcacaattttagcagcaccctctggcctctacacactagatg

SEQ ID NO: 891847 - DNA, 120 bp, Artificial Sequence
  ENSG00000226655_0 (sequence is synthesized)
ctgtaatttatcatattaatttgggctaccagtagcatcgtttagagattgtgcaaattgagttcacaaatatcacagctttggaagatcaagaagtggttttgaacatagagattccag

SEQ ID NO: 891848 - DNA, 120 bp, Artificial Sequence
  ENSG00000226655_1 (sequence is synthesized)
ggttagaatcaggaactgcgctgaccacagaggatcgggcaacatcgactgtgtgctgtttgctaactgaaagttcagagggagacagtttggcccctccttggacctctggctgagaga

SEQ ID NO: 891849 - DNA, 120 bp, Artificial Sequence
  ENSG00000226655_2 (sequence is synthesized)
agggatgtacacggagtggcaccaacacacccaggcagacgctcacattatgaaacataaatgcagagtgaacaaagagtgttgcaaatcactcagcttggctagctgctgccaaagcaa

SEQ ID NO: 891850 - DNA, 120 bp, Artificial Sequence
  ENSG00000254186_0 (sequence is synthesized)
ggtcaccaaggaagccagagtggaggctgcagggaatatggatttaaatgaattttggctgtaccatcaagcagtctgatcactgaggaaatatcaaaagcttcacccgagtgactcatc

SEQ ID NO: 891851 - DNA, 120 bp, Artificial Sequence
  ENSG00000254186_1 (sequence is synthesized)
gacagagcgtccacattttctctcattttactctgagacggccagtctgttttacagtctcccacacacacttttcttctctcaaagacatttccaagtttaatattatattttaaaaaa

SEQ ID NO: 891852 - DNA, 120 bp, Artificial Sequence
  ENSG00000254186_2 (sequence is synthesized)
agggaggccattacattaatgccttcagctttccgcacagcccatattgctttggtggacgctttgaaatgtctggtcgttataactcagtcactcaagacacctcacttaaaaattcta

SEQ ID NO: 891853 - DNA, 120 bp, Artificial Sequence
  ENSG00000254186_3 (sequence is synthesized)
gttatggaataattgtgatgccataggaagaaaattaagcaagctgtctactcttgggaaatgttaacaaatgcctgtgcatactgtgaagagtccacggggaagaaaatgagccacaca

SEQ ID NO: 891854 - DNA, 120 bp, Artificial Sequence
  ENSG00000254186_4 (sequence is synthesized)
agatggtcccacctatatttattatacactgatcactatgaagacataaagatttgttaaaagtggcctttgaagagcatgtaattgtgtccagaattggcgggttcttggtctcactga

SEQ ID NO: 891855 - DNA, 120 bp, Artificial Sequence
  ENSG00000254186_5 (sequence is synthesized)
aagaatgaagccgcagaccctcacggctaagacatccaaggtcaaagggcctacatctggtgaaggtcttgctgctttatcccatggtggaaggcagatgggttcacagaaaatagaaat

SEQ ID NO: 891856 - DNA, 120 bp, Artificial Sequence
  ENSG00000254186_6 (sequence is synthesized)
ccctttttctgtaaatactggctagagagttgctaacttccataatggagaaatggaaaaagcagtttctttctccaataaaaccacaaaagccatggttttaaaagaaactatagagga

SEQ ID NO: 891857 - DNA, 120 bp, Artificial Sequence
  ENSG00000254186_7 (sequence is synthesized)
tttcttgtgtggagtccttagctttgtgactgctgagatttaagacataggaaatcatgacttcctcgtggcagcctcatgattctgagatcacagcacgtgcatttggtacagccagca

SEQ ID NO: 891858 - DNA, 120 bp, Artificial Sequence
  ENSG00000254186_8 (sequence is synthesized)
gaggtggtggtgtcttctcgaattcctgaccttctttccatggcagaagaagcaacccttttgctaactgaggtctatggtggtgttcctggaatctccatctctaacctatttacctaa

SEQ ID NO: 891859 - DNA, 120 bp, Artificial Sequence
  ENSG00000254186_9 (sequence is synthesized)
tccttccaaaaatcttatattgaatcttttcatgtttaaattatttagaatggtttgtggtatctgtaaacactgaccaatgcttcccacaataaaatcagcagtatggaaagaaagaaa

SEQ ID NO: 891860 - DNA, 120 bp, Artificial Sequence
  ENSG00000254186_10 (sequence is synthesized)
tacagtttgtatgtgggcttggttaaggatctgttaagctgcagctagatgctttggcacttatgtcttgtccacatagtaacaatatactcattgattactacatcttagatttatagc

SEQ ID NO: 891861 - DNA, 120 bp, Artificial Sequence
  ENSG00000254186_11 (sequence is synthesized)
tacttaataatataacttattggagcaacacatctgggcaagagaaatttcttcttagtcctcttttgttttacattccaagctatacatacggtcatacttcattttattatgtattgc

SEQ ID NO: 891862 - DNA, 120 bp, Artificial Sequence
  ENSG00000254186_12 (sequence is synthesized)
agatattgcattgtttacaaattgaagatgtgtggtgaccccgcgacaagcaagtctaccaaagccacttttcagcagcatcttctcacttcctgtctctgtttcaattatggtaattct

SEQ ID NO: 891863 - DNA, 89 bp, Artificial Sequence
  ENSG00000254186_13 (sequence is synthesized)
gtagagacagagtttcaccatgttgccaggccagtccggaactcctgagtttgctgggatgacaagtatgagccaccatgcctggcctg

SEQ ID NO: 891864 - DNA, 120 bp, Artificial Sequence
  ENSG00000254186_14 (sequence is synthesized)
attgctgggatgacaagtatgagccaccatgcctggcctgtaatctttgatgttacttttgtaattgtctttaggtgccacaaagtgtgacaatataaaacaatgtacttaattaatgta

SEQ ID NO: 891865 - DNA, 120 bp, Artificial Sequence
  ENSG00000254186_15 (sequence is synthesized)
ggtcaatcggctgccagccggattggccggcgtatcattccagaatgtactgtttgttctgtggggtttaggagttctacagtggttctgccccatctttctaaaaatacaatacagtgt

SEQ ID NO: 891866 - DNA, 78 bp, Artificial Sequence
  ENSG00000254186_16 (sequence is synthesized)
acttgccaaagaagctgcttatttcacagaaggatggtgctggctgaaagatacttccttgaaactgagagattgctt

SEQ ID NO: 891867 - DNA, 120 bp, Artificial Sequence
  ENSG00000254186_17 (sequence is synthesized)
gctggctgaaagatacttccttgaaactgagagattgcttccttagacaggtctccttgaagagaatcccactctgtcagcccggctggagtgcaatggcgcagtcttggctcgctgcaa

SEQ ID NO: 891868 - DNA, 88 bp, Artificial Sequence
  ENSG00000254186_18 (sequence is synthesized)
tcccaagtagctaggattacaggcttgcaccaccacacctctttccctatgttggccagactggtctcaaactactggcctcaagtga

SEQ ID NO: 891869 - DNA, 84 bp, Artificial Sequence
  ENSG00000254186_19 (sequence is synthesized)
aactttttgtgtttttagtagagacgggctttccctatgttggccagactggtctcaaactactggcctcaagtgatttaccca

SEQ ID NO: 891870 - DNA, 120 bp, Artificial Sequence
  ENSG00000254186_20 (sequence is synthesized)
cctgagagtactgtgttatatgaatatctgatctacctatggattcagccgacctaaagttgttgaattcttaagccaccacccccttctcaccaggcgcttcttgccgctgccatgaga

SEQ ID NO: 891871 - DNA, 120 bp, Artificial Sequence
  ENSG00000254186_21 (sequence is synthesized)
agaaggatgtttgcttccccctctgccatgattgttaagtttcctgaggcctcctgagccatgctgaactgtttcatttcaaccccatgttttgggaactgtttggaacagactaatcag

SEQ ID NO: 891872 - DNA, 120 bp, Artificial Sequence
  ENSG00000254186_22 (sequence is synthesized)
ctctaaattctggaatcttccaccttctttatcttcaaagggatggttacatattctggctaagttctgtatcaaggaaactcacaagcttctgagaatagagacttgactttccagagt

SEQ ID NO: 891873 - DNA, 120 bp, Artificial Sequence
  ENSG00000254186_23 (sequence is synthesized)
acccttttgctaactgagatattgcattgtttacaaattgaagatgtgtggtgaccccgcgacaagcaagtctaccaaagccacttttcagcagcatcttctcacttcctgtctctgttt

SEQ ID NO: 891874 - DNA, 120 bp, Artificial Sequence
  ENSG00000254186_24 (sequence is synthesized)
caattatgagaacagatgtagagattagaatcggcaaagggaaaaggcccatgggatgaaggccagaagaaatcaagctacaagtttttctctccagtggagtcccatgaggatgcacac

SEQ ID NO: 891875 - DNA, 120 bp, Artificial Sequence
  ENSG00000254186_25 (sequence is synthesized)
aactctcccagcagcaatgtgggacaacacatgcaaagtattggccatcagggaagctccccccagctttggtcaccagggttttttattggttgtcagtcatgcacacattcagtgctt

SEQ ID NO: 891876 - DNA, 120 bp, Artificial Sequence
  ENSG00000254186_26 (sequence is synthesized)
ctgtgactgacctcacccaccagactgtaacctcaagagcaaaatcaggtattcaccataaatcagactgttaggataaacttatatgctcaaattgccatagcatggcccaaggcctca

SEQ ID NO: 891877 - DNA, 120 bp, Artificial Sequence
  ENSG00000254186_27 (sequence is synthesized)
ggcttatggaaatattatcaggcagggtattccaggagctcagaaattgtctccaggagacgaatgggacagggaaggtaggaggttgtagcaacttgctaaaatgggagacatttcaca

SEQ ID NO: 891878 - DNA, 120 bp, Artificial Sequence
  ENSG00000254186_28 (sequence is synthesized)
agaaaaaatcagttgtagaaaatcctcattcatcaaagggtcactgtattcttgggcataaaaccttgactgcacatatttccagctgtgcttacattaaaaattcccaaagggatttgt

SEQ ID NO: 891879 - DNA, 120 bp, Artificial Sequence
  ENSG00000254186_29 (sequence is synthesized)
tggaagtaagaagagaaaaatgatcagtctaaatctacagagtgactgcagaggcatggattagtacatgtgaatactgaatatgcaaatcaataaagaaaacacatttattcttgaggc

SEQ ID NO: 891880 - DNA, 120 bp, Artificial Sequence
  ENSG00000254186_30 (sequence is synthesized)
atatcttcctgtcacttaagagctaatgtctagaaactctgttttattccaattggagccaccctcaatatgtatcttgttttttaataaaagaagattgtgaaaggttctaagtatcaa

SEQ ID NO: 891881 - DNA, 120 bp, Artificial Sequence
  ENSG00000254186_31 (sequence is synthesized)
aatgtatccttttgaactaaggtgagattaagcatagcctactcctccattatgacaaatgtcatgacagcaatccagtctcagaagaaattgaaaccaggaccatcttctcatattgcc

SEQ ID NO: 891882 - DNA, 120 bp, Artificial Sequence
  ENSG00000254186_32 (sequence is synthesized)
agaggactccagatttccctggatagtcaatgattgtagtatcagaaggtattgctatggacattgttacaactaacttgtgaagtgggaaaagttcccttgttccctcacaggacgtgc

SEQ ID NO: 891883 - DNA, 120 bp, Artificial Sequence
  ENSG00000254186_33 (sequence is synthesized)
gatgggggtgtggctcacttcctcagtgccccgctgctgggacctctaggggagcatatagatgtgcaggctgtggggctccgaccccaaggcagtgtctaggggtgaatgtttatggct

SEQ ID NO: 891884 - DNA, 120 bp, Artificial Sequence
  ENSG00000254186_34 (sequence is synthesized)
cctgaagccccagtggttgtgtgttacagggtgctcttttagtttgcctataggcggcttgtgttagctcaattagaccctcttattgttgcaaggagagaaggctttctgtatcctagg

SEQ ID NO: 891885 - DNA, 61 bp, Artificial Sequence
  ENSG00000254186_35 (sequence is synthesized)
tcttattgttgcaaggagagaaggctttctgtatcctaggttcttgccttggagtactgga

SEQ ID NO: 891886 - DNA, 120 bp, Artificial Sequence
  ENSG00000254186_36 (sequence is synthesized)
cctggagttggccatcagtagcccgggctcttctctgactgccctggccaaactccacgtcgttctgccagttggtggcctgctggtgtgcccgtgcctgtcggtgctttcctctagaag

SEQ ID NO: 891887 - DNA, 120 bp, Artificial Sequence
  ENSG00000254186_37 (sequence is synthesized)
tccaaccgcctgtgtgttcctccgccaatgtgcttctctccacgtccacctgtctctgtgccttctttcgcggatctgctcctctcaacgtccagcctcttgtgtatcttcccactaagg

SEQ ID NO: 891888 - DNA, 87 bp, Artificial Sequence
  ENSG00000254186_38 (sequence is synthesized)
cctctcaacgtccagcctcttgtgtatcttcccactaaggtctcaagtttttgttttagtttggagtacaatggtgcattcttggct

SEQ ID NO: 891889 - DNA, 69 bp, Artificial Sequence
  ENSG00000254186_39 (sequence is synthesized)
tcaagagattcccctgcctagtttttgtatttttagtagagaggggcttcaccatgttggccaggctgg

SEQ ID NO: 891890 - DNA, 120 bp, Artificial Sequence
  ENSG00000254186_40 (sequence is synthesized)
tccacccgcctcagcctcccaaagtgcccgtatcacaggcaccagccactgcatccagcaggtctcaagtttttataggtccaggctagggtggtcttggaaaatgcaacatttgggctc

SEQ ID NO: 891891 - DNA, 120 bp, Artificial Sequence
  ENSG00000254186_41 (sequence is synthesized)
ttgggctccaaagcaggagtgcctgtcctcacctgggtccatggtgtggagccctagccagggaccacactcacctccacccagtacttccctttctctcttccatatcatttaaaggga

SEQ ID NO: 891892 - DNA, 120 bp, Artificial Sequence
  ENSG00000254186_42 (sequence is synthesized)
ccacactcttcccttcccagaactctggcatcactaggatctatttccctgtggctgtgattatttagtctaaaagaatataacttacttaagacaaatgtcatttgtctgaaagaatct

SEQ ID NO: 891893 - DNA, 120 bp, Artificial Sequence
  ENSG00000254186_43 (sequence is synthesized)
ttggaggttttcatggctcatgtgatgcatcctatgtctttgaaaccagaaaacattctggtctttgtttaactcaaaataaatgaatttgtaatattttatgaactctaaaattatagt

SEQ ID NO: 891894 - DNA, 120 bp, Artificial Sequence
  ENSG00000254186_44 (sequence is synthesized)
tgtgctttaagttgctttccatctattgtatctcttgtgtaaacacaactccatgacagcctgtatccttggggtgggagtgggaaaataatgttgtaatagaagaaaacttactaagga

SEQ ID NO: 891895 - DNA, 120 bp, Artificial Sequence
  ENSG00000254186_45 (sequence is synthesized)
ctttattattctaaattgtccaagaccagactgcttgaatgccctagtccaaatggcaaatgtctctctttctatagtttatacacagaacaggaaaaaacagtcattcttcatctccct

SEQ ID NO: 891896 - DNA, 120 bp, Artificial Sequence
  ENSG00000254186_46 (sequence is synthesized)
tcttattcttgtttacaaaagactttaactaggtcttatgtctggggattcctttaaaagtattattctagttcagctagctgagaatgaatagaacaaagagaagtcattatcccaggg

SEQ ID NO: 891897 - DNA, 120 bp, Artificial Sequence
  ENSG00000254186_47 (sequence is synthesized)
aggctttaaagtttcctgaagtcacttgtaatgccattttaatagcatatatagagaaccattctggctaaaatatcctgggggtcttgaccactaacatcatggaggaatggaggttaa

SEQ ID NO: 891898 - DNA, 120 bp, Artificial Sequence
  ENSG00000254186_48 (sequence is synthesized)
acaagcacaaacactggaccagagtgagaaaaacaggataccagcaaagttcctgctactcattatgcttggccataggcagtaccttctctctggagctgagatttttctgtccataaa

SEQ ID NO: 891899 - DNA, 120 bp, Artificial Sequence
  ENSG00000254186_49 (sequence is synthesized)
tacaggtttgaaagctcagaagttgtgtccggagttgtttccttccggtgggttcatagtctcactgacttcaagaatggagccacggaccttcacgataagtcattccacttcttctga

SEQ ID NO: 891900 - DNA, 120 bp, Artificial Sequence
  ENSG00000254186_50 (sequence is synthesized)
gggagtgaagaaagaggccaagttcagaattgtaccaattgactaccttgacctggacataagcaccagaatggttgcactcaacaacaaagactgtactgggaatagaaagatgaacaa

SEQ ID NO: 891901 - DNA, 120 bp, Artificial Sequence
  ENSG00000254186_51 (sequence is synthesized)
gacagtgcacttcccttcaaagagcttacagaatcacaaccagcaggatttgtgctagactttggagatatgaagatgattgaatcaaggtctttatctttaactgagatgttcataata

SEQ ID NO: 891902 - DNA, 120 bp, Artificial Sequence
  ENSG00000254186_52 (sequence is synthesized)
atatcacagaaaagaagacatataaagatcgtatacaaataaatacaatacaatgtggtaaaagatctcagcctccataactttaaaaatggtataaattatatcgtttaaaaattgcaa

SEQ ID NO: 891903 - DNA, 120 bp, Artificial Sequence
  ENSG00000254186_53 (sequence is synthesized)
gaagaaaactgttgcaaacatttgcagtcacatgacctgaaaggacctttgaagatacaacttttggaatcttagtctccattttgaatatatacttttgctgttataaccagtagaaga

SEQ ID NO: 891904 - DNA, 120 bp, Artificial Sequence
  ENSG00000254186_54 (sequence is synthesized)
gaatttccagcaacttatacgttattatttttccaggtgactgagcattgaaagaactttactcataaatgggttgtcaacactagcatggagtgtcttaggcagcagtaagttcaccat

SEQ ID NO: 891905 - DNA, 120 bp, Artificial Sequence
  ENSG00000254186_55 (sequence is synthesized)
tcttgggtatttaaaaagaagatggatgaacatctgaaaggaatcccgtaatgaggttttggcattgctcaacagattaacttttaacactcttccatctttgatcttttttacattcca

SEQ ID NO: 891906 - DNA, 120 bp, Artificial Sequence
  ENSG00000254186_56 (sequence is synthesized)
acttcaacgtaaaactttcttgaagccaagaagtattaattttaaaatggaaaaaacaccatatttatttgtgttacttatttatatcacatgaatatactttcagatatgtggatattc

SEQ ID NO: 891907 - DNA, 120 bp, Artificial Sequence
  ENSG00000254186_57 (sequence is synthesized)
aatactgtctacagtttgtaacatagtaaagaggtgtcatttttaataagtcaaatgttttgcttaaaagtatatgtaattttttctatgaaatgttggtaaaatgttgatctcacaata

SEQ ID NO: 891908 - DNA, 120 bp, Artificial Sequence
  ENSG00000254186_58 (sequence is synthesized)
tgaaatgttggtaaaatgttgatctcacaatagatttaatattttaatgtcaggtttcaaatgaatttgatttttaagaaatatattttcacctttactttaatatagttattttcttct

SEQ ID NO: 891909 - DNA, 120 bp, Artificial Sequence
  ENSG00000254186_59 (sequence is synthesized)
catttaaaattaaattagggagtttttcaacttgactgttaaatattactgctacctctccactgtacttagacctgcaccttgtgttaagaaaaacattttaacaaatttaaaaaataa

SEQ ID NO: 891910 - DNA, 120 bp, Artificial Sequence
  ENSG00000254186_60 (sequence is synthesized)
tggaggctgcagggaatatggatttaaatgaattttggctgtaccatcaagcagtctgatcactgaggaaatatcaaaagcttcacccgagtgactcatcacccaaattcaacagagact

SEQ ID NO: 891911 - DNA, 120 bp, Artificial Sequence
  ENSG00000254186_61 (sequence is synthesized)
tgccaaagaagctgcttatttcacagaaggatggtgctggctgaaagatacttccttgaaactgagagattgcttccttagacaggtctccttgaagagcattcatgataagcaaccagc

SEQ ID NO: 891912 - DNA, 120 bp, Artificial Sequence
  ENSG00000254186_62 (sequence is synthesized)
agactcttctgtgaaagaccagcaaccacctgggccagaccaggatattcttttggcctacatcactctctacgaactggtctgttaacctgtttttgctatctcttttctcttgatgtt

SEQ ID NO: 891913 - DNA, 120 bp, Artificial Sequence
  ENSG00000254186_63 (sequence is synthesized)
aaatgtcacttagtttgttgtggaatgtttaatctataacatgtattgtttaagtatactatcatgtatggttggcaatattgactgacttgtggagtggcttgagccagtgtgcctaca

SEQ ID NO: 891914 - DNA, 120 bp, Artificial Sequence
  ENSG00000254186_64 (sequence is synthesized)
gctctaattaccagtgagtgggaattactaaagagaactgcttccttgggaactccatatagctcgtggcttttatgattgagatagtatcaataaaagtctgatattttgggaaagaca

SEQ ID NO: 891915 - DNA, 120 bp, Artificial Sequence
  ENSG00000254186_65 (sequence is synthesized)
cacaaccagcaggaagataaaaagcagatggaatagcaataacaacaactaaaggacagaaaaacctagcaaccacaaggcaagagcaagataaaaataagaataataaaagataaatgc

SEQ ID NO: 891916 - DNA, 120 bp, Artificial Sequence
  ENSG00000254186_66 (sequence is synthesized)
acgaattcctaaacaccttcctcctcttctctcaggagttccaatgcctgaataggaaaataacagacatcccagaagaatactgaacaatgcatacaaataagtacatcgctgaagaag

SEQ ID NO: 891917 - DNA, 120 bp, Artificial Sequence
  ENSG00000254186_67 (sequence is synthesized)
caaactgcccaataaagtcttcaatctctgtggtggtaagaatgatcagggaaataataagtggctagaactggaagagtgaggggttgtagcagatagaggcaagccggtcatctccca

SEQ ID NO: 891918 - DNA, 120 bp, Artificial Sequence
  ENSG00000254186_68 (sequence is synthesized)
ctcctcatggagtttcaggctctctccactgttttctttttgtggttactcaaagtacctggatttcctacatgatggttcacacagttccaaaggatccggagaaagaccagttagaag

SEQ ID NO: 891919 - DNA, 120 bp, Artificial Sequence
  ENSG00000254186_69 (sequence is synthesized)
aggaaagctgcccaggttggatggagtcttgtttgaatgtactgcacttgcactgcagctacaggaccctggaaatcatcccaccctaggttttatacgaggggaaggaaaacatgaccc

SEQ ID NO: 891920 - DNA, 120 bp, Artificial Sequence
  ENSG00000254186_70 (sequence is synthesized)
ggaagacattatgtcaaataaaataagccaggcacagaaagacaagtacctcatgatctcactcgtaactggaatcttaaaaattttatattatagaaggtagagagtataatggtagtt

SEQ ID NO: 891921 - DNA, 120 bp, Artificial Sequence
  ENSG00000254186_71 (sequence is synthesized)
accagtggcagaggtggttggcagagatagagagatgggaagatgttgttggtcaaaggatacctaataagatagaggaaaatttcaagagatctattgtgcagcaagttgactatagtt

SEQ ID NO: 891922 - DNA, 120 bp, Artificial Sequence
  ENSG00000254186_72 (sequence is synthesized)
aagggtgatatattctattcataaaaaagaaagtggatatttgttatgtgttcttaccacagaaataataactattttttataaaaggataactagagttctgtatcaaggaaactcaca

SEQ ID NO: 891923 - DNA, 120 bp, Artificial Sequence
  ENSG00000254187_0 (sequence is synthesized)
tgagattacaggcttgagccaccacgcccagtccaacatctcttattaaggacattctacagccctccctttaaggaatgcttccaggctgtcactgccagcatccagaaaaggacctga

SEQ ID NO: 891924 - DNA, 120 bp, Artificial Sequence
  ENSG00000254187_1 (sequence is synthesized)
cactgccagcatccagaaaaggacctgactaatgcttcctttgagaaaagcaccgtaaagcatgattggctccattctccaacagacaaagtggatgtggcaaccccagaccttccaacc

SEQ ID NO: 891925 - DNA, 120 bp, Artificial Sequence
  ENSG00000254187_2 (sequence is synthesized)
tttcttcaaaagccctcagattagctgtttgcctagcttgtcacatgccaccccagaaccaatccctatggccagagaaatgtagcgtattgattggtttagccctaggtcacatgaccc

SEQ ID NO: 891926 - DNA, 120 bp, Artificial Sequence
  ENSG00000254187_3 (sequence is synthesized)
acctctggaaaagggctcaatcctcactcaaactgctttggctgaaggcttggaagagatggagccaaggaaagtagacactggggatgcaaaaataaaagttcaataagtatgccttta

SEQ ID NO: 891927 - DNA, 120 bp, Artificial Sequence
  ENSG00000254187_4 (sequence is synthesized)
aatacggaccagatactgaatattaaaaaccagcacattctgaaaagaagaaatataagcaaaagaaaaaaaaagtgggaaatatgagatagtatttagaattagtaagctatccaacta

SEQ ID NO: 891928 - DNA, 120 bp, Artificial Sequence
  ENSG00000254187_5 (sequence is synthesized)
aggtcaagttcaagaatattttaagagttacttaaatatatagagatagctaggcatggtaacttgtgcctgtaattccagctgctctggaagccaaggtgggaggattgtcttaagccc

SEQ ID NO: 891929 - DNA, 120 bp, Artificial Sequence
  ENSG00000254187_6 (sequence is synthesized)
gggacttcaatgctgcagtgagctgtgatttcacccttgcattccagcctgtgaaataaaggagaccccatctctaagaaaaagaaaaagaaataaatatataaaattacttccctgtta

SEQ ID NO: 891930 - DNA, 120 bp, Artificial Sequence
  ENSG00000183250_0 (sequence is synthesized)
ccgccacgcccggctaatttttattaatgttttgctagagccgggatcttgctgtgttgtctggctggtcttaaactcctgggctccagcgatcctccctcctcggcctcccaaagcgct

SEQ ID NO: 891931 - DNA, 120 bp, Artificial Sequence
  ENSG00000183250_1 (sequence is synthesized)
gggattacaggcatgagccacactgcgcctggccaagctagtgcattttaattgaccttcacttcatgtcaatttattttttacactattccatttagtcctcagaacagttctttagaa

SEQ ID NO: 891932 - DNA, 120 bp, Artificial Sequence
  ENSG00000183250_2 (sequence is synthesized)
ttgggtattgctccgtttacgtgggaaacatagcagcgaggtaacgggctgggtcccgtgctgggaacgggagccctgctcatctgactgcttgcaccctgtgctgtctatgctgggcgt

SEQ ID NO: 891933 - DNA, 120 bp, Artificial Sequence
  ENSG00000183250_3 (sequence is synthesized)
actggggggcgttagggaagagaccacaggtacgatgcaatgcctgtcctcaaggagcccattgttctcatgggaacacaaagctgacacatcgagaacaaactatggaacaggctgtgg

SEQ ID NO: 891934 - DNA, 120 bp, Artificial Sequence
  ENSG00000183250_4 (sequence is synthesized)
ctgagggccatgaaggaaggctgccaagtccgggcccagccaggtagcagccacacctctatctaccctgctccccaacactgggcaccagcactcacctgcccaggacccacagtgaaa

SEQ ID NO: 891935 - DNA, 120 bp, Artificial Sequence
  ENSG00000183250_5 (sequence is synthesized)
acccacccacaaaaaatgcactttggagaagagtagcaggtcccaggcagagccagggccacctctcagaaaggacatcaagtttctcgcccagctgagagatggacagatgaccgcaca

SEQ ID NO: 891936 - DNA, 120 bp, Artificial Sequence
  ENSG00000183250_6 (sequence is synthesized)
agccactcacagcccaaggagtggccagaaggctcctctccaggcctcacagagggaaacactggtctagtgagagacctgcgtcctgcccatcaggaccgaagcggcacgcgtgaggat

SEQ ID NO: 891937 - DNA, 120 bp, Artificial Sequence
  ENSG00000183250_7 (sequence is synthesized)
cctgcaggccaagagacaacagcgattacaaaccccagtcccagccttgcagctgaccttgcaggtgacgccctgcctgggtgtctcggtgcagctgcacatcaggggcctctgctggac

SEQ ID NO: 891938 - DNA, 120 bp, Artificial Sequence
  ENSG00000183250_8 (sequence is synthesized)
agaagctctgagtccacacttggcccccaggcgctggagctggagcactgccacgagaggggatgctgccgtggctgcgccagcttcagccctttccctgcaccgagatgtcccagtgag

SEQ ID NO: 891939 - DNA, 120 bp, Artificial Sequence
  ENSG00000183250_9 (sequence is synthesized)
cggctgggtgctcacagttcccgttgggccatcagaggaagatcaaagatcaaccctcccccatgggctcctgcctgcctgccaggtgggtttcctgcctgtctcccagcccccaagagc

SEQ ID NO: 891940 - DNA, 120 bp, Artificial Sequence
  ENSG00000183250_10 (sequence is synthesized)
tccacggactctgccagtagctgctttaaaggagggagggagttttctgatcctctggacatccctggggctggagctatgggctgagccataggagagccagcccagctccctgggggt

SEQ ID NO: 891941 - DNA, 120 bp, Artificial Sequence
  ENSG00000183250_11 (sequence is synthesized)
tagtaaaaatacagcaactcccaactcaaagtcaagggtcaatagtcacaaaaccttggtgcagcctggaacaggcatagaggtctcagcagagctgcccaaggacaagacctaagatcc

SEQ ID NO: 891942 - DNA, 120 bp, Artificial Sequence
  ENSG00000183250_12 (sequence is synthesized)
agcagggaactatgtagtcaccccgagaggcccagctctctccgtgagctctgggcctagggtgggggtggttgttggttctgcgcgcactgttccccctacatgatgggtccatcccag

SEQ ID NO: 891943 - DNA, 120 bp, Artificial Sequence
  ENSG00000183250_13 (sequence is synthesized)
ttggcttctctcactcgcttcctcctgtggagaagcctgtccaggtgtcactgcctccaggaagctgtctctgatttctccagttgaacagtgagatttgccacacctcacatgcatcgc

SEQ ID NO: 891944 - DNA, 120 bp, Artificial Sequence
  ENSG00000183250_14 (sequence is synthesized)
tcttgtccctggaattgtaaccataggttttcctgtctcctggaggacaaggatgagggctttccacttgagtctccctggtggagcccagctcctgacatacctggtaaaagttctcaa

SEQ ID NO: 891945 - DNA, 120 bp, Artificial Sequence
  ENSG00000183250_15 (sequence is synthesized)
gagaagaacatggaggaggaatgtggataacaaccctggctgcctgtgtgttccaagctaggaagatgtaatgtccccacaaacggggtaaatggcttgcctgcgtcacagctgtctcaa

SEQ ID NO: 891946 - DNA, 120 bp, Artificial Sequence
  ENSG00000183250_16 (sequence is synthesized)
gcccaggccctgggtgccagcccaagcccaaggactaggtccagagccacacagcgccaggccacatccgcctcacctgggaccttttgtggggtacagtctccggccccacccagacct

SEQ ID NO: 891947 - DNA, 120 bp, Artificial Sequence
  ENSG00000183250_17 (sequence is synthesized)
gctgaaggagagaccccatggcaaggactcagccacctgcagtttcataagcccccagtgggttcctaggcatgaagaccaccggttagaggctgaactggcaggaacctgtctccagcc

SEQ ID NO: 891948 - DNA, 120 bp, Artificial Sequence
  ENSG00000183250_18 (sequence is synthesized)
ccttctcaccccagccgggccctgcctcagaggcagcacccaggacgtggccatgacccgtggactccactcaatccctcttctccaggagccatgcaaagtgtcagccagccaggcccc

SEQ ID NO: 891949 - DNA, 120 bp, Artificial Sequence
  ENSG00000183250_19 (sequence is synthesized)
tggaaggcagtcatcacctcttaaggcattgcgggtgtcggtcctgcaactgccaggtgcagcacacgacccatgtccggtgttcgatagcagggagccatgacctggcaacgattccac

SEQ ID NO: 891950 - DNA, 120 bp, Artificial Sequence
  ENSG00000183250_20 (sequence is synthesized)
gctcaaaggggcacccggggggccctgggtcggggcggatcagctttccctgggcacatctgcctcattccagatctccagggctcatgtctgtgacagggagggaaggctctgccctgg

SEQ ID NO: 891951 - DNA, 120 bp, Artificial Sequence
  ENSG00000183250_21 (sequence is synthesized)
ccttccgtcagctctgccagtgcaggctgggcagcctgggctttagagctggcttctgcccacactttctccgtgaaaggaaaacaactatgagtctgccaaacgcatctcagatgcgtt

SEQ ID NO: 891952 - DNA, 120 bp, Artificial Sequence
  ENSG00000183250_22 (sequence is synthesized)
ttaaaaaattctggtccccgctctctgtcccatcatctgcctcggggacttcctctctccgtggttctcaccccatactctgtcactgccacattttcacctgggcctggcctttgtctc

SEQ ID NO: 891953 - DNA, 120 bp, Artificial Sequence
  ENSG00000183250_23 (sequence is synthesized)
ggaagcggctcgggcgggcgcagggtcgcgggtgtagggtggcggcgctccgcctttcaccgacgcacctgggagaaacagaccggaggacgcgggtggcgcggagcacgagaaacaacg

SEQ ID NO: 891954 - DNA, 120 bp, Artificial Sequence
  ENSG00000183250_24 (sequence is synthesized)
agtttctgtctagatcgtgggggacccaagcccggggttgcgtccaaggtcggggatggagaggacgcgacccccgcggcagtcgagatggcctttttaaaattctatatttgagaagga

SEQ ID NO: 891955 - DNA, 120 bp, Artificial Sequence
  ENSG00000183250_25 (sequence is synthesized)
gtctcgcgctgtcgcccaggctggagcgcaatggcgcgaaatcggctcattgcagcctcgacgtccaggactcgagcgatcctcccgcctcagcctctcgagaaggtgggaccaccggtg

SEQ ID NO: 891956 - DNA, 120 bp, Artificial Sequence
  ENSG00000183250_26 (sequence is synthesized)
tttaccctccaactagccgtgttctcaaccagtctacctaggaatgctgttggctgtgaaaactccagaggctggtatctttagagttccttcagggtgcattcagcatctgagcctagc

SEQ ID NO: 891957 - DNA, 76 bp, Artificial Sequence
  ENSG00000183250_27 (sequence is synthesized)
ttagagttccttcagggtgcattcagcatctgagcctagcgactcttgaggtgaaagtgctcacgttttttttttg

SEQ ID NO: 891958 - DNA, 120 bp, Artificial Sequence
  ENSG00000183250_28 (sequence is synthesized)
ctattgtttcagccagctggatcactttacctgttaaccattccaatgtgagtttacttcatggaattgtgcctgtttttaaagaacatattctggctgggcgtggtggcccacgcctgt

SEQ ID NO: 891959 - DNA, 120 bp, Artificial Sequence
  ENSG00000183250_29 (sequence is synthesized)
aaactccgtctcaaaaaaaaaaaatttatattctttaaagatcagcctcctcttccactgccagcccagtgtttgagactgctatggtttgaatgttggtcccctctgaaacccatgttg

SEQ ID NO: 891960 - DNA, 120 bp, Artificial Sequence
  ENSG00000183250_30 (sequence is synthesized)
aaatgtaattgccatcatactagtattaagatgtggcacctttaagaggtgattaggccacaaggactctaccgtcaggaaagggttaatgttgttatcatgggagtgggtttgttatca

SEQ ID NO: 891961 - DNA, 120 bp, Artificial Sequence
  ENSG00000183250_31 (sequence is synthesized)
aagtatttttcataaaaggactagtttgccccccttttggcacactcttgccctctctttgctgttccaccatgggatgacacagcaagaaggcccttgccagttgctagctcttctgtc

SEQ ID NO: 891962 - DNA, 120 bp, Artificial Sequence
  ENSG00000183250_32 (sequence is synthesized)
gatactcacctgtacaaaggaggaagcttcaaaagaagccattcatgtatggggtgggactgcagaaggaccacagtagagaatccctcaccaataaggaactgtgttaatcaggagtgg

SEQ ID NO: 891963 - DNA, 120 bp, Artificial Sequence
  ENSG00000183250_33 (sequence is synthesized)
gtccacacttggcccccaggcgctggagctgcactgccacgagaggggatgctgccgtggctgcgccagcttcagccctttccctgcaccgagatgtcccagtgagcggctgggtgctca

SEQ ID NO: 891964 - DNA, 120 bp, Artificial Sequence
  ENSG00000183250_34 (sequence is synthesized)
ttgaaatggatttctaggtcactggggactccggcagcacattcggcttcagaataaagggcgcccgcggtcccccagcacctgcccaagccacacccctagcttccctccctatccctg

SEQ ID NO: 891965 - DNA, 120 bp, Artificial Sequence
  ENSG00000183250_35 (sequence is synthesized)
cagcctgagggtcccttcagccacccctaagtccccacctgggctcctgccccgcccctggctagcagcgccttctccaccggggcccctctgctcacagagccccctcacctccctggg

SEQ ID NO: 891966 - DNA, 120 bp, Artificial Sequence
  ENSG00000183250_36 (sequence is synthesized)
gatgaggggccaggccatgaccctgaaagcctagccctggccttgacctcccaggagcgccctccccgccctctcccggccccggccccgtcctctgctgctggcctctgggtcgtgccc

SEQ ID NO: 891967 - DNA, 120 bp, Artificial Sequence
  ENSG00000183250_37 (sequence is synthesized)
cgcagactgagctgcgcttgggggtcctggcggcctgggccgtcccgcaccgaacccaggcggtcggagcccggcggggaggcgcgaggtccttctgggggctcctccgacgcctgaggg

SEQ ID NO: 891968 - DNA, 120 bp, Artificial Sequence
  ENSG00000214999_0 (sequence is synthesized)
gctccacggtggggatgccctccatgatgcggtagtcggccaggaacggagccaccatgtcgtctgtgacggggaacttgtctgggatccgcgtgcagcggcggatcaggccggggttga

SEQ ID NO: 891969 - DNA, 120 bp, Artificial Sequence
  ENSG00000214999_1 (sequence is synthesized)
cgccgttgaggtactggtacccaaagaaggtgtcctctgcccagtgctcggccacgtactctgcgaggacggcgcgagggcgtcacaaggaggcccggcccccctcggggacggagaggc

SEQ ID NO: 891970 - DNA, 120 bp, Artificial Sequence
  ENSG00000214999_2 (sequence is synthesized)
atgggacagaagaagactatgggcaccgagaggagtcggggaggaaaacgaggcccccagcctggcgctgagcggccggaggagcccggtgcgacattttccaagaagccgccagagggc

SEQ ID NO: 891971 - DNA, 120 bp, Artificial Sequence
  ENSG00000214999_3 (sequence is synthesized)
gcgcgcgcgcctcgctgcctctcccgtcccactgccccgaagtcgggggcctgcctagcacgccggagaccgcctggctccccctgctcgatccgggacgccccattccataccggagac

SEQ ID NO: 891972 - DNA, 120 bp, Artificial Sequence
  ENSG00000214999_4 (sequence is synthesized)
gacagatttcttgccagggaaaattttcctaatgtccttcagcctcttccacgaatgtttgcagtccaacaggccgcggactttgaaagccagtgccctaggagatgggattccaggaag

SEQ ID NO: 891973 - DNA, 120 bp, Artificial Sequence
  ENSG00000214999_5 (sequence is synthesized)
aggccttcagaggggctgccaagcgccggctggggcaggtggcggggccgccccatccacttaggtctctgggtctcagggtctgtgcgtcgcaaagtctctgggtcccatgtctcaaga

SEQ ID NO: 891974 - DNA, 120 bp, Artificial Sequence
  ENSG00000214999_6 (sequence is synthesized)
tctttgcatctctaggtctctgggatcatgtctcaggttttctgggtctgcgtttcagctccctctgccttcctggccattccaacctctggggctgtcttggaggccgccaaggttggg

SEQ ID NO: 891975 - DNA, 120 bp, Artificial Sequence
  ENSG00000214999_7 (sequence is synthesized)
agggaaagttcttgcaggagccctcgttctcccgtcactcacacggactcacatgggccccaggcggacgaagaaggaggccgtcttgaggaaggagtagcggagatttaagttcaggaa

SEQ ID NO: 891976 - DNA, 120 bp, Artificial Sequence
  ENSG00000214999_8 (sequence is synthesized)
cttggtggccttaaagttgatgagaattgggaatcccggaatatagccattccacctgtggggagaagcgcagggcaactgggatccagggggcggggaggaggcaggcgcccaggggaa

SEQ ID NO: 891977 - DNA, 120 bp, Artificial Sequence
  ENSG00000214999_9 (sequence is synthesized)
aaccatgggcggggcccagcacagcttcgggtccttactcaggccggttggggttgcgatgcctccgcaccggagggcggtaactgggaatgtgcacatagctgggcaggccaggaagaa

SEQ ID NO: 891978 - DNA, 120 bp, Artificial Sequence
  ENSG00000214999_10 (sequence is synthesized)
agactcgccagctgcaagggaaaccgagatgtcaccctcatgcccgtgcaccaccccagggcaaagggccagagccatcactgccccccacctccctggacccctgccgggcgcccagac

SEQ ID NO: 891979 - DNA, 120 bp, Artificial Sequence
  ENSG00000214999_11 (sequence is synthesized)
tctgccacccgccccctcactggtagaagtcctgcttggctctgatctcctcttttctgtgctccaggaggacggggagcgagtcatctgctgttgtctttcctgtagggagaccaagga

SEQ ID NO: 891980 - DNA, 120 bp, Artificial Sequence
  ENSG00000214999_12 (sequence is synthesized)
gaggactcaagggctgacccttgcccctgcccacttcaggaagcaggagttcagcttctgtgccccaggtcgtctctgggggggcccatgaccaaggagtgggaaggctcaccttgggag

SEQ ID NO: 891981 - DNA, 120 bp, Artificial Sequence
  ENSG00000214999_13 (sequence is synthesized)
agtgaaggtgcgtcctgtccggaaatatcagataaaagaatcacggacccaccctctttcctcttgctctactgtcaagctaagctctgctgctgcaaaaagtccctcctctagacccac

SEQ ID NO: 891982 - DNA, 120 bp, Artificial Sequence
  ENSG00000214999_14 (sequence is synthesized)
tgaaatattttttatttctataaattcatggagtacaagagcaatgttgttacatgcatagtggccaagttagggctttaggttacccatcacccaaataaagtatattgtacccattaa

SEQ ID NO: 891983 - DNA, 120 bp, Artificial Sequence
  ENSG00000233919_0 (sequence is synthesized)
tgtctgctctgcaagacaatgagtcaagaagatacaggcaaagcaaagagaaggagggctctggtcttgtttctcgtccctaaaaggacacataaaaatgaactctgaatggctcaagag

SEQ ID NO: 891984 - DNA, 120 bp, Artificial Sequence
  ENSG00000233919_1 (sequence is synthesized)
gattagggaaaataggacaattgagagaatccaaatgttgagagaatacgtgtccagagcttctggggaacatgatttcagcttcaagaaaggaaatgaggcctcctagcagaaagcaaa

SEQ ID NO: 891985 - DNA, 120 bp, Artificial Sequence
  ENSG00000233919_2 (sequence is synthesized)
gagaagggataatgaactgctgttgagtccctggttccaggtgaccttgcctgcctgtgatgtggttcttgtatgcagtgtttcctgagatcacctcccaaacaattgcatctggaatcc

SEQ ID NO: 891986 - DNA, 120 bp, Artificial Sequence
  ENSG00000233919_3 (sequence is synthesized)
ttcactcatgtctacttctgggagaagcatctaagacagtcatggtccataaaacagcagcaacatgaacaaagacacagggctcaactgtaccaggcaaatgaagggagatggagagat

SEQ ID NO: 891987 - DNA, 120 bp, Artificial Sequence
  ENSG00000233919_4 (sequence is synthesized)
tgaagcaagagctaaaactatccaccagactgcagtccattgtgagtaggttgagaggaaattgagctgccaagacatatgaaactcctggtggagatttggaggaagatgaatggtact

SEQ ID NO: 891988 - DNA, 120 bp, Artificial Sequence
  ENSG00000233912_0 (sequence is synthesized)
ggccttgggtggatcgggtctctgggcagagcgtgtgtccggcagagctaggaccggaaaaagccactctaggtctaggttaggagtgatgacagttaaaagatatataaggaaaagaag

SEQ ID NO: 891989 - DNA, 120 bp, Artificial Sequence
  ENSG00000233912_1 (sequence is synthesized)
gaaaggatcgtttctgtataaaacgagctatttttgcatatcgagcgcataagttttataacttaggtgtctgtttatggagagggtgggatactaccttttagctcaaggagtgcacaa

SEQ ID NO: 891990 - DNA, 120 bp, Artificial Sequence
  ENSG00000233912_2 (sequence is synthesized)
cacgtatccccagatccctccctagacctatcgaacaactccaacggtctcgggaatgtgcgtggtttctgaaaagcttgggaagcaagacctgactagacccccaaatctgatattggc

SEQ ID NO: 891991 - DNA, 120 bp, Artificial Sequence
  ENSG00000233912_3 (sequence is synthesized)
tgaatggccgaccaatggagtgcataagaagtctggatacaaaggcagcccaatttctagaaatgtataccagccatgaagagataaagctccaagaggagatttctctttctggtataa

SEQ ID NO: 891992 - DNA, 120 bp, Artificial Sequence
  ENSG00000233912_4 (sequence is synthesized)
ggatttaaacaaaacctagaatgtcgcagtactcgaagtatccaaaacaactgaaaaatgaagaagaataaaagaagaatccaaaagtatccaaaataactgaacatatgaagaatcatg

SEQ ID NO: 891993 - DNA, 61 bp, Artificial Sequence
  ENSG00000257989_0 (sequence is synthesized)
ggcacagagctcctcattagccaaagtcgcccaagttccccaacctttaaggatttcctca

SEQ ID NO: 891994 - DNA, 120 bp, Artificial Sequence
  ENSG00000257989_1 (sequence is synthesized)
tctaatcaggagaaagctgcagaagttcatcagctaacttcttgggacctagcaccatgtgaagacgctcaagctagactttaaaatgagagacccagaggagagacagaagctccacta

SEQ ID NO: 891995 - DNA, 120 bp, Artificial Sequence
  ENSG00000257989_2 (sequence is synthesized)
gaggaagcaaggacagcaaagggcgctgcagaggccaagagggaaggttttagaatgtttcccaaagcatgaatgttggaatggtggtcccatgagatgctcctctaaaaaaagaaggag

SEQ ID NO: 891996 - DNA, 120 bp, Artificial Sequence
  ENSG00000257989_3 (sequence is synthesized)
gtgaaagaattatttggccaaatctgctttgaaatcctctcccttttagattcatcctaatattggcataggaatgcctctttaaagaactacaataaagaagcctgtttatctttgctt

SEQ ID NO: 891997 - DNA, 120 bp, Artificial Sequence
  ENSG00000257985_0 (sequence is synthesized)
agcgctctgttctgccctttcactgaaaatagctcttcctgacacaggcttgggtagtgaaagcagcttggtcacatctgtcccatggtgtaactaatctttaggatctgcagagacctg

SEQ ID NO: 891998 - DNA, 120 bp, Artificial Sequence
  ENSG00000257985_1 (sequence is synthesized)
ccttcctctgcaattgtaactgtacctccaatcgtgagtttcgtctggcagcttaactgggctaccagcgaggtcctcataatggcttttgctccttgcctcgcggagacccgactctgg

SEQ ID NO: 891999 - DNA, 120 bp, Artificial Sequence
  ENSG00000257985_2 (sequence is synthesized)
ggagacccgactctggaatccttagccagtgagatgtggtctcactatgttgtctagactggcctcaaactgctgggctcctgcgatccacctaccttggccttccaaagtgctgggatt

SEQ ID NO: 892000 - DNA, 120 bp, Artificial Sequence
  ENSG00000257985_3 (sequence is synthesized)
atgcccagccgcttcatctttctttactcatgccttagaggactcggtcaagacaatggtgccctcaggaaggttacgagagagcaagctgtgctgctttgcccatcttgggatgagcat

SEQ ID NO: 892001 - DNA, 120 bp, Artificial Sequence
  ENSG00000257985_4 (sequence is synthesized)
cacccagagagagggaccagaatccctgaggccatcttggttcatctgcaccgtctctcctacacctcttcacccctcccctctccacttcactccaggctgcattggggcggggaggtg

SEQ ID NO: 892002 - DNA, 120 bp, Artificial Sequence
  ENSG00000257985_5 (sequence is synthesized)
atcatccaaggccctggctctccatcgagaccccagccaggtagagcccctattgcctgagcaagcttgcgcaggatggggctggagctgcactatttggatcttcttggagtagaaaat

SEQ ID NO: 892003 - DNA, 120 bp, Artificial Sequence
  ENSG00000257985_6 (sequence is synthesized)
tcacaaattccaacctctgctcccaaagcaaacctccccagcccaggtggctgcatccttctcctcccctccccccagttccctgggtcgccaagccggaggctttgaaaaccagcttgt

SEQ ID NO: 892004 - DNA, 120 bp, Artificial Sequence
  ENSG00000257985_7 (sequence is synthesized)
gtttggtttgtgaaagcaccaatgtttgcaatgtttgcccagcagagaaggagcatattttctcccttccaaatgcaaactcaaaagatgctccaccagtttttcttcagactttccaca

SEQ ID NO: 892005 - DNA, 120 bp, Artificial Sequence
  ENSG00000257985_8 (sequence is synthesized)
ggaaacataaataagaaagaaaaatgactttaggtgctgagacctgaaatggaatttcaaccctgaaggaactgcctgtaacaagcactctctgtccttcagtgaaggcttcgagagcct

SEQ ID NO: 892006 - DNA, 120 bp, Artificial Sequence
  ENSG00000257985_9 (sequence is synthesized)
aggtgcatgtttctttcctctgagtagccttcacagatgaggcaaggggaggagctgaaccagttcttagacctgactcccagctagatcttcagccccacacaatgaatggccggtgac

SEQ ID NO: 892007 - DNA, 120 bp, Artificial Sequence
  ENSG00000257985_10 (sequence is synthesized)
tggcacagcagctgagattccctggctacagtgttcttttttatctttcttgattgtgttagggtagaacaaatgagggtgctgcaacccgagaggcccagccacactgcaagccagcac

SEQ ID NO: 892008 - DNA, 120 bp, Artificial Sequence
  ENSG00000257985_11 (sequence is synthesized)
aatcagagtgtgaagtgtggacacgcccccctggaacacaaggccacagtttgccacctgctctgcccttgtctccatctcggaagaaggacatccctgatctgtggcctctgtcctcac

SEQ ID NO: 892009 - DNA, 120 bp, Artificial Sequence
  ENSG00000257985_12 (sequence is synthesized)
taattggagcatttcttgctcacagcttatagccaccaaatgactgcttccaggttaggagtttgcagaatatgtacacacacggagccctacaaaaggctccagacccaagaaatacag

SEQ ID NO: 892010 - DNA, 120 bp, Artificial Sequence
  ENSG00000257985_13 (sequence is synthesized)
ggttgaagtcagtgtggacagttctaatgcagctaatacattctaactgatttgttgtgagctaagggttcagtgtttacacttcaaggtcactgtttctgtctcctgacatctgagaac

SEQ ID NO: 892011 - DNA, 80 bp, Artificial Sequence
  ENSG00000257985_14 (sequence is synthesized)
acttcaaggtcactgtttctgtctcctgacatctgagaacctttcttcttcttcttttttttttgagacagagtcttgcc

SEQ ID NO: 892012 - DNA, 65 bp, Artificial Sequence
  ENSG00000257985_15 (sequence is synthesized)
cctgagtagctgggattataggcaccccccgccagacctggcaaattttgtatttttaaccttag

SEQ ID NO: 892013 - DNA, 120 bp, Artificial Sequence
  ENSG00000257985_16 (sequence is synthesized)
gattacaggcgtgagccaccgcgcctcacccaagaacttttcttcttaaggtgttttcctttcccatagcattctatctttggataggcccaacgaggccattgagcatctacccttttt

SEQ ID NO: 892014 - DNA, 120 bp, Artificial Sequence
  ENSG00000257985_17 (sequence is synthesized)
ggccattgagcatctaccctttttacaaaacatattatcaatcttatagcccatatgtttagtgataagtcaactaaacaaagcaagggaccccactggaaggtgcttgtgggaagtgta

SEQ ID NO: 892015 - DNA, 120 bp, Artificial Sequence
  ENSG00000257985_18 (sequence is synthesized)
cccttccatctaggacttcactttgatgtaccaaattctgagaaagaccccagaagccatttccttcttgctgaggtttatttatcttgtttatctgaagccagggccaataacccaaat

SEQ ID NO: 892016 - DNA, 120 bp, Artificial Sequence
  ENSG00000257985_19 (sequence is synthesized)
ggctttcaaatggctacaaaagtgtctcagcattcgattaatcagtcccatcacagacaagtcaactaacctgcagacccacgtgctgtactcatagtcgttgctggttctggcaggggt

SEQ ID NO: 892017 - DNA, 120 bp, Artificial Sequence
  ENSG00000257985_20 (sequence is synthesized)
gatctgggaggaggtatttcccggaggtgtttccgaagggagaggcactagctgaagttggctctgagattcgaagcggaggaggaaagggaaggtggagtgctgatgctgacaaggtga

SEQ ID NO: 892018 - DNA, 120 bp, Artificial Sequence
  ENSG00000257985_21 (sequence is synthesized)
ggaagaggaggagtagaggttaccagcgctcagagcatgggttttggaggcacacagatctgtgcccaaagggctatcaatgctcttccacttcattgctgagcaacctgatgtgttcat

SEQ ID NO: 892019 - DNA, 120 bp, Artificial Sequence
  ENSG00000257985_22 (sequence is synthesized)
acgttccctgatgtgtaaaagtggcacaatacttgcgtctaccttataaagtgcctgcaagcactaagacaaaatgtagacagagcttaatgcagtgccggactcagtcaacaaatagca

SEQ ID NO: 892020 - DNA, 120 bp, Artificial Sequence
  ENSG00000257985_23 (sequence is synthesized)
aatggaagtcgttctcattaaacagcgaaaaggaagtaaaaaggaagacagaggaagacaaaggggagatggggaggggatgccgtgggaggctgtgggtggggtgcagaggctgacact

SEQ ID NO: 892021 - DNA, 120 bp, Artificial Sequence
  ENSG00000257985_24 (sequence is synthesized)
gcagacagcagcccctcacccagctccatctctgggcgcctgggacaacacagctctcggtccagacaggctgctcagatgtttattaagaaaccacccataaaagttattggaaacttt

SEQ ID NO: 892022 - DNA, 120 bp, Artificial Sequence
  ENSG00000257986_0 (sequence is synthesized)
gagactcggcactggcagaacaaagaaacctaggagggaagctttgctccaaaagagaggttttgcttcaggagaagactgttccaagaaaagggagactggctgtttcaaactcaaaaa

SEQ ID NO: 892023 - DNA, 120 bp, Artificial Sequence
  ENSG00000257986_1 (sequence is synthesized)
agctgatcttatggctcttagcaaaatagtggtgtctttaagagttgattgggctccttcctcctgagtgggtttaagtacctaacaaaagaggcttcaagcagtattcagctctcttgc

SEQ ID NO: 892024 - DNA, 120 bp, Artificial Sequence
  ENSG00000257986_2 (sequence is synthesized)
ccttccgctctctgctatgtgaagacacagtgttcctcccctctcccttctggaagacacagcgacaatgtgccatatcggaaggaagcagagaacatccctcaccaaataatcaatcct

SEQ ID NO: 892025 - DNA, 120 bp, Artificial Sequence
  ENSG00000257986_3 (sequence is synthesized)
gctggtgccttaattatgaacttctcagcctgcagaactcatgaaggccatcatcggatgtgggctgattgatcttggacttccaagcctccagaactagaactactccaccatcatctg

SEQ ID NO: 892026 - DNA, 120 bp, Artificial Sequence
  ENSG00000257986_4 (sequence is synthesized)
ttcactgtcattgggcagaaagctaaaaacctaattacgttggaagtaggaagaggaagtaagtatggttggaagaggtggagtctggtgctgccagagcagaaagcacaaagaagaacg

SEQ ID NO: 892027 - DNA, 120 bp, Artificial Sequence
  ENSG00000257986_5 (sequence is synthesized)
tgcttttagcctagatgccccaaattgcaaaagtaatgaaaaagacccagtgataataatgcgattggaaaggaagacactgatttctcacatgactgtggcaaactgtgaagagtgaaa

SEQ ID NO: 892028 - DNA, 120 bp, Artificial Sequence
  ENSG00000257986_6 (sequence is synthesized)
attccagaagacttaaattgtctatagttttggcatctctccctctatgtacttgctatcttttttttgcttttaagtctgcttagttacaactgcagaccacagtaaaattatagattt

SEQ ID NO: 892029 - DNA, 120 bp, Artificial Sequence
  ENSG00000257986_7 (sequence is synthesized)
ggagatgttggaatgtttcctcaaagataaaagccaattaaaaaaattttaacaaagaacagaagaagcaatcaagagtttgtaacaaattattaggattaataaaaaatatgctttgta

SEQ ID NO: 892030 - DNA, 120 bp, Artificial Sequence
  ENSG00000257986_8 (sequence is synthesized)
ctagacccagctgccatgcaatgaggaagccaaagtaatgctgtaaagaggctcacatggagaggaactaccaacagccagtatcaaactgcaatccatgcaagtaaaggcacctcaact

SEQ ID NO: 892031 - DNA, 120 bp, Artificial Sequence
  ENSG00000257986_9 (sequence is synthesized)
gacatcatttagagtgggaatgtgatgtgccagtcaagtcttgaccacattgcaattagcagagaatggccagacacattctcctgaaccactggtcctcaattatcatcatctgtggtt

SEQ ID NO: 892032 - DNA, 120 bp, Artificial Sequence
  ENSG00000257986_10 (sequence is synthesized)
tgttatctgggaaacctgactggagacatgagaacagtgatgccaagagtacaccaatgaaacattttgaagctggatcacctacctggacccctttctggtaacatctttctggtgaac

SEQ ID NO: 892033 - DNA, 120 bp, Artificial Sequence
  ENSG00000257986_11 (sequence is synthesized)
cctgaagggatgatactgaagagattccccgacccaaaggaaaatcgtctgcctgcaccaataggctgactttggggtgaccatcttgcccagagaacacaagctgagactcctggtcag

SEQ ID NO: 892034 - DNA, 120 bp, Artificial Sequence
  ENSG00000257986_12 (sequence is synthesized)
aggttggattaccaatgactgagcccaactggggacaagtttgagccttgccaatgtgatattgagggctaagcagagtggctaatgtctatgttttgtcacacatattttgctctggcc

SEQ ID NO: 892035 - DNA, 120 bp, Artificial Sequence
  ENSG00000257986_13 (sequence is synthesized)
aaaaagaaaaacataattttcctttgtgttgtggcttggcacccagggctgtgatacagcttgctgggttaccaggtttgctcagggaaggggaacccagaagcctggcatagtaaaaat

SEQ ID NO: 892036 - DNA, 120 bp, Artificial Sequence
  ENSG00000257986_14 (sequence is synthesized)
ttcttaccaaacttctggtgtctctctctctctctgtctgtctctctctctctctctgcaaactggttgaatgaatggcaaaaatcattgtttatcacctctgtaaagttttgattaatg

SEQ ID NO: 892037 - DNA, 120 bp, Artificial Sequence
  ENSG00000257986_15 (sequence is synthesized)
gcctaggacctcgtaagcttgttgttcagaatggcccagcgaactggtcagttccagctgtgcctgcttattagaccctaggaagtgcatgctttaaagagaaacataaaaatttgcaag

SEQ ID NO: 892038 - DNA, 120 bp, Artificial Sequence
  ENSG00000257986_16 (sequence is synthesized)
tgataagccttacaactacagggtcttctttctgtcggtgtatttatatgtgttgtgtgtaatatgaaagagttttgattaattggcttaataataagagcttaaacaaaatattttgtc

SEQ ID NO: 892039 - DNA, 120 bp, Artificial Sequence
  ENSG00000257986_17 (sequence is synthesized)
agaagagtagaaagtgtaatcccttttagttcatgtgacttttagtaatctttgggaaataaaaacagttttaaagattattagtaaaataaaaatttcttcaaaaatgtaaacatttgg

SEQ ID NO: 892040 - DNA, 120 bp, Artificial Sequence
  ENSG00000257986_18 (sequence is synthesized)
tctaaattgtgcaggtcagatataacgtaggctaaatgctttatcatgataaactgcttctttgacttttgaaaattgttcattttacttatcttgaagccattagattctagataaggc

SEQ ID NO: 892041 - DNA, 120 bp, Artificial Sequence
  ENSG00000257986_19 (sequence is synthesized)
ctagggacatgtggaattagccatatctcctagctatgcaaagaaggttataaagatccttatataagaaaggatcatgtatggtaaattctatttctaaagtaaaatgactggttgctt

SEQ ID NO: 892042 - DNA, 120 bp, Artificial Sequence
  ENSG00000257986_20 (sequence is synthesized)
aaaaagatatttaggtcaagtcagaaagtccaagcacattgtatactgtctgtgtaagtcatgaaagaatttgtgaaaggaatttatgcaagaaatgctgtacaatttgagggttgtcag

SEQ ID NO: 892043 - DNA, 120 bp, Artificial Sequence
  ENSG00000257986_21 (sequence is synthesized)
gcttcctacatgcttcataatatgccactatgactcttaaccatacagcttgcctgctttgcagctaggtaaggcctgggacatgtggagttagccatgcctcctagctatgctggaaac

SEQ ID NO: 892044 - DNA, 120 bp, Artificial Sequence
  ENSG00000257986_22 (sequence is synthesized)
agtgagatgttatctgcacttccatctgggtcctaggctccacacctggttcataattaaaatcgctgacttaccaaggttttcaccaaaagtaaaagtcactaagagttaacattataa

SEQ ID NO: 892045 - DNA, 120 bp, Artificial Sequence
  ENSG00000257986_23 (sequence is synthesized)
tatgtaattgagactacttaaaaaacagttttacatgcaaggtgtgtaagaaaagtgaaatgtgtttttggtaaaagattataagaaggcacaggaatgtggatttcttgcctaagtttc

SEQ ID NO: 892046 - DNA, 120 bp, Artificial Sequence
  ENSG00000257986_24 (sequence is synthesized)
aagggttaaaggattgttttaagttagataagctgaagctttgagaaaattgtgtaaggtttgtgaaaaaataagcttgtaaaagaaattctgtgtgtgcacatattggctaaagtaaaa

SEQ ID NO: 892047 - DNA, 120 bp, Artificial Sequence
  ENSG00000257986_25 (sequence is synthesized)
gaggtgttattcagtttttccataaattgaacattggaataaaagcacaacaggtttttcttagagcatttatctgttctttaacaaaaattgtaaagtgttataaaaggtttataagaa

SEQ ID NO: 892048 - DNA, 120 bp, Artificial Sequence
  ENSG00000257986_26 (sequence is synthesized)
tcttaccttatgttcaaagtgagtaaggttaaatagattggtttataaggttttattaagaattaggattaacattaatagtactaatgtaaaggtaaaatttggcttatttggtataaa

SEQ ID NO: 892049 - DNA, 120 bp, Artificial Sequence
  ENSG00000255858_0 (sequence is synthesized)
agctggtgctctcctgtatgagcatcctctactcacaacaccttctgaaggagcctcagtcctgccatgactggcagaacctatcacgagcatcgccggcatccatgccaacagctcacc

SEQ ID NO: 892050 - DNA, 120 bp, Artificial Sequence
  ENSG00000255858_1 (sequence is synthesized)
accaaataccaggccatcccgccatttcagtctctgtcccaaggactcctcattaaattccatcatcatccttcagctaacaaccaaaagccttcctgaaacacagcctcatgcaaatag

SEQ ID NO: 892051 - DNA, 120 bp, Artificial Sequence
  ENSG00000255858_2 (sequence is synthesized)
gtactgagaaaacttcctagcccctagttctgcaaacactcacctacgcagtttagaatcagctaggttacgtgcctgtgcatttatatatgcagataaataatacagcagctatactac

SEQ ID NO: 892052 - DNA, 120 bp, Artificial Sequence
  ENSG00000255858_3 (sequence is synthesized)
cagtggttttgttgttttcatgcagaagtcctcatctcctgaagctgcaagaagagacagagcccagcctgataatctgaggactgaacttcaaaggtcacccagccaaaataatctact

SEQ ID NO: 892053 - DNA, 120 bp, Artificial Sequence
  ENSG00000255858_4 (sequence is synthesized)
ctgcctgcccaagtgtgaagcctagtgtgaaacctactccagaggtgaaaccccaccaagagatgaaaaccactttgggaaataccttatgtctgatattttcttcttcattttttgata

SEQ ID NO: 892054 - DNA, 120 bp, Artificial Sequence
  ENSG00000255858_5 (sequence is synthesized)
ggactttttttttcctgctcaaaagtgactatctggtagtacattcccagaggatcctggccaggtaacagagaagtctgaaaggctaccttgagataaggtactaacagcctgtggtag

SEQ ID NO: 892055 - DNA, 120 bp, Artificial Sequence
  ENSG00000255858_6 (sequence is synthesized)
ctttaatagaatattctggtttaaataacaaccttgaacatccaacttattcagattcaacaaacatctatcgagtatttaccctctgcagataagacaaggccatgtattagatgtttc

SEQ ID NO: 892056 - DNA, 120 bp, Artificial Sequence
  ENSG00000255858_7 (sequence is synthesized)
tactttacaaagtaaaacacagatactcagaaagggtaatttattcactgaaagtcaaagtgagatgaattcaaacataggtcctctaacacccagggcacagactgatgatgttcatga

SEQ ID NO: 892057 - DNA, 120 bp, Artificial Sequence
  ENSG00000255858_8 (sequence is synthesized)
ccagctgagtttatgaaatctcttacgctgtctgtccctaatctgcctatacattagcaaggtgtagagaagcaccatgcttctgtccaacataacagggttagaaggtcacttttctgc

SEQ ID NO: 892058 - DNA, 120 bp, Artificial Sequence
  ENSG00000255858_9 (sequence is synthesized)
atgtttctacattattttcaaaactgccattcatctgcgttttcaaataaatatcaacaaaattacttttgttagcctgtagttactttgctatcctacagccttagtcacatgtaagca

SEQ ID NO: 892059 - DNA, 120 bp, Artificial Sequence
  ENSG00000255858_10 (sequence is synthesized)
gattactagagcagcatgtgtttcaaatctcttcctgggaaggagtcaacaggtggaaaaacaaatgctaagcaaaccatctagaagactccttctcaaggctttaaatgcaaaacaatg

SEQ ID NO: 892060 - DNA, 120 bp, Artificial Sequence
  ENSG00000255858_11 (sequence is synthesized)
tggataggacacatggatatatcgtgccatcttctgctttagaaaatgattactttgcacctgtgacccatttactaaacctcaaaactcttggtttaagatatgttgttttgtaattaa

SEQ ID NO: 892061 - DNA, 120 bp, Artificial Sequence
  ENSG00000255857_0 (sequence is synthesized)
ggagctgcgaattcggagtcccggttccctgtgccacctggcgagctcagcaaactaaaagtctctttgtcttcatcgtttccggcactgatgtgagcacatcataagcacaagacctgg

SEQ ID NO: 892062 - DNA, 120 bp, Artificial Sequence
  ENSG00000255857_1 (sequence is synthesized)
acacctttacaatcagaggtagcatctgtctggaactgtatcttgactctcactggtgcttttcctttggttgatgcaaagcttttgaatcctttagggagatgtcattggcctaggact

SEQ ID NO: 892063 - DNA, 120 bp, Artificial Sequence
  ENSG00000255857_2 (sequence is synthesized)
cacagacgaagtgctcggggtggaacttcttggccatggcggtgatgcagcggccggtgatgggcttctggcagccagaacacagcgagccgcgccgctcgtggtagtgcacctcacagt

SEQ ID NO: 892064 - DNA, 120 bp, Artificial Sequence
  ENSG00000255857_3 (sequence is synthesized)
agggctgcccgtcgtgctcgaagaagctgccgttcacgaatggcgtgaagcattcctgccaggcggagagaggggctcagggagctgcccctcgggctagagctgcaccctgtgtgatgg

SEQ ID NO: 892065 - DNA, 120 bp, Artificial Sequence
  ENSG00000255857_4 (sequence is synthesized)
ggccgaggtgggcatagtcggcacgctcggagtgactcctacttgctaggcgtttcccatgtgccgtgttgtcctaaacgctcatttttcatttttattttattaaataaattttttttg

SEQ ID NO: 892066 - DNA, 120 bp, Artificial Sequence
  ENSG00000255857_5 (sequence is synthesized)
ggggaggcaactgaagcacacaggtgaagtaacttgcccagggtcatgcagctactgaggtcacagcctggattcatacacaggtctgactcctgagcacttagccaggtggctgtaaca

SEQ ID NO: 892067 - DNA, 120 bp, Artificial Sequence
  ENSG00000255857_6 (sequence is synthesized)
gtgttcccagaaacacaggtgtgacactggtctgtagtcaaactctgcctcctagattctcattggagattcacatcacatataggtagaaaaggctctgagaggggccgggtgaggtgg

SEQ ID NO: 892068 - DNA, 120 bp, Artificial Sequence
  ENSG00000255857_7 (sequence is synthesized)
ccttggtaaacccaggtgatcacaccctgggcaggccctgccccacagggccccatcccgctgctccccagcctgtcctcaccaactgcccaggcaggagcaaagcccacggggaggacc

SEQ ID NO: 892069 - DNA, 120 bp, Artificial Sequence
  ENSG00000255857_8 (sequence is synthesized)
tgtgaccacaggcaaggaccacggaccccagccccagggattttgacctcaagaaaggaaacatccacaatttaccctccatctggtgatccagctgcatctggggtgggtttggtctct

SEQ ID NO: 892070 - DNA, 120 bp, Artificial Sequence
  ENSG00000255857_9 (sequence is synthesized)
gctgggaccatgaggttcagaccaccaagaaatagcactagcacaggtgaaaatcatgggcaaactttattggcataaatcacaggaattgaaatgggaaaagccagcttggaagtttac

SEQ ID NO: 892071 - DNA, 120 bp, Artificial Sequence
  ENSG00000255857_10 (sequence is synthesized)
tttacaatcagagggcctaggactggagctctggatctgaccggagcaaagaggaagcacgcaaatccggacatgacgacgaggaggcagtagagacccatcctcaactaccccctgagt

SEQ ID NO: 892072 - DNA, 120 bp, Artificial Sequence
  ENSG00000255857_11 (sequence is synthesized)
gccgatcccacctgtgaaaggggaggagcagatctggggaagggatatgcccagaggaaatcaacaagaccaaagagacgtcagagtcctgatggccaaaatcagacaccagctttcctg

SEQ ID NO: 892073 - DNA, 120 bp, Artificial Sequence
  ENSG00000255857_12 (sequence is synthesized)
gcacggccgcgtctggttctgtgcaggaacacaggcagaggcaagccctgggtccgcatcatggctctgccctcactcagattgccttgtacatgtaggttcttgtcctagagcctcttt

SEQ ID NO: 892074 - DNA, 120 bp, Artificial Sequence
  ENSG00000255857_13 (sequence is synthesized)
cccccaaaacatacttccccttctcctcccacagaaacagaacagataaagttcagaattctaggcccaaaagggtgcaacacccttcaaccagtttcagtgaagagcttgctggcctgg

SEQ ID NO: 892075 - DNA, 120 bp, Artificial Sequence
  ENSG00000255857_14 (sequence is synthesized)
gaagtaaagaaggggtttccaaatacagcagtttataaaacagtcctggtgagctatgaagtgaaagagggggagtcacagagctgctcccagttcacctgcttgtgctaagaaacaata

SEQ ID NO: 892076 - DNA, 120 bp, Artificial Sequence
  ENSG00000255857_15 (sequence is synthesized)
aaatacaaattgcttccccaccccaaccctcagtacaaagcaaacttcacaccagagccaccatcagtgacaggcccagtggcggtggatgaggaagagaatacaaaagggaacgtcttt

SEQ ID NO: 892077 - DNA, 120 bp, Artificial Sequence
  ENSG00000255857_16 (sequence is synthesized)
aaaatctcttcaaaatcattttgtatagagaagtaaaagcaactcaggcgatatgaattcaaacctcagtgtagaaatctatcaaagtcggtacagtgtccaggcacgccgtcccggaga

SEQ ID NO: 892078 - DNA, 120 bp, Artificial Sequence
  ENSG00000255857_17 (sequence is synthesized)
cggaggaagtgactagaaaacattattgctggagaggcttttctcagtagaacaagagcaggtataaaaggggagggcgggtctaaaaggcaggggcagtcgccaggcctagggcactgg

SEQ ID NO: 892079 - DNA, 120 bp, Artificial Sequence
  ENSG00000255857_18 (sequence is synthesized)
aagggtaggaggagcacagagaaccttccatggcccctttggttctctgcctttggatggatggatttatgctggcattgtctggagggagccgggtgtcccccaataatcacagaacaa

SEQ ID NO: 892080 - DNA, 120 bp, Artificial Sequence
  ENSG00000255857_19 (sequence is synthesized)
attaggtcgggggaggaataaggataaaaagagaccccaacagaccctgcctgcccttccctgccccccggctgcactgctgaaatatgaggaagagatggctccagtgtggggtgctgg

SEQ ID NO: 892081 - DNA, 120 bp, Artificial Sequence
  ENSG00000255857_20 (sequence is synthesized)
ccaggccagttcgtggggacgtacatgggctggggtggagcccccagcctctacccctggggaggatggagagtgggcagcctagggagagctacaggagggaggagggggcccagaggc

SEQ ID NO: 892082 - DNA, 120 bp, Artificial Sequence
  ENSG00000255857_21 (sequence is synthesized)
tctggcaggggtgaagacaagcagggggacccctcacggccctctgtccatcccgcaccagcggaggacaagggttccagtttcagtcgggtttaccccttcacccccgggtgaagtctc

SEQ ID NO: 892083 - DNA, 120 bp, Artificial Sequence
  ENSG00000255857_22 (sequence is synthesized)
taggtcacagtcgcagttggggatgctggctggggaaggggggcagagacaggggcagggcacctagcagaagagcttgaggaagcagttctgacagtaaggcttgtcgttctgctcctt

SEQ ID NO: 892084 - DNA, 120 bp, Artificial Sequence
  ENSG00000255857_23 (sequence is synthesized)
atctatggtactatgatactactatctatgatcattgtgagtgtctatgatagtctcctgtgccttcaaaatctttgccttctccatagaactttcccaactagcttgtaagatccaaag

SEQ ID NO: 892085 - DNA, 120 bp, Artificial Sequence
  ENSG00000255857_24 (sequence is synthesized)
cttgtaagatccaaaggtgtgagacacactgatccagaacattcagggagtgtagtgaggggaaggaaatataaattgtctcgtcagcagttaatttttattttattttattttattttt

SEQ ID NO: 892086 - DNA, 120 bp, Artificial Sequence
  ENSG00000255857_25 (sequence is synthesized)
gttcgccaggctagtcttggactcctgagctcaagtgatctgtcggcctcggcctcccaaagttctggggttacaggcatgagccaccgtggccggccggcagttatgttttgatggcct

SEQ ID NO: 892087 - DNA, 120 bp, Artificial Sequence
  ENSG00000255857_26 (sequence is synthesized)
tttgagaatggaagcctgtgtggattccgttgtctgccttgctgtggatcctgaaaggtgttctgttggcactgggcgctgagccagggggcaggctgtggtggtccaatgttcagttgg

SEQ ID NO: 892088 - DNA, 120 bp, Artificial Sequence
  ENSG00000255857_27 (sequence is synthesized)
catatttccacttgtacttcaggcacccaacttccgccatagcctagggcttcagtcttcaccctgagatccctggttccatcaagatgctcagctccattcggcaacccgcggacaccc

SEQ ID NO: 892089 - DNA, 120 bp, Artificial Sequence
  ENSG00000255857_28 (sequence is synthesized)
gagatctctttttaatggcaatgtattactgcacacttcgtattgtcctaagtactctgtgcacattactgaagctaatctttgcaacaatcctctgaggagatacagtactgtcagtac

SEQ ID NO: 892090 - DNA, 120 bp, Artificial Sequence
  ENSG00000255857_29 (sequence is synthesized)
tcccattttatcgatgagaatactcacaggaaggttaaataatttgcccaagtctctcagccagtaagtgaaggcttcagaactgaaatctaggaggaagttcaaagcccctgggcctca

SEQ ID NO: 892091 - DNA, 120 bp, Artificial Sequence
  ENSG00000255857_30 (sequence is synthesized)
ctgtgctatacagtccattccaaaccctgagtcagcctccctctgaacgcacttttccaagtatatacatatgcacaaggtacatttccaaggacctcctggctctgatgatataaatat

SEQ ID NO: 892092 - DNA, 120 bp, Artificial Sequence
  ENSG00000255857_31 (sequence is synthesized)
catctctaattgtagtacatcaatataacggaataccatgaagccattagaaaatggtacagatctatatttattgacatgggaaaatatccacaaagcaaagcgaaaagcacattacag

SEQ ID NO: 892093 - DNA, 120 bp, Artificial Sequence
  ENSG00000255856_0 (sequence is synthesized)
aaaaaaagaaagagagaaagaaaaagaaaaaaaagagaaagagaaagaaggacttcagagaatcgttccgagaattttctgggaaaatatgcaacagcaggtcataaaacagatctcaca

SEQ ID NO: 892094 - DNA, 120 bp, Artificial Sequence
  ENSG00000255856_1 (sequence is synthesized)
gagatatgtgagatcaataggtatgtgctttgggccacatgaaactttaaaaaaatgtatcttaaaatttaaaataggaaaatattatgtcagaattcaaatagtgactgaggaacagat

SEQ ID NO: 892095 - DNA, 120 bp, Artificial Sequence
  ENSG00000255856_2 (sequence is synthesized)
agggaatgaatacatgctacaacatgggtgaaccttgaaacacgctaagtgaaagaagccagtcacaaaaggataaatatgcgtaagtccatttgcgggagatatctacaactaggcgaa

SEQ ID NO: 892096 - DNA, 120 bp, Artificial Sequence
  ENSG00000255856_3 (sequence is synthesized)
tccataaagacagatatcagattggtggttgccagaggcaagggggagggagagcaggagtgactgctaacggatgtggggtttcctttcggagtgataggaaagttctggaatgagata

SEQ ID NO: 892097 - DNA, 120 bp, Artificial Sequence
  ENSG00000255856_4 (sequence is synthesized)
gtggtgatggttgcagaacaatgtgaatgtacttaatgacgctgaattgtacacttttaaatggttacaatggtcaattttatgtgtatttgatcataataaaaagaaatctaggctggg

SEQ ID NO: 892098 - DNA, 120 bp, Artificial Sequence
  ENSG00000255856_5 (sequence is synthesized)
tagtatttgtggaaatctgctggaatgagtacccttggcctacgaggcagagtcgggggtggtgagctacaccctgtgggacaaatctaggctgctgcctgtgtttgcaggtctccgagc

SEQ ID NO: 892099 - DNA, 120 bp, Artificial Sequence
  ENSG00000255856_6 (sequence is synthesized)
taagaatgggtttcacatttttaaatggttgaaaaaaaaacaaaagacaaataatagtccatgatatgtggaaattatcatgaaatccaaatgtcagtgtccataggtgaagtggggctg

SEQ ID NO: 892100 - DNA, 120 bp, Artificial Sequence
  ENSG00000255856_7 (sequence is synthesized)
ggaggcagccacgggcattcttttctgtgttgtccctgggggcttttgcactacaatggcaggattgggaagtcactacggaggccctttggccccaagagcctcaatatttactccctg

SEQ ID NO: 892101 - DNA, 120 bp, Artificial Sequence
  ENSG00000255850_0 (sequence is synthesized)
gatcatgtccctgcagacccggatggagaggatgagcccggccgcgctgaacttcttgtagagcatcgcctcggtcacgtcgggatggaggtcccccacgtacagcgaggacgtagctgg

SEQ ID NO: 892102 - DNA, 120 bp, Artificial Sequence
  ENSG00000255850_1 (sequence is synthesized)
gggcactggggttcatctcggcactgctgctcgcagggccacaggccgcgacctttccgtgagaggaggagagcgaatgctggggctaggggccggagctgggggaagaagatggagtat

SEQ ID NO: 892103 - DNA, 80 bp, Artificial Sequence
  ENSG00000255850_2 (sequence is synthesized)
ttggcctttggaaactgggctgaagggacagggtgccagttctaggcagaaactttgagatccagggcatgactcatcac

SEQ ID NO: 892104 - DNA, 120 bp, Artificial Sequence
  ENSG00000255850_3 (sequence is synthesized)
ctgtactccagcttgggcgaaaaacagggagttccttccagttcttgataaagataaagggagcacccatggacttgagtaactgcagaggagcaccgtggtgcacagatgtattcccac

SEQ ID NO: 892105 - DNA, 120 bp, Artificial Sequence
  ENSG00000255850_4 (sequence is synthesized)
gtattcccacagttgccagctgtcatcacgtcttccaccacaggaatggagccataggagcaagcctcatagattcgatagcattctgtgtttactccgaccgggcacaatgtgagatca

SEQ ID NO: 892106 - DNA, 120 bp, Artificial Sequence
  ENSG00000255850_5 (sequence is synthesized)
ctctgaagcaaggcatcttggtctactttgtgcaaggtcctatgttagatctggggattcacagaagaatacaaggtccatgtcctgaagatggtgtcaggttcctgaattcctgaattt

SEQ ID NO: 892107 - DNA, 120 bp, Artificial Sequence
  ENSG00000255850_6 (sequence is synthesized)
gtgagacctgcacaccggtcttggaacactgaattggtccactgcacaacatctcagtgatgaacctaagtatctcattagcatctataatctcctgtgtgactaacaaatattattgag

SEQ ID NO: 892108 - DNA, 120 bp, Artificial Sequence
  ENSG00000255850_7 (sequence is synthesized)
gaaaccctaacaactgaaatttgcaaatgacagttaccagtgttcctcttcaagatggactacagtcataggcggttctctctattctaaatgtgtacaacccagtcttttcacagtttt

SEQ ID NO: 892109 - DNA, 120 bp, Artificial Sequence
  ENSG00000255850_8 (sequence is synthesized)
aattactaatgtatcttctggggaaagattggtacaaatagagttaacaatgcctctttggaaacctgtgtttctacataaagcaactctcagactggagaacaaaatgaatgaattaaa

SEQ ID NO: 892110 - DNA, 120 bp, Artificial Sequence
  ENSG00000255850_9 (sequence is synthesized)
tgtctggatgaattttcataaatcgttcctaagaaattacataaatatggcctctcatcatgcagcattgaccaacttgcctccaccacaggaaaattcctgtatctataaaaataaata

SEQ ID NO: 892111 - DNA, 120 bp, Artificial Sequence
  ENSG00000255850_10 (sequence is synthesized)
cacatgaattaacatatgatatagaattggcaaaaattccccataacccaatctcttaggtagcaagaagtatacagaagaggtttaaaatgtgatttctaaatctcaaattgtaatttt

SEQ ID NO: 892112 - DNA, 120 bp, Artificial Sequence
  ENSG00000255850_11 (sequence is synthesized)
ccatgaatactttggaaaactccctgaatctactgacttaaaaaaattgaatttcacactgacatctcttacaaaagtgttacagagatgttgtgcctaaagttatttgtttttgacatt

SEQ ID NO: 892113 - DNA, 120 bp, Artificial Sequence
  ENSG00000255850_12 (sequence is synthesized)
ctttaacttgcattactcatctgcagctgttaggcatgttacattcaaaaccttcaaagtataaagactcttctctattcataatgatcacgatttaagcaacattttaaccaggtgatg

SEQ ID NO: 892114 - DNA, 120 bp, Artificial Sequence
  ENSG00000255850_13 (sequence is synthesized)
aaaagattacagaatactccaggggagggagatggatggggaaaaggaagatgttgatcgaagggtatgaagtttcagttggacaggaggaataagctttagtgatctatcacacagaat

SEQ ID NO: 892115 - DNA, 120 bp, Artificial Sequence
  ENSG00000207955_0 (sequence is synthesized)
gttgcagctgcctggccagcccgagagacagcggagattcattacccgccgacacaatgaccattgatggccccgtggcgttattcaaatccagtaccaattgcagccgagcccctttct

SEQ ID NO: 892116 - DNA, 120 bp, Artificial Sequence
  ENSG00000207955_1 (sequence is synthesized)
ccgcgccaggcccgtattgttggagcggcccactaaaagcccgccccggccccgagccgccagaggcgcctgctcgggttcagccttgcgcctcggcagcccgccggctcccagtccggc

SEQ ID NO: 892117 - DNA, 80 bp, Artificial Sequence
  ENSG00000207955_2 (sequence is synthesized)
tccacgggcgctgcaggtgacccggcggcgcattccagcactccccgccgcccgggccaccgccgccaccgccaccgcag

SEQ ID NO: 892118 - DNA, 120 bp, Artificial Sequence
  ENSG00000207955_3 (sequence is synthesized)
agccggtgcgtgcgcggggctgggcgggggcgggggacccacgaatccagcagcccggaccccgggctcggaaacgcgacccggcctggggctcctgccttccggattcccggagatccc

SEQ ID NO: 892119 - DNA, 120 bp, Artificial Sequence
  ENSG00000207955_4 (sequence is synthesized)
tcccaggctgggggcagggagaggggagtcggggttccccaggccagacagaggagattccccctcgacctggggcggcgctgagacccaacgcgggccactctgcggactccgggccgc

SEQ ID NO: 892120 - DNA, 120 bp, Artificial Sequence
  ENSG00000207955_5 (sequence is synthesized)
gatcgaaggagccacgccaggggcgatggggatccccgcacagggtcaggatccgcgtgcttgctagtccaccttaccgccggatgggcagccgctgctgagcgcctgctaggtggtccg

SEQ ID NO: 892121 - DNA, 120 bp, Artificial Sequence
  ENSG00000207955_6 (sequence is synthesized)
ccagggccctgaactcaggggcttcgccactgattgtccaaacgcaattcttgtacgagtctgcggccaaccgagaattgtggctggacatctgtggctgagctccgggcgcaacagggg

SEQ ID NO: 892122 - DNA, 120 bp, Artificial Sequence
  ENSG00000207955_7 (sequence is synthesized)
ctcagcgcgggcgagacctctcggggcggcggctggctggccccagcgcgaggatcgcggtcccggcccgcgcgcacagagacgccggtccctgccaccagcgccgccatccgcatcctc

SEQ ID NO: 892123 - DNA, 120 bp, Artificial Sequence
  ENSG00000207955_8 (sequence is synthesized)
gcgccgccatccgcatcctcgtccttcttccttctctgcgggtgaccagtcccggccggcagggtccttcagtcgatcgcgtcgtttttcctcctttcaaatttcggccggaacgaagcc

SEQ ID NO: 892124 - DNA, 120 bp, Artificial Sequence
  ENSG00000207955_9 (sequence is synthesized)
ggcacgcagcggcggggccgaatgtggtccgccctcagcccaagccgcatgaagtcgggggtgaaagaagaggccggccgaatgcgcccgctaactcgtttcgcagttgttctaacttat

SEQ ID NO: 892125 - DNA, 120 bp, Artificial Sequence
  ENSG00000207955_10 (sequence is synthesized)
caccccaatactccctacctaaacaaaacaaatcctcaaccaacccctaaatcccaaacaaaccaacccctcccgcaagcccctccggacggaccgatgggctgagcctcctccagccgc

SEQ ID NO: 892126 - DNA, 120 bp, Artificial Sequence
  ENSG00000207955_11 (sequence is synthesized)
tgccagggtccgacgggcaagcgtcaccaacgatgcgctccagcccggcaatctcctcggctttggaaatagaatttggaaaaacgaatccttttcattaaagaaaaatcttcggagata

SEQ ID NO: 892127 - DNA, 120 bp, Artificial Sequence
  ENSG00000254721_0 (sequence is synthesized)
ttttttgtagtatggaagttgtaaagctgtgttttaataggattaccttaggaataagaggactgctttttaaagatacgagatcccgctgccttggcaattctgttatcagaaagatag

SEQ ID NO: 892128 - DNA, 120 bp, Artificial Sequence
  ENSG00000254721_1 (sequence is synthesized)
tgattttgatacaaaacagtaagaaactgtagaattgcaggacccataatcctcacaaggaagatttagagagtgctgtgtgtcaatcactcatcagcacctcacagatattatctcaat

SEQ ID NO: 892129 - DNA, 120 bp, Artificial Sequence
  ENSG00000254721_2 (sequence is synthesized)
tcgtcctggcaaccatcactgcccctacttagcagtctcagagaggagactcaactcacacaggggccaagagctggaccacggccaaccaggggcagcagaacgccacagtggttgagc

SEQ ID NO: 892130 - DNA, 120 bp, Artificial Sequence
  ENSG00000254721_3 (sequence is synthesized)
atgggctctggtgaaggatggcgggggttcaaatcccagttctccacctctctgcttcgctccgattcctgggcctctgagctggtctcctccgctgtggagtaacagtgtgactgctca

SEQ ID NO: 892131 - DNA, 120 bp, Artificial Sequence
  ENSG00000254721_4 (sequence is synthesized)
ctgtgctggacacggttccaactttccaactactcccgcaggagctcatttagtggagacaagatcttgctcagtgtcatagtgaggaagaaatggaaatatctgtgcagggcccaagcc

SEQ ID NO: 892132 - DNA, 120 bp, Artificial Sequence
  ENSG00000254721_5 (sequence is synthesized)
cggcctggtgcgggagaggcattaataaacgcagcttgagttcagaagcaggtggtctgtggctcactcagcctggcttcctgctgggtcttcacagtgctgggctaccttcctggagag

SEQ ID NO: 892133 - DNA, 120 bp, Artificial Sequence
  ENSG00000254721_6 (sequence is synthesized)
aaccaaagtccaggctgtgtagatgcctgtggtccaccagcgcaaagcagcggcccatcaggacgcttcggaggtagatgcgtctgagttccatgacatcggggacatggccccactcct

SEQ ID NO: 892134 - DNA, 120 bp, Artificial Sequence
  ENSG00000254721_7 (sequence is synthesized)
gttctggaggtcacgggcctgctgaacctcttgtaccaggtcagccaccaggttcatctggcaggacctgagagcccccaccaggtgggccactgttgcgttctccttctctgtgttctt

SEQ ID NO: 892135 - DNA, 120 bp, Artificial Sequence
  ENSG00000240859_0 (sequence is synthesized)
aaacagatttccataaagaaaagctgctttagagtgctacactgtaagaggggccgggcaaacaagaagggacggaggaaagaccaccaagtgagaggcacaggtgtcaggacacacaga

SEQ ID NO: 892136 - DNA, 120 bp, Artificial Sequence
  ENSG00000240859_1 (sequence is synthesized)
gagcccgaaaacgaggcagagtttggctgctgtaactgactgggaagcttaaaataacagacaatcatctctcacatttatggggactgggaagtccaagaccaagttgccatctgggga

SEQ ID NO: 892137 - DNA, 120 bp, Artificial Sequence
  ENSG00000240859_2 (sequence is synthesized)
tcctcatgacttactcacctcggaaagccccacccccaagaccatcacattgtgggtgatggcagagcataaggtgccttccccacatgctcgggttggcccagcgtctcacgctagcag

SEQ ID NO: 892138 - DNA, 120 bp, Artificial Sequence
  ENSG00000240859_3 (sequence is synthesized)
ctacgtggaatagttattttttctggagaactctgggacccctctgatgtcttggagcacccacacaggccgttcactgtgcacgctgtgaggctgtcgtcttggagcacccacacaggc

SEQ ID NO: 892139 - DNA, 120 bp, Artificial Sequence
  ENSG00000240859_4 (sequence is synthesized)
ggcgccgccaatcatttcggggcttattttggttctaaagcccggggcagccaggcctccctgcctggcctcggcggggacgcgggacctggggccccggaccgggcctaaccgccctgg

SEQ ID NO: 892140 - DNA, 120 bp, Artificial Sequence
  ENSG00000240859_5 (sequence is synthesized)
ccggtccccactgatggtggcggtcggtcctgatcgtcctgatggcagcgaccaggctggactcgggctgtgcaggggcgaggggagcagggcggggtgacgcccggagagcggcctgga

SEQ ID NO: 892141 - DNA, 120 bp, Artificial Sequence
  ENSG00000240859_6 (sequence is synthesized)
gagcgcgtgcttcagaaggcgtgggcaccctgtcccctttgcagatggggatgcaggccctggtggcggtggaggggagatgggggcagggacgttgccgggcagaggaagctggaagtt

SEQ ID NO: 892142 - DNA, 120 bp, Artificial Sequence
  ENSG00000240859_7 (sequence is synthesized)
acgcatgcgcaggagccgccctgcgcgggtggggggctgagcccctgtggcttcaggtttaaaggcgcgagcgccacccacgcaggcacaagggctcctagtcgttttatttttagcgta

SEQ ID NO: 892143 - DNA, 120 bp, Artificial Sequence
  ENSG00000240859_8 (sequence is synthesized)
agggcacactagcgtcatccccagagggcttggtaaggggactgtttgcagagacataggcagagggctggaaaactaccaaaaaagtgcagtgttctggacctaataatagcagagcta

SEQ ID NO: 892144 - DNA, 120 bp, Artificial Sequence
  ENSG00000240859_9 (sequence is synthesized)
ttctcaccctggtctgaaggcaggaggggaggagcagttaatggattctggaagtcaggttgcacagagtcaccttgaaagatgccatgaccttcaccgagggccagacagagactaaga

SEQ ID NO: 892145 - DNA, 120 bp, Artificial Sequence
  ENSG00000240859_10 (sequence is synthesized)
tgaccccataggagaataagacctagacctcatcctcctgcctcctgccagtccctgccaggggtcgccaatggcaaaacaggactggaagccagaggccatggaagcccatggatgaag

SEQ ID NO: 892146 - DNA, 120 bp, Artificial Sequence
  ENSG00000240859_11 (sequence is synthesized)
tccacaggccagcctccccgagagcagcctggacggtccgcaggagacgtctcctgtcttaggcgtcccacgccgcgtgctcctgttcagccctgccgaggtggaagcttggagtggctc

SEQ ID NO: 892147 - DNA, 120 bp, Artificial Sequence
  ENSG00000240859_12 (sequence is synthesized)
acggtggatgcattgacgctgcagacgccagcaagtgctacaaaccagagctggcctttaactcagactgatggagaaggtgttaataatgcagattagacttaaaagtgttgaagccat

SEQ ID NO: 892148 - DNA, 120 bp, Artificial Sequence
  ENSG00000240859_13 (sequence is synthesized)
tgcactgtgaacagcaaaaaaattgaagaactcttctggcatttaaaaacaattactcagttcagcagagaagtcactgacaaacgagatcacactgactgctttgtcgttttggttttg

SEQ ID NO: 892149 - DNA, 120 bp, Artificial Sequence
  ENSG00000240859_14 (sequence is synthesized)
tcttactcattaatgcaaataagaacattcactagcatctgtgtcgggcctaccctccctggtcaaatacagctacagtctccctgcagaaacgagttttccagaaatgagccgatgttt

SEQ ID NO: 892150 - DNA, 120 bp, Artificial Sequence
  ENSG00000240859_15 (sequence is synthesized)
tctgcgagaatcaattggtcatatacaatttacaaaaatgagtactgtatactatatttgtaaactgtacactgcagatgctttatttcactgaaatttataatacacttatccatgtat

SEQ ID NO: 892151 - DNA, 120 bp, Artificial Sequence
  ENSG00000240859_16 (sequence is synthesized)
atgcatgcatgcatttttgttcctgagatccagctgtgaaatgtttaccagcacataaattaccagcacatgctcttttttgttaacctactaggtaaaatcttcatttattacatcaaa

SEQ ID NO: 892152 - DNA, 120 bp, Artificial Sequence
  ENSG00000240859_17 (sequence is synthesized)
taccacaatttcagatattgatcagcgtgttcagttggtttctaaggaggtttacttacctcatggtacacctagtttgcatagtttgattatatttaactcttatgctaattgggggaa

SEQ ID NO: 892153 - DNA, 120 bp, Artificial Sequence
  ENSG00000240859_18 (sequence is synthesized)
gtcattgatttattggacagatgcacctgtggtcttccctgagcacatcctggccaaggatgctgcccccaggagatttgagaagtcctgtaaggatcatatcagtattttcaaatactt

SEQ ID NO: 892154 - DNA, 120 bp, Artificial Sequence
  ENSG00000240859_19 (sequence is synthesized)
atagaaaagccagagggattgacccagaattaccaatataagcttgaccctgagataacaatgccattttatgtttgcatgcataaaaccaatgcaagaggctgatgactccagatccct

SEQ ID NO: 892155 - DNA, 120 bp, Artificial Sequence
  ENSG00000240859_20 (sequence is synthesized)
aggcccacgtgcacactcggtgaaccacagtccagacacaggcagggcggcaggccagggaaggagaggccaggtgttggtgcatggagaggccaggtgttggcctgggggtgctaagtg

SEQ ID NO: 892156 - DNA, 120 bp, Artificial Sequence
  ENSG00000240859_21 (sequence is synthesized)
aacccccaaggtcgcggagacagtagggcaacagcaaaacgagctctgccgtccagggcgagggcccggagtcctccccaggggtgggctgcagagaagcccctgtccaggccctgctca

SEQ ID NO: 892157 - DNA, 120 bp, Artificial Sequence
  ENSG00000240859_22 (sequence is synthesized)
cctgcaaagtgctcccgagctcctgtgcccccagcagcaatcccagccccgctgacacccaagcttgtcacccgctgggtttcttgaggtctgaggaccgtggctgagggtgcatgggcg

SEQ ID NO: 892158 - DNA, 120 bp, Artificial Sequence
  ENSG00000240859_23 (sequence is synthesized)
ctgggatggagggggatgtcctgtcccagtctgtgcttattaattgttaaagagggcaaggctgcttttattcaaggtgggggggctgctaaagcgagatgttgggttaggggaggcaga

SEQ ID NO: 892159 - DNA, 120 bp, Artificial Sequence
  ENSG00000240859_24 (sequence is synthesized)
tccggctcaactccagatagaaaaagtgggaattgacagcccaggcgtagggtcgggagtggagagaaaattactaagaggaagggtcaggggcaaggcgggttctagctgcatagacag

SEQ ID NO: 892160 - DNA, 120 bp, Artificial Sequence
  ENSG00000240859_25 (sequence is synthesized)
gatttttgctgaaaaggcaggcagtgtggtcacagaccgagggtgggagttgaggactttgatcagggaccaagagtagacgattttcactaaaccgactcagcaggattcttgctaaat

SEQ ID NO: 892161 - DNA, 120 bp, Artificial Sequence
  ENSG00000240859_26 (sequence is synthesized)
cggccgaaaccggccaaggtcagggactggtcacagggagggctcagaggagcctgactcgagtgtggtcaaaggagagagtctttgtcatcttttaagaggcgagagtgacgtattagt

SEQ ID NO: 892162 - DNA, 120 bp, Artificial Sequence
  ENSG00000240859_27 (sequence is synthesized)
gagaaacggtgaagggatcaagctcaggccagcagccccgagtttgagatgaggacaggctgggtccaggaagggctgcaggaatagggggcacctgagcctgcagaaagcggggagccc

SEQ ID NO: 892163 - DNA, 120 bp, Artificial Sequence
  ENSG00000240859_28 (sequence is synthesized)
agccgccagagcaggcacccccaggcagacctcagtgtgtcctgccctgtgggagtggcaaggccagaccaagctggatgtgaaccagtcccagaacaccgcctagaatttggattgtaa

SEQ ID NO: 892164 - DNA, 120 bp, Artificial Sequence
  ENSG00000240859_29 (sequence is synthesized)
tttgttatcgatgatattgctgcttggtctctctcctcttcctccccacccccacccaagatggagtctggctttgtcccccaggctggagtgcgatggcaggatctcggctcactgcaa

SEQ ID NO: 892165 - DNA, 120 bp, Artificial Sequence
  ENSG00000240859_30 (sequence is synthesized)
ggccaggctagtctcaaactcctgacgtcgtgatccgcccacctcagcctcccgaaatgctttgggattacgggtgtgagccgccgcgccgagcatggccatcgtggctacatcagtccc

SEQ ID NO: 892166 - DNA, 120 bp, Artificial Sequence
  ENSG00000240859_31 (sequence is synthesized)
tcccggctaatagagattttagcacactcagattctattggctaataagatttaattataattctggggtatttaacaatgtcgttatacagtcttcattgttgcaaatggagaatgaaa

SEQ ID NO: 892167 - DNA, 120 bp, Artificial Sequence
  ENSG00000240859_32 (sequence is synthesized)
tcgggtgcatgtgacactaatatgacctgttcatgctctgtcacttaaacggagttaagtaacatagccctgagcaggaagactccttccccacttctgtccaggagctccttactcgat

SEQ ID NO: 892168 - DNA, 120 bp, Artificial Sequence
  ENSG00000240859_33 (sequence is synthesized)
tctggggaacagaaaggctttcagcggccaaggggagtgacaacagccagacatgagacacctcctagagccctttggtgttaccctttccggtccatcagccacagtgtccaccccagg

SEQ ID NO: 892169 - DNA, 120 bp, Artificial Sequence
  ENSG00000240859_34 (sequence is synthesized)
cagtccatcgccaagactggagtgcagtggtgtgatcctggcttactcagcctcccaggctcaggtgatcctcccagctcagcctcctgcgtagctgggaccacaggcaggcaccaccat

SEQ ID NO: 892170 - DNA, 87 bp, Artificial Sequence
  ENSG00000240859_35 (sequence is synthesized)
gggaccacaggcaggctgtagagaccagctctcgctatgttgtccaggttggtctcaaactgctgcctcagcctcccaaggtgctgg

SEQ ID NO: 892171 - DNA, 120 bp, Artificial Sequence
  ENSG00000240859_36 (sequence is synthesized)
tcagcaatctgaattatttatgcagaatttttttttctctagctggaagagctgtttatatgcacgtttctttgggggcaactcttctccattgtcacagattttttttttccaagccat

SEQ ID NO: 892172 - DNA, 120 bp, Artificial Sequence
  ENSG00000240859_37 (sequence is synthesized)
tcctgggggattcctgggagccatgtgggagaggcgtgaggaagtgagaccttcaccccgagacaggtcctgacacaccctctggtgcctctactcaagtgagaagtttggctgctgtaa

SEQ ID NO: 892173 - DNA, 120 bp, Artificial Sequence
  ENSG00000233806_0 (sequence is synthesized)
cctttttctctgtgcatcctcagtgacgcggggcacagctctgcccgggggcctaccagagcccacctggaccccacactgggtcagccctggtgcggaggaggccgctgtaggcgcggc

SEQ ID NO: 892174 - DNA, 120 bp, Artificial Sequence
  ENSG00000233806_1 (sequence is synthesized)
caggtcacagtcggcaccagaagtttggcagatctcagtgaggcgttagtttgcatttccttgtgacgggttttgactggaatgccaggcttaacgttgctcagaagttgcttctatgag

SEQ ID NO: 892175 - DNA, 120 bp, Artificial Sequence
  ENSG00000233806_2 (sequence is synthesized)
gaatcaatgcacagaaattaagctaatgtcttcagtctttgcaacaccacttgagcagcttgaccaagtcactcatgcctagtggccccgttagttgctcttctcccatcaatgagcttt

SEQ ID NO: 892176 - DNA, 120 bp, Artificial Sequence
  ENSG00000233806_3 (sequence is synthesized)
ggaattttcgtcagtagctgcctatgcattactcatggatcagagagcagaaagaaaccagacattgccaagtcccacctaggtagctacacagggagccctgtattgaccatggcccag

SEQ ID NO: 892177 - DNA, 120 bp, Artificial Sequence
  ENSG00000233806_4 (sequence is synthesized)
ccttcctgtgcaggtggtggtgccctctgcgccttcactggggcccagccaagtaactgaatccagccaggagcaagggcagacgctggcacaggtcctgccactgtccccaacctgggt

SEQ ID NO: 892178 - DNA, 85 bp, Artificial Sequence
  ENSG00000233806_5 (sequence is synthesized)
aggtcacagtcggcaccagaagtttggcagatctcagtgaggcgttagtttgcatttccttgtatggtgccatcttgactcactg

SEQ ID NO: 892179 - DNA, 120 bp, Artificial Sequence
  ENSG00000233806_6 (sequence is synthesized)
gcttcctgagtagctggtactacaggcgtgtgccaccatgcccagaatcccagtaggttgctcggtgcctggttctgacgctatccctcagagcctgtggaagttgctgatgccaggatg

SEQ ID NO: 892180 - DNA, 120 bp, Artificial Sequence
  ENSG00000233806_7 (sequence is synthesized)
tcttttgcctttaaaagcttcctcttgccccagcctcccagggaatgcctgtggtctgtcatggctcacacatcctggttgataatccactgctgttctccacggaatgccttcattttg

SEQ ID NO: 892181 - DNA, 120 bp, Artificial Sequence
  ENSG00000233806_8 (sequence is synthesized)
agagctgctcgctgcctgttgtggtttcagttgacggcccaccgctgtgtgcagagttcaccagccgctgtggtgtgcagtgcagcagctgacctgcctgccttgtggttttctaatccc

SEQ ID NO: 892182 - DNA, 120 bp, Artificial Sequence
  ENSG00000233806_9 (sequence is synthesized)
attgaggggacgtcttaggtgttctcaccaagaatgcacagcaacagtgctgggtgggccacatcctccctcacgtttggtgccaccagttttatagattttggctactgtgggtgtgtg

SEQ ID NO: 892183 - DNA, 120 bp, Artificial Sequence
  ENSG00000233806_10 (sequence is synthesized)
gtgcatctccgagtaggggctgagggcacagctctcctggctcctctgctcggttacatctacacagtgaatacgccccaggtcccagcctgggatccacagaatcttgatattttccac

SEQ ID NO: 892184 - DNA, 120 bp, Artificial Sequence
  ENSG00000233806_11 (sequence is synthesized)
ttctggaaaataaacttctgttttctccagttcagctgagctgaacatctacaatgtctggctttacaggttttgatgctgaaaatattttttattttttattttttttttgagacagag

SEQ ID NO: 892185 - DNA, 120 bp, Artificial Sequence
  ENSG00000284428_0 (sequence is synthesized)
gctgttttacgtcctccacctcgggagcccccggtgactgtcacagcctcttgccctgtgatctgcaggttctgggagacgcacagctaagatgccaggacatcctggaagctgggaaaa

SEQ ID NO: 892186 - DNA, 73 bp, Artificial Sequence
  ENSG00000284428_1 (sequence is synthesized)
acctcaggcgatccacccactcaacctatcaacctaatttttattcttagtagacacgttggtggtgagccaa

SEQ ID NO: 892187 - DNA, 120 bp, Artificial Sequence
  ENSG00000284428_2 (sequence is synthesized)
ctaatttttattcttagtagacacgttggtggtgagccaatcagatgttgttattgatgagaaaaagcagaaatgatttctgttgattcttgaaataaaattttttccaaaggacaagaa

SEQ ID NO: 892188 - DNA, 120 bp, Artificial Sequence
  ENSG00000284428_3 (sequence is synthesized)
gctcccatcccagtaaggcaatgcaagaacctgaagcaaaatgcacctgaggcttacagtggggtacagtacagtgtctcctgggaaggtggtcactaatttaatgggcagggtggggat

SEQ ID NO: 892189 - DNA, 120 bp, Artificial Sequence
  ENSG00000284428_4 (sequence is synthesized)
aaagattgtgacagatcactggacccagcacctaggtgatatgactctcctcatttgcctgagacctgcatattttagacattgtgatatacaactggaacaaacacctaggggttggaa

SEQ ID NO: 892190 - DNA, 120 bp, Artificial Sequence
  ENSG00000284428_5 (sequence is synthesized)
ggctcctgcctgagtccctcccacaggaggccttgtgatgtttttttgtttgttttttgttttctttgagatggagttttgttattgttgcccagactggcatgcggtggcgcaaccttg

SEQ ID NO: 892191 - DNA, 120 bp, Artificial Sequence
  ENSG00000284428_6 (sequence is synthesized)
tgatttcagttttttaataactgtaagttacatttcatcaaaagagcttaaatgatgtttaaaaagtcaaagactttgaaaggtatatttcagaaaaatctagtcatatatgttatttgt

SEQ ID NO: 892192 - DNA, 120 bp, Artificial Sequence
  ENSG00000284428_7 (sequence is synthesized)
aatctagtcatatatgttatttgttacagattcttatttacctttatcttccccagagtgaatgtagtaagtttctcatgtctgttttttctggttgcatgatttttttttttttttttt

SEQ ID NO: 892193 - DNA, 120 bp, Artificial Sequence
  ENSG00000284428_8 (sequence is synthesized)
tacaggtgtgagccaccgtgcccagtctaaggcacacaatttgcaaaggaaattgaggctctcgcacaaatccagtccaccctgtacttacacccaacatgcaggaggtgttgactctca

SEQ ID NO: 892194 - DNA, 120 bp, Artificial Sequence
  ENSG00000284428_9 (sequence is synthesized)
ctcatcccttgactcaggacatgtgtgtaattgttaatgtcatcgcaaggccttttgacaagtgtaattgtgacatataccttggcctagcatctgagttatttgttgtttcctgggtcc

SEQ ID NO: 892195 - DNA, 120 bp, Artificial Sequence
  ENSG00000284428_10 (sequence is synthesized)
agctcacagtgccatatcactggatccagacccttggtaatgtgattctattctgccttgatacagcccacaggggtcattgtgacatcgctgggcattgcacctaggtgatttgagtct

SEQ ID NO: 892196 - DNA, 120 bp, Artificial Sequence
  ENSG00000284428_11 (sequence is synthesized)
cctcttctgccttggtgctgcccacaggtgtattgtgacatattgctgggcgtatgttatgtgactcttgcttgtgccctaaacacataggccattgtaacattgctgagtgcaacaccc

SEQ ID NO: 892197 - DNA, 120 bp, Artificial Sequence
  ENSG00000284428_12 (sequence is synthesized)
aggtgatgtaacgcttcaccctggacctgtctacagagggcattgtaatatatgtcttcaccaatcacccaggaaatgtgactttttattcctccctgttctgtactcacagggggtatt

SEQ ID NO: 892198 - DNA, 120 bp, Artificial Sequence
  ENSG00000284428_13 (sequence is synthesized)
gggacatattgggcccagcacctagctgatgtgacttttctttattctaggttctgacaacaaaggagattgtgacatattgctgggcctaacactaaggtgatgttagttatttgcttt

SEQ ID NO: 892199 - DNA, 120 bp, Artificial Sequence
  ENSG00000284428_14 (sequence is synthesized)
tgcacccagctttgtgatgtatttctgcatccatcatgcaggagataaaactctgtatttttgcctgcattctgcccacagggaagattttgacatattgttgggcccagcaaccagtcg

SEQ ID NO: 892200 - DNA, 120 bp, Artificial Sequence
  ENSG00000284428_15 (sequence is synthesized)
ttttgtctgtcatatctgggcccagcacccaagggatctcactcttctacctgtgccctgctttcaggagggattgtaacatccctggtcaagcccccagtgatgtgattctcctgtttg

SEQ ID NO: 892201 - DNA, 120 bp, Artificial Sequence
  ENSG00000284428_16 (sequence is synthesized)
atgcctgccctcagggaggattgtgacatagccctggcccaacacacagttcatgtaactcttgaatttgctctttacatacaggtaggattgtgacatatatctggccaagcgtacaga

SEQ ID NO: 892202 - DNA, 120 bp, Artificial Sequence
  ENSG00000284428_17 (sequence is synthesized)
tgtaatgatgactgtcataccttgaagaagccaatagcagagagaatgttgctctcaggcttaggaaaatgaggaagtctttctgtacaaaagtcataaagaattactactctctcacat

SEQ ID NO: 892203 - DNA, 120 bp, Artificial Sequence
  ENSG00000284428_18 (sequence is synthesized)
aaagaaagattgtgacatatcacttaaaccagaacttaggtgatgagactcttctgtctagcaaccacttattttgggtattgtgacatttcactgggccaaacacctaaaaaatgggag

SEQ ID NO: 892204 - DNA, 120 bp, Artificial Sequence
  ENSG00000284428_19 (sequence is synthesized)
gctcctgcctcagccctgtccacatatatctggacatatatctgcatccattacataaaacatgtgataccttttctgcctgtaccctgcccacaggaaagattgtgacactgcagggcc

SEQ ID NO: 892205 - DNA, 120 bp, Artificial Sequence
  ENSG00000284428_20 (sequence is synthesized)
tggccgccagctgttgtgtctcacctgaatgtacataactttcaggagaaagttgtaacatgtcactggttgaaaacccagatgatgtgactctcctggcttttcacagccctcagggaa

SEQ ID NO: 892206 - DNA, 120 bp, Artificial Sequence
  ENSG00000284428_21 (sequence is synthesized)
aaaatttacatatcagtggcccagcatccaggtgatgcgactctcctgggtgctttctgccaacaagttgattggtaacatatatctcatcccagctcacaggtttgatgatgactctaa

SEQ ID NO: 892207 - DNA, 120 bp, Artificial Sequence
  ENSG00000284428_22 (sequence is synthesized)
tacttcataccagtcaatagaagagatagtgtctctcacagctaggcttagaaaaaggagtaaaatctcaggtctcctctctgcatgaaggttatagcgaatcaccactctcatatattg

SEQ ID NO: 892208 - DNA, 120 bp, Artificial Sequence
  ENSG00000284428_23 (sequence is synthesized)
tataaagcactcagatgatacagagcatgtcatcataggacccagcaaacaggttagatcatgtttcatgtaagcgctccctgacaatttttagaattgtcatcgtcacacatggtgaaa

SEQ ID NO: 892209 - DNA, 120 bp, Artificial Sequence
  ENSG00000284428_24 (sequence is synthesized)
gtccactgatgaggtcataattctcatgcacagatgcagtccacagttaaaattgtaactatcatatgtaaacgtggccacagttgagatggtgactcatttctaaacccagctcatagg

SEQ ID NO: 892210 - DNA, 120 bp, Artificial Sequence
  ENSG00000284428_25 (sequence is synthesized)
tgagtgaggactctcctctctggacccagccaattgaagagatgttgacccatacctagacttaggaccacataagatcatgggtccaaagcagcgcaaagttctcagagtaggttgcaa

SEQ ID NO: 892211 - DNA, 120 bp, Artificial Sequence
  ENSG00000284428_26 (sequence is synthesized)
ctcatacagtcctcaagagagtgcccttacagggccaagcacacaggtgagattgtcaaacttacattcacacccagtcaatagcaaagattgtcatttacttaaacacaccctactttt

SEQ ID NO: 892212 - DNA, 120 bp, Artificial Sequence
  ENSG00000284428_27 (sequence is synthesized)
gaggttctgaatctcacttttggaggcagttgaatgttggaaaattgactctcatttgtgtggattttgtccacatttgggtgactctttaatcaaaattcagcacacctttgtgactgt

SEQ ID NO: 892213 - DNA, 90 bp, Artificial Sequence
  ENSG00000284428_28 (sequence is synthesized)
gtgactctttaatcaaaattcagcacacctttgtgactgtaacttcactaaggagctttatttatttagagatgaagtttcattcttgta

SEQ ID NO: 892214 - DNA, 120 bp, Artificial Sequence
  ENSG00000284428_29 (sequence is synthesized)
ttgtgacctatctgttgacccactgcaatctctcctgtgggaaaagcacagataaatgccctcttttacctacgtgatttgacactcctctactgcctgggccgtgcccacagaatagag

SEQ ID NO: 892215 - DNA, 120 bp, Artificial Sequence
  ENSG00000284428_30 (sequence is synthesized)
agtgacttatcactggaccaagcacaccagtgatgtaattattctgcttggtccttgcacacacaagtcactgtgatatatgtttgggcccatcacctagatgatgtgactcctcttctg

SEQ ID NO: 892216 - DNA, 120 bp, Artificial Sequence
  ENSG00000284428_31 (sequence is synthesized)
gggtccacagtgggaattgtgatacatcgcttgacgtagctcttatgtgatgtgacttttctttcatgcttgggcccttcctactgggatgattgtaacataaagctgagcccagcacct

SEQ ID NO: 892217 - DNA, 120 bp, Artificial Sequence
  ENSG00000226078_0 (sequence is synthesized)
ttatcaaagctgatttcagggagcaaagttcccaccaggagaggccacagcctcattagagagttctgggaatgatgaaaagccaggccgccgtgcacatccctgggacaattaggcctt

SEQ ID NO: 892218 - DNA, 120 bp, Artificial Sequence
  ENSG00000226078_1 (sequence is synthesized)
gttctctacaaacagcaaactcgaaaatgccgtatttccctgataaataattcccattctaagggattccaccccccattccaagtcccctccaaaaatatatattgaaagaaaacaaaa

SEQ ID NO: 892219 - DNA, 88 bp, Artificial Sequence
  ENSG00000226070_0 (sequence is synthesized)
tgccatgattttaagtttcatgaagtaaacacatggcagcctctctctcccactgacgatacaaccttgatagagggcatggtggagc

SEQ ID NO: 892220 - DNA, 120 bp, Artificial Sequence
  ENSG00000226070_1 (sequence is synthesized)
cccactgacgatacaaccttgatagagggcatggtggagctaattgaatgatccgaacagtaaataccagcaagtagatgggtgaaaacagccaggattccaagtaccacaaaactggtg

SEQ ID NO: 892221 - DNA, 120 bp, Artificial Sequence
  ENSG00000226070_2 (sequence is synthesized)
ttgagttgtgcacactttttcctctggaatctcttgagcagaactcagcatgacctgaaacccaggagtgagccgcacagtgccgacaatgagatgcagaagaaaacctctggttctggc

SEQ ID NO: 892222 - DNA, 120 bp, Artificial Sequence
  ENSG00000226070_3 (sequence is synthesized)
aagagaggagtagcagtggcagtaaatgtggcatcaacaacaacaacaaaaagcagggactaggactctgaggaagggaagcctatattctggcctcagggtgctctttcttcctgccta

SEQ ID NO: 892223 - DNA, 120 bp, Artificial Sequence
  ENSG00000226070_4 (sequence is synthesized)
ggggtcatataccacctgtgggcacctcaggactcctgacaacctcacttttacctgttgcctttttagcccaggatcagtaggtatgggggtgcacatgctcttgaggacacagcagct

SEQ ID NO: 892224 - DNA, 120 bp, Artificial Sequence
  ENSG00000226070_5 (sequence is synthesized)
gtcacatcagggaacccgactccagaaccctctgtaaatatcccatggcttggccctgcccatcaccccacccaggcctcctcaaatgaggagctaaagctggcccatggggccaaagtg

SEQ ID NO: 892225 - DNA, 120 bp, Artificial Sequence
  ENSG00000287737_0 (sequence is synthesized)
ggcgagcgctccaggcctcctcccgaccctgcgccgtgcccagcccctctgccctcctgttaccccgggacctcgggccgccagccccttccacgtgcaggctcctgctgctctcgcggg

SEQ ID NO: 892226 - DNA, 120 bp, Artificial Sequence
  ENSG00000287737_1 (sequence is synthesized)
ggcttttcgtgtgtcccccgagatgtcgaggaagccaggtgagttcctcgcgacaggcggtgccctttgcaggaggggacaggtagctgaggcgtggacagagtgacaggccaggctcag

SEQ ID NO: 892227 - DNA, 120 bp, Artificial Sequence
  ENSG00000287737_2 (sequence is synthesized)
gggacacaggtgagaccccctcactgggctgccagttcccgggcttggggcatcccagtacgtcagcgtctgcggccttacctcctgacacctaaggccagagacagagcaggcccgcgc

SEQ ID NO: 892228 - DNA, 120 bp, Artificial Sequence
  ENSG00000287737_3 (sequence is synthesized)
cctgggaggtcctgatgtccagcctgaagattgaggacaaagccaccacctttcacaaaatgaggccagaccacctgcctccctccagtccctgcggcctggagacggagtcaacattct

SEQ ID NO: 892229 - DNA, 120 bp, Artificial Sequence
  ENSG00000287737_4 (sequence is synthesized)
tatctgtgttggatctgaatgttcctccttgcaaaggaaacaaggagtggacgttcaggctgatggccagcttcaaagatcggggcctttgattcccatcactgggaagaaagcccttca

SEQ ID NO: 892230 - DNA, 120 bp, Artificial Sequence
  ENSG00000287737_5 (sequence is synthesized)
gacaagcccccccaggctgcaggtgcatggggaccttgaagaacccgtccccatggtcccacgtccatgtgtctcgagacctgtcgcatcctcgctgaaactcaagaatgtgaaacagag

SEQ ID NO: 892231 - DNA, 120 bp, Artificial Sequence
  ENSG00000287737_6 (sequence is synthesized)
tccagctctcccacgggtggctgtgatccttcttcctggggagtcctgctgtccctgactaggggcacctgcccacctgtcagctgctcctccctcggctggtcctcctgggctctgatg

SEQ ID NO: 892232 - DNA, 120 bp, Artificial Sequence
  ENSG00000287737_7 (sequence is synthesized)
ctagctcttctcacccatagtgccccaagcttcatgcagctgcggcagcagcatgaacagactgagatagcggcttacatgtaaccggaagctgcagaaaaacatcttcagacagctgag

SEQ ID NO: 892233 - DNA, 120 bp, Artificial Sequence
  ENSG00000287737_8 (sequence is synthesized)
acggctcccaggactcgtgcctggcacagacaccatctgcctggcagggcaaagaaaggcgtctgtgagtgtgggaggattccgagtctaacaccctgagcccagccaggaaggggccag

SEQ ID NO: 892234 - DNA, 120 bp, Artificial Sequence
  ENSG00000287737_9 (sequence is synthesized)
gaaggcctcctcgtgaacaacgaatgaaacagatcccagatctcagacagggcggggaaggggaggggtaccatgtcaagcagcactctgtgtaagtcggcacctgcgcacacttgcatg

SEQ ID NO: 892235 - DNA, 120 bp, Artificial Sequence
  ENSG00000287737_10 (sequence is synthesized)
cagacgtgtgtattgtgagtgtatggacatgttagaaatggatgtgtgcatgtgtctgcatgtgtttgtgcatttatgcacagacactacacgggcatgcacatcatgtacgtatatgtt

SEQ ID NO: 892236 - DNA, 120 bp, Artificial Sequence
  ENSG00000287737_11 (sequence is synthesized)
tgcatatgtgcacgtgtgtgtacgtgcatgtgttcgtgtgtgcatgcacacagcatgcgtgtgtgtgtatacttgcatgcatgctaacatatggtggagaataaataatgatcacctctc

SEQ ID NO: 892237 - DNA, 120 bp, Artificial Sequence
  ENSG00000287737_12 (sequence is synthesized)
tggaactggggaaagtaagtgttaaacagattttcgacaggaaatgctgctgcaaggaattcgtccgtaggctagcactacaacctggaggcagggagcagtgaggagtggaagtcttcc

SEQ ID NO: 892238 - DNA, 71 bp, Artificial Sequence
  ENSG00000287737_13 (sequence is synthesized)
caacctggaggcagggagcagtgaggagtggaagtcttcccatcagaagtgaggaaggctggaaggatcac

SEQ ID NO: 892239 - DNA, 120 bp, Artificial Sequence
  ENSG00000287737_14 (sequence is synthesized)
agctcttctcacccatagtgccccaagcttcatgcagctgcggcaggtactgtgcccgtctgcctggcttttgtgtgtttgtgtcttgactctataacccgtgcacacggactgggctgt

SEQ ID NO: 892240 - DNA, 120 bp, Artificial Sequence
  ENSG00000287737_15 (sequence is synthesized)
ggtgtagtggggatggcaggagccctgggaacatgcgggctgggcaaggtgaggcaggctgattgctgtggctcccccaccaccagccccagccacaacaaactgacaaaggaagaggac

SEQ ID NO: 892241 - DNA, 120 bp, Artificial Sequence
  ENSG00000287737_16 (sequence is synthesized)
gtcttaaaaaaaaaaaaaaaaattttacaaggaactacacagatggcaaaattaaaaaaaaaaaaagtgggaagaggggagaaagggagatcaatgtcttctacagatttcatcttatcg

SEQ ID NO: 892242 - DNA, 120 bp, Artificial Sequence
  ENSG00000287737_17 (sequence is synthesized)
ggtggagggtgtgaggagtagagccacgtggtgggaaactgttggtgtcttgtttgcgaatgactttggaacaaagaccacctgataagcacagttaaggaaggaaaacacacagggact

SEQ ID NO: 892243 - DNA, 120 bp, Artificial Sequence
  ENSG00000287737_18 (sequence is synthesized)
tcccagggagccaggaggacactgggggagcaggaacacctgcctttcccatggggccctggtgtgcccagccccccacttcatgtctgacccacgtgctctccggctgacctcctggga

SEQ ID NO: 892244 - DNA, 120 bp, Artificial Sequence
  ENSG00000287737_19 (sequence is synthesized)
ctcgcacctggcccccacttggtatctgagccacgtgcttcccggccctcacttggtatctgagccatgtacttcccggctgacctcccgcaacgtgaagactactctcgctcccttcaa

SEQ ID NO: 892245 - DNA, 120 bp, Artificial Sequence
  ENSG00000287737_20 (sequence is synthesized)
ggccactgtccccaccgcagccagagaggtgttttatagttcaaatcctgcccaggcaccatcttgtctaaaggcagccctgagccggaatctgtgtgctttgctgatgggactgtaaaa

SEQ ID NO: 892246 - DNA, 120 bp, Artificial Sequence
  ENSG00000287737_21 (sequence is synthesized)
tggcgcagtcacttttgaaacagtctgacagttcctcaaaagcttaaacatagacttaccacatacccagcaattccacgcccaggctctgccccaggagaattgaaaacatctatccac

SEQ ID NO: 892247 - DNA, 120 bp, Artificial Sequence
  ENSG00000287737_22 (sequence is synthesized)
acggaaacttgtacacaaatgttcacagttgcactatttatcatcatcagaatgcctataattgatgaacaggtgaacaaattgtgctatatccatataattaaatattattcagtcata

SEQ ID NO: 892248 - DNA, 81 bp, Artificial Sequence
  ENSG00000287737_23 (sequence is synthesized)
attgtgctatatccatataattaaatattattcagtcataaaaaagaatgaggccgggtgtggtagctcacgcctgtcatt

SEQ ID NO: 892249 - DNA, 120 bp, Artificial Sequence
  ENSG00000287737_24 (sequence is synthesized)
cgggacctcgggccgccagccccttccacgtgcaggctcctgctgctctcgcgggggcttttcgtgtgtcccccgagatgtcgaggaagccagcagcatgaacagactgagatagcggct

SEQ ID NO: 892250 - DNA, 120 bp, Artificial Sequence
  ENSG00000287737_25 (sequence is synthesized)
gtgtagcccagggaatgacagcaccccttccgagaagacagggagggtgcagacatggccaggttctgagctagaaaactgtcagcagggggctgaagctgaggatagtcattgccaagg

SEQ ID NO: 892251 - DNA, 120 bp, Artificial Sequence
  ENSG00000287737_26 (sequence is synthesized)
ctgtggggcggtttgatgatactagaacatctcagagtagaaggacgtcccgacctgcagactggaaagcccccagagctcccggcaggacgtatgagggccagcccacacccaggtctg

SEQ ID NO: 892252 - DNA, 120 bp, Artificial Sequence
  ENSG00000287737_27 (sequence is synthesized)
tcctgatacaactgaacgccacagtgtcttagctcctttactgttgctatcaagaaacacctgaggctgggaaatttatgaagaatcatgaggtaatttgtatatttgtccacactaaac

SEQ ID NO: 892253 - DNA, 120 bp, Artificial Sequence
  ENSG00000287737_28 (sequence is synthesized)
ctcatgttgaattgtaaaccccaaggctggaggtggctgggtcatgggggtggatttctcaggaatgtttagtaccatccccttggtgctgtccttgagatagtgagttctcctgagatc

SEQ ID NO: 892254 - DNA, 120 bp, Artificial Sequence
  ENSG00000287737_29 (sequence is synthesized)
tggttatttaaaaagtgtggggcacctctctctctcgctcactcgctcgctcgctcctgctctggccatgtgacgtgcccgctcccccattgcctttcaccatgattggaagcttccgga

SEQ ID NO: 892255 - DNA, 120 bp, Artificial Sequence
  ENSG00000287737_30 (sequence is synthesized)
gaagcttccggaggcctccccagaagctgagcagaggccagcaccatgcctcctgtaaagcctgcagaaccaggagccaagtaaacctcttttcattatttatttatttatttatttatt

SEQ ID NO: 892256 - DNA, 120 bp, Artificial Sequence
  ENSG00000287737_31 (sequence is synthesized)
ggcaccgccgtgtgagtgagacagcagcctcagcccgtccaggtcactgcagaagaggaaagcagcccccacaggccccacagtggtgctcgcctttctccaccccccagtctttcctct

SEQ ID NO: 892257 - DNA, 120 bp, Artificial Sequence
  ENSG00000287737_32 (sequence is synthesized)
ccacccctcagctccaaacagctggaggtcaggtcggggagacgggcgtccattcccgaaattacatagcagggcctggagacaggagatgccgccggccagaccaccatcagtcactaa

SEQ ID NO: 892258 - DNA, 120 bp, Artificial Sequence
  ENSG00000287737_33 (sequence is synthesized)
tgagggatgggcagtcggaactgcccagtttctgagttacagaagccgggggtggggggctgccagactagtaaaactgaccttgttggcggaatcgctcacggcttttctgttgatgaa

SEQ ID NO: 892259 - DNA, 120 bp, Artificial Sequence
  ENSG00000287736_0 (sequence is synthesized)
tttgtcacttccagtgccctgcccagccctacagaaaatacgtgattatttaagggtgaagaagccaaagctgggagagttttagtcacctatctaggggaaagtgtgaagatttcaaag

SEQ ID NO: 892260 - DNA, 120 bp, Artificial Sequence
  ENSG00000287736_1 (sequence is synthesized)
cccagggtccttcacggagccacacggctctccttggcacttaatcttcaagctctcctcagcccacacttgacccttaacaggggagacaaaggcagactccaggtaagttgtcagggt

SEQ ID NO: 892261 - DNA, 120 bp, Artificial Sequence
  ENSG00000287736_2 (sequence is synthesized)
tagcataagcagctcagggcaactggtgggtagggagctgtacagcccagggattgcagcctcttgttttgcatttcctggagtcatggctaaactcatggtctcctcaggggtcaaagc

SEQ ID NO: 892262 - DNA, 74 bp, Artificial Sequence
  ENSG00000287736_3 (sequence is synthesized)
gagtcatggctaaactcatggtctcctcaggggtcaaagcaggcctgactttcagtgtcatcttcaggacacac

SEQ ID NO: 892263 - DNA, 120 bp, Artificial Sequence
  ENSG00000287736_4 (sequence is synthesized)
agctggaccatctagcctggtagaaggtctgccgagttctgcgggtcaccatgaaccaggcttgtgagccctcttagtcatatgtaaagggctgtgtttgagacccggtagcccacaaag

SEQ ID NO: 892264 - DNA, 120 bp, Artificial Sequence
  ENSG00000287736_5 (sequence is synthesized)
ctcttttctgcccaagccttggtttttccgtatgttagtggggacagattggaactaaacagaccttgagtcttttcagggtcagtctcaactctcttagatgctagagggatataggca

SEQ ID NO: 892265 - DNA, 120 bp, Artificial Sequence
  ENSG00000287736_6 (sequence is synthesized)
gggctagcacagaacagaagcaagaaatagtcaaaatgaatattttggactgcatagactcagaatgtgctttacttgggcacccagggcttctcagacttcagttgttttcattccacc

SEQ ID NO: 892266 - DNA, 85 bp, Artificial Sequence
  ENSG00000287736_7 (sequence is synthesized)
gcgcacagctctggggggaatcaggcactgggctgtggtggtaccgaggttacccctgaagtcctcacgcctccctgtgaggttg

SEQ ID NO: 892267 - DNA, 120 bp, Artificial Sequence
  ENSG00000287736_8 (sequence is synthesized)
gaggttacccctgaagtcctcacgcctccctgtgaggttgatagattgaaactaccttattttgagtatgaggaaatagaggcacagtgaggtccagagaccgcccaagagcacacacct

SEQ ID NO: 892268 - DNA, 120 bp, Artificial Sequence
  ENSG00000287736_9 (sequence is synthesized)
aggaagctgagtgccaggtttcaaaaccaggtctccctgggcagggcagggcatggctgtgtttgaaccactcaggtctcctttgacatagttgacagcactagttacttgataatgtct

SEQ ID NO: 892269 - DNA, 120 bp, Artificial Sequence
  ENSG00000287736_10 (sequence is synthesized)
ttttaaaaattaatttacttaaaaaaacttgagtgctattctaagcaatgtgacatcgtggatttcttgggctagttatatattttatgatgttcatcaatgtacaattatgtaaaagtt

SEQ ID NO: 892270 - DNA, 120 bp, Artificial Sequence
  ENSG00000287736_11 (sequence is synthesized)
agattcaaatagaaaaaagggatctggtccaagatttgacacggattcactgtctgtgggaccccttgctagggcacttgatcatctgggtcattaaatctgggggccaggcacattctc

SEQ ID NO: 892271 - DNA, 120 bp, Artificial Sequence
  ENSG00000287736_12 (sequence is synthesized)
attcattcgagacgagcccatcctcttccagagcatgggggcttcttgaaaccctgtcctttccaggcacacactgaggtggggagagggaccctggagtcagaccacctggctttgaat

SEQ ID NO: 892272 - DNA, 120 bp, Artificial Sequence
  ENSG00000287736_13 (sequence is synthesized)
cccagctgtctcctctgagctgtatggcctaaggcaagtcatttaagcttcttgtacctcagattctccaactgcaaaacggagatgataataggcagaagcctcgtggggctgtgagaa

SEQ ID NO: 892273 - DNA, 120 bp, Artificial Sequence
  ENSG00000287736_14 (sequence is synthesized)
tcgagtctgcatatgtaaagcactgggcactgtgtctggaggctgtgagcaccaagcggctctaatcattcccgttttacaaaggaggacagagagactaaggagataaactctttctca

SEQ ID NO: 892274 - DNA, 120 bp, Artificial Sequence
  ENSG00000287736_15 (sequence is synthesized)
tctctcgttgtgtgtcagtgcaggggcaggactaaaagctggtctgtggtctgcaagctttaggggttacagagtccccaggaactcctaggaaattcagctggcggctaccttccacca

SEQ ID NO: 892275 - DNA, 120 bp, Artificial Sequence
  ENSG00000287736_16 (sequence is synthesized)
tccccaggttctgattcgtgggcctggggtgggacccaggaatctgcatttcagttacttcccaggggattctgatgcaggtggtgcgaagaccacttactgagaagctgcaagctgggt

SEQ ID NO: 892276 - DNA, 120 bp, Artificial Sequence
  ENSG00000287736_17 (sequence is synthesized)
ttgagaggtccctacctccttcttccttccccgagccccacccgcccccttctttccactgggcaactatgtaaacagcattatttctacccttgcacggacagaaaggggtctgtgctg

SEQ ID NO: 892277 - DNA, 120 bp, Artificial Sequence
  ENSG00000287736_18 (sequence is synthesized)
ctgcctctgttggtgcctcttcaggtcagggtgataagaagagaaggaacaaagaggggaaaaagatcacagcagagagacagagtgctcattttaaggtggaaatatgccatttcctga

SEQ ID NO: 892278 - DNA, 120 bp, Artificial Sequence
  ENSG00000287736_19 (sequence is synthesized)
ccacagcgggacttccctaggttgtattaaaaaatcctgtactgcccatgtctggtacagaagtatgtatagaattgtagagaaaatgaacactttgggatgatttgaaagcaaattaca

SEQ ID NO: 892279 - DNA, 120 bp, Artificial Sequence
  ENSG00000287736_20 (sequence is synthesized)
gaactaccagtttcaccactttaaaacttttggggaatggccatttagatataacctggtgcagtcaggtaaccccaaacagagtttttaaaagtttccacacccttctttgctggtgcc

SEQ ID NO: 892280 - DNA, 120 bp, Artificial Sequence
  ENSG00000287736_21 (sequence is synthesized)
tgccctgcatcatgctgtcgctgtgaggagggacttgttccagatctctggggcagcccgagtgactcacctaaagtcacacagcttccacggaacattactggaagctcagtgagggcc

SEQ ID NO: 892281 - DNA, 120 bp, Artificial Sequence
  ENSG00000287736_22 (sequence is synthesized)
ttctgcctctgaaacttgctctatttccctcaagtcctgcttccttttgtaggtttaagacattagttcctgagaaattgactaatcaagaatattctggaaatcttagtttagcaaaac

SEQ ID NO: 892282 - DNA, 120 bp, Artificial Sequence
  ENSG00000287735_0 (sequence is synthesized)
gagggagttgcgggccgcagctccggctaagaatcgggagaaattcccagaaacagagtgacagctgtaattggacagctggcacctccatgttgagatagggtctcactctgtcgccca

SEQ ID NO: 892283 - DNA, 120 bp, Artificial Sequence
  ENSG00000287735_1 (sequence is synthesized)
taatttttgtatttttagtagacaaagggtctcgccatgttggccaagctggtttcaaactattgacctccagtgatccacccacctcggcctcccaacgtgccgggattacaggcgtgc

SEQ ID NO: 892284 - DNA, 120 bp, Artificial Sequence
  ENSG00000287735_2 (sequence is synthesized)
gccaccatgcccagccttataccgtcttttgtagccatctttccagatgttgtgaacctattatgaattagtaacagatgcaattagccacgcagtggacatcaaaccctgcaaacccct

SEQ ID NO: 892285 - DNA, 120 bp, Artificial Sequence
  ENSG00000287735_3 (sequence is synthesized)
tgcaacttcctacaaggtttgtcatctgtttcggagtaattaggcctttgtacatttcctaaaatatcttctgataactttaaagtggtaatttaattttggtataaaccagttccaaaa

SEQ ID NO: 892286 - DNA, 120 bp, Artificial Sequence
  ENSG00000287735_4 (sequence is synthesized)
aaaggagatcttcatgtgtgaaccatatactccctaacatctgtttttggctgtttgagccttctgtgtgaattctggttttaactatgccaaatgtagaaatattaatacaaaaaatag

SEQ ID NO: 892287 - DNA, 120 bp, Artificial Sequence
  ENSG00000287735_5 (sequence is synthesized)
tacaactcatttaaagttgaaaaatgcaaaatattctaatttgactagtacctaactttgtgatcctagccaattccctttgcactgcaatatgatcacttcctggagatgtatctaagt

SEQ ID NO: 892288 - DNA, 120 bp, Artificial Sequence
  ENSG00000287735_6 (sequence is synthesized)
taataaatacttaacattaattcattttaacaacatgtactgcaaatatgctacaatttatccattcttctaatagacattgattgcgggtttttacaattaaaaacaatactgcaatga

SEQ ID NO: 892289 - DNA, 120 bp, Artificial Sequence
  ENSG00000287734_0 (sequence is synthesized)
agtctgtattttcaactcttcggctctagaccaccagcactgaggacgatgaaaattttttggatagcattgaagagttcaaaaggtcgtatgaagtgttttgcctgaagcttcagtgaa

SEQ ID NO: 892290 - DNA, 120 bp, Artificial Sequence
  ENSG00000287734_1 (sequence is synthesized)
gtaaaattggtttcttctgagaataaggttgtttaggccaccatccctggaacaaatattatcccttcctgcaattccattgtctgccggtgttaccggcagagctactttgagtgctgg

SEQ ID NO: 892291 - DNA, 120 bp, Artificial Sequence
  ENSG00000287734_2 (sequence is synthesized)
gcaggagctgaagccacgatgggcagggggttcattctggggagtggctgggaggggagattcttagacctctgagcctgcagctctgagctctgagttgaagctctgctctccaaagca

SEQ ID NO: 892292 - DNA, 120 bp, Artificial Sequence
  ENSG00000287734_3 (sequence is synthesized)
agggtggctcagaagcgctttggggtcatctgtcttcgccagcctcacctcactcttattctctgaggatgtttaggaagaaatgaaaattatgtggcttagtctcagcatagcaagaac

SEQ ID NO: 892293 - DNA, 120 bp, Artificial Sequence
  ENSG00000287734_4 (sequence is synthesized)
tgtggggaagatcattaactttctaacctgatttcttctgtgacttcagaggcttccttaacctccagttagaaatttttatcaggcatatttgattattatgtatcaagtatctgcctt

SEQ ID NO: 892294 - DNA, 120 bp, Artificial Sequence
  ENSG00000287734_5 (sequence is synthesized)
gtgccattcgctgtttgaggcagttagaaacagtgatgggcatgtcagatgaaaccctgctctgacggacctaaaatcctagtgagtgataattaatatttatactttatcttttcactt

SEQ ID NO: 892295 - DNA, 120 bp, Artificial Sequence
  ENSG00000287734_6 (sequence is synthesized)
ttattcttcaaaaattatgatagattctctttgtattttaaaaatattttggtggtatataatagagtcagtttcttcaacagagctacaagcttgatccccttgttgggaaatatatgt

SEQ ID NO: 892296 - DNA, 120 bp, Artificial Sequence
  ENSG00000287734_7 (sequence is synthesized)
catgatccagtcacctcccaccaggtccttcccccaacgttagggattacaactcaacatgagatttgggtgggacacggagccaaaccatatcagttgttaactcagctctcgtgtgct

SEQ ID NO: 892297 - DNA, 120 bp, Artificial Sequence
  ENSG00000287734_8 (sequence is synthesized)
ttgttaactcagctctcgtgtgctatatcctttccttcgtgggatcccattaaaaacattaaatgaagaaacataacagccaagggaaagatggaaggacccttccacggaaaaaaaaaa

SEQ ID NO: 892298 - DNA, 120 bp, Artificial Sequence
  ENSG00000287734_9 (sequence is synthesized)
tggaacaaatagcttgaaggaaaatgagaaggaaaacctgttgaaggatgacaccgatctggaagaggatgcccagagtgtaaagaaggagatggggatgggcaacagggctccagaggg

SEQ ID NO: 892299 - DNA, 120 bp, Artificial Sequence
  ENSG00000287734_10 (sequence is synthesized)
ctaccaggctgtgcgttcacaggtcggaggagcagaaaatgcgtccatcgcaacaagaagggggactactgtgagtggaaagcttgctcatggagagggagacattcactcctctcactg

SEQ ID NO: 892300 - DNA, 120 bp, Artificial Sequence
  ENSG00000287734_11 (sequence is synthesized)
tcccctatccctgctgtcccaaggagagagcaccccagttatgtgattgagtgtagtattttttaaatgtcagtactggtttgatttttaactaagtaaaaatggaaaattaaacaaaaa

SEQ ID NO: 892301 - DNA, 120 bp, Artificial Sequence
  ENSG00000287733_0 (sequence is synthesized)
gggacacttccggctcccggcagctgcctcagtcggaggtccgcgggcgccccatgctggcagtggtaatgccgccggctggcatccggttggctgcgcgctgggaacgccagcgaggca

SEQ ID NO: 892302 - DNA, 120 bp, Artificial Sequence
  ENSG00000287733_1 (sequence is synthesized)
gcgccaccggcttgaggagggtgaaagttcaattcttggcccctgaagttagcggaagggaacgggcatgttttggaaaggcccgccgggaattccctcagaaaccaggcgaagctccct

SEQ ID NO: 892303 - DNA, 120 bp, Artificial Sequence
  ENSG00000287733_2 (sequence is synthesized)
gctgggccaggcccccctcgtgtgcttgaggaggatgggagcccggcctcggtttgttatcctaattaagtggaaaattaagaaaataatagaatagcctccgtgtctgagaggttttgt

SEQ ID NO: 892304 - DNA, 120 bp, Artificial Sequence
  ENSG00000287733_3 (sequence is synthesized)
ctgtggcttgtcctgctacagtccttggttccctgaccaggaagcgaggtgactgacaagccctgtggagcgtccctgcagaggactccggccagcctgactgacgcaatccaaagagcg

SEQ ID NO: 892305 - DNA, 120 bp, Artificial Sequence
  ENSG00000287733_4 (sequence is synthesized)
ggaactggcacttgaagtccagacatctgaagcttgtcaagactagtttttggaacttgccccactccatgtgagtggaagcatggcctgatcacccacggtgtgcctgtattgacatct

SEQ ID NO: 892306 - DNA, 81 bp, Artificial Sequence
  ENSG00000287733_5 (sequence is synthesized)
gcatggcctgatcacccacggtgtgcctgtattgacatctttgttctggttttgacttggcttcgtgagtggaagcgtggc

SEQ ID NO: 892307 - DNA, 120 bp, Artificial Sequence
  ENSG00000287733_6 (sequence is synthesized)
acttgccccactccatctgagtggaaacgtggcctgatcacccacagcatgcctgcatgggcactcttgttctggttttgacttgacttgaattgctggatactttggttttggttttga

SEQ ID NO: 892308 - DNA, 120 bp, Artificial Sequence
  ENSG00000287733_7 (sequence is synthesized)
acttgacttgaattgctggatactttggttttggttttgacttggcttgaattttttggtactcggattttgaatttcgtgattttggtttggtataaacggtaaaagtgtgtgtgccct

SEQ ID NO: 892309 - DNA, 120 bp, Artificial Sequence
  ENSG00000287732_0 (sequence is synthesized)
ggggcatttttcagggctttcaccccaattgccttgctgaacgcctccctcttggtgagctgtttacatggaggtgaatagattctgcagctgtctctttctgtggcctggtaacaaccc

SEQ ID NO: 892310 - DNA, 120 bp, Artificial Sequence
  ENSG00000287732_1 (sequence is synthesized)
cagtgttgttctggacaagaatatgctcactttcaaatcgtggattactctatgacaataaaaaaaattctggtttgcagtttgccagcctctcttgccccagggaacatgcataagtca

SEQ ID NO: 892311 - DNA, 120 bp, Artificial Sequence
  ENSG00000287732_2 (sequence is synthesized)
cagtcttgccccataagactaaactgaactctgtgagcactgccctcctttatgtttttgttagtcctgctctaaatgtggctgtgatggctagagctgcaacattcattttacaaccat

SEQ ID NO: 892312 - DNA, 120 bp, Artificial Sequence
  ENSG00000287732_3 (sequence is synthesized)
gttcctgcaagcagaagagtgaaggcaatatgctaaagactgaaaataaagaaaggatctggacttcaaagatgtcatcaacagctgccaacctctaaatatttgatatgaaaaaaattc

SEQ ID NO: 892313 - DNA, 120 bp, Artificial Sequence
  ENSG00000287732_4 (sequence is synthesized)
taaacaatcccagtagacacacatcaacatgagaaagggggttagggttgagttgtagagagagaaatgcaaggctaaagagcaagagaatacttccttctgtgatcatacttttggaca

SEQ ID NO: 892314 - DNA, 120 bp, Artificial Sequence
  ENSG00000287732_5 (sequence is synthesized)
aggttgcacttctgtgtgacatctaaactgtaggtgtcataccaaggccgtacatggtttctaaaggccagctaatgaagcagccataaacatcacttatctagcacacagaattgatgc

SEQ ID NO: 892315 - DNA, 120 bp, Artificial Sequence
  ENSG00000287732_6 (sequence is synthesized)
tttatccgtttgaccatatgtgactgggcacatgtgttggtgtgcatttttacacaaagctttgtataggccaagacctgggctacaagtaagacatttgggttctatctctggctattc

SEQ ID NO: 892316 - DNA, 120 bp, Artificial Sequence
  ENSG00000287732_7 (sequence is synthesized)
cacttactagatgaatatattactcaggataggctagattgtgctgcaataaaacaataagtgttaaaaataaaataaaataaacaatctccaggtcttagtggcttaaaagagtaaaaa

SEQ ID NO: 892317 - DNA, 120 bp, Artificial Sequence
  ENSG00000287731_0 (sequence is synthesized)
atgtatacatgttcatatatacaaaataatcaaaccaaaacaacaatcacctcgacaaactgtgtttcctttgaattgcttatttttatatatttcatatcttaacaattgtaaatctaa

SEQ ID NO: 892318 - DNA, 120 bp, Artificial Sequence
  ENSG00000287731_1 (sequence is synthesized)
atgataataaaaaatatatttttagcttctttaaagatttcaaattcttgtttttcttctccatttaagacagatgtttatttttatatgatgtctaggttttataaagtccaggtaaga

SEQ ID NO: 892319 - DNA, 120 bp, Artificial Sequence
  ENSG00000287731_2 (sequence is synthesized)
ggatgctttcattttttctttctatatttctcatgatagaataatggaaagtgatcaaaccgggaaatggaagagtttaagcaaacggaatttttttaccaaattattaaaacaacatgg

SEQ ID NO: 892320 - DNA, 120 bp, Artificial Sequence
  ENSG00000287731_3 (sequence is synthesized)
acaggttttcttttttaaaaaaaaatgactgacaaagttagttttgtaaagtatttcttgcaactatttaattaaactcaagtctcatgtagtataattcaattcttatgtagtgtagcc

SEQ ID NO: 892321 - DNA, 120 bp, Artificial Sequence
  ENSG00000287731_4 (sequence is synthesized)
tcttctttgcaagaaagcatcattttagggtaagagccatttctcagatgttcaccttactttctgtagtaaggcttcaacatgcttgtgactgcctataaccctatcttcatctttcaa

SEQ ID NO: 892322 - DNA, 120 bp, Artificial Sequence
  ENSG00000287731_5 (sequence is synthesized)
ggcctgtggatactgaaaacaaaacaatgaaagaacaagacctctgatagatttcatgggcttcttggaggaccaacgtcagtcaatggaagtgtgatgacttatcagaggcttccttgg

SEQ ID NO: 892323 - DNA, 120 bp, Artificial Sequence
  ENSG00000287731_6 (sequence is synthesized)
ttgcagtacagaagatgcaatgccagcagtgctttttcaggagctccctctgaagaagatcatggctcagttaccatggacaccaagaagctatgcagctttttattctttttacttcct

SEQ ID NO: 892324 - DNA, 120 bp, Artificial Sequence
  ENSG00000287731_7 (sequence is synthesized)
atctaatacataggtatatgccagtctgagccaactgtgctattaggaaactaataaatactcctttgcttcctatttaatgagaaaaagcacgacaatattgctcatgccagatcaggt

SEQ ID NO: 892325 - DNA, 120 bp, Artificial Sequence
  ENSG00000287731_8 (sequence is synthesized)
tttgattggtatgtgcttatccttcataaacaaatgtattttatatgaaaaaccacaggggaaatatttttatttattttattagttgtacaaaagccatgttggcaactgaagaaccaa

SEQ ID NO: 892326 - DNA, 120 bp, Artificial Sequence
  ENSG00000287731_9 (sequence is synthesized)
taaaataaaattgtctcatgtggttcttattatggaatcaaatagtaatgtaaaaggcaagcacacaccaatcataattccatctggctgaaagaacaggaaaatgtggctccattttca

SEQ ID NO: 892327 - DNA, 120 bp, Artificial Sequence
  ENSG00000287731_10 (sequence is synthesized)
ttaggaaaaggaggcatatatttcataatgtgttcaaatgtggctctaaaggtactcccagtacactactgcattttgtaccactcatggggtgccatatctactgatgcaggttaatgt

SEQ ID NO: 892328 - DNA, 120 bp, Artificial Sequence
  ENSG00000287731_11 (sequence is synthesized)
aatcaaagtgacttgaaaggagaggactgctgttagccttgcatctgcattaatagagcaccaacagaagctagagcaacatttcttggcattctggaaagaaatgcatgttgaaccagt

SEQ ID NO: 892329 - DNA, 120 bp, Artificial Sequence
  ENSG00000287731_12 (sequence is synthesized)
aagcaatatgtatagcccttgcaatatacacttggcatatttgcagcaagtaagttgccattcatgtaaccaccaaaaatacattccagaatgtttactcttttcagtaagcagataata

SEQ ID NO: 892330 - DNA, 120 bp, Artificial Sequence
  ENSG00000287731_13 (sequence is synthesized)
ccattcaagctctggacttaaaagattgcatgcataaatattttctaaattcctttagtgctgtttttggtttatcttcaaggaaatataagggtagctattatcaatagaaggtaggta

SEQ ID NO: 892331 - DNA, 120 bp, Artificial Sequence
  ENSG00000287731_14 (sequence is synthesized)
ttcatttgtaagaggttgggtcagcaagacactgctctattgaatcatatctgggacaacatggagtggtcatttgggcctctgggaagtgtggcatggaagagtagttctttattaaga

SEQ ID NO: 892332 - DNA, 120 bp, Artificial Sequence
  ENSG00000287730_0 (sequence is synthesized)
atggtaaatagaaagacggccctgaggacatagcgtttaggactgaaagcagagagtactggattcagaggaaatgccttaattgggagatttgtgtccttgttgtcaggtctcactggg

SEQ ID NO: 892333 - DNA, 120 bp, Artificial Sequence
  ENSG00000287730_1 (sequence is synthesized)
gaggcaagaagaagaaagatatggattcctgacatttgttgagaggatggttggctttctcctcttagattttagagagccgaaggaaagctttaccttcaacttctgaagatgtgttaa

SEQ ID NO: 892334 - DNA, 120 bp, Artificial Sequence
  ENSG00000287730_2 (sequence is synthesized)
aagtcactgacaagagtcaaattaataacagaaaaggcatacaaatttaattgatcatagttttacataacacaggagccttcagaatgaagatccaaagatacagaggaattgtacatt

SEQ ID NO: 892335 - DNA, 120 bp, Artificial Sequence
  ENSG00000287730_3 (sequence is synthesized)
ttaatgcttagggtcgacaaaatatggacagccatgtacaaatacgattgggcaaaaagagaatgatctactgccaatagagttgggaaacccagcaaggcctgtctgtctagactcctc

SEQ ID NO: 892336 - DNA, 120 bp, Artificial Sequence
  ENSG00000287730_4 (sequence is synthesized)
ttggcctcactgcgcagcattcgttcctccttggtgtgtggcaggaccctctatggaaagagggtgttatgacctacaattaaaaaagacttggagctaaagcagctgtcaacctggaag

SEQ ID NO: 892337 - DNA, 120 bp, Artificial Sequence
  ENSG00000287730_5 (sequence is synthesized)
taccaatggacactgacaaaacaataaacaaatctccaacaaaagcctgttctctctagccaaaaatccaagacagtcttgagaagactagtaagacagaaaacttttagacaataacag

SEQ ID NO: 892338 - DNA, 120 bp, Artificial Sequence
  ENSG00000287730_6 (sequence is synthesized)
ctctactccagccagccacaacaacaataacaaaaaaactgtggctctaccccacccatggcaaaagccaagtggggaagccaagctttccactcatgcctgactgtgacaaggcactca

SEQ ID NO: 892339 - DNA, 120 bp, Artificial Sequence
  ENSG00000287730_7 (sequence is synthesized)
tgagtaaggaattggtagtttcattctcactgggtggtaaggagtccaccttactgttagcagagtccacatgactttagtagtgttggtagttgtggtggtattattagtagaggccat

SEQ ID NO: 892340 - DNA, 120 bp, Artificial Sequence
  ENSG00000287730_8 (sequence is synthesized)
ttagggagccatgacaaggcactcatatccatcgcagtcagtgagttaccagcagacacctcgtgtggagttggaagtcccaaccctagcagttggagacagactccctgctacaacttg

SEQ ID NO: 892341 - DNA, 120 bp, Artificial Sequence
  ENSG00000287730_9 (sequence is synthesized)
agagtcaacagaggccaaataaggaacctggagacctgggcatttatcccacagaaacggaacttatacccacccaaaaggttacccaaaaatatgtgtagtagttttaattatagtagt

SEQ ID NO: 892342 - DNA, 120 bp, Artificial Sequence
  ENSG00000287730_10 (sequence is synthesized)
cagtaactggaaacaatccagatgtccttcaaaaagtgaatggttaagcaaactgtggtacttccatttcttgggaaattactcagtaatttaaaaaaaattgttaatgcaacaacctag

SEQ ID NO: 892343 - DNA, 120 bp, Artificial Sequence
  ENSG00000287730_11 (sequence is synthesized)
atgactattcagagatttgtgctgagtgaaaaaagcaatcccaaaaggttgtatcttgtaattccatttatgtatttttcctgaaatgacaaaactgcagaaatgtagaacaaattagtg

SEQ ID NO: 892344 - DNA, 120 bp, Artificial Sequence
  ENSG00000287730_12 (sequence is synthesized)
gctgccaggtgttaaggagaaggtgaagataagagaaaaatgtgtgcagctataaaagtgcaacatgagggatccttgtggtagtgaaactattcggtatcttgcttatatcaatgtcag

SEQ ID NO: 892345 - DNA, 120 bp, Artificial Sequence
  ENSG00000287730_13 (sequence is synthesized)
catgttacttgtgattttgtggtgtttgatttttttggcgttgttatagtttttccattggtggatattgggtgaatagcccatgagatatatctgtattatttcttccaactgcatgtg

SEQ ID NO: 892346 - DNA, 120 bp, Artificial Sequence
  ENSG00000287730_14 (sequence is synthesized)
tgagaggatggttggctttctcctcttagattttagagtgagtgtagagcttttcagagctcttaaaggttcttaagtgtatgagtatttgctgttagggcatttgcagaccctgacgaa

SEQ ID NO: 892347 - DNA, 120 bp, Artificial Sequence
  ENSG00000287730_15 (sequence is synthesized)
aaggagcccagccagaggagaccaggatcgtgaactgcggtagacgaggctcgcccagcacagaaagatctaactccttgtgatataccccatggatattcaaacaatatggggtattat

SEQ ID NO: 892348 - DNA, 120 bp, Artificial Sequence
  ENSG00000287730_16 (sequence is synthesized)
tggactattatcataatatggatattttagatcacataatttgggttgatgctgtgttattttagactcctaaaattgcttttaaaaatgtatagatatagcacatgaaaaattgaagag

SEQ ID NO: 892349 - DNA, 120 bp, Artificial Sequence
  ENSG00000287730_17 (sequence is synthesized)
gaaaatgactccttataatacaaagatttttataccatcagttaatctcactaaaggttaggttggcatttactaatattttttaaaaatatgtaagactaggaaatgtgaaagggcttg

SEQ ID NO: 892350 - DNA, 120 bp, Artificial Sequence
  ENSG00000259943_0 (sequence is synthesized)
atcaacattcttcccccacgtcttgacgctgggttccggcctagggttctggctttcctcctgggctagtgaacgcggcgaagtcctcctctttctaatctccagagccgcagttccatc

SEQ ID NO: 892351 - DNA, 120 bp, Artificial Sequence
  ENSG00000259943_1 (sequence is synthesized)
ctctgggtcagcggcttaccctgactgggctgcggtatctgccttccttcccccaacaaggcgacaggtagtcggggctggggccggaactgactgagtgggccgcaactgactgagtgg

SEQ ID NO: 892352 - DNA, 120 bp, Artificial Sequence
  ENSG00000259943_2 (sequence is synthesized)
gccgcggctcccgcctgaggaggctaggaaggactgaacagcagccgacttcccaggctctaaaaatcgtgcctctgagttagagctacctcaaaagcaagaccaagcatgagaaatgga

SEQ ID NO: 892353 - DNA, 120 bp, Artificial Sequence
  ENSG00000259943_3 (sequence is synthesized)
gtcttttggccagtattggggtgttcggaattcaagcgtatgagagagtggacggtagcgttgagaattttcatttgaagatctcgtcttaaccaccccaagtgtagtcagaggcggcgt

SEQ ID NO: 892354 - DNA, 120 bp, Artificial Sequence
  ENSG00000259943_4 (sequence is synthesized)
tttccctgcgagagtgccctggaacaaagcaaggatagcgtgggttagacatacctgaaatgaaagcgtcttactttatctaggtacatatttgcgtcagtaaggcgcaacgccatttct

SEQ ID NO: 892355 - DNA, 120 bp, Artificial Sequence
  ENSG00000259943_5 (sequence is synthesized)
ctcttggaattcagaagtgaaatatggtgactgggacgcctgtacattgctttgacttaaaaattgaagtccattattctgaccgaaagttaatctgatgattaattggttaaacatact

SEQ ID NO: 892356 - DNA, 120 bp, Artificial Sequence
  ENSG00000259943_6 (sequence is synthesized)
gttgaaattaatatcttgaatttctcaaccctgcctaaatgcctctgagagtaattagtataattaaaagtcactagagaaagtgaatgactctaataacaggataacaaattcttttca

SEQ ID NO: 892357 - DNA, 120 bp, Artificial Sequence
  ENSG00000259943_7 (sequence is synthesized)
agtcagatggtttccagttctttgctttcaacaaaattaatggtggcccatgaattgtcagctgatgaaggaacactatttggtttttggcatgcaactcggaaagaaaccaaacgattg

SEQ ID NO: 892358 - DNA, 120 bp, Artificial Sequence
  ENSG00000259943_8 (sequence is synthesized)
attgacatgcttacaacaaaactactagcattctcacctatttatgtaaaaccatttctcagcacttgtatctgtgaaaacaacagaattgaaaatgaaccctgttaatctaccagtagg

SEQ ID NO: 892359 - DNA, 120 bp, Artificial Sequence
  ENSG00000259943_9 (sequence is synthesized)
aactattcatccagataaatgaattaattggtgggtcagccccatctatctcactaagagatgtgttcccaatagaatttcaccttttataactgtgtgttatcaatatttgcaatcgtg

SEQ ID NO: 892360 - DNA, 120 bp, Artificial Sequence
  ENSG00000259943_10 (sequence is synthesized)
tcattttgatccattatatactaaagatgattgtgatgattactcacttcagaagaattccagcgtagagccataaagttacacgaaattttttaaggtttactacatatgtcatatttt

SEQ ID NO: 892361 - DNA, 120 bp, Artificial Sequence
  ENSG00000259943_11 (sequence is synthesized)
tattgcgaagaagtgatcaagaaaaggttgttcaaacatcaaagtactatatttgaataacattttttgttagagtacaatctaaatatgttagagataataaaagaacaatgttgaaga

SEQ ID NO: 892362 - DNA, 120 bp, Artificial Sequence
  ENSG00000287739_0 (sequence is synthesized)
acttgagcctctgggagtacagcccagcagacaccttgatttcagactctggcctccaggatggtgagagaagaaacgattgtcttttgttcatttgtttttgagagagggtcacagctt

SEQ ID NO: 892363 - DNA, 84 bp, Artificial Sequence
  ENSG00000287739_1 (sequence is synthesized)
actgccattgcctcccgagtagctgggagtacaggtgtgcaccaccacaccaggtcatttttgtatttttttgtagagatggag

SEQ ID NO: 892364 - DNA, 68 bp, Artificial Sequence
  ENSG00000287739_2 (sequence is synthesized)
caagcagtcctcccgcatttctattgttttaagccatcaagtttgggtggcatcatttgtcacagctg

SEQ ID NO: 892365 - DNA, 120 bp, Artificial Sequence
  ENSG00000287739_3 (sequence is synthesized)
ttaagccatcaagtttgggtggcatcatttgtcacagctgccacaggatactaacacacccagagacagaagacgggaggacataactgcattaacactgagctaggatctgcacgcctc

SEQ ID NO: 892366 - DNA, 120 bp, Artificial Sequence
  ENSG00000287739_4 (sequence is synthesized)
aggactctgctcccaggactacggacctctgcgccgagtcagaagaacagtttcaggaacccgcttggatagtagggagtggaaatgaccccaggtgactgcagcgggactcctggaagg

SEQ ID NO: 892367 - DNA, 120 bp, Artificial Sequence
  ENSG00000287739_5 (sequence is synthesized)
cttccacccatccctcccctctgagctgtgggtcccgggcccgcgggtcctgcccacctctcccggaagacaggtacctcgtccaatgggaaatatggcacagagtcctcatcgccctgc

SEQ ID NO: 892368 - DNA, 120 bp, Artificial Sequence
  ENSG00000287739_6 (sequence is synthesized)
tctatgggcttccctccaaatgcaacattgacagtgctggtatagatgagccttggaacccgccggcgaacacagactgcagcagcaggtgcacatagcaacaaataaacacacacacac

SEQ ID NO: 892369 - DNA, 120 bp, Artificial Sequence
  ENSG00000287739_7 (sequence is synthesized)
atgcaaagacacagacacacacgggacacaagtgagcatagagtcggctgaggaggtgtcatgcagatctctaccaagttttcaacacacaacttggacccccaggaccctcccagaatc

SEQ ID NO: 892370 - DNA, 120 bp, Artificial Sequence
  ENSG00000287739_8 (sequence is synthesized)
tacagctgttcaggagggaagagtctcctgcccttaacttagggtgcaggtcaagttcctgctctgtgggcccctgggagccaggtctgctccttattctttctcattgtggcttggacc

SEQ ID NO: 892371 - DNA, 120 bp, Artificial Sequence
  ENSG00000287739_9 (sequence is synthesized)
cctgggctaccttgccagagacaggtcagaagaaggtctcactggatggagacttagaaaaagacactctagaatcaaagacatacgggataaggcaggacatgcccaggcagcccacac

SEQ ID NO: 892372 - DNA, 82 bp, Artificial Sequence
  ENSG00000287739_10 (sequence is synthesized)
acatacgggataaggcaggacatgcccaggcagcccacacatgggtctgcgattttggtgctttagtaactttttatttatc

SEQ ID NO: 892373 - DNA, 120 bp, Artificial Sequence
  ENSG00000287738_0 (sequence is synthesized)
gaggatttaattctgtaaaagcagtcttctctgcaaaatgggaatagaactgtctaactcacatggttattgttggtgctagaacaacaccaacaacattacatcctgagtcccagaaca

SEQ ID NO: 892374 - DNA, 120 bp, Artificial Sequence
  ENSG00000287738_1 (sequence is synthesized)
taaatgctaccccgaatgaacttttatagactgtttatagtccatgtgatgacataatagatgatctccctacctgatgtgactggaatggtatggagacagccactctgcaatgttgac

SEQ ID NO: 892375 - DNA, 120 bp, Artificial Sequence
  ENSG00000287738_2 (sequence is synthesized)
tcaaagatccactacattataatgctccaagaagataaggaacacatgtattttgtctacttctgaatatccaagattttaccgggtacctgacatacatgtgacaacgaattacaggtg

SEQ ID NO: 892376 - DNA, 120 bp, Artificial Sequence
  ENSG00000287738_3 (sequence is synthesized)
gaacaacacatagaactgactgtttttttcactatttcacagaactgggatggccgaggatttgataatgggatgtgaatcatccctttgtccagcgtgttcatgatgtctatgttacct

SEQ ID NO: 892377 - DNA, 120 bp, Artificial Sequence
  ENSG00000287738_4 (sequence is synthesized)
gtccattagtcacttcatcgttgtccgggttgtcagactgatttcaccttattgtagtgattgtgattctgtggagaaagactcttattggacagctctcctttttgagcaaggttttca

SEQ ID NO: 892378 - DNA, 120 bp, Artificial Sequence
  ENSG00000287738_5 (sequence is synthesized)
atctataaactggctgccagtggatgaagtaccctgtccctctccctgtccaatgtgtgaggccagaggtgaagcaggatcttctgtattgtacatggtgctaaagactactcactagta

SEQ ID NO: 892379 - DNA, 120 bp, Artificial Sequence
  ENSG00000287738_6 (sequence is synthesized)
ggtattgtgttgtgagctaagtgactctctatatgatacttttgaacatttatggaaaaataaggaatatagtgatgctggttggttgctcctaatgttactggatatgtggtggaaaaa

SEQ ID NO: 892380 - DNA, 120 bp, Artificial Sequence
  ENSG00000287738_7 (sequence is synthesized)
aaagaaatgagttcagttcagggagttgaattcccaggtgaagaatcacaaatgacctaagagcttccaggtgtgccctgaaggacaaccttatctccaatagttacagggctgaaaatg

SEQ ID NO: 892381 - DNA, 120 bp, Artificial Sequence
  ENSG00000287738_8 (sequence is synthesized)
ctgaaagctgaatgcagaacctcatctgatgattggctaaattacagcacaagttgaaatcccagcttcccagggtgtctactgttaaagtgagggcattgattgcgaaagaatgggatc

SEQ ID NO: 892382 - DNA, 120 bp, Artificial Sequence
  ENSG00000287738_9 (sequence is synthesized)
cataatttgagatggggccatgtgggaagaccctgatgaacctggagttactgagcccctaaattctgatgaaccttctttgccagagggagatgtctccccagccccagtagaagaggc

SEQ ID NO: 892383 - DNA, 120 bp, Artificial Sequence
  ENSG00000287738_10 (sequence is synthesized)
ctccccagccctactgacagcagcctccccagtgtcagaggtattggcctgtccacctctgtctgaggggtttaaccctgcattgcttgagaaaatggtaagggcctcccctgagagaac

SEQ ID NO: 892384 - DNA, 120 bp, Artificial Sequence
  ENSG00000287738_11 (sequence is synthesized)
tgccatgcaagacaattctgattctccgcaggactcaccatgaccactcctctttgcttctagacctatgactggactcaagtcccagcagggccctaaaggtgaggtacaaagtatgac

SEQ ID NO: 892385 - DNA, 120 bp, Artificial Sequence
  ENSG00000287738_12 (sequence is synthesized)
ccataacagggcgcactgaattccaaaacaactacttgaggttattagttcatacaagcagaaatccaggaaacatgtatgggaattatggatgtggaacatatgtgggaattaagggtg

SEQ ID NO: 892386 - DNA, 120 bp, Artificial Sequence
  ENSG00000287738_13 (sequence is synthesized)
tggaaaaatggtagaaggaacataaaattggatcaggctgaatttattgatatgggctcagtaagcagagattctgcattcaatattgtggcttggcagaaagggctctaactggtaggg

SEQ ID NO: 892387 - DNA, 120 bp, Artificial Sequence
  ENSG00000287738_14 (sequence is synthesized)
atggtccaccataaatgaattggaaatgcctgacctcccttagtttaatagagaggaagaaattcaaaggcttaaggagattggaagattggagtggatttgtcatttaccttactcacc

SEQ ID NO: 892388 - DNA, 120 bp, Artificial Sequence
  ENSG00000287738_15 (sequence is synthesized)
tatgctgaaagggtccagaagacatacctttcaccaatactttgagaaatactttgaataaataaataaataaatgttgaggagatacccagcatctttgtcaagctttgtggttgctct

SEQ ID NO: 892389 - DNA, 120 bp, Artificial Sequence
  ENSG00000287738_16 (sequence is synthesized)
tttttgtaggctccacctcacaataggaaccacagtcattcgactggaaaacctaaatgcaatgggattttctagatcccattttttttctccagttctggaatgcataattaaaataga

SEQ ID NO: 892390 - DNA, 120 bp, Artificial Sequence
  ENSG00000287738_17 (sequence is synthesized)
catatttagcaggcagaagtcctctattcatcccctgacctgtgaagtgagggctattatgatagaaaaagccaaatggaagtcattagaactacctctacttagaaaaataacaaatca

SEQ ID NO: 892391 - DNA, 120 bp, Artificial Sequence
  ENSG00000287738_18 (sequence is synthesized)
gaagcaattctagatcccagaatatggcaggaatcaagtgatggtagtggcacttaaccaccaaaggcaaagtgggcatggttattataatgaacagcagagtcaaagcagcaaccagaa

SEQ ID NO: 892392 - DNA, 120 bp, Artificial Sequence
  ENSG00000287738_19 (sequence is synthesized)
tagtctgactccaggagacgtatggtgttggctagttaatcatgatgtttctcaaagtgaaatagataggaagcctaccaaattcttaattgatctgtataagcagaacatttctaggcc

SEQ ID NO: 892393 - DNA, 120 bp, Artificial Sequence
  ENSG00000287738_20 (sequence is synthesized)
aaaaaacaaaagtctaactcaaatcataaaaacagagagatgtggcccctcaatcaattcccagatgagccagtttacagacctggaaccttatgagtgaaggggatgttaggacccctg

SEQ ID NO: 892394 - DNA, 120 bp, Artificial Sequence
  ENSG00000287738_21 (sequence is synthesized)
gaagaaccacagcataatactaaaaatttatactgttaaatctttctcctatccttcttcaaagggacctatggccttttacaaggataactgtacactggggaaaagcaaataatcaga

SEQ ID NO: 892395 - DNA, 120 bp, Artificial Sequence
  ENSG00000287738_22 (sequence is synthesized)
ccttttgggtctactggacgctggatttgtctatccactgattacaggagacctaaaacatcacagtggtcttctcattagagtaggggcttgtggaagtcagatgatcaataaagtttt

SEQ ID NO: 892396 - DNA, 120 bp, Artificial Sequence
  ENSG00000287738_23 (sequence is synthesized)
agctcagatttgtctcacagtgagtccaatgggtccttgaacctatcctgtgtttttctttttctccagttctggaatgcataattaaaatagacatatttagtagcaggcagaattcct

SEQ ID NO: 892397 - DNA, 120 bp, Artificial Sequence
  ENSG00000287738_24 (sequence is synthesized)
ccattcagtctctgacctgtgaagtgagggctattatgatagaaaaggccaaattgaagtcattagaactacctctacttagaaaaatagcaaatcagaagcaattctacatgcagaaat

SEQ ID NO: 892398 - DNA, 120 bp, Artificial Sequence
  ENSG00000287738_25 (sequence is synthesized)
tagtgctactctcagaaacttaaaagatgcaggcatggtgatttccaccatatctccattcaactatcctgtttggcccatgatagacaggtcttggagaaagacagtggattatcataa

SEQ ID NO: 892399 - DNA, 120 bp, Artificial Sequence
  ENSG00000287738_26 (sequence is synthesized)
acctaaccaagtggtgactccaattgcagattctgtaccagatatggttccatttattgagaaaatcaactatctcctggcactgatatgcagctattgatctgggaaatggctttttca

SEQ ID NO: 892400 - DNA, 120 bp, Artificial Sequence
  ENSG00000287738_27 (sequence is synthesized)
tcatccctgtccatgggaactagcagaagggaccagaaaagcagtttgcttttagttggcaaggccagcaacatactttcactctcctacctcaagggtatgtcaactctacagttctat

SEQ ID NO: 892401 - DNA, 120 bp, Artificial Sequence
  ENSG00000287738_28 (sequence is synthesized)
gtcataatttagttttcatggatcttgatcacctttctctcccacaagatatcacactggcccattacattaatcacattttgctgattggacctggtgaatgagaattagcaaccactc

SEQ ID NO: 892402 - DNA, 120 bp, Artificial Sequence
  ENSG00000178130_0 (sequence is synthesized)
aatgcgcatgcgcaaggagagagccgcttctccccatcacagcgattcccagggttgtcgtagaaaccactccctgaggcttcgcaaagcaggagccctccgtagcagggcttcggtgtc

SEQ ID NO: 892403 - DNA, 120 bp, Artificial Sequence
  ENSG00000178130_1 (sequence is synthesized)
ggggctccgaggctccggcctgacttctccacggggtacacaggaacgtctccggacgccaggacctgaaatgggccgactaggatgacgaaaccacaggcagagtccggggaagcagcg

SEQ ID NO: 892404 - DNA, 120 bp, Artificial Sequence
  ENSG00000178130_2 (sequence is synthesized)
agctcactgtcctgcaggagaggagcaggcccacgtccaagaagatggctgtatgttttcacggctcttctctgagaagtgaagccacaccacgatacagtcttgaagaggaagccagga

SEQ ID NO: 892405 - DNA, 120 bp, Artificial Sequence
  ENSG00000178130_3 (sequence is synthesized)
atgggagatggcaacaagccctgtcatggtggcctctctgaacaagttacccttttggcacccctccccttatgcccgtggcggtggcacagtgctgtatcctgcctgggctctggcccc

SEQ ID NO: 892406 - DNA, 120 bp, Artificial Sequence
  ENSG00000178130_4 (sequence is synthesized)
tgctctgtcctccctcttactctgtctcccttgtttctgaggggcctagatgcttctaggtctggctgaatgtcttcaaaaaagatcacttcccagtccatcagggagacagttggtgga

SEQ ID NO: 892407 - DNA, 120 bp, Artificial Sequence
  ENSG00000285771_0 (sequence is synthesized)
agggtgcatggacaaagaggtgcttgaggaacagtgatcagatatgtgccagcttcagctgtcctagcgtccccatccctaggtaggcactgggaagaagaaaggcgtctggaagtccca

SEQ ID NO: 892408 - DNA, 120 bp, Artificial Sequence
  ENSG00000285771_1 (sequence is synthesized)
tccaaatccccccgccgcccccacctcgcctctctggcttcactgtgaagcgggtcaactttttccaagggcaggagaatgtggttccctgttgcttgaggggctctgcaggccgaaggg

SEQ ID NO: 892409 - DNA, 79 bp, Artificial Sequence
  ENSG00000285771_2 (sequence is synthesized)
gtggttccctgttgcttgaggggctctgcaggccgaagggccttgctacattgtccaggttggtctcgaactcctgagg

SEQ ID NO: 892410 - DNA, 120 bp, Artificial Sequence
  ENSG00000285771_3 (sequence is synthesized)
gcctagactgtttgatgatttctctgctggctccccgtctcacactgttgctaggacgtttctagaccacagttccggtgcattcacggatgccctcaagaaccttcaacggctcccacc

SEQ ID NO: 892411 - DNA, 120 bp, Artificial Sequence
  ENSG00000285771_4 (sequence is synthesized)
ccccttccagccgtagcccacaccactctgatgtgatgggacaccccgtggccagcttccctgtgccctgagcttcttcctggccccgggccggcgacgctcctccaccctgctgcaacc

SEQ ID NO: 892412 - DNA, 120 bp, Artificial Sequence
  ENSG00000285771_5 (sequence is synthesized)
tgcagaaatccttccaggggcctcgttctataaattctgtctacatgtccccaagcagcagtgccccccacctccaaatgcccttgatgctctgggcttgccactccatttaacagtgtc

SEQ ID NO: 892413 - DNA, 120 bp, Artificial Sequence
  ENSG00000285771_6 (sequence is synthesized)
cttctcggctgttttctccgaagcggctggagggcagagtctgtgtctcatttgcctgagatttcctcccctgctgagctcagggcctgcaaatatttgctgggtagacatggatggaca

SEQ ID NO: 892414 - DNA, 120 bp, Artificial Sequence
  ENSG00000285771_7 (sequence is synthesized)
gcctgaccaggacgcctcctgctcccagcactgcccctccccgtctggggtcctccttccgagtcatctggatacgccagcaagcctagattctcatctgcctgccggactccccggact

SEQ ID NO: 892415 - DNA, 120 bp, Artificial Sequence
  ENSG00000285771_8 (sequence is synthesized)
ttttcagagatcattgcaaagctcaccgccataaagccaatctgcaaacacttttcttgcttctttttttaacctcaattaaacacactaaaatacataaatgagtaaataaataaataa

SEQ ID NO: 892416 - DNA, 120 bp, Artificial Sequence
  ENSG00000285770_0 (sequence is synthesized)
aaaatacaaaaattatccaggtgtggtggtagatgcttgtagtcccagctactcaggagtaaaaagggagaaggcatcatctcagtaggcatgatgagctcagagcccctgaagttgcca

SEQ ID NO: 892417 - DNA, 120 bp, Artificial Sequence
  ENSG00000285770_1 (sequence is synthesized)
gccaatgcccgggatgtgctgagttcctgtaccacacggagcagggcctattacagtctgccatccagataggcctagggcaaagccccttgggaaacaatcccagatgaccctgaaggc

SEQ ID NO: 892418 - DNA, 120 bp, Artificial Sequence
  ENSG00000285770_2 (sequence is synthesized)
gctccaacagacatcctccctgcaatgagcaatgctgtgctgtgccgctggtctgggaatcccaaggggaataggaggcctgacccaaaggcaccgttggtctggtagagagattagacg

SEQ ID NO: 892419 - DNA, 120 bp, Artificial Sequence
  ENSG00000285770_3 (sequence is synthesized)
tggcacacaaaagttaaaagaaaggcaaatatggtcatcgccatatgagtggaacaaacaaccagaagagttcagaggagggagaggttagttctgcctaggataagaggagggtgcttg

SEQ ID NO: 892420 - DNA, 120 bp, Artificial Sequence
  ENSG00000285770_4 (sequence is synthesized)
gaaaaggaaggtaggaacgatcagagaaagtagcaactgagctagcctttgaaggagggtagtactgacccagagtggatggcgagaagcttactaaggggagtagaggaacatgaggca

SEQ ID NO: 892421 - DNA, 120 bp, Artificial Sequence
  ENSG00000285773_0 (sequence is synthesized)
ttttttttttttttttttaaaacagcatttaaatgttaaacaagcctggacagctacagacaggcaacaggcataaaagaagcaggcttaaaaaaatttttttatttttggtgtgtttgt

SEQ ID NO: 892422 - DNA, 120 bp, Artificial Sequence
  ENSG00000285773_1 (sequence is synthesized)
tcattttccctgggatttctgtctttagaaagataatatcaatttcatctttagtaacctggagttttggcaaagtgtgctttctggaattttgaatggtaatatctgtcgtttctctgc

SEQ ID NO: 892423 - DNA, 120 bp, Artificial Sequence
  ENSG00000285773_2 (sequence is synthesized)
ttgacacagctttatttaaatagctttaaaattgagactcctctggcatgactcttcctttaaaatccatataatttcatagtacaagtgctacctttcatatatggacaaggtgccact

SEQ ID NO: 892424 - DNA, 120 bp, Artificial Sequence
  ENSG00000285773_3 (sequence is synthesized)
gactttcttgattttttactagttgattcgtctgtaccctctcacgaggacccttaaaaacatgcctttcgaaggtgttagccaaagtgaggggcagaaagtttagccaagggacagagt

SEQ ID NO: 892425 - DNA, 120 bp, Artificial Sequence
  ENSG00000285773_4 (sequence is synthesized)
ttgtctttgcaaagcaaactggtgtgttccagacagagtctgaaaccctggctctccaggggaatcatcgcaacagagttaatatttattggctattgagtgtgtgccaatgagtcccaa

SEQ ID NO: 892426 - DNA, 120 bp, Artificial Sequence
  ENSG00000285773_5 (sequence is synthesized)
attttctgtggaatgactcatttcagccttgccacaactcctctattttacagccagtgaaactgaggctccaagagtttaggtattttattgatctaaggtcaggaagcagaaaagact

SEQ ID NO: 892427 - DNA, 120 bp, Artificial Sequence
  ENSG00000285773_6 (sequence is synthesized)
gcgggaatctgaaacaagccatctgtctctagagcccttgctcttgaccttttcccaacaaacatgatctaaaataaaacattaatcatattagcatgtgattattacatagtttgattt

SEQ ID NO: 892428 - DNA, 120 bp, Artificial Sequence
  ENSG00000285773_7 (sequence is synthesized)
ttaaatggttcaaactattttcacaactgttacctcttttgctccagaggcatgatggtaactaaaatcttggaatgtgtcttttcgtaaagattagatttggaaaagacacacaagaaa

SEQ ID NO: 892429 - DNA, 120 bp, Artificial Sequence
  ENSG00000285773_8 (sequence is synthesized)
ctcccttttccagtgcaacgttaacggaagccctacttgagcaaatctggtgccccaggagatcacctcagtttattttccttctcccaaagataaatgtaggtggtggggtgttttagg

SEQ ID NO: 892430 - DNA, 120 bp, Artificial Sequence
  ENSG00000285773_9 (sequence is synthesized)
gtttctttcagtaccgcttttatttttctacatttttcctgaacatgatgcaattgatacccttttgaagtttaattatacctccggcgtcacattgcatgaagcattttcctcatggct

SEQ ID NO: 892431 - DNA, 120 bp, Artificial Sequence
  ENSG00000285773_10 (sequence is synthesized)
gtgtttttggaagctaagtgcatggcagtaacagcatgtttatcttggagttgagacttgagaagcaagttcctcccttgaacacgacctgagatatatcacctccccatctgggattcc

SEQ ID NO: 892432 - DNA, 120 bp, Artificial Sequence
  ENSG00000285773_11 (sequence is synthesized)
aaccttaggtacataagggagccaacgcgtcattttaagagacaatgggagtgagaagccattttccattaatttagatgaaagctgatgaggtgaggggcagccatctatcatttctag

SEQ ID NO: 892433 - DNA, 120 bp, Artificial Sequence
  ENSG00000285773_12 (sequence is synthesized)
ggggttttagtactagtatcctcccccaactgcctcccgattcactattctataagtgtgggggtcaagaatggttggcaaatcaccactttcaacaatgtctatttaggcttaaacatg

SEQ ID NO: 892434 - DNA, 120 bp, Artificial Sequence
  ENSG00000285773_13 (sequence is synthesized)
gccctcctgcatcaagttgataatgaacaagttgctaaacagacacatctgtgcttaggagacctgtggcaacttgccggcatggcctagggggccttttgtaattggtcctcgccttcc

SEQ ID NO: 892435 - DNA, 120 bp, Artificial Sequence
  ENSG00000285773_14 (sequence is synthesized)
tttctggcccaagcactggccactccctattctgcagctataccaggcagcctgcacctctttactccagatggggtcaaaggcaagtcatggctacattttggacttccaaggattggt

SEQ ID NO: 892436 - DNA, 120 bp, Artificial Sequence
  ENSG00000285773_15 (sequence is synthesized)
ttcctacttctagcctgcaagtttgagatttagtggttctaggatggatgaggtggtcctgggatgataaccaactcatgcagccaaaccttcaagacacagaggaaattcaatgtcatc

SEQ ID NO: 892437 - DNA, 120 bp, Artificial Sequence
  ENSG00000285773_16 (sequence is synthesized)
atttaaggcaggagacccctccaaatctttcatccatatggatccattattctgggatgccttctttcacttcatctcttgaattataatattaatatattcttccttcaatattcagtc

SEQ ID NO: 892438 - DNA, 120 bp, Artificial Sequence
  ENSG00000285773_17 (sequence is synthesized)
cacggaggcctcccagcatggttttatctacccctcccactaaactatattcaatcattctggctgatagtaggggatcaatatatttgttcaatgaatgaataattctttctggtagag

SEQ ID NO: 892439 - DNA, 120 bp, Artificial Sequence
  ENSG00000285773_18 (sequence is synthesized)
gagcctatttgggaaacaactcaagtcagattacttggtgaatattgaaggcctggaacaagctgagctgaaaatgctccaaatctacttctgaagccagctaccctgtcccatggccat

SEQ ID NO: 892440 - DNA, 120 bp, Artificial Sequence
  ENSG00000285773_19 (sequence is synthesized)
tatcgctctcctggtttgtcctacattcttcaaactctccatatttcagtgctgtgagcatctctgtcggctctggtggtgtcaaaagggcccccaagtagctcccaactcattagttaa

SEQ ID NO: 892441 - DNA, 120 bp, Artificial Sequence
  ENSG00000285773_20 (sequence is synthesized)
acttggccatgactgtagtggagaaaggtgctagtctcttacgttgaagaagtgggatcatgagtagggctaggcccactgtgtggggtctttcatttgtagattttctcatggctacct

SEQ ID NO: 892442 - DNA, 120 bp, Artificial Sequence
  ENSG00000285773_21 (sequence is synthesized)
ctgtgccccaacaacattgtatgcctgactgttttttttttttttttttgtggagacaagggtcttaccatgttgcgcaggcagttctcaaactcgggcagtcaaatgattcttctgtct

SEQ ID NO: 892443 - DNA, 120 bp, Artificial Sequence
  ENSG00000285773_22 (sequence is synthesized)
cagcctctcgagtagcagggactgcaggcacaggccactgtgcccagcttgcctgccttttaaaggggtggaggaatgcttttatgctagtggctgcataggacacagccatgctgggga

SEQ ID NO: 892444 - DNA, 120 bp, Artificial Sequence
  ENSG00000285773_23 (sequence is synthesized)
gaatttcccactcggagacagctctgcatgcaagcaaaggagatggcctccttcatatgagatgagaacggaaactgcttaaaacgagtctctcaccactccgtgcaatgaaattctacc

SEQ ID NO: 892445 - DNA, 120 bp, Artificial Sequence
  ENSG00000285773_24 (sequence is synthesized)
atcaaatccaagtatctgcctcgaggggcttgcaggcctacaatctattaacctctcctaacacattagcattaattagtttgttcaaggacaggtccatttgcagtgtggagaaaggcg

SEQ ID NO: 892446 - DNA, 120 bp, Artificial Sequence
  ENSG00000285773_25 (sequence is synthesized)
cctgaaaggtctgtaattgcggagatgaatagaaacgtgggcagcgtgcggacctaagctcaggccacgatccttctcttgcctgggtttcggcccgtctctttgagacctcagccaagc

SEQ ID NO: 892447 - DNA, 120 bp, Artificial Sequence
  ENSG00000285773_26 (sequence is synthesized)
tctctagctgtggagttttatcctccagttttggatggagagcactcattttctttctgggcccaaatgaagtgtaaatactttaaactgccccccaaagcccggtaggtcaggtgctgt

SEQ ID NO: 892448 - DNA, 120 bp, Artificial Sequence
  ENSG00000285773_27 (sequence is synthesized)
cagtaactaatcatgaagctgatctcccccagtcccagcactcagcatgagggcagcccttcccatttcctcccctgtcccctgcaggaattaatccctcaggccatcacattcccagtg

SEQ ID NO: 892449 - DNA, 120 bp, Artificial Sequence
  ENSG00000285773_28 (sequence is synthesized)
cattttctttttatacttctgtgtgtcacttggggctgtctgccttgaattagagttatttgtgtacctgtgcctggtagcctccccacgacttgacgatttgagcgtctgagtgacagg

SEQ ID NO: 892450 - DNA, 120 bp, Artificial Sequence
  ENSG00000285773_29 (sequence is synthesized)
gccatctttttcatttttctattcctcggagcaccctgctcaatattttacatttaggtactcaatgtgtggtttgaattgaattgaatgcaacaactgggatttagatttgctggatga

SEQ ID NO: 892451 - DNA, 81 bp, Artificial Sequence
  ENSG00000285773_30 (sequence is synthesized)
gaattgaatgcaacaactgggatttagatttgctggatgaaccactaccctgtgtaccctcaaaaatacacgaacttgggt

SEQ ID NO: 892452 - DNA, 120 bp, Artificial Sequence
  ENSG00000285773_31 (sequence is synthesized)
agaccagcctgggcaacatagagagaatctgtctcttttccatcgaggccatcagttactgtcttctaaagagaagggcacgattgcaggtgtcagggatgcaagagtgattaagagaga

SEQ ID NO: 892453 - DNA, 120 bp, Artificial Sequence
  ENSG00000285773_32 (sequence is synthesized)
gagagggggccctgccctcatggagcctcactccagagggtccggcaaagtctaaggccttagaattctagccaaacctactggctgaggcagaagaatgaacaagaagcgtcagccagg

SEQ ID NO: 892454 - DNA, 120 bp, Artificial Sequence
  ENSG00000285773_33 (sequence is synthesized)
ccgctggcccaggcaccaactcacagttgcccaataggattgagctctggggccgtttacaagtccacgtcattcctgtataaaccttagaagtttactgaataaaccttagaataagga

SEQ ID NO: 892455 - DNA, 120 bp, Artificial Sequence
  ENSG00000285775_0 (sequence is synthesized)
agctccaccatggaacacaggtgtgcgtgtgcactcagaagtgatgggccaggtgagcattgggccttcagtgagcagtaaccaggctacctgcagaaagaatgaatgatactggctaat

SEQ ID NO: 892456 - DNA, 120 bp, Artificial Sequence
  ENSG00000285775_1 (sequence is synthesized)
ctgacaagttagaaaaagcttggttaggagagcttctgctgaattctgaaaatggaaaacgctgtggccaagtctgaagtttggggatgtcaagcagaaacttcaaaatgcacaaagggc

SEQ ID NO: 892457 - DNA, 120 bp, Artificial Sequence
  ENSG00000285775_2 (sequence is synthesized)
tagaagactctggtattttctaaacacagatgaatccatgaagaccacctaaggaggaggatgaggtagggaggaggtgcagataaattgcatggccccaacacagccaggctgaaagtg

SEQ ID NO: 892458 - DNA, 120 bp, Artificial Sequence
  ENSG00000285775_3 (sequence is synthesized)
ttggagagggaatgggcagacagcattggccctattgtacggaaggggaaacagaggccaaagggatccaaagaatccactcagtgagctggaagtggcagaggcaggaatcgaactcgg

SEQ ID NO: 892459 - DNA, 120 bp, Artificial Sequence
  ENSG00000285775_4 (sequence is synthesized)
gacccggggtaagaaagaaacatcatagaagctgcagctgagaattcagcagggctcacaatcaatctgtggtggcaaaagatctctctgcatcatcatttgcaagttatctaaaatgtc

SEQ ID NO: 892460 - DNA, 120 bp, Artificial Sequence
  ENSG00000285775_5 (sequence is synthesized)
aaaggtgttcttttgaagtttattacagatcacatgccataaggcccggacgctgggtatttacagcgaggggggaattcccgcacggactttcaaagcccacaaaagaattgagatcat

SEQ ID NO: 892461 - DNA, 120 bp, Artificial Sequence
  ENSG00000285775_6 (sequence is synthesized)
attggtttaaaacaagacacacacacaaaaccccaatttatcattttttacaatttttcccattttgaggggtgggggcggatattgcaaaggaaatttcaagaaggagaaatgaacaaa

SEQ ID NO: 892462 - DNA, 120 bp, Artificial Sequence
  ENSG00000285774_0 (sequence is synthesized)
tgagaagggacagcagcccagccccattcagggacacgtggccctgatttgagctcctgtgacatcacgctccctccacttatcttacatgtcacatctcaaacatttaacattttacat

SEQ ID NO: 892463 - DNA, 120 bp, Artificial Sequence
  ENSG00000285774_1 (sequence is synthesized)
ctcaaacatttcttgaggcccttaccctcccattcccccaaatcaatacggcacttaggggacaccaaggcgcagagacacttgccccaaatcatgcagtaatgccctggtgccaccgtg

SEQ ID NO: 892464 - DNA, 120 bp, Artificial Sequence
  ENSG00000285774_2 (sequence is synthesized)
aacagtgctgaagcttcctgaccccttgtccaggggacctggctgccttttatagaaagtttccacacaccttctattcctaacctcgatcacaagcatcgccggcccagatgctctgtg

SEQ ID NO: 892465 - DNA, 120 bp, Artificial Sequence
  ENSG00000285774_3 (sequence is synthesized)
tcaccggcttagtaacataccccatttaggagcatgagcacaacttgtttgcagtgggaatgaattaactgaattctagatattgttttttggctgcctttttttgtttgtttttatttc

SEQ ID NO: 892466 - DNA, 120 bp, Artificial Sequence
  ENSG00000285774_4 (sequence is synthesized)
caccaagaatgccaactttgattcttcaaggaaaatcagcagctgaccacacaccacccttcctggtcctccccgagatgccaagaacatccaaagtctgcagttttgaggaaactgaag

SEQ ID NO: 892467 - DNA, 120 bp, Artificial Sequence
  ENSG00000285774_5 (sequence is synthesized)
ctgatctgacaccacttcctttttctccagatgttacccttcggatgcatacctcaatctgcctgaaaatcatggaattctggagatggaagggacctcagagattttctggttctctct

SEQ ID NO: 892468 - DNA, 120 bp, Artificial Sequence
  ENSG00000285774_6 (sequence is synthesized)
gttctggttgcccctgcagcttcctggccaccctcctctggctacacttaatgcctctttgaaaacctggtacccagaactgaatggtggactgcgctcagcttctccttccaggtcccg

SEQ ID NO: 892469 - DNA, 120 bp, Artificial Sequence
  ENSG00000285774_7 (sequence is synthesized)
ccctgaggcacccggcttaacccccaagtcaaacgctgcacagagcaggcctgctgcctgcccactctggctaccaggccaaaggcccaggtctggaagaataaaaagatgccaccaccc

SEQ ID NO: 892470 - DNA, 120 bp, Artificial Sequence
  ENSG00000285778_0 (sequence is synthesized)
tcaagtaaaagtggaatctctgtcaatgtgaatcagaatcacttctcagcaacacagcagccttcagtccttgctgacagattccttctaagctgcacgggggcaaccatgcagaaaaag

SEQ ID NO: 892471 - DNA, 120 bp, Artificial Sequence
  ENSG00000285778_1 (sequence is synthesized)
caaaatcctaccttcagccagggagtttacaagttgaccagcaaagctgccaagtttaaatgaggccctttgcagcagcagatcttggaagccattcaacaagtcaagacccaggcacca

SEQ ID NO: 892472 - DNA, 120 bp, Artificial Sequence
  ENSG00000285778_2 (sequence is synthesized)
ccttgaaaaccttgagtctgctaccttgatggaattactggatgtgacagcagagacctggaagaaaaatgccttgatttggctgtgtaagctgcagccactgcaggtaacctgaagaaa

SEQ ID NO: 892473 - DNA, 120 bp, Artificial Sequence
  ENSG00000285778_3 (sequence is synthesized)
tgctgaatctgctgtcctggacgtcattctgtcccagatcacagacacctttacatcctgccagtggtgaactacaccagcattcccaatactacagtgcgcgtctatagaagctgagcc

SEQ ID NO: 892474 - DNA, 120 bp, Artificial Sequence
  ENSG00000285778_4 (sequence is synthesized)
ctggattatcaagtgaagacctgatacttgccacatgggagggagccagagggaccctgttttaatttagctggtctaaggtggcacaatgtcacaaccacaactaacaaaaccttggcg

SEQ ID NO: 892475 - DNA, 120 bp, Artificial Sequence
  ENSG00000285778_5 (sequence is synthesized)
ggatggtattttgacacagccagtcttcttttgtcccttgctacctatcagtaggcaataaaaccacttcatgtaatgttgtgtgtacaggtatactgcctcaccagattcagacaggtc

SEQ ID NO: 892476 - DNA, 120 bp, Artificial Sequence
  ENSG00000285778_6 (sequence is synthesized)
agaagtaaatcatatagctagtaagtggcagaatcagaatgtgatcccaggcaatctggcctgtagagtctgtaatattaacgactatgctatggagtctttgatggattagggaaaaaa

SEQ ID NO: 892477 - DNA, 120 bp, Artificial Sequence
  ENSG00000285778_7 (sequence is synthesized)
attaccgttgctcttcccaaaaaccttataattaaatgactctaatgatcagatgtgagcacaaccttggaaaatgtaattttccataaattttagatcatttggaaatattgtccattt

SEQ ID NO: 892478 - DNA, 120 bp, Artificial Sequence
  ENSG00000285778_8 (sequence is synthesized)
tctttcttggctaactttgatcattgagaacagcagcataggattttaatatttatttatttatctgatagtaagcatttatctaaactctttatggaaatcttcaaatcagtcatttca

SEQ ID NO: 892479 - DNA, 120 bp, Artificial Sequence
  ENSG00000285778_9 (sequence is synthesized)
tttatgtagacaaaaatgcaggtgaaaaatctaagtatgtatttaaatttactgaaaatcatattttttccttaagtaagcctttcattattcctctggaatttctcttttccatgtaat

SEQ ID NO: 892480 - DNA, 120 bp, Artificial Sequence
  ENSG00000285778_10 (sequence is synthesized)
ggctcttttgttggtaagatttttctatgttattcattgacagctgcaaaactgctttgccaagttaaaaatgcaatcgtattttgaaagatacttgtttgttaaacataaaatgattta

SEQ ID NO: 892481 - DNA, 120 bp, Artificial Sequence
  ENSG00000285778_11 (sequence is synthesized)
tttagttgcctgtttataatagttttagagaaatattactctaggaatatatttttatgtgaaatgactattaagagttcattatatttttccatgtttaggattctattctctcatttc

SEQ ID NO: 892482 - DNA, 120 bp, Artificial Sequence
  ENSG00000285778_12 (sequence is synthesized)
gatgtatttgcttccccttccaccatgattacaagcttcctgagacatcctgagccatgcagaattgtgagtcaattaaaccttcttgcttgataaattacccagtctcaggcagttctt

SEQ ID NO: 892483 - DNA, 120 bp, Artificial Sequence
  ENSG00000285778_13 (sequence is synthesized)
tatagcagcatgaaaatgggccaatacagtaaatcagtaccaggagtggggtgctacagtgaagataccccaaaatgtggaagtgacattggaactgggtaacaggcagaagctggaaca

SEQ ID NO: 892484 - DNA, 120 bp, Artificial Sequence
  ENSG00000285778_14 (sequence is synthesized)
cagaagaagataggaaaatgtgggaaagtctggaatgtcctagagacttggaaggctcagaaaacaggagtatatggaaaaatgtggaacttcctagagacttgttaaatggttttgacc

SEQ ID NO: 892485 - DNA, 71 bp, Artificial Sequence
  ENSG00000285778_15 (sequence is synthesized)
agtatatggaaaaatgtggaacttcctagagacttgttaaatggttttgacccaaatgctgagaggaactt

SEQ ID NO: 892486 - DNA, 74 bp, Artificial Sequence
  ENSG00000285778_16 (sequence is synthesized)
gtggaagaaatttctaagcagcgaaatattcaagaggaagcagagcataaatgtttgaaaaatttgcagcctag

SEQ ID NO: 892487 - DNA, 120 bp, Artificial Sequence
  ENSG00000285778_17 (sequence is synthesized)
atcaccaagacaatggggaaaatgtctacatggcatgtcaaagacctttgctgcagcccctcccatcacaggatgaaacataggaagaaaacatagtttcctgggtcaggtccagggttc

SEQ ID NO: 892488 - DNA, 78 bp, Artificial Sequence
  ENSG00000285778_18 (sequence is synthesized)
catagtttcctgggtcaggtccagggttccctgctgtgtatggacttgggacttggtgcactgtactcaggccatggc

SEQ ID NO: 892489 - DNA, 81 bp, Artificial Sequence
  ENSG00000285778_19 (sequence is synthesized)
aagccccaagccttggcagcttccatgtgatgttgatcctgctggtgtgcagaagacaagaattgaggtttgggaaccttc

SEQ ID NO: 892490 - DNA, 120 bp, Artificial Sequence
  ENSG00000285778_20 (sequence is synthesized)
ccttcatagaaaaccactgctagggcagtgcagaagggaattgtggcgttggaaccaccacacagagtcccccacagtgcactgcctagtagagctgtgagaagagggcaaccctactcc

SEQ ID NO: 892491 - DNA, 120 bp, Artificial Sequence
  ENSG00000285778_21 (sequence is synthesized)
agaccccagagtattagatccactgacagcttgcatcatgtccctggaaaagtgtcagacactcaatatcagcctgtgtagccaggaggggggctttaccctacaaagccacagagatga

SEQ ID NO: 892492 - DNA, 120 bp, Artificial Sequence
  ENSG00000285778_22 (sequence is synthesized)
agctgctcaaggccatgggagactacctcttgcatcagtatgacctggatatgagacatggagtcaaaaccgatcattttgaaactttaaggtttaatgattgccccattgggtttcaga

SEQ ID NO: 892493 - DNA, 89 bp, Artificial Sequence
  ENSG00000285778_23 (sequence is synthesized)
gaaactttaaggtttaatgattgccccattgggtttcagacttgcatggggtctgtagtctcatgtatttacccaatgcctgtaccccc

SEQ ID NO: 892494 - DNA, 120 bp, Artificial Sequence
  ENSG00000285778_24 (sequence is synthesized)
ttgccttgtctcagatgagactttagacttggtctttggggttaatgctggtgagttaagactttgggtgactagaagacatgattgtgttttgaaaatgtgaggacatgagatttggga

SEQ ID NO: 892495 - DNA, 120 bp, Artificial Sequence
  ENSG00000285778_25 (sequence is synthesized)
tgaggacatgagatttgggaggggccagaggggaattatatggtttgggtgtgttctcacccaaaatcacatcttgaattgtaatttgaattataatcctcacatgttgggggaggaact

SEQ ID NO: 892496 - DNA, 120 bp, Artificial Sequence
  ENSG00000285778_26 (sequence is synthesized)
tgttgggggaggaacttcataggaagttattatatcatggggttcattcccccaccctattctcactgttctcatggtagtgagtaagttcttatgagatctgatggttttataaggggc

SEQ ID NO: 892497 - DNA, 120 bp, Artificial Sequence
  ENSG00000285778_27 (sequence is synthesized)
ccttcactctgcacttctctcccctgccaccatgtgaagatgaatgtgttcatttccccgtctaccatgattgtaagtttcctgagtcctccaaagccatgcagaactgtgagtcaatta

SEQ ID NO: 892498 - DNA, 120 bp, Artificial Sequence
  ENSG00000287881_0 (sequence is synthesized)
gatattccctctctgatctacttctctggacatctgggtttcctgtggattgcgttcaatcagcaatgttgagaacattctggataaaaggtatgggagagtatgtgacccagtgtactt

SEQ ID NO: 892499 - DNA, 120 bp, Artificial Sequence
  ENSG00000287881_1 (sequence is synthesized)
tcaattaagtggtgaagtacaaacaatgagaggtgcctccagcagctccctggactccttctccccaaggggaaaaggaaactgaataaaggaaaacatggacaacctcaaatgcagaaa

SEQ ID NO: 892500 - DNA, 120 bp, Artificial Sequence
  ENSG00000287881_2 (sequence is synthesized)
catgacatattttctcatgaggacagcgtggcccaggagaaagaggtgagttaggattcagagcatgttcagattcccctatgagggatcccattctctaaacttggagaagccactttc

SEQ ID NO: 892501 - DNA, 120 bp, Artificial Sequence
  ENSG00000287881_3 (sequence is synthesized)
ctttactgaggctttgtttcctcatcagagaggagtcaaaggttagacaaagtaacatcttttgtttcggaaatccatggagtttgcagccaggatatgggggaatgttctggatgagag

SEQ ID NO: 892502 - DNA, 120 bp, Artificial Sequence
  ENSG00000287881_4 (sequence is synthesized)
gtaaccatgaaggcatggattcttttgcatggttttcaatctgtaggatattcctttttctttccattcaacgctttgcagagtgttaaaaagcaaggagttctaaatttgaggcaaaca

SEQ ID NO: 892503 - DNA, 120 bp, Artificial Sequence
  ENSG00000287881_5 (sequence is synthesized)
cagtatttttctcttatatttttataatgcttaacaattaacagagtattgtcatgtgtattatcctcatagcaactgctgtaaatagtgatatcattatgttctagttttgcagaggag

SEQ ID NO: 892504 - DNA, 120 bp, Artificial Sequence
  ENSG00000287881_6 (sequence is synthesized)
aaattcatcctccaagagaacactcactttaaaattacaaaagcaatctttgggggtgctagatttggacccagttgtgttctttgaaaattctccttccacacaacactaacctcatta

SEQ ID NO: 892505 - DNA, 120 bp, Artificial Sequence
  ENSG00000287881_7 (sequence is synthesized)
tttctgtaatctgagaacaagaaacacaaacccactactgctattaggaccaaagtttcatttctatactcaggtgggtatttggaaacagtggttcacaataacaatttctgcaatgtg

SEQ ID NO: 892506 - DNA, 120 bp, Artificial Sequence
  ENSG00000287881_8 (sequence is synthesized)
aagaaaccagcattactgctcatctgtaaaaattttttaaagtatatctcttctggaaattcaacacttttttctctctctctcaatgtatgcatatatgtatgtagatatgacatcatt

SEQ ID NO: 892507 - DNA, 120 bp, Artificial Sequence
  ENSG00000287881_9 (sequence is synthesized)
tgtaggagtgtgcagttttgttgtctttatttattcatatgatatttttcccatttattcctctcactgagcacctcccaatggctagaccctgtgctaggtatggggcatacagagata

SEQ ID NO: 892508 - DNA, 120 bp, Artificial Sequence
  ENSG00000287881_10 (sequence is synthesized)
gacgaagtatctctgacaccactgccttgtccacatgtgagcaacgtggggtattcatgtgtgcactgaatgctaacacaaggaaggaggtatccgttacagaataatagaagcaaaatg

SEQ ID NO: 892509 - DNA, 120 bp, Artificial Sequence
  ENSG00000287881_11 (sequence is synthesized)
tggtgggagcgtagaacacagattgattttttaactctttctttggaatataaaagtcccaccaacacaagagaggctagtcttaccagtagatggtcagggttgggatatttccctccc

SEQ ID NO: 892510 - DNA, 120 bp, Artificial Sequence
  ENSG00000287881_12 (sequence is synthesized)
ctcaaatatcgattcccacttcgacatcatggtgactgaaatgatagcatccattgcacatcacgaagaaaggatttctgaagacatcccagaatagaataaagaagtaattagtctggg

SEQ ID NO: 892511 - DNA, 120 bp, Artificial Sequence
  ENSG00000287881_13 (sequence is synthesized)
ctcctgactctgtaggtggacagagaaaattttagctattaaatgttacataactaacacttacataattaaatattacgaatcttaccagtaaaagcttcttcccagcatcctttatga

SEQ ID NO: 892512 - DNA, 120 bp, Artificial Sequence
  ENSG00000287881_14 (sequence is synthesized)
atgtgcacagccaagttcactaaagatattgagactgtggcccctctctcaacaccccccatctgcctgccccatcattccctcgatgctagcacatactcctccccctttacccacatc

SEQ ID NO: 892513 - DNA, 120 bp, Artificial Sequence
  ENSG00000287881_15 (sequence is synthesized)
ttcagccccactctgagacctaacccaagacccagcttcttcatgtggtctttcctatagcagttccagaatcacctttttcgctctcccctgtttatattgtcatttgctaattatctt

SEQ ID NO: 892514 - DNA, 120 bp, Artificial Sequence
  ENSG00000287881_16 (sequence is synthesized)
tttaaaattatgccataatttctcttgttttaaaatgaccggcttcctcgactacatttttgtgttctttgaaggaagttatatactttcaagaaccgtgcataatagcagttttatttg

SEQ ID NO: 892515 - DNA, 120 bp, Artificial Sequence
  ENSG00000287881_17 (sequence is synthesized)
gctttactgaagtgacacatacttagcaattttatccatttgaatgagggaataacaaattgcaatgtttgcaagctgagcagggcttttcaaagaccatattttaagaggcccatgcca

SEQ ID NO: 892516 - DNA, 120 bp, Artificial Sequence
  ENSG00000287881_18 (sequence is synthesized)
cactatatcagacatactaaaacgtattcacatctcaattaaatattatttacatatgcatatttgtggatttctctacatatacacatacatatgcatatatgtatgtatacaaatata

SEQ ID NO: 892517 - DNA, 120 bp, Artificial Sequence
  ENSG00000287881_19 (sequence is synthesized)
tatgtgtatatatatctctatatgaagtgaattctaatttgctagttaaaataatgttctgtttcatacctgtttgaccatattgatgtcaattttccaatttttcttttttactttaga

SEQ ID NO: 892518 - DNA, 120 bp, Artificial Sequence
  ENSG00000287881_20 (sequence is synthesized)
gccaatgctgcttttggggcatcatttttataggatctggacaatggagaggcatgttgggttgttgatgggggcaggtgcttcctgatcatcactgtgaaacagaaataagccatggct

SEQ ID NO: 892519 - DNA, 120 bp, Artificial Sequence
  ENSG00000287881_21 (sequence is synthesized)
ttgacctagcagcccagcctcactgcagagcggacgtctttgagcaacactggttgtgttgacacagacattaggttacatccctcactgctgtttccacttgtcctgatttttcctagc

SEQ ID NO: 892520 - DNA, 120 bp, Artificial Sequence
  ENSG00000287881_22 (sequence is synthesized)
gtcctcttttgctctgagattttccaggatttttcacaccacttaggggatttgcagatggaaattttgagtaaaatgtgttcactcgttttcatgttatgcaagagtgaaaacaaaaaa

SEQ ID NO: 892521 - DNA, 120 bp, Artificial Sequence
  ENSG00000287881_23 (sequence is synthesized)
gcctcaaactcaatttaggatggagtgggatggggtggagtggcgcccatgcacgaaaaactcaaaactgctaaattgcaagaagcaaaactttccttgagcttaattttcagtgtggga

SEQ ID NO: 892522 - DNA, 120 bp, Artificial Sequence
  ENSG00000287881_24 (sequence is synthesized)
gattctctgtaggggttttggggaaaaaatgacagaatttttaagcaccattgacacgaatatttgctacatagactttgagtgatgtacccatttccatgttgtaaattgataagcaaa

SEQ ID NO: 892523 - DNA, 120 bp, Artificial Sequence
  ENSG00000287881_25 (sequence is synthesized)
gggagttgctgaggctggaagttactgttagtggtttctgagggtatcatgcaatgattttaggaatcttatctccacactttctactcccaccacccgatcctctttgatgcccccgtg

SEQ ID NO: 892524 - DNA, 120 bp, Artificial Sequence
  ENSG00000287880_0 (sequence is synthesized)
ccctcatttcctgcttatatgaagactcaaggccaagctacatttgacagcatttctcccctatcattttaaactgaaaatcccaagactgataaaatttcaaaactaagctgaaataag

SEQ ID NO: 892525 - DNA, 120 bp, Artificial Sequence
  ENSG00000287880_1 (sequence is synthesized)
aagaaggaaaatagtgtttccggtgtttatcattccactggcccaacaacaacagccaatcatattcaactgaaataatttcaaattacttatttaatactagatgtatgccaactagga

SEQ ID NO: 892526 - DNA, 120 bp, Artificial Sequence
  ENSG00000287880_2 (sequence is synthesized)
tattagatataaaaataccaagtaatataatttatgtctttaagttcaatagctaccagggaacatagacatgttaacaattaattataaaacaatcctagagtgtcttttttaattgtg

SEQ ID NO: 892527 - DNA, 120 bp, Artificial Sequence
  ENSG00000287880_3 (sequence is synthesized)
tttacaaagttttatcaaagcctaggggaatcagtcacttggttttacacaagttatttggtcaagtgaacttttttttttttttttcacagattgaagcatctgactatttctaacact

SEQ ID NO: 892528 - DNA, 120 bp, Artificial Sequence
  ENSG00000287880_4 (sequence is synthesized)
gtgatccacagtattaagacaattaaaatgccatatttagggaatatataaatgtattatttttctttatgcaaatttcaagttgtttattatattcagaatgagaaacattacaaatat

SEQ ID NO: 892529 - DNA, 120 bp, Artificial Sequence
  ENSG00000287880_5 (sequence is synthesized)
tcatatgaactagtctctgagtacccagattaattagctaatcactgcattgtcaagtctctataatgctctctgctgtatcctatcactgactttttctgggttaagatttattttggg

SEQ ID NO: 892530 - DNA, 120 bp, Artificial Sequence
  ENSG00000287880_6 (sequence is synthesized)
aattgagagccaaggctggaacacactgaacagagtgttctatttctgtgtgaaatgatagatgttgctcttgcccagaatgaaaatgctttgcactgctcccaatctgtaaattgttcc

SEQ ID NO: 892531 - DNA, 120 bp, Artificial Sequence
  ENSG00000287880_7 (sequence is synthesized)
atttgcttggcataataagtatactgatgtatttaattctgtctaccaggcccatgctgttcaattcccctctgctagccaaatataccagaagtcataaatttctctccaataaggaaa

SEQ ID NO: 892532 - DNA, 120 bp, Artificial Sequence
  ENSG00000287880_8 (sequence is synthesized)
ctaaatgtgatctcttctataagtaaaagcagtgttagtgtcctgttattattttttggagttaccgtatgttttaaatccaagattagcaaaagatttgttataatcttttcactttta

SEQ ID NO: 892533 - DNA, 120 bp, Artificial Sequence
  ENSG00000287880_9 (sequence is synthesized)
tcaactacttagtccagcaaacataccgacaaaataattgtatatgctcaaaggtacagtctgtggaaatgattcgatgtttgtataactaccactttctttcaaaatgaaccttcattt

SEQ ID NO: 892534 - DNA, 120 bp, Artificial Sequence
  ENSG00000287883_0 (sequence is synthesized)
agacacccttgttcctcccgtcagaaccacaggcctcatactccctctgccagaggcccttccccaaaacagaggagcgagtggagcagacagctgccggctgggtgtgttccaagcctc

SEQ ID NO: 892535 - DNA, 120 bp, Artificial Sequence
  ENSG00000287883_1 (sequence is synthesized)
ggcggatgcttcagaatagaagcgcccacgccgctttgcaaagtaaaggcatcatcacattttatgaatgacagatggcttttaccacacctttgcatgatcgcttatggtaataggact

SEQ ID NO: 892536 - DNA, 120 bp, Artificial Sequence
  ENSG00000287883_2 (sequence is synthesized)
gcggtgccctgagacgtggggatctgcgtgagtgcccccggcaaagtctgctcttccggcctcgaatctggatcccaggagcccgtccatatccctcatccagcaaactccatggccatg

SEQ ID NO: 892537 - DNA, 120 bp, Artificial Sequence
  ENSG00000287883_3 (sequence is synthesized)
cagggctcctcaggacactgcagttgtgccctgtttaaaacaataactgtttctcaagtttcttggagtgaagccaccatgacctttgcaacagacgaagcctacactttttccaagtgt

SEQ ID NO: 892538 - DNA, 120 bp, Artificial Sequence
  ENSG00000287883_4 (sequence is synthesized)
ctgtaaggattttgtaagatcacaccaaacccactcccttacagaaaacagcttcaaaatctgtacacaatgcaaacaggctgcttgtgggcgttggagagtgaacagcaagacggacct

SEQ ID NO: 892539 - DNA, 120 bp, Artificial Sequence
  ENSG00000287883_5 (sequence is synthesized)
ggggtgtacacgggggataaaggagttgcaggaagcacgttctctttgaccgtggctgttagcctgagcactatgtagttagggcatgaggagctgggggtcctcagggaagaccacagt

SEQ ID NO: 892540 - DNA, 120 bp, Artificial Sequence
  ENSG00000287883_6 (sequence is synthesized)
cttcatggcctggaacaggagcaggacgaaattggggaagctgtggccagtggagggggggagcgtccagaaggggaaacttggcggactctactcatgtttccgactggccctgaactg

SEQ ID NO: 892541 - DNA, 120 bp, Artificial Sequence
  ENSG00000287883_7 (sequence is synthesized)
cacacactcaaagcagataaaagaagcccagctaaaggctggtacaaaatgaccttctttataatgctggttgtgttcattgttcaatattaatatagctgttcccgctttttttttttt

SEQ ID NO: 892542 - DNA, 120 bp, Artificial Sequence
  ENSG00000287882_0 (sequence is synthesized)
ggagaagcagaggagatggctgctgagtcatatccagggcccagtactcaggaaatttgctgaagtcttaccgttgaaagagaagataagaggacatgactgcacctcactctttgtgcc

SEQ ID NO: 892543 - DNA, 120 bp, Artificial Sequence
  ENSG00000287882_1 (sequence is synthesized)
tgttagagccccagctcaggatccaacatatcagaggaggactccaggaagtcattctaccacctctgcctccctgctgacgaatccgatatttggttgaacattcctacttcaaaattc

SEQ ID NO: 892544 - DNA, 120 bp, Artificial Sequence
  ENSG00000287882_2 (sequence is synthesized)
caaaatctgaagcagtccaaaatctgaaacttttggggcactgacatgaagccacaaatagaaaattccacatgtaagtactcaacacaagctttgtttcatatgcaaaattattgaaaa

SEQ ID NO: 892545 - DNA, 120 bp, Artificial Sequence
  ENSG00000287882_3 (sequence is synthesized)
tgtttcataaaattactccttcatcctatgtgtatacggtgtgtatgaaacacaagtgaatttcctttactgtttttgtactcacaaaccctcccttccactccaagccctgtaagcatc

SEQ ID NO: 892546 - DNA, 120 bp, Artificial Sequence
  ENSG00000287882_4 (sequence is synthesized)
tgcaatcttggctagtttgctgcttccgaggtgcctgggggttcatgcattttagactttgtgtgctccggggactagacatgatttcaaagtgctgctgacttgggtcccaatccccaa

SEQ ID NO: 892547 - DNA, 120 bp, Artificial Sequence
  ENSG00000287882_5 (sequence is synthesized)
ttccaaaatctgaaacagtctggtcccaaatacttcggatatgggatactgatctctctaatgaatgtagagtggcagtgatggctgctgagaaaagcagcaaggcagaaaaaaaggggg

SEQ ID NO: 892548 - DNA, 120 bp, Artificial Sequence
  ENSG00000287882_6 (sequence is synthesized)
agaggctgccattttagatggaggggaaagaggccccctctcctccaggctacacagaccatccctaacatcccttgcacctcaatcaagggcctaccatgtgccagacttttaaagggt

SEQ ID NO: 892549 - DNA, 120 bp, Artificial Sequence
  ENSG00000287882_7 (sequence is synthesized)
cttggaggccccaggcagcgtgtgatgggccacggtctgtgaaggtgtgccccgcattgaggaggagccgggcatctgaaccgcgaagcacagccaggcctgccaggcaggtgtgccatg

SEQ ID NO: 892550 - DNA, 120 bp, Artificial Sequence
  ENSG00000287882_8 (sequence is synthesized)
tggactgggagccgtggccaacagctgccaggtggagccaggcttgtgccagggactgcggtcaacagaagcagctgccctccagtgtttactgagcatttattttctctccttctttct

SEQ ID NO: 892551 - DNA, 120 bp, Artificial Sequence
  ENSG00000287882_9 (sequence is synthesized)
tctttccccttttcagcccatctttcctagccttaccccttctcctttcttccctctcttctccctcactccttacctcccatccacccacctatccagtgtttattgaaggcctactat

SEQ ID NO: 892552 - DNA, 120 bp, Artificial Sequence
  ENSG00000287882_10 (sequence is synthesized)
gtaccagacacggtgtcaagccctagggacactgtggtgaataaaatgctcctgtcctcaaggaatgttatggtccatttggaaggacccataaataaatctgtaatgtctgctgagaaa

SEQ ID NO: 892553 - DNA, 120 bp, Artificial Sequence
  ENSG00000287887_0 (sequence is synthesized)
ggcacggcggggcacgggccctgctgcaaacgggcgcgctcccttctgggcaagcaggtgcgaggcgcgcgccatggaacagcccttagctgagtttcggtttgcgcgcaaacggccggc

SEQ ID NO: 892554 - DNA, 120 bp, Artificial Sequence
  ENSG00000287887_1 (sequence is synthesized)
ctggccgcccaacgcagcatttccagccagggcgcacaaacctcgggagagaaggtggaagccgcaggggctctaaaggcagccccaggttggctaaagcggttcctggtacggacacca

SEQ ID NO: 892555 - DNA, 120 bp, Artificial Sequence
  ENSG00000287887_2 (sequence is synthesized)
aggcccccgtgctcgggccctacccagcctggttcaggcctgtcatactcgtctttctctttcctgggaaattgctgatggttcaagtaaagactctgaagcagtctcagggatatactg

SEQ ID NO: 892556 - DNA, 120 bp, Artificial Sequence
  ENSG00000287887_3 (sequence is synthesized)
cttggtagtaaaagtcaagtcttcatcatctagtttacggcatgaatcaacacacagttgtttgaaaatgctgaatgcagatttgtcagaactccctgaatcttctgcacttgctcctcc

SEQ ID NO: 892557 - DNA, 120 bp, Artificial Sequence
  ENSG00000287887_4 (sequence is synthesized)
ttctctcaaacttgcattctttgatgcttctggattgtcattttgaagaccattttcaagtatctttttttttatgttgcaaaatttgttgttgaatgctagtcaaaacaccacaaatag

SEQ ID NO: 892558 - DNA, 120 bp, Artificial Sequence
  ENSG00000287887_5 (sequence is synthesized)
cataattgtttgctgtctgtccatacatatcttgaataaagacagtaatattttgttgaagaatgccaactatacctaacgagccataatgtacagcaggcgtgaaggctgttcctctca

SEQ ID NO: 892559 - DNA, 120 bp, Artificial Sequence
  ENSG00000287887_6 (sequence is synthesized)
acctatcaacagcatgtgcatttgcttgtttcttcactaaaaattccagcatttgctgtcttttgcaaactgcagcaagtaaaagtggtgtgtttccatcattgttcagcacttcaatat

SEQ ID NO: 892560 - DNA, 120 bp, Artificial Sequence
  ENSG00000287887_7 (sequence is synthesized)
ccgtatcatgggaaaatagtttttctaccaggaatgtactctcattataggacagcatagtggagagcagtgttgctgtagacatccacgttccagcagaacgatgccacaaatctcttc

SEQ ID NO: 892561 - DNA, 120 bp, Artificial Sequence
  ENSG00000287887_8 (sequence is synthesized)
ctggcaatgtacagcctcctcaaaggcatcccattttgtttatcaccaatgtcaatgtggcattttcagttcaccaggagagtccccacttccacatggccattggcacaggccaaacgt

SEQ ID NO: 892562 - DNA, 120 bp, Artificial Sequence
  ENSG00000287887_9 (sequence is synthesized)
atacagatacacacagagtatgcttcagccataaagctttgggaaatcctgtcattcgcagccacatggagaaacccagaggacattaggtccaagaaaatgagcctggtggagcaagtc

SEQ ID NO: 892563 - DNA, 120 bp, Artificial Sequence
  ENSG00000287887_10 (sequence is synthesized)
ccacactgcgtgacctcaggcatgtggactccaaaaagctttatctcctgcccatccacagatgaagggatcaagaaactctgatatatatacacaaaggaatgttctttggccatcaag

SEQ ID NO: 892564 - DNA, 120 bp, Artificial Sequence
  ENSG00000287887_11 (sequence is synthesized)
ataattaaaggatgtcatttggaggaacatagatggcccgccgaggctgcggctgcctcatcctgcactgtggatggaagccgctgatctgacaggaagtggagctcaggtggtaatgct

SEQ ID NO: 892565 - DNA, 120 bp, Artificial Sequence
  ENSG00000287887_12 (sequence is synthesized)
cgctcttgctgtgctgccaggttcttaacaggccagggatgatactggtccaggggtgggggagccctgctccagatgacagccagagtagtcttaaatgaccttctgctttgcacaaag

SEQ ID NO: 892566 - DNA, 120 bp, Artificial Sequence
  ENSG00000287887_13 (sequence is synthesized)
gtggtatgcaatcagaagacgtctgaggagacaagtatgcatctcccaccacaacattatatgatgcttggagtaaaaacagtcctccctgttcctacccacgaatgtattattcaataa

SEQ ID NO: 892567 - DNA, 120 bp, Artificial Sequence
  ENSG00000287887_14 (sequence is synthesized)
agattgctgccaggcatggtggctcatacctgtagtcccgcactttgggaggctgaggctgggcagatcgcttgagaccagggtttgagactagcctggacaacatggtgagccaccatc

SEQ ID NO: 892568 - DNA, 120 bp, Artificial Sequence
  ENSG00000287887_15 (sequence is synthesized)
ttgagactagcctggacaacatggtgagccaccatctctgcagaaataaaataaaataaaattagccaggtgtagtggcctgtgcctatagcctcagctacttgggaggctgaggcagga

SEQ ID NO: 892569 - DNA, 120 bp, Artificial Sequence
  ENSG00000287887_16 (sequence is synthesized)
gccatgatggtggcactgcactccaaactgggtgacagagtaagaccctgtcttaaaaaaaaaaaaaaaagattgcattattcaatcttttttcccatatataatttatatagttacata

SEQ ID NO: 892570 - DNA, 120 bp, Artificial Sequence
  ENSG00000287887_17 (sequence is synthesized)
attacattctagtttttgcacatgccgagaactacatataatttagtagtatgctgttttcacttatatatcacatatattttcctatataggtatataatatctatatttgtccttttc

SEQ ID NO: 892571 - DNA, 120 bp, Artificial Sequence
  ENSG00000287887_18 (sequence is synthesized)
catttgactgctgtgtttcttaaattgatatactgtgatctaagccagttacagattggtatggatttaaattacttcctattttctgttttattaacaataaacactgttatgatatag

SEQ ID NO: 892572 - DNA, 120 bp, Artificial Sequence
  ENSG00000287886_0 (sequence is synthesized)
gagactcctgcctttcggggcgggcgggctggaacaaagacaccaacggggccacctcggaaagtctttttgagcagtttcagcaaatagcatttaagggaagggaaaaaaactccaatg

SEQ ID NO: 892573 - DNA, 120 bp, Artificial Sequence
  ENSG00000287886_1 (sequence is synthesized)
tactcaataagtgtgtacagcaaatttctgttgtgcctgggaagaaggaaatttgagttaaagaggaggcccgctccatatgccttgtcacaagtacactcactgaaacattaattcacg

SEQ ID NO: 892574 - DNA, 120 bp, Artificial Sequence
  ENSG00000287886_2 (sequence is synthesized)
aagagattgcaacaagaccaaaacgaaagaggaacagggcctgacaatgttcagagaaggaaaaccgaagaagtaaccatccccaagttaaaaatgacgtggggatgaaaaaataggttg

SEQ ID NO: 892575 - DNA, 120 bp, Artificial Sequence
  ENSG00000287886_3 (sequence is synthesized)
cctgttgtatttgtcattgaaatgcacaatcttgtttactgtttatcttgagactctgggagctctcctgctgcttaggaaaaaagaggcaaaggtttaggaagaaatgctagtcataag

SEQ ID NO: 892576 - DNA, 120 bp, Artificial Sequence
  ENSG00000287886_4 (sequence is synthesized)
aaagagaggcattagaaaccctagagagaatgggaggtgtaaatagtatgtgggcatttggcaatcaccacaaagaaatgggagacaaaggcaagtgtctgatgccagaaatcctaaaaa

SEQ ID NO: 892577 - DNA, 120 bp, Artificial Sequence
  ENSG00000287886_5 (sequence is synthesized)
cttgagtggaaaacccagacacaataaaaatgtccaaaagaaaaaaaaggcaaaatcccatgagatctttttttttctctgtgatgttacctaatggagaaaataaaggtgggttttgcc

SEQ ID NO: 892578 - DNA, 120 bp, Artificial Sequence
  ENSG00000287886_6 (sequence is synthesized)
acaaaatgggacaatcttgggggacaatttctttctccaaaaaggggatgagattgggcagaagaaacacttgcagggcagagttattatctctctccccgaagagtttaatcaattgtg

SEQ ID NO: 892579 - DNA, 78 bp, Artificial Sequence
  ENSG00000287886_7 (sequence is synthesized)
gagttattatctctctccccgaagagtttaatcaattgtggtcatttacagatctctgtcgttgtccttttctctctc

SEQ ID NO: 892580 - DNA, 120 bp, Artificial Sequence
  ENSG00000287886_8 (sequence is synthesized)
ttctttctctctctttctttttttcttttcttctttctttctgatgactttgccttgaaaggaattgcttaggaaagagggaaaaggcatttttagtcaaaagctaagctaagatcaaat

SEQ ID NO: 892581 - DNA, 120 bp, Artificial Sequence
  ENSG00000287886_9 (sequence is synthesized)
taaatcgggcaatggaaacctcctctggaggctgtgcagtagagtgtgacacctcctaatttcatgacttgggcagattgcttcattttcctactgtaaaaaaaaggaaaacgataataa

SEQ ID NO: 892582 - DNA, 120 bp, Artificial Sequence
  ENSG00000287886_10 (sequence is synthesized)
caggtaatgtttattgaactcctacatggaataagtattttatacacagatccatttcaccctctgaatctaatgaggtagtataattattatctccgttttatagatgagtggaggctc

SEQ ID NO: 892583 - DNA, 120 bp, Artificial Sequence
  ENSG00000287886_11 (sequence is synthesized)
agatcacccagctagaaaatggagatagaatataattctagatcaggggttagcaatgaccgcctgagggccaaattctgctcagtatgtgtttttgtaaataaagttttattggaacct

SEQ ID NO: 892584 - DNA, 120 bp, Artificial Sequence
  ENSG00000287889_0 (sequence is synthesized)
agtaactctctaggcctgggtaccggagggagggaggcgggcagaggaggggagatgggcacccccagtttttccatcctcctcattcgtctaggggcacccgaatcccctattccttat

SEQ ID NO: 892585 - DNA, 120 bp, Artificial Sequence
  ENSG00000287889_1 (sequence is synthesized)
aggggcacccgaatcccctattccttatttcccctatcactcaggcactggcagggtccttttcccactcctgttggccgccgcggctccaaagcgagctgggcagatgtgcctgagaca

SEQ ID NO: 892586 - DNA, 120 bp, Artificial Sequence
  ENSG00000287889_2 (sequence is synthesized)
cccagaggaagagagagaatttggacaaatgaatgaggaacaacgctctcctgagggttttctttaaggggcaaggatcaatgcctctagatcctttgaaagcagagttaagaggcagtg

SEQ ID NO: 892587 - DNA, 120 bp, Artificial Sequence
  ENSG00000287889_3 (sequence is synthesized)
caggaaggcacagcaggaaggttcatggttagactacagagaaggaagcagccactgctggggacctaccctgtgctggtcactgacaagctgtctcattaaaccttcccggaccctcaa

SEQ ID NO: 892588 - DNA, 120 bp, Artificial Sequence
  ENSG00000287888_0 (sequence is synthesized)
gctccacttggagtcagctgattggcaggagggcatctgaaattgagaggaggtttcaggccgtttacccagccctttagtggggatctgtccgggactctgcagtctgaacctgcaact

SEQ ID NO: 892589 - DNA, 120 bp, Artificial Sequence
  ENSG00000287888_1 (sequence is synthesized)
gtaaaagaggtctggttgaaggacatgagcagtgcagaacagaagagagacaacaaataaaagtggtcatcactgtttcaactgggaagagcagtatggatatagaaaccaagtcaggag

SEQ ID NO: 892590 - DNA, 120 bp, Artificial Sequence
  ENSG00000287888_2 (sequence is synthesized)
gggaaacaaggtctctatcccctctgggagcccctggggcataccctagctaagtgtagatcctatacctatgagcccttgactaagagaaaaacggtctattattgcagtgctgtttgg

SEQ ID NO: 892591 - DNA, 120 bp, Artificial Sequence
  ENSG00000287888_3 (sequence is synthesized)
actgtggacaagttaggttataaattttgacctctgactggacgtaaccaatactagtctttaatgcagttagactcattttgtcagaggtctggaaaattagaaaaaataccatatgtc

SEQ ID NO: 892592 - DNA, 120 bp, Artificial Sequence
  ENSG00000287888_4 (sequence is synthesized)
atgctttttgaaaatcaggattcataccatgagggaagacgccagctgccagctgtaccaagggacagaatggaaaaaggactcttcacaagccagatagccaaactcaggcagaaagca

SEQ ID NO: 892593 - DNA, 120 bp, Artificial Sequence
  ENSG00000287888_5 (sequence is synthesized)
atgaagaagaattaggacttttaaatgtcctacacccaagctgttttagcagctccaaccaccacagccagaacgcacctggcctctgctccaccccaacagctcccactgcggtaccgc

SEQ ID NO: 892594 - DNA, 120 bp, Artificial Sequence
  ENSG00000287888_6 (sequence is synthesized)
catacggggcccttagcgccggcctctgcgttggcccggattgccttgatgctaccaagtgaggcatcagaccaataagagggagctactctgcctcctcagtataatgagataacagag

SEQ ID NO: 892595 - DNA, 120 bp, Artificial Sequence
  ENSG00000287888_7 (sequence is synthesized)
atggcctctccctccagtgcttgacagggtacacaattaagcaaggaagtgccatttcaggaatgctaagaatcctcatctcagaatgaggaatgacttccatgaagctgaatgtctctt

SEQ ID NO: 892596 - DNA, 120 bp, Artificial Sequence
  ENSG00000287888_8 (sequence is synthesized)
ccaagtttctaggtcacaggagctcattttctcactgtcactattaccatggtgtagaaaatagaccccatgtttataaaccaaaaaacaagtcaacattatacatggccattggtgtgc

SEQ ID NO: 892597 - DNA, 120 bp, Artificial Sequence
  ENSG00000256769_0 (sequence is synthesized)
aactcccagatgccataaggttgatttttcagtgacccttcagaaggccagtccctttggctcctacgtggcactacaggttccatacacctgggatgctgaggccaagccagagcttct

SEQ ID NO: 892598 - DNA, 120 bp, Artificial Sequence
  ENSG00000256769_1 (sequence is synthesized)
gagctgtccatcctacccaggtggggctcattaaccataccaccttggtgagcagctatggagcacatcctaaccctcacgggctaactacctgagatagcctctcaagcttttggagag

SEQ ID NO: 892599 - DNA, 120 bp, Artificial Sequence
  ENSG00000256769_2 (sequence is synthesized)
cctcatacttgtcttgggacctaaacaatgaatgacaggccagcaagcgctgatttcatgctttgtgtggtcaggatgatgtgctcaaggggctggtggaaagatccgatttctctggtg

SEQ ID NO: 892600 - DNA, 120 bp, Artificial Sequence
  ENSG00000248912_0 (sequence is synthesized)
aagatgcaggtttatgctgttctatcatttagtaagttattatacagatacgctgttgttattttttaaataagtgagtttacaaaaaataagggttcagtggaaatatatgaaataatt

SEQ ID NO: 892601 - DNA, 120 bp, Artificial Sequence
  ENSG00000248912_1 (sequence is synthesized)
cacatgctataaaacattaggacaactaatcccgaaggtcaaaaactctctaatgaagagctcgggggtgaagacattctgaatatttagccaccaaaagaagaagtttaatgaaaatat

SEQ ID NO: 892602 - DNA, 120 bp, Artificial Sequence
  ENSG00000248912_2 (sequence is synthesized)
attcctagtaggaatgcattcagaatgttctgtctgaatccaaactttattcattgttggaattaaagtaaacttgtcaatgtttcatggatactggcagaagaaacaagtctcctgggt

SEQ ID NO: 892603 - DNA, 120 bp, Artificial Sequence
  ENSG00000248912_3 (sequence is synthesized)
gcatgcagtgggtttgcatcatcacaactgacaaatgggagcttgggaaatctactgctttttgagtaagcacaaagcaagcctgaaggacaaatgcaatcctaagaaatgcttcaggtt

SEQ ID NO: 892604 - DNA, 120 bp, Artificial Sequence
  ENSG00000248912_4 (sequence is synthesized)
aagaagacaggtcaaggtcttgcatttttggcatacccagcaagtatgtacaaggacgcatggggctgaaagaagattgccttgcccaactgatgcttgagaaaattttggtttaaagaa

SEQ ID NO: 892605 - DNA, 120 bp, Artificial Sequence
  ENSG00000248912_5 (sequence is synthesized)
ttttctgatcaaaattgatttctattcataacaagaaaatctatttattctctctctctttctctgtctctctctcacaaatatgcatgcacacacacgcgcgcacacacacacacgcct

SEQ ID NO: 892606 - DNA, 120 bp, Artificial Sequence
  ENSG00000248912_6 (sequence is synthesized)
tttacattgtcttaaactgatactgaaaccttaaatagtaacccccccacaccacctgttcccatgtcaaccagaaactctgtggtgataaaagtaaagatggctttttacacttattca

SEQ ID NO: 892607 - DNA, 120 bp, Artificial Sequence
  ENSG00000285483_0 (sequence is synthesized)
tgtccccattgggcgagacctacctagacaaaggccttaacataccgacaaaggccttaaggggcctgggaggaagtcgtacaaaataaatgtcttctggagatgatttttggaaatgga

SEQ ID NO: 892608 - DNA, 120 bp, Artificial Sequence
  ENSG00000285483_1 (sequence is synthesized)
ccacgtttgttcagtgggttagatgacatggagctggaagacctgagaaggaagagaagaaggttctatgacagactggtcatatttagaagacactttcatattctatccatagttttg

SEQ ID NO: 892609 - DNA, 120 bp, Artificial Sequence
  ENSG00000285483_2 (sequence is synthesized)
tatgcattttattcctcactaccttatatatagttgacaatgctaagcttttttgaaatgtctgtttttttagatgttctgaagtgcctgatatatgttaaaattaaaggtaataaaaac

SEQ ID NO: 892610 - DNA, 120 bp, Artificial Sequence
  ENSG00000248918_0 (sequence is synthesized)
ccctccccgcggcactccagctccgaagagcgagcttcggttccgcccgccctccagaccatttgcttattctcactattgttttaatttattgtgcagcctgttgcgccgcgggcccgg

SEQ ID NO: 892611 - DNA, 120 bp, Artificial Sequence
  ENSG00000248918_1 (sequence is synthesized)
ggggcacgcgcgtgttttcttgtggataactgcctcggacttggcggggccggtccccacctgaagctcacctcaggcagtcgctagaagttccaatccaatctgctttggaaatttaga

SEQ ID NO: 892612 - DNA, 120 bp, Artificial Sequence
  ENSG00000248918_2 (sequence is synthesized)
aagcgcgctttcatttgtacatcgcctgccgacagcccctttgctgattagagaagccttgttccccctctccacgcgtacgcacactcatttttagttttaacaaatgatttaaaaatc

SEQ ID NO: 892613 - DNA, 120 bp, Artificial Sequence
  ENSG00000285486_0 (sequence is synthesized)
gctaggattacaggtgtgagccactgcaactggcccgtgattcatattttaacagtgtttggttggctttaaataaagtgcatagcaggggtgggggaacccctccttaatgctggggtt

SEQ ID NO: 892614 - DNA, 120 bp, Artificial Sequence
  ENSG00000285486_1 (sequence is synthesized)
cctttcacacagccagtgttgtccaggggagcccaagtgcacccttctagacacagcgcctccctaccctggctccaagcatcaggggccctctgatggcacctgggatgctgcctgggg

SEQ ID NO: 892615 - DNA, 120 bp, Artificial Sequence
  ENSG00000285486_2 (sequence is synthesized)
ctgaccctcgacctctacctttaccccacagcagaggaggttgttctgtggttccgggtatttcaaagggtcacgccttggtcggggctggggcagtgcagaggcagcttccccagcagt

SEQ ID NO: 892616 - DNA, 120 bp, Artificial Sequence
  ENSG00000285486_3 (sequence is synthesized)
gaccacaggcagtcagcctccatcaccctttgttctgagccactgtgtgcctgctgccctgaaagcagagggtgactgagtcacaggtgggtcctcaggacctagcagaaggggaggcat

SEQ ID NO: 892617 - DNA, 120 bp, Artificial Sequence
  ENSG00000285486_4 (sequence is synthesized)
gcatggcggaggtccgacgggcttcaggagagaggagaggaaggccagtcgtccacgccaggtccaagtcgaagaaggagtggaagctggactgcagagaggcctgagctcaattttaaa

SEQ ID NO: 892618 - DNA, 120 bp, Artificial Sequence
  ENSG00000285486_5 (sequence is synthesized)
gtgaatgaagctaagggagtgcgcagagacaggaccagtagggcaggctggggacggagagcaagttcacagcaggggccaggtcagaaggaggaacttgaactttatcctgaggccaca

SEQ ID NO: 892619 - DNA, 120 bp, Artificial Sequence
  ENSG00000285486_6 (sequence is synthesized)
tggaacagctggaagggtcagaagtgggagggagccaggagtgcagggtcaggggaaggaagagggggccgccggccataggtcctcctccacagggctccccagcatagattcccccca

SEQ ID NO: 892620 - DNA, 120 bp, Artificial Sequence
  ENSG00000285486_7 (sequence is synthesized)
gacataggataggtactctccctacgcgggtctcacgccctgcaggttctctgcacctgcatgcaggcccttccaggcgcccccctacgccaggcctgcgtcccggccacctaagcctga

SEQ ID NO: 892621 - DNA, 120 bp, Artificial Sequence
  ENSG00000285486_8 (sequence is synthesized)
gtagacagagctgaggtcttcagccaccgacttcaatgacgtagtgaatcagggctgggaaccaaggccgtccccgccctacccagccagccctacaggccaaggtcagtcttagtcggc

SEQ ID NO: 892622 - DNA, 120 bp, Artificial Sequence
  ENSG00000285486_9 (sequence is synthesized)
tgtggtttccggtctgctgctgccccgccagagcctggctccctccagctggtttgacctcaaaatctcaccgactgagaagagccatttcctggagagtttcccctccctacccccatc

SEQ ID NO: 892623 - DNA, 120 bp, Artificial Sequence
  ENSG00000285486_10 (sequence is synthesized)
ccaagtttcagtgtgtgaatccccagtcccaatccagctctgctgcttatgagctgtgtgacctcggggaatttacttcacctctctgtaccctactttcttcaagttttaggaagattg

SEQ ID NO: 892624 - DNA, 120 bp, Artificial Sequence
  ENSG00000285486_11 (sequence is synthesized)
agtacaggctgacagtaaagacagcaccccttattgaggatggtctttgtgatgtgtgattaagtcttttgtatggatgaggaagttgagggtcagatgttgctagttggggagagccca

SEQ ID NO: 892625 - DNA, 120 bp, Artificial Sequence
  ENSG00000285486_12 (sequence is synthesized)
ggaagttgagggtcagatgttgctagttggggagagcccagatttcagcctctcatcctgggctggggctttttccaagactaaactctccttatttattttttattttatttttatttt

SEQ ID NO: 892626 - DNA, 120 bp, Artificial Sequence
  ENSG00000285486_13 (sequence is synthesized)
aggcatgagtcactgcgtctagcctccttttttttattttaatttttgtgggtacatagtaattgtatatatttatggggtacatgtaaggggtacatgaggtgttttgacacaggcatg

SEQ ID NO: 892627 - DNA, 87 bp, Artificial Sequence
  ENSG00000285486_14 (sequence is synthesized)
agaatggggtatccatcccctcaagcatctaaacactctttgatgacccttgtgtgagctggtgtttttgtttttgcagagtgcagt

SEQ ID NO: 892628 - DNA, 70 bp, Artificial Sequence
  ENSG00000285486_15 (sequence is synthesized)
cagtggcatgatcatggctcactgcaccctagacctcctgggcccaggcgatcacctggctaatttttat

SEQ ID NO: 892629 - DNA, 85 bp, Artificial Sequence
  ENSG00000285486_16 (sequence is synthesized)
gctgggactacaggcatgcaccaccccacctggctaatttttatatatctggtcttaaactcctgggctcaagcaatccacccgc

SEQ ID NO: 892630 - DNA, 120 bp, Artificial Sequence
  ENSG00000285486_17 (sequence is synthesized)
ttacaggcatgagccaccatgcccgaccgtgtgagcaggtgttgaacgaataaaggaatagtaactgctggttgacttggtcattttgaacccctgggtctctggaaacttgtgagccat

SEQ ID NO: 892631 - DNA, 120 bp, Artificial Sequence
  ENSG00000285486_18 (sequence is synthesized)
ccatctgagggcagctctatccacccgtgggctgattttcacccctggggacagagactagacagtgggattagtaatggttagagggtacctaaaaggatgggaagatgcaggccagga

SEQ ID NO: 892632 - DNA, 120 bp, Artificial Sequence
  ENSG00000285486_19 (sequence is synthesized)
tgggaattagaggtgacctgggaggtcagcactacagggtacaggaatgacgctgtcaaattttctccatcagagggttccacccatccttcaaggtgtctcttccttgaagccttccct

SEQ ID NO: 892633 - DNA, 120 bp, Artificial Sequence
  ENSG00000285486_20 (sequence is synthesized)
gaccacttcattctcttgtttaataattcctgggacatgagaagctacagctcagcccctgtgagctgactgtaccctgtgactgcatgtgacacagtctgaccattatgcagcatcaaa

SEQ ID NO: 892634 - DNA, 120 bp, Artificial Sequence
  ENSG00000285486_21 (sequence is synthesized)
tcatttctggagagcttgccaatacattagctcacttaaccctcttaacagccctgggacggaggagttacgtgtttatcacctcggttctaaggtccagagaagtttgaatgtcttgct

SEQ ID NO: 892635 - DNA, 120 bp, Artificial Sequence
  ENSG00000285486_22 (sequence is synthesized)
cacaggagcattggctgagactcaagtttaggctccctggttccaaatcacatacattctgttcattacagcactttacctgaggttgaggctgcctctgcgttctgggtgcttacttaa

SEQ ID NO: 892636 - DNA, 120 bp, Artificial Sequence
  ENSG00000285486_23 (sequence is synthesized)
aactcgaagtttcctagcagccaaggtaaaaagggaaacctgatgacttagatggcccttctctgtctgaaataaagaaacctatcagttcatctggagtttcagacagtatccggtact

SEQ ID NO: 892637 - DNA, 120 bp, Artificial Sequence
  ENSG00000285486_24 (sequence is synthesized)
tacttccagcaggattgatttcatggattctgtgtgacatcctcacccattgatttgcaggaaggtattatgttgatcccattagaggctataggaatgatattagtgagaacttggggt

SEQ ID NO: 892638 - DNA, 90 bp, Artificial Sequence
  ENSG00000285486_25 (sequence is synthesized)
attagaggctataggaatgatattagtgagaacttggggtggaatttcccggggaaattgcactaagagattccaggtgattgcctcctg

SEQ ID NO: 892639 - DNA, 90 bp, Artificial Sequence
  ENSG00000285486_26 (sequence is synthesized)
ccaaagtgctgggatgtttcctggcatctaacttgatccagggtgcagctgagacatcaggggagccagcatgtgaagtggaaagagttg

SEQ ID NO: 892640 - DNA, 120 bp, Artificial Sequence
  ENSG00000285486_27 (sequence is synthesized)
gagacatcaggggagccagcatgtgaagtggaaagagttgaaagagtgctggagccacagagagcaaggttcaaatcttggccctactgccaactgtccttaggcaatgtaatagaacac

SEQ ID NO: 892641 - DNA, 120 bp, Artificial Sequence
  ENSG00000285486_28 (sequence is synthesized)
aggacttcccagaataaaagctacatttcctaggctcccttgaagctaaatgtagccatggaactgagtctgggccaatgggatgtaagcagaagcaacctctgggaaatacccttaaag

SEQ ID NO: 892642 - DNA, 120 bp, Artificial Sequence
  ENSG00000277369_0 (sequence is synthesized)
gcactggacgcgctcggactcaagactgattaaccagcaccggggttttctggggcctcgcctgggccgcggcctgagcagaagcgctaggaggtagaacagcgtccagcggggagagga

SEQ ID NO: 892643 - DNA, 120 bp, Artificial Sequence
  ENSG00000277369_1 (sequence is synthesized)
gctagagtcggcatcgggaagcccaccctggagcctgcttagcttgacgagccctcaaccggggcgccctgctctgcgaagagtaaccctgcatcctcagaacaaccgtgattgtcttca

SEQ ID NO: 892644 - DNA, 120 bp, Artificial Sequence
  ENSG00000277369_2 (sequence is synthesized)
ttcctacatatgaggaacggaggcgcggagccccacggcagccggggatccaaagacagcctccctccagttccatctgccggctcttggaaggcctggatccctgtccttcagggccca

SEQ ID NO: 892645 - DNA, 120 bp, Artificial Sequence
  ENSG00000277369_3 (sequence is synthesized)
ggcgaggcagggtccctgccccatgggatggagggcggagatcaggacccacaagagcccaaagaagaccattttggtcggtgaagaccaaagaaattcaagcaggaggatgtgacagga

SEQ ID NO: 892646 - DNA, 120 bp, Artificial Sequence
  ENSG00000277369_4 (sequence is synthesized)
gcttttgggaaagcctctgaggaggtgacagccatgcaaccgtgttcggggaagtgtgccgcaggcagaggggaaatgagtgcaaaagccctgaagctggagttcggtgtctggataaca

SEQ ID NO: 892647 - DNA, 120 bp, Artificial Sequence
  ENSG00000277369_5 (sequence is synthesized)
ggaaaggcctgcatagctgatgtgtgccagaggggagaaagatctgtgacacaggggggccgccatgtttaatttggagttttgtgtggaagggggtcattcattgagtctgaattggga

SEQ ID NO: 892648 - DNA, 120 bp, Artificial Sequence
  ENSG00000277368_0 (sequence is synthesized)
ccagctggaggggatactcgggaggaagaacggcaggccccagcccttctttcccgacagccacgccgcccacttggcggcggggagtcgctccgcagccggcccggagctcgcccgtgc

SEQ ID NO: 892649 - DNA, 120 bp, Artificial Sequence
  ENSG00000277368_1 (sequence is synthesized)
gctcagcgctcgtggcagccgcgtagttgcagagacacggtctgctttccaggcttgggaagtcccagcacttaactctgcgcgtcggtgtcgctcgtttgccagccagactataaagtg

SEQ ID NO: 892650 - DNA, 120 bp, Artificial Sequence
  ENSG00000277368_2 (sequence is synthesized)
cacccaacggtgtatgcgtctctttacttccgggtgtaacgtactacccagccaggccctttcccttgctgtgctttggaacctggaaattacaaaccctaataaattctgaagtctgtc

SEQ ID NO: 892651 - DNA, 120 bp, Artificial Sequence
  ENSG00000274943_0 (sequence is synthesized)
accagatctgctggtaccttgatcttggatttcccagctccagaactatgagaaatataaatagtttgttgtttaagcctatgataatttgttacggcagtccaaccctactaagacaaa

SEQ ID NO: 892652 - DNA, 120 bp, Artificial Sequence
  ENSG00000274943_1 (sequence is synthesized)
tctcctcacctctttactcccttaaaacagacaaaattttgtttatatatgtatggactaatagatgcctattttattcagtgagttgtaattcattgctgtcactattttgatgcttaa

SEQ ID NO: 892653 - DNA, 120 bp, Artificial Sequence
  ENSG00000274943_2 (sequence is synthesized)
atttggccagtgagagtcccttcaagttagcttctgtggttggttggttggttggttttgtttttcaaatatttgcttgtgacaatatatgtaacataataaagtatgccatttacacaa

SEQ ID NO: 892654 - DNA, 120 bp, Artificial Sequence
  ENSG00000231662_0 (sequence is synthesized)
gaactgcttttgcaataagtaaagtcaatgaagaaagtaagaggattgcaaaggtttcccccgctgattctgccaacagaaatgtttttattgtgctgctttgggcgtggaaaaaaaaca

SEQ ID NO: 892655 - DNA, 120 bp, Artificial Sequence
  ENSG00000231662_1 (sequence is synthesized)
tttaaaggaatgcatgtcatttatttaaaacataaatcagcaaacagagagacataaaattactagtggactgcttcaagttcagaagccactgccctggtagaggagttaccaacgatc

SEQ ID NO: 892656 - DNA, 120 bp, Artificial Sequence
  ENSG00000231662_2 (sequence is synthesized)
acacatcctataggaatccaactacagtggccctgagctgaaacagcatgcgttccatgctcctttgcataatttgcctacttcttctcatattttgtaaatataaaatctacttctggt

SEQ ID NO: 892657 - DNA, 120 bp, Artificial Sequence
  ENSG00000231663_0 (sequence is synthesized)
ggtgccgagtcctgccactgcagggtcgccccgctggctcaagctctagaagcgtagacctccccagccgcaaaaagcaactcacgcggcgaaaccgcggactcttttgacccttccgag

SEQ ID NO: 892658 - DNA, 120 bp, Artificial Sequence
  ENSG00000231663_1 (sequence is synthesized)
ctaccatttactttccatagaggggcgggacttcctgtttcgcttttatcttgtctcgctcttccgcccagtctcgagtgcagtggtgagaacacggcttactgcagcctcaaaatcctg

SEQ ID NO: 892659 - DNA, 120 bp, Artificial Sequence
  ENSG00000231663_2 (sequence is synthesized)
aacgggccccagaaagaggcggtgacgtcccagaacccatggcaggggagttgggaaaataaatatttgtattgttttaatctcccttgtggctttttttaacccccgaaacagcaaggt

SEQ ID NO: 892660 - DNA, 120 bp, Artificial Sequence
  ENSG00000231663_3 (sequence is synthesized)
atttttaaaagggatgaagagagttgcttcaaatgttttgagacgttgttatttttaatatgtgagtgaatatcttagaaacaaaatgaacaagaaataaaaattttagaaaatatatga

SEQ ID NO: 892661 - DNA, 120 bp, Artificial Sequence
  ENSG00000231666_0 (sequence is synthesized)
tggggcccctcacttgtggtgcacatggggcatgtacgggcaacactcaatcctgcccaggaagcttccttgagccttgagggctgcctcacaatggatcctaggcttcttttttccctt

SEQ ID NO: 892662 - DNA, 120 bp, Artificial Sequence
  ENSG00000231666_1 (sequence is synthesized)
gctgcttgcctaaatgtaaattaaatgctctcaagggatgagagacactggaagctgggacgctcttggaactctgttgccatcatcaaggcttccagatacagccctctaggtcatcca

SEQ ID NO: 892663 - DNA, 120 bp, Artificial Sequence
  ENSG00000231666_2 (sequence is synthesized)
gaggtgccagccagccctcaccagtggtcagcttttcctcagtggagtggtaggtgagccagtggagcttgctctgaagatactagagggagccaaagctgtctggcccttcagtgtgac

SEQ ID NO: 892664 - DNA, 120 bp, Artificial Sequence
  ENSG00000231666_3 (sequence is synthesized)
cagcagtccaactaccagggccagagccccatcaaagaatcttcagtgccagccagaaagaatgatgaactcctcgtgtaaagggagtttggggcaaccagtcaaaccatggcctcatgg

SEQ ID NO: 892665 - DNA, 120 bp, Artificial Sequence
  ENSG00000231666_4 (sequence is synthesized)
gaagcagctgactaggcaatgagagaggaatacaaaagacaaggcactgcgaagccaagtctggttggggagaagaaaccaatatgcctgaaacagggaaccagaaaggactcagacaaa

SEQ ID NO: 892666 - DNA, 120 bp, Artificial Sequence
  ENSG00000231666_5 (sequence is synthesized)
actgctgacaagtatggggtttcttggggtaggtggtgaaaatattccaaaataagattatagcgatgttttaataatcccctggatataataaaaaaacatcgaattgtacacttcaaa

SEQ ID NO: 892667 - DNA, 120 bp, Artificial Sequence
  ENSG00000231666_6 (sequence is synthesized)
gggttccagatacataacattctgctacacagatgctgtttcctttgcccagcacacctgtcactcacctcaaccctttctctcttttccccatctttctgtggctagctcctcctcatt

SEQ ID NO: 892668 - DNA, 120 bp, Artificial Sequence
  ENSG00000231666_7 (sequence is synthesized)
tccttgtcctgggctggcctccaacttggaacgccggcgaaccgcctgacctcttccggcggcctcagcctgggacgcatgcgcacatcgaggctccccgacatcaggcgcgggtcttta

SEQ ID NO: 892669 - DNA, 120 bp, Artificial Sequence
  ENSG00000231666_8 (sequence is synthesized)
attacatattttgctatgctccaggctatgcatttggaacagtgctttcctttttatctttattttgtttcttttgcttaacttcgggatgcagcaatgaagtgttattaaaagagccct

SEQ ID NO: 892670 - DNA, 120 bp, Artificial Sequence
  ENSG00000231666_9 (sequence is synthesized)
aaagctgagagtgaaatttggactctgtaacaaaccagctgtggggtcttaagcaagtcacttaaacgtggggacctcggcctccaaaccagatgacactcgaggcacagcctgcctcct
